(19) United States
(12) Patent Application Publication
(10) Pub. No.: US 2007/0224201 A1
(43) Pub. Date: Sep. 27, 2007

(54) Compositions and methods for the diagnosis and treatment of tumor

(75) Inventors: Thomas D. Wu, San Francisco, CA (US); Zemin Zhang, Foster City, CA (US); Yan Zhou, South Pasadena, CA (US)

Correspondence Address: GENENTECH, INC., 1 DNA WAY, SOUTH SAN FRANCISCO, CA, 94080, US

(73) Assignee: Genentech, Inc., South San Francisco, CA (US)

(21) Appl. No.: 10/529,351

(22) PCT Filed: Sep. 29, 2003
(86) PCT No.: PCT/US03/28547

§ 371 Date: May 24, 2006

Related U.S. Application Data
(60) Provisional application No. 60/414,971, filed on Oct. 2, 2002.

(51) Int. Cl. C12Q 1/68; G01N 33/574; C07H 21/04; C12P 21/06; A61K 39/395; C07K 14/82; C07K 16/30; C07K 16/46

(52) U.S. Cl. 424/155.1; 536/23.5; 435/6; 435/7.23; 435/69.1; 435/320.1; 435/325; 530/350; 530/388.8; 530/391.1; 424/178.1; 435/252.3

(57) ABSTRACT

The present invention is directed to compositions of matter useful for the diagnosis and treatment of tumor in mammals and to methods of using those compositions of matter for the same.

### FIELD OF THE INVENTION

[0001] The present invention is directed to compositions of matter useful for the diagnosis and treatment of tumor in mammals and to methods of using those compositions of matter for the same.

### BACKGROUND OF THE INVENTION

[0002] Malignant tumors (cancers) are the second leading cause of death in the United States, after heart disease (Boring et al., CA Cancel J. Clin. 43:7 (1993)). Cancer is characterized by the increase in the number of abnormal, or neoplastic, cells derived from a normal tissue which proliferate to form a tumor mass, the invasion of adjacent tissues by these neoplastic tumor cells, and the generation of malignant cells which eventually spread via the blood or lymphatic system to regional lymph nodes and to distant sites via a process called metastasis. In a cancerous state, a cell proliferates under conditions in which normal cells would not grow. Cancer manifests itself in a wide variety of forms, characterized by different degrees of invasiveness and aggressiveness.

[0003] In attempts to discover effective cellular targets for cancer diagnosis and therapy, researchers have sought to identify transmembrane or otherwise membrane-associated polypeptides that are specifically expressed on the surface of one or more particular type(s) of cancer cell as compared to on one or more normal non-cancerous cell(s). Often, such membrane-associated polypeptides are more abundantly expressed on the surface of the cancer cells as compared to on the surface of the non-cancerous cells. The identification of such tumor-associated cell surface antigen polypeptides has given rise to the ability to specifically target cancer cells for destruction via antibody-based therapies. In this regard, it is noted that antibody-based therapy has proved very effective in the treatment of certain cancers. For example, HERCEPTIN® and RITUXAN® (both from Genentech Inc., South San Francisco, Calif.) are antibodies that have been used successfully to treat breast cancer and non-Hodgkin's lymphoma, respectively. More specifically, HERCEPTIN® is a recombinant DNA-derived humanized monoclonal antibody that selectively binds to the extracellular domain of the human epidermal growth factor receptor 2 (HER2) proto-oncogene. HER2 protein overexpression is observed in 25-30% of primary breast cancers. RITUXAN® is a genetically engineered chimeric murine/human monoclonal antibody directed against the CD20 antigen found on the surface of normal and malignant B lymphocytes. Both these antibodies are recombinantly produced in CHO cells.

[0004] In other attempts to discover effective cellular targets for cancer diagnosis and therapy, researchers have sought to identify (1) non-membrane-associated polypeptides that are specifically produced by one or more particular type(s) of cancer cell(s) as compared to by one or more particular type(s) of non-cancerous normal cell(s), (2) polypeptides that are produced by cancer cells at an expression level that is significantly higher than that of one or more normal non-cancerous cell(s), or (3) polypeptides whose expression is specifically limited to only a single (or very limited number of different) tissue type(s) in both the cancerous and non-cancerous state (e.g., normal prostate and prostate tumor tissue). Such polypeptides may remain intracellularly located or may be secreted by the cancer cell. Moreover, such polypeptides may be expressed not by the cancer cell itself, but rather by cells which produce and/or secrete polypeptides having a potentiating or growth-enhancing effect on cancer cells. Such secreted polypeptides are often proteins that provide cancer cells with a growth advantage over normal cells and include such things as, for example, angiogenic factors, cellular adhesion factors, growth factors, and the like. Identification of antagonists of such non-membrane associated polypeptides would be expected to serve as effective therapeutic agents for the treatment of such cancers. Furthermore, identification of the expression pattern of such polypeptides would be useful for the diagnosis of particular cancers in mammals.

[0005] Despite the above identified advances in mammalian cancer therapy, there is a great need for additional diagnostic and therapeutic agents capable of detecting the presence of tumor in a mammal and for effectively inhibiting neoplastic cell growth, respectively. Accordingly, it is an objective of the present invention to identify: (1) cell membrane-associated polypeptides that are more abundantly expressed on one or more type(s) of cancer cell(s) as compared to on normal cells or on other different cancer cells, (2) non-membrane-associated polypeptides that are specifically produced by one or more particular type(s) of cancer cell(s) (or by other cells that produce polypeptides having a potentiating effect on the growth of cancer cells) as compared to by one or more particular type(s) of non-cancerous normal cell(s), (3) non-membrane-associated polypeptides that are produced by cancer cells at an expression level that is significantly higher than that of one or more normal non-cancerous cell(s), or (4) polypeptides whose expression is specifically limited to only a single (or very limited number of different) tissue type(s) in both a cancerous and non-cancerous state (e.g., normal prostate and prostate tumor tissue), and to use those polypeptides, and their encoding nucleic acids, to produce compositions of matter useful in the therapeutic treatment and diagnostic detection of cancer in mammals. It is also an objective of the present invention to identify cell membrane-associated, secreted or intracellular polypeptides whose expression is limited to a single or very limited number of tissues, and to use those polypeptides, and their encoding nucleic acids, to produce compositions of matter useful in the therapeutic treatment and diagnostic detection of cancer in mammals.

### SUMMARY OF THE INVENTION

### A. Embodiments

[0006] In the present specification, Applicants describe for the first time the identification of various cellular polypeptides (and their encoding nucleic acids or fragments thereof) which are expressed to a greater degree on the surface of or by one or more types of cancer cell(s) as compared to on the surface of or by one or more types of normal non-cancer cells. Alternatively, such polypeptides are expressed by cells which produce and/or secrete polypeptides having a potentiating or growth-enhancing effect on cancer cells. Again alternatively, such polypeptides may not be overexpressed by tumor cells as compared to normal cells of the same tissue type, but rather may be specifically expressed by both tumor cells and normal cells of only a single or very limited number of tissue types (preferably tissues which are not essential for life, e.g., prostate, etc.). All of the above polypeptides are herein referred to as Tumor-associated Antigenic Target polypeptides (“TAT” polypeptides) and are expected to serve as effective targets for cancer therapy and diagnosis in mammals.

[0007] Accordingly, in one embodiment of the present invention, the invention provides an isolated nucleic acid molecule having a nucleotide sequence that encodes a tumor-associated antigenic target polypeptide or fragment thereof (a “TAT” polypeptide).

[0008] In certain aspects, the isolated nucleic acid molecule comprises a nucleotide sequence having at least about 80% nucleic acid sequence identity, alternatively at least about 81%, 82%, 83%, 84%, 85%, 86%, 87%, 88%, 89%, 90%, 91%, 92%, 93%, 94%, 95%, 96%, 97%, 98%, 99% or 100% nucleic acid sequence identity, to (a) a DNA molecule encoding a full-length TAT polypeptide having an amino acid sequence as disclosed herein, a TAT polypeptide amino acid sequence lacking the signal peptide as disclosed herein, an extracellular domain of a transmembrane TAT polypeptide, with or without the signal peptide, as disclosed herein or any t other specifically defined fragment of a full-length TAT polypeptide amino acid sequence as disclosed herein, or (b) the complement of the DNA molecule of (a).

[0009] In other aspects, the isolated nucleic acid molecule comprises a nucleotide sequence having at least about 80% nucleic acid sequence identity, alternatively at least about 81%, 82%, 83%, 84%, 85%, 86%, 87%, 88%, 89%, 90%, 91%, 92%, 93%, 94%, 95%, 96%, 97%, 98%, 99% or 100% nucleic acid sequence identity, to (a) a DNA molecule comprising the coding sequence of a full-length TAT polypeptide cDNA as disclosed herein, the coding sequence of a TAT polypeptide lacking the signal peptide as disclosed herein, the coding sequence of an extracellular domain of a transmembrane TAT polypeptide, with or without the signal peptide, as disclosed herein or the coding sequence of any other specifically defined fragment of the full-length TAT polypeptide amino acid sequence as disclosed herein, or (b) the complement of the DNA molecule of (a).

[0010] In further aspects, the invention concerns an isolated nucleic acid molecule comprising a nucleotide sequence having at least about 80% nucleic acid sequence identity, alternatively at least about 81%, 82%, 83%, 84%, 85%, 86%, 87%, 88%, 89%, 90%, 91%, 92%, 93%, 94%, 95%, 96%, 97%, 98%, 99% or 100% nucleic acid sequence identity, to (a) a DNA molecule that encodes the same mature polypeptide encoded by the full-length coding region of any of the human protein cDNAs deposited with the ATCC as disclosed herein, or (b) the complement of the DNA molecule of (a).

[0011] Another aspect of the invention provides an isolated nucleic acid molecule comprising a nucleotide sequence encoding a TAT polypeptide which is either transmembrane domain-deleted or transmembrane domain-inactivated, or is complementary to such encoding nucleotide sequence, wherein the transmembrane domain(s) of such polypeptide(s) are disclosed herein. Therefore, soluble extracellular domains of the herein described TAT polypeptides are contemplated.

[0012] In other aspects, the present invention is directed to isolated nucleic acid molecules which hybridize to (a) a nucleotide sequence encoding a TAT polypeptide having a full-length amino acid sequence as disclosed herein, a TAT polypeptide amino acid sequence lacking the signal peptide as disclosed herein, an extracellular domain of a transmembrane TAT polypeptide, with or without the signal peptide, as disclosed herein or any other specifically defined fragment of a full-length TAT polypeptide amino acid sequence as disclosed herein, or (b) the complement of the nucleotide sequence of (a). In this regard, an embodiment of the present invention is directed to fragments of a full-length TAT polypeptide coding sequence, or the complement thereof, as disclosed herein, that may find use as, for example, hybridization probes useful as, for example, diagnostic probes, antisense oligonucleotide probes, or for encoding fragments of a full-length TAT polypeptide that may optionally encode a polypeptide comprising a binding site for an anti-TAT polypeptide antibody, a TAT binding oligopeptide or other small organic molecule that binds to a TAT polypeptide. Such nucleic acid fragments are usually at least about S nucleotides in length, alternatively at least about 6, 7, 8, 9, 10, 11, 12, 13, 14, 15, 16, 17, 18, 19, 20, 21, 22, 23, 24, 25, 26, 27, 28, 29, 30, 35, 40, 45, 50, 55, 60, 65, 70, 75, 80, 85, 90, 95, 100, 105, 110, 115, 120, 125, 130, 135, 140, 145, 150, 155, 160, 165, 170, 175, 180, 185, 190, 195, 200, 210, 220, 230, 240, 250, 260, 270, 280, 290, 300, 310, 320, 330, 340, 350, 360, 370, 380, 390, 400, 410, 420, 430, 440, 450, 460, 470, 480, 490, 500, 510, 520, 530, 540, 550, 560, 570, 580, 590, 600, 610, 620, 630, 640, 650, 660, 670, 680, 690, 700, 710, 720, 730, 740, 750, 760, 770, 780, 790, 800, 810, 820, 830, 840, 850, 860, 870, 880, 890, 900, 910, 920, 930, 940, 950, 960, 970, 980, 990, or 1000 nucleotides in length, wherein in this context the term “about” means the referenced nucleotide sequence length plus or minus 10% of that referenced length. It is noted that novel fragments of a TAT polypeptide-encoding nucleotide sequence may be determined in a routine manner by aligning the TAT polypeptide-encoding nucleotide sequence with other known nucleotide sequences using any of a number of well known sequence alignment programs and determining which TAT polypeptide-encoding nucleotide sequence fragment(s) are novel. All of such novel fragments of TAT polypeptide-encoding nucleotide sequences are contemplated herein. Also contemplated are the TAT polypeptide fragments encoded by these nucleotide molecule fragments, preferably those TAT polypeptide fragments that comprise a binding site for an anti-TAT antibody, a TAT binding oligopeptide or other small organic molecule that binds to a TAT polypeptide.

[0013] In another embodiment, the invention provides isolated TAT polypeptides encoded by any of the isolated nucleic acid sequences hereinabove identified.

[0014] In a certain aspect, the invention concerns an isolated TAT polypeptide, comprising an amino acid sequence having at least about 80% amino acid sequence identity, alternatively at least about 81%, 82%, 83%, 84%, 85%, 86%, 87%, 88%, 89%, 90%, 91%, 92%, 93%, 94%, 95%, 96%, 97%, 98%, 99% or 100% amino acid sequence identity, to a TAT polypeptide having a full-length amino acid sequence as disclosed herein, a TAT polypeptide amino acid sequence lacking the signal peptide as disclosed herein, an extracellular domain of a transmembrane TAT polypeptide protein, with or without the signal peptide, as disclosed herein, an amino acid sequence encoded by any of the nucleic acid sequences disclosed herein or any other specifically defined fragment of a full-length TAT polypeptide amino acid sequence as disclosed herein.

[0015] In a further aspect, the invention concerns an isolated TAT polypeptide comprising an amino acid sequence having at least about 80% amino acid sequence identity, alternatively at least about 81%, 82%, 83%, 84%, 85%, 86%, 87%, 88%, 89%, 90%, 91%, 92%, 93%, 94%, 95%, 96%, 97%, 98%, or 99% amino acid sequence identity, to an amino acid sequence encoded by any of the human protein cDNAs deposited with the ATCC as disclosed herein.

[0016] In a specific aspect, the invention provides an isolated TAT polypeptide without the N-terminal signal sequence and/or without the initiating methionine and is encoded by a nucleotide sequence that encodes such an amino acid sequence as hereinbefore described. Processes for producing the same are also herein described, wherein those processes comprise culturing a host cell comprising a vector which comprises the appropriate encoding nucleic acid molecule under conditions suitable for expression of the TAT polypeptide and recovering the TAT polypeptide from the cell culture.

[0017] Another aspect of the invention provides an isolated TAT polypeptide which is either transmembrane domain-deleted or transmembrane domain-inactivated. Processes for producing the same are also herein described, wherein those processes comprise culturing a host cell comprising a vector which comprises the appropriate encoding nucleic acid molecule under conditions suitable for expression of the TAT polypeptide and recovering the TAT polypeptide from the cell culture.

[0018] In other embodiments of the present invention, the invention provides vectors comprising DNA encoding any of the herein described polypeptides. Host cells comprising any such vector are also provided. By way of example, the host cells may be CHO cells, E. coli cells, or yeast cells. A process for producing any of the herein described polypeptides is further provided and comprises culturing host cells under conditions suitable for expression of the desired polypeptide and recovering the desired polypeptide from the cell culture.

[0019] In other embodiments, the invention provides isolated chimeric polypeptides comprising any of the herein described TAT polypeptides fused to a heterologous (non-TAT) polypeptide. Example of such chimeric molecules comprise any of the herein described TAT polypeptides fused to a heterologous polypeptide such as, for example, an epitope tag sequence or a Fc region of an immunoglobulin.

[0020] In another embodiment, the invention provides an antibody which binds, preferably specifically, to any of the above or below described polypeptides. Optionally, the antibody is a monoclonal antibody, antibody fragment, chimeric antibody, humanized antibody, single-chain antibody or antibody that competitively inhibits the binding of an anti-TAT polypeptide antibody to its respective antigenic epitope. Antibodies of the present invention may optionally be conjugated to a growth inhibitory agent or cytotoxic agent such as a toxin, including, for example, a maytansinoid or calicheamicin, an antibiotic, a radioactive isotope, a nucleolytic enzyme, or the like. The antibodies of the present invention may optionally be produced in CHO cells or bacterial cells and preferably induce death of a cell to which they bind. For diagnostic purposes, the antibodies of the present invention may be detectably labeled, attached to a solid support, or the like.

[0021] In other embodiments of the present invention, the invention provides vectors comprising DNA encoding any of the herein described antibodies. Host cell comprising any such vector are also provided. By way of example, the host cells may be CHO cells, E. coli cells, or yeast cells. A process for producing any of the herein described antibodies is further provided and comprises culturing host cells under conditions suitable for expression of the desired antibody and recovering the desired antibody from the cell culture.

[0022] In another embodiment, the invention provides oligopeptides (“TAT binding oligopeptides”) which bind, preferably specifically, to any of the above or below described TAT polypeptides. Optionally, the TAT binding oligopeptides of the present invention may be conjugated to a growth inhibitory agent or cytotoxic agent such as a toxin, including, for example, a maytansinoid or calicheamicin, an antibiotic, a radioactive isotope, a nucleolytic enzyme, or the like. The TAT binding oligopeptides of the present invention may optionally be produced in CHO cells or bacterial cells and preferably induce death of a cell to which they bind. For diagnostic purposes, the TAT binding oligopeptides of the present invention may be detectably labeled, attached to a solid support, or the like.

[0023] In other embodiments of the present invention, the invention provides vectors comprising DNA encoding any of the herein described TAT binding oligopeptides. Host cell comprising any such vector are also provided. By way of example, the host cells may be CHO cells, E. coli cells, or yeast cells. A process for producing any of the herein described TAT binding oligopeptides is further provided and comprises culturing host cells under conditions suitable for expression of the desired oligopeptide and recovering the desired oligopeptide from the cell culture.

[0024] In another embodiment, the invention provides small organic molecules (“TAT binding organic molecules”) which bind, preferably specifically, to any of the above or below described TAT polypeptides. Optionally, the TAT binding organic molecules of the present invention may be conjugated to a growth inhibitory agent or cytotoxic agent such as a toxin, including, for example, a maytansinoid or calicheamicin, an antibiotic, a radioactive isotope, a nucleolytic enzyme, or the like. The TAT binding organic molecules of the present invention preferably induce death of a cell to which they bind. For diagnostic purposes, the TAT binding organic molecules of the present invention may be detectably labeled, attached to a solid support, or the like.

[0025] In a still further embodiment, the invention concerns a composition of matter comprising a TAT polypeptide as described herein, a chimeric TAT polypeptide as described herein, an anti-TAT antibody as described herein, a TAT binding oligopeptide as described herein, or a TAT binding organic molecule as described herein, in combination with a carrier. Optionally, the carrier is a pharmaceutically acceptable carrier. In yet another embodiment, the invention concerns an article of manufacture comprising a container and a composition of matter contained within the container, wherein the composition of matter may comprise a TAT polypeptide as described herein, a chimeric TAT polypeptide as described herein, an anti-TAT antibody as described herein, a TAT binding oligopeptide as described herein, or a TAT binding organic molecule as described herein. The article may further optionally comprise a label affixed to the container, or a package insert included with the container, that refers to the use of the composition of matter for the therapeutic treatment or diagnostic detection of a tumor.

[0026] Another embodiment of the present invention is directed to the use of a TAT polypeptide as described herein, a chimeric TAT polypeptide as described herein, an anti-TAT polypeptide antibody as described herein, a TAT binding oligopeptide as described herein, or a TAT binding organic molecule as described herein, for the preparation of a medicament useful in the treatment of a condition which is responsive to the TAT polypeptide, chimeric TAT polypeptide, anti-TAT polypeptide antibody, TAT binding oligopeptide, or TAT binding organic molecule.

### B. Additional Embodiments

[0027] Another embodiment of the present invention is directed to a method for inhibiting the growth of a cell that expresses a TAT polypeptide, wherein the method comprises contacting the cell with an antibody, an oligopeptide or a small organic molecule that binds to the TAT polypeptide, and wherein the binding of the antibody, oligopeptide or organic molecule to the TAT polypeptide causes inhibition of the growth of the cell expressing the TAT polypeptide. In preferred embodiments, the cell is a cancer cell and binding of the antibody, oligopeptide or organic molecule to the TAT polypeptide causes death of the cell expressing the TAT polypeptide. Optionally, the antibody is a monoclonal antibody, antibody fragment, chimeric antibody, humanized antibody, or single-chain antibody. Antibodies, TAT binding oligopeptides and TAT binding organic molecules employed in the methods of the present invention may optionally be conjugated to a growth inhibitory agent or cytotoxic agent such as a toxin, including, for example, a maytansinoid or calicheamicin, an antibiotic, a radioactive isotope, a nucleolytic enzyme, or the like. The antibodies and TAT binding oligopeptides employed in the methods of the present invention may optionally be produced in CHO cells or bacterial cells.

[0028] Yet another embodiment of the present invention is directed to a method of therapeutically treating a mammal having a cancerous tumor comprising cells that express a TAT polypeptide, wherein the method comprises administering to the mammal a therapeutically effective amount of an antibody, an oligopeptide or a small organic molecule that binds to the TAT polypeptide, thereby resulting in the effective therapeutic treatment of the tumor. Optionally, the antibody is a monoclonal antibody, antibody fragment, chimeric antibody, humanized antibody, or single-chain antibody. Antibodies, TAT binding oligopeptides and TAT binding organic molecules employed in the methods of the present invention may optionally be conjugated to a growth inhibitory agent or cytotoxic agent such as a toxin, including, for example, a maytansinoid or calicheamicin, an antibiotic, a radioactive isotope, a nucleolytic enzyme, or the like. The antibodies and oligopeptides employed in the methods of the present invention may optionally be produced in CHO cells or bacterial cells.

[0029] Yet another embodiment of the present invention is directed to a method of determining the presence of a TAT polypeptide in a sample suspected of containing the TAT polypeptide, wherein the method comprises exposing the sample to an antibody, oligopeptide or small organic molecule that binds to the TAT polypeptide and determining binding of the antibody, oligopeptide or organic molecule to the TAT polypeptide in the sample, wherein the presence of such binding is indicative of the presence of the TAT polypeptide in the sample. Optionally, the sample may contain cells (which may be cancer cells) suspected of expressing the TAT polypeptide. The antibody, TAT binding oligopeptide or TAT binding organic molecule employed in the method may optionally be detectably labeled, attached to a solid support, or the like.

[0030] A further embodiment of the present invention is directed to a method of diagnosing the presence of a tumor in a mammal, wherein the method comprises detecting the level of expression of a gene encoding a TAT polypeptide (a) in a test sample of tissue cells obtained from said mammal, and (b) in a control sample of known normal non-cancerous cells of the same tissue origin or type, wherein a higher level of expression of the TAT polypeptide in the test sample, as compared to the control sample, is indicative of the presence of tumor in the mammal from which the test sample was obtained.

[0031] Another embodiment of the present invention is directed to a method of diagnosing the presence of a tumor in a mammal, wherein the method comprises (a) contacting a test sample comprising tissue cells obtained from the mammal with an antibody, oligopeptide or small organic molecule that binds to a TAT polypeptide and (b) detecting the formation of a complex between the antibody, oligopeptide or small organic molecule and the TAT polypeptide in the test sample, wherein the formation of a complex is indicative of the presence of a tumor in the mammal. Optionally, the antibody, TAT binding oligopeptide or TAT binding organic molecule employed is detectably labeled, attached to a solid support, or the like, and/or the test sample of tissue cells is obtained from an individual suspected of having a cancerous tumor.

[0032] Yet another embodiment of the present invention is directed to a method for treating or preventing a cell proliferative disorder associated with altered, preferably increased, expression or activity of a TAT polypeptide, the method comprising administering to a subject in need of such treatment an effective amount of an antagonist of a TAT polypeptide. Preferably, the cell proliferative disorder is cancer and the antagonist of the TAT polypeptide is an anti-TAT polypeptide antibody, TAT binding oligopeptide, TAT binding organic molecule or antisense oligonucleotide. Effective treatment or prevention of the cell proliferative disorder may be a result of direct killing or growth inhibition of cells that express a TAT polypeptide or by antagonizing the cell growth potentiating activity of a TAT polypeptide.

[0033] Yet another embodiment of the present invention is directed to a method of binding an antibody, oligopeptide or small organic molecule to a cell that expresses a TAT polypeptide, wherein the method comprises contacting a cell that expresses a TAT polypeptide with said antibody, oligopeptide or small organic molecule under conditions which are suitable for binding of the antibody, oligopeptide or small organic molecule to said TAT polypeptide and allowing binding therebetween.

[0034] Other embodiments of the present invention are directed to the use of (a) a TAT polypeptide, (b) a nucleic acid encoding a TAT polypeptide or a vector or host cell comprising that nucleic acid, (c) an anti-TAT polypeptide antibody, (d) a TAT-binding oligopeptide, or (e) a TAT-binding small organic molecule in the preparation of a medicament useful for (i) the therapeutic treatment or diagnostic detection of a cancer or tumor, or (ii) the therapeutic treatment or prevention of a cell proliferative disorder.

[0035] Another embodiment of the present invention is directed to a method for inhibiting the growth of a cancer cell, wherein the growth of said cancer cell is at least in part dependent upon the growth potentiating effect(s) of a TAT polypeptide (wherein the TAT polypeptide may be expressed either by the cancer cell itself or a cell that produces polypeptide(s) that have a growth potentiating effect on cancer cells), wherein the method comprises contacting the TAT polypeptide with an antibody, an oligopeptide or a small organic molecule that binds to the TAT polypeptide, thereby antagonizing the growth-potentiating activity of the TAT polypeptide and, in turn, inhibiting the growth of the cancer cell. Preferably the growth of the cancer cell is completely inhibited. Even more preferably, binding of the antibody, oligopeptide or small organic molecule to the TAT polypeptide induces the death of the cancer cell. Optionally, the antibody is a monoclonal antibody, antibody fragment, chimeric antibody, humanized antibody, or single-chain antibody. Antibodies, TAT binding oligopeptides and TAT binding organic molecules employed in the methods of the present invention may optionally be conjugated to a growth inhibitory agent or cytotoxic agent such as a toxin, including, for example, a maytansinoid or calicheamicin, an antibiotic, a radioactive isotope, a nucleolytic enzyme, or the like. The antibodies and TAT binding oligopeptides employed in the methods of the present invention may optionally be produced in CHO cells or bacterial cells.

[0036] Yet another embodiment of the present invention is directed to a method of therapeutically treating a tumor in a mammal, wherein the growth of said tumor is at least in part dependent upon the growth potentiating effect(s) of a TAT polypeptide, wherein the method comprises administering to the mammal a therapeutically effective amount of an antibody, an oligopeptide or a small organic molecule that binds to the TAT polypeptide, thereby antagonizing the growth potentiating activity of said TAT polypeptide and resulting in the effective therapeutic treatment of the tumor. Optionally, the antibody is a monoclonal antibody, antibody fragment, chimeric antibody, humanized antibody, or single-chain antibody. Antibodies, TAT binding oligopeptides and TAT binding organic molecules employed in the methods of the present invention may optionally be conjugated to a growth inhibitory agent or cytotoxic agent such as a toxin, including, for example, a maytansinoid or calicheamicin, an antibiotic, a radioactive isotope, a nucleolytic enzyme, or the like. The antibodies and oligopeptides employed in the methods of the present invention may optionally be produced in CHO cells or bacterial cells.

[0037] Yet further embodiments of the present invention will be evident to the skilled artisan upon a reading of the present specification.

### BRIEF DESCRIPTION OF THE DRAWINGS

[0038] In the list of figures for the present application, specific cDNA sequences which are upregulated in certain tumor tissues as compared to their normal tissue counterparts are individually identified with a designation beginning with the letters “DNA” followed by a specific numerical designation. A full or partial length protein sequence that is encoded by a cDNA sequence identified and shown herein is individually identified with a designation beginning with the letters “PRO” followed by a specific numerical designation. Figures showing encoded amino acid sequences immediately follow the figure showing the cDNA sequence encoding that specific amino acid sequence. If start and/or stop codons have been identified in a cDNA sequence shown in the attached figures, they are shown in bold and underlined font.

### LIST OF FIGURES

[0039] FIG. 1: DNA323717,XM_{—}059201,gen.XM_{—}059201

[0040] FIG. 2: DNA323718,XM_{—}117159,gen.XM_{—}117159

[0041] FIG. 3: DNA323719,XM_{—}114062,gen.XM_{—}114062

[0042] FIG. 4: DNA323720,XM_{—}086178,gen.XM_{—}086178

[0043] FIG. 5: PRO80480

[0044] FIG. 6: DNA323721,XM_{—}051556,gen.XM_{—}051556

[0045] FIG. 7: PRO80481

[0046] FIG. 8: DNA323722,NM_{—}017891,gen.NM_{—}017891

[0047] FIG. 9: PRO80482

[0048] FIG. 10: DNA323723,NM_{—}018188,gen.NM_{—}018188

[0049] FIG. 11: PRO80483

[0050] FIG. 12: DNA323724,NM_{—}002617,gen.NM_{—}002617

[0051] FIG. 13: PRO23746

[0052] FIG. 14: DNA323725,XM_{—}049742,gen.XM_{—}049742

[0053] FIG. 15: DNA323726,NM_{—}033534,gen.NM_{—}033534

[0054] FIG. 16: PRO80484

[0055] FIG. 17: DNA323727,NM_{—}014188,gen.NM_{—}014188

[0056] FIG. 18: PRO80485

[0057] FIG. 19: DNA323728,XM_{—}086180,gen.XM_{—}086180

[0058] FIG. 20: DNA323729,XM_{—}166599,gen.XM_{—}166599

[0059] FIG. 21: PRO80487

[0060] FIG. 22: DNA323730,NM_{—}017900,gen.NM_{—}017900

[0061] FIG. 23: PRO80488

[0062] FIG. 24: DNA323731,XM_{—}001589,gen.XM_{—}001589

[0063] FIG. 25: PRO80489

[0064] FIG. 26: DNA323732,NM_{—}016176,gen.NM_{—}016176

[0065] FIG. 27: PRO80490

[0066] FIG. 28: DNA323733,XM_{—}117692,gen.XM_{—}117692

[0067] FIG. 29: DNA323734,XM_{—}086360,gen.XM_{—}086360

[0068] FIG. 30: PRO80492

[0069] FIG. 31: DNA287173,NM_{—}001428,gen.NM_{—}001428

[0070] FIG. 32: PRO69463

[0071] FIG. 33: DNA323735,XM_{—}001299,gen.XM_{—}001299

[0072] FIG. 34: DNA323736,NM_{—}000983,gen.NM_{—}000983

[0073] FIG. 35: PRO80493

[0074] FIG. 36A-B: DNA227821,NM_{—}014851,gen.NM_{—}014851

[0075] FIG. 37: PRO38284

[0076] FIG. 38A-B: DNA323737,XM_{—}086204,gen.XM_{—}086204

[0077] FIG. 39: PRO80494

[0078] FIG. 40: DNA323738,XM_{—}030920,gen.XM_{—}030920

[0079] FIG. 41: DNA323739,NM_{—}018948,gen.NM_{—}018948

[0080] FIG. 42: DNA273712,NM_{—}007262,gen.NM_{—}007262

[0081] FIG. 43: PRO61679

[0082] FIG. 44: DNA151148,NM_{—}004781,gen.NM_{—}004781

[0083] FIG. 45: PRO12618

[0084] FIG. 46: DNA323740,XM_{—}086151,gen.XM_{—}086151

[0085] FIG. 47: PRO80497

[0086] FIG. 48: DNA171408,NM_{—}004401,gen.NM_{—}004401

[0087] FIG. 49: PRO20136

[0088] FIG. 50: DNA323741,NM_{—}003132,gen.NM_{—}003132

[0089] FIG. 51: PRO80498

[0090] FIG. 52: DNA323742,XM_{—}086586,gen.XM_{—}086586

[0091] FIG. 53: PRO80499

[0092] FIG. 54: DNA323743,XM_{—}086587,gen.XM_{—}086587

[0093] FIG. 55: DNA323744,XM_{—}059230,gen.XM_{—}059230

[0094] FIG. 56: PRO80501

[0095] FIG. 57A-B: DNA323745,XM_{—}048780,gen.XM_{—}048780

[0096] FIG. 58: DNA323746,XM_{—}053183,gen.XM_{—}053183

[0097] FIG. 59: DNA323747,XM_{—}165442,gen.XM_{—}165442

[0098] FIG. 60: DNA323748,NM_{—}033440,gen.NM_{—}033440

[0099] FIG. 61: PRO2269

[0100] FIG. 62: DNA323749,NM_{—}024329,gen.NM_{—}024329

[0101] FIG. 63: PRO80505

[0102] FIG. 64: DNA323750,XM_{—}018205,gen.XM_{—}018205

[0103] FIG. 65: PRO80506

[0104] FIG. 66: DNA323751,XM_{—}011650,gen.XM_{—}011650

[0105] FIG. 67: DNA323752,XM_{—}017315,gen.XM_{—}017315

[0106] FIG. 68A-B: DNA323753,XM_{—}030470,genXM_{—}030470

[0107] FIG. 69: DNA323754,NM_{—}004930,gen.NM_{—}004930

[0108] FIG. 70: PRO80510

[0109] FIG. 71: DNA323755,NM_{—}003689,gen.NM_{—}003689

[0110] FIG. 72: PRO80511

[0111] FIG. 73: DNA323756,NM_{—}016183,gen.NM_{—}016183

[0112] FIG. 74: PRO80512

[0113] FIG. 75: DNA323757,XM_{—}015234,gen.XM_{—}015234

[0114] FIG. 76A-B: DNA323758,XM_{—}027916,gen.XM_{—}027916

[0115] FIG. 77: DNA323759,XM_{—}033683,gen.XM_{—}033683

[0116] FIG. 78: DNA323760,XM_{—}001826,gen.XM_{—}001826

[0117] FIG. 79: DNA323761,XM_{—}033654,gen.XM_{—}033654

[0118] FIG. 80: PRO80517

[0119] FIG. 81: DNA323762,NM_{—}001791,gen.NM_{—}001791

[0120] FIG. 82: PRO26194

[0121] FIG. 83: DNA323763,NM_{—}005826,gen.NM_{—}005826

[0122] FIG. 84: PRO60815

[0123] FIG. 85: DNA323764,XM_{—}086357,gen.XM_{—}086357

[0124] FIG. 86: PRO80518

[0125] FIG. 87: DNA323765,NM_{—}000975,gen.NM_{—}000975

[0126] FIG. 88: PRO80519

[0127] FIG. 89: DNA323766,NM_{—}007260,gen.NM_{—}007260

[0128] FIG. 90: PRO61250

[0129] FIG. 91: DNA323767,NM_{—}017761,gen.NM_{—}017761

[0130] FIG. 92: PRO80520

[0131] FIG. 93: DNA323768,NM_{—}006625,gen.NM_{—}006625

[0132] FIG. 94: PRO22196

[0133] FIG. 95: DNA323769,NM_{—}054016,gen.NM_{—}054016

[0134] FIG. 96: PRO80521

[0135] FIG. 97: DNA323770,XM_{—}086375,gen.XM_{—}086375

[0136] FIG. 98: DNA323771,XM_{—}006290,gen.XM_{—}006290

[0137] FIG. 99: DNA323772,NM_{—}015484,gen.NM_{—}015484

[0138] FIG. 100: PRO80524

[0139] FIG. 101A-B: DNA323773,XM_{—}001616,gen.XM_{—}001616

[0140] FIG. 102: DNA323774,XM_{—}058240,gen.XM_{—}058240

[0141] FIG. 103: DNA323775,XM_{—}059117,gen.XM_{—}059117

[0142] FIG. 104: PRO80527

[0143] FIG. 105: DNA226262,NM_{—}005563,gen.NM_{—}005563

[0144] FIG. 106: PRO36725

[0145] FIG. 107: DNA323776,NM_{—}022778,gen.NM_{—}1022778

[0146] FIG. 108: PRO80528

[0147] FIG. 109: DNA323777,XM_{—}017846,gen.XM_{—}017846

[0148] FIG. 110: DNA323778,NM_{—}005517,gen.NM_{—}005517

[0149] FIG. 111: PRO80530

[0150] FIG. 112A-C: DNA323779,XM_{—}046918,gen.XM_{—}046918

[0151] FIG. 113: DNA323780,XM_{—}002114,gen.XM_{—}002114

[0152] FIG. 114: DNA323781,XM_{—}059066,gen.XM_{—}059066

[0153] FIG. 115: PRO80533

[0154] FIG. 116: DNA323782,NM_{—}018066,gen.NM_{—}018066

[0155] FIG. 117: PRO80534

[0156] FIG. 118: DNA323783,NM_{—}006600,gen.NM_{—}006600

[0157] FIG. 119: PRO80535

[0158] FIG. 120: DNA323784,XM_{—}059067,gen.XM_{—}059067

[0159] FIG. 121: PRO80536

[0160] FIG. 122: DNA323785,NM_{—}032872,gen.NM_{—}032872

[0161] FIG. 123: PRO080537

[0162] FIG. 124: DNA196349,NM_{—}006990,gen.NM_{—}006990

[0163] FIG. 125: PRO24856

[0164] FIG. 126: DNA323788,XM_{—}001640,gen.XM_{—}001640

[0165] FIG. 127: DNA323789,NM_{—}002946,gen.NM_{—}002946

[0166] FIG. 128: PRO59099

[0167] FIG. 129: DNA323790,XM_{—}114044,gen.XM_{—}114044

[0168] FIG. 130: DNA323791,XM_{—}059088,gen.XM_{—}059088

[0169] FIG. 131: DNA323792,NM_{—}031459,gen.NM_{—}031459

[0170] FIG. 132: PRO80542

[0171] FIG. 133: DNA323793,XM_{—}010664,gen.XM_{—}010664

[0172] FIG. 134: DNA323794,XM_{—}001812,gen.XM_{—}001812

[0173] FIG. 135: DNA323795,XM_{—}001807,gen.XM_{—}001807

[0174] FIG. 136: DNA323796,XM_{—}086444,gen.XM_{—}086444

[0175] FIG. 137: DNA323797,NM_{—}024640,gen.NM_{—}024640

[0176] FIG. 138: PRO80547

[0177] FIG. 139A-B: DNA323798,XM_{—}049310,gen.XM_{—}049310

[0178] FIG. 140: DNA323799,XM_{—}113374,gen.XM_{—}113374

[0179] FIG. 141: DNA323800,XM_{—}002105,gen.XM_{—}002105

[0180] FIG. 142: DNA323801,NM_{—}014571,gen.NM_{—}014571

[0181] FIG. 143: PRO80550

[0182] FIG. 144: DNA323802,XM_{—}165438,gen.XM_{—}165438

[0183] FIG. 145: DNA323803,XM_{—}029844,gen.XM_{—}029844

[0184] FIG. 146: DNA188748,NM_{—}006559,gen.NM_{—}006559

[0185] FIG. 147: PRO22304

[0186] FIG. 148: DNA323804,NM_{—}003757,gen.NM_{—}003757

[0187] FIG. 151: PRO80554

[0188] FIG. 152: DNA323806,NM_{—}023009,gen.NM_{—}023009

[0189] FIG. 153: PRO80555

[0190] FIG. 154: DNA323807,XM_{—}030423,gen.XM_{—}030423

[0191] FIG. 155A-B: DNA323808,XM_{—}036299,gen.XM_{—}036299

[0192] FIG. 156: PRO80557

[0193] FIG. 157: DNA227213,NM_{—}003680,gen.NM_{—}003680

[0194] FIG. 158: PRO37676

[0195] FIG. 159: DNA323809,NM_{—}006112,gen.NM_{—}006112

[0196] FIG. 160: PRO80558

[0197] FIG. 161: DNA323810,XM_{—}018136,gen.XM_{—}018136

[0198] FIG. 162: PRO80559

[0199] FIG. 163: DNA323811,XM_{—}117184,gen.XM_{—}117184

[0200] FIG. 164: PRO80560

[0201] FIG. 165: DNA323812,NM_{—}017825,gen.NM_{—}017825

[0202] FIG. 166: PRO80561

[0203] FIG. 167: DNA189315,NM_{—}014408,gen.NM_{—}014408

[0204] FIG. 168: PRO22262

[0205] FIG. 169A-B: DNA323813,XM_{—}029031,gen.XM_{—}029031

[0206] FIG. 170: PRO80562

[0207] FIG. 171: DNA323814,XM_{—}059171,gen.XM_{—}059171

[0208] FIG. 172: PRO80563

[0209] FIG. 173: DNA83085,NM_{—}000760,gen.NM_{—}000760

[0210] FIG. 174: PRO2583

[0211] FIG. 175: DNA323815,XM_{—}165984,gen.XM_{—}165984

[0212] FIG. 176: DNA323816,XM_{—}029842,gen.XM_{—}029842

[0213] FIG. 177: PRO2851

[0214] FIG. 178: DNA323817,XM_{—}086384,gen.XM_{—}86384

[0215] FIG. 179: PRO80565

[0216] FIG. 180A-C: DNA274487,NM_{—}014747,gen.NM_{—}014747

[0217] FIG. 181: PRO62389

[0218] FIG. 182: DNA323818,XM_{—}010712,gen.XM_{—}010712

[0219] FIG. 183: DNA323819,NM_{—}024664,gen.NM_{—}024664

[0220] FIG. 184: PRO80567

[0221] FIG. 185: DNA323820,XM_{—}059214,gen.XM_{—}059214

[0222] FIG. 186: PRO80568

[0223] FIG. 187: DNA323821,XM_{—}046349,gen.XM_{—}046349

[0224] FIG. 188: DNA103253,NM_{—}006516,gen.NM_{—}006516

[0225] FIG. 189: PRO4583

[0226] FIG. 190: DNA323822,XM_{—}086543,gen.XM_{—}086543

[0227] FIG. 191: PRO80570

[0228] FIG. 192: DNA274745,NM_{—}006824,gen.NM_{—}006824

[0229] FIG. 193: PRO62518

[0230] FIG. 194: DNA273060,NM_{—}001255,gen.NM_{—}001255

[0231] FIG. 195: PRO61125

[0232] FIG. 196: DNA323823,NM_{—}030587,gen.NM_{—}030587

[0233] FIG. 197: PRO80571

[0234] FIG. 198: DNA323824,XM_{—}097649,gen.XM_{—}097649

[0235] FIG. 199: DNA256503,NM_{—}003780,gen.NM_{—}003780

[0236] FIG. 200: PRO51539

[0237] FIG. 201: DNA323825,XM_{—}046450,gen.XM_{—}046450

[0238] FIG. 202A-B: DNA272024,NM_{—}014663,gen.NM_{—}014663

[0239] FIG. 203: PRO60298

[0240] FIG. 204: DNA323826,XM_{—}046565,gen.XM_{—}046565

[0241] FIG. 205: PRO80574

[0242] FIG. 206: DNA323827,NM_{—}024602,gen.NM_{—}024602

[0243] FIG. 207: PRO80575

[0244] FIG. 208: DNA323828,XM_{—}046557,gen.XM_{—}046557

[0245] FIG. 209: PRO80576

[0246] FIG. 210: DNA323829,NM_{—}001012,gen.NM_{—}001012

[0247] FIG. 211: PRO10760

[0248] FIG. 212: DNA323830,XM_{—}046551,gen.XM_{—}046551

[0249] FIG. 213A-B: DNA323831,XM_{—}027983,gen.XM_{—}027983

[0250] FIG. 214: DNA323832,XM_{—}086324,gen.XM_{—}086324

[0251] FIG. 215: PRO80579

[0252] FIG. 216: DNA323833,XM_{—}032391,gen.XM_{—}032391

[0253] FIG. 217: PRO80580

[0254] FIG. 218: DNA103214,NM_{—}006066,gen.NM_{—}006066

[0255] FIG. 219: PRO4544

[0256] FIG. 220: DNA304686,NM_{—}002574,gen.NM_{—}002574

[0257] FIG. 221: PRO71112

[0258] FIG. 222: DNA323834,NM_{—}032756,gen.NM_{—}032756

[0259] FIG. 223: PRO80581

[0260] FIG. 224: DNA323835,XM_{—}059133,gen.XM_{—}059133

[0261] FIG. 225: PRO80582

[0262] FIG. 226: DNA323836,XM_{—}027313,gen.XM_{—}027313

[0263] FIG. 227: PRO80583

[0264] FIG. 228: DNA323837,XM_{—}054868,gen.XM_{—}054868

[0265] FIG. 229: DNA323838,NM_{—}001262,gen.NM_{—}001262

[0266] FIG. 230: PRO59546

[0267] FIG. 231: DNA323839,XM_{—}086391,gen.XM_{—}086391

[0268] FIG. 232: PRO80584

[0269] FIG. 233: DNA323840,XM_{—}114798,gen.XM_{—}114798

[0270] FIG. 234: PRO80585

[0271] FIG. 235: DNA272748,NM_{—}002979,gen.NM_{—}002979

[0272] FIG. 236: PRO60860

[0273] FIG. 237: DNA323841,XM_{—}038911,gen.XM_{—}038911

[0274] FIG. 238: PRO80586

[0275] FIG. 239: DNA323842,NM_{—}018070,gen.NM_{—}018070

[0276] FIG. 240: PRO80587

[0277] FIG. 241: DNA323843,NM_{—}024603,gen.NM_{—}024603

[0278] FIG. 242: PRO80588

[0279] FIG. 243: DNA323844,XM_{—}086389,gen.XM_{—}086389

[0280] FIG. 244: DNA323845,XM_{—}038852,gen.XM_{—}038852

[0281] FIG. 245: DNA323846,NM_{—}032864,gen.NM_{—}032864

[0282] FIG. 246: PRO80591

[0283] FIG. 247: DNA323847,NM_{—}024586,gen.NM_{—}024586

[0284] FIG. 248: PRO80592

[0285] FIG. 249A-B: DNA323848,XM_{—}097565,gen.XM_{—}097565

[0286] FIG. 250: DNA323849,XM_{—}001472,gen.XM_{—}001472

[0287] FIG. 251A-C: DNA323850,XM_{—}055481,gen.XM_{—}055481

[0288] FIG. 252: PRO80593

[0289] FIG. 253: DNA323851,XM_{—}010615,gen.XM_{—}010615

[0290] FIG. 254A-B: DNA323852,XM_{—}089138,gen.XM_{—}089138

[0291] FIG. 255: PRO80595

[0292] FIG. 256A-B: DNA323853,XM_{—}059180,gen.XM_{—}59180

[0293] FIG. 257: DNA323854,XM_{—}015717,gen.XM_{—}015717

[0294] FIG. 258: PRO80597

[0295] FIG. 259: DNA323855,XM_{—}114125,gen.XM_{—}114125

[0296] FIG. 260: DNA323856,NM_{—}015640,gen.NM_{—}015640

[0297] FIG. 261: PRO80599

[0298] FIG. 262: DNA323857,NM_{—}017768,gen.NM_{—}017768

[0299] FIG. 263: PRO80600

[0300] FIG. 264: DNA323858,XM_{—}165977,gen.XM_{—}165977

[0301] FIG. 265: DNA323859,XM_{—}086343,gen.XM_{—}086343

[0302] FIG. 266: PRO80602

[0303] FIG. 267: DNA269708,NM_{—}007034,gen.NM_{—}007034

[0304] FIG. 268: PRO58118

[0305] FIG. 269: DNA323860,NM_{—}001554,gen.NM_{—}001554

[0306] FIG. 270: PRO80603

[0307] FIG. 271: DNA226260,NM_{—}006769,gen.NM_{—}006769

[0308] FIG. 272: PRO36723

[0309] FIG. 273: DNA323861,NM_{—}004261,gen.NM_{—}004261

[0310] FIG. 274: PRO8060

[0311] FIG. 275: DNA323862,XM_{—}165983,gen.XM_{—}165983

[0312] FIG. 276: DNA323863,XM_{—}016164,gen.XM_{—}016164

[0313] FIG. 277: DNA323864,XM_{—}086164,gen.XM_{—}086164

[0314] FIG. 278: PRO80607

[0315] FIG. 279: DNA323865,XM_{—}086165,gen.XM_{—}086165

[0316] FIG. 280: DNA323866,XM_{—}086167,gen.XM_{—}086167

[0317] FIG. 281: DNA323867,XM_{—}086166,gen.XM_{—}086166

[0318] FIG. 282: DNA323868,XM_{—}086138,gen.XM_{—}086138

[0319] FIG. 283: PRO80611

[0320] FIG. 284: DNA323869,NM_{—}000969,gen.NM_{—}000969

[0321] FIG. 285: PRO80612

[0322] FIG. 286: DNA323870,XM_{—}088863,gen.XM_{—}088863

[0323] FIG. 287: PRO80613

[0324] FIG. 288: DNA271003,NM_{—}003729,gen.NM_{—}003729

[0325] FIG. 289: PRO59332

[0326] FIG. 290: DNA323871,XM_{—}165981,gen.XM_{—}165981

[0327] FIG. 291: PRO80614

[0328] FIG. 292: DNA275139,NM_{—}013296,gen.NM_{—}013296

[0329] FIG. 293: PRO62849

[0330] FIG. 294: DNA323872,XM_{—}058702,gen.XM_{—}058702

[0331] FIG. 295: DNA323873,XM_{—}054978,gen.XM_{—}054978

[0332] FIG. 296: DNA323874,NM_{—}032636,gen.NM_{—}032636

[0333] FIG. 297: PRO80617

[0334] FIG. 298: DNA323875,NM_{—}006513,gen.NM_{—}006513

[0335] FIG. 299: PRO80618

[0336] FIG. 300: DNA323876,NM_{—}006621,gen.NM_{—}006621

[0337] FIG. 301: PRO80619

[0338] FIG. 302A-B: DNA323877,NM_{—}007158,gen.NM_{—}007158

[0339] FIG. 303: PRO80620

[0340] FIG. 304: DNA323878,XM_{—}086132,gen.XM_{—}086132

[0341] FIG. 305: PRO80621

[0342] FIG. 306: DNA323879,NM_{—}004000,gen.NM_{—}004000

[0343] FIG. 307: PRO80622

[0344] FIG. 308: DNA323880,NM_{—}001688,gen.NM_{—}001688

[0345] FIG. 309: PRO80623

[0346] FIG. 310: DNA323881,NM_{—}019099,gen.NM_{—}019099

[0347] FIG. 311: PRO80624

[0348] FIG. 312A-B: DNA323882,NM_{—}000701,gen.NM_{—}000701

[0349] FIG. 313: PRO80625

[0350] FIG. 314A-B: DNA323883,XM_{—}018332,gen.XM_{—}018332

[0351] FIG. 315A-B: DNA323884,XM_{—}040709,gen.XM_{—}040709

[0352] FIG. 316: PRO80627

[0353] FIG. 317: DNA323885,XM_{—}086518,gen.XM_{—}086518

[0354] FIG. 318A-D: DNA323886,XM_{—}034671,gen.XM_{—}034671

[0355] FIG. 319: DNA323887,XM_{—}034662,gen.XM_{—}034662

[0356] FIG. 320: PRO80630

[0357] FIG. 321: DNA323888,XM_{—}039721,gen.XM_{—}039721

[0358] FIG. 322: PRO80631

[0359] FIG. 323A-B: DNA323889,XM_{—}086397,gen.XM_{—}086397

[0360] FIG. 324A-B: DNA323890,XM_{—}086515,gen.XM_{—}086515

[0361] FIG. 325: PRO80633

[0362] FIG. 326: DNA323891,XM_{—}016480,gen.XM_{—}016480

[0363] FIG. 327: DNA323892,XM_{—}165975,gen.XM_{—}165975

[0364] FIG. 328: DNA323893,NM_{—}016361,gen.NM_{—}016361

[0365] FIG. 329: PRO231

[0366] FIG. 330: DNA323894,XM_{—}059210,gen.XM_{—}059210

[0367] FIG. 331: DNA323895,XM_{—}086296,gen.XM_{—}086296

[0368] FIG. 332: DNA323896,NM_{—}030920,gen.NM_{—}030920

[0369] FIG. 333: PRO80638

[0370] FIG. 334: DNA323897,NM_{—}016022,gen.NM_{—}016022

[0371] FIG. 335: PRO80639

[0372] FIG. 336: DNA323898,NM_{—}031901,gen.NM_{—}031901

[0373] FIG. 337: PRO80640

[0374] FIG. 338A-B: DNA323899,XM_{—}088788,gen.XM_{—}088788

[0375] FIG. 339: PRO80641

[0376] FIG. 340: DNA274759,NM_{—}005620,gen.NM_{—}005620

[0377] FIG. 341: PRO62529

[0378] FIG. 342: DNA323900,XM_{—}001468,gen.XM_{—}001468

[0379] FIG. 343: PRO49642

[0380] FIG. 344: DNA323901,NM_{—}006862,gen.NM_{—}006862

[0381] FIG. 345: PRO80642

[0382] FIG. 346: DNA227529,NM_{—}002796,gen.NM_{—}002796

[0383] FIG. 347: PRO37992

[0384] FIG. 348: DNA323902,NM_{—}002810,gen.NM_{—}002810

[0385] FIG. 349: PRO61638

[0386] FIG. 350: DNA290284,NM_{—}005997,gen.NM_{—}005997

[0387] FIG. 351: PRO70433

[0388] FIG. 352: DNA323903,XM_{—}097639,gen.XM_{—}097639

[0389] FIG. 353: DNA323904,XM_{—}041879,gen.XM_{—}041879

[0390] FIG. 354: DNA323905,XM_{—}041884,gen.XM_{—}041884

[0391] FIG. 355: PRO80644

[0392] FIG. 356: DNA225809,NM_{—}000396,gen.NM_{—}000396

[0393] FIG. 357: PRO36272

[0394] FIG. 358: DNA323906,NM_{—}025150,gen.NM_{—}025150

[0395] FIG. 359: PRO80645

[0396] FIG. 360: DNA323907,XM_{—}114098,gen.XM_{—}114098

[0397] FIG. 361: DNA323908,XM_{—}113369,gen.XM_{—}113369

[0398] FIG. 362: PRO80646

[0399] FIG. 363: DNA323909,XM_{—}099467,gen.XM_{—}099467

[0400] FIG. 364: DNA323910,NM_{—}002965,gen.NM_{—}002965

[0401] FIG. 365: PRO80648

[0402] FIG. 366: DNA323911,XM_{—}086400,gen.XM_{—}086400

[0403] FIG. 367: DNA210134,NM_{—}014624,gen.NM_{—}014624

[0404] FIG. 368: PRO33679

[0405] FIG. 369: DNA304666,NM_{—}002961,gen.NM_{—}002961

[0406] FIG. 370: PRO71093

[0407] FIG. 371: DNA304720,NM_{—}019554,gen.NM_{—}019554

[0408] FIG. 372: PRO71146

[0409] FIG. 373: DNA323912,XM_{—}165976,gen.XM_{—}165976

[0410] FIG. 374: DNA227577,NM_{—}006271,gen.NM_{—}006271

[0411] FIG. 375: PRO38040

[0412] FIG. 376: DNA323913,XM_{—}114097,gen.XM_{—}114097

[0413] FIG. 377: DNA323914,XM_{—}040009,gen.XM_{—}040009

[0414] FIG. 378: PRO80651

[0415] FIG. 379: DNA323915,NM_{—}024330,gen.NM_{—}024330

[0416] FIG. 380: PRO703

[0417] FIG. 381: DNA323916,NM_{—}012437,gen.NM_{—}012437

[0418] FIG. 382: PRO80652

[0419] FIG. 383: DNA323917,XM_{—}086271,gen.XM_{—}086271

[0420] FIG. 384: DNA323918,XM_{—}114055,gen.XM_{—}114055

[0421] FIG. 385: PRO37535

[0422] FIG. 386: DNA323919,XM_{—}113360,gen.XM_{—}113360

[0423] FIG. 387: PRO80654

[0424] FIG. 388: DNA323920,XM_{—}086564,gen.XM_{—}086564

[0425] FIG. 389: DNA323921,NM_{—}005973,gen.NM_{—}005973

[0426] FIG. 390: PRO80656

[0427] FIG. 391: DNA323922,XM_{—}044077,gen.XM_{—}044077

[0428] FIG. 392: DNA323923,NM_{—}001878,gen.NM_{—}001878

[0429] FIG. 393: PRO80657

[0430] FIG. 394: DNA323924,NM_{—}021948,gen.NM_{—}021948

[0431] FIG. 395: PRO6018

[0432] FIG. 396: DNA273088,NM_{—}006365,gen.NM_{—}006365

[0433] FIG. 397: PRO61146

[0434] FIG. 398: DNA323925,XM_{—}044127,gen.XM_{—}044127

[0435] FIG. 399: PRO80658

[0436] FIG. 400: DNA323926,XM_{—}053245,gen.XM_{—}053245

[0437] FIG. 401: PRO80659

[0438] FIG. 402: DNA257916,NM_{—}032323,gen.NM_{—}032323

[0439] FIG. 403: PRO52449

[0440] FIG. 404: DNA323927,NM_{—}005572,gen.NM_{—}005572

[0441] FIG. 405: PRO80660

[0442] FIG. 406: DNA323928,XM_{—}044166,gen.XM_{—}044166

[0443] FIG. 407: PRO80661

[0444] FIG. 408: DNA323929,XM_{—}044128,gen.XM_{—}044128

[0445] FIG. 409: DNA226125,NM_{—}003145,gen.NM_{—}003145

[0446] FIG. 410: PRO36588

[0447] FIG. 411A-B: DNA323930,XM_{—}044172,gen.XM_{—}044172

[0448] FIG. 412: DNA323931,NM_{—}032292,gen.NM_{—}032292

[0449] FIG. 413: PRO80664

[0450] FIG. 414: DNA323932,NM_{—}004632,gen.NM_{—}004632

[0451] FIG. 415: PRO80665

[0452] FIG. 416: DNA323933,XM_{—}044075,gen.XM_{—}044075

[0453] FIG. 417: PRO80666

[0454] FIG. 418: DNA323934,NM_{—}018253,gen.NM_{—}018253

[0455] FIG. 419: PRO80667

[0456] FIG. 420: DNA323935,NM_{—}018116,gen.NM_{—}018116

[0457] FIG. 421: PRO80668

[0458] FIG. 422: DNA323936,NM_{—}002004,gen.NM_{—}002004

[0459] FIG. 423: PRO80669

[0460] FIG. 424: DNA323937,NM_{—}005698,gen.NM_{—}005698

[0461] FIG. 425: PRO80670

[0462] FIG. 426: DNA323938,NM_{—}052837,gen.NM_{—}052837

[0463] FIG. 427: PRO80671

[0464] FIG. 428: DNA194600,NM_{—}006589,gen.NM_{—}006589

[0465] FIG. 429: PRO23942

[0466] FIG. 430: DNA323939,XM_{—}086567,gen.XM_{—}086567

[0467] FIG. 431: PRO80672

[0468] FIG. 432: DNA323940,XM_{—}086552,gen.XM_{—}086552

[0469] FIG. 433: DNA323941,XM_{—}036744,gen.XM_{—}036744

[0470] FIG. 434: DNA323942,NM_{—}130898,gen.NM_{—}130898

[0471] FIG. 435: PRO80675

[0472] FIG. 436: DNA226793,NM_{—}006694,gen.NM_{—}006694

[0473] FIG. 437: PRO37256

[0474] FIG. 438: DNA294794,NM_{—}002870,gen.NM_{—}002870

[0475] FIG. 439: PRO70754

[0476] FIG. 440: DNA323943,NM_{—}001030,gen.NM_{—}001030

[0477] FIG. 441: PRO80676

[0478] FIG. 442: DNA323944,XM_{—}036829,gen.XM_{—}036829

[0479] FIG. 443: PRO80677

[0480] FIG. 444: DNA323945,NM_{—}015449,gen.NM_{—}015449

[0481] FIG. 445: PRO80678

[0482] FIG. 446: DNA323946,NM_{—}014847,gen.NM_{—}014847

[0483] FIG. 447: PRO80679

[0484] FIG. 448: DNA323947,XM_{—}036934,gen.XM_{—}036934

[0485] FIG. 449: PRO80680

[0486] FIG. 450A-B: DNA323948,XM_{—}036845,gen.XM_{—}036845

[0487] FIG. 451: DNA323949,XM_{—}010636,gen.XM_{—}010636

[0488] FIG. 452: DNA323950,NM_{—}006556,gen.NM_{—}006556

[0489] FIG. 453: PRO62574

[0490] FIG. 454: DNA323951,XM_{—}034082,gen.XM_{—}034082

[0491] FIG. 455: DNA323952,NM_{—}025207,gen.NM_{—}025207

[0492] FIG. 456: PRO80684

[0493] FIG. 457: DNA103436,NM_{—}003815,gen.NM_{—}003815

[0494] FIG. 458: PRO4763

[0495] FIG. 459: DNA323953,NM_{—}003516,gen.NM_{—}003516

[0496] FIG. 460: PRO80685

[0497] FIG. 461: DNA323954,NM_{—}005850,gen.NM_{—}005850

[0498] FIG. 462: PRO59725

[0499] FIG. 463A-B: DNA323955,NM_{—}014849,gen.NM_{—}014849

[0500] FIG. 464: PRO80686

[0501] FIG. 465: DNA323956,XM_{—}059094,gen.XM_{—}059094

[0502] FIG. 466: DNA323957,XM_{—}058247,gen.XM_{—}058247

[0503] FIG. 467: PRO80688

[0504] FIG. 468: DNA323958,NM_{—}003779,gen.NM_{—}003779

[0505] FIG. 469: PRO80689

[0506] FIG. 470: DNA323959,NM_{—}004550,gen.NM_{—}004550

[0507] FIG. 471: PRO58974

[0508] FIG. 472: DNA323960,XM_{—}085581,gen.XM_{—}085581

[0509] FIG. 473: DNA323961,XM_{—}113379,gen.XM_{—}113379

[0510] FIG. 474: DNA226619,NM_{—}003564,gen.NM_{—}003564

[0511] FIG. 475: PRO37082

[0512] FIG. 476A-B: DNA323962,XM_{—}049680,gen.XM_{—}049680

[0513] FIG. 477: DNA323963,XM_{—}165443,gen.XM_{—}165443

[0514] FIG. 478: PRO80693

[0515] FIG. 479: DNA323964,XM_{—}086381,gen.XM_{—}086381

[0516] FIG. 480: PRO80694

[0517] FIG. 481A-B: DNA323965,NM_{—}002857,gen.NM_{—}002857

[0518] FIG. 482: PRO80695

[0519] FIG. 483A-B: DNA323966,XM_{—}049690,gen.XM_{—}049690

[0520] FIG. 484: DNA323967,XM_{—}114153,gen.XM_{—}114153

[0521] FIG. 485: DNA323968,XM_{—}086378,gen.XM_{—}086378

[0522] FIG. 486: DNA323969,XM_{—}001897,gen.XM_{—}001897

[0523] FIG. 487: PRO10002

[0524] FIG. 488: DNA323970,NM_{—}052862,gen.NM_{—}052862

[0525] FIG. 489: PRO80699

[0526] FIG. 490: DNA323971,XM_{—}086481,gen.XM_{—}086481

[0527] FIG. 491: PRO8070

[0528] FIG. 492: DNA323972,XM_{—}059191,gen.XM_{—}059191

[0529] FIG. 493: DNA323973,XM_{—}086485,gen.XM_{—}086485

[0530] FIG. 494: DNA323974,XM_{—}086484,gen.XM_{—}086484

[0531] FIG. 495: DNA323975,XM_{—}047479,gen.XM_{—}047479

[0532] FIG. 496: PRO80704

[0533] FIG. 497: DNA323976,NM_{≠}003617,gen.NM_{—}003617

[0534] FIG. 498: PRO37806

[0535] FIG. 499: DNA254298,NM_{—}025226,gen.NM_{—}025226

[0536] FIG. 500: PRO49409

[0537] FIG. 501: DNA323977,XM_{—}034000,gen.XM_{—}034000

[0538] FIG. 502: PRO80705

[0539] FIG. 503: DNA323978,NM_{—}032738,gen.NM_{—}032738

[0540] FIG. 504: PRO329

[0541] FIG. 505: DNA323979,NM_{—}000569,gen.NM_{—}000569

[0542] FIG. 506: PRO80706

[0543] FIG. 507: DNA323980,XM_{—}088945,gen.XM_{—}088945

[0544] FIG. 508: PRO80707

[0545] FIG. 509: DNA323981,XM_{—}060331,gen.XM_{—}060331

[0546] FIG. 510: PRO80708

[0547] FIG. 511: DNA323982,NM_{—}004905,gen.NM_{—}004905

[0548] FIG. 512: PRO80709

[0549] FIG. 513: DNA323983,NM_{—}017847,gen.NM_{—}017847

[0550] FIG. 514: PRO80710

[0551] FIG. 515A-B: DNA323984,XM_{—}051877,gen.XM_{—}051877

[0552] FIG. 516: PRO62077

[0553] FIG. 517: DNA323985,NM_{—}005717,gen.NM_{—}005717

[0554] FIG. 518: PRO80711

[0555] FIG. 519A-B: DNA271986,NM_{—}014837,gen.NM_{—}014837

[0556] FIG. 520: PRO60261

[0557] FIG. 521A-B: DNA323986,XM_{—}056923,gen.XM_{—}056923

[0558] FIG. 522: DNA323987,XM_{—}046464,gen.XM_{—}046464

[0559] FIG. 523: DNA323988,XM_{—}002068,gen.XM_{—}002068

[0560] FIG. 524A-B: DNA323989,XM_{—}001289,gen.XM_{—}001289

[0561] FIG. 525: DNA323990,XM_{—}114109,gen.XM_{—}114109

[0562] FIG. 526: PRO80714

[0563] FIG. 527: DNA323991,NM_{—}022371,gen.NM_{—}022371

[0564] FIG. 528: PRO80715

[0565] FIG. 529: DNA323992,NM_{—}004673,gen.NM_{—}004673

[0566] FIG. 530: PRO188

[0567] FIG. 531: DNA323993,XM_{—}060517,gen.XM_{—}060517

[0568] FIG. 532: DNA323994,XM_{—}165978,gen.XM_{—}165978

[0569] FIG. 533: PRO80717

[0570] FIG. 534: DNA323995,XM_{—}117181,gen.XM_{—}117181

[0571] FIG. 535: DNA323996,NM_{—}018122,gen.NM_{—}018122

[0572] FIG. 536: PRO80719

[0573] FIG. 537: DNA323997,XM_{—}042967,gen.XM_{—}042967

[0574] FIG. 538: DNA323998,XM_{—}086494,gen.XM_{—}086494

[0575] FIG. 539: PRO80720

[0576] FIG. 540: DNA290234,NM_{—}002923,gen.NM_{—}002923

[0577] FIG. 541: PRO70333

[0578] FIG. 542: DNA323999,XM_{—}086328,gen.XM_{—}086328

[0579] FIG. 543: DNA324000,XM_{—}086282,gen.XM_{—}086282

[0580] FIG. 544: DNA324001,XM_{—}053633,gen.XM_{—}053633

[0581] FIG. 545: DNA256905,NM_{—}138391,gen.NM_{—}138391

[0582] FIG. 546: PRO51836

[0583] FIG. 547: DNA324002,XM_{—}015434,gen.XM_{—}015434

[0584] FIG. 548: DNA324003,NM_{—}006763,gen.NM_{—}006763

[0585] FIG. 549: PRO80725

[0586] FIG. 550: DNA227246,NM_{—}005686,gen.NM_{—}005686

[0587] FIG. 551: PRO37709

[0588] FIG. 552: DNA324004,XM_{—}058405,gen.XM_{—}058405

[0589] FIG. 553A-B: DNA226005,NM_{—}000228,gen.NM_{—}000228

[0590] FIG. 554: PRO36468

[0591] FIG. 555: DNA324005,NM_{—}015714,gen.NM_{—}015714

[0592] FIG. 556: PRO11582

[0593] FIG. 557: DNA324006,XM_{—}086142,gen.XM_{—}086142

[0594] FIG. 558: DNA83046,NM_{—}000574,gen.NM_{—}000574

[0595] FIG. 559: PRO2569

[0596] FIG. 560A-B: DNA324007,XM_{—}114030,gen.XM_{—}114030

[0597] FIG. 561: DNA324008,XM_{—}097519,gen.XM_{—}097519

[0598] FIG. 562: DNA324009,XM_{—}059120,gen.XM_{—}059120

[0599] FIG. 563: PRO80730

[0600] FIG. 564: DNA324010,NM_{—}016456,gen.NM_{—}016456

[0601] FIG. 565: PRO1248

[0602] FIG. 566: DNA324011,XM_{—}036556,gen.XM_{—}036556

[0603] FIG. 567: DNA324012,XM_{—}001914,gen.XM_{—}001914

[0604] FIG. 568: DNA324013,XM_{—}001916,gen.XM_{—}001916

[0605] FIG. 569: DNA324014,NM_{—}018085,gen.NM_{—}018085

[0606] FIG. 570: PRO80734

[0607] FIG. 571: DNA324015,NM_{—}006335,gen.NM_{—}006335

[0608] FIG. 572: PRO80735

[0609] FIG. 573: DNA324016,XM_{—}036500,gen.XM_{—}036500

[0610] FIG. 574: PRO80736

[0611] FIG. 575: DNA324017,XM_{—}036507,gen.XM_{—}036507

[0612] FIG. 576: DNA196344,NM_{—}004767,gen.NM_{—}004767

[0613] FIG. 577: PRO24851

[0614] FIG. 578: DNA247474,NM_{—}014176,gen.NM_{—}014176

[0615] FIG. 579: PRO44999

[0616] FIG. 580A-B: DNA324018,XM_{—}084055,gen.XM_{—}084055

[0617] FIG. 581: DNA324019,XM_{—}010682,gen.XM_{—}010682

[0618] FIG. 582: DNA324020,XM_{—}117185,gen.XM_{—}117185

[0619] FIG. 583: DNA324021,XM_{—}055880,gen.XM_{—}055880

[0620] FIG. 584: PRO80740

[0621] FIG. 585: DNA193882,NM_{—}014184,gen.NM_{—}014184

[0622] FIG. 586: PRO23300

[0623] FIG. 587: DNA324022,NM_{—}018212,gen.NM_{—}018212

[0624] FIG. 588: PRO80741

[0625] FIG. 589: DNA324023,XM_{—}086431,gen.XM_{—}086431

[0626] FIG. 590: PRO80742

[0627] FIG. 591: DNA324024,XM_{—}037329,gen.XM_{—}037329

[0628] FIG. 592: DNA324025,XM_{—}086432,gen.XM_{—}086432

[0629] FIG. 593A-B: DNA324026,XM_{—}010732,gen.XM_{—}010732

[0630] FIG. 594: DNA227504,NM_{—}000447,gen.NM_{—}000447

[0631] FIG. 595: PR037967

[0632] FIG. 596: DNA324027,NM_{—}012486,gen.NM_{—}012486

[0633] FIG. 597: PRO80745

[0634] FIG. 598A-B: DNA324028,XM_{—}113361,gen.XM_{—}113361

[0635] FIG. 599A-B: DNA324029,XM_{—}001958,gen.XM_{—}001958

[0636] FIG. 600: DNA324030,XM_{—}016199,gen.XM_{—}016199

[0637] FIG. 601: DNA324031,XM_{—}086244,gen.XM_{—}086244

[0638] FIG. 602: DNA324032,XM_{—}086245,gen.XM_{—}086245

[0639] FIG. 603: DNA254346,NM_{—}024709,gen.NM_{—}024709

[0640] FIG. 604: PRO49457

[0641] FIG. 605: DNA324033,XM_{—}088107,gen.XM_{—}088107

[0642] FIG. 606: DNA324034,NM_{—}032890,gen.NM_{—}032890

[0643] FIG. 607: PRO80752

[0644] FIG. 608: DNA324035,XM_{—}052974,gen.XM_{—}052974

[0645] FIG. 609: PRO80753

[0646] FIG. 610: DNA324036,XM_{—}047499,gen.XM_{—}047499

[0647] FIG. 611: PRO80754

[0648] FIG. 612: DNA324037,NM_{—}000858,gen.NM_{—}000858

[0649] FIG. 613: PRO80755

[0650] FIG. 614: DNA324038,NM_{—}024319,gen.NM_{—}024319

[0651] FIG. 615: PRO80756

[0652] FIG. 616: DNA324039,XM_{—}047545,gen.XM_{—}047545

[0653] FIG. 617: PRO4914

[0654] FIG. 618A-B: DNA324040,XM_{—}056884,gen.XM_{—}056884

[0655] FIG. 619: DNA324041,XM_{—}098599,gen.XM_{—}098599

[0656] FIG. 620: DNA324042,XM_{—}165439,gen.XM_{—}165439

[0657] FIG. 621: PRO80759

[0658] FIG. 622: DNA324043,XM_{—}089030,gen.XM_{—}089030

[0659] FIG. 623: PRO80760

[0660] FIG. 624: DNA82328,NM_{—}000029,gen.NM_{—}000029

[0661] FIG. 625: PRO1707

[0662] FIG. 626: DNA324044,NM_{—}014236,gen.NM_{—}014236

[0663] FIG. 627: PRO80761

[0664] FIG. 628: DNA324045,XM_{—}056970,gen.XM_{—}056970

[0665] FIG. 629: PRO80762

[0666] FIG. 630: DNA324046,NM_{—}032324,gen.NM_{—}032324

[0667] FIG. 631: PRO80763

[0668] FIG. 632: DNA324047,XM_{—}086257,gen.XM_{—}086257

[0669] FIG. 633: PRO80764

[0670] FIG. 634: DNA324048,XM_{—}114137,gen.XM_{—}114137

[0671] FIG. 635: PRO80765

[0672] FIG. 636: DNA324049,NM_{—}000143,gen.NM_{—}000143

[0673] FIG. 637: PRO62607

[0674] FIG. 638: DNA324050,XM_{—}090833,gen.XM_{—}090833

[0675] FIG. 639: DNA324051,NM_{—}130398,gen.NM_{—}130398

[0676] FIG. 640: PRO80767

[0677] FIG. 641: DNA324052,XM_{—}117196,gen.XM_{—}117196

[0678] FIG. 642: DNA324053,XM_{—}018041,gen.XM_{—}018041

[0679] FIG. 643: DNA324054,NM_{—}001011,gen.NM_{—}001011

[0680] FIG. 644: PRO10692

[0681] FIG. 645: DNA324055,NM_{—}024027,gen.NM_{—}024027

[0682] FIG. 646: PRO1182

[0683] FIG. 647: DNA324056,NM_{—}016030,gen.NM_{—}016030

[0684] FIG. 648: PRO80770

[0685] FIG. 649: DNA103217,NM_{—}003310,gen.NM_{—}003310

[0686] FIG. 650: PRO4547

[0687] FIG. 651: DNA275195,NM_{—}001034,gen.NM_{—}001034

[0688] FIG. 652: PRO62893

[0689] FIG. 653: DNA324057,XM_{—}059368,gen.XM_{—}059368

[0690] FIG. 654: PRO80771

[0691] FIG. 655: DNA324058,NM_{—}006826,gen.NM_{—}006826

[0692] FIG. 656: PRO70258

[0693] FIG. 657: DNA324059,NM_{—}005378,gen.NM_{—}005378

[0694] FIG. 658: PRO80772

[0695] FIG. 659: DNA324060,NM_{—}002539,gen.NM_{—}002539

[0696] FIG. 660: PRO80773

[0697] FIG. 661: DNA324061,XM_{—}096149,gen.XM_{—}096149

[0698] FIG. 662: DNA275049,NM_{—}004939,gen.NM_{—}004939

[0699] FIG. 663: PRO62770

[0700] FIG. 664A-B: DNA324062,XM_{—}036450,gen.XM_{—}036450

[0701] FIG. 665: DNA324063,XM_{—}103946,gen.XM_{—}103946

[0702] FIG. 666: PRO80775

[0703] FIG. 667: DNA324064,NM_{—}014713,gen.NM_{—}014713

[0704] FIG. 668: PRO80776

[0705] FIG. 669: DNA324065,XM_{—}087206,gen.XM_{—}087206

[0706] FIG. 670: DNA324066,NM_{—}106552,gen.NM_{—}106552

[0707] FIG. 671: PRO80778

[0708] FIG. 672: DNA324067,XM_{—}092135,gen.XM_{—}092135

[0709] FIG. 673: PRO80779

[0710] FIG. 674: DNA324068,NM_{—}017910,gen.NM_{—}017910

[0711] FIG. 675: PRO80780

[0712] FIG. 676: DNA324069,XM_{—}092517,gen.XM_{—}092517

[0713] FIG. 677: PRO80781

[0714] FIG. 678A-B: DNA324070,NM_{—}025203,gen.NM_{—}025203

[0715] FIG. 679: PRO80782

[0716] FIG. 680: DNA324071,XM_{—}002480,gen.XM_{—}002480

[0717] FIG. 681: DNA324072,NM_{—}002707,gen.NM_{—}002707

[0718] FIG. 682: PRO12199

[0719] FIG. 683: DNA324073,XM_{—}087151,gen.XM_{—}087151

[0720] FIG. 684: DNA227165,NM_{—}014748,gen.NM_{—}014748

[0721] FIG. 685: PRO37628

[0722] FIG. 686: DNA324074,NM_{—}015636,gen.NM_{—}015636

[0723] FIG. 687: PRO80785

[0724] FIG. 688: DNA273800,NM_{—}001521,gen.NM_{—}001521

[0725] FIG. 689: PRO61761

[0726] FIG. 690: DNA324075,XM_{—}047175,gen.XM_{—}047175

[0727] FIG. 691: PRO80786

[0728] FIG. 692A-B: DNA324076,NM_{—}004341,gen.NM_{—}004341

[0729] FIG. 693: PRO80787

[0730] FIG. 694: DNA324077,NM_{—}016085,gen.NM_{—}016085

[0731] FIG. 695: PRO80788

[0732] FIG. 696: DNA324078,NM_{—}080592,gen.NM_{—}080592

[0733] FIG. 697: PRO80789

[0734] FIG. 698: DNA227545,NM_{—}021095,gen.NM_{—}021095

[0735] FIG. 699: PRO38008

[0736] FIG. 700: DNA324079,XM_{—}002435,gen.XM_{—}002435

[0737] FIG. 701: DNA324080,NM_{—}000221,gen.NM_{—}000221

[0738] FIG. 702: PRO80790

[0739] FIG. 703: DNA271243,NM_{—}006488,gen.NM_{—}006488

[0740] FIG. 704: PRO59558

[0741] FIG. 705: DNA324081,NM_{—}007046,gen.NM_{—}007046

[0742] FIG. 706: PRO9886

[0743] FIG. 707: DNA324082,NM_{—}021831,gen.NM_{—}021831

[0744] FIG. 708: PRO80791

[0745] FIG. 709: DNA324083,NM_{—}020134,gen.NM_{—}020134

[0746] FIG. 710: PRO80792

[0747] FIG. 711: DNA103593,NM_{—}000183,gen.NM_{—}000183

[0748] FIG. 712: PRO4917

[0749] FIG. 713: DNA324084,NM_{—}000182,gen.NM_{—}000182

[0750] FIG. 714: PRO80793

[0751] FIG. 715: DNA324085,XM_{—}097976,gen.XM_{—}097976

[0752] FIG. 716A-B: DNA324086,XM_{—}039712,gen.XM_{—}039712

[0753] FIG. 717: DNA324087,NM_{—}022552,gen.NM_{—}022552

[0754] FIG. 718: PRO80796

[0755] FIG. 719: DNA324088,NM_{—}024572,gen.NM_{—}024572

[0756] FIG. 720: PRO80797

[0757] FIG. 721: DNA324089,NM_{—}018607,gen.NM_{—}018607

[0758] FIG. 722: PRO80798

[0759] FIG. 723: DNA324090,XM_{—}165448,gen.XM_{—}165448

[0760] FIG. 724: PRO80799

[0761] FIG. 725: DNA324091,XM_{—}087195,gen.XM_{—}087195

[0762] FIG. 726: DNA324092,XM_{—}087193,gen.XM_{—}087193

[0763] FIG. 727: DNA324093,NM_{—}138801,gen.NM_{—}138801

[0764] FIG. 728: PRO80802

[0765] FIG. 729: DNA324094,XM_{—}098004,gen.XM_{—}098004

[0766] FIG. 730: PRO80803

[0767] FIG. 731: DNA324095,XM_{—}031519,gen.XM_{—}031519

[0768] FIG. 732: PRO80804

[0769] FIG. 733A-B: DNA324096,XM_{—}031527,gen.XM_{—}031527

[0770] FIG. 734: DNA324097,XM_{—}038576,gen.XM_{—}038576

[0771] FIG. 735: PRO80806

[0772] FIG. 736: DNA324098,XM_{—}117264,gen.XM_{—}117264

[0773] FIG. 737: PRO80807

[0774] FIG. 738A-B: DNA324099,XM_{—}031626,gen.XM_{—}031626

[0775] FIG. 739: PRO80808

[0776] FIG. 740: DNA324100,XM_{—}057664,gen.XM_{—}057664

[0777] FIG. 741: DNA226428,NM_{—}000251,gen.NM_{—}000251

[0778] FIG. 742: PRO36891

[0779] FIG. 743: DNA324101,XM_{—}087211,gen.XM_{—}087211

[0780] FIG. 744A-B: DNA275066,NM_{—}000179,gen.NM_{—}000179

[0781] FIG. 745: PRO62786

[0782] FIG. 746A-C: DNA270154,NM_{—}003128,gen.NM_{—}003128

[0783] FIG. 747: PRO58543

[0784] FIG. 748: DNA324102,XM_{—}087051,gen.XM_{—}087051

[0785] FIG. 749: DNA324103,NM_{—}002954,gen.NM_{—}002954

[0786] FIG. 750: PRO62239

[0787] FIG. 751: DNA271060,NM_{—}002453,gen.NM_{—}002453

[0788] FIG. 752: PRO59384

[0789] FIG. 753: DNA324104,XM_{—}048088,gen.XM_{—}048088

[0790] FIG. 754: PRO80811

[0791] FIG. 755: DNA324105,XM_{—}010886,gen.XM_{—}010886

[0792] FIG. 756: PRO80812

[0793] FIG. 757: DNA324106,XM_{—}045283,gen.XM_{—}045283

[0794] FIG. 758: PRO80813

[0795] FIG. 759: DNA324107,NM_{—}006430,gen.NM_{—}006430

[0796] FIG. 760: PRO80814

[0797] FIG. 761A-B: DNA324108,NM_{—}003400,gen.NM_{—}003400

[0798] FIG. 762: PRO59544

[0799] FIG. 763: DNA324109,XM_{—}018301,gen.XM_{—}018301

[0800] FIG. 764: DNA324110,NM_{—}005917,gen.NM_{—}005917

[0801] FIG. 765: PRO4918

[0802] FIG. 766: DNA324111,XM_{—}016843,gen.XM_{—}016843

[0803] FIG. 767: PRO80816

[0804] FIG. 768: DNA324112,XM_{—}088638,gen.XM_{—}088638

[0805] FIG. 769: PRO80817

[0806] FIG. 770: DNA324113,XM_{—}002647,gen.XM_{—}002647

[0807] FIG. 771: DNA324114,XM_{—}010881,gen.XM_{—}010881

[0808] FIG. 772: DNA324115,XM_{—}087069,gen.XM_{—}087069

[0809] FIG. 773: DNA324116,XM_{—}016625,gen.Xm_{—}087069

[0810] FIG. 774: PRO80820

[0811] FIG. 775: DNA324117,XM_{—}087068,gen.XM_{—}087068

[0812] FIG. 776: DNA324118,XM_{—}002674,gen.XM_{—}002674

[0813] FIG. 777: DNA324119,XM_{—}065884,gen.XM_{—}065884

[0814] FIG. 778: PRO80823

[0815] FIG. 779A-B: DNA324120,XM_{—}002739,gen.XM_{—}002739

[0816] FIG. 780: DNA324121,XM_{—}031596,gen.XM_{—}031596

[0817] FIG. 781: PRO61325

[0818] FIG. 782: DNA324122,XM_{—}031585,gen.XM_{—}031585

[0819] FIG. 783: DNA324123,XM_{—}031586,gen.XM_{—}031586

[0820] FIG. 784: DNA324124,XM_{—}018039,gen.XM_{—}018039

[0821] FIG. 785: DNA324125,NM_{—}032822,gen.NM_{—}032822

[0822] FIG. 786: PRO80827

[0823] FIG. 787A-B: DNA324126,XM_{—}096172,gen.XM_{—}096172

[0824] FIG. 788A-B: DNA324127,XM_{—}002727,gen.XM_{—}002727

[0825] FIG. 789: DNA324128,NM_{—}003124,gen.NM_{—}003124

[0826] FIG. 790: PRO80830

[0827] FIG. 791: DNA324129,XM_{—}086980,gen.XM_{—}086980

[0828] FIG. 792: DNA227795,NM_{—}006429,gen.NM_{—}006429

[0829] FIG. 793: PRO38258

[0830] FIG. 794: DNA287167,NM_{—}006636,gen.NM_{—}006636

[0831] FIG. 795: PRO59136

[0832] FIG. 796: DNA324130,NM_{—}033046,gen.NM_{—}033046

[0833] FIG. 797: PRO80832

[0834] FIG. 798: DNA324131,NM_{—}133637,gen.NM_{—}133637

[0835] FIG. 799: PRO80833

[0836] FIG. 800: DNA324132,XM_{—}035220,gen.XM_{—}035220

[0837] FIG. 801: DNA324133,NM_{—}013247,gen.NM_{—}013247

[0838] FIG. 802: PRO80835

[0839] FIG. 803: DNA227528,NM_{—}021103,gen.NM_{—}021103

[0840] FIG. 804: PRO37991

[0841] FIG. 805: DNA324134,XM_{—}086920,gen.XM_{—}086920

[0842] FIG. 806: DNA150725,NM_{—}001747,gen.NM_{—}001747

[0843] FIG. 807: PRO12792

[0844] FIG. 808: DNA324135,NM_{—}005911,gen.NM_{—}005911

[0845] FIG. 809: PRO80837

[0846] FIG. 810: DNA324136,NM_{—}032827,gen.NM_{—}032827

[0847] FIG. 811: PRO80838

[0848] FIG. 812: DNA324137,NM_{—}017952,gen.NM_{—}017952

[0849] FIG. 813: PRO80839

[0850] FIG. 814: DNA227190,NM_{—}006839,gen.NM_{—}006839

[0851] FIG. 815: PRO37653

[0852] FIG. 816: DNA324138,XM_{—}114215,gen.XM_{—}114215

[0853] FIG. 817: DNA324139,XM_{—}052989,gen.XM_{—}052989

[0854] FIG. 818: DNA324140,XM_{—}049116,gen.XM_{—}049116

[0855] FIG. 819: PRO80842

[0856] FIG. 820A-B: DNA324141,XM_{—}049108,gen.XM_{—}049108

[0857] FIG. 821: PRO80843

[0858] FIG. 822: DNA324142,XM_{—}049113,gen.XM_{—}049113

[0859] FIG. 823: DNA324143,XM_{—}002611,gen.XM_{—}002611

[0860] FIG. 824A-B: DNA324144,XM_{—}114247,gen.XM_{—}114247

[0861] FIG. 825: DNA324145,NM_{—}017789,gen.NM_{—}017789

[0862] FIG. 826: PRO80846

[0863] FIG. 827: DNA324146,NM_{—}001862,gen.NM_{—}001862

[0864] FIG. 828: PRO80847

[0865] FIG. 829: DNA324147,NM_{—}005783,gen.NM_{—}005783

[0866] FIG. 830: PRO80848

[0867] FIG. 831A-B: DNA324148,XM_{—}037108,gen.XM_{—}037108

[0868] FIG. 832: DNA324149,NM_{—}000993,gen.NM_{—}000993

[0869] FIG. 833: PRO11197

[0870] FIG. 834: DNA324150,NM_{—}017546,gen.NM_{—}017546

[0871] FIG. 835: PRO80850

[0872] FIG. 836: DNA324151,NM_{—}001450,gen.NM_{—}001450

[0873] FIG. 837: PRO80851

[0874] FIG. 838: DNA324152,XM_{—}114229,gen.XM_{—}114229

[0875] FIG. 839: DNA324153,XM_{—}087122,gen.XM_{—}087122

[0876] FIG. 840: PRO80853

[0877] FIG. 841: DNA324154,XM_{—}018540,gen.XM_{—}018540

[0878] FIG. 842: DNA324155,XM_{—}087040,gen.XM_{—}087040

[0879] FIG. 843: DNA324156,NM_{—}032212,gen.NM_{—}032212

[0880] FIG. 844: PRO80856

[0881] FIG. 845: DNA324157,XM_{—}002217,gen.XM_{—}002217

[0882] FIG. 846: PRO80857

[0883] FIG. 847: DNA324158,NM_{—}000576,gen.NM_{—}000576

[0884] FIG. 848: PRO65

[0885] FIG. 849: DNA324159,XM_{—}086923,gen.XM_{—}086923

[0886] FIG. 850: DNA324160,XM_{—}086925,gen.XM_{—}086925

[0887] FIG. 851A-B: DNA324161,XM_{—}114266,gen.XM_{—}114266

[0888] FIG. 852: PRO80860

[0889] FIG. 853: DNA324162,XM_{—}002704,gen.XM_{—}002704

[0890] FIG. 854: DNAl94740,NM_{—}005291,gen.NM_{—}005291

[0891] FIG. 855: PRO24028

[0892] FIG. 856A-B: DNA324163,XM_{—}114267,gen.XM_{—}114267

[0893] FIG. 857: DNA324164,XM_{—}034952,gen.XM_{—}034952

[0894] FIG. 858: DNA324165,XM_{—}086950,gen.XM_{—}086950

[0895] FIG. 859A-B: DNA255531,NM_{—}017751,gen.NM_{—}017751

[0896] FIG. 860: PRO50596

[0897] FIG. 861: DNA324166,XM_{—}017698,gen.XM_{—}017698

[0898] FIG. 862: DNA324167,XM_{—}030529,gen.XM_{—}030529

[0899] FIG. 863: PRO80866

[0900] FIG. 864: DNA275240,NM_{—}005915,gen.NM_{—}005915

[0901] FIG. 865: PRO62927

[0902] FIG. 866: DNA324168,XM_{—}043173,gen.XM_{—}043173

[0903] FIG. 867: DNA324169,XM_{—}092489,gen.XM_{—}092489

[0904] FIG. 868: PRO80868

[0905] FIG. 869: DNA324170,XM_{—}115672,gen.XM_{—}115672

[0906] FIG. 870: PRO80869

[0907] FIG. 871: DNA324171,NM_{—}020548,gen.NM_{—}020548

[0908] FIG. 872: PRO60753

[0909] FIG. 873: DNA324172,XM_{—}037101,gen.XM_{—}037101

[0910] FIG. 874: PRO80870

[0911] FIG. 875: DNA324173,NM_{—}032390,gen.NM_{—}032390

[0912] FIG. 876: PRO80871

[0913] FIG. 877: DNA324174,XM_{—}002447,gen.XM_{—}002447

[0914] FIG. 878: DNA324175,NM_{—}033416,gen.NM_{—}033416

[0915] FIG. 879: PRO80873

[0916] FIG. 880: DNA324176,XM_{—}016288,gen.XM_{—}016288

[0917] FIG. 881: DNA272127,NM_{—}003937,gen.NM_{—}003937

[0918] FIG. 882: PRO60397

[0919] FIG. 883: DNA324177,XM_{—}030582,gen.XM_{—}030582

[0920] FIG. 884: PRO80875

[0921] FIG. 885: DNA324178,NM_{—}015702,gen.NM_{—}015702

[0922] FIG. 886: PRO80876

[0923] FIG. 887: DNA324179,NM_{—}016838,gen.NM_{—}016838

[0924] FIG. 888: PRO80877

[0925] FIG. 889: DNA324180,NM_{—}016839,gen.NM_{—}016839

[0926] FIG. 890: PRO80878

[0927] FIG. 891: DNA324181,XM_{—}087118,gen.XM_{—}087118

[0928] FIG. 892: PRO80879

[0929] FIG. 893: DNA324182,XM_{—}165998,gen.XM_{—}165998

[0930] FIG. 894: DNA324183,NM_{—}001935,gen.NM_{—}001935

[0931] FIG. 895: PRO80881

[0932] FIG. 896: DNA324184,NM_{—}020675,gen.NM_{—}020675

[0933] FIG. 897: PRO80882

[0934] FIG. 898: DNA88051,NM_{—}000079,gen.NM_{—}000079

[0935] FIG. 899: PRO2146

[0936] FIG. 900: DNA324185,XM_{—}166008,gen.XM_{—}166008

[0937] FIG. 901: DNA324186,XM_{—}087240,gen.XM_{—}087240

[0938] FIG. 902: PRO11403

[0939] FIG. 903: DNA324187,NM_{—}013341,gen.NM_{—}013341

[0940] FIG. 904: PRO80883

[0941] FIG. 905: DNA304805,NM_{—}031942,gen.NM_{—}031942

[0942] FIG. 906: PRO69531

[0943] FIG. 907: DNA324188,XM_{—}059465,gen.XM_{—}059465

[0944] FIG. 908: PRO80884

[0945] FIG. 909: DNA324189,XM_{—}015920,gen.XM_{—}015920

[0946] FIG. 910: DNA324190,XM_{—}166007,gen.XM_{—}166007

[0947] FIG. 911: DNA324191,XM_{—}015922,gen.XM_{—}015922

[0948] FIG. 912: DNA324192,XM_{—}087061,gen.XM_{—}087061

[0949] FIG. 913: PRO80888

[0950] FIG. 914: DNA324193,XM_{—}087062,gen.XM_{—}087062

[0951] FIG. 915: PRO80889

[0952] FIG. 916: DNA324194,NM_{—}001463,gen.NM_{—}001463

[0953] FIG. 917: PRO80890

[0954] FIG. 918: DNA324195,XM_{—}092158,gen.XM_{—}092158

[0955] FIG. 919: PRO80891

[0956] FIG. 920: DNA324196,XM_{—}059351,gen.XM_{—}059351

[0957] FIG. 921A-B: DNA324197,NM_{—}000090,gen.NM_{—}000090

[0958] FIG. 922: PRO2665

[0959] FIG. 923: DNA324198,NM_{—}014585,gen.NM_{—}014585

[0960] FIG. 924: PRO37675

[0961] FIG. 925: DNA324199,XM_{—}010778,gen.XM_{—}010778

[0962] FIG. 926: DNA324200,XM_{—}086961,gen.XM_{—}086961

[0963] FIG. 927: DNA324201,XM_{—}165994,gen.XM_{—}165994

[0964] FIG. 928: DNA324202,XM_{—}045170,gen.XM_{—}045170

[0965] FIG. 929: DNA324203,XM_{—}113390,gen.XM_{—}113390

[0966] FIG. 930: DNA299899,NM_{—}002157,gen.NM_{—}002157

[0967] FIG. 931: PRO62760

[0968] FIG. 932: DNA324204,XM_{—}087045,gen.XM_{—}087045

[0969] FIG. 933: DNA324205,XM_{—}086944,gen.XM_{—}086944

[0970] FIG. 934: DNA271608,NM_{—}014670,gen.NM_{—}014670

[0971] FIG. 935: PRO59895

[0972] FIG. 936: DNA324206,XM_{—}027963,gen.XM_{—}027963

[0973] FIG. 937: PRO80900

[0974] FIG. 938: DNA324207,XM_{—}010852,gen.XM_{—}010852

[0975] FIG. 939: PRO80901

[0976] FIG. 940: DNA324208,XM_{—}028034,gen.XM_{—}028034

[0977] FIG. 941: DNA324209,NM_{—}015934,gen.NM_{—}015934

[0978] FIG. 942: DNA324210,XM_{—}087028,gen.XM_{—}087028

[0979] FIG. 943: PRO80903

[0980] FIG. 944: DNA324211,XM_{—}092346,gen.XM_{—}092346

[0981] FIG. 945: PRO80904

[0982] FIG. 946: DNA324212,XM_{—}002669,gen.XM_{—}002669

[0983] FIG. 947: PRO80905

[0984] FIG. 948: DNA324213,NM_{—}021121,gen.NM_{—}021121

[0985] FIG. 949: PRO23124

[0986] FIG. 950: DNA324214,NM_{—}001959,gen.NM_{—}001959

[0987] FIG. 951: PRO23124

[0988] FIG. 952: DNA324215,XM_{—}030834,gen.XM_{—}030834

[0989] FIG. 953: PRO80906

[0990] FIG. 954A-C: DNA324216,XM_{—}055254,gen.XM_{—}055254

[0991] FIG. 955: DNA324217,NM_{—}004044,gen.NM_{—}004044

[0992] FIG. 956: PRO80908

[0993] FIG. 957: DNA324218,XM_{—}114298,gen.XM_{—}114298

[0994] FIG. 958: DNA324219,NM_{—}021141,gen.NM_{—}021141

[0995] FIG. 959: PRO59313

[0996] FIG. 960A-B: DNA324220,XM_{—}098048,gen.XM_{—}098048

[0997] FIG. 961: PRO80910

[0998] FIG. 962: DNA324221,XM_{—}098047,gen.XM_{—}098047

[0999] FIG. 963: PRO80911

[1000] FIG. 964: DNA324222,XM_{—}002636,gen.XM_{—}002636

[1001] FIG. 965: DNA324223,XM_{—}087181,gen.XM_{—}087181

[1002] FIG. 966: DNA324224,NM_{—}000998,gen.NM_{—}000998

[1003] FIG. 967: PRO10498

[1004] FIG. 968: DNA324225,XM_{—}059422,gen.XM_{—}059422

[1005] FIG. 969: PRO9984

[1006] FIG. 970: DNA324226,XM_{—}092545,gen.XM_{—}092545

[1007] FIG. 971: DNA324227,XM_{—}059461,gen.XM_{—}059461

[1008] FIG. 972: PRO80915

[1009] FIG. 973: DNA324228,NM_{—}018674,gen.NM_{—}018674

[1010] FIG. 974: PRO80916

[1011] FIG. 975: DNA324229,XM_{—}050962,gen.XM_{—}050962

[1012] FIG. 976: PRO80917

[1013] FIG. 977: DNA194827,NM_{—}012100,gen.NM_{—}012100

[1014] FIG. 978: PRO24091

[1015] FIG. 979: DNA324230,XM_{—}050638,gen.XM_{—}050638

[1016] FIG. 980A-B: DNA324231,NM_{—}002846,gen.NM_{—}002846

[1017] FIG. 981: PRO2610

[1018] FIG. 982: DNA324232,NM_{—}006000,gen.NM_{—}006000

[1019] FIG. 983: PRO26228

[1020] FIG. 984: DNA324233,XM_{—}050891,gen.XM_{—}050891

[1021] FIG. 985: DNA324234,XM_{—}087162,gen.XM_{—}087162

[1022] FIG. 986: DNA324235,XM_{—}058098,gen.XM_{—}058098

[1023] FIG. 987: PRO80920

[1024] FIG. 988: DNA324236,NM_{—}022453,gen.NM_{—}022453

[1025] FIG. 989: PRO80921

[1026] FIG. 990: DNA324237,NM_{—}032726,gen.NM_{—}032726

[1027] FIG. 991: PRO70675

[1028] FIG. 992: DNA324238,XM_{—}010866,gen.XM_{—}010866

[1029] FIG. 993: DNA324239,XM_{—}087166,gen.XM_{—}087166

[1030] FIG. 994: DNA254204,NM_{—}001087,gen.NM_{—}001087

[1031] FIG. 995: PRO49316

[1032] FIG. 996: DNA324240,NM_{—}005731,gen.NM_{—}005731

[1033] FIG. 997: PRO80924

[1034] FIG. 998: DNA189697,NM_{—}004846,gen.NM_{—}004846

[1035] FIG. 999: PRO23123

[1036] FIG. 1000: DNA324241,NM_{—}025202,gen.NM_{—}025202

[1037] FIG. 1001: PRO80925

[1038] FIG. 1002: DNA324242,XM_{—}115825,gen.XM_{—}115825

[1039] FIG. 1003: PRO80926

[1040] FIG. 1004: DNA324243,XM_{—}010858,gen.XM_{—}010858

[1041] FIG. 1005: PRO80927

[1042] FIG. 1006: DNA324244,XM_{—}002540,gen.XM_{—}002540

[1043] FIG. 1007: DNA324245,XM_{—}048690,gen.XM_{—}048690

[1044] FIG. 1008: PRO80929

[1045] FIG. 1009: DNA324246,NM_{—}030926,gen.NM_{—}030926

[1046] FIG. 1010: PRO80930

[1047] FIG. 1011: DNA324247,XM_{—}087218,gen.XM_{—}087218

[1048] FIG. 1012: DNA324248,NM_{—}004509,gen.NM_{—}004509

[1049] FIG. 1013: PRO80932

[1050] FIG. 1014: DNA324249,NM_{—}004510,gen.NM_{—}004510

[1051] FIG. 1015: PRO80933

[1052] FIG. 1016: DNA324250,NM_{—}080424,gen.NM_{—}080424

[1053] FIG. 1017: PRO80934

[1054] FIG. 1018: DNA324251,NM_{—}018410,gen.NM_{—}018410

[1055] FIG. 1019: PRO80935

[1056] FIG. 1020: DNA324252,NM_{—}017974,gen.NM_{—}017974

[1057] FIG. 1021: PRO80936

[1058] FIG. 1022A-B: DNA324253,XM_{—}096169,gen.XM_{—}096169

[1059] FIG. 1023: PRO80937

[1060] FIG. 1024: DNA150884,NM_{—}005855,gen.NM_{—}005855

[1061] FIG. 1025: PRO12520

[1062] FIG. 1026A-B: DNA324254,NM_{—}004735,gen.NM_{—}004735

[1063] FIG. 1027: PRO80938

[1064] FIG. 1028A-C: DNA324255,XM_{—}030203,gen.XM_{—}030203

[1065] FIG. 1029: DNA324256,XM_{—}059372,gen.XM_{—}059372

[1066] FIG. 1030: DNA324257,NM_{—}002712,gen.NM_{—}002712

[1067] FIG. 1031: PRO80941

[1068] FIG. 1032A-B: DNA324258,XM_{—}042326,gen.XM_{—}042326

[1069] FIG. 1033: PRO80942

[1070] FIG. 1034: DNA324259,NM_{—}004404,gen.NM_{—}004404

[1071] FIG. 1035: PRO80943

[1072] FIG. 1036: DNA324260,XM_{—}002742,gen.XM_{—}002742

[1073] FIG. 1037: DNA324261,NM_{—}138483,gen.NM_{—}138483

[1074] FIG. 1038: PRO80945

[1075] FIG. 1039: DNA324262,XM_{—}115706,gen.XM_{—}115706

[1076] FIG. 1040: DNA324263,XM_{—}115722,gen.XM_{—}115722

[1077] FIG. 1041: DNA324264,XM_{—}084141,gen.XM_{—}084141

[1078] FIG. 1042: DNA324265,XM_{—}005086,gen.XM_{—}005086

[1079] FIG. 1043: DNA324266,NM_{—}015453,gen.NM_{—}015453

[1080] FIG. 1044: PRO80949

[1081] FIG. 1045: DNA324267,NM_{—}022485,gen.NM_{—}022485

[1082] FIG. 1046: PRO80950

[1083] FIG. 1047A-B: DNA324268,XM_{—}054520,gen.XM_{—}054520

[1084] FIG. 1048: PRO80951

[1085] FIG. 1049: DNA324269,NM_{—}006354,gen.NM_{—}006354

[1086] FIG. 1050: PRO80952

[1087] FIG. 1051: DNA324270,NM_{—}133480,gen.NM_{—}133480

[1088] FIG. 1052: PRO80953

[1089] FIG. 1053: DNA324271,NM_{—}133481,gen.NM_{—}133481

[1090] FIG. 1054: PRO80954

[1091] FIG. 1055: DNA324272,NM_{—}005718,gen.NM_{—}005718

[1092] FIG. 1056: PRO80955

[1093] FIG. 1057: DNA324273,NM_{—}015644,gen.NM_{—}015644

[1094] FIG. 1058: PRO80956

[1095] FIG. 1059: DNA324274,XM_{—}059561,gen.XM_{—}059561

[1096] FIG. 1060: DNA324275,XM_{—}052310,gen.XM_{—}052310

[1097] FIG. 1061: PRO80958

[1098] FIG. 1062: DNA269910,NM_{—}006395,gen.NM_{—}006395

[1099] FIG. 1063: PRO58308

[1100] FIG. 1064: DNA324276,NM_{—}000994,gen.NM_{—}000994

[1101] FIG. 1065: PRO80959

[1102] FIG. 1066: DNA151017,NM_{—}004844,gen.NM_{—}004844

[1103] FIG. 1067: PRO12841

[1104] FIG. 1068: DNA324277,XM_{—}059557,gen.XM_{—}059557

[1105] FIG. 1069: PRO80960

[1106] FIG. 1070A-B: DNA324278,XM_{—}042860,gen.XM_{—}042860

[1107] FIG. 1071: PRO80961

[1108] FIG. 1072: DNA324279,XM_{—}042841,gen.XM_{—}042841

[1109] FIG. 1073: PRO80962

[1110] FIG. 1074: DNA324280,XM_{—}053712,gen.XM_{—}053712

[1111] FIG. 1075: DNA324281,XM_{—}087284,gen.XM_{—}087284

[1112] FIG. 1076: DNA324282,NM_{—}002948,gen.NM_{—}002948

[1113] FIG. 1077: PRO6360

[1114] FIG. 1078: DNA324283,XM_{—}053323,gen.XM_{—}053323

[1115] FIG. 1079A-B: DNA324284,NM_{—}001068,gen.NM_{—}001068

[1116] FIG. 1080: PRO80966

[1117] FIG. 1081: DNA252367,NM_{—}017801,gen.NM_{—}017801

[1118] FIG. 1082: PRO48357

[1119] FIG. 1083: DNA324285,XM_{—}093624,gen.XM_{—}093624

[1120] FIG. 1084: PRO80967

[1121] FIG. 1085: DNA324286,XM_{—}046401,gen.XM_{—}046401

[1122] FIG. 1086: DNA324287,NM_{—}022461,gen.NM_{—}022461

[1123] FIG. 1087: PRO80969

[1124] FIG. 1088: DNA324288,XM_{—}113410,gen.XM_{—}113410

[1125] FIG. 1089: DNA88100,NM_{—}000404,gen.NM_{—}000404

[1126] FIG. 1090: PRO2172

[1127] FIG. 1091: DNA324289,XM_{—}091076,gen.XM_{—}091076

[1128] FIG. 1092: PRO80970

[1129] FIG. 1093A-B: DNA271187,NM_{—}005109,gen.NM_{—}005109

[1130] FIG. 1094: PRO59504

[1131] FIG. 1095: DNA324290,NM_{—}002468,gen.NM_{—}002468

[1132] FIG. 1096: PRO36735

[1133] FIG. 1097: DNA269930,NM_{—}001607,gen.NM_{—}001607

[1134] FIG. 1098: PRO58328

[1135] FIG. 1099: DNA270401,NM_{—}003149,gen.NM_{—}003149

[1136] FIG. 1100: PRO58784

[1137] FIG. 1101: DNA324291,XM_{—}087370,gen.XM_{—}087370

[1138] FIG. 1102: PRO80971

[1139] FIG. 1103: DNA324292,XM_{—}098158,gen.XM_{—}098158

[1140] FIG. 1104: PRO80972

[1141] FIG. 1105: DNA324293,XM_{—}017364,gen.XM_{—}017364

[1142] FIG. 1106: DNA324294,XM_{—}087349,gen.XM_{—}087349

[1143] FIG. 1107: PRO80974

[1144] FIG. 1108: DNA226547,NM_{—}002295,gen.NM_{—}002295

[1145] FIG. 1109: PRO37010

[1146] FIG. 1110: DNA324295,NM_{—}003973,gen.NM_{—}003973

[1147] FIG. 1111: PRO80975

[1148] FIG. 1112: DNA324296,XM_{—}030417,gen.XM_{—}030417

[1149] FIG. 1113: DNA324297,NM_{—}020347,gen.NM_{—}020347

[1150] FIG. 1114: PRO80977

[1151] FIG. 1115: DNA324298,XM_{—}087346,gen.XM_{—}087346

[1152] FIG. 1116: PRO80978

[1153] FIG. 1117: DNA324299,XM_{—}096198,gen.XM_{—}096198

[1154] FIG. 1118: PRO80979

[1155] FIG. 1119: DNA324300,XM_{—}003222,gen.XM_{—}003222

[1156] FIG. 1120: DNA324301,XM_{—}087588,gen.XM_{—}087588

[1157] FIG. 1121: DNA324302,XM_{—}166011,gen.XM_{—}166011

[1158] FIG. 1122A-B: DNA324303,XM_{—}114364,gen.XM_{—}114364

[1159] FIG. 1123A-B: DNA324304,XM_{—}033294,gen.XM_{—}033294

[1160] FIG. 1124: PRO80983

[1161] FIG. 1125: DNA324305,NM_{—}138614,gen.NM_{—}138614

[1162] FIG. 1126: PRO80984

[1163] FIG. 1127: DNA324306,XM_{—}002899,gen.XM_{—}002899

[1164] FIG. 1128: DNA225910,NM_{—}004345,gen.NM_{—}004345

[1165] FIG. 1129: PRO36373

[1166] FIG. 1130: DNA324307,XM_{—}010953,gen.XM_{—}010953

[1167] FIG. 1131: DNA324308,XM_{—}051518,gen.XM_{—}051518

[1168] FIG. 1132A-D: DNA324309,NM_{—}001407,gen.NM_{—}001407

[1169] FIG. 1133: PRO50095

[1170] FIG. 1134: DNA324310,NM_{—}003365,gen.NM_{—}003365

[1171] FIG. 1135: PRO80988

[1172] FIG. 1136: DNA324311,XM_{—}003245,gen.XM_{—}003245

[1173] FIG. 1137: DNA324312,XM_{—}047561,gen.XM_{—}047561

[1174] FIG. 1138: PRO80990

[1175] FIG. 1139: DNA324313,XM_{—}116853,gen.XM_{—}116853

[1176] FIG. 1140A-B: DNA324314,XM_{—}113405,gen.XM_{—}113405

[1177] FIG. 1141: DNA324315,XM_{—}114323,gen.XM_{—}114323

[1178] FIG. 1142: PRO80993

[1179] FIG. 1143: DNA324316,XM_{—}002828,gen.XM_{—}002828

[1180] FIG. 1144: PRO80994

[1181] FIG. 1145: DNA150976,NM_{—}022171,gen.NM_{—}022171

[1182] FIG. 1146: PRO12565

[1183] FIG. 1147: DNA324317,XM_{—}041507,gen.XM_{—}041507

[1184] FIG. 1148: PRO71103

[1185] FIG. 1149: DNA103505,NM_{—}004636,gen.NM_{—}004636

[1186] FIG. 1150: PRO4832

[1187] FIG. 1151: DNA324318,NM_{—}006764,gen.NM_{—}006764

[1188] FIG. 1152: PRO80995

[1189] FIG. 1153: DNA150562,NM_{—}007275,gen.NM_{—}007275

[1190] FIG. 1154: PRO12779

[1191] FIG. 1155: DNA254582,NM_{—}004635,gen.NM_{—}004635

[1192] FIG. 1156: PRO49685

[1193] FIG. 1157: DNA324319,NM_{—}052859,gen.NM_{—}052859

[1194] FIG. 1158: PRO80996

[1195] FIG. 1159: DNA324320,NM_{—}001064,gen.NM_{—}001064

[1196] FIG. 1160: PRO80997

[1197] FIG. 1161: DNA324321,XM_{—}041211,gen.XM_{—}041211

[1198] FIG. 1162: DNA324322,XM_{—}003213,gen.XM_{—}003213

[1199] FIG. 1163A-C: DNA324323,XM_{—}037423,gen.XM_{—}037423

[1200] FIG. 1164: PRO80999

[1201] FIG. 1165A-B: DNA227307,NM_{—}007184,gen.NM_{—}007184

[1202] FIG. 1166: PRO37770

[1203] FIG. 1167: DNA324324,NM_{—}000688,gen.NM_{—}000688

[1204] FIG. 1168: PRO81000

[1205] FIG. 1169: DNA324325,XM_{—}067715,gen.XM_{—}067715

[1206] FIG. 1170: DNA324326,NM_{—}000992,gen.NM_{—}000992

[1207] FIG. 1171: PRO62153

[1208] FIG. 1172: DNA324327,NM_{—}000666,gen.NM_{—}000666

[1209] FIG. 1173: PRO81002

[1210] FIG. 1174: DNA324328,NM_{—}032750,gen.NM_{—}032750

[1211] FIG. 1175: PRO81003

[1212] FIG. 1176: DNA324329,NM_{—}033008,gen.NM_{—}033008

[1213] FIG. 1177: PRO81004

[1214] FIG. 1178: DNA324330,NM_{—}033010,gen.NM_{—}033010

[1215] FIG. 1179: PRO81005

[1216] FIG. 1180: DNA324331,NM_{—}020418,gen.NM_{—}020418

[1217] FIG. 1181: PRO81006

[1218] FIG. 1182: DNA273919,NM_{—}004704,gen.NM_{—}004704

[1219] FIG. 1183: PRO61870

[1220] FIG. 1184A-B: DNA324332,XM_{—}087448,gen.XM_{—}087448

[1221] FIG. 1185: PRO81007

[1222] FIG. 1186: DNA324333,XM_{—}002855,gen.XM_{—}002855

[1223] FIG. 1187: DNA324334,XM_{—}002854,gen.XM_{—}002854

[1224] FIG. 1188: DNA0,NM_{—}002854,gen.NM_{—}002854

[1225] FIG. 1189: PRO

[1226] FIG. 1190: DNA324335,XM_{—}096195,gen.XM_{—}096195

[1227] FIG. 1191: PRO81010

[1228] FIG. 1192: DNA324336,XM_{—}166015,gen.XM_{—}166015

[1229] FIG. 1193: DNA324337,XM_{—}113395,gen.XM_{—}113395

[1230] FIG. 1194: PRO81012

[1231] FIG. 1195: DNA269730,NM_{—}014814,gen.NM_{—}014814

[1232] FIG. 1196: PRO58140

[1233] FIG. 1197: DNA324338,XM_{—}036938,gen.XM_{—}036938

[1234] FIG. 1198: DNA324339,XM_{—}029369,gen.XM_{—}029369

[1235] FIG. 1199: DNA324340,XM_{—}076414,gen.XM_{—}076414

[1236] FIG. 1200: PRO81015

[1237] FIG. 1201: DNA324341,XM_{—}093546,gen.XM_{—}093546

[1238] FIG. 1202: DNA324342,XM_{—}113409,gen.XM_{—}113409

[1239] FIG. 1203: DNA324343,XM_{—}087268,gen.XM_{—}087268

[1240] FIG. 1204: DNA324344,XM_{—}116071,gen.XM_{—}116071

[1241] FIG. 1205: DNA324345,XM_{—}116072,gen.XM_{—}116072

[1242] FIG. 1206: DNA324346,NM_{—}000986,gen.NM_{—}000986

[1243] FIG. 1207: PRO10602

[1244] FIG. 1208: DNA324347,XM_{—}015462,gen.XM_{—}015462

[1245] FIG. 1209: DNA324348,XM_{—}167366,gen.XM_{—}167366

[1246] FIG. 1210: PRO81022

[1247] FIG. 1211: DNA324349,XM_{—}087331,gen.XM_{—}087331

[1248] FIG. 1212: PRO81023

[1249] FIG. 1213: DNA324350,XM_{—}039952,gen.XM_{—}039952

[1250] FIG. 1214: DNA324351,XM_{—}045290,gen.XM_{—}045290

[1251] FIG. 1215: PRO81025

[1252] FIG. 1216A-B: DNA324352,NM_{—}007085,gen.NM_{—}007085

[1253] FIG. 1217: PRO2077

[1254] FIG. 1218: DNA324353,NM_{—}004547,gen.NM_{—}004547

[1255] FIG. 1219: PRO81026

[1256] FIG. 1220: DNA324354,XM_{—}027161,gen.XM_{—}027161

[1257] FIG. 1221A-B: DNA324355,XM_{—}032269,gen.XM_{—}032269

[1258] FIG. 1222: PRO81028

[1259] FIG. 1223: DNA88547,NM_{—}006810,gen.NM_{—}006810

[1260] FIG. 1224: PRO2837

[1261] FIG. 1225: DNA324356,XM_{—}114301,gen.XM_{—}114301

[1262] FIG. 1226: PRO81029

[1263] FIG. 1227: DNA324357,XM_{—}098173,gen.XM_{—}098173

[1264] FIG. 1228: PRO81030

[1265] FIG. 1229: DNA324358,XM_{—}042618,gen.XM_{—}042618

[1266] FIG. 1230: PRO81031

[1267] FIG. 1231: DNA324359,XM_{—}084129,gen.XM_{—}084129

[1268] FIG. 1232: DNA324360,XM_{—}098154,gen.XM_{—}098154

[1269] FIG. 1233: PRO81033

[1270] FIG. 1234: D05524361,XM_{—}050552,gen.XM_{—}050552

[1271] FIG. 1235: DNA324362,NM_{—}032343,gen.NM_{—}032343

[1272] FIG. 1236: PRO81034

[1273] FIG. 1237: DNA324363,XM_{—}051264,gen.XM_{—}051264

[1274] FIG. 1238A-B: DNA324364,NM_{—}013336,gen.NM_{—}013336

[1275] FIG. 1239: PR01314

[1276] FIG. 1240: DNA324365,XM_{—}067264,gen.XM_{—}067264

[1277] FIG. 1241: PRO81036

[1278] FIG. 1242: DNA324366,XM_{—}114309,gen.XM_{—}114309

[1279] FIG. 1243: DNA324367,XM_{—}084111,gen.XM_{—}084111

[1280] FIG. 1244: DNA324368,XM_{—}113397,gen.XM_{—}113397

[1281] FIG. 1245: DNA324369,XM_{—}098111,gen.XM_{—}098111

[1282] FIG. 1246: DNA324370,NM_{—}004637,gen.NM_{—}004637

[1283] FIG. 1247: PRO81040

[1284] FIG. 1248: DNA324371,NM_{—}020701,gen.NM_{—}020701

[1285] FIG. 1249: PRO81041

[1286] FIG. 1250: DNA324372,NM_{—}003418,gen.NM_{—}003418

[1287] FIG. 1251: PRO81042

[1288] FIG. 1252: DNA324373,XM_{—}059583,gen.XM_{—}059583

[1289] FIG. 1253: PRO81043

[1290] FIG. 1254: DNA324374,XM_{—}113417,gen.XM_{—}113417

[1291] FIG. 1255: DNA324375,XM_{—}093487,gen.XM_{—}093487

[1292] FIG. 1256A-B: DNA324376,XM_{—}030812,gen.XM_{—}030812

[1293] FIG. 1257: PRO58177

[1294] FIG. 1258A-B: DNA324377,XM_{—}039805,gen.XM_{—}039805

[1295] FIG. 1259: PRO81046

[1296] FIG. 1260: DNA324378,NM_{—}000532,gen.NM_{—}000532

[1297] FIG. 1261: PRO81047

[1298] FIG. 1262: DNA324379,XM_{—}036118,gen.XM_{—}036118

[1299] FIG. 1263: DNA324380,XM_{—}084123,gen.XM_{—}084123

[1300] FIG. 1264: DNA324381,XM_{—}018149,gen.XM_{—}018149

[1301] FIG. 1265: DNA324382,XM_{—}087342,gen.XM_{—}087342

[1302] FIG. 1266: DNA324383,XM_{—}059516,gen.XM_{—}059516

[1303] FIG. 1267: DNA324384,XM_{—}087341,gen.XM_{—}087341

[1304] FIG. 1268: DNA324385,XM_{—}165451,gen.XM_{—}165451

[1305] FIG. 1269: PRO81053

[1306] FIG. 1270: DNA269858,NM_{—}004766,gen.NM_{—}004766

[1307] FIG. 1271: PRO58259

[1308] FIG. 1272: DNA324386,NM_{—}030921,gen.NM_{—}030921

[1309] FIG. 1273: PRO51109

[1310] FIG. 1274: DNA324387,XM_{—}002859,gen.XM_{—}002859

[1311] FIG. 1275: DNA324388,XM_{—}166014,gen.XM_{—}166014

[1312] FIG. 1276: DNA324389,NM_{—}013363,gen.NM_{—}013363

[1313] FIG. 1277: PRO287

[1314] FIG. 1278: DNA324390,XM_{—}058267,gen.XM_{—}058267

[1315] FIG. 1279: PRO81056

[1316] FIG. 1280A-B: DNA324391,NM_{—}032383,gen.NM_{—}032383

[1317] FIG. 1281: PRO81057

[1318] FIG. 1282: DNA324392,NM_{—}015472,gen.NM_{—}015472

[1319] FIG. 1283: PRO81058

[1320] FIG. 1284: DNA324393,NM_{—}014445,gen.NM_{—}014445

[1321] FIG. 1285: PRO11048

[1322] FIG. 1286: DNA324394,XM_{—}042168,gen.XM_{—}042168

[1323] FIG. 1287: PRO81059

[1324] FIG. 1288A-B: DNA324395,XM_{—}114356,gen.XM_{—}114356

[1325] FIG. 1289: DNA324396,XM_{—}105236,gen.XM_{—}105236

[1326] FIG. 1290: DNA324397,XM_{—}010978,gen.XM_{—}010978

[1327] FIG. 1291: DNA324398,XM_{—}017356,gen.XM_{—}017356

[1328] FIG. 1292A-B: DNA324399,XM_{—}039796,gen.XM_{—}39796

[1329] FIG. 1293: PRO81064

[1330] FIG. 1294: DNA324400,XM_{—}016334,gen.XM_{—}016334

[1331] FIG. 1295: DNA324401,XM_{—}116058,gen.XM_{—}116058

[1332] FIG. 1296: DNA324402,XM_{—}113408,gen.XM_{—}113408

[1333] FIG. 1297: DNA324403,NM_{—}002492,gen.NM_{—}002492

[1334] FIG. 1298: PRO81068

[1335] FIG. 1299: DNA324404,XM_{—}037381,gen.XM_{—}037381

[1336] FIG. 1300: DNA324405,XM_{—}037377,gen.XM_{—}037377

[1337] FIG. 1301: PRO69681

[1338] FIG. 1302A-B: DNA324406,XM_{—}087254,gen.XM_{—}087254

[1339] FIG. 1303: PRO81070

[1340] FIG. 1304: DNA324407,XM_{—}037600,gen.XM_{—}037600

[1341] FIG. 1305: PRO81071

[1342] FIG. 1306: DNA324408,NM_{—}018023,gen.NM_{—}018023

[1343] FIG. 1307: PRO81072

[1344] FIG. 1308: DNA324409,XM_{—}093423,gen.XM_{—}093423

[1345] FIG. 1309: PRO81073

[1346] FIG. 1310: DNA324410,XM_{—}029136,gen.XM_{—}029136

[1347] FIG. 1311: PRO81074

[1348] FIG. 1312: DNA324411,XM_{—}087322,gen.XM_{—}087322

[1349] FIG. 1313A-B: DNA324412,XM_{—}029132,gen.XM_{—}029132

[1350] FIG. 1314A-B: DNA324413,XM_{—}029104,gen.XM_{—}029104

[1351] FIG. 1315: DNA324414,XM_{—}084120,gen.XM_{—}084120

[1352] FIG. 1316: DNA254620,NM_{—}005787,gen.NM_{—}005787

[1353] FIG. 1317: PRO49722

[1354] FIG. 1318: DNA324415,NM_{—}032331,gen.NM_{—}032331

[1355] FIG. 1319: PRO81079

[1356] FIG. 1320: DNA324416,XM_{—}011074,gen.XM_{—}011074

[1357] FIG. 1321: PRO81080

[1358] FIG. 1322: DNA324417,XM_{—}087295,gen.XM_{—}087295

[1359] FIG. 1323: DNA324418,XM_{—}087289,gen.XM_{—}087289

[1360] FIG. 1324: PRO81082

[1361] FIG. 1325: DNA324419,XM_{—}105658,gen.XM_{—}105658

[1362] FIG. 1326: PRO81083

[1363] FIG. 1327: DNA89239,NM_{—}000893,gen.NM_{—}000893

[1364] FIG. 1328: PRO2906

[1365] FIG. 1329: DNA324420,XM_{—}113422,gen.XM_{—}113422

[1366] FIG. 1330: DNA225592,NM_{—}001622,gen.NM_{—}001622

[1367] FIG. 1331: PRO36055

[1368] FIG. 1332: DNA324421,XM_{—}005180,gen.XM_{—}005180

[1369] FIG. 1333: DNA324422,XM_{—}087392,gen.XM_{—}087392

[1370] FIG. 1334: PRO81086

[1371] FIG. 1335A-B: DNA272605,NM_{—}003722,gen.NM_{—}003722

[1372] FIG. 1336: PRO60741

[1373] FIG. 1337: DNA324423,XM_{—}117311,gen.XM_{—}117311

[1374] FIG. 1338: DNA324424,XM_{—}116034,gen.XM_{—}116034

[1375] FIG. 1339: PRO81088

[1376] FIG. 1340A-B: DNA324425,XM_{—}084110,gen.XM_{—}084110

[1377] FIG. 1341: DNA324426,XM_{—}038243,gen.XM_{—}038243

[1378] FIG. 1342: PRO81090

[1379] FIG. 1343: DNA324427,XM_{—}087359,gen.XM_{—}087359

[1380] FIG. 1344: DNA324428,XM_{—}114328,gen.XM_{—}114328

[1381] FIG. 1345: DNA324429,XM_{—}098109,gen.XM_{—}098109

[1382] FIG. 1346: PRO81093

[1383] FIG. 1347: DNA324430,XM_{—}087410,gen.XM_{—}087410

[1384] FIG. 1348: DNA324431,NM_{—}033316,gen.NM_{—}033316

[1385] FIG. 1349: PRO81095

[1386] FIG. 1350: DNA324432,XM_{—}166017,gen.XM_{—}166017

[1387] FIG. 1351: PRO81096

[1388] FIG. 1352: DNA79129,NM_{—}001647,gen.NM_{—}001647

[1389] FIG. 1353: PRO2551

[1390] FIG. 1354: DNA324433,NM_{—}032288,gen.NM_{—}032288

[1391] FIG. 1355: PRO81097

[1392] FIG. 1356: DNA324434,XM_{—}086228,gen.XM_{—}086228

[1393] FIG. 1357: PRO81098

[1394] FIG. 1358: DNA324435,XM_{—}087278,gen.XM_{—}087278

[1395] FIG. 1359: DNA324436,XM_{—}018523,gen.XM_{—}018523

[1396] FIG. 1360: DNA324437,XM_{—}087297,gen.XM_{—}087297

[1397] FIG. 1361: DNA324438,XM_{—}002255,gen.XM_{—}002255

[1398] FIG. 1362: PRO81102

[1399] FIG. 1363: DNA324439,XM_{—}053122,gen.XM_{—}053122

[1400] FIG. 1364: DNA324440,XM_{—}042695,gen.XM_{—}042695

[1401] FIG. 1365: DNA324441,XM_{—}011160,gen.XM_{—}011160

[1402] FIG. 1366: DNA324442,NM_{—}007100,gen.NM_{—}007100

[1403] FIG. 1367: PRO81106

[1404] FIG. 1368: DNA139747,NM_{—}002477,gen.NM_{—}002477

[1405] FIG. 1369: PRO9785

[1406] FIG. 1370: DNA253804,NM_{—}032219,gen.NM_{—}032219

[1407] FIG. 1371: PRO49209

[1408] FIG. 1372: DNA324443,NM_{—}138385,gen.NM_{—}138385

[1409] FIG. 1373: PRO81107

[1410] FIG. 1374: DNA324444,NM_{—}006342,gen.NM_{—}006342

[1411] FIG. 1375: PRO81108

[1412] FIG. 1376A-C: DNA324445,NM_{—}133330,gen.NM_{—}133330

[1413] FIG. 1377: PRO81109

[1414] FIG. 1378A-C: DNA324446,NM_{—}014919,gen.NM_{—}014919

[1415] FIG. 1379: PRO81110

[1416] FIG. 1380A-C: DNA324447,NM_{—}133332,gen.NM_{—}133332

[1417] FIG. 1381: PRO81111

[1418] FIG. 1382: DNA324448,NM_{—}005663,gen.NM_{—}005663

[1419] FIG. 1383: PRO81112

[1420] FIG. 1384A-B: DNA324449,XM_{—}098248,gen.XM_{—}098248

[1421] FIG. 1385: PRO81113

[1422] FIG. 1386: DNA270615,NM_{—}002938,gen.NM_{—}002938

[1423] FIG. 1387: PRO58986

[1424] FIG. 1388A-B: DNA324450,NM_{—}014190,gen.NM_{—}014190

[1425] FIG. 1389: PRO81114

[1426] FIG. 1390A-B: DNA324451,NM_{—}014189,gen.NM_{—}014189

[1427] FIG. 1391: PRO81115

[1428] FIG. 1392: DNA324452,XM_{—}035572,gen.XM_{—}035572

[1429] FIG. 1393: PRO81116

[1430] FIG. 1394A-B: DNA324453,NM_{—}014556,gen.NM_{—}014556

[1431] FIG. 1395: PRO81117

[1432] FIG. 1396: DNA324454,NM_{—}001313,gen.NM_{—}001313

[1433] FIG. 1397: PRO60542

[1434] FIG. 1398A-B: DNA324455,XM_{—}052626,gen.XM_{—}052626

[1435] FIG. 1399: PRO81118

[1436] FIG. 1400: DNA324456,NM_{—}016930,gen.NM_{—}016930

[1437] FIG. 1401: PRO81119

[1438] FIG. 1402: DNA324457,XM_{—}035824,gen.XM_{—}035824

[1439] FIG. 1403: PRO81120

[1440] FIG. 1404: DNA324458,NM_{—}033296,gen.NM_{—}033296

[1441] FIG. 1405: PRO81121

[1442] FIG. 1406: DNA324459,NM_{—}138699,gen.NM_{—}138699

[1443] FIG. 1407: PRO81122

[1444] FIG. 1408: DNA324460,XM_{—}116285,gen.XM_{—}116285

[1445] FIG. 1409: PRO81123

[1446] FIG. 1410: DNA324461,XM_{—}041221,gen.XM_{—}041221

[1447] FIG. 1411: PRO81124

[1448] FIG. 1412: DNA324462,XM_{—}117351,gen.XM_{—}117351

[1449] FIG. 1413: DNA324463,XM_{—}039165,gen.XM_{—}039165

[1450] FIG. 1414: DNA324464,NM_{—}025205,gen.NM_{—}025205

[1451] FIG. 1415: PRO81127

[1452] FIG. 1416: DNA324465,XM_{—}039173,gen.XM_{—}039173

[1453] FIG. 1417: DNA324466,XM_{—}039176,gen.XM_{—}039176

[1454] FIG. 1418: DNA324467,XM_{—}087583,gen.XM_{—}087583

[1455] FIG. 1419: DNA324468,NM_{—}017491,gen.NM_{—}017491

[1456] FIG. 1420: PRO12077

[1457] FIG. 1421: DNA324469,NM_{—}005112,gen.NM_{—}005112

[1458] FIG. 1422: PRO81131

[1459] FIG. 1423: DNA324470,XM_{—}011129,gen.XM_{—}011129

[1460] FIG. 1424A-B: DNA324471,XM_{—}052530,gen.XM_{—}052530

[1461] FIG. 1425: DNA324472,NM_{—}000661,gen.NM_{—}000661

[1462] FIG. 1426: PRO81134

[1463] FIG. 1427A-B: DNA324473,NM_{—}002913,gen.NM_{—}002913

[1464] FIG. 1428: PRO81135

[1465] FIG. 1429A-B: DNA324474,XM_{—}047477,gen.XM_{—}047477

[1466] FIG. 1430: DNA324475,NM_{—}004181,gen.NM_{—}004181

[1467] FIG. 1431: PRO81137

[1468] FIG. 1432: DNA324476,XM_{—}003435,gen.XM_{—}003435

[1469] FIG. 1433: DNA324478,XM_{—}010941,gen.XM_{—}010941

[1470] FIG. 1434: DNA324479,XM_{—}059593,gen.XM_{—}059593

[1471] FIG. 1435: DNA324480,NM_{—}001553,gen.NM_{—}001553

[1472] FIG. 1436: PRO81141

[1473] FIG. 1437: DNA257511,NM_{—}032313,gen.NM_{—}032313

[1474] FIG. 1438: PRO52083

[1475] FIG. 1439: DNA324481,XM_{—}071623,gen.XM_{—}071623

[1476] FIG. 1440A-B: DNA324482,XM_{—}036002,gen.XM_{—}036002

[1477] FIG. 1441: DNA324483,XM_{—}058927,gen.XM_{—}058927

[1478] FIG. 1442: DNA324484,XM_{—}059628,gen.XM_{—}059628

[1479] FIG. 1443: DNA324485,XM_{—}046057,gen.XM_{—}046057

[1480] FIG. 1444: PRO81146

[1481] FIG. 1445: DNA324486,XM_{—}031320,gen.XM_{—}031320

[1482] FIG. 1446: DNA225919,NM_{—}001134,gen.NM_{—}001134

[1483] FIG. 1447: PRO36382

[1484] FIG. 1448A-B: DNA324487,XM_{—}03511,gen.XM_{—}003511

[1485] FIG. 1449: DNA324488,NM_{—}006835,gen.NM_{—}006835

[1486] FIG. 1450: PRO4605

[1487] FIG. 1451: DNA324489,XM_{—}003305,gen.XM_{—}003305

[1488] FIG. 1452: DNA324490,XM_{—}113425,gen.XM_{—}113425

[1489] FIG. 1453: DNA324491,XM_{—}001389,gen.XM_{—}001389

[1490] FIG. 1454: PRO81148

[1491] FIG. 1455: DNA324492,XM_{—}087527,gen.XM_{—}087527

[1492] FIG. 1456: DNA324493,XM_{—}035986,gen.XM_{—}035986

[1493] FIG. 1457A-B: DNA324494,NM_{—}014933,gen.NM_{—}014933

[1494] FIG. 1458: PRO81150

[1495] FIG. 1459: DNA290585,NM_{—}000582,gen.NM_{—}000582

[1496] FIG. 1460: PRO70536

[1497] FIG. 1461: DNA324495,XM_{—}055551,gen.XM_{—}055551

[1498] FIG. 1462: PRO81151

[1499] FIG. 1463: DNA324496,XM_{—}087498,gen.XM_{—}087498

[1500] FIG. 1464: DNA324497,XM_{—}096203,gen.XM_{—}096203

[1501] FIG. 1465: DNA324498,XM_{—}084158,gen.XM_{—}084158

[1502] FIG. 1466: DNA324499,XM_{—}034710,gen.XM_{—}034710

[1503] FIG. 1467: PRO81156

[1504] FIG. 1468: DNA324500,XM_{—}034713,gen.XM_{—}034713

[1505] FIG. 1469: DNA324501,XM_{—}059633,gen.XM_{—}059633

[1506] FIG. 1470: DNA324502,XM_{—}114426,gen.XM_{—}114426

[1507] FIG. 1471: DNA324503,XM_{—}056957,gen.XM_{—}056957

[1508] FIG. 1472: DNA324504,XM_{—}088472,gen.XM_{—}088472

[1509] FIG. 1473: DNA324505,XM_{—}114424,gen.XM_{—}114424

[1510] FIG. 1474A-B: DNA324506,XM_{—}042301,gen.XM_{—}042301

[1511] FIG. 1475: PRO81163

[1512] FIG. 1476: DNA324507,XM_{—}017925,gen.XM_{—}017925

[1513] FIG. 1477: DNA324508,XM_{—}052336,gen.XM_{—}052336

[1514] FIG. 1478: DNA324509,NM_{—}002106,gen.NM_{—}002106

[1515] FIG. 1479: PRO10297

[1516] FIG. 1480: DNA324510,XM_{—}085068,gen.XM_{—}085068

[1517] FIG. 1481: PRO81166

[1518] FIG. 1482: DNA324511,XM_{—}165473,gen.XM_{—}165473

[1519] FIG. 1483: DNA324512,XM_{—}087514,gen.XM_{—}087514

[1520] FIG. 1484: DNA324513,XM_{—}116247,gen.XM_{—}116247

[1521] FIG. 1485: DNA324514,NM_{—}002358,gen.NM_{—}002358

[1522] FIG. 1486: PRO81169

[1523] FIG. 1487: DNA324515,XM_{—}050200,gen.XM_{—}050200

[1524] FIG. 1488: PRO81170

[1525] FIG. 1489: DNA225584,NM_{—}001154,gen.NM_{—}001154

[1526] FIG. 1490: PRO36047

[1527] FIG. 1491: DNA324516,NM_{—}024900,gen.NM_{—}024900

[1528] FIG. 1492: PRO81171

[1529] FIG. 1493: DNA324517,XM_{—}040752,gen.XM_{—}040752

[1530] FIG. 1494: DNA324518,NM_{—}002413,gen.NM_{—}002413

[1531] FIG. 1495: PRO60956

[1532] FIG. 1496: DNA324519,XM_{—}114401,gen.XM_{—}114401

[1533] FIG. 1497: DNA324520,XM_{—}068164,gen.XM_{—}068164

[1534] FIG. 1498: PRO81174

[1535] FIG. 1499: DNA324521,XM_{—}060067,gen.XM_{—}060067

[1536] FIG. 1500: DNA324522,XM_{—}003555,gen.XM_{—}003555

[1537] FIG. 1501: PRO81176

[1538] FIG. 1502: DNA324523,XM_{—}034321,gen.XM_{—}034321

[1539] FIG. 1503: PRO81177

[1540] FIG. 1504: DNA324524,NM_{—}006439,gen.NM_{—}006439

[1541] FIG. 1505: PRO81178

[1542] FIG. 1506: DNA324525,NM_{—}001006,gen.NM_{—}001006

[1543] FIG. 1507: PRO81179

[1544] FIG. 1508: DNA227575,NM_{—}005141,gen.NM_{—}005141

[1545] FIG. 1509: PRO38038

[1546] FIG. 1510: DNA324526,XM_{—}114368,gen.XM_{—}114368

[1547] FIG. 1511A-B: DNA225920,NM_{—}000508,gen.NM_{—}000508

[1548] FIG. 1512: PRO36383

[1549] FIG. 1513: DNA324527,NM_{—}021871,gen.NM_{—}021871

[1550] FIG. 1514: PRO81181

[1551] FIG. 1515: DNA225921,NM_{—}000509,gen.NM_{—}000509

[1552] FIG. 1516: PRO36384

[1553] FIG. 1517: DNA324528,NM_{—}021870,gen.NM_{—}021870

[1554] FIG. 1518: PRO81182

[1555] FIG. 1519: DNA324529,XM_{—}059623,gen.XM_{—}059623

[1556] FIG. 1520: DNA324530,XM_{—}106246,gen.XM_{—}106246

[1557] FIG. 1521: PRO81184

[1558] FIG. 1522: DNA324531,NM_{—}002129,gen.NM_{—}002129

[1559] FIG. 1523: PRO81185

[1560] FIG. 1524: DNA324532,XM_{—}040321,gen.XM_{—}040321

[1561] FIG. 1525: DNA324533,XM_{—}015563,gen.XM_{—}015563

[1562] FIG. 1526: DNA324534,NM_{—}024748,gen.NM_{—}024748

[1563] FIG. 1527: PRO81188

[1564] FIG. 1528: DNA324535,XM_{—}165470,gen.XM_{—}165470

[1565] FIG. 1529: PRO81189

[1566] FIG. 1530A-E: DNA324536,XM_{—}003477,gen.XM_{—}003477

[1567] FIG. 1531: DNA324537,XM_{—}165465,gen.XM_{—}165465

[1568] FIG. 1532: DNA324538,XM_{—}116204,gen.XM_{—}116204

[1569] FIG. 1533: DNA324539,XM_{—}116205,gen.XM_{—}116205

[1570] FIG. 1534: DNA324540,XM_{—}098405,gen.XM_{—}098405

[1571] FIG. 1535: DNA324541,XM_{—}052313,gen.XM_{—}052313

[1572] FIG. 1536: PRO81195

[1573] FIG. 1537: DNA324542,XM_{—}087659,gen.XM_{—}087659

[1574] FIG. 1538: PRO81196

[1575] FIG. 1539: DNA324543,XM_{—}029096,gen.XM_{—}029096

[1576] FIG. 1540: DNA324544,XM_{—}003825,gen.XM_{—}003825

[1577] FIG. 1541: DNA324545,XM_{—}057994,gen.XM_{—}057994

[1578] FIG. 1542: PRO81199

[1579] FIG. 1543: DNA324546,XM_{—}087686,gen.XM_{—}087686

[1580] FIG. 1544: DNA324547,XM_{—}017641,gen.XM_{—}017641

[1581] FIG. 1545: DNA324548,NM_{—}030782,gen.NM_{—}030782

[1582] FIG. 1546: PRO81202

[1583] FIG. 1547: DNA324549,XM_{—}084168,gen.XM_{—}084168

[1584] FIG. 1548: DNA324550,XM_{—}057492,gen.XM_{—}057492

[1585] FIG. 1549: DNA324551,XM_{—}087597,gen.XM_{—}087597

[1586] FIG. 1550: DNA324552,XM_{—}087601,gen.XM_{—}087601

[1587] FIG. 1551: DNA324554,XM_{—}087599,gen.XM_{—}087599

[1588] FIG. 1552: DNA324555,XM_{—}114435,gen.XM_{—}114435

[1589] FIG. 1553: DNA324556,XM_{—}087600,gen.XM_{—}087600

[1590] FIG. 1554: DNA324557,XM_{—}016170,gen.XM_{—}016170

[1591] FIG. 1555: DNA324558,XM_{—}114434,gen.XM_{—}114434

[1592] FIG. 1556: DNA324559,XM_{—}113452,gen.XM_{—}113452

[1593] FIG. 1557: DNA324560,XM_{—}071580,gen.XM_{—}071580

[1594] FIG. 1558: PRO81213

[1595] FIG. 1559: DNA324561,XM_{—}087713,gen.XM_{—}087713

[1596] FIG. 1560: PRO81214

[1597] FIG. 1561: DNA324562,XM_{—}094440,gen.XM_{—}094440

[1598] FIG. 1562: DNA324563,XM_{—}106739,gen.XM_{—}106739

[1599] FIG. 1563: PRO81216

[1600] FIG. 1564: DNA324564,XM_{—}087614,gen.XM_{—}087614

[1601] FIG. 1565: DNA324565,XM_{—}004009,gen.XM_{—}004009

[1602] FIG. 1566: PRO81219

[1603] FIG. 1567: DNA324566,XM_{—}114437,gen.XM_{—}114437

[1604] FIG. 1568: DNA324567,XM_{—}043771,gen.XM_{—}043771

[1605] FIG. 1569: PRO81221

[1606] FIG. 1570: DNA324568,NM_{—}000997,gen.NM_{—}000997

[1607] FIG. 1571: PRO11077

[1608] FIG. 1572: DNA324569,XM_{—}003869,gen.XM_{—}003869

[1609] FIG. 1573: DNA227173,NM_{—}001465,gen.NM_{—}001465

[1610] FIG. 1574: PRO37636

[1611] FIG. 1575: DNA324570,NM_{—}018034,gen.NM_{—}018034

[1612] FIG. 1576: PRO81223

[1613] FIG. 1577: DNA324571,NM_{—}032637,gen.NM_{—}032637

[1614] FIG. 1578: PRO81224

[1615] FIG. 1579: DNA324572,NM_{—}005983,gen.NM_{—}005983

[1616] FIG. 1580: PRO81225

[1617] FIG. 1581A-B: DNA324573,XM_{—}003896,gen.XM_{—}003896

[1618] FIG. 1582: DNA287282,NM_{—}002130,gen.NM_{—}002130

[1619] FIG. 1583: PRO69554

[1620] FIG. 1584: DNA324574,XM_{—}114442,gen.XM_{—}114442

[1621] FIG. 1585: PRO81227

[1622] FIG. 1586: DNA324575,XM_{—}114439,gen.XM_{—}114439

[1623] FIG. 1587: DNA324576,XM_{—}114440,gen.XM_{—}114440

[1624] FIG. 1588A-B: DNA324577,XM_{—}032902,gen.XM_{—}032902

[1625] FIG. 1589: PRO81230

[1626] FIG. 1590: DNA324578,XM_{—}032895,gen.XM_{—}032895

[1627] FIG. 1591: DNA324579,XM_{—}084179,gen.XM_{—}084179

[1628] FIG. 1592: DNA324580,XM_{—}041712,gen.XM_{—}041712

[1629] FIG. 1593: DNA324581,XM_{—}116439,gen.XM_{—}116439

[1630] FIG. 1594: PRO81234

[1631] FIG. 1595: DNA324582,XM_{—}087611,gen.XM_{—}087611

[1632] FIG. 1596: DNA324583,XM_{—}059653,gen.XM_{—}059653

[1633] FIG. 1597: DNA324584,XM_{—}087610,gen.XM_{—}087610

[1634] FIG. 1598: DNA288259,NM_{—}031966,gen.NM_{—}031966

[1635] FIG. 1599: PRO4676

[1636] FIG. 1600: DNA324585,XM_{—}042025,gen.XM_{—}042025

[1637] FIG. 1601: PRO81238

[1638] FIG. 1602: DNA324586,NM_{—}005713,gen.NM_{—}005713

[1639] FIG. 1603: PRO81239

[1640] FIG. 1604: DNA324587,XM_{—}059709,gen.XM_{—}059709

[1641] FIG. 1605: PRO81240

[1642] FIG. 1606: DNA324588,XM_{—}116447,gen.XM_{—}116447

[1643] FIG. 1607: PRO81241

[1644] FIG. 1608: DNA324589,XM_{—}037260,gen.XM_{—}037260

[1645] FIG. 1609: DNA324590,XM_{—}098351,gen.XM_{—}098351

[1646] FIG. 1610: DNA324591,XM_{—}098354,gen.XM_{—}098354

[1647] FIG. 1611: DNA324592,XM_{—}098352,gen.XM_{—}098352

[1648] FIG. 1612: DNA324593,XM_{—}166037,gen.XM_{—}166037

[1649] FIG. 1613: PRO81246

[1650] FIG. 1614: DNA324594,XM_{—}041694,gen.XM_{—}041694

[1651] FIG. 1615: DNA324595,XM_{—}165488,gen.XM_{—}165488

[1652] FIG. 1616: PRO81248

[1653] FIG. 1617: DNA324596,XM_{—}059669,gen.XM_{—}059669

[1654] FIG. 1618: PRO81249

[1655] FIG. 1619: DNA324597,XM_{—}027964,gen.XM_{—}027964

[1656] FIG. 1620: PRO81250

[1657] FIG. 1621: DNA324598,XM_{—}088020,gen.XM_{—}088020

[1658] FIG. 1622: DNA324599,XM_{—}117387,gen.XM_{—}117387

[1659] FIG. 1623: DNA324600,XM_{—}114469,gen.XM_{—}114469

[1660] FIG. 1624: DNA324601,NM_{—}001207,gen.NM_{—}001207

[1661] FIG. 1625: PRO22771

[1662] FIG. 1626A-B: DNA324602,XM_{—}032553,gen.XM_{—}032553

[1663] FIG. 1627: DNA254147,NM_{—}000521,gen.NM_{—}000521

[1664] FIG. 1628: PRO49262

[1665] FIG. 1629: DNA324603,NM_{—}031482,gen.NM_{—}031482

[1666] FIG. 1630: PRO81254

[1667] FIG. 1631: DNA324604,XM_{—}087790,gen.XM_{—}087790

[1668] FIG. 1666: DNA324622,XM_{—}003830,gen.XM_{—}003830

[1669] FIG. 1632: DNA324605,NM_{—}001025,gen.NM_{—}001025

[1670] FIG. 1667: PRO81269

[1671] FIG. 1668: DNA324623,XM_{—}037002,gen.XM_{—}037002

[1672] FIG. 1633: PRO10685

[1673] FIG. 1634: DNA324606,XM_{—}098362,gen.XM_{—}098362

[1674] FIG. 1669: DNA324624,XM_{—}166026,gen.XM_{—}166026

[1675] FIG. 1635: PRO81256

[1676] FIG. 1670: DNA324625,XM_{—}041059,gen.XM_{—}041059

[1677] FIG. 1636: DNA324607,NM_{—}003401,gen.NM_{—}003401

[1678] FIG. 1671: DNA83020,NM_{—}000358,gen.NM_{—}000358

[1679] FIG. 1637: PRO70327

[1680] FIG. 1638: DNA290231,NM_{—}022550,gen.NM_{—}022550

[1681] FIG. 1672: PRO2561

[1682] FIG. 1673: DNA324626,NM_{—}003687,gen NM_{—}003687

[1683] FIG. 1639: PRO70327

[1684] FIG. 1640: DNA324608,XM_{—}017857,gen.XM_{—}017857

[1685] FIG. 1674: PRO81272

[1686] FIG. 1675: DNA324627,XM_{—}034862,gen.XM_{—}034862

[1687] FIG. 1641: DNA324609,XM_{—}117398,gen.XM_{—}117398

[1688] FIG. 1676: PRO34544

[1689] FIG. 1642A-B: DNA257253,NM_{—}032280,gen.NM_{—}032280

[1690] FIG. 1677: DNA103380,NM_{—}003374,gen.NM_{—}003374

[1691] FIG. 1643: PRO51851

[1692] FIG. 1678: PRO4710

[1693] FIG. 1644: DNA324610,XM_{—}003771,gen.XM_{—}003771

[1694] FIG. 1679: DNA324628,XM_{—}017474,gen.XM_{—}017474

[1695] FIG. 1645: PRO81259

[1696] FIG. 1680: PRO63082

[1697] FIG. 1646A-B: DNA269816,NM_{—}002397,gen.NM_{—}002397

[1698] FIG. 1681A-B: DNA324629,NM_{—}014829,gen.NM_{—}014829

[1699] FIG. 1647: PRO58219

[1700] FIG. 1682: PRO81273

[1701] FIG. 1648: DNA324611,XM_{—}116427,gen.XM_{—}116427

[1702] FIG. 1683A-B: DNA324630,XM_{—}114482,gen.XM_{—}114482

[1703] FIG. 1649: PRO81260

[1704] FIG. 1684: PRO81274

[1705] FIG. 1650: DNA324612,NM_{—}004772,gen.NM_{—}004772

[1706] FIG. 1685: DNA324631,NM_{—}004893,gen.NM_{—}004893

[1707] FIG. 1651: PRO81261

[1708] FIG. 1686: PRO81275

[1709] FIG. 1652: DNA324613,XM_{—}016674,gen.XM_{—}016674

[1710] FIG. 1687: DNA269809,NM_{—}006805,gen.NM_{—}006805

[1711] FIG. 1653: PRO81262

[1712] FIG. 1688: PRO58213

[1713] FIG. 1654: DNA324614,XM_{—}113463,gen.XM_{—}113463

[1714] FIG. 1689: DNA226872,NM_{—}001964,gen.NM_{—}001964

[1715] FIG. 1655: DNA324615,XM_{—}034744,gen.XM_{—}034744

[1716] FIG. 1690: PRO37335

[1717] FIG. 1691: DNA324632,XM_{—}116307,gen.XM_{—}116307

[1718] FIG. 1656: DNA324616,XM_{—}087745,gen.XM_{—}087745

[1719] FIG. 1692: PRO81276

[1720] FIG. 1657: PRO81264

[1721] FIG. 1693: DNA324633,NM_{—}004134,gen.NM_{—}004134

[1722] FIG. 1658: DNA324617,XM_{—}018473,gen.XM_{—}018473

[1723] FIG. 1694: PRO81277

[1724] FIG. 1659: PRO81265

[1725] FIG. 1695: DNA324634,XM_{—}038221,gen.XM_{—}038221

[1726] FIG. 1660: DNA324618,XM_{—}087635,gen.XM_{—}087635

[1727] FIG. 1696: PRO81278

[1728] FIG. 1661: PRO81266

[1729] FIG. 1697: DNA271931,NM_{—}005754,gen.NM_{—}005754

[1730] FIG. 1662: DNA324619,XM_{—}087637,gen.XM_{—}087637

[1731] FIG. 1698: PRO60207

[1732] FIG. 1663: DNA324620,XM_{—}166027,gen.XM_{—}166027

[1733] FIG. 1699: DNA324635,XM_{—}003841,gen.XM_{—}003841

[1734] FIG. 1664: DNA324621,NM_{—}014035,gen.NM_{—}014035

[1735] FIG. 1700: DNA324636,XM_{—}032759,gen.XM_{—}032759

[1736] FIG. 1665: PRO1285

[1737] FIG. 1701: DNA324637,XM_{—}017591,gen.XM_{—}017591

[1738] FIG. 1702: DNA324638,NM_{—}006058,gen.NM_{—}006058

[1739] FIG. 1703: PRO81280

[1740] FIG. 1704: DNA324639,NM_{—}002084,gen.NM_{—}002084

[1741] FIG. 1705: PRO81281

[1742] FIG. 1706: DNA324640,NM_{—}018047,gen.NM_{—}018047

[1743] FIG. 1707: PRO81282

[1744] FIG. 1708: DNA324641,NM_{—}005617,gen.NM_{—}005617

[1745] FIG. 1709: PRO10849

[1746] FIG. 1710: DNA324642,XM_{—}003937,gen.XM_{—}003937

[1747] FIG. 1711: DNA324643,XM_{—}087621,gen.XM_{—}087621

[1748] FIG. 1712A-B: DNA324644,XM_{—}003789,gen.XM_{—}003789

[1749] FIG. 1713: DNA324645,XM_{—}087652,gen.XM_{—}087652

[1750] FIG. 1714: DNA324646,XM_{—}068853,gen.XM_{—}068853

[1751] FIG. 1715: PRO81286

[1752] FIG. 1716: DNA324647,XM_{—}116465,gen.XM_{—}116465

[1753] FIG. 1717: PRO81287

[1754] FIG. 1718: DNA302020,NM_{—}005573,gen.NM_{—}005573

[1755] FIG. 1719: PRO70993

[1756] FIG. 1720: DNA324648,XM_{—}113467,gen.XM_{—}113467

[1757] FIG. 1721: DNA271626,NM_{—}014773,gen.NM_{—}014773

[1758] FIG. 1722: PRO59913

[1759] FIG. 1723A-B: DNA324649,XM_{—}056315,gen.XM_{—}056315

[1760] FIG. 1724: DNA324650,NM_{—}024668,gen.NM_{—}024668

[1761] FIG. 1725: PRO81289

[1762] FIG. 1726: DNA324651,NM_{—}080670,gen.NM_{—}080670

[1763] FIG. 1727: PRO81290

[1764] FIG. 1728A-B: DNA324652,NM_{—}002588,gen.NM_{—}002588

[1765] FIG. 1729: PRO81291

[1766] FIG. 1730A-B: DNA324653,NM_{—}003735,gen.NM_{—}003735

[1767] FIG. 1731: PRO81292

[1768] FIG. 1732A-B: DNA150679,NM_{—}003736,gen.NM_{—}003736

[1769] FIG. 1733: PRO12416

[1770] FIG. 1734A-B: DNA324654,NM_{—}018912,gen.NM_{—}018912

[1771] FIG. 1735: PRO36058

[1772] FIG. 1736A-B: DNA324655,NM_{—}018913,gen.NM_{—}018913

[1773] FIG. 1737: PRO81293

[1774] FIG. 1738A-B: DNA324656,NM_{—}018914,gen.NM_{—}018914

[1775] FIG. 1739: PRO81294

[1776] FIG. 1740A-B: DNA324657,NM_{—}018915,gen.NM_{—}018915

[1777] FIG. 1741: PRO36020

[1778] FIG. 1742A-B: DNA324658,NM_{—}018916,gen.NM_{—}018916

[1779] FIG. 1743: PRO81295

[1780] FIG. 1744A-B: DNA324659,NM_{—}018917,gen.NM_{—}018917

[1781] FIG. 1745: PRO81296

[1782] FIG. 1746A-B: DNA324660,NM_{—}018918,gen.NM_{—}018918

[1783] FIG. 1747: PRO81297

[1784] FIG. 1748A-B: DNA324661,NM_{—}018919,gen.NM_{—}018919

[1785] FIG. 1749: PRO81298

[1786] FIG. 1750A-B: DNA324662,NM_{—}018920,gen.NM_{—}018920

[1787] FIG. 1751: PRO81299

[1788] FIG. 1752A-B: DNA324663,NM_{—}018921,gen.NM_{—}018921

[1789] FIG. 1753: PRO81300

[1790] FIG. 1754A-B: DNA324664,NM_{—}018922,gen.NM_{—}018922

[1791] FIG. 1755: PRO81301

[1792] FIG. 1756A-B: DNA324665,NM_{—}018923,gen.NM_{—}018923

[1793] FIG. 1757: PRO81302

[1794] FIG. 1758A-B: DNA324666,NM_{—}018924,gen.NM_{—}018924

[1795] FIG. 1759: PRO81303

[1796] FIG. 1760A-B: DNA324667,NM_{—}018925,gen.NM_{—}018925

[1797] FIG. 1761: PRO81304

[1798] FIG. 1762A-B: DNA324668,NM_{—}018926,gen.NM_{—}018926

[1799] FIG. 1763: PRO81305

[1800] FIG. 1764A-B: DNA324669,NM_{—}018927,gen.NM_{—}018927

[1801] FIG. 1765: PRO37091

[1802] FIG. 1766A-B: DNA324670,NM_{—}018928,gen.NM_{—}018928

[1803] FIG. 1767: PRO81306

[1804] FIG. 1768A-B: DNA324671,NM_{—}018929,gen.NM_{—}018929

[1805] FIG. 1769: PRO81307

[1806] FIG. 1770A-B: DNA324672,NM_{—}032088,gen.NM_{—}032088

[1807] FIG. 1771: PRO81308

[1808] FIG. 1772A-B: DNA324673,NM_{—}032092,gen.NM_{—}032092

[1809] FIG. 1773: PRO81309

[1810] FIG. 1774: DNA324674,NM_{—}032403,gen.NM_{—}032403

[1811] FIG. 1775: PRO81310

[1812] FIG. 1776: DNA324675,NM_{—}032402,gen.NM_{—}032402

[1813] FIG. 1777: PRO81311

[1814] FIG. 1778: DNA324676,XM_{—}098387,gen.XM_{—}098387

[1815] FIG. 1779: DNA324677,NM_{—}002109,gen.NM_{—}002109

[1816] FIG. 1780: PRO4908

[1817] FIG. 1781: DNA324678,XM_{—}084180,gen.XM_{—}084180

[1818] FIG. 1782: PRO81313

[1819] FIG. 1783: DNA324679,XM_{—}039975,gen.XM_{—}039975

[1820] FIG. 1784: PRO81314

[1821] FIG. 1785: DNA324680,NM_{—}033551,gen.NM_{—}033551

[1822] FIG. 1786: PRO81315

[1823] FIG. 1787: DNA324681,NM_{—}004821,gen.NM_{—}004821

[1824] FIG. 1788: PRO81316

[1825] FIG. 1789: DNA324682,XM_{—}068395,gen.XM_{—}068395

[1826] FIG. 1790: PRO81317

[1827] FIG. 1791: DNA226418,NM_{—}004060,gen.NM_{—}004060

[1828] FIG. 1792: PRO36881

[1829] FIG. 1793A-B: DNA324683,XM_{—}56963,gen.XM_{—}056963

[1830] FIG. 1794: PRO81318

[1831] FIG. 1795: DNA324684,NM_{—}004219,gen.NM_{—}004219

[1832] FIG. 1796: PRO81319

[1833] FIG. 1797: DNA324685,XM_{—}094243,gen.XM_{—}094243

[1834] FIG. 1798A-B: DNA324686,XM_{—}047964,gen.XM_{—}047964

[1835] FIG. 1799: DNA324687,XM_{—}016345,gen.XM_{—}016345

[1836] FIG. 1800: DNA324688,NM_{—}002887,gen.NM_{—}002887

[1837] FIG. 1801: PRO81323

[1838] FIG. 1802: DNA324689,XM_{—}166029,gen.XM_{—}166029

[1839] FIG. 1803: DNA324690,NM_{—}002520,gen.NM_{—}002520

[1840] FIG. 1804: PRO58993

[1841] FIG. 1805: DNA324691,XM_{—}043340,gen.XM_{—}043340

[1842] FIG. 1806: PRO81325

[1843] FIG. 1807: DNA324692,XM_{—}116340,gen.XM_{—}116340

[1844] FIG. 1808A-B: DNA324693,XM_{—}043388,gen.XM_{—}043388

[1845] FIG. 1809: PRO81327

[1846] FIG. 1810: DNA324694,XM_{—}116856,gen.XM_{—}116856

[1847] FIG. 1811: DNA324695,XM_{—}003716,gen.XM_{—}003716

[1848] FIG. 1812: DNA227320,NM_{—}003714,gen.NM_{—}003714

[1849] FIG. 1813: PRO37783

[1850] FIG. 1814: DNA324696,NM_{—}032361,gen.NM_{—}032361

[1851] FIG. 1815: PRO81330

[1852] FIG. 1816: DNA324697,XM_{—}087773,gen.XM_{—}087773

[1853] FIG. 1817: DNA324698,XM_{—}114457,gen.XM_{—}114457

[1854] FIG. 1818: DNA324699,XM_{—}165483,gen.XM_{—}165483

[1855] FIG. 1819: DNA324700,XM_{—}114453,gen.XM_{—}114453

[1856] FIG. 1820: DNA324701,XM_{—}165484,gen.XM_{—}165484

[1857] FIG. 1821: DNA324702,XM_{—}030771,gen.XM_{—}030771

[1858] FIG. 1822: PRO19615

[1859] FIG. 1823: DNA324703,XM_{—}030777,gen.XM_{—}030777

[1860] FIG. 1824: DNA324704,XM_{—}030782,gen.XM_{—}030782

[1861] FIG. 1825: PRO81336

[1862] FIG. 1826: DNA324705,NM_{—}030567,gen.NM_{—}030567

[1863] FIG. 1827: PRO81337

[1864] FIG. 1828: DNA225909,NM_{—}000505,gen.NM_{—}000505

[1865] FIG. 1829: PRO36372

[1866] FIG. 1830: DNA274206,NM_{—}006816,gen.NM_{—}006816

[1867] FIG. 1831: PRO62135

[1868] FIG. 1832: DNA324706,NM_{—}031300,gen.NM_{—}031300

[1869] FIG. 1833: PRO81338

[1870] FIG. 1834: DNA324707,NM_{—}013237,gen.NM_{—}013237

[1871] FIG. 1835: PRO81339

[1872] FIG. 1836: DNA324708,NM_{—}002011,gen.NM_{—}002011

[1873] FIG. 1837: PRO81340

[1874] FIG. 1838: DNA324709,NM_{—}022963,gen.NM_{—}022963

[1875] FIG. 1839: PRO81341

[1876] FIG. 1840: DNA324710,XM_{—}038946,gen.XM_{—}038946

[1877] FIG. 1841: DNA324711,XM_{—}113454,gen.XM_{—}113454

[1878] FIG. 1842: DNA324712,XM_{—}166028,gen.XM_{—}166028

[1879] FIG. 1843: DNA324713,NM_{—}015043,gen.NM_{—}015043

[1880] FIG. 1844: PRO81345

[1881] FIG. 1845: DNA324714,XM_{—}113468,gen.XM_{—}113468

[1882] FIG. 1846: DNA324715,NM_{—}014275,gen.NM_{—}014275

[1883] FIG. 1847: PRO1927

[1884] FIG. 1848: DNA324716,NM_{—}054013,gen.NM_{—}054013

[1885] FIG. 1849: PRO81347

[1886] FIG. 1850: DNA270675,NM_{—}005520,gen.NM_{—}005520

[1887] FIG. 1851: PRO59040

[1888] FIG. 1852: DNA324717,NM_{—}006098,gen.NM_{—}006098

[1889] FIG. 1853: PRO25849

[1890] FIG. 1854: DNA269593,NM_{—}005110,gen.NM_{—}005110

[1891] FIG. 1855: PRO58006

[1892] FIG. 1856: DNA324718,XM_{—}116365,gen.XM_{—}116365

[1893] FIG. 1857: DNA324719,XM_{—}116511,gen.XM_{—}116511

[1894] FIG. 1858: DNA324720,XM_{—}087823,gen.XM_{—}087823

[1895] FIG. 1859A-C: DNA324721,XM_{—}053955,gen.XM_{—}053955

[1896] FIG. 1860: DNA324722,XM_{—}113476,gen.XM_{—}113476

[1897] FIG. 1861: DNA324723,XM_{—}116514,gen.XM_{—}116514

[1898] FIG. 1862: DNA324724,XM_{—}094741,gen.XM_{—}094741

[1899] FIG. 1863: DNA324725,NM_{—}025168,gen.NM_{—}025168

[1900] FIG. 1864: PRO81354

[1901] FIG. 1865A-B: DNA324726,XM_{—}165740,gen.XM_{—}165740

[1902] FIG. 1866: DNA272171,NM_{—}002388,gen.NM_{—}002388

[1903] FIG. 1867: PRO60438

[1904] FIG. 1868: DNA324727,XM_{—}167169,gen.XM_{—}167169

[1905] FIG. 1869: PRO81355

[1906] FIG. 1870: DNA324728,NM_{—}014452,gen.NM_{—}014452

[1907] FIG. 1871: PRO868

[1908] FIG. 1872: DNA324729,XM_{—}166349,gen.XM_{—}166349

[1909] FIG. 1873: PRO81356

[1910] FIG. 1874: DNA304680,NM_{—}007355,gen.NM_{—}007355

[1911] FIG. 1875: PRO71106

[1912] FIG. 1876: DNA324730,XM_{—}165772,gen.XM_{—}165772

[1913] FIG. 1877: DNA324731,XM_{—}168123,gen.XM_{—}168123

[1914] FIG. 1878: DNA324732,XM_{—}166457,gen.XM_{—}166457

[1915] FIG. 1879: DNA324733,XM_{—}166469,gen.XM_{—}166469

[1916] FIG. 1880: DNA324734,NM_{—}018135,gen.NM_{—}018135

[1917] FIG. 1881: PRO81359

[1918] FIG. 1882A-B: DNA324735,NM_{—}166340,gen.XM_{—}166340

[1919] FIG. 1883: DNA324736,XM_{—}087960,gen.XM_{—}087960

[1920] FIG. 1884: DNA324737,XM_{—}166362,gen.XM_{—}166362

[1921] FIG. 1885: PRO81362

[1922] FIG. 1886: DNA227204,NM_{—}015388,gen.NM_{—}015388

[1923] FIG. 1887: PRO37667

[1924] FIG. 1888: DNA324738,XM_{—}166425 gen.XM_{—}166425

[1925] FIG. 1889: PRO81363

[1926] FIG. 1890: DNA324739,NM_{—}057161,gen.NM_{—}057161

[1927] FIG. 1891: PRO81364

[1928] FIG. 1892: DNA270613,NM_{—}006245,gen.NM_{—}006245

[1929] FIG. 1893: PRO58984

[1930] FIG. 1894: DNA324740,NM_{—}006586,gen.NM_{—}006586

[1931] FIG. 1895: PRO81365

[1932] FIG. 1896: DNA324741,XM_{—}166402,gen.XM_{—}166402

[1933] FIG. 1897: PRO81366

[1934] FIG. 1898: DNA324742,NM_{—}001760,gen.NM_{—}001760

[1935] FIG. 1899: PRO81367

[1936] FIG. 1900: DNA287246,NM_{—}004053,gen.NM_{—}004053

[1937] FIG. 1901: PRO69521

[1938] FIG. 1902: DNA324743,NM_{—}017601,gen.NM_{—}017601

[1939] FIG. 1903: PRO81368

[1940] FIG. 1904: DNA275630,NM_{—}006708,gen.NM_{—}006708

[1941] FIG. 1905: PRO63253

[1942] FIG. 1906: DNA324744,NM_{—}014341,gen.NM_{—}014341

[1943] FIG. 1907: PRO81369

[1944] FIG. 1908: DNA304460,NM_{—}016059,gen.NM_{—}016059

[1945] FIG. 1909: PRO4984

[1946] FIG. 1910: DNA324745,XM_{—}166412,gen.XM_{—}166412

[1947] FIG. 1911: PRO81370

[1948] FIG. 1912: DNA304716,NM_{—}078467,gen.NM_{—}078467

[1949] FIG. 1913: PRO71142

[1950] FIG. 1914: DNA324746,XM_{—}166417,gen.XM_{—}166417

[1951] FIG. 1915: PRO81371

[1952] FIG. 1916A-B: DNA324747,NM_{—}003137,gen.NM_{—}003137

[1953] FIG. 1917: PRO81372

[1954] FIG. 1918A-B: DNA324748,NM_{—}004117,gen.NM_{—}004117

[1955] FIG. 1919: PRO36841

[1956] FIG. 1920: DNA324749,XM_{—}166419,gen.XM_{—}166419

[1957] FIG. 1921: DNA324750,XM_{—}165794,gen.XM_{—}165794

[1958] FIG. 1922: DNA324751,NM_{—}007104,gen.NM_{—}007104

[1959] FIG. 1923: PRO10360

[1960] FIG. 1924: DNA324752,NM_{—}024294,gen.NM_{—}024294

[1961] FIG. 1925: PRO81375

[1962] FIG. 1926: DNA324753,NM_{—}022758,gen.NM_{—}022758

[1963] FIG. 1927: PRO50582

[1964] FIG. 1928: DNA324754,XM_{—}168070,gen.XM_{—}168070

[1965] FIG. 1929: DNA324755,NM_{—}012391,gen.NM_{—}012391

[1966] FIG. 1930: PRO81377

[1967] FIG. 1931: DNA324756,XM_{—}166459,gen.XM_{—}166459

[1968] FIG. 1932: DNA324757,XM_{—}166333,gen.XM_{—}166333

[1969] FIG. 1933: PRO81379

[1970] FIG. 1934: DNA324758,XM_{—}058039,gen.XM_{—}058039

[1971] FIG. 1935: PRO81380

[1972] FIG. 1936: DNA324759,XM_{—}087990,gen.XM_{—}087990

[1973] FIG. 1937: DNA324760,XM_{—}165743,gen.XM_{—}165743

[1974] FIG. 1938: DNA324761,XM_{—}166360,gen.XM_{—}166360

[1975] FIG. 1939: DNA324763,XM_{—}059801,gen.XM_{—}059801

[1976] FIG. 1940: DNA324764,XM_{—}166363,gen.XM_{—}166363

[1977] FIG. 1941: DNA324765,XM_{—}016857,gen.XM_{—}016857

[1978] FIG. 1942: DNA227442,NM_{—}001350,gen.NM_{—}001350

[1979] FIG. 1943: PRO37905

[1980] FIG. 1944: DNA324766,NM_{—}005452,gen.NM_{—}005452

[1981] FIG. 1945: PRO81387

[1982] FIG. 1946: DNA30466 1,NM_{—}022551,gen.NM_{—}022551

[1983] FIG. 1947: PRO71088

[1984] FIG. 1948: DNA324767,XM_{—}165747,gen.XM_{—}165747

[1985] FIG. 1949: DNA324768,XM_{—}165698,gen.XM_{—}165698

[1986] FIG. 1950: PRO4884

[1987] FIG. 1951A-B: DNA324769,XM_{—}165770,gen.XM_{—}165770

[1988] FIG. 1952: DNA287227,NM_{—}004159,gen.NM_{—}004159

[1989] FIG. 1953: PRO69506

[1990] FIG. 1954: DNA324770,XM_{—}165717,gen.XM_{—}165717

[1991] FIG. 1955: DNA324771,XM_{—}166480,gen.XM_{—}166480

[1992] FIG. 1956: DNA324772,XM_{—}165801,gen.XM_{—}165801

[1993] FIG. 1957A-B: DNA324773,NM_{—}000592,gen.NM_{—}000592

[1994] FIG. 1958: PRO36316

[1995] FIG. 1959: DNA324774,NM_{—}001710,gen.NM_{—}001710

[1996] FIG. 1960: PRO36305

[1997] FIG. 1961: DNA227607,NM_{—}005346,gen.NM_{—}005346

[1998] FIG. 1962: PRO38070

[1999] FIG. 1963: DNA304668,NM_{—}005345,gen.NM_{—}005345

[2000] FIG. 1964: PRO71095

[2001] FIG. 1965: DNA324775,NM_{—}021177,gen.NM_{—}021177

[2002] FIG. 1966: PRO81394

[2003] FIG. 1967A-B: DNA272263,NM_{—}006295,gen.NM_{—}006295

[2004] FIG. 1968: PRO70138

[2005] FIG. 1969: DNA287319,NM_{—}001288,gen.NM_{—}001288

[2006] FIG. 1970: PRO69584

[2007] FIG. 1971: DNA324776,NM_{—}001320,gen.NM_{—}001320

[2008] FIG. 1972: PRO63052

[2009] FIG. 1973A-B: DNA324777,NM_{—}004639,gen.NM_{—}004639

[2010] FIG. 1974: PRO81395

[2011] FIG. 1975A-B: DNA324778,NM_{—}080703,gen.NM_{—}080703

[2012] FIG. 1976: PRO81396

[2013] FIG. 1977A-B: DNA324779,NM_{—}080702,gen.NM_{—}080702

[2014] FIG. 1978: PRO81397

[2015] FIG. 1979A-B: DNA324780,NM_{—}004638,gen.NM_{—}004638

[2016] FIG. 1980: PRO81398

[2017] FIG. 1981A-B: DNA324781,NM_{—}080686,gen.NM_{—}080686

[2018] FIG. 1982: PRO81399

[2019] FIG. 1983: DNA324782,XM_{—}165771,gen.XM_{—}165771

[2020] FIG. 1984: DNA324783,NM_{—}080598,gen.NM_{—}080598

[2021] FIG. 1985: PRO71125

[2022] FIG. 1986: DNA304699,NM_{—}004640,gen.NM_{—}004640

[2023] FIG. 1987: PRO71125

[2024] FIG. 1988: DNA324784,XM_{—}165765,gen.XM_{—}165765

[2025] FIG. 1989: PRO81400

[2026] FIG. 1990: DNA324785,XM_{—}087945,gen.XM_{—}087945

[2027] FIG. 1991: PRO81401

[2028] FIG. 1992: DNA324786,XM_{—}166381,gen.XM_{—}166381

[2029] FIG. 1993: PRO81402

[2030] FIG. 1994: DNA324787,XM_{—}168104,gen.XM_{—}168104

[2031] FIG. 1995: DNA324788,XM_{—}166401,gen.XM_{—}166401

[2032] FIG. 1996: PRO81404

[2033] FIG. 1997: DNA271040,NM_{—}001517,gen.NM_{—}001517

[2034] FIG. 1998: PRO59365

[2035] FIG. 1999A-B: DNA324789,XM_{—}165738,gen.XM_{—}165738

[2036] FIG. 2000: DNA324790,XM_{—}087939,gen.XM_{—}087939

[2037] FIG. 2001: PRO81406

[2038] FIG. 2002: DNA324791,XM_{—}166353,gen.XM_{—}166353

[2039] FIG. 2003: PRO1112

[2040] FIG. 2004A-B: DNA324792,XM_{—}166376,gen.XM_{—}166376

[2041] FIG. 2005: PRO81407

[2042] FIG. 2006A-B: DNA324793,XM_{—}165799,gen.XM_{—}165799

[2043] FIG. 2007: DNA290264,NM_{—}025263,gen.NM_{—}025263

[2044] FIG. 2008: PRO70393

[2045] FIG. 2009: DNA324794,XM_{—}166361,gen.XM_{—}166361

[2046] FIG. 2010: PRO81409

[2047] FIG. 2011: DNA324795,XM_{—}165764,gen.XM_{—}165764

[2048] FIG. 2012: PRO81410

[2049] FIG. 2013: DNA324796,XM_{—}165758,gen.XM_{—}165758

[2050] FIG. 2014: PRO81411

[2051] FIG. 2015: DNA324797,XM_{—}166406,gen.XM_{—}166406

[2052] FIG. 2016: DNA324798,XM_{—}165809,gen.XM_{—}165809

[2053] FIG. 2017: DNA324799,NM_{—}018950,gen.NM_{—}018950

[2054] FIG. 2018: PRO81414

[2055] FIG. 2019: DNA324800,XM_{—}166392,gen.XM_{—}166392

[2056] FIG. 2020: PRO81415

[2057] FIG. 2021: DNA324801,XM_{—}166336,gen.XM_{—}166336

[2058] FIG. 2022: PRO81416

[2059] FIG. 2023: DNA324802,XM_{—}1 67128,gen.XM_{—}167128

[2060] FIG. 2024: PRO23797

[2061] FIG. 2025: DNA324803,XM_{—}167161,gen.XM_{—}2167161

[2062] FIG. 2026: PRO81417

[2063] FIG. 2027: DNA324804,NM_{—}013375,gen.NM_{—}013375

[2064] FIG. 2028: PRO81418

[2065] FIG. 2029: DNA324805,NM_{—}007047,gen.NM_{—}007047

[2066] FIG. 2030: PRO81419

[2067] FIG. 2031: DNA324806,XM_{—}167179,gen.XM_{—}167179

[2068] FIG. 2032: DNA290785,NM_{—}003107,gen.NM_{—}003107

[2069] FIG. 2033: PRO70544

[2070] FIG. 2034: DNA150772,NM_{—}003472,gen.NM_{—}003472

[2071] FIG. 2035: PRO12797

[2072] FIG. 2036A-B: DNA324807,XM_{—}165728,gen.NM_{—}165728

[2073] FIG. 2037: DNA324808,XM_{—}165749,gen.XM_{—}165749

[2074] FIG. 2038: PRO81421

[2075] FIG. 2039A-B: DNA324809,NM_{—}004973,gen.NM_{—}004973

[2076] FIG. 2040: PRO81422

[2077] FIG. 2041: DNA324810,XM_{—}167196,gen.XM_{—}167196

[2078] FIG. 2042: DNA324811,XM_{—}166446,gen.XM_{—}166446

[2079] FIG. 2043: PRO81424

[2080] FIG. 2044A-C: DNA324812,XM_{—}165777,gen.XM_{—}165777

[2081] FIG. 2045: DNA324813,XM_{—}037875,gen.XM_{—}037875

[2082] FIG. 2046: PRO81426

[2083] FIG. 2047: DNA324814,XM_{—}167225,gen.XM_{—}167225

[2084] FIG. 2048: PRO81427

[2085] FIG. 2049: DNA324815,XM_{—}166357,gen.XM_{—}166357

[2086] FIG. 2050: DNA324816,NM_{—}001069,gen.NM_{—}001069

[2087] FIG. 2051: PRO81429

[2088] FIG. 2052: DNA324817,NM_{—}001500,gen.NM_{—}001500

[2089] FIG. 2053: PRO81430

[2090] FIG. 2054A-B: DNA324818,XM_{—}166042,gen.XM_{—}166042

[2091] FIG. 2055: PRO51389

[2092] FIG. 2056: DNA324819,XM_{—}052721,gen.XM_{—}052721

[2093] FIG. 2057: DNA324820,XM_{—}165499,gen.XM_{—}165499

[2094] FIG. 2058: DNA324821,XM_{—}114497,gen.XM_{—}114497

[2095] FIG. 2059: DNA324822,XM_{—}011117,gen.XM_{—}011117

[2096] FIG. 2060: DNA324823,XM_{—}094855,gen.XM_{—}094855

[2097] FIG. 2061: PRO81435

[2098] FIG. 2062: DNA324824,XM_{—}059776,gen.XM_{—}059776

[2099] FIG. 2063: PRO81436

[2100] FIG. 2064: DNA324825,XM_{—}055641,gen.XM_{—}055641

[2101] FIG. 2065: DNA324826,XM_{—}004151,gen.XM_{—}004151

[2102] FIG. 2066: DNA324827,NM_{—}133645,gen.NM_{—}133645

[2103] FIG. 2067: PRO81439

[2104] FIG. 2068: DNA324828,XM_{—}097453,gen.XM_{—}097453

[2105] FIG. 2069: DNA324829,XM_{—}029228,gen.XM_{—}029228

[2106] FIG. 2070: DNA103471,NM_{—}006670,gen.NM_{—}006670

[2107] FIG. 2071: PRO4798

[2108] FIG. 2072: DNA324830,XM_{—}068963,gen.XM_{—}68963

[2109] FIG. 2073: PRO81441

[2110] FIG. 2074: DNA324831,XM_{—}040623,gen.XM_{—}040623

[2111] FIG. 2075: DNA324832,NM_{—}020320,gen.NM_{—}020320

[2112] FIG. 2076: PRO81443

[2113] FIG. 2077: DNA324833,NM_{—}014107,gen.NM_{—}014107

[2114] FIG. 2078: PRO81444

[2115] FIG. 2079A-B: DNA324834,XM_{—}084204,gen.XM_{—}84204

[2116] FIG. 2080: DNA324835,XM_{—}017517,gen.XM_{—}17517

[2117] FIG. 2081: DNA324836,NM_{—}032929,gen.NM_{—}32929

[2118] FIG. 2082: PRO81446

[2119] FIG. 2083: DNA324837,XM_{—}003611,gen.XM_{—}03611

[2120] FIG. 2084: PRO81447

[2121] FIG. 2085: DNA324838,XM_{—}068919,gen.XM_{—}068919

[2122] FIG. 2086: PRO81448

[2123] FIG. 2087: DNA324839,XM_{—}167016,gen.XM_{—}167016

[2124] FIG. 2088: PRO81449

[2125] FIG. 2089: DNA324840,XM_{—}087855,gen.XM_{—}087855

[2126] FIG. 2090: DNA324841,XM_{—}087853,gen.XM_{—}087853

[2127] FIG. 2091: DNA324842,XM_{—}165669,gen.XM_{—}165669

[2128] FIG. 2092: DNA324843,XM_{—}166303,gen.XM_{—}166303

[2129] FIG. 2093: PRO81453

[2130] FIG. 2094: DNA324844,XM_{—}167027,gen.XM_{—}167027

[2131] FIG. 2095: PRO81454

[2132] FIG. 2096: DNA324845,XM_{—}167037,gen.XM_{—}167037

[2133] FIG. 2097: PRO81455

[2134] FIG. 2098: DNA324846,XM_{—}018182,gen.XM_{—}018182

[2135] FIG. 2099: DNA227924,NM_{—}000165,gen.NM_{—}000165

[2136] FIG. 2100: PRO38387

[2137] FIG. 2101: DNA324847,XM_{—}166310,gen.XM_{—}166310

[2138] FIG. 2102: PRO81457

[2139] FIG. 2103: DNA324848,XM_{—}168054,gen.XM_{—}168054

[2140] FIG. 2104: DNA271418,NM_{—}003287,gen.NM_{—}003287

[2141] FIG. 2105: PRO59717

[2142] FIG. 2106: DNA324849,XM_{—}114492,gen.XM_{—}114492

[2143] FIG. 2107: DNA324850,XM_{—}037056,gen.XM_{—}037056

[2144] FIG. 2108: DNA32485 1,XM_{—}098468,gen.XM_{—}098468

[2145] FIG. 2109: PRO19933

[2146] FIG. 2110: DNA324852,XM_{—}004526,gen.XM_{—}004526

[2147] FIG. 2111: DNA324853,NM_{—}001016,gen.NM_{—}001016

[2148] FIG. 2112: PRO81462

[2149] FIG. 2113: DNA324854,XM_{—}004297,gen.XM_{—}004297

[2150] FIG. 2114: DNA324855,XM_{—}004256,gen.XM_{—}004256

[2151] FIG. 2115: PRO81464

[2152] FIG. 2116: DNA324856,NM_{—}014320,gen.NM_{—}014320

[2153] FIG. 2117: PRO81465

[2154] FIG. 2118: DNA324857,XM_{—}059741,gen.XM_{—}059741

[2155] FIG. 2119: DNA324858,XM_{—}017831,gen.XM_{—}017831

[2156] FIG. 2120: PRO81467

[2157] FIG. 2121: DNA324859,XM_{—}049899,gen.XM_{—}049899

[2158] FIG. 2122: DNA324860,XM_{—}004379,gen.XM_{—}004379

[2159] FIG. 2123A-C: DNA324861,XM_{—}087834,gen.XM_{—}087834

[2160] FIG. 2124A-B: DNA324862,XM_{—}087836,gen.XM_{—}087836

[2161] FIG. 2125: PRO81471

[2162] FIG. 2126: DNA324863,NM_{—}005389,gen.NM_{—}005389

[2163] FIG. 2127: PRO66279

[2164] FIG. 2128A-C: DNA324864,XM_{—}029746,gen.XM_{—}029746

[2165] FIG. 2129: PRO66282

[2166] FIG. 2130: DNA324865,XM_{—}004383,gen.XM_{—}004383

[2167] FIG. 2131: DNA324866,XM_{—}059745,gen.XM_{—}059745

[2168] FIG. 2132: DNA324867,XM_{—}033912,gen.XM_{—}033912

[2169] FIG. 2133: PRO81474

[2170] FIG. 2134: DNA324868,XM_{—}033910,gen.XM_{—}033910

[2171] FIG. 2135: DNA324870,NM_{—}003181,gen.NM_{—}003181

[2172] FIG. 2136: PRO81476

[2173] FIG. 2137: DNA324871,NM_{—}002793,gen.NM_{—}002793

[2174] FIG. 2138: PRO81477

[2175] FIG. 2139: DNA324872,XM_{—}044866,gen.XM_{—}044866

[2176] FIG. 2140: DNA324873,XM_{—}116524,gen.XM_{—}116524

[2177] FIG. 2141: DNA324874,XM_{—}059773,gen.XM_{—}059773

[2178] FIG. 2142: DNA324875,XM_{—}084998,gen.XM_{—}084998

[2179] FIG. 2143: PRO81481

[2180] FIG. 2144: DNA324876,XM_{—}058266,gen.XM_{—}058266

[2181] FIG. 2145: DNA324877,XM_{—}042422,gen.XM_{—}042422

[2182] FIG. 2146A-B: DNA324878,XM_{—}054706,gen.XM_{—}054706

[2183] FIG. 2147: DNA324879,XM_{—}166049,gen.XM_{—}166049

[2184] FIG. 2148: DNA324880,XM_{—}042473,gen.XM_{—}042473

[2185] FIG. 2149: PRO81486

[2186] FIG. 2150: DNA324881,XM_{—}167046,gen.XM_{—}167046

[2187] FIG. 2151: PRO23797

[2188] FIG. 2152: DNA324882,XM_{—}071937,gen.XM_{—}071937

[2189] FIG. 2153: PRO81487

[2190] FIG. 2154: DNA324883,XM_{—}087991,gen.XM_{—}087991

[2191] FIG. 2155: DNA324884,NM_{—}005514,gen.NM_{—}005514

[2192] FIG. 2156: PRO81490

[2193] FIG. 2157: DNA324885,XM_{—}166327,gen.XM_{—}166327

[2194] FIG. 2158: PRO81491

[2195] FIG. 2159: DNA324886,XM_{—}165692,gen.XM_{—}165692

[2196] FIG. 2160: DNA324887,XM_{—}117449,gen.XM_{—}117449

[2197] FIG. 2161: DNA324888,XM_{—}086428,gen.XM_{—}086428

[2198] FIG. 2162: PRO81494

[2199] FIG. 2163: DNA324889,NM_{—}032350,gen.NM_{—}032350

[2200] FIG. 2164: PRO81495

[2201] FIG. 2165: DNA324890,NM_{—}013393,gen.NM_{—}013393

[2202] FIG. 2166: PRO81496

[2203] FIG. 2167: DNA324891,XM_{—}165860,gen.XM_{—}165860

[2204] FIG. 2168: DNA324892,XM_{—}166541,gen.XM_{—}166541

[2205] FIG. 2169: PRO81498

[2206] FIG. 2170A-B: DNA324893,XM_{—}166523,gen.XM_{—}166523

[2207] FIG. 2171: PRO81499

[2208] FIG. 2172: DNA324894,NM_{—}016003,gen.NM_{—}016003

[2209] FIG. 2173: PRO81500

[2210] FIG. 2174: DNA225631,NM_{—}001101,gen.NM_{—}001101

[2211] FIG. 2175: PRO36094

[2212] FIG. 2176: DNA274326,NM_{—}003088,gen.NM_{—}003088

[2213] FIG. 2177: PRO62244

[2214] FIG. 2178: DNA324895,NM_{—}006303,gen.NM_{—}006303

[2215] FIG. 2179: PRO81501

[2216] FIG. 2180: DNA324896,NM_{—}014413,gen.NM_{—}014413

[2217] FIG. 2181: PRO60579

[2218] FIG. 2182: DNA247595,NM_{—}006908,gen.NM_{—}006908

[2219] FIG. 2183: PRO45014

[2220] FIG. 2184: DNA324897,NM_{—}006854,gen.NM_{—}006854

[2221] FIG. 2185: PRO12468

[2222] FIG. 2186: DNA324898,NM_{—}024067,gen.NM_{—}024067

[2223] FIG. 2187: PRO81502

[2224] FIG. 2188: DNA324899,NM_{—}002947,gen.NM_{—}002947

[2225] FIG. 2189: PRO81503

[2226] FIG. 2190: DNA324900,XM_{—}166531,gen.XM_{—}166531

[2227] FIG. 2191: DNA324901,XM_{—}166540,gen.XM_{—}166540

[2228] FIG. 2192: PRO81505

[2229] FIG. 2193: DNA193955,NM_{—}002489,gen.NM_{—}002489

[2230] FIG. 2194: PRO23362

[2231] FIG. 2195: DNA324902,XM_{—}088264,gen.XM_{—}088264

[2232] FIG. 2196: PRO81506

[2233] FIG. 2197: DNA324903,XM_{—}165841,gen.XM_{—}165841

[2234] FIG. 2198: DNA324904,XM_{—}166521,gen.XM_{—}166521

[2235] FIG. 2199: PRO81508

[2236] FIG. 2200: DNA324905,XM_{—}166506,gen.XM_{—}166506

[2237] FIG. 2201: PRO81509

[2238] FIG. 2202: DNA324906,XM_{—}166505,gen.XM_{—}166505

[2239] FIG. 2203: DNA324907,XM_{—}166514,gen.XM_{—}166514

[2240] FIG. 2204: DNA324908,XM_{—}166515,gen.XM_{—}166515

[2241] FIG. 2205: DNA324909,XM_{—}166512,gen.XM_{—}166512

[2242] FIG. 2206: DNA227929,NM_{—}019059,gen.NM_{—}019059

[2243] FIG. 2207: PRO38392

[2244] FIG. 2208A-B: DNA324910,NM_{—}18947,gen.NM_{—}018947

[2245] FIG. 2209: PRO81514

[2246] FIG. 2210: DNA324911,NM_{—}002137,gen.NM_{—}002137

[2247] FIG. 2211: PRO81515

[2248] FIG. 2212: DNA324912,NM_{—}031243,gen.NM_{—}031243

[2249] FIG. 2213: PRO6373

[2250] FIG. 2214: DNA324913,NM_{—}007276,gen.NM_{—}007276

[2251] FIG. 2215: PRO81516

[2252] FIG. 2216: DNA324914,NM_{—}016587,gen.NM_{—}016587

[2253] FIG. 2217: PRO81517

[2254] FIG. 2218: DNA324915,XM_{—}040853,gen.XM_{—}040853

[2255] FIG. 2219: DNA324916,XM_{—}166509,gen.XM_{—}166509

[2256] FIG. 2220: DNA324917,XM_{—}166513,gen.XM_{—}166513

[2257] FIG. 2221: PRO81520

[2258] FIG. 2222: DNA324918,XM_{—}166504,gen.XM_{—}166504

[2259] FIG. 2223: PRO81521

[2260] FIG. 2224: DNA324919,XM_{—}166494,gen.XM_{—}166494

[2261] FIG. 2225: DNA324920,XM_{—}107825,gen.XM_{—}107825

[2262] FIG. 2226A-B: DNA324921,NM_{—}022748,gen.NM_{—}022748

[2263] FIG. 2227: PRO81523

[2264] FIG. 2228: DNA324922,NM_{—}000598,gen.NM_{—}000598

[2265] FIG. 2229: PRO119

[2266] FIG. 2230A-B: DNA324923,XM_{—}166594,gen.XM_{—}166594

[2267] FIG. 2231: PRO81524

[2268] FIG. 2232A-B: DNA275334,NM_{—}030900,gen.NM_{—}030900

[2269] FIG. 2233: PRO63009

[2270] FIG. 2234: DNA324924,NM_{—}031443,gen.NM_{—}031443

[2271] FIG. 2235: PRO81525

[2272] FIG. 2236: DNA324925,NM_{—}012412,gen.NM_{—}012412

[2273] FIG. 2237: PRO61812

[2274] FIG. 2238: DNA324926,NM_{—}021130,gen.NM_{—}021130

[2275] FIG. 2239: PRO7427

[2276] FIG. 2240A-B: DNA324927,XM_{—}165877,gen.XM_{—}165877

[2277] FIG. 2241: PRO81526

[2278] FIG. 2242: DNA227268,NM_{—}019082,gen.NM_{—}019082

[2279] FIG. 2243: PRO37731

[2280] FIG. 2244: DNA324928,XM_{—}015258,gen.XM_{—}015258

[2281] FIG. 2245: DNA324929,XM_{—}165870,gen.XM_{—}165870

[2282] FIG. 2246: DNA273865,NM_{—}006230,gen.NM_{—}006230

[2283] FIG. 2247: PRO61824

[2284] FIG. 2248A-B: DNA324930,XM_{—}165882,gen.XM_{—}165882

[2285] FIG. 2249: DNA324931,XM_{—}165867,gen.XM_{—}165867

[2286] FIG. 2250: PRO61688

[2287] FIG. 2251: DNA324932,NM_{—}014063,gen.NM_{—}014063

[2288] FIG. 2252: PRO81529

[2289] FIG. 2253: DNA324933,XM_{—}165872,gen.XM_{—}165872

[2290] FIG. 2254: DNA304707,NM_{—}002787,gen.NM_{—}002787

[2291] FIG. 2255: PRO71133

[2292] FIG. 2256: DNA324934,XM_{—}016733,gen.XM_{—}016733

[2293] FIG. 2257: PRO81531

[2294] FIG. 2258: DNA324935,XM_{—}165876,gen.XM_{—}165876

[2295] FIG. 2259A-B: DNA324936,NM_{—}014800,gen.NM_{—}014800

[2296] FIG. 2260: DNA324937,NM_{—}130442,gen.NM_{—}130442

[2297] FIG. 2261: PRO81534

[2298] FIG. 2262: DNA226416,NM_{—}000385,gen.NM_{—}000385

[2299] FIG. 2263: PRO36879

[2300] FIG. 2264A-B: DNA324938,XM_{—}167339,gen.XM_{—}167339

[2301] FIG. 2265: DNA287189,NM_{—}002047,gen.NM_{—}002047

[2302] FIG. 2266: PRO69475

[2303] FIG. 2267: DNA324939,XM_{—}170195,gen.XM_{—}170195

[2304] FIG. 2268: PRO81536

[2305] FIG. 2269: DNA324940,XM_{—}168378,gen.XM_{—}168378

[2306] FIG. 2270: PRO81537

[2307] FIG. 2271: DNA324941,XM_{—}168354,gen.XM_{—}168354

[2308] FIG. 2272: PRO81538

[2309] FIG. 2273: DNA324942,XM_{—}167494,gen.XM_{—}167494

[2310] FIG. 2274: DNA103588,NM_{—}001762,gen.NM_{—}001762

[2311] FIG. 2275: PRO4912

[2312] FIG. 2276: DNA324943,XM_{—}037741,gen.XM_{—}037741

[2313] FIG. 2277: PRO81540

[2314] FIG. 2278: DNA324944,XM_{—}050265,gen.XM_{—}050265

[2315] FIG. 2279: PRO81541

[2316] FIG. 2280: DNA324945,XM_{—}017483,gen.XM_{—}017483

[2317] FIG. 2281A-B: DNA324946,XM_{—}018359,gen.XM_{—}018359

[2318] FIG. 2282: DNA324947,XM_{—}059876,gen.XM_{—}059876

[2319] FIG. 2283: PRO81544

[2320] FIG. 2284: DNA324948,NM_{—}032951,gen.NM_{—}032951

[2321] FIG. 2285: PRO81545

[2322] FIG. 2286: DNA324949,NM_{—}032953,gen.NM_{—}032953

[2323] FIG. 2287: PRO81546

[2324] FIG. 2288: DNA324950,NM_{—}022170,gen.NM_{—}022170

[2325] FIG. 2289: PRO81547

[2326] FIG. 2290: DNA324951,NM_{—}031992,gen.NM_{—}031992

[2327] FIG. 2291: PRO81548

[2328] FIG. 2292: DNA324952,XM_{—}004901,gen.XM_{—}004901

[2329] FIG. 2293: DNA324953,NM_{—}016328,gen.NM_{—}016328

[2330] FIG. 2294: PRO81550

[2331] FIG. 2295A-B: DNA324954,NM_{—}032999,gen.NM_{—}032999

[2332] FIG. 2296: PRO81551

[2333] FIG. 2297: DNA324955,XM_{—}088239,gen.XM_{—}088239

[2334] FIG. 2298: PRO81552

[2335] FIG. 2299A-B: DNA324956,XM_{—}167500,gen.XM_{—}167500

[2336] FIG. 2300A-B: DNA324957,XM_{—}167504,gen.XM_{—}167504

[2337] FIG. 2301: DNA324958,XM_{—}167498,gen.XM_{—}167498

[2338] FIG. 2302: DNA324959,XM_{—}168454,gen.XM_{—}168454

[2339] FIG. 2303: PRO81556

[2340] FIG. 2304: DNA324960,NM_{—}031925,gen.NM_{—}031925

[2341] FIG. 2305: PRO81557

[2342] FIG. 2306: DNA324961,NM_{—}005918,gen.NM_{—}005918

[2343] FIG. 2307: PRO81558

[2344] FIG. 2308: DNA304710,NM_{—}001540,gen.NM_{—}001540

[2345] FIG. 2309: PRO71136

[2346] FIG. 2310: DNA324962,XM_{—}168470,gen.XM_{—}168470

[2347] FIG. 2311: DNA324963,XM_{—}168461,gen.XM_{—}168461

[2348] FIG. 2312A-B: DNA324964,XM_{—}167502,gen.XM_{—}167502

[2349] FIG. 2313: DN74 24965,XM_{—}17442,gen.XM_{—}017442

[2350] FIG. 2314: PRO81561

[2351] FIG. 2315: DNA324966,XM_{—}168450,gen.XM_{—}168450

[2352] FIG. 2316: DNA324967,XM_{—}168435,gen.XM_{—}168435

[2353] FIG. 2317: DNA324968,XM_{—}168464,gen.XM_{—}168464

[2354] FIG. 2318: DNA324969,XM_{—}170427,gen.XM_{—}170427

[2355] FIG. 2319A-B: DNA324971,NM_{—}015068,gen.NM_{—}015068

[2356] FIG. 2320: PRO81566

[2357] FIG. 2321A-B: DNA324972,XM_{—}167476,gen.XM_{—}167476

[2358] FIG. 2322: DNA324973,XM_{—}168181,gen.XM_{—}168181

[2359] FIG. 2323: DNA324974,XM_{—}168251,gen.XM_{—}168251

[2360] FIG. 2324: PRO81569

[2361] FIG. 2325: DNA324975,XM_{—}167477,gen.XM_{—}167477

[2362] FIG. 2326: DNA324976,NM_{—}005837,gen.NM_{—}005837

[2363] FIG. 2327: PRO81571

[2364] FIG. 2328: DNA324977,XM_{—}167483,gen.XM_{—}167483

[2365] FIG. 2329: DNA324978,XM_{—}167484,gen.XM_{—}167484

[2366] FIG. 2330: PRO81572

[2367] FIG. 2331: DNA324979,NM_{—}030935,gen.NM_{—}030935

[2368] FIG. 2332: PRO81573

[2369] FIG. 2333: DNA324980,NM_{—}019606,gen.NM_{—}019606

[2370] FIG. 2334: PRO81574

[2371] FIG. 2335: DNA324981,NM_{—}024070,gen.NM_{—}024070

[2372] FIG. 2336: PRO81575

[2373] FIG. 2337: DNA324982,XM_{—}084241,gen.XM_{—}084241

[2374] FIG. 2338: DNA324983,NM_{—}006833,gen.NM_{—}006833

[2375] FIG. 2339: PRO22897

[2376] FIG. 2340: DNA324984,NM_{—}032164,gen.NM_{—}032164

[2377] FIG. 2341: PRO81578

[2378] FIG. 2342: DNA304801,NM_{—}004889,gen.NM_{—}004889

[2379] FIG. 2343: PRO71211

[2380] FIG. 2344: DNA324985,NM_{—}006693,gen.NM_{—}006693

[2381] FIG. 2345: PRO81579

[2382] FIG. 2346: DNA324986,XM_{—}165839,gen.XM_{—}165839

[2383] FIG. 2347: PRO81580

[2384] FIG. 2348: DNA272090,NM_{—}005720,gen.NM_{—}005720

[2385] FIG. 2349: PRO60360

[2386] FIG. 2350: DNA324987,XM_{—}165836,gen.XM_{—}165836

[2387] FIG. 2351A-B: DNA324988,XM_{—}166482,gen.XM_{—}166482

[2388] FIG. 2352: DNA324989,XM_{—}088180,gen.XM_{—}088180

[2389] FIG. 2353A-B: DNA324990,XM_{—}166485,gen.XM_{—}166485

[2390] FIG. 2354: PRO81584

[2391] FIG. 2355: DNA324991,NM_{—}001673,gen.NM_{—}001673

[2392] FIG. 2356: PRO81585

[2393] FIG. 2357: DNA324992,NM_{—}133436,gen.NM_{—}133436

[2394] FIG. 2358: PRO81586

[2395] FIG. 2359: DNA324993,XM_{—}168586,gen.XM_{—}168586

[2396] FIG. 2360: PRO81587

[2397] FIG. 2361: DNA83141,NM_{—}000602,gen.NM_{—}000602

[2398] FIG. 2362: PRO2604

[2399] FIG. 2363: DNA324994,NM_{—}057089,gen.NM_{—}057089

[2400] FIG. 2364: PRO81588

[2401] FIG. 2365: DNA324995,NM_{—}001283,gen.NM_{—}001283

[2402] FIG. 2366: PRO41882

[2403] FIG. 2367: DNA324996,NM_{—}003378,gen.NM_{—}003378

[2404] FIG. 2368: PRO81589

[2405] FIG. 2369: DNA324997,NM_{—}001084,gen.NM_{—}001084

[2406] FIG. 2370: PRO58437

[2407] FIG. 2371: DNA270711,NM_{—}006349,gen.NM_{—}006349

[2408] FIG. 2372: PRO59074

[2409] FIG. 2373: DNA324998,NM_{—}024653,gen.NM_{—}024653

[2410] FIG. 2374: PRO81590

[2411] FIG. 2375: DNA824999,XM_{—}168548,gen.XM_{—}168548

[2412] FIG. 2376: DNA325000,NM_{—}032958,gen.NM_{—}032958

[2413] FIG. 2377: PRO81591

[2414] FIG. 2378: DNA325001,NM_{—}002803,gen.NM_{—}002803

[2415] FIG. 2379: PRO81592

[2416] FIG. 2380: DNA325002,XM_{—}168572,gen.XM_{—}168572

[2417] FIG. 2381: DNA325003,XM_{—}071605,gen.XM_{—}071605

[2418] FIG. 2382: PRO81594

[2419] FIG. 2383: DNA325004,XM_{—}033876,gen.XM_{—}033876

[2420] FIG. 2384: PRO81595

[2421] FIG. 2385A-B: DNA325005,XM_{—}027214,gen.XM_{—}027214

[2422] FIG. 2386: DNA325006,XM_{—}088073,gen.XM_{—}088073

[2423] FIG. 2387: DNA325007,XM_{—}072430,gen.XM_{—}072430

[2424] FIG. 2388: PRO81598

[2425] FIG. 2389: DNA325008,XM_{—}050430,gen.XM_{—}050430

[2426] FIG. 2390: PRO81599

[2427] FIG. 2391: DNA325009,NM_{—}001753,gen.NM_{—}001753

[2428] FIG. 2392: PRO81600

[2429] FIG. 2393: DNA226560,NM_{—}006136,gen.NM_{—}006136

[2430] FIG. 2394: PRO37023

[2431] FIG. 2395: DNA325010,XM_{—}012284,gen.XM_{—}012284

[2432] FIG. 2396: DNA325011,NM_{—}005000,gen.NM_{—}005000

[2433] FIG. 2397: PRO59380

[2434] FIG. 2398: DNA325012,NM_{—}001662,gen.NM_{—}001662

[2435] FIG. 2399: PRO39773

[2436] FIG. 2400: DNA325013,XM_{—}011618,gen.XM_{—}011618

[2437] FIG. 2401: PRO81602

[2438] FIG. 2402: DNA325014,XM_{—}004627,gen.XM_{—}004627

[2439] FIG. 2403: DNA325015,XM_{—}045401,gen.XM_{—}045401

[2440] FIG. 2404: DNA325016,XM_{—}114602,gen.XM_{—}4114602

[2441] FIG. 2405: PRO81605

[2442] FIG. 2406: DNA325017,XM_{—}117481,gen.XM_{—}117481

[2443] FIG. 2407A-C: DNA325018,XM_{—}045856,gen.XM_{—}045856

[2444] FIG. 2408: PRO81607

[2445] FIG. 2409A-B: DNA325019,XM_{—}088105,gen.XM_{—}088105

[2446] FIG. 2410: PRO81608

[2447] FIG. 2411: DNA325020,XM_{—}011548,gen.XM_{—}011548

[2448] FIG. 2412: PRO81609

[2449] FIG. 2413: DNA325021,XM_{—}045952,gen.XM_{—}045952

[2450] FIG. 2414: DNA325022,XM_{—}046001,gen.XM_{—}046001

[2451] FIG. 2415: PRO81611

[2452] FIG. 2416: DNA325023,XM_{—}088099,gen.XM_{—}088099

[2453] FIG. 2417: DNA325024,XM_{—}040498,gen.XM_{—}040498

[2454] FIG. 2418: DNA325025,XM_{—}088103,gen.XM_{—}088103

[2455] FIG. 2419: PRO81614

[2456] FIG. 2420: DNA325026,XM_{—}088122,gen.XM_{—}088122

[2457] FIG. 2421: PRO81615

[2458] FIG. 2422: DNA325027,XM_{—}088119,gen.XM_{—}088119

[2459] FIG. 2423: DNA325028,NM_{—}001628,gen.NM_{—}001628

[2460] FIG. 2424: PRO81617

[2461] FIG. 2425: DNA325029,NM_{—}020299,gen.NM_{—}020299

[2462] FIG. 2426: PRO81618

[2463] FIG. 2427: DNA325030,NM_{—}024033,gen.NM_{—}024033

[2464] FIG. 2428: PRO81619

[2465] FIG. 2429: DNA325031,XM_{—}114555,gen.XM_{—}114555

[2466] FIG. 2430: DNA325032,XM_{—}059839,gen.XM_{—}059839

[2467] FIG. 2431: PRO81621

[2468] FIG. 2432: DNA325033,XM_{—}095146,gen.XM_{—}095146

[2469] FIG. 2433: DNA325034,XM_{—}016700,gen.XM_{—}016700

[2470] FIG. 2434: DNA325035,XM_{—}042781,gen.XM_{—}042781

[2471] FIG. 2435: DNA304685,NM_{—}003143,gen.NM_{—}003143

[2472] FIG. 2436: PRO71111

[2473] FIG. 2437: DNA325036,NM_{—}018238,gen.NM_{—}018238

[2474] FIG. 2438: PRO81625

[2475] FIG. 2439: DNA325037,XM_{—}035107,gen.XM_{—}035107

[2476] FIG. 2440: DNA325038,NM_{—}003461,gen.NM_{—}003461

[2477] FIG. 2441: PRO10194

[2478] FIG. 2442: DNA325039,NM_{—}004911,gen.NM_{—}004911

[2479] FIG. 2443: PRO2733

[2480] FIG. 2444A-B: DNA325040,XM_{—}114578,gen.XM_{—}114578

[2481] FIG. 2445: PRO81627

[2482] FIG. 2446: DNA325041,XM_{—}088135,gen.XM_{—}088135

[2483] FIG. 2447: DNA325042,XM_{—}098654,gen.XM_{—}098654

[2484] FIG. 2448: PRO81629

[2485] FIG. 2449: DNA325043,NM_{—}023942,gen.NM_{—}023942

[2486] FIG. 2450: PRO81630

[2487] FIG. 2451: DNA325044,NM_{—}138434,gen.NM_{—}138434

[2488] FIG. 2452: PRO81631

[2489] FIG. 2453: DNA325045,XM_{—}084238,gen.XM_{—}084238

[2490] FIG. 2454A-B: DNA325046,XM_{—}032216,gen.XM_{—}032216

[2491] FIG. 2455A-B: DNA325047,XM_{—}032121,gen.XM_{—}032121

[2492] FIG. 2456: DNA325048,NM_{—}031434,gen.NM_{—}031434

[2493] FIG. 2457: PRO1555

[2494] FIG. 2458: DNA226337,NM_{—}005692,gen.NM_{—}005692

[2495] FIG. 2459: PRO36800

[2496] FIG. 2460: DNA325049,NM_{—}005614,gen.NM_{—}005614

[2497] FIG. 2461: PRO37938

[2498] FIG. 2462A-B: DNA325050,NM_{—}053043,gen.NM_{—}053043

[2499] FIG. 2463: PRO81634

[2500] FIG. 2464: DNA325051,NM_{—}022458,gen.NM_{—}022458

[2501] FIG. 2465: PRO81635

[2502] FIG. 2466: DNA325052,XM_{—}098669,gen.XM_{—}098669

[2503] FIG. 2467: DNA325053,NM_{—}017760,gen.NM_{—}017760

[2504] FIG. 2468: PRO81637

[2505] FIG. 2469: DNA325054,XM_{—}036413,gen.XM_{—}036413

[2506] FIG. 2470A-B: DNA325055,XM_{—}032944,gen.XM_{—}032944

[2507] FIG. 2471: DNA325056,XM_{—}117444,gen.XM_{—}117444

[2508] FIG. 2472: DNA325057,XM_{—}117452,gen.XM_{—}117452

[2509] FIG. 2473: DNA325058,XM_{—}070203,gen.XM_{—}070203

[2510] FIG. 2474: PRO81641

[2511] FIG. 2475: DNA325059,XM_{—}095371,gen.XM_{—}095371

[2512] FIG. 2476: DNA325060,NM_{—}004084,gen.NM_{—}004084

[2513] FIG. 2477: PRO2570

[2514] FIG. 2478: DNA325061,NM_{—}005217,gen.NM_{—}005217

[2515] FIG. 2479: PRO9980

[2516] FIG. 2480: DNA325062,XM_{—}070188,gen.XM_{—}070188

[2517] FIG. 2481: PRO81643

[2518] FIG. 2482: DNA325063,XM_{—}035680,gen.XM_{—}035680

[2519] FIG. 2483: DNA325064,XM_{—}035662,gen.XM_{—}035662

[2520] FIG. 2484: PRO3344

[2521] FIG. 2485: DNA325065,XM_{—}005305,gen.XM_{—}005305

[2522] FIG. 2486: PRO81645

[2523] FIG. 2487: DNA325066,XM_{—}050293,gen.XM_{—}050293

[2524] FIG. 2488A-B: DNA325067,XM_{—}027679,gen.XM_{—}027679

[2525] FIG. 2489: PRO81647

[2526] FIG. 2490A-B: DNA325068,XM_{—}027651,gen.XM_{—}027651

[2527] FIG. 2491: DNA274178,NM_{—}005775,gen.NM_{—}005775

[2528] FIG. 2492: PRO62108

[2529] FIG. 2493: DNA325069,XM_{—}113557,gen.XM_{—}113557

[2530] FIG. 2494: PRO81649

[2531] FIG. 2495: DNA83022,NM_{—}001199,gen.NM_{—}001199

[2532] FIG. 2496: PRO2042

[2533] FIG. 2497: DNA325070,NM_{—}006128,gen.NM_{—}006128

[2534] FIG. 2498: PRO81650

[2535] FIG. 2499: DNA325071,NM_{—}006131,gen.NM_{—}006131

[2536] FIG. 2500: PRO81651

[2537] FIG. 2501: DNA325072,NM_{—}006132,gen.NM_{—}006132

[2538] FIG. 2502: PROS1652

[2539] FIG. 2503: DNA325073,NM_{—}025232,gen.NM_{—}025232

[2540] FIG. 2504: PRO81653

[2541] FIG. 2505: DNA325074,XM_{—}027440,gen.XM_{—}027440

[2542] FIG. 2506: DNA225671,NM_{—}001831,gen.NM_{—}001831

[2543] FIG. 2507: PRO36134

[2544] FIG. 2508: DNA325075,NM_{—}024567,gen.NM_{—}024567

[2545] FIG. 2509: PRO81654

[2546] FIG. 2510: DNA325076,NM_{—}018250,gen.NM_{—}018250

[2547] FIG. 2511: PRO81655

[2548] FIG. 2512: DNA227267,NM_{—}018660,gen.NM_{—}018660

[2549] FIG. 2513: PRO37730

[2550] FIG. 2514A-B: DNA325077,XM_{—}095545,gen.XM_{—}095545

[2551] FIG. 2515: DNA325078,XM_{—}088338,gen.XM_{—}088338

[2552] FIG. 2516: PRO81657

[2553] FIG. 2517: DNA325079,XM_{—}114617,gen.XM_{—}114617

[2554] FIG. 2518: PRO81658

[2555] FIG. 2519: DNA325080,XM_{—}088336,gen.XM_{—}088336

[2556] FIG. 2520: PRO81659

[2557] FIG. 2521: DNA325081,XM_{—}047083,gen.XM_{—}047083

[2558] FIG. 2522: PRO81660

[2559] FIG. 2523: DNA325082,XM_{—}114618,gen.XM_{—}114618

[2560] FIG. 2524: PRO81661

[2561] FIG. 2525: DNA325083,XM_{—}050215,gen.XM_{—}050215

[2562] FIG. 2526: DNA325084,XM_{—}113531,gen.XM_{—}113531

[2563] FIG. 2527: DNA325085,NM_{—}018310,gen.NM_{—}018310

[2564] FIG. 2528: PRO81664

[2565] FIG. 2529: DNA325086,XM_{—}088294,gen.XM_{—}088294

[2566] FIG. 2530: DNA325087,XM_{—}013112,gen.XM_{—}013112

[2567] FIG. 2531: DNA325088,XM_{—}059933,gen.XM_{—}059933

[2568] FIG. 2532: PRO1108

[2569] FIG. 2533: DNA325089,XM_{—}011629,gen.XM_{—}011629

[2570] FIG. 2534: DNA325090,NM_{—}000930,gen.NM_{—}000930

[2571] FIG. 2535: PRO4

[2572] FIG. 2536: DNA325091,NM_{—}000931,gen.NM_{—}000931

[2573] FIG. 2537: PRO81668

[2574] FIG. 2538: DNA325092,NM_{—}033011,gen.NM_{—}033011

[2575] FIG. 2539: PRO81669

[2576] FIG. 2540: DNA325093,XM_{—}166063,gen.XM_{—}166063

[2577] FIG. 2541: DNA325094,NM_{—}025070,gen.NM_{—}025070

[2578] FIG. 2542: PRO81671

[2579] FIG. 2543A-B: DNA325095,XM_{—}030268,gen.XM_{—}030268

[2580] FIG. 2544: DNA325096,XM_{—}030274,gen.XM_{—}030274

[2581] FIG. 2545: PRO81673

[2582] FIG. 2546: DNA151010,NM_{—}003350,gen.NM_{—}003350

[2583] FIG. 2547: PRO12838

[2584] FIG. 2548: DNA325097,XM_{—}113540,gen.XM_{—}113540

[2585] FIG. 2549: PRO81674

[2586] FIG. 2550: DNA325098,NM_{—}006330,gen.NM_{—}006330

[2587] FIG. 2551: PRO59230

[2588] FIG. 2552: DNA325099,NM_{—}001023,gen.NM_{—}001023

[2589] FIG. 2553: PRO58263

[2590] FIG. 2554: DNA325100,XM_{—}095667,gen.XM_{—}095667

[2591] FIG. 2555: PRO81675

[2592] FIG. 2556: DNA325101,XM_{—}114640,gen.XM_{—}114640

[2593] FIG. 2557: DNA325102,XM_{—}057780,gen.XM_{—}057780

[2594] FIG. 2558: DNA325103,XM_{—}166064,gen.XM_{—}166064

[2595] FIG. 2559: DNA325104,XM_{—}088399,gen.XM_{—}088399

[2596] FIG. 2560: DNA325105,XM_{—}088401,gen.XM_{—}088401

[2597] FIG. 2561: DNA325106,XM_{—}042658,gen.XM_{—}042658

[2598] FIG. 2562: DNA325107,XM_{—}011769,gen.XM_{—}011769

[2599] FIG. 2563: DNA325108,XM_{—}044627,gen.XM_{—}044627

[2600] FIG. 2564: DNA325109,XM_{—}098761,gen.XM_{—}098761

[2601] FIG. 2565: DNA226496,NM_{—}006837,gen.NM_{—}006837

[2602] FIG. 2566: PRO36959

[2603] FIG. 2567: DNA325110,NM_{—}014294,gen.NM_{—}014294

[2604] FIG. 2568: PRO23248

[2605] FIG. 2569: DNA325111,NM_{—}000971,gen.NM_{—}000971

[2606] FIG. 2570: PRO81685

[2607] FIG. 2571: DNA325112,XM_{—}050731,gen.XM_{—}050731

[2608] FIG. 2572: DNA325113,XM_{—}088325,gen.XM_{—}088325

[2609] FIG. 2573: PRO81687

[2610] FIG. 2574: DNA325114,XM_{—}088323,gen.XM_{—}088323

[2611] FIG. 2575: DNA325115,NM_{—}001444,gen.NM_{—}001444

[2612] FIG. 2576: PRO81689

[2613] FIG. 2577: DNA325116,XM_{—}013127,gen.XM_{—}013127

[2614] FIG. 2578: PRO81690

[2615] FIG. 2579: DNA325117,XM_{—}165514,gen.XM_{—}165514

[2616] FIG. 2580: PRO81691

[2617] FIG. 2581: DNA325118,XM_{—}017816,gen.XM_{—}017816

[2618] FIG. 2582: DNA325119,XM_{—}098747,gen.XM_{—}098747

[2619] FIG. 2583: DNA325120,XM_{—}050506,gen.XM_{—}050506

[2620] FIG. 2584: DNA325121,NM_{—}024613,gen.NM_{—}024613

[2621] FIG. 2585: PRO81695

[2622] FIG. 2586: DNA325122,XM_{—}011642,gen.XM_{—}011642

[2623] FIG. 2587: PRO81696

[2624] FIG. 2588: DNA325123,NM_{—}000989,gen.NM_{—}000989

[2625] FIG. 2589: PRO11265

[2626] FIG. 2590: DNA325124,NM_{—}003406,gen.NM_{—}003406

[2627] FIG. 2591: PRO71091

[2628] FIG. 2592: DNA325125,XM_{—}011657,gen.XM_{—}011657

[2629] FIG. 2593: DNA131588,NM_{—}002568,gen.NM_{—}002568

[2630] FIG. 2594: PRO7445

[2631] FIG. 2595: DNA325126,XM_{—}018287,gen.XM_{—}018287

[2632] FIG. 2596: DNA325127,NM_{—}001568,gen.NM_{—}001568

[2633] FIG. 2597: PRO81699

[2634] FIG. 2598: DNA325128,NM_{—}003756,gen.NM_{—}003756

[2635] FIG. 2599: PRO81700

[2636] FIG. 2600A-B: DNA272050,NM_{—}006265,gen.NM_{—}006265

[2637] FIG. 2601: PRO60321

[2638] FIG. 2602: DNA325129,NM_{—}052886,gen.NM_{—}052886

[2639] FIG. 2603: PRO81701

[2640] FIG. 2604: DNA325130,XM_{—}016047,gen.XM_{—}016047

[2641] FIG. 2605: DNA325131,XM_{—}005060,gen.XM_{—}005060

[2642] FIG. 2606: DNA325132,NM_{—}005005,gen.NM_{—}005005

[2643] FIG. 2607: PRO81704

[2644] FIG. 2608: DNA325133,XM_{—}037657,gen.XM_{—}037657

[2645] FIG. 2609: DNA325134,XM_{—}029567,gen.XM_{—}029567

[2646] FIG. 2610: PRO81705

[2647] FIG. 2611: DNA325135,XM_{—}088316,gen.XM_{—}088316

[2648] FIG. 2612: DNA325136,XM_{—}051298,gen.XM_{—}051298

[2649] FIG. 2613: DNA325137,XM_{—}088370,gen.XM_{—}088370

[2650] FIG. 2614: DNA325138,NM_{—}016647,gen.NM_{—}016647

[2651] FIG. 2615: PRO23201

[2652] FIG. 2616: DNA325139,NM_{—}052963,gen.NM_{—}052963

[2653] FIG. 2617: PRO81708

[2654] FIG. 2618: DNA325140,XM_{—}049247,gen.XM_{—}049247

[2655] FIG. 2619: DNA325141,XM_{—}058968,gen.XM_{—}058968

[2656] FIG. 2620: DNA325143,NM_{—}023078,gen.NM_{—}023078

[2657] FIG. 2621: PRO81711

[2658] FIG. 2622: DNA325144,XM_{—}117487,gen.XM_{—}117487

[2659] FIG. 2623: DNA325145,XM_{—}049226,gen.XM_{—}049226

[2660] FIG. 2624: PRO81714

[2661] FIG. 2625: DNA325146,XM_{—}114613,gen.XM_{—}114613

[2662] FIG. 2626: DNA325147,XM_{—}035368,gen.XM_{—}035368

[2663] FIG. 2627: DNA325148,XM_{—}113532,gen.XM_{—}113532

[2664] FIG. 2628: DNA325149,XM_{—}088321,gen.XM_{—}088321

[2665] FIG. 2629: DNA325150,XM_{—}035373,gen.XM_{—}035373

[2666] FIG. 2630: PRO81719

[2667] FIG. 2631: DNA325151,XM_{—}035370,gen.XM_{—}035370

[2668] FIG. 2632: PRO81720

[2669] FIG. 2633: DNA325152,NM_{—}000973,gen.NM_{—}000973

[2670] FIG. 2634: PRO22907

[2671] FIG. 2635: DNA325153,NM_{—}033301,gen.NM_{—}033301

[2672] FIG. 2636: PRO22907

[2673] FIG. 2637: DNA325154,XM_{—}049421,gen.XM_{—}049421

[2674] FIG. 2638: DNA325155,XM_{—}034640,gen.XM_{—}034640

[2675] FIG. 2639: PRO81722

[2676] FIG. 2640: DNA325156,XM_{—}088550,gen.XM_{—}088550

[2677] FIG. 2641: DNA325157,XM_{—}088552,gen.XM_{—}088552

[2678] FIG. 2642: DNA325158,XM_{—}088553,gen.XM_{—}088553

[2679] FIG. 2643: PRO81725

[2680] FIG. 2644: DNA325159,XM_{—}059979,gen.XM_{—}059979

[2681] FIG. 2645: DNA325160,XM_{—}167558,gen.XM_{—}167558

[2682] FIG. 2646: DNA325161,XM_{—}039654,gen.XM_{—}039654

[2683] FIG. 2647: DNA325162,XM_{—}060006,gen.XM_{—}060006

[2684] FIG. 2648: PRO81729

[2685] FIG. 2649: DNA325163,NM_{—}001122,gen.NM_{—}001122

[2686] FIG. 2650: PRO81730

[2687] FIG. 2651: DNA325164,NM_{—}001010,gen.NM_{—}001010

[2688] FIG. 2652: PRO10824

[2689] FIG. 2653: DNA325165,NM_{—}058195,gen.NM_{—}058195

[2690] FIG. 2654: PRO81731

[2691] FIG. 2655: DNA325166,NM_{—}000077,gen.NM_{—}000077

[2692] FIG. 2656: PRO36693

[2693] FIG. 2657: DNA325167,NM_{—}058196,gen.NM_{—}058196

[2694] FIG. 2658: PRO81732

[2695] FIG. 2659: DNA325168,XM_{—}017931,gen.XM_{—}017931

[2696] FIG. 2660: DNA271847,NM_{—}001539,gen.NM_{—}001539

[2697] FIG. 2661: PRO60127

[2698] FIG. 2662: DNA270991,NM_{—}004323,gen.NM_{—}004323

[2699] FIG. 2663: PRO59321

[2700] FIG. 2664: DNA325169,NM_{—}016410,gen.NM_{—}016410

[2701] FIG. 2665: PRO81734

[2702] FIG. 2666: DNA325170,XM_{—}005543,gen.XM_{—}005543

[2703] FIG. 2667: PRO38028

[2704] FIG. 2668: DNA325171,NM_{—}001842,gen.NM_{—}001842

[2705] FIG. 2669: PRO21481

[2706] FIG. 2670: DNA226345,NM_{—}005866,gen.NM_{—}005866

[2707] FIG. 2671: PRO36808

[2708] FIG. 2672: DNA325172,XM_{—}088563,gen.XM_{—}088563

[2709] FIG. 2673: DNA325173,XM_{—}059998,gen.XM_{—}059998

[2710] FIG. 2674: PRO59579

[2711] FIG. 2675: DNA325174,NM_{—}013442,gen.NM_{—}013442

[2712] FIG. 2676: PRO9819

[2713] FIG. 2677: DNA325175,XM_{—}114661,gen.XM_{—}114661

[2714] FIG. 2678: PRO81736

[2715] FIG. 2679: DNA325176,XM_{—}048479,gen.XM_{—}048479

[2716] FIG. 2680: DNA290319,NM_{—}003289,gen.NM_{—}003289

[2717] FIG. 2681: PRO70595

[2718] FIG. 2682A-C: DNA325177,NM_{—}006289,gen.NM_{—}006289

[2719] FIG. 2683: PRO81738

[2720] FIG. 2684: DNA325178,XM_{—}048518,gen.XM_{—}048518

[2721] FIG. 2685: PRO81739

[2722] FIG. 2686: DNA325179,XM_{—}048539,gen.XM_{—}048539

[2723] FIG. 2687: PRO81740

[2724] FIG. 2688: DNA325180,XM_{—}114662,gen.XM_{—}114662

[2725] FIG. 2689: DNA325181,NM_{—}001833,gen.NM_{—}001833

[2726] FIG. 2690: PRO81742

[2727] FIG. 2691: DNA227491,NM_{—}007096,gen.NM_{—}007096

[2728] FIG. 2692: PRO37954

[2729] FIG. 2693: DNA254771,NM_{—}012203,gen.NM_{—}012203

[2730] FIG. 2694: PRO49869

[2731] FIG. 2695: DNA89242,NM_{—}000700,gen.NM_{—}000700

[2732] FIG. 2696: PRO2907

[2733] FIG. 2697: DNA325182,XM_{—}041020,gen.XM_{—}041020

[2734] FIG. 2698: PRO81743

[2735] FIG. 2699: DNA325183,XM_{—}114686,gen.XM_{—}114686

[2736] FIG. 2700: DNA325184,XM_{—}088637,gen.XM_{—}088637

[2737] FIG. 2701: DNA287216,NM_{—}021154,gen.NM_{—}021154

[2738] FIG. 2702: PRO69496

[2739] FIG. 2703: DNA288247,NM_{—}058179,gen.NM_{—}058179

[2740] FIG. 2704: PRO70011

[2741] FIG. 2705: DNA325185,XM_{—}071178,gen.XM_{—}071178

[2742] FIG. 2706: PRO81746

[2743] FIG. 2707: DNA325186,XM_{—}005490,gen.XM_{—}005490

[2744] FIG. 2708: DNA325187,NM_{—}031263,gen.NM_{—}031263

[2745] FIG. 2709: PRO81748

[2746] FIG. 2710: DNA325188,XM_{—}018006,gen.XM_{—}018006

[2747] FIG. 2711: DNA325189,XM_{—}017996,gen.XM_{—}017996

[2748] FIG. 2712: DNA325190,XM_{—}016113,gen.XM_{—}016113

[2749] FIG. 2713: PRO81751

[2750] FIG. 2714: DNA272655,NM_{—}001827,gen.NM_{—}991827

[2751] FIG. 2715: PRO60781

[2752] FIG. 2716A-B: DNA325191,NM_{—}002161,gen.NM_{—}002161

[2753] FIG. 2717: PRO81752

[2754] FIG. 2718A-B: DNA325192,NM_{—}013417,gen.NM_{—}013417

[2755] FIG. 2719: PRO81753

[2756] FIG. 2720A-B: DNA325193,XM_{—}046863,gen.XM_{—}046863

[2757] FIG. 2721: PRO81754

[2758] FIG. 2722: DNA325194,XM_{—}046836,gen.XM_{—}046836

[2759] FIG. 2723: DNA275322,NM_{—}003837,gen.NM_{—}003837

[2760] FIG. 2724: PRO63000

[2761] FIG. 2725A-B: DNA325195,XM_{—}098943,gen.XM_{—}098943

[2762] FIG. 2726: DNA325196,XM_{—}016308,gen.XM_{—}016308

[2763] FIG. 2727: DNA325197,XM_{—}005525,gen.XM_{—}005525

[2764] FIG. 2728: DNA325198,NM_{—}003389,gen.NM_{—}003389

[2765] FIG. 2729: PRO81759

[2766] FIG. 2730: DNA325199,NM_{—}033219,gen.NM_{—}033219

[2767] FIG. 2731: PRO81760

[2768] FIG. 2732: DNA325200,NM_{—}006401,gen.NM_{—}006401

[2769] FIG. 2733: PRO81761

[2770] FIG. 2734: DNA272213,NM_{—}002486,gen.NM_{—}002486

[2771] FIG. 2735: PRO60475

[2772] FIG. 2736: DNA325201,NM_{—}001333,gen.NM_{—}001333

[2773] FIG. 2737: PRO81762

[2774] FIG. 2738: DNA325202,XM_{—}116818,gen.XM_{—}116818

[2775] FIG. 2739: PRO81763

[2776] FIG. 2740: DNA254543,NM_{—}006808,gen.NM_{—}006808

[2777] FIG. 2741: PRO49648

[2778] FIG. 2742: DNA325203,XM_{—}070873,gen.XM_{—}070873

[2779] FIG. 2743: PRO81764

[2780] FIG. 2744: DNA325204,XM_{—}042788,gen.XM_{—}042788

[2781] FIG. 2745: PRO81765

[2782] FIG. 2746: DNA257309,NM_{—}032342,gen.NM_{—}032342

[2783] FIG. 2747: PRO51901

[2784] FIG. 2748: DNA325205,XM_{—}088569,gen.XM_{—}088569

[2785] FIG. 2749: PRO81766

[2786] FIG. 2750: DNA325206,XM_{—}088571,gen.XM_{—}088571

[2787] FIG. 2751: DNA271722,NM_{—}004697,gen.NM_{—}004697

[2788] FIG. 2752: PRO60006

[2789] FIG. 2753: DNA325207,NM_{—}017443,gen.NM_{—}017443

[2790] FIG. 2754: PRO81768

[2791] FIG. 2755A-C: DNA325208,XM_{—}005348,gen.XM_{—}005348

[2792] FIG. 2756: DNA325209,XM_{—}114646,gen.XM_{—}114646

[2793] FIG. 2757: DNA325210,XM_{—}038391,gen.XM_{—}038391

[2794] FIG. 2758: PRO81771

[2795] FIG. 2759A-B: DNA325211,XM_{—}045296,gen.XM_{—}045296

[2796] FIG. 2760: DNA325212,XM_{—}005365,gen.XM_{—}005365

[2797] FIG. 2761: DNA289530,NM_{—}004435,gen.NM_{—}004435

[2798] FIG. 2762: PRO70290

[2799] FIG. 2763: DNA287271,NM_{—}032799,gen.NM_{—}032799

[2800] FIG. 2764: PRO69542

[2801] FIG. 2765: DNA325213,XM_{—}026987,gen.XM_{—}026987

[2802] FIG. 2766: DNA325214,XM_{—}026985,gen.XM_{—}026985

[2803] FIG. 2767: DNA225630,NM_{—}016174,gen.NM_{—}016174

[2804] FIG. 2768: PRO36093

[2805] FIG. 2769: DNA325215,XM_{—}026968,gen.XM_{—}026968

[2806] FIG. 2770: PRO81775

[2807] FIG. 2771: DNA325216,XM_{—}026951,gen.XM_{—}026951

[2808] FIG. 2772: DNA325217,NM_{—}025072,gen.NM_{—}025072

[2809] FIG. 2773: PRO33818

[2810] FIG. 2774: DNA325218,XM_{—}033424,gen.XM_{—}033424

[2811] FIG. 2775: DNA325219,NM_{—}004957,gen.NM_{—}004957

[2812] FIG. 2776: PRO81778

[2813] FIG. 2777: DNA325220,XM_{—}033457,gen.XM_{—}033457

[2814] FIG. 2778A-B: DNA325221,XM_{—}033460,gen.XM_{—}033460

[2815] FIG. 2779: PRO81780

[2816] FIG. 2780: DNA325222,NM_{—}000976,gen.NM_{—}000976

[2817] FIG. 2781: PRO62236

[2818] FIG. 2782: DNA218841,NM_{—}012098,gen.NM_{—}012098

[2819] FIG. 2783: PRO34473

[2820] FIG. 2784A-B: DNA325223,XM_{—}052725,gen.XM_{—}052725

[2821] FIG. 2785: PRO81781

[2822] FIG. 2786: DNA325224,XM_{—}011752,gen.XM_{—}011752

[2823] FIG. 2787: DNA325225,XM_{—}026944,gen.XM_{—}026944

[2824] FIG. 2788: PRO81783

[2825] FIG. 2789: DNA325226,XM_{—}116806,gen.XM_{—}116806

[2826] FIG. 2790A-B: DNA325227,NM_{—}005347,gen.NM_{—}005347

[2827] FIG. 2791: PRO81785

[2828] FIG. 2792: DNA325228,NM_{—}005833,gen.NM_{—}005833

[2829] FIG. 2793: PRO81786

[2830] FIG. 2794: DNA325229,NM_{—}007209,gen.NM_{—}007209

[2831] FIG. 2795: PRO61897

[2832] FIG. 2796: DNA88350,NM_{—}000177,gen.NM_{—}000177

[2833] FIG. 2797: PRO2758

[2834] FIG. 2798A-B: DNA325230,XM_{—}011749,gen.XM_{—}011749

[2835] FIG. 2799: DNA325231,XM_{—}114679,gen.XM_{—}114679

[2836] FIG. 2800: DNA325232,XM_{—}087041,gen.XM_{—}087041

[2837] FIG. 2801: DNA325233,XM_{—}114678,gen.XM_{—}114678

[2838] FIG. 2802: DNA325234,XM_{—}114677,gen.XM_{—}114677

[2839] FIG. 2803: DNA325235,XM_{—}087038,gen.XM_{—}087038

[2840] FIG. 2804: DNA325236,XM_{—}059637,gen.XM_{—}059637

[2841] FIG. 2805: PRO81792

[2842] FIG. 2806: DNA325237,NM_{—}000368,gen.NM_{—}000368

[2843] FIG. 2807: PRO60115

[2844] FIG. 2808: DNA325238,XM_{—}033385,gen.XM_{—}033385

[2845] FIG. 2809A-B: DNA325239,XM_{—}033380,gen.XM_{—}033380

[2846] FIG. 2810: PRO81794

[2847] FIG. 2811: DNA325240,XM_{—}033362,gen.XM_{—}033362

[2848] FIG. 2813: DNA325241,XM_{—}059986,gen.XM_{—}059986

[2849] FIG. 2814: PRO81796

[2850] FIG. 2815A-B: DNA325242,XM_{—}033361,gen.XM_{—}033361

[2851] FIG. 2816: PRO81797

[2852] FIG. 2817A-B: DNA325243,XM_{—}033360,gen.XM_{—}033360

[2853] FIG. 2818: DNA325244,XM_{—}033359,gen.XM_{—}033359

[2854] FIG. 2819A-B: DNA325245,XM_{—}033355,gen.XM_{—}033355

[2855] FIG. 2820: DNA325246,NM_{—}014285,gen.NM_{—}014285

[2856] FIG. 2821: PRO81800

[2857] FIG. 2822: DNA325247,NM_{—}054012,gen.NM_{—}054012

[2858] FIG. 2823: PRO81801

[2859] FIG. 2824: DNA325248,XM_{—}035103,gen.XM_{—}035103

[2860] FIG. 2825: DNA325249,XM_{—}035109,gen.XM_{—}035109

[2861] FIG. 2826: DNA325250,NM_{—}000972,gen.NM_{—}000972

[2862] FIG. 2827: PRO81804

[2863] FIG. 2828: DNA325251,NM_{—}033161,gen.NM_{—}033161

[2864] FIG. 2829: PRO81805

[2865] FIG. 2830: DNA325252,NM_{—}000787,gen.NM_{—}000787

[2866] FIG. 2831: PRO81806

[2867] FIG. 2832A-B: DNA325253,XM_{—}011778,gen.XM_{—}011778

[2868] FIG. 2833: DNA325254,XM_{—}088426,gen.XM_{—}088426

[2869] FIG. 2834: DNA325255,NM_{—}002003,gen.NM_{—}002003

[2870] FIG. 2835: PRO1910

[2871] FIG. 2836: DNA325256,NM_{—}058199,gen.NM_{—}058199

[2872] FIG. 2837: PRO81809

[2873] FIG. 2838: DNA325257,XM_{—}059945,gen.XM_{—}059945

[2874] FIG. 2839: DNA325258,XM_{—}088422,gen.XM_{—}088422

[2875] FIG. 2840: PRO81811

[2876] FIG. 2841: DNA325259,XM_{—}029168,gen.XM_{—}029168

[2877] FIG. 2842: PRO81812

[2878] FIG. 2843: DNA325260,XM_{—}098913,gen.XM_{—}098913

[2879] FIG. 2844: PRO81813

[2880] FIG. 2845: DNA325261,XM_{—}114669,gen.XM_{—}114669

[2881] FIG. 2846: DNA325262,XM_{—}113564,gen.XM_{—}113564

[2882] FIG. 2847A-B: DNA325263,XM_{—}088459,gen.XM_{—}088459

[2883] FIG. 2848: PRO81815

[2884] FIG. 2849: DNA325264,XM_{—}054752,gen.XM_{—}054752

[2885] FIG. 2850: PRO81816

[2886] FIG. 2851: DNA325265,XM_{—}084270,gen.XM_{—}084270

[2887] FIG. 2852: DNA325266,XM_{—}054763,gen.XM_{—}054763

[2888] FIG. 2853: PRO81817

[2889] FIG. 2854: DNA325267,XM_{—}114655,gen.XM_{—}114655

[2890] FIG. 2855: DNA325268,XM_{—}038030,gen.XM_{—}038030

[2891] FIG. 2856: PRO59351

[2892] FIG. 2857: DNA325269,XM_{—}072526,gen.XM_{—}072526

[2893] FIG. 2858: PRO81819

[2894] FIG. 2859: DNA325270,XM_{—}059961,gen.XM_{—}059961

[2895] FIG. 2860: DNA325271,NM_{—}032928,gen.NM_{—}032928

[2896] FIG. 2861: PRO81821

[2897] FIG. 2862: DNA325272,NM_{—}014172,gen.NM_{—}014172

[2898] FIG. 2863: PRO81822

[2899] FIG. 2864: DNA325273,XM_{—}038049,gen.XM_{—}038049

[2900] FIG. 2865: PRO62069

[2901] FIG. 2866: DNA325274,XM_{—}038063,gen.XM_{—}038063

[2902] FIG. 2867: PRO81823

[2903] FIG. 2868: DNA325275,NM_{—}000954,gen.NM_{—}000954

[2904] FIG. 2869: PRO81824

[2905] FIG. 2870: DNA325276,XM_{—}088461,gen.XM_{—}088461

[2906] FIG. 2871: DNA325277,XM_{—}059966,gen.XM_{—}059966

[2907] FIG. 2872: PRO81826

[2908] FIG. 2873: DNA325278,XM_{—}114649,gen.XM_{—}114649

[2909] FIG. 2874: DNA325279,XM_{—}117519,gen.XM_{—}117519

[2910] FIG. 2875: DNA325280,XM_{—}053206,gen.XM_{—}053206

[2911] FIG. 2876: DNA325281,XM_{—}040272,gen.XM_{—}040272

[2912] FIG. 2877: PRO58939

[2913] FIG. 2878: DNA325282,XM_{—}005724,gen.XM_{—}005724

[2914] FIG. 2879: DNA325283,XM_{—}040267,gen.XM_{—}040267

[2915] FIG. 2880: PRO81831

[2916] FIG. 2881: DNA325284,XM_{—}048859,gen.XM_{—}048859

[2917] FIG. 2882: PRO62617

[2918] FIG. 2883: DNA325285,NM_{—}003739,gen.NM_{—}003739

[2919] FIG. 2884: PRO81832

[2920] FIG. 2885: DNA325286,XM_{—}060976,gen.XM_{—}060976

[2921] FIG. 2886: PRO81833

[2922] FIG. 2887: DNA325287,XM_{—}167626,gen.XM_{—}167626

[2923] FIG. 2888: PRO81834

[2924] FIG. 2889: DNA325288,XM_{—}165555,gen.XM_{—}165555

[2925] FIG. 2890: PRO81835

[2926] FIG. 2891: DNA325289,NM_{—}001494,gen.NM_{—}001494

[2927] FIG. 2892: PRO81836

[2928] FIG. 2893: DNA325290,NM_{—}032905,gen.NM_{—}032905

[2929] FIG. 2894: PRO81837

[2930] FIG. 2895: DNA325291,NM_{—}005174,gen.NM_{—}005174

[2931] FIG. 2896: PRO81838

[2932] FIG. 2897: DNA325292,XM_{—}165557,gen.XM_{—}165557

[2933] FIG. 2898: DNA325293,XM_{—}167374,gen.XM_{—}167374

[2934] FIG. 2899: DNA273759,NM_{—}006023,gen.NM_{—}006023

[2935] FIG. 2900: PRO61721

[2936] FIG. 2901: DNA325294,XM_{—}167411,gen.XM_{—}167411

[2937] FIG. 2902: DNA325295,NM_{—}031453,gen.NM_{—}031453

[2938] FIG. 2903: PRO81841

[2939] FIG. 2904: DNA325296,XM_{—}167414,gen.XM_{—}167414

[2940] FIG. 2905: PRO12851

[2941] FIG. 2906: DNA325297,XM_{—}166717,gen.XM_{—}166717

[2942] FIG. 2907: PRO81842

[2943] FIG. 2908: DNA325298,XM_{—}005100,gen.XM_{—}005100

[2944] FIG. 2909: DNA325299,XM_{—}038536,gen.XM_{—}038536

[2945] FIG. 2910A-B: DNA325300,XM_{—}084420,gen.XM_{—}084420

[2946] FIG. 2911: DNA325301,XM_{—}084429,gen.XM_{—}084429

[2947] FIG. 2912: PRO81846

[2948] FIG. 2913A-C: DNA325302,XM_{—}165551,gen.XM_{—}165551

[2949] FIG. 2914: DNA325303,XM_{—}059720,gen.XM_{—}059720

[2950] FIG. 2915: PRO81848

[2951] FIG. 2916A-B: DNA325304,NM_{—}019619,gen.NM_{—}019619

[2952] FIG. 2917: PRO81849

[2953] FIG. 2918: DNA325305,XM_{—}166665,gen.XM_{—}166665

[2954] FIG. 2919A-B: DNA325306,NM_{—}002211,gen.NM_{—}002211

[2955] FIG. 2920: PRO81851

[2956] FIG. 2921A-B: DNA325307,XM_{—}165567,gen.XM_{—}165567

[2957] FIG. 2922: DNA325308,XM_{—}166157,gen.XM_{—}166157

[2958] FIG. 2923: DNA325309,NM_{—}032023,gen.NM_{—}032023

[2959] FIG. 2924: PRO52537

[2960] FIG. 2925: DNA325310,XM_{—}165560,gen.XM_{—}165560

[2961] FIG. 2926: DNA325311,XM_{—}165563,gen.XM_{—}165563

[2962] FIG. 2927: DNA325312,XM_{—}113615,gen.XM_{—}113615

[2963] FIG. 2928: PRO81855

[2964] FIG. 2929: DNA325313,XM_{—}165890,gen.XM_{—}165890

[2965] FIG. 2930: DNA325314,XM_{—}061126,gen.XM_{—}061126

[2966] FIG. 2931: DNA325315,XM_{—}061125,gen.XM_{—}061125

[2967] FIG. 2932: PRO81858

[2968] FIG. 2933: DNA325316,XM_{—}054474,gen.XM_{—}054474

[2969] FIG. 2934: DNA325317,XM_{—}165888,gen.XM_{—}165888

[2970] FIG. 2935: DNA325318,XM_{—}054475,gen.XM_{—}054475

[2971] FIG. 2936: PRO81861

[2972] FIG. 2937: DNA325319,XM_{—}015652,gen.XM_{—}015652

[2973] FIG. 2938: PRO81862

[2974] FIG. 2939: DNA325320,XM_{—}036593,gen.XM_{—}036593

[2975] FIG. 2940: PRO81863

[2976] FIG. 2941: DNA325321,XM_{—}165891,gen.XM_{—}165891

[2977] FIG. 2942: DNA325322,XM_{—}084450,gen.XM_{—}084450

[2978] FIG. 2943: PRO81865

[2979] FIG. 2944: DNA325323,XM_{—}084385,gen.XM_{—}084385

[2980] FIG. 2945: DNA325324,NM_{—}021226,gen.NM_{—}021226

[2981] FIG. 2946: PRO81867

[2982] FIG. 2947: DNA193957,NM_{—}003055,gen.NM_{—}003055

[2983] FIG. 2948: PRO23364

[2984] FIG. 2949: DNA325325,NM_{—}032997,gen.NM_{—}032997

[2985] FIG. 2950: PRO81868

[2986] FIG. 2951: DNA287642,NM_{—}018464,gen.NM_{—}018464

[2987] FIG. 2952: PRO9902

[2988] FIG. 2953: DNA325326,XM_{—}084451,gen.XM_{—}084451

[2989] FIG. 2954: PRO81869

[2990] FIG. 2955: DNA325327,NM_{—}012207,gen.NM_{—}012207

[2991] FIG. 2956: PRO81870

[2992] FIG. 2957: DNA325328,NM_{—}024045,gen.NM_{—}024045

[2993] FIG. 2958: PRO81871

[2994] FIG. 2959: DNA325329,NM_{—}004728,gen.NM_{—}004728

[2995] FIG. 2960: PRO81872

[2996] FIG. 2961: DNA88562,NM_{—}002727,gen.NM_{—}002727

[2997] FIG. 2962: PRO2842

[2998] FIG. 2963: DNA325330,XM_{—}167395,gen.XM_{—}167395

[2999] FIG. 2964: DNA227172,NM_{—}021129,gen.NM_{—}021129

[3000] FIG. 2965: PRO37635

[3001] FIG. 2966A-B: DNA325331,XM_{—}166125,gen.XM_{—}166125

[3002] FIG. 2967: PRO81874

[3003] FIG. 2968: DNA325332,XM_{—}044354,gen.XM_{—}044354

[3004] FIG. 2969: PRO81875

[3005] FIG. 2970: DNA325333,XM_{—}032520,gen.XM_{—}032520

[3006] FIG. 2971: DNA325334,NM_{—}019058,gen.NM_{—}019058

[3007] FIG. 2972: PRO81877

[3008] FIG. 2973: DNA325335,XM_{—}045140,gen.XM_{—}045140

[3009] FIG. 2974: PRO2875

[3010] FIG. 2975: DNA325336,XM_{—}116863,gen.XM_{—}116863

[3011] FIG. 2976: DNA325337,XM_{—}032476,gen.XM_{—}032476

[3012] FIG. 2977: DNA325338,XM_{—}114894,gen.XM_{—}114894

[3013] FIG. 2978: DNA325339,NM_{—}033022,gen.NM_{—}033022

[3014] FIG. 2979: PRO81881

[3015] FIG. 2980: DNA325340,NM_{—}001026,gen.NM_{—}001026

[3016] FIG. 2981: PRO11139

[3017] FIG. 2982: DNA103421,NM_{—}003375,gen.NM_{—}003375

[3018] FIG. 2983: PRO4749

[3019] FIG. 2984A-B: DNA325341,XM_{—}166093,gen.XM_{—}166093

[3020] FIG. 2985: PRO81882

[3021] FIG. 2986: DNA304459,NM_{—}005729,gen.NM_{—}005729

[3022] FIG. 2987: PRO37073

[3023] FIG. 2988: DNA325342,XM_{—}166629,gen.XM_{—}166629

[3024] FIG. 2989: PRO81883

[3025] FIG. 2990: DNA103506,NM_{—}001157,gen.NM_{—}001157

[3026] FIG. 2991: PRO4833

[3027] FIG. 2992: DNA325343,XM_{—}016093,gen.XM_{—}016093

[3028] FIG. 2993: PRO81884

[3029] FIG. 2994: DNA325344,XM_{—}084467,gen.XM_{—}084467

[3030] FIG. 2995: PRO81885

[3031] FIG. 2996: DNA304488,NM_{—}032333,gen.NM_{—}032333

[3032] FIG. 2997: PRO71057

[3033] FIG. 2998: DNA325345,XM_{—}043589,gen.XM_{—}043589

[3034] FIG. 2999: DNA325346,XM_{—}043605,gen.XM_{—}043605

[3035] FIG. 3000: DNA325347,XM_{—}087480,gen.XM_{—}087480

[3036] FIG. 3001: PRO81887

[3037] FIG. 3002: DNA325348,NM_{—}002921,gen.NM_{—}002921

[3038] FIG. 3003: PRO81888

[3039] FIG. 3004: DNA226217,NM_{—}005271,gen.NM_{—}005271

[3040] FIG. 3005: PRO36680

[3041] FIG. 3006: DNA325349,XM_{—}089551,gen.XM_{—}089551

[3042] FIG. 3007: PRO81889

[3043] FIG. 3008: DNA287237,NM_{—}001613,gen.NM_{—}001613

[3044] FIG. 3009: PRO39648

[3045] FIG. 3010: DNA325350,NM_{—}084477,gen.XM_{—}084477

[3046] FIG. 3011: PRO69523

[3047] FIG. 3012: DNA325351,XM_{—}084480,gen.XM_{—}084480

[3048] FIG. 3013A-B: DNA325352,NM_{—}013451,gen.NM_{—}013451

[3049] FIG. 3014: PRO12813

[3050] FIG. 3015: DNA325353,XM_{—}018167,gen.XM_{—}018167

[3051] FIG. 3016: DNA325354,XM_{—}084372,gen.XM_{—}084372

[3052] FIG. 3017: DNA325355,NM_{—}020992,gen.NM_{—}020992

[3053] FIG. 3018: PRO81893

[3054] FIG. 3019: DNA325356,XM_{—}089514,gen.XM_{—}089514

[3055] FIG. 3020A-B: DNA325357,XM_{—}058343,gen.XM_{—}058343

[3056] FIG. 3021: PRO81895

[3057] FIG. 3022: DNA325358,XM_{—}058602,gen.XM_{—}058602

[3058] FIG. 3023: PRO81896

[3059] FIG. 3024A-B: DNA325359,NM_{—}015179,gen.NM_{—}015179

[3060] FIG. 3025: PRO81897

[3061] FIG. 3026: DNA325360,XM_{—}083842,gen.XM_{—}083842

[3062] FIG. 3027: PRO69473

[3063] FIG. 3028: DNA325361,XM_{—}084413,gen.XM_{—}084413

[3064] FIG. 3029: DNA325362,NM_{—}022362,gen.NM_{—}022362

[3065] FIG. 3030: PRO81899

[3066] FIG. 3031: DNA325363,NM_{—}032112,gen.NM_{—}032112

[3067] FIG. 3032: PRO81900

[3068] FIG. 3033: DNA325364,NM_{—}021830,gen.NM_{—}021830

[3069] FIG. 3034: PRO81901

[3070] FIG. 3035A-B: DNA325365,XM_{—}046743,gen.XM_{—}046743

[3071] FIG. 3036: PRO81902

[3072] FIG. 3037: DNA325366,NM_{—}013274,gen.NM_{—}013274

[3073] FIG. 3038: PRO81903

[3074] FIG. 3039: DNA325367,NM_{—}022039,gen.NM_{—}022039

[3075] FIG. 3040: PRO81904

[3076] FIG. 3041A-B: DNA325368,XM_{—}031866,gen.XM_{—}031866

[3077] FIG. 3042A-B: DNA325369,NM_{—}015062,gen.NM_{—}015062

[3078] FIG. 3043: PRO81905

[3079] FIG. 3044A-B: DNA325370,XM_{—}031890,gen.XM_{—}031890

[3080] FIG. 3045A-B: DNA325371,NM_{—}004193,gen.NM_{—}004193

[3081] FIG. 3046: PRO81907

[3082] FIG. 3047: DNA325372,NM_{—}024040,gen.NM_{—}024040

[3083] FIG. 3048: PRO81908

[3084] FIG. 3049: DNA325373,XM_{—}031949,gen.XM_{—}031949

[3085] FIG. 3050: PRO4900

[3086] FIG. 3051A-B: DNA144601,NM_{—}016169,gen.NM_{—}016169

[3087] FIG. 3052: PRO34073

[3088] FIG. 3053: DNA325374,XM_{—}005698,gen.XM_{—}005698

[3089] FIG. 3054: PRO81909

[3090] FIG. 3055: DNA325375,NM_{—}006523,gen.NM_{—}006523

[3091] FIG. 3056: PRO59043

[3092] FIG. 3057: DNA325376,XM_{—}018279,gen.XM_{—}018279

[3093] FIG. 3058A-B: DNA325377,XM_{—}005938,gen.XM_{—}005938

[3094] FIG. 3059A-B: DNA325378,XM_{—}031992,gen.XM_{—}031992

[3095] FIG. 3060: PRO81912

[3096] FIG. 3061: DNA325379,NM_{—}032747,gen.NM_{—}032747

[3097] FIG. 3062: PRO81913

[3098] FIG. 3063: DNA325380,NM_{—}005004,gen.NM_{—}005004

[3099] FIG. 3064: PRO81914

[3100] FIG. 3065: DNA325381,XM_{—}030447,gen.XM_{—}030447

[3101] FIG. 3066: DNA273521,NM_{—}002079,gen.NM_{—}002079

[3102] FIG. 3067: PRO61502

[3103] FIG. 3068A-B: DNA325382,NM_{—}032211,gen.NM_{—}032211

[3104] FIG. 3069: PRO81916

[3105] FIG. 3070: DNA325383,NM_{—}031484,gen.NM_{—}031484

[3106] FIG. 3071: PRO81917

[3107] FIG. 3072: DNA325384,XM_{—}084632,gen.XM_{—}084632

[3108] FIG. 3073: DNA325385,XM_{—}084359,gen.XM_{—}084359

[3109] FIG. 3074A-D: DNA325386,XM_{—}045667,gen.XM_{—}045667

[3110] FIG. 3075: DNA325387,XM_{—}109162,gen.XM_{—}109162

[3111] FIG. 3076: DNA227509,NM_{—}000274,gen.NM_{—}000274

[3112] FIG. 3077: PRO37972

[3113] FIG. 3078: DNA325388,XM_{—}058361,gen.XM_{—}058361

[3114] FIG. 3079: PRO81922

[3115] FIG. 3080: DNA325389,XM_{—}084505,gen.XM_{—}084505

[3116] FIG. 3081: PRO81923

[3117] FIG. 3082A-B: DNA325390,XM_{—}049795,gen.XM_{—}049795

[3118] FIG. 3083: PRO81924

[3119] FIG. 3084: DNA325391,XM_{—}058406,gen.XM_{—}058406

[3120] FIG. 3085: PRO81925

[3121] FIG. 3086: DNA325392,XM_{—}055573,gen.XM_{—}055573

[3122] FIG. 3087: PRO60991

[3123] FIG. 3088: DNA325393,XM_{—}005969,gen.XM_{—}005969

[3124] FIG. 3089: DNA325394,NM_{—}007190,gen.NM_{—}007190

[3125] FIG. 3090: PRO81926

[3126] FIG. 3091: DNA325395,NM_{—}000982,gen.NM_{—}000982

[3127] FIG. 3092: PRO81927

[3128] FIG. 3093: DNA269952,NM_{—}004725,gen.NM_{—}004725

[3129] FIG. 3094: PRO58348

[3130] FIG. 3095: DNA325396,NM_{—}024942,gen.NM_{—}024942

[3131] FIG. 3096: PRO81928

[3132] FIG. 3097: DNA325397,NM_{—}016567,gen.NM_{—}016567

[3133] FIG. 3098: PRO81929

[3134] FIG. 3099: DNA325398,NM_{—}004092,gen.NM_{—}004092

[3135] FIG. 3100: PRO81930

[3136] FIG. 3101: DNA269431,NM_{—}006659,gen.NM_{—}006659

[3137] FIG. 3102: PRO57854

[3138] FIG. 3103: DNA325399,XM_{—}005675,gen.XM_{—}005675

[3139] FIG. 3104: DNA325400,XM_{—}114862,gen.XM_{—}114862

[3140] FIG. 3105: PRO81932

[3141] FIG. 3106: DNA325401,XM_{—}088009,gen.XM_{—}088009

[3142] FIG. 3107: DNA325402,NM_{—}016526,gen.NM_{—}016526

[3143] FIG. 3108: PRO81934

[3144] FIG. 3109: DNA255696,NM_{—}021932,gen.NM_{—}021932

[3145] FIG. 3110: PRO50756

[3146] FIG. 3111: DNA325403,XM_{—}043220,gen.XM_{—}043220

[3147] FIG. 3112: PRO81935

[3148] FIG. 3113: DNA255078,NM_{—}006435,gen.NM_{—}006435

[3149] FIG. 3114: PRO50165

[3150] FIG. 3115: DNA325404,NM_{—}002339,gen.NM_{—}002339

[3151] FIG. 3116: PRO81936

[3152] FIG. 3117: DNA325405,XM_{—}028192,gen.XM_{—}028192

[3153] FIG. 3118: PRO81937

[3154] FIG. 3119: DNA325406,XM_{—}096544,gen.XM_{—}096544

[3155] FIG. 3120: DNA325407,NM_{—}000612,gen.NM_{—}000612

[3156] FIG. 3121: PRO124

[3157] FIG. 3122: DNA325408,XM_{—}084742,gen.XM_{—}084742

[3158] FIG. 3123: PRO81939

[3159] FIG. 3124: DNA325409,XM_{—}084739,gen.XM_{—}084739

[3160] FIG. 3125: DNA325410,XM_{—}058505,gen.XM_{—}058505

[3161] FIG. 3126: PRO81941

[3162] FIG. 3127: DNA325411,XM_{—}006139,gen.XM_{—}006139

[3163] FIG. 3128: PRO81942

[3164] FIG. 3129: DNA325412,XM_{—}044932,gen.XM_{—}044932

[3165] FIG. 3130: PRO81943

[3166] FIG. 3131A-B: DNA325413,XM_{—}044957,gen.XM_{—}044957

[3167] FIG. 3132: PRO81944

[3168] FIG. 3133: DNA325414,NM_{—}001909,gen.NM_{—}001909

[3169] FIG. 3134: PRO292

[3170] FIG. 3135: DNA325415,XM_{—}006475,gen.XM_{—}006475

[3171] FIG. 3136: DNA325416,XM_{—}006483,gen.XM_{—}006483

[3172] FIG. 3137: DNA325417,NM_{—}001751,gen.NM_{—}001751

[3173] FIG. 3138: PRO69635

[3174] FIG. 3139: DNA325418,XM_{—}114981,gen.XM_{—}114981

[3175] FIG. 3140: PRO81945

[3176] FIG. 3141: DNA325419,XM_{—}083852,gen.XM_{—}083852

[3177] FIG. 3142: DNA325420,NM_{—}000559,gen.NM_{—}000559

[3178] FIG. 3143: PRO81946

[3179] FIG. 3144: DNA325421,NM_{—}000184,gen.NM_{—}000184

[3180] FIG. 3145: PRO81947

[3181] FIG. 3146: DNA325422,NM_{—}005330,gen.NM_{—}005330

[3182] FIG. 3147: PRO81948

[3183] FIG. 3148: DNA325423,XM_{—}015243,gen.XM_{—}015243

[3184] FIG. 3149: DNA325424,NM_{—}015324,gen.NM_{—}015324

[3185] FIG. 3150: PRO81950

[3186] FIG. 3151: DNA325425,XM_{—}006424,gen.XM_{—}006424

[3187] FIG. 3152: DNA325426,XM_{—}113238,gen.XM_{—}113238

[3188] FIG. 3153A-C: DNA325427,XM_{—}052786,gen.XM_{—}052786

[3189] FIG. 3154: PRO81953

[3190] FIG. 3155: DNA325428,NM_{—}000990,gen.NM_{—}000990

[3191] FIG. 3156: PRO25985

[3192] FIG. 3157A-B: DNA325429,XM_{—}045750,gen.XM_{—}045750

[3193] FIG. 3158: PRO81954

[3194] FIG. 3159: DNA325430,XM_{—}058414,gen.XM_{—}058414

[3195] FIG. 3160: PRO81955

[3196] FIG. 3161A-B: DNA325431,XM_{—}049197,gen.XM_{—}049197

[3197] FIG. 3162: PRO81956

[3198] FIG. 3163A-B: DNA325432,NM_{—}001418,gen.NM_{—}001418

[3199] FIG. 3164: PRO81957

[3200] FIG. 3165: DNA325433,XM_{—}096520,gen.XM_{—}096520

[3201] FIG. 3166: PRO81958

[3202] FIG. 3167: DNA325434,XM_{—}006212,gen.XM_{—}006212

[3203] FIG. 3168: PRO81959

[3204] FIG. 3169: DNA325435,XM_{—}084527,gen.XM_{—}084527

[3205] FIG. 3170: DNA325436,XM_{—}016139,gen.XM_{—}016139

[3206] FIG. 3171: DNA325437,NM_{—}001017,gen.NM_{—}001017

[3207] FIG. 3172: PRO11262

[3208] FIG. 3173: DNA325438,NM_{—}014267,gen.NM_{—}014267

[3209] FIG. 3174: PRO81962

[3210] FIG. 3175: DNA97285,NM_{—}005566,gen.NM_{—}005566

[3211] FIG. 3176: PRO3632

[3212] FIG. 3177: DNA325439,XM_{—}115081,gen.XM_{—}115081

[3213] FIG. 3178: DNA325440,XM_{—}036339,gen.XM_{—}036339

[3214] FIG. 3179: PRO81964

[3215] FIG. 3180: DNA325441,XM_{—}084514,gen.XM_{—}084514

[3216] FIG. 3181: PRO81965

[3217] FIG. 3182: DNA325442,XM_{—}084516,gen.XM_{—}084516

[3218] FIG. 3183: DNA325443,XM_{—}084515,gen.XM_{—}084515

[3219] FIG. 3184: DNA325444,XM_{—}084517,gen.XM_{—}084517

[3220] FIG. 3185: DNA325445,XM_{—}034431,gen.XM_{—}034431

[3221] FIG. 3186: PRO11691

[3222] FIG. 3187: DNA325446,XM_{—}030326,gen.XM_{—}030326

[3223] FIG. 3188: DNA325447,NM_{—}057174,gen.NM_{—}057174

[3224] FIG. 3189: PRO81970

[3225] FIG. 3190: DNA325448,NM_{—}004813,gen.NM_{—}004813

[3226] FIG. 3191: PRO81971

[3227] FIG. 3192: DNA325449,XM_{—}167437,gen.XM_{—}167437

[3228] FIG. 3193: DNA325450,XM_{—}054856,gen.XM_{—}054856

[3229] FIG. 3194: DNA325451,XM_{—}004330,gen.XM_{—}004330

[3230] FIG. 3195: DNA325452,XM_{—}084681,gen.XM_{—}084681

[3231] FIG. 3196: DNA325453,XM_{—}006297,gen.XM_{—}006297

[3232] FIG. 3197: DNA325454,NM_{—}003646,gen.NM_{—}003646

[3233] FIG. 3198: PRO81977

[3234] FIG. 3199: DNA325455,NM_{—}004551,gen.NM_{—}004551

[3235] FIG. 3200: PRO81978

[3236] FIG. 3201: DNA325456,XM_{—}006170,gen.XM_{—}006170

[3237] FIG. 3202: DNA325457,XM_{—}037173,gen.XM_{—}037173

[3238] FIG. 3203: PRO81980

[3239] FIG. 3204: DNA150974,NM_{—}005693,gen.NM_{—}005693

[3240] FIG. 3205: PRO12224

[3241] FIG. 3206: DNA226080,NM_{—}001610,gen.NM_{—}001610

[3242] FIG. 3207: PRO36543

[3243] FIG. 3208: DNA270134,NM_{—}000107,gen.NM_{—}000107

[3244] FIG. 3209: PRO58523

[3245] FIG. 3210: DNA325458,NM_{—}016223,gen.NM_{—}016223

[3246] FIG. 3211: PRO81981

[3247] FIG. 3212: DNA325459,XM_{—}037147,gen.XM_{—}037147

[3248] FIG. 3213: PRO81982

[3249] FIG. 3214: DNA325460,XM_{—}015705,gen.XM_{—}015705

[3250] FIG. 3215: DNA272728,NM_{—}003146,gen.NM_{—}003146

[3251] FIG. 3216: PRO60847

[3252] FIG. 3217: DNA325461,XM_{—}165611,gen.XM_{—}165611

[3253] FIG. 3218: DNA287417,NM_{—}024098,gen.NM_{—}024098

[3254] FIG. 3219: PRO69674

[3255] FIG. 3220: DNA227088,NM_{—}014502,gen.NM_{—}014502

[3256] FIG. 3221: PRO37551

[3257] FIG. 3222: DNA325462,XM_{—}165610,gen.XM_{—}165610

[3258] FIG. 3223A-B: DNA325463,XM_{—}165612,gen.XM_{—}165612

[3259] FIG. 3224: DNA325464,XM_{—}166234,gen.XM_{—}166234

[3260] FIG. 3225: DNA325465,NM_{—}015533,gen.NM_{—}015533

[3261] FIG. 3226: PRO81988

[3262] FIG. 3227: DNA325466,XM_{—}166232,gen.XM_{—}166232

[3263] FIG. 3228A-B: DNA325467,XM_{—}167748,gen.XM_{—}167748

[3264] FIG. 3229: PRO81990

[3265] FIG. 3230: DNA325468,NM_{—}004739,gen.NM_{—}004739

[3266] FIG. 3231: PRO81991

[3267] FIG. 3232: DNA325469,NM_{—}014610,gen.NM_{—}014610

[3268] FIG. 3233: PRO81992

[3269] FIG. 3234: DNA325470,XM_{—}167747,gen.XM_{—}167747

[3270] FIG. 3235: PRO81993

[3271] FIG. 3236: DNA287254,NM_{—}024099,gen.NM_{—}024099

[3272] FIG. 3237: PRO69528

[3273] FIG. 3238: DNA325471,NM_{—}015853,gen.NM_{—}015853

[3274] FIG. 3239: PRO81994

[3275] FIG. 3240: DNA325472,NM_{—}032667,gen.NM_{—}032667

[3276] FIG. 3241: PRO81995

[3277] FIG. 3242: DNA325473,NM_{—}006362,gen.NM_{—}006362

[3278] FIG. 3243: PRO81996

[3279] FIG. 3244: DNA325474,XM_{—}167716,gen.XM_{—}167716

[3280] FIG. 3245: DNA75863,NM_{—}002411,gen.NM_{—}002411

[3281] FIG. 3246: PRO2018

[3282] FIG. 3247: DNA325475,XM_{—}087710,gen.XM_{—}087710

[3283] FIG. 3248: DNA325476,XM_{—}167726,gen.XM_{—}167726

[3284] FIG. 3249: DNA325477,NM_{—}004265,gen.NM_{—}004265

[3285] FIG. 3250: PRO 12878

[3286] FIG. 3251A-B: DNA325478,NM_{—}013402,gen.NM_{—}013402

[3287] FIG. 3252: PRO81999

[3288] FIG. 3253: DNA325479,NM_{—}004111,gen.NM_{—}004111

[3289] FIG. 3254: PRO69568

[3290] FIG. 3255: DNA325480,XM_{—}048286,gen.XM_{—}048286

[3291] FIG. 3256: DNA325481,NM_{—}004322,gen.NM_{—}004322

[3292] FIG. 3257: PRO20117

[3293] FIG. 3258: DNA325482,NM_{—}032989,gen.NM_{—}032989

[3294] FIG. 3259: PRO20117

[3295] FIG. 3260: DNA325483,XM_{—}011988,gen.XM_{—}011988

[3296] FIG. 3261: DNA325484,NM_{—}031472,gen.NM_{—}031472

[3297] FIG. 3262: PRO82002

[3298] FIG. 3263: DNA325485,XM_{—}037808,gen.XM_{—}037808

[3299] FIG. 3264: DNA325486,NM_{—}004074,gen.NM_{—}004074

[3300] FIG. 3265: PRO82004

[3301] FIG. 3266: DNA325487,NM_{—}017670,gen.NM_{—}017670

[3302] FIG. 3267: PRO82005

[3303] FIG. 3268: DNA325488,XM_{—}113223,gen.XM_{—}113223

[3304] FIG. 3269: DNA325489,XM_{—}045642,gen.XM_{—}045642

[3305] FIG. 3270: DNA325490,XM_{—}006533,gen.XM_{—}006533

[3306] FIG. 3271: DNA325491,XM_{—}045613,gen.XM_{—}045613

[3307] FIG. 3272: PRO59721

[3308] FIG. 3273A-B: DNA325492,XM_{—}045612,gen.XM_{—}045612

[3309] FIG. 3274: PRO82009

[3310] FIG. 3275: DNA325493,XM_{—}113224,gen.XM_{—}113224

[3311] FIG. 3276: DNA325494,XM_{—}045499,gen.XM_{—}045499

[3312] FIG. 3277: PRO82011

[3313] FIG. 3278: DNA325495,XM_{—}045525,gen.XM_{—}045525

[3314] FIG. 3279: DNA325496,NM_{—}013265,gen.NM_{—}013265

[3315] FIG. 3280: PRO82013

[3316] FIG. 3281: DNA325497,XM_{—}006529,gen.XM_{—}006529

[3317] FIG. 3282: PRO60008

[3318] FIG. 3283: DNA325498,XM_{—}053787,gen.XM_{—}053787

[3319] FIG. 3284: DNA269803,NM_{—}001667,gen.NM_{—}001667

[3320] FIG. 3285: PRO58207

[3321] FIG. 3286: DNA325499,XM_{—}115031,gen.XM_{—}115031

[3322] FIG. 3287: DNA325500,XM_{—}084702,gen.XM_{—}084702

[3323] FIG. 3288: DNA325501,XM_{—}053796,gen.XM_{—}053796

[3324] FIG. 3289: DNA325502,NM_{—}002689,gen.NM_{—}002689

[3325] FIG. 3290: PRO82018

[3326] FIG. 3291A-D: DNA325503,XM_{—}167804,gen.XM_{—}167804

[3327] FIG. 3292: PRO82019

[3328] FIG. 3293: DNA325504,XM_{—}166235,gen.XM_{—}166235

[3329] FIG. 3294: DNA325505,XM_{—}166236,gen.XM_{—}166236

[3330] FIG. 3295: DNA270721,NM_{—}006842,gen.NM_{—}006842

[3331] FIG. 3296: PRO59084

[3332] FIG. 3297: DNA189687,NM_{—}000852,gen.NM_{—}000852

[3333] FIG. 3298: PRO25845

[3334] FIG. 3299: DNA325506,NM_{—}007103,gen.NM_{—}007103

[3335] FIG. 3300: PRO58606

[3336] FIG. 3301: DNA325507,NM_{—}005851,gen.NM_{—}005851

[3337] FIG. 3302: PRO69461

[3338] FIG. 3303A-B: DNA325508,XM_{—}165598,gen.XM_{—}165598

[3339] FIG. 3304: DNA325509,NM_{—}006019,gen.NM_{—}006019

[3340] FIG. 3305: PRO82023

[3341] FIG. 3306: DNA325510,NM_{—}006053,gen.NM_{—}106053

[3342] FIG. 3307: PRO24831

[3343] FIG. 3308: DNA325511,XM_{—}166196,gen.XM_{—}166196

[3344] FIG. 3309: PRO82024

[3345] FIG. 3310: DNA325512,XM_{—}165600,gen.XM_{≠}165600

[3346] FIG. 3311A-B: DNA325513,NM_{—}053056,gen.NM_{—}053056

[3347] FIG. 3312: PRO4870

[3348] FIG. 3313: DNA103474,NM_{—}003824,gen.NM_{—}003824

[3349] FIG. 3314: PRO4801

[3350] FIG. 3315: DNA325514,XM_{—}096486,gen.XM_{—}096486

[3351] FIG. 3316A-B: DNA325515,NM_{—}003626,gen.NM_{—}003626

[3352] FIG. 3317: PRO82027

[3353] FIG. 3318A-B: DNA325516,XM_{—}167853,gen.XM_{—}167853

[3354] FIG. 3319: PRO82028

[3355] FIG. 3320: DNA325517,NM_{—}014042,gen.NM_{—}014042

[3356] FIG. 3321: PRO82029

[3357] FIG. 3322A-B: DNA325518,NM_{—}001567,gen.NM_{—}001567

[3358] FIG. 3323: PRO61238

[3359] FIG. 3324: DNA325519,XM_{—}167433,gen.XM_{—}167433

[3360] FIG. 3325: DNA325520,XM_{—}165616,gen.XM_{—}165616

[3361] FIG. 3326: DNA325521,NM_{—}032871,gen.NM_{—}032871

[3362] FIG. 3327: PRO57307

[3363] FIG. 3328: DNA325522,XM_{—}165631,gen.XM_{—}165631

[3364] FIG. 3329: DNA254186,NM_{—}014752,gen.NM_{—}014752

[3365] FIG. 3330: PRO49298

[3366] FIG. 3331: DNA325523,NM_{—}001005,gen.NM_{—}001005

[3367] FIG. 3332: PRO82032

[3368] FIG. 3333: DNA88176,NM_{—}001235,gen.NM_{—}001235

[3369] FIG. 3334: PRO2685

[3370] FIG. 3335A-B: DNA325524,XM_{—}165627,gen.XM_{—}165627

[3371] FIG. 3336: DNA325525,XM_{—}166253,gen.XM_{—}166253

[3372] FIG. 3337: DNA325526,NM_{—}001293,gen.NM_{—}001293

[3373] FIG. 3338: PRO82034

[3374] FIG. 3339: DNA325527,XM_{—}042852,gen.XM_{—}042852

[3375] FIG. 3340: PRO82035

[3376] FIG. 3341: DNA325528,XM_{—}165628,gen.XM_{—}165628

[3377] FIG. 3342A-B: DNA325529,NM_{—}080491,gen.NM_{—}080491

[3378] FIG. 3343: PRO82037

[3379] FIG. 3344A-B: DNA325530,NM_{—}012296,gen.NM_{—}012296

[3380] FIG. 3345: PRO60311

[3381] FIG. 3346: DNA325531,NM_{—}032379,gen.NM_{—}032379

[3382] FIG. 3347: PRO82038

[3383] FIG. 3348: DNA325532,NM_{—}007173,gen.NM_{—}007173

[3384] FIG. 3349: DNA325533,XM_{—}166239,gen.XM_{—}166239

[3385] FIG. 3350: DNA325534,XM_{—}084610,gen.XM_{—}084610

[3386] FIG. 3351: PRO82040

[3387] FIG. 3352: DNA325535,XM_{—}058450,gen.XM_{—}058450

[3388] FIG. 3353: DNA325536,XM_{—}084601,gen.XM_{—}094601

[3389] FIG. 3354: PRO82042

[3390] FIG. 3355A-B: DNA325537,XM_{—}006464,gen.XM_{—}006464

[3391] FIG. 3356: PRO82043

[3392] FIG. 3357: DNA325538,0M 084570,gen.XM_{—}084570

[3393] FIG. 3358: DNA325539,XM_{—}051435,gen.XM_{—}051435

[3394] FIG. 3359: DNA325540,NM_{—}001467,gen.NM_{—}001467

[3395] FIG. 3360: PRO82045

[3396] FIG. 3361: DNA325541,NM_{—}001028,gen.NM_{—}001028

[3397] FIG. 3362: PRO82046

[3398] FIG. 3363: DNA325542,XM_{—}113230,gen.XM_{—}113230

[3399] FIG. 3364: DNA325543,XM_{—}115062,gen.XM_{—}115062

[3400] FIG. 3365: DNA325544,XM_{—}115063,gen.XM_{—}115063

[3401] FIG. 3366: DNA325545,XM_{—}113229,gen.XM_{—}113229

[3402] FIG. 3367A-B: DNA325546,XM_{—}051489,gen.XM_{—}051489

[3403] FIG. 3368: PRO82050

[3404] FIG. 3369: DNA325547,NM_{—}022003,gen.NM_{—}022003

[3405] FIG. 3370: PRO82051

[3406] FIG. 3371: DNA325548,XM_{—}006432,gen.XM_{—}006432

[3407] FIG. 3372: PRO82052

[3408] FIG. 3373: DNA325549,XM_{—}051716,gen.XM_{—}051716

[3409] FIG. 3374: DNA325550,NM_{—}025164,gen.NM_{—}025164

[3410] FIG. 3375: PRO82054

[3411] FIG. 3376: DNA225752,NM_{—}000039,gen.NM_{—}000039

[3412] FIG. 3377: PRO36215

[3413] FIG. 3378: DNA325551,XM_{—}052113,gen.XM_{—}052113

[3414] FIG. 3379: PRO82055

[3415] FIG. 3380: DNA271324,NM_{—}006169,gen.NM_{—}006169

[3416] FIG. 3381: PRO59629

[3417] FIG. 3382: DNA325552,XM_{—}084658,gen.XM_{—}084658

[3418] FIG. 3383: PRO82056

[3419] FIG. 3384: DNA325553,NM_{—}000795,gen.NM_{—}000795

[3420] FIG. 3385: PRO12448

[3421] FIG. 3386: DNA325554,NM_{—}017868,gen.NM_{—}017868

[3422] FIG. 3387: PRO82057

[3423] FIG. 3388: DNA325555,XM_{—}084654,gen.XM_{—}084654

[3424] FIG. 3389: PRO82058

[3425] FIG. 3390: DNA272413,NM_{—}003002,gen.NM_{—}003002

[3426] FIG. 3391: PRO60666

[3427] FIG. 3392: DNA271843,NM_{—}004398,gen.NM_{—}004398

[3428] FIG. 3393: PRO60123

[3429] FIG. 3394: DNA325556,XM_{—}017369,gen.XM_{—}017369

[3430] FIG. 3395: DNA325557,NM_{—}032299,gen.NM_{—}032299

[3431] FIG. 3396: PRO82060

[3432] FIG. 3397: DNA325558,XM_{—}055369,gen.XM_{—}055369

[3433] FIG. 3398: DNA325559,XM_{—}051430,gen.XM_{—}051430

[3434] FIG. 3399: DNA325560,XM_{—}006467,gen.XM_{—}006467

[3435] FIG. 3400: DNA325561,XM_{—}113226,gen.XM_{—}113226

[3436] FIG. 3401: DNA325562,XM_{—}165592,gen.XM_{—}165592

[3437] FIG. 3402: PRO82064

[3438] FIG. 3403: DNA325563,XM_{—}166181,gen.XM_{—}166181

[3439] FIG. 3404: DNA325564,XM_{—}052862,gen.XM_{—}052862

[3440] FIG. 3405: PRO82066

[3441] FIG. 3406: DNA325565,XM_{—}166177,gen.XM_{—}166177

[3442] FIG. 3407: DNA325566,XM_{—}165571,gen.XM_{—}165571

[3443] FIG. 3408: PRO82068

[3444] FIG. 3409: DNA325567,XM_{—}166174,gen.XM_{—}166174

[3445] FIG. 3410: PRO82069

[3446] FIG. 3411: DNA325568,NM_{—}001274,gen.NM_{—}001274

[3447] FIG. 3412: PRO12187

[3448] FIG. 3413: DNA325569,XM_{—}165586,gen.XM_{—}165586

[3449] FIG. 3414: DNA325570,XM_{—}165584,gen.XM_{—}165584

[3450] FIG. 3415: DNA257965,NM_{—}032873,gen.NM_{—}032873

[3451] FIG. 3416: PRO52492

[3452] FIG. 3417: DNA325571,XM_{—}167780,gen.XM_{—}167780

[3453] FIG. 3418: DNA325572,XM_{—}166743,gen.XM_{—}166743

[3454] FIG. 3419: PRO82072

[3455] FIG. 3420: DNA325573,NM_{—}012101,gen.NM_{—}012101

[3456] FIG. 3421: PRO82073

[3457] FIG. 3422: DNA325574,NM_{—}058193,gen.NM_{—}058193

[3458] FIG. 3423: PRO82074

[3459] FIG. 3424: DNA325575,XM_{—}084522,gen.XM_{—}084522

[3460] FIG. 3425: PRO82075

[3461] FIG. 3426: DNA325576,XM_{—}091786,gen.XM_{—}091786

[3462] FIG. 3427: DNA325577,XM_{—}165390,gen.XM_{—}165390

[3463] FIG. 3428: DNA325578,XM_{—}084525,gen.XM_{—}084525

[3464] FIG. 3429A-B: DNA325579,XM_{—}010494,gen.XM_{—}010494

[3465] FIG. 3430A-B: DNA325580,NM_{—}015064,gen.NM_{—}015064

[3466] FIG. 3431: PRO82078

[3467] FIG. 3432: DNA325581,NM_{—}030775,gen.NM_{—}030775

[3468] FIG. 3433: PRO71031

[3469] FIG. 3434: DNA297398,NM_{—}032642,gen.NM_{—}032642

[3470] FIG. 3435: PRO71031

[3471] FIG. 3436: DNA325582,XM_{—}017080,gen.XM_{—}017080

[3472] FIG. 3437: DNA325583,XM_{—}113739,gen.XM_{—}113739

[3473] FIG. 3438: PRO82080

[3474] FIG. 3439: DNA325584,NM_{—}002014,gen.NM_{—}002014

[3475] FIG. 3440: PRO59262

[3476] FIG. 3441: DNA325585,XM_{—}096661,gen.XM_{—}096661

[3477] FIG. 3442: DNA325586,NM_{—}018463,gen.NM_{—}018463

[3478] FIG. 3443: PRO82082

[3479] FIG. 3444: DNA325587,NM_{—}021953,gen.NM_{—}021953

[3480] FIG. 3445: PRO82083

[3481] FIG. 3446: DNA325588,NM_{—}031465,gen.NM_{—}031465

[3482] FIG. 3447: PRO82084

[3483] FIG. 3448: DNA325589,NM_{—}005002,gen.NM_{—}005002

[3484] FIG. 3449: PRO82085

[3485] FIG. 3450: DNA325590,XM_{—}033227,gen.XM_{—}033227

[3486] FIG. 3451: DNA325591,XM_{—}116926,gen.XM_{—}116926

[3487] FIG. 3452: DNA88114,NM_{—}001734,gen.NM_{—}001734

[3488] FIG. 3453: PRO2660

[3489] FIG. 3454: DNA325592,XM_{—}058574,gen.XM_{—}058574

[3490] FIG. 3455: DNA325593,NM_{—}007273,gen.NM_{—}007273

[3491] FIG. 3456: PRO36970

[3492] FIG. 3457A-B: DNA325594,XM_{—}032588,gen.XM_{—}032588

[3493] FIG. 3458: DNA325595,NM_{—}001975,gen.NM_{—}001975

[3494] FIG. 3459: PRO38010

[3495] FIG. 3460: DNA325596,NM_{—}000365,gen.NM_{—}000365

[3496] FIG. 3461: PRO69549

[3497] FIG. 3462: DNA325597,XM_{—}032614,gen.XM_{—}032614

[3498] FIG. 3463: DNA325598,NM_{—}002075,gen.NM_{—}002075

[3499] FIG. 3464: PRO82091

[3500] FIG. 3465: DNA325599,XM_{—}165910,gen.XM_{—}165910

[3501] FIG. 3466: DNA151827,NM_{—}005439,gen.NM_{—}005439

[3502] FIG. 3467: PRO12902

[3503] FIG. 3468A-B: DNA254624,NM_{—}001273,gen.NM_{—}001273

[3504] FIG. 3469: PRO49726

[3505] FIG. 3470: DNA325600,NM_{—}015438,gen.NM_{—}015438

[3506] FIG. 3471: PRO82093

[3507] FIG. 3472: DNA325601,XM_{—}033263,gen.XM_{—}033263

[3508] FIG. 3473: DNA225632,NM_{—}002046,gen.NM_{—}002046

[3509] FIG. 3474: PRO36095

[3510] FIG. 3475A-B: DNA325602,XM_{—}006958,gen.XM_{—}006958

[3511] FIG. 3476: DNA83180,NM_{—}002342,gen.NM_{—}002342

[3512] FIG. 3477: PRO2622

[3513] FIG. 3478: DNA103514,NM_{—}001038,gen.NM_{—}001038

[3514] FIG. 3479: PRO4841

[3515] FIG. 3480: DNA188396,NM_{—}001065,gen.NM_{—}001065

[3516] FIG. 3481: PRO21924

[3517] FIG. 3482A-C: DNA325603,XM_{—}006947,gen.XM_{—}006947

[3518] FIG. 3483A-B: DNA325604,XM_{—}006936,gen.XM_{—}006936

[3519] FIG. 3484: PRO82097

[3520] FIG. 3485A-B: DNA325605,XM_{—}006925,gen.XM_{—}006925

[3521] FIG. 3486: DNA325606,XM_{—}096630,gen.XM_{—}096630

[3522] FIG. 3487: PRO82099

[3523] FIG. 3488: DNA325607,XM_{—}084901,gen.XM_{—}084901

[3524] FIG. 3489: DNA226028,NM_{—}002355,gen.NM_{—}002355

[3525] FIG. 3490: PRO36491

[3526] FIG. 3491: DNA325608,XM_{—}031807,gen.XM_{—}031807

[3527] FIG. 3492: PRO82101

[3528] FIG. 3493A-B: DNA325609,XM_{—}049663,gen.XM_{—}049663

[3529] FIG. 3494: DNA325610,XM_{—}012159,gen.XM_{—}012159

[3530] FIG. 3495: DNA325611,XM_{—}084922,gen.XM_{—}084922

[3531] FIG. 3496: DNA325612,NM_{—}031289,gen.NM_{—}031289

[3532] FIG. 3497: PRO82104

[3533] FIG. 3498: DNA226771,NM_{—}003979,gen.NM_{—}003979

[3534] FIG. 3499: PRO37234

[3535] FIG. 3500: DNA325613,XM_{—}084918,gen.XM_{—}084918

[3536] FIG. 3501: DNA325614,NM_{—}007178,gen.NM_{—}007178

[3537] FIG. 3502: PRO82106

[3538] FIG. 3503: DNA325615,XM_{—}041100,gen.XM_{—}041100

[3539] FIG. 3504A-B: DNA325616,XM_{—}058567,gen.XM_{—}058567

[3540] FIG. 3505: PRO82107

[3541] FIG. 3506A-B: DNA325617,XM_{—}166605,gen.XM_{—}166605

[3542] FIG. 3507: DNA325618,XM_{—}029805,gen.XM_{—}029805

[3543] FIG. 3508: PRO82109

[3544] FIG. 3509: DNA325619,NM_{—}005889,gen.NM_{—}005889

[3545] FIG. 3510: PRO82110

[3546] FIG. 3511: DMA256072,NM_{—}001644,gen.NM_{—}001644

[3547] FIG. 3512: PRO51121

[3548] FIG. 3513: DNA325620,NM_{—}018686,gen.NM_{—}018686

[3549] FIG. 3514: PRO82111

[3550] FIG. 3515: DNA325621,XM_{—}084770,gen.XM_{—}084770

[3551] FIG. 3516: PRO82112

[3552] FIG. 3517: DNA325622,NM_{—}018048,gen.NM_{—}018048

[3553] FIG. 3518: PRO82113

[3554] FIG. 3519: DNA325623,XM_{—}113730,gen.XM_{—}113730

[3555] FIG. 3520: DNA150978,NM_{—}007244,gen.NM_{—}007244

[3556] FIG. 3521: PRO11601

[3557] FIG. 3522: DNA325624,NM_{—}006250,gen.NM_{—}006250

[3558] FIG. 3523: PRO82115

[3559] FIG. 3524: DNA79313,NM_{—}005042,gen.NM_{—}005042

[3560] FIG. 3525: PRO2555

[3561] FIG. 3526: DNA150997,NM_{—}004982,gen.NM_{—}004982

[3562] FIG. 3527: PRO12573

[3563] FIG. 3528: DNA325625,XM_{—}050074,gen.XM_{—}050074

[3564] FIG. 3529: DNA325626,NM_{—}024854,gen.NM_{—}024854

[3565] FIG. 3530: PRO82117

[3566] FIG. 3531: DNA325627,XM_{—}084807,gen.XM_{—}084807

[3567] FIG. 3532: DNA325628,XM_{—}165906,gen.XM_{—}165906

[3568] FIG. 3533A-B: DNA325629,XM_{—}038659,gen.XM_{—}038659

[3569] FIG. 3534: PRO82120

[3570] FIG. 3535: DNA325630,XM_{—}006694,gen.XM_{—}006694

[3571] FIG. 3536: DNA325631,XM_{—}006748,gen.XM_{—}006748

[3572] FIG. 3537: PRO82122

[3573] FIG. 3538: DNA325632,XM_{—}016640,gen.XM_{—}016640

[3574] FIG. 3539: DNA325633,XM_{—}096146,gen.XM_{—}096146

[3575] FIG. 3540A-B: DNA325634,XM_{—}084841,gen.XM_{—}084841

[3576] FIG. 3541: PRO82125

[3577] FIG. 3542: DNA325635,XM_{—}090218,gen.XM_{—}090218

[3578] FIG. 3543: DNA325636,XM_{—}012272,gen.XM_{—}012272

[3579] FIG. 3544: PRO82127

[3580] FIG. 3545A-B: DNA325637,XM_{—}056481,gen.XM_{—}056481

[3581] FIG. 3546: DNA325638,NM_{—}006262,gen.NM_{—}006262

[3582] FIG. 3547: PRO82129

[3583] FIG. 3548: DNA325639,NM_{—}018113,gen.NM_{—}018113

[3584] FIG. 3549: PRO82130

[3585] FIG. 3550: DNA271344,NM_{—}001659,gen.NM_{—}001659

[3586] FIG. 3551: PRO59647

[3587] FIG. 3552: DNA325640,NM_{—}017822,gen.NM_{—}017822

[3588] FIG. 3553: PRO82131

[3589] FIG. 3554A-E: DNA325641,XM_{—}028760,gen.XM_{—}028760

[3590] FIG. 3555: DNA272379,NM_{—}002733,gen.NM_{—}002733

[3591] FIG. 3556: PRO60634

[3592] FIG. 3557: DNA325642,XM_{—}084866,gen.XM_{—}084866

[3593] FIG. 3558: PRO82133

[3594] FIG. 3559: DNA325643,XM_{—}006826,gen.XM_{—}006826

[3595] FIG. 3560: DNA325644,XM_{—}113719,gen.XM_{—}113719

[3596] FIG. 3561: DNA325645,XM_{—}028662,gen.XM_{—}028662

[3597] FIG. 3562: DNA325646,XM_{—}035497,gen.XM_{—}035497

[3598] FIG. 3563: PRO82137

[3599] FIG. 3564: DNA325647,XM_{—}035490,gen.XM_{—}035490

[3600] FIG. 3565: PRO82138

[3601] FIG. 3566: DNA325648,NM_{—}013277,gen.NM_{—}013277

[3602] FIG. 3567: PRO82139

[3603] FIG. 3568: DNA325649,NM_{—}003076,gen.NM_{—}003076

[3604] FIG. 3569: PRO82140

[3605] FIG. 3570: DNA325650,XM_{—}115117,gen.XM_{—}115117

[3606] FIG. 3571: DNA325651,XM_{—}035485,gen.XM_{—}035485

[3607] FIG. 3572A-B: DNA325652,NM_{—}016357,gen.NM_{—}016357

[3608] FIG. 3573: PRO82143

[3609] FIG. 3574: DNA325653,NM_{—}005171,gen.NM_{—}005171

[3610] FIG. 3575: PRO60924

[3611] FIG. 3576: DNA325654,NM_{—}014033,gen.NM_{—}014033

[3612] FIG. 3577: PRO4348

[3613] FIG. 3578: DNA325655,XM_{—}096620,gen.XM_{—}096620

[3614] FIG. 3579: DNA325656,XM_{—}165905,gen.XM_{—}165905

[3615] FIG. 3580: DNA325657,XM_{—}015481,gen.XM_{—}015481

[3616] FIG. 3581: DNA325658,XM_{—}049148,gen.XM_{—}049148

[3617] FIG. 3582: DNA325659,XM_{—}084885,gen.XM_{—}084885

[3618] FIG. 3583: DNA325660,XM_{—}084884,gen.XM_{—}084884

[3619] FIG. 3584: DNA325661,XM_{—}113726,gen.XM_{—}113726

[3620] FIG. 3585: DNA325662,XM_{—}015476,gen.XM_{—}015476

[3621] FIG. 3586: DNA325663,XM_{—}049141,gen.XM_{—}049141

[3622] FIG. 3587: PRO82152

[3623] FIG. 3588: DNA227191,NM_{—}021934,gen.NM_{—}021934

[3624] FIG. 3589: PRO37654

[3625] FIG. 3590: DNA325664,XM_{—}083868,gen.XM_{—}083868

[3626] FIG. 3591: DNA270458,NM_{—}002273,gen.NM_{—}002273

[3627] FIG. 3592: PRO58837

[3628] FIG. 3593: DNA227092,NM_{—}000224,gen.NM_{—}000224

[3629] FIG. 3594: PRO37555

[3630] FIG. 3595: DNA325665,XM_{—}029728,gen.XM_{—}029728

[3631] FIG. 3596: DNA325666,XM_{—}015468,gen.XM_{—}015468

[3632] FIG. 3597: PRO82155

[3633] FIG. 3598: DNA325667,XM_{—}012162,gen.XM_{—}012162

[3634] FIG. 3599: DNA325668,XM_{—}084789,gen.XM_{—}084789

[3635] FIG. 3600: DNA196351,NM_{—}002178,gen.NM_{—}002178

[3636] FIG. 3601: PRO3449

[3637] FIG. 3602A-B: DNA325669,XM_{—}29631,gen.XM_{—}029631

[3638] FIG. 3603: PRO82158

[3639] FIG. 3604: DNA325670,NM_{—}015665,gen.NM_{—}015665

[3640] FIG. 3605: PRO82159

[3641] FIG. 3606: DNA325671,NM_{—}014311,gen.NM_{—}014311

[3642] FIG. 3607: PRO82160

[3643] FIG. 3608: DNA325672,XM_{—}096606,gen.XM_{—}096606

[3644] FIG. 3609: PRO82161

[3645] FIG. 3610: DNA325673,NM_{—}018457,gen.NM_{—}018457

[3646] FIG. 3611: PRO82162

[3647] FIG. 3612: DNA325674,NM_{—}031157,gen.NM_{—}031157

[3648] FIG. 3613: PRO82163

[3649] FIG. 3614: DNA325675,NM_{—}004178,gen.NM_{—}004178

[3650] FIG. 3615: PRO82164

[3651] FIG. 3616: DNA325676,NM_{—}134323,gen.NM_{—}134323

[3652] FIG. 3617: PRO82165

[3653] FIG. 3618: DNA325677,NM_{—}134324,gen.NM_{—}134324

[3654] FIG. 3619: PRO82166

[3655] FIG. 3620: DNA290294,NM_{—}005016,gen.NM_{—}005016

[3656] FIG. 3621: PRO70453

[3657] FIG. 3622: DNA325678,NM_{—}031989,gen.NM_{—}031989

[3658] FIG. 3623: PRO82167

[3659] FIG. 3624: DNA325679,XM_{—}028643,gen.XM_{—}028643

[3660] FIG. 3625: PRO82168

[3661] FIG. 3626: DNA325680,XM_{—}006710,gen.XM_{—}006710

[3662] FIG. 3627: PRO82169

[3663] FIG. 3628: DNA227094,NM_{—}005594,gen.NM_{—}005594

[3664] FIG. 3629: PRO37557

[3665] FIG. 3630: DNA325681,XM_{—}084824,gen.XM_{—}084824

[3666] FIG. 3631: DNA304783,NM_{—}014255,gen.NM_{—}014255

[3667] FIG. 3632: PRO4426

[3668] FIG. 3633: DNA325682,XM_{—}165903,gen.XM_{—}165903

[3669] FIG. 3634: DNA325683,XM_{—}115140,gen.XM_{—}115140

[3670] FIG. 3635: DNA325684,XM_{—}113712,gen.XM_{—}113712

[3671] FIG. 3636: DNA325685,NM_{—}006601,gen.NM_{—}006601

[3672] FIG. 3637: PRO82174

[3673] FIG. 3638: DNA325686,XM_{—}012182,gen.XM_{—}012182

[3674] FIG. 3639: PRO82175

[3675] FIG. 3640: DNA325687,XM_{—}048943,gen.XM_{—}048943

[3676] FIG. 3641: DNA325688,XM_{—}053164,gen.XM_{—}053164

[3677] FIG. 3642: DNA325689,XM_{—}048991,gen.XM_{—}048991

[3678] FIG. 3643: DNA325690,NM_{—}024068,gen.NM_{—}024068

[3679] FIG. 3644: PRO82179

[3680] FIG. 3645A-B: DNA325691,XM_{—}056346,gen.XM_{—}056346

[3681] FIG. 3646: DNA325692,NM_{—}021019,gen.NM_{—}021019

[3682] FIG. 3647: PRO82181

[3683] FIG. 3648: DNA325693,NM_{—}079423,gen.NM_{—}079423

[3684] FIG. 3649: PRO82182

[3685] FIG. 3650: DNA325694,NM_{—}079425,gen.NM_{—}079425

[3686] FIG. 3651: PRO82183

[3687] FIG. 3652: DNA325695,XM_{—}049048,gen.XM_{—}049048

[3688] FIG. 3653: PRO82184

[3689] FIG. 3654: DNA325696,NM_{—}021104,gen.NM_{—}021104

[3690] FIG. 3655: PRO11213

[3691] FIG. 3656: DNA325697,NM_{—}001029,gen.NM_{—}001029

[3692] FIG. 3657: PRO10838

[3693] FIG. 3658: DNA325698,XM_{—}001482,gen.XM_{—}001482

[3694] FIG. 3659: DNA325699,XM_{—}049150,gen.XM_{—}049150

[3695] FIG. 3660: DNA325700,NM_{—}006928,gen.NM_{—}006928

[3696] FIG. 3661: PRO2846

[3697] FIG. 3662: DNA325701,XM_{—}056353,gen.XM_{—}056353

[3698] FIG. 3663: DNA325702,NM_{—}001780,gen.NM_{—}001780

[3699] FIG. 3664: PRO283

[3700] FIG. 3665: DNA325703,NM_{—}031479,gen.NM_{—}031479

[3701] FIG. 3666: PRO21773

[3702] FIG. 3667A-: DNA137231,NM_{—}005269,gen.NM_{—}005269

[3703] FIG. 3668: PRO9112

[3704] FIG. 3669: DNA325704,NM_{—}004990,gen.NM_{—}004990

[3705] FIG. 3670: PRO82188

[3706] FIG. 3671: DNA325705,XM_{—}058528,gen.XM_{—}058528

[3707] FIG. 3672: DNA325706,XM_{—}084801,gen.XM_{—}084801

[3708] FIG. 3673: PRO82190

[3709] FIG. 3674: DNA325707,XM_{—}048603,gen.XM_{—}048603

[3710] FIG. 3675: PRO82191

[3711] FIG. 3676: DNA325708,NM_{—}133483,gen.NM_{—}133483

[3712] FIG. 3677: PRO82192

[3713] FIG. 3678: DNA79101,NM_{—}006812,gen.NM_{—}006812

[3714] FIG. 3679: PRO2549

[3715] FIG. 3680: DNA325709,XM_{—}096566,gen.XM_{—}096566

[3716] FIG. 3681: DNA325710,NM_{—}005981,gen.NM_{—}005981

[3717] FIG. 3682: PRO4666

[3718] FIG. 3683: DNA325711,NM_{—}000075,gen.NM_{—}000075

[3719] FIG. 3684: PRO4873

[3720] FIG. 3685: DNA325712,NM_{—}052984,gen.NM_{—}052984

[3721] FIG. 3686: PRO82194

[3722] FIG. 3687: DNA325713,NM_{—}000785,gen.NM_{—}000785

[3723] FIG. 3688: PRO58440

[3724] FIG. 3689: DNA325714,NM_{—}005371,gen.NM_{—}005371

[3725] FIG. 3690: PRO82195

[3726] FIG. 3691: DNA325715,NM_{—}023032,gen.NM_{—}023032

[3727] FIG. 3692: PRO82196

[3728] FIG. 3693: DNA325716,NM_{—}023033,gen.NM_{—}023033

[3729] FIG. 3694: PRO82197

[3730] FIG. 3695: DNA325717,NM_{—}005726,gen.NM_{—}005726

[3731] FIG. 3696: PRO82198

[3732] FIG. 3697: DNA325718,NM_{—}006576,gen.NM_{—}006576

[3733] FIG. 3698: PRO82199

[3734] FIG. 3699A-B: DNA325719,XM_{—}96038,gen.XM_{—}96038

[3735] FIG. 3700: DNA325720,XM_{—}056681,gen.XM_{—}056681

[3736] FIG. 3701: PRO82201

[3737] FIG. 3702: DNA325721,XM_{—}084909,gen.XM_{—}084909

[3738] FIG. 3703: PRO82202

[3739] FIG. 3704: DNA325722,XM_{—}004098,gen.XM_{—}004098

[3740] FIG. 3705: DNA325723,XM_{—}084912,gen.XM_{—}084912

[3741] FIG. 3706: PRO82204

[3742] FIG. 3707: DNA325724,XM_{—}040221,gen.XM_{—}040221

[3743] FIG. 3708: DNA325725,XM_{—}016605,gen.XM_{—}016605

[3744] FIG. 3709: PRO82206

[3745] FIG. 3710: DNA325726,XM_{—}017508,gen.XM_{—}017508

[3746] FIG. 3711: PRO82207

[3747] FIG. 3712: DNA325727,NM_{—}032338,gen.NM_{—}032338

[3748] FIG. 3713: PRO82208

[3749] FIG. 3714A-B: DNA325728,XM_{—}052460,gen.XM_{—}052460

[3750] FIG. 3715: DNA325729,XM_{—}083866,gen.XM_{—}083866

[3751] FIG. 3716: PRO82210

[3752] FIG. 3717: DNA304694,NM_{—}020401,gen.NM_{—}020401

[3753] FIG. 3718: PRO71120

[3754] FIG. 3719: DNA325730,XM_{—}052474,gen.XM_{—}052474

[3755] FIG. 3720: DNA227474,NM_{—}015646,gen.NM_{—}015646

[3756] FIG. 3721: PRO37937

[3757] FIG. 3722: DNA32573 1,XM_{—}053952,gen.XM_{—}053952

[3758] FIG. 3723: PRO82212

[3759] FIG. 3724: DNA227171,NM_{—}014515,gen.NM_{—}014515

[3760] FIG. 3725: PRO37634

[3761] FIG. 3726: DNA325732,XM_{—}046041,gen.XM_{—}046041

[3762] FIG. 3727: DNA271492,NM_{—}006530,gen.NM_{—}006530

[3763] FIG. 3728: PRO59785

[3764] FIG. 3729: DNA226014,NM_{—}000239,gen.NM_{—}000239

[3765] FIG. 3730: PRO36477

[3766] FIG. 3731: DNA325733,XM_{—}084645,gen.XM_{—}084645

[3767] FIG. 3732A-B: DNA325734,XM_{—}039395,gen.XM_{—}039395

[3768] FIG. 3733: PRO82213

[3769] FIG. 3734: DNA325736,XM_{—}040644,gen.XM_{—}040644

[3770] FIG. 3735: PRO82214

[3771] FIG. 3736A-B: DNA325737,XM_{—}006578,gen.XM_{—}006578

[3772] FIG. 3737: DNA325738,XM_{—}038308,gen.XM_{—}038308

[3773] FIG. 3738: PRO82215

[3774] FIG. 3739: DNA325739,XM_{—}096597,gen.XM_{—}096597

[3775] FIG. 3740: DNA325740,NM_{—}001920,gen.NM_{—}001920

[3776] FIG. 3741: PRO2841

[3777] FIG. 3742: DNA325741,NM_{—}133503,gen.NM_{—}133503

[3778] FIG. 3743: PRO2841

[3779] FIG. 3744: DNA325742,NM_{—}133504,gen.NM_{—}133504

[3780] FIG. 3745: PRO82218

[3781] FIG. 3746: DNA325743,NM_{—}133505,gen.NM_{—}133505

[3782] FIG. 3747: PRO82219

[3783] FIG. 3748: DNA325744,NM_{—}133507,gen.NM_{—}133507

[3784] FIG. 3749: PRO82220

[3785] FIG. 3750: DNA325745,NM_{—}133506,gen.NM_{—}133506

[3786] FIG. 3751: PRO82221

[3787] FIG. 3752: DNA325746,NM_{—}002345,gen.NM_{—}002345

[3788] FIG. 3753: PRO9987

[3789] FIG. 3754: DNA325747,XM_{—}167518,gen.XM_{—}167518

[3790] FIG. 3755: DNA325748,XM_{—}052542,gen.XM_{—}052542

[3791] FIG. 3756: PRO82223

[3792] FIG. 3757: DNA325749,NM_{—}003877,gen.NM_{—}003877

[3793] FIG. 3758: PRO12839

[3794] FIG. 3759: DNA325750,XM_{—}012219,gen.XM_{—}012219

[3795] FIG. 3760: PRO69473

[3796] FIG. 3761: DNA325751,XM_{—}012145,gen.XM_{—}012145

[3797] FIG. 3762: PRO82224

[3798] FIG. 3763: DNA274361,NM_{—}000895,gen.NM_{—}000895

[3799] FIG. 3764: PRO62273

[3800] FIG. 3765: DNA325752,XM_{—}006887,gen.XM_{—}006887

[3801] FIG. 3766: DNA325753,XM_{—}006589,gen.XM_{—}006589

[3802] FIG. 3767: DNA325754,XM_{—}090458,gen.XM_{—}090458

[3803] FIG. 3768: PRO82227

[3804] FIG. 3769: DNA325755,XM_{—}052641,gen.XM_{—}052641

[3805] FIG. 3770: PRO82228

[3806] FIG. 3771A-B: DNA325756,XM_{—}049211,gen.XM_{—}049211

[3807] FIG. 3772: DNA325757,XM_{—}049201,gen.XM_{—}049201

[3808] FIG. 3773: DNA325758,XM_{—}058556,gen.XM_{—}058556

[3809] FIG. 3774: DNA325759,XM_{—}083864,gen.XM_{—}083864

[3810] FIG. 3775: DNA325760,XM_{—}062437,gen.XM_{—}062437

[3811] FIG. 3776: PRO82232

[3812] FIG. 3777: DNA254777,NM_{—}014325,gen.NM_{—}014325

[3813] FIG. 3778: PRO49875

[3814] FIG. 3779: DNA325761,XM_{—}090413,gen.XM_{—}090413

[3815] FIG. 3780: PRO82233

[3816] FIG. 3781: DNA325762,NM_{—}000970,gen.NM_{—}000970

[3817] FIG. 3782: PRO82234

[3818] FIG. 3783: DNA325763,XM_{—}084800,gen.XM_{—}084800

[3819] FIG. 3784: PRO82235

[3820] FIG. 3785: DNA325764,NM_{—}006817,gen.NM_{—}006817

[3821] FIG. 3786: PRO70694

[3822] FIG. 3787A-C: DNA325765,XM_{—}083892,gen.XM_{—}083892

[3823] FIG. 3788A-B: DNA325766,XM_{—}084941,gen.NM_{—}084941

[3824] FIG. 3789: PRO82237

[3825] FIG. 3790A-B: DNA325767,NM_{—}057169,gen.NM_{—}057169

[3826] FIG. 3791: PRO82238

[3827] FIG. 3792A-B: DNA325768,NM_{—}014776,gen.NM_{—}014776

[3828] FIG. 3793: PRO82239

[3829] FIG. 3794: DNA325769,NM_{—}032904,gen.NM_{—}032904

[3830] FIG. 3795: PRO82240

[3831] FIG. 3796A-B: DNA325770,XM_{—}007003,gen.XM_{—}007003

[3832] FIG. 3797: DNA325771,XM_{—}007002,gen.XM_{—}007002

[3833] FIG. 3798: DNA325772,XM_{—}056996,gen.XM_{—}056996

[3834] FIG. 3799: PRO82243

[3835] FIG. 3800: DNA325773,XM_{—}084946,gen.XM_{—}084946

[3836] FIG. 3801: PRO82244

[3837] FIG. 3802: DNA325775,XM_{—}027102,gen.XM_{—}027102

[3838] FIG. 3803: PRO82245

[3839] FIG. 3804: DNA325776,XM_{—}084948,gen.XM_{—}084948

[3840] FIG. 3805: DNA325777,NM_{—}007062,gen.NM_{—}007062

[3841] FIG. 3806: PRO82247

[3842] FIG. 3807: DNA325778,NM_{—}006825,gen.NM_{—}006825

[3843] FIG. 3808: PRO82248

[3844] FIG. 3809: DNA325779,XM_{—}115197,gen.XM_{—}115197

[3845] FIG. 3810: DNA325780,NM_{—}017901,gen.NM_{—}017901

[3846] FIG. 3811: PRO82250

[3847] FIG. 3812: DNA325781,NM_{—}032814,gen.NM_{—}032814

[3848] FIG. 3813: PRO82252

[3849] FIG. 3814: DNA325782,XM_{—}084889,gen.XM_{—}084889

[3850] FIG. 3815: PRO82253

[3851] FIG. 3816: DNA325783,NM_{—}002567,gen.NM_{—}002567

[3852] FIG. 3817: PRO59001

[3853] FIG. 3818: DNA325784,XM_{—}084808,gen.XM_{—}084808

[3854] FIG. 3819: DNA325785,XM_{—}096572,gen.XM_{—}096572

[3855] FIG. 3820: PRO82255

[3856] FIG. 3821: DNA325786,XM_{—}045010,gen.XM_{—}045010

[3857] FIG. 3822: PRO82256

[3858] FIG. 3823: DNA270677,NM_{—}014868,gen.NM_{—}014868

[3859] FIG. 3824: PRO59042

[3860] FIG. 3825: DNA325787,XM_{—}052893,gen.XM_{—}052893

[3861] FIG. 3826A-B: DNA325788,XM_{—}045802,gen.XM_{—}045802

[3862] FIG. 3827: DNA302016,NM_{—}001002,gen.NM_{—}001002

[3863] FIG. 3828: PRO70989

[3864] FIG. 3829: DNA325789,NM_{—}053275,gen.NM_{—}053275

[3865] FIG. 3830: PRO70989

[3866] FIG. 3831: DNA325790,NM_{—}006253,gen.NM_{—}006253

[3867] FIG. 3832: PRO82259

[3868] FIG. 3833: DNA325791,XM_{—}045187,gen.XM_{—}045187

[3869] FIG. 3834: DNA325792,XM_{—}045963,gen.XM_{—}045963

[3870] FIG. 3835: DNA325793,XM_{—}006595,gen.XM_{—}006595

[3871] FIG. 3836: DNA325794,XM_{—}012124,gen.XM_{—}012124

[3872] FIG. 3837: DNA325795,NM_{—}002813,gen.NM_{—}002813

[3873] FIG. 3838: PRO82263

[3874] FIG. 3839: DNA325796,NM_{—}019887,gen.NM_{—}019887

[3875] FIG. 3840: PRO69471

[3876] FIG. 3841A-B: DNA325797,XM_{—}038791,gen.XM_{—}038791

[3877] FIG. 3842: PRO82264

[3878] FIG. 3843: DNA325798,NM_{—}016638,gen.NM_{—}016638

[3879] FIG. 3844: PRO82265

[3880] FIG. 3845: DNA325799,XM_{—}116913,gen.XM_{—}116913

[3881] FIG. 3846: PRO82266

[3882] FIG. 3847: DNA325800,NM_{—}006815,gen.NM_{—}006815

[3883] FIG. 3848: PRO4793

[3884] FIG. 3849: DNA325801,XM_{—}006566,gen.XM_{—}006566

[3885] FIG. 3850: PRO82267

[3886] FIG. 3851: DNA325802,NM_{—}032656,gen.NM_{—}032656

[3887] FIG. 3852: PRO82268

[3888] FIG. 3853: DNA325803,XM_{—}055013,gen.XM_{—}055013

[3889] FIG. 3854: PRO82269

[3890] FIG. 3855: DNA325804,XM_{—}113737,gen.XM_{—}113737

[3891] FIG. 3856A-C: DNA325805,XM_{—}045602,gen.XM_{—}045602

[3892] FIG. 3857: DNA325806,XM_{—}087955,gen.XM_{—}087955

[3893] FIG. 3858: PRO82272

[3894] FIG. 3859A-B: DNA325807,XM_{—}044334,gen.XM_{—}044334

[3895] FIG. 3860: PRO82273

[3896] FIG. 3861: DNA325808,XM_{—}012184,gen.XM_{—}012184

[3897] FIG. 3862: DNA325809,XM_{—}113702,gen.XM_{—}113702

[3898] FIG. 3863: PRO82275

[3899] FIG. 3864A-B: DNA270015,NM_{—}003453,gen.NM_{—}003453

[3900] FIG. 3865: PRO58410

[3901] FIG. 3866: DNA226853,NM_{—}004004,gen.NM_{—}004004

[3902] FIG. 3867: PRO37316

[3903] FIG. 3868: DNA325810,XM_{—}167911,gen.XM_{—}167911

[3904] FIG. 3869: DNA325811,XM_{—}167918,gen.XM_{—}167918

[3905] FIG. 3870: DNA325812,XM_{—}084982,gen.XM_{—}084982

[3906] FIG. 3871: PRO82278

[3907] FIG. 3872: DNA325813,NM_{—}024026,gen.NM_{—}024026

[3908] FIG. 3873: PRO82279

[3909] FIG. 3874: DNA325814,XM_{—}012638,gen.XM_{—}012638

[3910] FIG. 3875: PRO82280

[3911] FIG. 3876: DNA325815,XM_{—}167439,gen.XM_{—}167439

[3912] FIG. 3877: DNA325816,XM_{—}167906,gen.XM_{—}167906

[3913] FIG. 3878A-B: DNA325817,NM_{—}014778,gen.NM_{—}014778

[3914] FIG. 3879: PRO82283

[3915] FIG. 3880: DNA325818,XM_{—}169414,gen.XM_{—}169414

[3916] FIG. 3881A-B: DNA325819,NM_{—}006646,gen.NM_{—}006646

[3917] FIG. 3882: PRO82285

[3918] FIG. 3883: DNA325820,XM_{—}167892,gen.XM_{—}167892

[3919] FIG. 3884: DNA325821,NM_{—}015932,gen.NM_{—}015932

[3920] FIG. 3885: PRO82287

[3921] FIG. 3886: DNA325822,XM_{—}166273,gen.XM_{—}166273

[3922] FIG. 3887: DNA304669,NM_{—}002128,gen.NM_{—}002128

[3923] FIG. 3888: PRO71096

[3924] FIG. 3889: DNA325823,NM_{—}014887,gen.NM_{—}014887

[3925] FIG. 3890: PRO82289

[3926] FIG. 3891: DNA325824,NM_{—}002915,gen.NM_{—}002915

[3927] FIG. 3892: PRO82290

[3928] FIG. 3893: DNA325825,XM_{—}085017,gen.XM_{—}085017

[3929] FIG. 3894: PRO82291

[3930] FIG. 3895: DNA325826,XM_{—}017432,gen.XM_{—}017432

[3931] FIG. 3896A-B: DNA270254,NM_{—}002015,gen.NM_{—}002015

[3932] FIG. 3897: PRO58642

[3933] FIG. 3898: DNA325827,NM_{—}005830,gen.NM_{—}005830

[3934] FIG. 3899: PRO58092

[3935] FIG. 3900: DNA281436,NM_{—}003295,gen.NM_{—}003295

[3936] FIG. 3901: PRO66275

[3937] FIG. 3902: DNA325828,XM_{—}038371,gen.XM_{—}038371

[3938] FIG. 3903A-B: DNA325829,XM_{—}165636,gen.XM_{—}165636

[3939] FIG. 3904: DNA325830,XM_{—}166266,gen.XM_{—}166266

[3940] FIG. 3905: PRO82295

[3941] FIG. 3906: DNA325831,NM_{—}014166,gen.NM_{—}014166

[3942] FIG. 3907: PRO82296

[3943] FIG. 3908: DNA325832,NM_{—}021999,gen.NM_{—}021999

[3944] FIG. 3909: PRO1869

[3945] FIG. 3910: DNA325833,NM_{—}030925,gen.NM_{—}030925

[3946] FIG. 3911: PRO82297

[3947] FIG. 3912: DNA274058,NM_{—}016119,gen.NM_{—}016119

[3948] FIG. 3913: PRO61999

[3949] FIG. 3914: DNA325834,NM_{—}032565,gen.NM_{—}032565

[3950] FIG. 3915: PRO11982

[3951] FIG. 3916: DNA325835,XM_{—}085044,gen.XM_{—}085044

[3952] FIG. 3917: DNA325836,XM_{—}165639,gen.XM_{—}165639

[3953] FIG. 3918: DNA325837,XM_{—}018399,gen.XM_{—}018399

[3954] FIG. 3919: PRO82300

[3955] FIG. 3920: DNA325838,XM_{—}058977,gen.XM_{—}058977

[3956] FIG. 3921: DNA325839,XM_{—}015840,gen.XM_{—}015840

[3957] FIG. 3922: PRO82302

[3958] FIG. 3923: DNA325840,XM_{—}007199,gen.XM_{—}007199

[3959] FIG. 3924: DNA325841,XM_{—}016351,gen.XM_{—}016351

[3960] FIG. 3925: DNA325842,XM_{—}041209,gen.XM_{—}041209

[3961] FIG. 3926: DNA325843,XM_{—}058611,gen.XM_{—}058611

[3962] FIG. 3927: PRO82305

[3963] FIG. 3928: DNA325844,XM_{—}041473,gen.XM_{—}041473

[3964] FIG. 3929: PRO82306

[3965] FIG. 3930: DNA325845,XM_{—}032443,gen.XM_{—}032443

[3966] FIG. 3931: DNA325847,XM_{—}048957,gen.XM_{—}048957

[3967] FIG. 3932: DNA325848,XM_{—}015842,gen.XM_{—}015842

[3968] FIG. 3933: DNA325849,XM_{—}084997,gen.XM_{—}084997

[3969] FIG. 3934: PRO82311

[3970] FIG. 3935: DNA325850,NM_{—}024089,gen.NM_{—}024089

[3971] FIG. 3936: PRO82312

[3972] FIG. 3937A-B: DNA325851,XM_{—}049904,gen.XM_{—}049904

[3973] FIG. 3938: DNA325852,NM_{—}024537,gen.NM_{—}024537

[3974] FIG. 3939: PRO82314

[3975] FIG. 3940: DNA325853,NM_{—}023011,gen.NM_{—}023011

[3976] FIG. 3941: PRO82315

[3977] FIG. 3942: DNA325854,NM_{—}080687,gen.NM_{—}080687

[3978] FIG. 3943: PRO82316

[3979] FIG. 3944: DNA325855,XM_{—}041484,gen.XM_{—}041484

[3980] FIG. 3945: PRO82317

[3981] FIG. 3946A-B: DNA325856,XM_{—}113752,gen.XM_{—}113752

[3982] FIG. 3947: PRO82318

[3983] FIG. 3948: DNA325857,XM_{—}115215,gen.XM_{—}115215

[3984] FIG. 3949: DNA325858,XM_{—}046651,gen.XM_{—}046651

[3985] FIG. 3950: DNA325859,XM_{—}046648,gen.XM_{—}046648

[3986] FIG. 3951: DNA325860,XM_{—}046642,gen.XM_{—}046642

[3987] FIG. 3952: PRO10404

[3988] FIG. 3953: DNA325861,XM_{—}017914,gen.XM_{—}017914

[3989] FIG. 3954: PRO82321

[3990] FIG. 3955: DNA325862,XM_{—}085166,gen.XM_{—}085166

[3991] FIG. 3956: PRO82322

[3992] FIG. 3957: DNA325863,XM_{—}007316,gen.XM_{—}007316

[3993] FIG. 3958: DNA325864,XM_{—}007315,gen.XM_{—}007315

[3994] FIG. 3959: DNA325865,XM_{—}033251,gen.XM_{—}033251

[3995] FIG. 3960: DNA325866,NM_{—}024658,gen.NM_{—}024658

[3996] FIG. 3961: PRO82325

[3997] FIG. 3962: DNA210180,NM_{—}005132,gen.NM_{—}005132

[3998] FIG. 3963: PRO33717

[3999] FIG. 3964: DNA325867,XM_{—}033337,gen.XM_{—}033337

[4000] FIG. 3965: PRO82326

[4001] FIG. 3966: DNA325868,XM_{—}096772,gen.XM_{—}096772

[4002] FIG. 3967: DNA325869,XM_{—}007293,gen.XM_{—}007293

[4003] FIG. 3968: DNA325870,XM_{—}007288,gen.XM_{—}007288

[4004] FIG. 3969A-B: DNA325871,XM_{—}033391,gen.XM_{—}033391

[4005] FIG. 3970: PRO82329

[4006] FIG. 3971: DNA325872,NM_{—}017815,gen.NM_{—}017815

[4007] FIG. 3972: PRO82330

[4008] FIG. 3973: DNA325873,NM_{—}006109,gen.NM_{—}006109

[4009] FIG. 3974: PRO82331

[4010] FIG. 3975: DNA325874,XM_{—}033435,gen.XM_{—}033435

[4011] FIG. 3976: DNA225865,NM_{—}004995,gen.NM_{—}004995

[4012] FIG. 3977: PRO36328

[4013] FIG. 3978: DNA325875,XM_{—}058647,gen.XM_{—}058647

[4014] FIG. 3979: PRO82333

[4015] FIG. 3980: DNA325876,XM_{—}033445,gen.XM_{—}033445

[4016] FIG. 3981: DNA325877,NM_{—}005015,gen.NM_{—}005015

[4017] FIG. 3982: PRO82334

[4018] FIG. 3983: DNA325878,XM_{—}012377,gen.XM_{—}012377

[4019] FIG. 3984: DNA227321,NM_{—}001344,gen.NM_{—}001344

[4020] FIG. 3985: PRO37784

[4021] FIG. 3986: DNA325879,XM_{—}058646,gen.XM_{—}058646

[4022] FIG. 3987: DNA325880,XM_{—}085106,gen.XM_{—}085106

[4023] FIG. 3988: DNA325881,NM_{—}019852,gen.NM_{—}019852

[4024] FIG. 3989: PRO82338

[4025] FIG. 3990: DNA325882,XM_{—}012376,gen.XM_{—}012376

[4026] FIG. 3991: DNA325883,XM_{—}033553,gen.XM_{—}033553

[4027] FIG. 3992: DNA226105,NM_{—}002934,gen.NM_{—}002934

[4028] FIG. 3993: PRO36568

[4029] FIG. 3994: DNA325884,XM_{—}033595,gen.XM_{—}033595

[4030] FIG. 3995: PRO2871

[4031] FIG. 3996: DNA325885,XM_{—}007491,gen.XM_{—}007491

[4032] FIG. 3997: DNA325886,NM_{—}001641,gen.NM_{—}001641

[4033] FIG. 3998: PRO82342

[4034] FIG. 3999: DNA325887,NM_{—}080648,gen.NM_{—}080648

[4035] FIG. 4000: PRO82343

[4036] FIG. 4001: DNA325888,NM_{—}080649,gen.NM_{—}080649

[4037] FIG. 4002: PRO82344

[4038] FIG. 4003: DNA325889,NM_{—}017807,gen.NM_{—}017807

[4039] FIG. 4004: PRO82345

[4040] FIG. 4005A-C: DNA325890,XM_{—}4007488,gen.XM_{—}007488

[4041] FIG. 4006: DNA325891,NM_{—}021178,gen.NM_{—}021178

[4042] FIG. 4007: PRO82347

[4043] FIG. 4008: DNA325892,XM_{—}041235,gen.XM_{—}041235

[4044] FIG. 4009: PRO82348

[4045] FIG. 4010: DNA325893,NM_{—}002028,gen.NM_{—}002028

[4046] FIG. 4011: PRO82349

[4047] FIG. 4012: DNA325894,NM_{—}002083,gen.NM_{—}002083

[4048] FIG. 4013: PRO82350

[4049] FIG. 4014A-B: DNA325895,XM_{—}085127,gen.XM_{—}085127

[4050] FIG. 4015: PRO82351

[4051] FIG. 4016A-B: DNA325896,NM_{—}001530,gen.NM_{—}001530

[4052] FIG. 4017: PRO82352

[4053] FIG. 4018: DNA325897,XM_{—}058210,gen.XM_{—}058210

[4054] FIG. 4019: DNA325898,XM_{—}085141,gen.XM_{—}085141

[4055] FIG. 4020: DNA325899,NM_{—}021728,gen.NM_{—}021728

[4056] FIG. 4021: PRO82355

[4057] FIG. 4022: DNA325900,NM_{—}002306,gen.NM_{—}002306

[4058] FIG. 4023: PRO82356

[4059] FIG. 4024: DNA325901,XM_{—}007328,gen.XM_{—}007328

[4060] FIG. 4025A-B: DNA325902,XM_{—}051712,gen.XM_{—}051712

[4061] FIG. 4026: PRO82357

[4062] FIG. 4027: DNA325903,XM_{—}007324,gen.XM_{—}007324

[4063] FIG. 4028: PRO82358

[4064] FIG. 4029: DNA325904,NM_{—}002863,gen.NM_{—}002863

[4065] FIG. 4030: PRO82359

[4066] FIG. 4031: DNA325905,XM_{—}085125,gen.XM_{—}085125

[4067] FIG. 4032: DNA325906,XM_{—}031025,gen.XM_{—}031025

[4068] FIG. 4033: DNA325907,XM_{—}085066,gen.XM_{—}085066

[4069] FIG. 4034: DNA325908,XM_{—}096744,gen.XM_{—}096744

[4070] FIG. 4035: DNA325909,NM_{—}016445,gen.NM_{—}016445

[4071] FIG. 4036: PRO82364

[4072] FIG. 4037: DNA325910,NM_{—}016026,gen.NM_{—}016026

[4073] FIG. 4038: PRO82365

[4074] FIG. 4039: DNA32591 1,XM_{—}031074,gen.XM_{—}031074

[4075] FIG. 4040: DNA325912,NM_{—}001102,gen.NM_{—}001102

[4076] FIG. 4041: PRO82367

[4077] FIG. 4042: DNA225649,NM_{—}022137,gen.NM_{—}022137

[4078] FIG. 4043: PRO36112

[4079] FIG. 4044: DNA325913,XM_{—}085065,gen.XM_{—}085065

[4080] FIG. 4045: DNA325914,XM_{—}007441,gen.XM_{—}007441

[4081] FIG. 4046: DNA325915,NM_{—}006821,gen.NM_{—}006821

[4082] FIG. 4047: PRO82369

[4083] FIG. 4048: DNA325916,NM_{—}006432,gen.NM_{—}006432

[4084] FIG. 4049: PRO2066

[4085] FIG. 4050A-B: DNA325917,XM_{—}085151,gen.XM_{—}085151

[4086] FIG. 4051: PRO82370

[4087] FIG. 4052: DNA325918,NM_{—}002632,gen.NM_{—}002632

[4088] FIG. 4053: PRO82371

[4089] FIG. 4054: DNA325919,XM_{—}085162,gen.XM_{—}085162

[4090] FIG. 4055: DNA325920,NM_{—}012111,gen.NM_{—}012111

[4091] FIG. 4056: PRO82373

[4092] FIG. 4057: DNA325921,NM_{—}024824,gen.NM_{—}024824

[4093] FIG. 4058: PRO82374

[4094] FIG. 4059: DNA269498,NM_{—}002802,gen.NM_{—}002802

[4095] FIG. 4060: PRO57917

[4096] FIG. 4061: DNA325922,XM_{—}058677,gen.XM_{—}058677

[4097] FIG. 4062: PRO82375

[4098] FIG. 4063: DNA325923,NM_{—}006888,gen.NM_{—}006888

[4099] FIG. 4064: PRO4904

[4100] FIG. 4065: DNA325924,NM_{—}001275,gen.NM_{—}001275

[4101] FIG. 4066: PRO2054

[4102] FIG. 4067: DNA325925,XM_{—}029288,gen.XM_{—}029288

[4103] FIG. 4068A-B: DNA325926,XM_{—}016487,gen.XM_{—}016487

[4104] FIG. 4069: DNA325927,NM_{—}020414,gen.NM_{—}020414

[4105] FIG. 4070: PRO62099

[4106] FIG. 4071: DNA325928,XM_{—}016486,gen.XM_{—}016486

[4107] FIG. 4072: DNA325929,XM_{—}007483,gen.XM_{—}007483

[4108] FIG. 4073: DNA325930,XM_{—}028358,gen.XM_{—}028358

[4109] FIG. 4074: DNA325931,XM_{—}028347,gen.XM_{—}028347

[4110] FIG. 4075: DNA325932,XM_{—}028322,gen.XM_{—}028322

[4111] FIG. 4076: PRO82381

[4112] FIG. 4077: DNA325933,XM_{—}056317,gen.XM_{—}056317

[4113] FIG. 4078: PRO82382

[4114] FIG. 4079: DNA151893,NM_{—}021966,gen.NM_{—}021966

[4115] FIG. 4080: PRO12916

[4116] FIG. 4081: DNA325934,XM_{—}007272,gen.XM_{—}007272

[4117] FIG. 4082: DNA325935,XM_{—}090914,gen.XM_{—}090914

[4118] FIG. 4083: PRO82383

[4119] FIG. 4084: DNA325936,NM_{—}022747,gen.NM_{—}022747

[4120] FIG. 4085: PRO82384

[4121] FIG. 4086: DNA325937,XM_{—}041014,gen.XM_{—}041014

[4122] FIG. 4087: PRO60575

[4123] FIG. 4088: DNA325938,NM_{—}003836,gen.NM_{—}003836

[4124] FIG. 4089: PRO82385

[4125] FIG. 4090A-B: DNA325939,XM_{—}040952,gen.XM_{—}040952

[4126] FIG. 4091: DNA325940,XM_{—}058618,gen.XM_{—}058618

[4127] FIG. 4092: DNA325941,NM_{—}005348,gen.NM_{—}005348

[4128] FIG. 4093: PRO82388

[4129] FIG. 4094: DNA325942,XM_{—}040942,gen.XM_{—}040942

[4130] FIG. 4095: DNA226324,NM_{—}014226,gen.NM_{—}014226

[4131] FIG. 4096: PRO36787

[4132] FIG. 4097A-B: DNA325943,XM_{—}007254,gen.XM_{—}007254

[4133] FIG. 4098A-B: DNA325944,NM_{—}01969,gen.NM_{—}001969

[4134] FIG. 4099: PRO82391

[4135] FIG. 4100: DNA325945,XM_{—}040898,gen.XM_{—}040898

[4136] FIG. 4101: DNA325946,NM_{—}005432,gen.NM_{—}005432

[4137] FIG. 4102: PRO60070

[4138] FIG. 4103A-B: DNA325947,XM_{—}050278,gen.XM_{—}050278

[4139] FIG. 4104: PRO82393

[4140] FIG. 4105: DNA325948,XM_{—}113759,gen.XM_{—}113759

[4141] FIG. 4106: DNA325949,NM_{—}006427,gen.NM_{—}006427

[4142] FIG. 4107: PRO82395

[4143] FIG. 4108: DNA325950,NM_{—}021709,gen.NM_{—}021709

[4144] FIG. 4109: PRO82396

[4145] FIG. 4110: DNA103509,NM_{—}005163,gen.NM_{—}005163

[4146] FIG. 4111: PRO4836

[4147] FIG. 4112: DNA325951,NM_{—}017955,gen.NM_{—}017955

[4148] FIG. 4113: PRO82397

[4149] FIG. 4114: DNA325952,XM_{—}088588,gen.XM_{—}088588

[4150] FIG. 4115: DNA325953,XM_{—}060012,gen.XM_{—}060012

[4151] FIG. 4116: DNA325954,XM_{—}034953,gen.XM_{—}034953

[4152] FIG. 4117: PRO82400

[4153] FIG. 4118: DNA325955,XM_{—}058636,gen.XM_{—}058636

[4154] FIG. 4119: DNA325956,XM_{—}035014,gen.XM_{—}035014

[4155] FIG. 4120: DNA325957,XM_{—}088587,gen.XM_{—}088587

[4156] FIG. 4121: DNA325958,XM_{—}088589,gen.XM_{—}088589

[4157] FIG. 4122: DNA325959,XM_{—}071801,gen.XM_{—}071801

[4158] FIG. 4123: DNA325960,XM_{—}018054,gen.XM_{—}018054

[4159] FIG. 4124: DNA325961,XM_{—}091108,gen.XM_{—}091108

[4160] FIG. 4125A-B: DNA325962,XM_{—}039225,gen.XM_{—}039225

[4161] FIG. 4126: PRO82408

[4162] FIG. 4127: DNA325963,XM_{—}165921,gen.XM_{—}165921

[4163] FIG. 4128: PRO82409

[4164] FIG. 4129: DNA325964,XM_{—}007751,gen.XM_{—}007751

[4165] FIG. 4130: DNA325965,XM_{—}085203,gen.XM_{—}085203

[4166] FIG. 4131: PRO82411

[4167] FIG. 4132: DNA325966,XM_{—}085204,gen.XM_{—}085204

[4168] FIG. 4133: DNA325967,XM_{—}012398,gen.XM_{—}012398

[4169] FIG. 4134A-B: DNA325968,XM_{—}036727,gen.XM_{—}036727

[4170] FIG. 4135: DNA325969,XM_{—}017240,gen.XM_{—}017240

[4171] FIG. 4136: DNA325970,NM_{—}020149,gen.NM_{—}020149

[4172] FIG. 4137: PRO82415

[4173] FIG. 4138A-B: DNA325971,XM_{—}031617,gen.XM_{—}031617

[4174] FIG. 4139A-B: DNA325972,NM_{—}001211,gen.NM_{—}001211

[4175] FIG. 4140: PRO82417

[4176] FIG. 4141A-B: DNA151831,NM_{—}004573,gen.NM_{—}004573

[4177] FIG. 4142: PRO12198

[4178] FIG. 4143: DNA325973,NM_{—}130468,gen.NM_{—}130468

[4179] FIG. 4144: PRO82418

[4180] FIG. 4145: DNA325974,XM_{—}031554,gen.XM_{—}031554

[4181] FIG. 4146: PRO82419

[4182] FIG. 4147: DNA325975,XM_{—}031515,gen.XM_{—}031515

[4183] FIG. 4148: DNA325976,NM_{—}024111,gen.NM_{—}024111

[4184] FIG. 4149: PRO82421

[4185] FIG. 4150: DNA325977,NM_{—}032196,gen.NM_{—}032196

[4186] FIG. 4151: PRO82422

[4187] FIG. 4152: DNA325978,NM_{—}016359,gen.NM_{—}016359

[4188] FIG. 4153: PRO82423

[4189] FIG. 4154: DNA325979,NM_{—}018454,gen.NM_{—}018454

[4190] FIG. 4155: PRO82424

[4191] FIG. 4156A-B: DNA325980,XM_{—}007545,gen.XM_{—}007545

[4192] FIG. 4157: DNA325981,XM_{—}091159,gen.XM_{—}091159

[4193] FIG. 4158: PRO82425

[4194] FIG. 4159: DNA325982,XM_{—}031718,gen.XM_{—}031718

[4195] FIG. 4160: DNA325983,XM_{—}085307,gen.XM_{—}085307

[4196] FIG. 4161: DNA227559,NM_{—}000070,gen.NM_{—}000070

[4197] FIG. 4162: PRO38022

[4198] FIG. 4163A-B: DNA325984,XM_{—}113823,gen.XM_{—}113823

[4199] FIG. 4164: PRO82428

[4200] FIG. 4165: DNA325985,XM_{—}016713,gen.XM_{—}016713

[4201] FIG. 4166: PRO82429

[4202] FIG. 4167A-B: DNA325986,XM_{—}007531,gen.XM_{—}007531

[4203] FIG. 4168: DNA325987,NM_{—}014444,gen.NM_{—}014444

[4204] FIG. 4169: PRO82431

[4205] FIG. 4170A-B: DNA227206,NM_{—}005657,gen.NM_{—}005657

[4206] FIG. 4171: PRO37669

[4207] FIG. 4172: DNA325988,NM_{—}020990,gen.NM_{—}020990

[4208] FIG. 4173: PRO82432

[4209] FIG. 4174: DNA325989,NM_{—}005313,gen.NM_{—}005313

[4210] FIG. 4175: PRO2732

[4211] FIG. 4176: DNA325990,NM_{—}005770,gen.NM_{—}005770

[4212] FIG. 4177: PRO82433

[4213] FIG. 4178: DNA325991,NM_{—}004048,gen.NM_{—}004048

[4214] FIG. 4179: PRO4379

[4215] FIG. 4180: DNA325992,XM_{—}032403,gen.XM_{—}032403

[4216] FIG. 4181: PRO82434

[4217] FIG. 4182: DNA219233,NM_{—}014335,gen.NM_{—}014335

[4218] FIG. 4183: PRO34557

[4219] FIG. 4184A-C: DNA325993,XM_{—}034890,gen.XM_{—}034890

[4220] FIG. 4185: PRO82435

[4221] FIG. 4186: DNA325994,XM_{—}058684,gen.XM_{—}058684

[4222] FIG. 4187: DNA325995,NM_{—}003104,gen.NM_{—}003104

[4223] FIG. 4188: PRO82437

[4224] FIG. 4189: DNA325996,XM_{—}007651,gen.XM_{—}007651

[4225] FIG. 4190: PRO82438

[4226] FIG. 4191: DNA325997,XM_{—}090991,gen.XM_{—}090991

[4227] FIG. 4192: PRO82439

[4228] FIG. 4193: DNA325998,NM_{—}016304,gen.NM_{—}016304

[4229] FIG. 4194: PRO82440

[4230] FIG. 4195: DNA325999,NM_{—}017610,gen.NM_{—}017610

[4231] FIG. 4196: PRO82441

[4232] FIG. 4197: DNA326000,NM_{—}004701,gen.NM_{—}004701

[4233] FIG. 4198: PRO82442

[4234] FIG. 4199A-B: DNA326001,XM_{—}012418,gen.XM_{—}012418

[4235] FIG. 4200: DNA326002,XM_{—}039702,gen.XM_{—}039702

[4236] FIG. 4201: PRO82444

[4237] FIG. 4202: DNA326003,3XM_{—}1 13266,gen.XM_{—}113266

[4238] FIG. 4203: DNA326004,NM_{—}001218,gen.NM_{—}01218

[4239] FIG. 4204: PRO54594

[4240] FIG. 4205: DNA326005,NM_{—}015920,gen.NM_{—}015920

[4241] FIG. 4206: PRO82446

[4242] FIG. 4207: DNA326006,XM_{—}1 13268,gen.XM_{—}113268

[4243] FIG. 4208: DNA255340,NM_{—}017684,gen.NM_{—}017684

[4244] FIG. 4209: PRO50409

[4245] FIG. 4210: DNA326007,NM_{—}002537,gen.NM_{—}002537

[4246] FIG. 4211: DNA326008,XM_{—}085283,gen.XM_{—}085283

[4247] FIG. 4212: PRO82448

[4248] FIG. 4213: DNA326009,XM_{—}016985,gen.XM_{—}016985

[4249] FIG. 4214: DNA234442,NM_{—}014736,gen.NM_{—}014736

[4250] FIG. 4215: PRO38852

[4251] FIG. 4216: DNA326010,NM_{—}022048,gen.NM_{—}022048

[4252] FIG. 4217: PRO82450

[4253] FIG. 4218: DNA326011,NM_{—}000942,gen.NM_{—}000942

[4254] FIG. 4219: PRO2720

[4255] FIG. 4220: DNA326012,XM_{—}050964,gen.XM_{—}050964

[4256] FIG. 4221: DNA326013,XM_{—}007623,gen.XM_{—}007623

[4257] FIG. 4222A-B: DNA326014,NM_{—}133375,gen.NM_{—}133375

[4258] FIG. 4223: PRO82453

[4259] FIG. 4224: DNA226646,NM_{—}017882,gen.NM_{—}017882

[4260] FIG. 4225: PRO37109

[4261] FIG. 4226: DNA326015,NM_{—}015322,gen.NM_{—}015322

[4262] FIG. 4227: PRO82454

[4263] FIG. 4228: DNA326016,NM_{—}001003,gen.NM_{—}001003

[4264] FIG. 4229: PRO82455

[4265] FIG. 4230A-B: DNA326017,XM_{—}051463,gen.XM_{—}051463

[4266] FIG. 4231: PRO82456

[4267] FIG. 4232: DNA326018,NM_{—}018357,gen.NM_{—}018357

[4268] FIG. 4233: PRO82457

[4269] FIG. 4234: DNA326019,XM_{—}063639,gen.XM_{—}063639

[4270] FIG. 4235: PRO82458

[4271] FIG. 4236: DNA326020,XM_{—}085249,gen.XM_{—}085249

[4272] FIG. 4237: DNA326021,XM_{—}016076,gen.XM_{—}016076

[4273] FIG. 4238: PRO82460

[4274] FIG. 4239: DNA326022,XM_{—}015366,gen.XM_{—}015366

[4275] FIG. 4240: PRO82461

[4276] FIG. 4241: DNA326023,XM_{—}096060,gen.XM_{—}096060

[4277] FIG. 4242: DNA287331,NM_{—}002654,gen.NM_{—}002654

[4278] FIG. 4243: PRO69595

[4279] FIG. 4244: DNA326024,XM_{—}037778,gen.XM_{—}037778

[4280] FIG. 4245: DNA326025,XM_{—}096842,gen.XM_{—}096842

[4281] FIG. 4246: DNA326026,NM_{—}022369,gen.NM_{—}022369

[4282] FIG. 4247: PRO82465

[4283] FIG. 4248: DNA326027,NM_{—}032907,gen.NM_{—}032907

[4284] FIG. 4249: PRO82466

[4285] FIG. 4250: DNA326028,XM_{—}058699,gen.XM_{—}058699

[4286] FIG. 4251: DNA326029,XM_{—}118637,gen.XM_{—}118637

[4287] FIG. 4252: DNA326030,XM_{—}053585,gen.XM_{—}053585

[4288] FIG. 4253: PRO82469

[4289] FIG. 4254: DNA326031,XM_{—}085239,gen.XM_{—}085239

[4290] FIG. 4255: PRO82470

[4291] FIG. 4256: DNA326032,XM_{—}034897,gen.XM_{—}034897

[4292] FIG. 4257A-B: DNA326033,XM_{—}057020,gen.XM_{—}057020

[4293] FIG. 4258: PRO82472

[4294] FIG. 4259: DNA326034,NM_{—}000743,gen.NM_{—}000743

[4295] FIG. 4260: PRO61219

[4296] FIG. 4261: DNA326035,NM_{—}002789,gen.NM_{—}002789

[4297] FIG. 4262: PRO60499

[4298] FIG. 4263: DNA326036,XM_{—}091100,gen.XM_{—}091100

[4299] FIG. 4264: PRO82473

[4300] FIG. 4265: DNA255370,NM_{—}012170,gen.NM_{—}012170

[4301] FIG. 4266: PRO50438

[4302] FIG. 4267: DNA273014,NM_{—}000126,gen.NM_{—}000126

[4303] FIG. 4268: PRO61085

[4304] FIG. 4269: DNA326037,XM_{—}044565,gen.XM_{—}044565

[4305] FIG. 4270: DNA326038,NM_{—}025234,gen.NM_{—}025234

[4306] FIG. 4271: PRO82475

[4307] FIG. 4272: DNA326039,XM_{—}044569,gen.XM_{—}044569

[4308] FIG. 4273: DNA326040,NM_{—}005724,gen.NM_{—}005724

[4309] FIG. 4274: PRO730

[4310] FIG. 4275: DNA326041,XM_{—}049354,gen.XM_{—}049354

[4311] FIG. 4276: PRO82477

[4312] FIG. 4277: DNA326042,NM_{—}007364,gen.NM_{—}007364

[4313] FIG. 4278: DNA326043,XM_{—}044593,gen.XM_{—}044593

[4314] FIG. 4279: DNA326044,NM_{—}006791,gen.NM_{—}006791

[4315] FIG. 4280: PRO82479

[4316] FIG. 4281: DNA326045,XM_{—}060042,gen.XM_{—}060042

[4317] FIG. 4282: DNA326046,XM_{—}085215,gen.XM_{—}085215

[4318] FIG. 4283: DNA326047,NM_{—}001021,gen.NM_{—}001021

[4319] FIG. 4284: PRO82482

[4320] FIG. 4285: DNA326048,XM_{—}031404,gen.XM_{—}031404

[4321] FIG. 4286: DNA326049,XM_{—}096844,gen.XM_{—}096844

[4322] FIG. 4287: DNA326050,XM_{—}045681,gen.XM_{—}045681

[4323] FIG. 4288: PRO82485

[4324] FIG. 4289: DNA326051,XM_{—}085280,gen.XM_{—}085280

[4325] FIG. 4290: DNA326052,NM_{—}022839,gen.NM_{—}022839

[4326] FIG. 4291: PRO82487

[4327] FIG. 4292: DNA326053,XM_{—}031354,gen.XM_{—}031354

[4328] FIG. 4293: DNA326054,NM_{—}002168,gen.NM_{—}002168

[4329] FIG. 4294: PRO82489

[4330] FIG. 4295: DNA326055,XM_{—}031292,gen.XM_{—}031292

[4331] FIG. 4296: DNA326056,NM_{—}022566,gen.NM_{—}22566

[4332] FIG. 4297: PRO82491

[4333] FIG. 4298A-B: DNA326057,XM_{—}051860,gen.XM_{—}051860

[4334] FIG. 4299: PRO82492

[4335] FIG. 4300: DNA275144,NM_{—}000137,gen.NM_{—}000137

[4336] FIG. 4301: PRO62852

[4337] FIG. 4302: DNA326058,NM_{—}016645,gen.NM_{—}016645

[4338] FIG. 4303: PRO82493

[4339] FIG. 4304: DNA326059,XM_{—}044523,gen.XM_{—}044523

[4340] FIG. 4305: DNA150485,NM_{—}006384,gen.NM_{—}006384

[4341] FIG. 4306: PRO12774

[4342] FIG. 4307A-B: DNA326060,XM_{—}044533,gen.XM_{—}044533

[4343] FIG. 4308: PRO82495

[4344] FIG. 4309A-C: DNA326061,XM_{—}054900,gen.XM_{—}054900

[4345] FIG. 4310: DNA326062,NM_{—}032162,gen.NM_{—}032162

[4346] FIG. 4311A-B: DNA326063,XM_{—}015835,gen.XM_{—}015835

[4347] FIG. 4312: DNA326064,NM_{—}018668,gen.NM_{—}018668

[4348] FIG. 4313: PRO82499

[4349] FIG. 4314: DNA326065,XM_{—}085262,gen.XM_{—}085262

[4350] FIG. 4315: DNA326066,NM_{—}033544,gen.NM_{—}033544

[4351] FIG. 4316: PRO82501

[4352] FIG. 4317: DNA326067,XM_{—}049372,gen.XM_{—}049372

[4353] FIG. 4318: PRO82502

[4354] FIG. 4319: DNA326068,XM_{—}017971,gen.XM_{—}017971

[4355] FIG. 4320: DNA275181,NM_{—}003090,gen.NM_{—}003090

[4356] FIG. 4321: PRO62882

[4357] FIG. 4322: DNA326069,XM_{—}012462,gen.XM_{—}012462

[4358] FIG. 4323A-B: DNA326070,XM_{—}085525,gen.XM_{—}085525

[4359] FIG. 4324: PRO82505

[4360] FIG. 4325: DNA326071,XM_{—}165923,gen.XM_{—}165923

[4361] FIG. 4326: DNA326072,XM_{—}113836,gen.XM_{—}113836

[4362] FIG. 4327: DNA326073,NM_{—}017668,gen.NM_{—}017668

[4363] FIG. 4328: PRO82508

[4364] FIG. 4329: DNA326074,XM_{—}027309,gen.XM_{—}027309

[4365] FIG. 4330: PRO82509

[4366] FIG. 4331: DNA326075,XM_{—}018432,gen.XM_{—}018432

[4367] FIG. 4332: PRO82510

[4368] FIG. 4333: DNA326076,XM_{—}115352,gen.XM_{—}115352

[4369] FIG. 4334: DNA326077,XM_{—}027365,gen.XM_{—}027365

[4370] FIG. 4335: DNA326078,NM_{—}016641,gen.NM_{—}016641

[4371] FIG. 4336: PRO38464

[4372] FIG. 4337: DNA326079,XM_{—}058796,gen.XM_{—}058796

[4373] FIG. 4338: DNA326080,XM_{—}017984,gen.XM_{—}017984

[4374] FIG. 4339: PRO82513

[4375] FIG. 4340: DNA326081,NM_{—}020677,gen.NM_{—}020677

[4376] FIG. 4341: PRO82514

[4377] FIG. 4342: DNA326082,XM_{—}036680,gen.XM_{—}036680

[4378] FIG. 4343: PRO37961

[4379] FIG. 4344A-B: DNA326083,XM_{—}048119,gen.XM_{—}048119

[4380] FIG. 4345: PRO82515

[4381] FIG. 4346: DNA326084,NM_{—}024589,gen.NM_{—}024589

[4382] FIG. 4347: PRO82516

[4383] FIG. 4348: DNA326085,XM_{—}050534,gen.XM_{—}050534

[4384] FIG. 4349: PRO82517

[4385] FIG. 4350: DNA326086,NM_{—}024571,gen.NM_{—}024571

[4386] FIG. 4351: PRO82518

[4387] FIG. 4352: DNA326087,XM_{—}027558,gen.XM_{—}027558

[4388] FIG. 4353: DNA326088,XM_{—}008126,gen.XM_{—}008126

[4389] FIG. 4354: DNA326089,NM_{—}000517,gen.NM_{—}000517

[4390] FIG. 4355: PRO3629

[4391] FIG. 4356: DNA326090,NM_{—}000558,gen.NM_{—}000558

[4392] FIG. 4355: PRO3629

[4393] FIG. 4356: DNA326090,NM_{—}000558,gen.NM_{—}000558

[4394] FIG. 4357: PRO3629

[4395] FIG. 4358: DNA326091,NM_{—}018032,gen.NM_{—}018032

[4396] FIG. 4359: PRO38311

[4397] FIG. 4360: DNA273839,NM_{—}006428,gen.NM_{—}006428

[4398] FIG. 4361: PRO61799

[4399] FIG. 4362A-B: DNA256844,NM_{—}005632,gen.NM_{—}005632

[4400] FIG. 4363: PRO51775

[4401] FIG. 4364: DNA326092,XM_{—}083939,gen.XM_{—}083939

[4402] FIG. 4365: PRO82521

[4403] FIG. 4366: DNA326093,NM_{—}058192,gen.NM_{—}058192

[4404] FIG. 4367: PRO82522

[4405] FIG. 4368: DNA326094,XM_{—}027412,gen.XM_{—}027412

[4406] FIG. 4369: PRO82523

[4407] FIG. 4370: DNA256886,NM_{—}014587,gen.NM_{—}014587

[4408] FIG. 4371: PRO51815

[4409] FIG. 4372A-B: DNA326095,NM_{—}001287,gen.NM_{—}001287

[4410] FIG. 4373: PRO38480

[4411] FIG. 4374: DNA254781,NM_{—}016111,gen.NM_{—}016111

[4412] FIG. 4375: PRO49879

[4413] FIG. 4376: DNA326096,XM_{—}034586,gen.XM_{—}034586

[4414] FIG. 4377: PRO82524

[4415] FIG. 4378: DNA326097,NM_{—}023936,gen.NM_{—}023936

[4416] FIG. 4379: PRO82525

[4417] FIG. 4380: DNA326098,XM_{—}034590,gen.XM_{—}034590

[4418] FIG. 4381: PRO82526

[4419] FIG. 4382: DNA326099,NM_{—}002952,gen.NM_{—}002952

[4420] FIG. 4383: PRO82527

[4421] FIG. 4384: DNA326100,NM_{—}006453,gen.NM_{—}006453

[4422] FIG. 4385: PRO82528

[4423] FIG. 4386: DNA326101,NM_{—}014353,gen.NM_{—}014353

[4424] FIG. 4387: PRO82529

[4425] FIG. 4388: DNA326102,NM_{—}032271,gen.NM_{—}032271

[4426] FIG. 4389: PRO82530

[4427] FIG. 4390: DNA326103,XM_{—}028848,gen.XM_{—}028848

[4428] FIG. 4391: PRO82531

[4429] FIG. 4392: DNA326104,NM_{—}006711,gen.NM_{—}006711

[4430] FIG. 4393: PRO82532

[4431] FIG. 4394: DNA326105,NM_{—}080594,gen.NM_{—}080594

[4432] FIG. 4395: PRO82533

[4433] FIG. 4396: DNA326106,NM_{—}024339,gen.NM_{—}024339

[4434] FIG. 4397: PRO82534

[4435] FIG. 4398: DNA326107,NM_{—}016639,gen.NM_{—}016639

[4436] FIG. 4399: PRO12683

[4437] FIG. 4400: DNA326108,NM_{—}021195,gen.NM_{—}021195

[4438] FIG. 4401: PRO82535

[4439] FIG. 4402: DNA326109,NM_{—}004203,gen.NM_{—}004203

[4440] FIG. 4403: PRO82536

[4441] FIG. 4404: DNA3261 10,XM_{—}058784,gen.XM_{—}058784

[4442] FIG. 4405: PRO82537

[4443] FIG. 4406: DNA326111,NM_{—}024507,gen.NM_{—}024507

[4444] FIG. 4407: PRO82538

[4445] FIG. 4408: DNA326112,NM_{—}006799,gen.NM_{—}006799

[4446] FIG. 4409: PRO303

[4447] FIG. 4410A-C: DNA326113,XM_{—}036528,gen.XM_{—}036528

[4448] FIG. 4411: DNA326114,NM_{—}025108,gen.NM_{—}025108

[4449] FIG. 4412: PRO82540

[4450] FIG. 4413A-C: DNA326115,XM_{—}165411,gen.XM_{—}165411

[4451] FIG. 4414: DNA326116,NM_{—}016292,gen.NM_{—}016292

[4452] FIG. 4415: PRO82542

[4453] FIG. 4416: DNA326117,NM_{—}002484,gen.NM_{—}002484

[4454] FIG. 4417: PRO82543

[4455] FIG. 4418: DNA326118,XM_{—}113845,gen.XM_{—}113845

[4456] FIG. 4419: PRO82544

[4457] FIG. 4420: DNA326119,XM_{—}113843,gen.XM_{—}113843

[4458] FIG. 4421: DNA97293,NM_{—}003366,gen.NM_{—}003366

[4459] FIG. 4422: PRO3640

[4460] FIG. 4423: DNA326120,NM_{—}006110,gen.NM_{—}006110

[4461] FIG. 4424: PRO82546

[4462] FIG. 4425: DNA326121,XM_{—}085445,gen.XM_{—}085445

[4463] FIG. 4426: DNA326122,XM_{—}113876,gen.XM_{—}113876

[4464] FIG. 4427A-B: DNA326123,XM_{—}055195,gen.XM_{—}055195

[4465] FIG. 4428: PRO82548

[4466] FIG. 4429: DNA326124,XM_{—}113291,gen.XM_{—}113291

[4467] FIG. 4430A-B: DNA326125,XM_{—}007988,gen.XM_{—}007988

[4468] FIG. 4431: DNA326126,XM_{—}113874,gen.XM_{—}113874

[4469] FIG. 4432: DNA326127,XM_{—}102377,gen.XM_{—}102377

[4470] FIG. 4433: PRO82551

[4471] FIG. 4434: DNA326128,XM_{—}086278,gen.XM_{—}086278

[4472] FIG. 4435: DNA326129,XM_{—}085452,gen.XM_{—}085452

[4473] FIG. 4436: DNA326130,NM_{—}018054,gen.NM_{—}018054

[4474] FIG. 4437: PRO82554

[4475] FIG. 4438A-B: DNA326131,XM_{—}056260,gen.XM_{—}056260

[4476] FIG. 4439: PRO82555

[4477] FIG. 4440: DNA326132,NM_{—}032626,gen.NM_{—}032626

[4478] FIG. 4441: PRO82556

[4479] FIG. 4442: DNA326133,NM_{—}005030,gen.NM_{—}005030

[4480] FIG. 4443: PRO82557

[4481] FIG. 4444: DNA326134,NM_{—}032486,gen.NM_{—}032486

[4482] FIG. 4445: PRO82558

[4483] FIG. 4446: DNA289522,NM_{—}005003,gen.NM_{—}005003

[4484] FIG. 4447: PRO70276

[4485] FIG. 4448: DNA326135,XM_{—}085340,gen.XM_{—}085340

[4486] FIG. 4449: DNA326136,NM_{—}003752,gen.NM_{—}003752

[4487] FIG. 4450: PRO60325

[4488] FIG. 4451: DNA326137,NM_{—}012248,gen.NM_{—}012248

[4489] FIG. 4452: PRO82560

[4490] FIG. 4453A-B: DNA326138,XM_{—}046035,gen.XM_{—}046035

[4491] FIG. 4454: DNA326139,NM_{—}024671,gen.NM_{—}024671

[4492] FIG. 4455: PRO82562

[4493] FIG. 4456: DNA326140,NM_{—}033410,gen.NM_{—}033410

[4494] FIG. 4457: PRO82563

[4495] FIG. 4458: DNA326141,NM_{—}024031,gen.NM_{—}024031

[4496] FIG. 4459: PRO82564

[4497] FIG. 4460A-B: DNA326142,XM_{—}034375,gen.XM_{—}034375

[4498] FIG. 4461: DNA326143,XM_{—}012569,gen.XM_{—}012569

[4499] FIG. 4462: DNA326144,XM_{—}050194,gen.XM_{—}050194

[4500] FIG. 4463: DNA326145,XM_{—}008106,gen.XM_{—}008106

[4501] FIG. 4464: PRO82567

[4502] FIG. 4465: DNA326146,NM_{—}004960,gen.NM_{—}004960

[4503] FIG. 4466: PRO82568

[4504] FIG. 4467: DNA326147,XM_{—}113293,gen.XM_{—}113293

[4505] FIG. 4468: DNA326148,NM_{—}022744,gen.NM_{—}022744

[4506] FIG. 4469: PRO82570

[4507] FIG. 4470: DNA326149,NM_{—}024048,gen.NM_{—}024048

[4508] FIG. 4471: PRO82571

[4509] FIG. 4472: DNA326150,XM_{—}018088,gen.XM_{—}018088

[4510] FIG. 4473: PRO82572

[4511] FIG. 4474: DNA326151,XM_{—}007963,gen.XM_{—}007963

[4512] FIG. 4475: PRO82573

[4513] FIG. 4476: DNA274002,NM_{—}014321,gen.NM_{—}014321

[4514] FIG. 4477: PRO61948

[4515] FIG. 4478: DNA326152,XM_{—}015700,gen.XM_{—}015700

[4516] FIG. 4479: DNA326153,XM_{—}051219,gen.XM_{—}051219

[4517] FIG. 4480: DNA326154,XM_{—}085393,gen.XM_{—}085393

[4518] FIG. 4481: PRO82576

[4519] FIG. 4482: DNA326155,XM_{—}085395,gen.XM_{—}085395

[4520] FIG. 4483: DNA326156,XM_{—}091270,gen.XM_{—}091270

[4521] FIG. 4484: DNA326157,XM_{—}165656,gen.XM_{—}165656

[4522] FIG. 4485: DNA326158,NM_{—}032330,gen.NM_{—}032330

[4523] FIG. 4486: PRO82579

[4524] FIG. 4487: DNA254532,NM_{—}001043,gen.NM_{—}001043

[4525] FIG. 4488: PRO49639

[4526] FIG. 4489: DNA326159,XM_{—}165658,gen.XM_{—}085434

[4527] FIG. 4490: DNA326160,XM_{—l}66285,gen.XM_{—}166285

[4528] FIG. 4491: DNA326161,XM_{—}166282,gen.XM_{—}166282

[4529] FIG. 4492: PRO82582

[4530] FIG. 4493: DNA326162,XM_{—}165657,gen.XM_{—}165657

[4531] FIG. 4494: PRO82583

[4532] FIG. 4495: DNA326163,NM_{—}032038,gen.NM_{—}032038

[4533] FIG. 4496: PRO82584

[4534] FIG. 4497: DNA326164,XM_{—}008065,gen.XM_{—}008065

[4535] FIG. 4498: DNA326165,NM_{—}017458,gen.NM_{—}017458

[4536] FIG. 4499: PRO82585

[4537] FIG. 4500: DNA326166,NM_{—}005115,gen.NM_{—}005115

[4538] FIG. 4501: PRO82586

[4539] FIG. 4502: DNA326167,NM_{—}024516,gen.NM_{—}024516

[4540] FIG. 4503: PRO82587

[4541] FIG. 4504: DNA326168,XM_{—}113299,gen.XM_{—}113299

[4542] FIG. 4505: DNA326169,XM_{—}055771,gen.XM_{—}055771

[4543] FIG. 4506: PRO82589

[4544] FIG. 4507: DNA271171,NM_{—}007317,gen.NM_{—}007317

[4545] FIG. 4508: PRO59491

[4546] FIG. 4509: DNA326170,XM_{—}008064,gen.XM_{—}008064

[4547] FIG. 4510: PRO82590

[4548] FIG. 4511: DNA326171,NM_{—}003123,gen.NM_{—}003123

[4549] FIG. 4512: PRO2355

[4550] FIG. 4513: DNA326172,XM_{—}085442,gen.XM_{—}085442

[4551] FIG. 4514: DNA326173,XM_{—}055132,gen.XM_{—}055132

[4552] FIG. 4515: PRO82592

[4553] FIG. 4516: DNA274180,NM_{—}007074,gen.NM_{—}107074

[4554] FIG. 4517: PRO62110

[4555] FIG. 4518: DNA326174,NM_{—}002720,gen.NM_{—}002720

[4556] FIG. 4519: PRO42208

[4557] FIG. 4520: DNA287355,NM_{—}000034,gen.NM_{—}000034

[4558] FIG. 4521: PRO69617

[4559] FIG. 4523: PRO82593

[4560] FIG. 4524: DNA326176,XM_{—}085434,gen.XM_{—}085434

[4561] FIG. 4525: PRO82594

[4562] FIG. 4526: DNA326177,XM_{—}058116,gen.XM_{—}058116

[4563] FIG. 4527: DNA326178,XM_{—}165649,gen.XM_{—}165649

[4564] FIG. 4528: DNA326179,XM_{—}165647,gen.XM_{—}165647

[4565] FIG. 4529: PRO82597

[4566] FIG. 4530: DNA194805,NM_{—}014685,gen.NM_{—}014685

[4567] FIG. 4531: PRO24075

[4568] FIG. 4532: DNA326180,XM_{—}166277,gen.XM_{—}166277

[4569] FIG. 4533: PRO82598

[4570] FIG. 4534: DNA326181,XM_{—}165645,gen.XM_{—}165645

[4571] FIG. 4535: DNA326182,NM_{—}018110,gen.NM_{—}018110

[4572] FIG. 4536: PRO82599

[4573] FIG. 4537: DNA326183,XM_{—}165648,gen.XM_{—}165648

[4574] FIG. 4538: DNA326184,XM_{—}167453,gen.XM_{—}167453

[4575] FIG. 4539: DNA326185,NM_{—}022770,gen.NM_{—}022770

[4576] FIG. 4540: PRO82602

[4577] FIG. 4541: DNA326186,XM_{—}167456,gen.XM_{—}167456

[4578] FIG. 4542: PRO82603

[4579] FIG. 4543: DNA326187,XM_{—}058745,gen.XM_{—}058745

[4580] FIG. 4544: DNA326188,XM_{—}091420,gen.XM_{—}091420

[4581] FIG. 4545: DNA326189,NM_{—}004691,gen.NM_{—}004691

[4582] FIG. 4546: PRO82606

[4583] FIG. 4547: DNA326190,NM_{—}000196,gen.NM_{—}000196

[4584] FIG. 4548: PRO82607

[4585] FIG. 4549A-B: DNA326191,NM_{—}004360,gen.NM_{—}004360

[4586] FIG. 4550: PRO2672

[4587] FIG. 4551: DNA326192,XM_{—}039306,gen.XM_{—}039306

[4588] FIG. 4552: PRO82608

[4589] FIG. 4553: DNA326193,NM_{—}030579,gen.NM_{—}030579

[4590] FIG. 4554: PRO82609

[4591] FIG. 4555: DNA326194,XM_{—}012487,gen.XM_{—}012487

[4592] FIG. 4556: DNA326195,NM_{—}014062,gen.NM_{—}014062

[4593] FIG. 4557: PRO82611

[4594] FIG. 4558: DNA326196,XM_{—}085471,gen.XM_{—}085471

[4595] FIG. 4559: PRO82612

[4596] FIG. 4560: DNA326197,XM_{—}113855,gen.XM_{—}113855

[4597] FIG. 4561: DNA326198,XM_{—}085475,gen.XM_{—}085475

[4598] FIG. 4562: DNA326199,XM_{—}028151,gen.XM_{—}028151

[4599] FIG. 4563: PRO82615

[4600] FIG. 4564: DNA275408,NM_{—}001605,gen.NM_{—}001605

[4601] FIG. 4565: PRO63068

[4602] FIG. 4566: DNA326200,NM_{—}007242,gen.NM_{—}007242

[4603] FIG. 4567: PRO82616

[4604] FIG. 4568: DNA189703,NM_{—}005548,gen.NM_{—}005548

[4605] FIG. 4569: PRO22637

[4606] FIG. 4570: DNA326201,XM_{—}113853,gen.XM_{—}113853

[4607] FIG. 4571: DNA326202,NM_{—}032140,gen.NM_{—}032140

[4608] FIG. 4572: PRO82618

[4609] FIG. 4573: DNA326203,NM_{—}030819,gen.NM_{—}030819

[4610] FIG. 4574: PRO82619

[4611] FIG. 4575: DNA304704,NM_{—}005796,gen.NM_{—}005796

[4612] FIG. 4576: PRO71130

[4613] FIG. 4577: DNA326204,XM_{—}043047,gen.XM_{—}043047

[4614] FIG. 4578: PRO49967

[4615] FIG. 4579: DNA88261,NM_{—}001907,gen.NM_{—}001907

[4616] FIG. 4580: PRO2719

[4617] FIG. 4581A-B: DNA326205,NM_{—}005072,gen.NM_{—}005072

[4618] FIG. 4582: PRO4814

[4619] FIG. 4583: DNA326206,XM_{—}165410,gen.XM_{—}165410

[4620] FIG. 4584: DNA326207,NM_{—}017803,gen.NM_{—}017803

[4621] FIG. 4585: PRO82621

[4622] FIG. 4586A-B: DNA326208,NM_{—}004555,gen.NM_{—}004555

[4623] FIG. 4587: PRO82622

[4624] FIG. 4588A-B: DNA326209,NM_{—}018124,gen.NM_{—}018124

[4625] FIG. 4589: PRO82623

[4626] FIG. 4590: DNA326210,XM_{—}091399,gen.XM_{—}091399

[4627] FIG. 4591: PRO82624

[4628] FIG. 4592A-B: DNA326211,NM_{—}014003,gen.NM_{—}014003

[4629] FIG. 4593: PRO82625

[4630] FIG. 4594: DNA326212,NM_{—}017853,gen.NM_{—}017853

[4631] FIG. 4595: PRO82626

[4632] FIG. 4596: DNA326213,XM_{—}042621,gen.XM_{—}042621

[4633] FIG. 4597: DNA326214,XM_{—}064091,gen.XM_{—}064091

[4634] FIG. 4598: PRO82627

[4635] FIG. 4599: DNA326215,XM_{—}085981,gen.XM_{—}085981

[4636] FIG. 4600A-B: DNA326216,XM_{—}051778,gen.XM_{—}051778

[4637] FIG. 4601: PRO82629

[4638] FIG. 4602: DNA326217,NM_{—}004483,gen.NM_{—}004483

[4639] FIG. 4603: PRO82630

[4640] FIG. 4604: DNA326218,NM_{—}020188,gen.NM_{—}020188

[4641] FIG. 4605: PRO82631

[4642] FIG. 4606: DNA326219,XM_{—}033922,gen.XM_{—}033922

[4643] FIG. 4607: PRO82632

[4644] FIG. 4608: DNA326220,XM_{—}113840,gen.XM_{—}113840

[4645] FIG. 4609: PRO82633

[4646] FIG. 4610: DNA326221,NM_{—}016095,gen.NM_{—}016095

[4647] FIG. 4611: PRO82634

[4648] FIG. 4612: DNA326222,NM_{—}006067,gen.NM_{—}006067

[4649] FIG. 4613: PRO50658

[4650] FIG. 4614: DNA326223,NM_{—}001861,gen.NM_{—}001861

[4651] FIG. 4615: PRO82635

[4652] FIG. 4616A-B: DNA326224,XM_{—}085483,gen.XM_{—}085483

[4653] FIG. 4617: DNA326225,NM_{—}017566,gen.NM_{—}017566

[4654] FIG. 4618: PRO82637

[4655] FIG. 4619: DNA326226,XM_{—}057150,gen.XM_{—}057150

[4656] FIG. 4620: PRO82638

[4657] FIG. 4621: DNA326227,XM_{—}058739,gen.XM_{—}058739

[4658] FIG. 4622: DNA326228,XM_{—}085327,gen.XM_{—}085327

[4659] FIG. 4623: PRO82640

[4660] FIG. 4624: DNA326229,XM_{—}047436,gen.XM_{—}047436

[4661] FIG. 4625: PRO82641

[4662] FIG. 4626: DNA227234,NM_{—}002386,gen.NM_{—}002386

[4663] FIG. 4627: PRO37697

[4664] FIG. 4628: DNA326230,NM_{—}014972,gen.NM_{—}014972

[4665] FIG. 4629: PRO82642

[4666] FIG. 4630: DNA326231,XM_{—}071873,gen.XM_{—}071873

[4667] FIG. 4631: PRO82643

[4668] FIG. 4632: DNA326232,XM_{—}047525,gen.XM_{—}047525

[4669] FIG. 4633: DNA326233,NM_{—}000977,gen.NM_{—}000977

[4670] FIG. 4634: PRO82645

[4671] FIG. 4635: DNA326234,NM_{—}033251,gen.NM_{—}033251

[4672] FIG. 4636: PRO82646

[4673] FIG. 4637: DNA326235,XM_{—}085408,gen.XM_{—}085408

[4674] FIG. 4638: DNA326236,NM_{—}004933,gen.NM_{—}004933

[4675] FIG. 4639: PRO2198

[4676] FIG. 4640: DNA326237,XM_{—}113882,gen.XM_{—}113882

[4677] FIG. 4641: DNA326238,XM_{—}010938,gen.XM_{—}010938

[4678] FIG. 4642: DNA326239,NM_{—}006761,gen.NM_{—}006761

[4679] FIG. 4643: PRO39530

[4680] FIG. 4644A-B: DNA326240,XM_{—}017096,gen.XM_{—}017096

[4681] FIG. 4645: DNA326241,XM_{—}033714,gen.XM_{—}033714

[4682] FIG. 4646A-B: DNA326242,XM_{—}033689,gen.XM_{—}033689

[4683] FIG. 4647: DNA326243,NM_{—}002615,gen.NM_{—}002615

[4684] FIG. 4648: DNA326244,XM_{—}056082,gen.XM_{—}056082

[4685] FIG. 4649: PRO82654

[4686] FIG. 4650: DNA326245,XM_{—}008557,gen.XM_{—}008557

[4687] FIG. 4651: DNA326246,XM_{—}045183,gen.XM_{—}045183

[4688] FIG. 4652: PRO82656

[4689] FIG. 4653: DNA326247,XM_{—}113901,gen.XM_{—}113901

[4690] FIG. 4654: DNA326248,NM_{—}080822,gen.NM_{—}080822

[4691] FIG. 4655: PRO82658

[4692] FIG. 4656A-B: DNA326249,XM_{—}029438,gen.XM_{—}029438

[4693] FIG. 4657: PRO82659

[4694] FIG. 4658: DNA326250,XM_{—}008509,gen.XM_{—}008509

[4695] FIG. 4659: DNA326251,XM_{—}085687,gen.XM_{—}085687

[4696] FIG. 4660: PRO82661

[4697] FIG. 4661: DNA326252,XM_{—}027825,gen.XM_{—}027825

[4698] FIG. 4662: PRO82662

[4699] FIG. 4663: DNA326253,XM_{—}053717,gen.XM_{—}053717

[4700] FIG. 4664: PRO82663

[4701] FIG. 4665: DNA326254,NM_{—}005022,gen.NM_{—}005022

[4702] FIG. 4666: PRO62780

[4703] FIG. 4667A-B: DNA326255,XM_{—}028398,gen.XM_{—}028398

[4704] FIG. 4668: PRO82664

[4705] FIG. 4669: DNA326256,NM_{—}000018,gen.NM_{—}000018

[4706] FIG. 4670: PRO66265

[4707] FIG. 4671: DNA326257,XM_{—}008334,gen.XM_{—}008334

[4708] FIG. 4672: DNA326258,NM_{—}024297,gen.NM_{—}024297

[4709] FIG. 4673: PRO82665

[4710] FIG. 4674: DNA326259,XM_{—}113324,gen.XM_{—}113324

[4711] FIG. 4675: DNA326260,XM_{—}012676,gen.XM_{—}012676

[4712] FIG. 4676: PRO82667

[4713] FIG. 4677: DNA326261,XM_{—}085691,gen.XM_{—}085691

[4714] FIG. 4678: DNA326262,XM_{—}028417,gen.XM_{—}028417

[4715] FIG. 4679: PRO82669

[4716] FIG. 4680A-B: DNA326263,XM_{—}041964,gen.XM_{—}041964

[4717] FIG. 4681: PRO82670

[4718] FIG. 4682: DNA326264,NM_{—}019013,gen.NM_{—}019013

[4719] FIG. 4683: PRO82671

[4720] FIG. 4684: DNA326265,XM_{—}008538,gen.XM_{—}008538

[4721] FIG. 4685: PRO82672

[4722] FIG. 4686: DNA326266,XM_{—}008441,gen.XM_{—}008441

[4723] FIG. 4687: DNA97300,NM_{—}001416,gen.NM_{—}001416

[4724] FIG. 4688: PRO3647

[4725] FIG. 4689: DNA326267,NM_{—}004870,gen.NM_{—}004870

[4726] FIG. 4690: PRO82674

[4727] FIG. 4691: DNA326268,NM_{—}006942,gen.NM_{—}006942

[4728] FIG. 4692: PRO82675

[4729] FIG. 4693: DNA326269,XM_{—}008679,gen.XM_{—}008679

[4730] FIG. 4694: DNA326270,XM_{—}008231,gen.XM_{—}008231

[4731] FIG. 4695: DNA326271,XM_{—}113328,gen.XM_{—}113328

[4732] FIG. 4696: DNA326272,XM_{—}113929,gen.XM_{—}113929

[4733] FIG. 4697: DNA326273,NM_{—}001970,gen.NM_{—}001970

[4734] FIG. 4698: PRO82678

[4735] FIG. 4699: DNA297388,NM_{—}004217,gen.NM_{—}004217

[4736] FIG. 4700: PRO70812

[4737] FIG. 4701: DNA326274,XM_{—}165421,gen.XM_{—}165421

[4738] FIG. 4702: PRO82679

[4739] FIG. 4703: DNA326275,XM_{—}113325,gen.XM_{—}113325

[4740] FIG. 4704: DNA326276,XM_{—}165422,gen.XM_{—}165422

[4741] FIG. 4705: PRO49182

[4742] FIG. 4706: DNA326277,XM_{—}113931,gen.XM_{—}113931

[4743] FIG. 4707: DNA326278,XH_{—}036659,gen.XM_{—}036659

[4744] FIG. 4708: DNA103401,NM_{—}003876,gen.NM_{—}003876

[4745] FIG. 4709: PRO4729

[4746] FIG. 4710A-B: DNA326279,XM_{—}042698,gen.XM_{—}042698

[4747] FIG. 4711: PRO82683

[4748] FIG. 4712A-B: DNA326280,NM_{—}017234,gen.XM_{—}017234

[4749] FIG. 4713: DNA326281,XM_{—}165418,gen.XM_{—}165418

[4750] FIG. 4714: DNA304715,NM_{—}000987,gen.NM_{—}000987

[4751] FIG. 4715: PRO71141

[4752] FIG. 4716A-B: DNA326282,NM_{—}004618,gen.NM_{—}004618

[4753] FIG. 4717: PRO62981

[4754] FIG. 4718: DNA326283,XM_{—}085743,gen.XM_{—}085743

[4755] FIG. 4719A-B: DNA254198,NM_{—}002018,gen.NM_{—}002018

[4756] FIG. 4720: PRO49310

[4757] FIG. 4721A-B: DNA326284,XM_{—}039910,gen.XM_{—}039910

[4758] FIG. 4722: PRO82687

[4759] FIG. 4723A-C: DNA326285,XM_{—}113310,gen.XM_{—}113310

[4760] FIG. 4724: DNA326286,XM_{—}085613,gen.XM_{—}085613

[4761] FIG. 4725: DNA326287,NM_{—}006470,gen.NM_{—}006470

[4762] FIG. 4726: PRO82689

[4763] FIG. 4727: DNA326288,XM_{—}051763,gen.XM_{—}051763

[4764] FIG. 4728: DNA290292,NM_{—}018955,gen.NM_{—}018955

[4765] FIG. 4729: PRO70449

[4766] FIG. 4730: DNA326289,XM_{—}058900,gen.XM_{—}058900

[4767] FIG. 4731: PRO82691

[4768] FIG. 4732: DNA326290,XM_{—}039921,gen.XM_{—}039921

[4769] FIG. 4733: PRO82692

[4770] FIG. 4734: DNA326291,XM_{—}012549,gen.XM_{—}012549

[4771] FIG. 4735: DNA326292,XM_{—}085548,gen.XM_{—}085548

[4772] FIG. 4736: PRO82694

[4773] FIG. 4737: DNA326293,NM_{—}018019,gen.NM_{—}018019

[4774] FIG. 4738: PRO82695

[4775] FIG. 4739: DNA326294,NM_{—}138427,gen.NM_{—}138427

[4776] FIG. 4740: PRO82696

[4777] FIG. 4741: DNA326295,XM_{—}085545,gen.XM_{—}085545

[4778] FIG. 4742A-B: DNA227084,NM_{—}004176,gen.NM_{—}004176

[4779] FIG. 4743: PRO37547

[4780] FIG. 4744: DNA326296,XM_{—}012615,gen.XM_{—}012615

[4781] FIG. 4745: DNA326297,XM_{—}085722,gen.XM_{—}085722

[4782] FIG. 4746: PRO82699

[4783] FIG. 4747: DNA255414,NM_{—}018242,gen.NM_{—}018242

[4784] FIG. 4748: PRO50481

[4785] FIG. 4749: DNA326298,XM_{—}045044,gen.XM_{—}045044

[4786] FIG. 4750: DNA326299,XM_{—}008323,gen.XM_{—}008323

[4787] FIG. 4751: DNA326300,XM_{—}045535,gen.XM_{—}045535

[4788] FIG. 4752A-B: DNA326301,XM_{—}045551,gen.XM_{—}045551

[4789] FIG. 4753: PRO82702

[4790] FIG. 4754: DNA326302,XM_{—}097204,gen.XM_{—}097204

[4791] FIG. 4755: DNA326303,XM_{—}058867,gen.XM_{—}058867

[4792] FIG. 4756: PRO82704

[4793] FIG. 4757: DNA326304,XM_{—}085672,gen.XM_{—}085672

[4794] FIG. 4758: DNA326305,XM_{—}031536,gen.XM_{—}031536

[4795] FIG. 4759: PRO82706

[4796] FIG. 4760: DNA326306,XM_{—}008486,gen.XM_{—}008486

[4797] FIG. 4761: DNA326307,NM_{—}015584,gen.NM_{—}015584

[4798] FIG. 4762: PRO82707

[4799] FIG. 4763: DNA326308,NM_{—}000638,gen.NM_{—}000638

[4800] FIG. 4764: PRO82708

[4801] FIG. 4765A-B: DN6 26309,XM_{—}031466,gen.XM_{—}031466

[4802] FIG. 4766: PRO82709

[4803] FIG. 4767: DNA326310,XM_{—}031415,gen.XM_{—}031415

[4804] FIG. 4768: DNA326311,XM_{—}117066,gen.XM_{—}117066

[4805] FIG. 4769: DNA326312,XM_{—}031427,gen.XM_{—}031427

[4806] FIG. 4770: PRO82712

[4807] FIG. 4771: DNA326313,NM_{—}032322,gen.NM_{—}032322

[4808] FIG. 4772: PRO82713

[4809] FIG. 4773A-B: DNA326314,XM_{—}050101,gen.XM_{—}050101

[4810] FIG. 4774: PRO82714

[4811] FIG. 4775: DNA326315,XM_{—}056730,gen.XM_{—}056730

[4812] FIG. 4776: PRO82715

[4813] FIG. 4777: DNA326316,XM_{—}008462,gen.XM_{—}008462

[4814] FIG. 4778: DNA287427,NM_{—}002815,gen.NM_{—}002815

[4815] FIG. 4779: PRO69684

[4816] FIG. 4780: DNA326317,NM_{—}015544,gen.NM_{—}015544

[4817] FIG. 4781: PRO82717

[4818] FIG. 4782: DNA188351,NM_{—}005623,gen.NM_{—}005623

[4819] FIG. 4783: PRO21887

[4820] FIG. 4784: DNA326318,NM_{—}002878,gen.NM_{—}002878

[4821] FIG. 4785: PRO82718

[4822] FIG. 4786: DNA326319,NM_{—}133627,gen.NM_{—}133627

[4823] FIG. 4787: PRO82719

[4824] FIG. 4788: DNA326320,NM_{—}133630,gen.NM_{—}133630

[4825] FIG. 4789: PRO82720

[4826] FIG. 4790: DNA326321,NM_{—}133629,gen.NM_{—}133629

[4827] FIG. 4791: PRO82721

[4828] FIG. 4792: DNA326322,NM_{—}018096,gen.NM_{—}018096

[4829] FIG. 4793: PRO37791

[4830] FIG. 4794A-B: DNA326323,XM_{—}039474,gen.XM_{—}039474

[4831] FIG. 4795: PRO82722

[4832] FIG. 4796A-B: DNA66475,NM_{—}004448,gen.NM_{—}004448

[4833] FIG. 4797: PRO 1204

[4834] FIG. 4798: DNA326324,NM_{—}000981,gen.NM_{—}000981

[4835] FIG. 4799: PRO4738

[4836] FIG. 4800A-B: DNA326325,XM_{—}008150,gen.XM_{—}008150

[4837] FIG. 4801: DNA326326,NM_{—}000978,gen.NM_{—}000978

[4838] FIG. 4802: PRO82724

[4839] FIG. 4803: DNA326327,XM_{—}058830,gen.XM_{—}058830

[4840] FIG. 4804: PRO82725

[4841] FIG. 4805: DNA270979,NM_{—}002809,gen.NM_{—}002809

[4842] FIG. 4806: PRO59309

[4843] FIG. 4807: DNA326328,NM_{—}000422,gen.NM_{—}000422

[4844] FIG. 4808: PRO82726

[4845] FIG. 4809: DNA326329,XM_{—}008579,gen.XM_{—}008579

[4846] FIG. 4810: DNA326330,NM_{—}002276,gen.NM_{—}002276

[4847] FIG. 4811: PRO82728

[4848] FIG. 4812: DNA272889,NM_{—}002275,gen.NM_{—}002275

[4849] FIG. 4813: PRO60979

[4850] FIG. 4814: DNA326331,NM_{—}002274,gen.NM_{—}002274

[4851] FIG. 4815: PRO82729

[4852] FIG. 4816: DNA326332,NM_{—}000526,gen.NM_{—}000526

[4853] FIG. 4817: PRO82730

[4854] FIG. 4818: DNA326333,XM_{—}049937,gen.XM_{—}049937

[4855] FIG. 4819A-B: DNA326334,XM_{—}1 13334,gen.XM_{—}113334

[4856] FIG. 4820: DNA226389,NM_{—}000964,gen.NM_{—}000964

[4857] FIG. 4821: PRO36852

[4858] FIG. 4822: DNA326335,NM_{—}006455,gen.NM_{—}006455

[4859] FIG. 4823: PRO82732

[4860] FIG. 4824: DNA326336,XM_{—}113938,gen.XM_{—}113938

[4861] FIG. 4825: DNA326337,XM_{—}036465,gen.XM_{—}036465

[4862] FIG. 4826: DNA326338,XM_{—}055061,gen.XM_{—}055061

[4863] FIG. 4827A-B: DNA326339,XM_{—}036462,gen.XM_{—}036462

[4864] FIG. 4828: PRO82736

[4865] FIG. 4829: DNA326340,XM_{—}048654,gen.XM_{—}048654

[4866] FIG. 4830: DNA326341,NM_{—}025197,gen.NM_{—}025197

[4867] FIG. 4831: PRO82737

[4868] FIG. 4832: DNA326342,XM_{—}054038,gen.XM_{—}054038

[4869] FIG. 4833: PRO82738

[4870] FIG. 4834: DNA326343,NM_{—}002265,gen.NM_{—}002265

[4871] FIG. 4835: PRO82739

[4872] FIG. 4836: DNA326344,XM_{—}032201,gen.XM_{—}032201

[4873] FIG. 4837: PRO82740

[4874] FIG. 4838: DNA326345,NM_{—}012138,gen.NM_{—}012138

[4875] FIG. 4839: PRO82741

[4876] FIG. 4840: DNA326346,XM_{—}018534,gen.XM_{—}018534

[4877] FIG. 4841: DNA227873,NM_{—}001050,gen.NM_{—}001050

[4878] FIG. 4842: PRO38336

[4879] FIG. 4843: DNA270975,NM_{—}000386,gen.NM_{—}000386

[4880] FIG. 4844: PRO59305

[4881] FIG. 4845: DNA88378,NM_{—}002087,gen.NM_{—}002087

[4882] FIG. 4846: PRO2769

[4883] FIG. 4847: DNA326347,NM_{—}016016,gen.NM_{—}016016

[4884] FIG. 4848: PRO82743

[4885] FIG. 4849: DNA326348,XM_{—}012642,gen.XM_{—}012642

[4886] FIG. 4850A-B: DNA326349,NM_{—}005474,gen.NM_{—}005474

[4887] FIG. 4851: PRO82745

[4888] FIG. 4852: DNA326350,XM_{—}045901,gen.XM_{—}045901

[4889] FIG. 4853: PRO82746

[4890] FIG. 4854: DNA257428,NM_{—}032376,gen.NM_{—}032376

[4891] FIG. 4855: PRO52010

[4892] FIG. 4856: DNA326351,XM_{—}008351,gen.XM_{—}008351

[4893] FIG. 4857: DNA326352,XM_{—}032852,gen.XM_{—}032852

[4894] FIG. 4858: PRO82748

[4895] FIG. 4859: DNA326353,NM_{—}025233,gen.NM_{—}025233

[4896] FIG. 4860: PRO82749

[4897] FIG. 4861: DNA326354,XM_{—}032817,gen.XM_{—}032817

[4898] FIG. 4862: PRO82750

[4899] FIG. 4863: DNA326355,XM_{—}032813,gen.XM_{—}032813

[4900] FIG. 4864: DNA326356,XM_{—}032766,gen.XM_{—}032766

[4901] FIG. 4865: DNA326357,NM_{—}003766,gen.NM_{—}003766

[4902] FIG. 4866: PRO82753

[4903] FIG. 4867: DNA326358,XM_{—}008401,gen.XM_{—}008401

[4904] FIG. 4868: PRO82754

[4905] FIG. 4869: DNA326359,XM_{—}008402,gen.XM_{—}008402

[4906] FIG. 4870: PRO82755

[4907] FIG. 4871: DNA326360,NM_{—}017595,gen.NM_{—}017595

[4908] FIG. 4872: PRO82756

[4909] FIG. 4873: DNA326361,XM_{—}085636,gen.XM_{—}085636

[4910] FIG. 4874: PRO82757

[4911] FIG. 4875: DNA326362,NM_{—}006373,gen.NM_{—}006373

[4912] FIG. 4876: PRO82758

[4913] FIG. 4877: DNA196642,NM_{—}005440,gen.NM_{—}005440

[4914] FIG. 4878: PRO25115

[4915] FIG. 4879A-B: DNA270901,NM_{—}004247,gen.NM_{—}004247

[4916] FIG. 4880: DNA326363,XM_{—}050159,gen.XM_{—}050159

[4917] FIG. 4881: DNA326364,XM_{—}083983,gen.XM_{—}083983

[4918] FIG. 4882: PRO82760

[4919] FIG. 4883A-B: DNA326365,NM_{—}021079,gen.NM_{—}021079

[4920] FIG. 4884: PRO82761

[4921] FIG. 4885: DNA326366,NM_{—}133373,gen.NM_{—}133373

[4922] FIG. 4886: PRO82762

[4923] FIG. 4887: DNA97290,NM_{—}002512,gen.NM_{—}002512

[4924] FIG. 4888: PRO3637

[4925] FIG. 4889: DNA227071,NM_{—}000269,gen.NM_{—}000269

[4926] FIG. 4890: PRO37534

[4927] FIG. 4891: DNA227764,NM_{—}003971,gen.NM_{—}003971

[4928] FIG. 4892: PRO38227

[4929] FIG. 4893A-B: DNA326367,NM_{—}020038,gen.NM_{—}020038

[4930] FIG. 4894: PRO82763

[4931] FIG. 4895A-B: DNA326368,NM_{—}020037,gen.NM_{—}020037

[4932] FIG. 4896: PRO82764

[4933] FIG. 4897: DNA326369,XM_{—}037971,gen.XM_{—}037971

[4934] FIG. 4898: DNA254791,NM_{—}018346,gen.NM_{—}018346

[4935] FIG. 4899: PRO49888

[4936] FIG. 4900: DNA287425,NM_{—}018509,gen.NM_{—}018509

[4937] FIG. 4901: PRO69682

[4938] FIG. 4902A-B: DNA326370,XM_{—}008432,gen.XM_{—}008432

[4939] FIG. 4903: DNA88554,NM_{—}000250,gen.NM_{—}000250

[4940] FIG. 4904: PRO2839

[4941] FIG. 4905: DNA326371,XM_{—}113919,gen.XM_{—}113919

[4942] FIG. 4906: DNA326372,NM_{—}017777,gen.NM_{—}017777

[4943] FIG. 4907: PRO82768

[4944] FIG. 4908: DNA326373,NM_{—}006924,gen.NM_{—}006924

[4945] FIG. 4909: PRO82769

[4946] FIG. 4910: DNA326374,XM_{—}115480,gen.XM_{—}115480

[4947] FIG. 4911: DNA326375,NM_{—}005831,gen.NM_{—}005831

[4948] FIG. 4912: PRO59328

[4949] FIG. 4913: DNA326376,XM_{—}117061,gen.XM_{—}117061

[4950] FIG. 4914: PRO82771

[4951] FIG. 4915: DNA326377,XM_{—(}08459,gen.XM_{—}008459

[4952] FIG. 4916A-B: DNA326378,XM_{—}012651,gen.XM_{—}012651

[4953] FIG. 4917: DNA326379,NM_{—}021626,gen.NM_{—}021626

[4954] FIG. 4918: PRO302

[4955] FIG. 4919: DNA287291,NM_{—}021213,gen.NM_{—}021213

[4956] FIG. 4920: PRO69561

[4957] FIG. 4921A-B: DNA326380,NM_{—}004859,gen.NM_{—}004859

[4958] FIG. 4922: PRO82774

[4959] FIG. 4923: DNA326381,XM_{—}083966,gen.XM_{—}083966

[4960] FIG. 4924: DNA326382,XM_{—}044426,gen.XM_{—}044426

[4961] FIG. 4925: PRO82776

[4962] FIG. 4926: DNA326383,XM_{—}008253,gen.XM_{—}008253

[4963] FIG. 4927: DNA326384,XM_{—}044394,gen.XM_{—}044394

[4964] FIG. 4928: PRO10400

[4965] FIG. 4929: DNA326385,NM_{—}017647,gen.NM_{—}017647

[4966] FIG. 4930: PRO82778

[4967] FIG. 4931: DNA326386,NM_{—}007372,gen.NM_{—}007372

[4968] FIG. 4932: PRO82779

[4969] FIG. 4933: DNA326387,NM_{—}002401,gen.NM_{—}002401

[4970] FIG. 4934: PRO37764

[4971] FIG. 4935: DNA326388,XM_{—}044376,gen.XM_{—}044376

[4972] FIG. 4936A-B: DNA150457,NM_{—}006039,gen.XM_{—}044376

[4973] FIG. 4937: PRO12265

[4974] FIG. 4938: DNA326389,XM_{—}044367,gen.XM_{—}044367

[4975] FIG. 4939: DNA227055,NM_{—}002634,gen.NM_{—}002634

[4976] FIG. 4940: PRO37518

[4977] FIG. 4941: DNA326390,XM_{—}111118,gen.XM_{—}011118

[4978] FIG. 4942: DNA326391,XM_{—}055199,gen.XM_{—}055199

[4979] FIG. 4943A-B: DNA326392,XM_{—}44372,gen.XM_{—}044372

[4980] FIG. 4944: DNA326393,XM_{—}113315,gen.XM_{—}113315

[4981] FIG. 4945: DNA326394,XM_{—}012609,gen.XM_{—}012609

[4982] FIG. 4946: DNA326395,NM_{—}005220,gen.NM_{—}005220

[4983] FIG. 4947: PRO82787

[4984] FIG. 4948: DNA326396,XM_{—}085589,gen.XM_{—}085589

[4985] FIG. 4949: PRO82788

[4986] FIG. 4950: DNA326397,XM_{—}012634,gen.XM_{—}012634

[4987] FIG. 4951: DNA326398,XM_{—}085627,gen.XM_{—}085627

[4988] FIG. 4952: PRO82790

[4989] FIG. 4953: DNA150814,NM_{—}002086,gen.NM_{—}002086

[4990] FIG. 4954: PRO12806

[4991] FIG. 4955: DNA326399,NM_{—}024844,gen.NM_{—}024844

[4992] FIG. 4956: PRO82791

[4993] FIG. 4957: DNA326400,XM_{—}041583,gen.XM_{—}041583

[4994] FIG. 4958: DNA326401,XM_{—}046932,gen.XM_{—}046932

[4995] FIG. 4959: PRO82792

[4996] FIG. 4960: DNA326402,NM_{—}004524,gen.NM_{—}004524

[4997] FIG. 4961: PRO82793

[4998] FIG. 4962A-B: DNA326403,XM_{—}113951,gen.XM_{—}113951

[4999] FIG. 4963A-B: DNA88430,NM_{—}000213,gen.NM_{—}000213

[5000] FIG. 4964: PRO2788

[5001] FIG. 4965A-B: DNA326404,XM_{—}036104,gen.XM_{—}036104

[5002] FIG. 4966: PRO82794

[5003] FIG. 4967: DNA326405,NM_{—}000154,gen.NM_{—}000154

[5004] FIG. 4968: PRO82795

[5005] FIG. 4969: DNA326406,NM_{—}005324,gen.NM_{—}005324

[5006] FIG. 4970: PRO1 1403

[5007] FIG. 4971A-B: DNA326407,XM_{—}036115,gen.XM_{—}036115

[5008] FIG. 4972: PRO82796

[5009] FIG. 4973: DNA326408,XM_{—}054344,gen.XM_{—}054344

[5010] FIG. 4974: PRO82797

[5011] FIG. 4975: DNA274755,NM_{—}002766,gen.NM_{—}002766

[5012] FIG. 4976: PRO70703

[5013] FIG. 4977A-B: DNA326409,XM_{—}085531,gen.XM_{—}085531

[5014] FIG. 4978: DNA326410,XM_{—}113892,gen.XM_{—}113892

[5015] FIG. 4979: PRO82799

[5016] FIG. 4980: DNA326411,XM_{—}017578,gen.XM_{—}017578

[5017] FIG. 4981: PRO82800

[5018] FIG. 4982: DNA326412,XM_{—}036785,gen.XM_{—}036785

[5019] FIG. 4983: PRO39201

[5020] FIG. 4984: DNA326413,XM_{—}097043,gen.XM_{—}097043

[5021] FIG. 4985: DNA129504,NM_{—}001168,gen.NM_{—}001168

[5022] FIG. 4986: PRO7143

[5023] FIG. 4987: DNA326414,XM_{—}037196,gen.XM_{—}037196

[5024] FIG. 4988: DNA326415,XM_{—}037195,gen.XM_{—}037195

[5025] FIG. 4989: DNA326416,XM_{—}045104,gen.XM_{—}045104

[5026] FIG. 4990: PRO37540

[5027] FIG. 4991: DNA326417,XM_{—}085563,gen.XM_{—}085563

[5028] FIG. 4992A-B: DNA326418,XM_{—}085716,gen.XM_{—}085716

[5029] FIG. 4993: PRO82805

[5030] FIG. 4994A-B: DNA326419,XM_{—}049934,gen.XM_{—}049934

[5031] FIG. 4995: DNA326420,XM_{—}049931,gen.XM_{—}049931

[5032] FIG. 4996A-B: DNA326421,XM_{—}045581,gen.XM_{—}045581

[5033] FIG. 4997: PRO82807

[5034] FIG. 4998: DNA326422,XM_{—}113945,gen.XM_{—}113945

[5035] FIG. 4999: DNA326423,XM_{—}046481,gen.XM_{—}046481

[5036] FIG. 5000: DNA326424,XM_{—}097195,gen.XM_{—}097195

[5037] FIG. 5001: DNA326425,XM_{—}097193,gen.XM_{—}097193

[5038] FIG. 5002: DNA326426,NM_{—}004309,gen.NM_{—}004309

[5039] FIG. 5003: PRO61246

[5040] FIG. 5004: DNA326427,XM_{—}046472,gen.XM_{—}046472

[5041] FIG. 5005: PRO82812

[5042] FIG. 5006: DNA326428,NM_{—}016286,gen.NM_{—}016286

[5043] FIG. 5007: PRO82813

[5044] FIG. 5008: DNA326429,NM_{—}004127,gen.NM_{—}004127

[5045] FIG. 5009: PRO82814

[5046] FIG. 5010A-C: DNA326430,XM_{—}113943,gen.NM_{—}004127

[5047] FIG. 5011: DNA326431,XM_{—}113330,gen.XM_{—}113330

[5048] FIG. 5012: PRO82816

[5049] FIG. 5013: DNA326432,XM_{—}113303,gen.XM_{—}113303

[5050] FIG. 5014: DNA287234,NM_{—}031968,gen.NM_{—}031968

[5051] FIG. 5015: PRO69513

[5052] FIG. 5016: DNA326433,NM_{—}022158,gen.NM_{—}022158

[5053] FIG. 5017: PRO82818

[5054] FIG. 5018: DNA326434,XM_{—}038424,gen.XM_{—}038424

[5055] FIG. 5019: DNA326435,XM_{—}085735,gen.XM_{—}085735

[5056] FIG. 5020: DNA326436,XM_{—}046765,gen.XM_{—}046765

[5057] FIG. 5021: DNA326437,XM_{—}046769,gen.XM_{—}046769

[5058] FIG. 5022: DNA326438,XM_{—}046767,gen.XM_{—}046767

[5059] FIG. 5023: DNA273694,NM_{—}006101,gen.NM_{—}006101

[5060] FIG. 5024: PRO61661

[5061] FIG. 5025A-B: DNA326439,XM_{—}028744,gen.XM_{—}028744

[5062] FIG. 5026: DNA326440,XM_{—}165954,gen.XM_{—}165954

[5063] FIG. 5027: DNA326441,XM_{—}041678,gen.XM_{—}041678

[5064] FIG. 5028: DNA326442,XM_{—}1 13343,gen.XM_{—}113343

[5065] FIG. 5029: PRO82825

[5066] FIG. 5030: DNA326443,XM_{—}067325,gen.XM_{—}067325

[5067] FIG. 5031: DNA326444,XM_{—}012741,gen.XM_{—}012741

[5068] FIG. 5032: DNA326445,NM_{—}014214,gen.NM_{—}014214

[5069] FIG. 5033: PRO82828

[5070] FIG. 5034A-B: DNA326446,XM_{—}035640,gen.XM_{—}035640

[5071] FIG. 5035: PRO82829

[5072] FIG. 5036: DNA326447,XM_{—}016382,gen.XM_{—}016382

[5073] FIG. 5037: DNA326448,NM_{—}032933,gen.NM_{—}032933

[5074] FIG. 5038: PRO82831

[5075] FIG. 5039: DNA274690,NM_{—}006938,gen.NM_{—}006938

[5076] FIG. 5040A-B: DNA88457,NM_{—}000227,gen.NM_{—}000227

[5077] FIG. 5041: PRO2799

[5078] FIG. 5042: DNA326449,XM_{—}085791,gen.XM_{—}085791

[5079] FIG. 5043: DNA326450,XM_{—}085789,gen.XM_{—}085789

[5080] FIG. 5044: PRO82833

[5081] FIG. 5045: DNA326451,XM_{—}085790,gen.XM_{—}085790

[5082] FIG. 5046: DNA326452,XM_{—}015755,gen.XM_{—}015755

[5083] FIG. 5047: PRO82835

[5084] FIG. 5048: DNA326453,XM_{—}097232,gen.XM_{—}097232

[5085] FIG. 5049: DNA326454,XM_{—}085788,gen.XM_{—}085788

[5086] FIG. 5050: DNA88281,NM_{—}001944,gen.NM_{—}001944

[5087] FIG. 5051: PRO2267

[5088] FIG. 5052: DNA271841,NM_{—}003787,gen.NM_{—}003787

[5089] FIG. 5053: PRO60121

[5090] FIG. 5054: DNA326455,XM_{—}008723,gen.XM_{—}008723

[5091] FIG. 5055: DNA326456,XM_{—}084007,gen.XM_{—}084007

[5092] FIG. 5056: DNA256813,NM_{—}018255,gen.NM_{—}018255

[5093] FIG. 5057: PRO51744

[5094] FIG. 5058: DNA326457,XM_{—}085775,gen.XM_{—}085775

[5095] FIG. 5059: PRO82840

[5096] FIG. 5060: DNA326458,NM_{—}138443,gen.NM_{—}138443

[5097] FIG. 5061: PRO82841

[5098] FIG. 5062: DNA326459,XM_{—}038872,gen.XM_{—}038872

[5099] FIG. 5063: PRO82842

[5100] FIG. 5064: DNA326460,XM_{—}086779,gen.XM_{—}086779

[5101] FIG. 5065: DNA326461,XM_{—}167363,gen.XM_{—}167363

[5102] FIG. 5066: DNA326462,XM_{—}031944,gen.XM_{—}031944

[5103] FIG. 5067: DNA326463,NM_{—}000985,gen.NM_{—}000985

[5104] FIG. 5068: PRO82846

[5105] FIG. 5069: DNA326464,NM_{—}002396,gen.NM_{—}002396

[5106] FIG. 5070: PRO61113

[5107] FIG. 5071: DNA326465,XM_{—}166288,gen.XM_{—}166288

[5108] FIG. 5072: DNA326466,NM_{—}004539,gen.NM_{—}004539

[5109] FIG. 5073: PRO60800

[5110] FIG. 5074: DNA326467,XM_{—}006937,gen.XM_{—}006937

[5111] FIG. 5075: DNA326468,XM_{—}085779,gen.XM_{—}085779

[5112] FIG. 5076: DNA326469,XM_{—}011089,gen.XM_{—}011089

[5113] FIG. 5077: PRO82850

[5114] FIG. 5078: DNA326470,XM_{—}169540,gen.XM_{—}169540

[5115] FIG. 5079: PRO82851

[5116] FIG. 5080: DNA326471,XM_{—}167008,gen.XM_{—}167008

[5117] FIG. 5081: PRO82852

[5118] FIG. 5082: DNA326472,XM_{—}048471,gen.XM_{—}048471

[5119] FIG. 5083A-B: DNA326473,XM_{—}008812,gen.XM_{—}008812

[5120] FIG. 5084A-B: DNA326474,XM_{—}117096,gen.XM_{—}117096

[5121] FIG. 5085: PRO82855

[5122] FIG. 5086: DNA326475,NM_{—}002385,gen.NM_{—}002385

[5123] FIG. 5087: PRO82856

[5124] FIG. 5088: DNA326476,XM_{—}015241,gen.XM_{—}015241

[5125] FIG. 5089A-B: DNA326477,XM_{—}008695,gen.XM_{—}008695

[5126] FIG. 5090A-B: DNA326478,XM_{—}041872,gen.XM_{—}041872

[5127] FIG. 5091: PRO82859

[5128] FIG. 5092: DNA326479,XM_{—}051586,gen.XM_{—}051586

[5129] FIG. 5093: DNA326480,NM_{—}003712,gen.NM_{—}003712

[5130] FIG. 5094: PRO1077

[5131] FIG. 5095: DNA326481,XM_{—}042018,gen.XM_{—}042018

[5132] FIG. 5096: PRO2560

[5133] FIG. 5097: DNA326482,XM_{—}114018,gen.XM_{—}114018

[5134] FIG. 5098: DNA326483,NM_{—}017876,gen.NM_{—}017876

[5135] FIG. 5099: PRO82861

[5136] FIG. 5100: DNA326484,NM_{—}031990,gen.NM_{—}031990

[5137] FIG. 5101: PRO82862

[5138] FIG. 5102: DNA326485,NM_{—}002819,gen.NM_{—}002819

[5139] FIG. 5103: PRO62899

[5140] FIG. 5104: DNA326486,NM_{—}005224,gen.NM_{—}005224

[5141] FIG. 5105: PRO82863

[5142] FIG. 5106: DNA326487,XM_{—}037565,gen.XM_{—}037565

[5143] FIG. 5107: PRO82864

[5144] FIG. 5108: DNA326488,XM_{—}092042,gen.XM_{—}092042

[5145] FIG. 5109: DNA326489,XM_{—}037572,gen.XM_{—}037572

[5146] FIG. 5110: DNA326490,XM_{—}009279,gen.XM_{—}009279

[5147] FIG. 5111: PRO82867

[5148] FIG. 5112: DNA326491,NM_{—}002085,gen.NM_{—}002085

[5149] FIG. 5113A-B: DNA326492,XM_{—}009277,gen.XM_{—}009277

[5150] FIG. 5114: DNA326493,XM_{—}012913,gen.XM_{—}012913

[5151] FIG. 5115: DNA274101,NM_{—}001687,gen.NM_{—}001687

[5152] FIG. 5116: PRO62039

[5153] FIG. 5117: DNA326494,XM_{—}028067,gen.XM_{—}028067

[5154] FIG. 5118: PRO82871

[5155] FIG. 5119: DNA326495,XM_{—}028064,gen.XM_{—}028064

[5156] FIG. 5120: DNA326496,NM_{—}024407,gen.NM_{—}024407

[5157] FIG. 5121: PRO82872

[5158] FIG. 5122: DNA326497,NM_{—}000156,gen.NM_{—}000156

[5159] FIG. 5123: PRO58046

[5160] FIG. 5124: DNA326498,NM_{—}138924,gen.NM_{—}138924

[5161] FIG. 5125: PRO82873

[5162] FIG. 5126: DNA326499,NM_{—}001018,gen.NM_{—}001018

[5163] FIG. 5127: PRO10485

[5164] FIG. 5128: DNA326500,XM_{—}086101,gen.XM_{—}086101

[5165] FIG. 5129: PRO82874

[5166] FIG. 5130: DNA326501,XM_{—}086102,gen.XM_{—}086102

[5167] FIG. 5131: DNA326502,XM_{—}047584,gen.XM_{—}047584

[5168] FIG. 5132A-B: DNA326503,XM_{—}047600,gen.XM_{—}047600

[5169] FIG. 5133: PRO38496

[5170] FIG. 5134: DNA326504,XM_{—}097420,gen.XM_{—}097420

[5171] FIG. 5135A-B: DNA326505,XM_{—}030721,gen.XM_{—}030721

[5172] FIG. 5136: PRO82877

[5173] FIG. 5137: DNA326506,XM_{—}030720,gen.XM_{—}030720

[5174] FIG. 5138: DNA326507,NM_{—}031213,gen.NM_{—}031213

[5175] FIG. 5139: PRO82879

[5176] FIG. 5140: DNA326508,XM_{—}039723,gen.XM_{—}039723

[5177] FIG. 5141: DNA326509,NM_{—}001319,gen.NM_{—}001319

[5178] FIG. 5142: PRO82881

[5179] FIG. 5143: DNA326510,NM_{—}017797,gen.NM_{—}017797

[5180] FIG. 5144: PRO82882

[5181] FIG. 5145: DNA326511,XM_{—}030714,gen.XM_{—}030714

[5182] FIG. 5146: DNA256555,NM_{—}017572,gen.NM_{—}017572

[5183] FIG. 5147: PRO51586

[5184] FIG. 5148A-B: DNA326512,NM_{—}003938,gen.NM_{—}003938

[5185] FIG. 5149: PRO82884

[5186] FIG. 515OA-B: DNA326513,XM_{—}046822,gen.XM_{—}046822

[5187] FIG. 5151: PRO82885

[5188] FIG. 5152: DNA326514,NM_{—}007165,gen.NM_{—}007165

[5189] FIG. 5153: PRO82886

[5190] FIG. 5154: DNA287636,NM_{—}004152,gen.NM_{—}004152

[5191] FIG. 5155: DNA326515,NM_{—}012458,gen.NM_{—}012458

[5192] FIG. 5156: PRO82887

[5193] FIG. 5157: DNA326516,NM_{—}032737,gen.NM_{—}032737

[5194] FIG. 5158: PRO82888

[5195] FIG. 5159: DNA326517,XM_{—}030485,gen.XM_{—}030485

[5196] FIG. 5160: DNA326518,XM_{—}046934,gen.XM_{—}046934

[5197] FIG. 5161: DNA326519,NM_{—}003021,gen.NM_{—}003021

[5198] FIG. 5162: PRO62302

[5199] FIG. 5163: DNA326520,XM_{—}055686,gen.XM_{—}055686

[5200] FIG. 5164: PRO37951

[5201] FIG. 5165: DNA326521,XM_{—}009222,gen.XM_{—}009222

[5202] FIG. 5166: DNA326522,XM_{—}052635,gen.XM_{—}052635

[5203] FIG. 5167: PRO82892

[5204] FIG. 5168: DNA326523,XM_{—}052661,gen.XM_{—}052661

[5205] FIG. 5169: DNA326524,NM_{—}016263,gen.NM_{—}016263

[5206] FIG. 5170: PRO82893

[5207] FIG. 5171: DNA326525,NM_{—}006339,gen.NM_{—}006339

[5208] FIG. 5172: PRO82894

[5209] FIG. 5173: DNA326526,NM_{—}032753,gen.NM_{—}032753

[5210] FIG. 5174: PRO82895

[5211] FIG. 5175: DNA326527,XM_{—}056421,gen.XM_{—}056421

[5212] FIG. 5176A-B: DNA326528,XM_{—}031917,gen.XM_{—}031917

[5213] FIG. 5177: PRO82897

[5214] FIG. 5178: DNA326529,NM_{—}001961,gen.NM_{—}001961

[5215] FIG. 5179: PRO62225

[5216] FIG. 5180: DNA326530,XM_{—}016871,gen.XM_{—}016871

[5217] FIG. 5181: DNA326531,NM_{—}1016539,gen.NM_{—}16539

[5218] FIG. 5182: PRO82899

[5219] FIG. 5183: DNA326532,XM_{—}117122,gen.XM_{—}117122

[5220] FIG. 5184: DNA326533,XM_{—}031857,gen.XM_{—}031857

[5221] FIG. 5185: PRO82901

[5222] FIG. 5186: DNA326534,NM_{—}024333,gen.NM_{—}924333

[5223] FIG. 5187: PRO82902

[5224] FIG. 5188: DNA326535,NM_{—}003025,gen.NM_{—}003025

[5225] FIG. 5189: PRO82903

[5226] FIG. 5190: DNA326536,NM_{—}025241,gen.NM_{—}025241

[5227] FIG. 5191: PRO82904

[5228] FIG. 5192: DNA326537,XM_{—}035638,gen.XM_{—}035638

[5229] FIG. 5193: PRO82905

[5230] FIG. 5194A-B: DNA326538,XM_{—}035636,gen.XM_{—}035636

[5231] FIG. 5195: DNA326539,XM_{—}012862,gen.XM_{—}012862

[5232] FIG. 5196A-B: DNA326540,XM_{—}035627,gen.XM_{—}035627

[5233] FIG. 5197A-B: DNA326541,XM_{—}035625,gen.XM_{—}035625

[5234] FIG. 5198: PRO82909

[5235] FIG. 5199: DNA274761,NM_{—}014649,gen.NM_{—}014649

[5236] FIG. 5200: PRO62531

[5237] FIG. 5201: DNA272421,NM_{—}006012,gen.NM_{—}006012

[5238] FIG. 5202: PRO60674

[5239] FIG. 5203: DNA326542,NM_{—}003685,gen.NM_{—}003685

[5240] FIG. 5204: PRO82910

[5241] FIG. 5205A-B: DNA326543,XM_{—}009010,gen.XM_{—}009010

[5242] FIG. 5206: DNA270315,NM_{—}004240,gen.NM_{—}004240

[5243] FIG. 5207: PRO58702

[5244] FIG. 5208: DNA326544,NM_{—}005490,gen.NM_{—}005490

[5245] FIG. 5209: PRO201

[5246] FIG. 5210: DNA326546,XM_{—}044619,gen.XM_{—}044619

[5247] FIG. 5211: PRO82912

[5248] FIG. 5212: DNA326547,XM_{—}012798,gen.XM_{—}012798

[5249] FIG. 5213: DNA326548,XM_{—}044608,gen.XM_{—}044608

[5250] FIG. 5214: DNA326549,NM_{—}003624,gen.NM_{—}003624

[5251] FIG. 5215: PRO82915

[5252] FIG. 5216: DNA326550,NM_{—}016579,gen.NM_{—}016579

[5253] FIG. 5217: PRO224

[5254] FIG. 5218A-B: DNA326551,XM_{—}048351,gen.XM_{—}048351

[5255] FIG. 5219: DNA326552,XM_{—}048364,gen.XM_{—}048364

[5256] FIG. 5220: PRO82917

[5257] FIG. 5221: DNA326553,XM_{—}091938,gen.XM_{—}091938

[5258] FIG. 5222: DNA326554,XM_{—}097300,gen.XM_{—}097300

[5259] FIG. 5223: DNA326555,XM_{—}049282,gen.XM_{—}049282

[5260] FIG. 5224: PRO82920

[5261] FIG. 5225: DNA326556,XM_{—}058232,gen.XM_{—}058232

[5262] FIG. 5226: DNA326557,XM_{—}045151,gen.XM_{—}045151

[5263] FIG. 5227A-B: DNA326558,XM_{—}050435,gen.XM_{—}050435

[5264] FIG. 5228: PRO82923

[5265] FIG. 5229: DNA326559,XM_{—}113988,gen.XM_{—}113988

[5266] FIG. 5230: DNA326560,NM_{—}058164,gen.NM_{—}058164

[5267] FIG. 5231: PRO82925

[5268] FIG. 5232: DNA227280,NM_{—}020230,gen.NM_{—}020230

[5269] FIG. 5233: PRO37743

[5270] FIG. 5234: DNA270621,NM_{—}003755,gen.NM_{—}003755

[5271] FIG. 5235: PRO58991

[5272] FIG. 5236: DNA326561,XM_{—}049502,gen.XM_{—}049502

[5273] FIG. 5237: DNA326562,NM_{—}007065,gen.NM_{—}007065

[5274] FIG. 5238: PRO63226

[5275] FIG. 5239: DNA326563,XM_{—}049561,gen.XM_{—}049561

[5276] FIG. 5240: DNA326564,XM_{—}017204,gen.XM_{—}017204

[5277] FIG. 5241: DNA326565,NM_{—}005498,gen.NM_{—}005498

[5278] FIG. 5242: PRO62112

[5279] FIG. 5243: DNA326566,XM_{—}008887,gen.XM_{—}008887

[5280] FIG. 5244: DNA326567,XM_{—}085862,gen.XM_{—}085862

[5281] FIG. 5245: PRO82930

[5282] FIG. 5246: DNA326568,XM_{—}084014,gen.XM_{—}084014

[5283] FIG. 5247A-B: DNA326569,XM_{—}032710,gen.XM_{—}032710

[5284] FIG. 5248: DNA326570,XM_{—}032719,gen.XM_{—}032719

[5285] FIG. 5249: PRO82933

[5286] FIG. 5250: DNA326571,NM_{—}024029,gen.NM_{—}024029

[5287] FIG. 5251: PRO23794

[5288] FIG. 5252: DNA326572,XM_{—}032724,gen.XM_{—}032724

[5289] FIG. 5253: PRO82934

[5290] FIG. 5254A-B: DNA326573,NM_{—}003072,gen.NM_{—}003072

[5291] FIG. 5255: PRO82935

[5292] FIG. 5256A-B: DNA326574,XM_{—}009082,gen.XM_{—}009082

[5293] FIG. 5257: DNA326575,XM_{—}032774,gen.XM_{—}032774

[5294] FIG. 5258: DNA218271,NM_{—}000121,gen.NM_{—}000121

[5295] FIG. 5259: PRO34323

[5296] FIG. 5260: DNA326576,XM_{—}057074,gen.XM_{—}057074

[5297] FIG. 5261: DNA326577,XM_{—}032782,gen.XM_{—}032782

[5298] FIG. 5262: DNA326578,NM_{—}032377,gen.NM_{—}032377

[5299] FIG. 5263: PRO82939

[5300] FIG. 5264: DNA326579,XM_{—}015697,gen.XM_{—}015697

[5301] FIG. 5265: PRO82940

[5302] FIG. 5266: DNA326580,XM_{—}010156,gen.XM_{—}010156

[5303] FIG. 5267: DNA326581,NM_{—}001930,gen.NM_{—}001930

[5304] FIG. 5268: PRO58446

[5305] FIG. 5269: DNA326582,NM_{—}013406,gen.NM_{—}013406

[5306] FIG. 5270: DNA326583,NM_{—}013407,gen.NM_{—}013407

[5307] FIG. 5271: PRO82943

[5308] FIG. 5272: DNA103320,NM_{—}002229,gen.NM_{—}002229

[5309] FIG. 5273: PRO4650

[5310] FIG. 5274: DNA326584,XM_{—}009063,gen.XM_{—}009063

[5311] FIG. 5275: PRO82944

[5312] FIG. 5276: DNA326585,XM_{—}085917,gen.XM_{—}085917

[5313] FIG. 5277: DNA274034,NM_{—}006397,gen.NM_{—}006397

[5314] FIG. 5278: PRO61977

[5315] FIG. 5279: DNA287243,NM_{—}004461,gen.NM_{—}004461

[5316] FIG. 5280: PRO69518

[5317] FIG. 5281: DNA326586,XM_{—}032020,gen.XM_{—}032020

[5318] FIG. 5282: PRO2718

[5319] FIG. 5283: DNA326587,NM_{—}005053,gen.NM_{—}005053

[5320] FIG. 5284: PRO22613

[5321] FIG. 5285: DNA326588,XM_{—}085916,gen.XM_{—}085916

[5322] FIG. 5286: DNA326589,NM_{—}017722,gen.NM_{—}017722

[5323] FIG. 5287: PRO82947

[5324] FIG. 5288: DNA326590,NM_{—}003765,gen.NM_{—}003765

[5325] FIG. 5289: PRO82948

[5326] FIG. 5290: DNA326591,XM_{—}051364,gen.XM_{—}051364

[5327] FIG. 5291: PRO82949

[5328] FIG. 5292: DNA326592,XM_{—}031345,gen.XM_{—}031345

[5329] FIG. 5293: PRO82950

[5330] FIG. 5294: DNA326593,XM_{—}113352,gen.XM_{—}113352

[5331] FIG. 5295: DNA326594,XM_{—}058967,gen.XM_{—}058967

[5332] FIG. 5296: PRO82952

[5333] FIG. 5297: DNA326595,XM_{—}085909,gen.XM_{—}085909

[5334] FIG. 5298: DNA269894,NM_{—}002730,gen.NM_{—}002730

[5335] FIG. 5299: PRO58292

[5336] FIG. 5300: DNA326596,NM_{—}018154,gen.NM_{—}018154

[5337] FIG. 5301: PRO82954

[5338] FIG. 5302: DNA326597,XM_{—}031276,gen.XM_{—}031276

[5339] FIG. 5303: DNA326598,XM_{—}031273,gen.XM_{—}031273

[5340] FIG. 5304: PRO82956

[5341] FIG. 5305: DNA326599,XM_{—}031263,gen.XM_{—}031263

[5342] FIG. 5306: PRO82957

[5343] FIG. 5307: DNA326600,XM_{—}031251,gen.XM_{—}031251

[5344] FIG. 5308: DNA326601,NM_{—}006844,gen.NM_{—}006844

[5345] FIG. 5309: PRO82958

[5346] FIG. 5310A-C: DNA326602,XM_{—}009303,gen.XM_{—}009303

[5347] FIG. 5311: DNA326603,XM_{—}086074,gen.XM_{—}086074

[5348] FIG. 5312: DNA269630,NM_{—}003290,gen.NM_{—}003290

[5349] FIG. 5313: PRO58042

[5350] FIG. 5314: DNA326604,NM_{—}005370,gen.NM_{—}005370

[5351] FIG. 5315: PRO12130

[5352] FIG. 5316: DNA326605,XM_{—}113348,gen.XM_{—}113348

[5353] FIG. 5317: DNA326606,NM_{—}032207,gen.NM_{—}032207

[5354] FIG. 5318: PRO82962

[5355] FIG. 5319A-B: DNA326607,NM_{—}006387,gen.NM_{—}006387

[5356] FIG. 5320: PRO82963

[5357] FIG. 5321: DNA326608,NM_{—}024881,gen.NM_{—}024881

[5358] FIG. 5322: PRO82964

[5359] FIG. 5323: DNA326609,NM_{—}024104,gen.NM_{—}024104

[5360] FIG. 5324: PRO82965

[5361] FIG. 5325A-C: DNA326610,XM_{—}008854,gen.XM_{—}008854

[5362] FIG. 5326: DNA326611,NM_{—}014173,gen.NM_{—}014173

[5363] FIG. 5327: PRO82967

[5364] FIG. 5328: DNA287240,NM_{—}004335,gen.NM_{—}004335

[5365] FIG. 5329: PRO29371

[5366] FIG. 5330: DNA326612,XM_{—}050660,gen.XM_{—}050660

[5367] FIG. 5331: DNA326613,XM_{—}086116,gen.XM_{—}086116

[5368] FIG. 5332: DNA326614,NM_{—}018174,gen.NM_{—}018174

[5369] FIG. 5333: PRO82970

[5370] FIG. 5334: DNA326615,NM_{—}000980,gen.NM_{—}000980

[5371] FIG. 5335: PRO82971

[5372] FIG. 5336: DNA326616,XM_{—}055230,gen.XM_{—}055230

[5373] FIG. 5337: DNA326617,XM_{—}012179,gen.XM_{—}012179

[5374] FIG. 5338A-B: DNA326618,XM_{—}009293,gen.XM_{—}009293

[5375] FIG. 5339: DNA326619,XM_{—}038146,gen.XM_{—}038146

[5376] FIG. 5340: PRO82975

[5377] FIG. 5341: DNA326620,XM_{—}092046,gen.XM_{—}092046

[5378] FIG. 5342: PRO82976

[5379] FIG. 5343: DNA326621,XM_{—}038098,gen.XM_{—}038098

[5380] FIG. 5344: PRO82977

[5381] FIG. 5345: DNA326622,NM_{—}032627,gen.NM_{—}032627

[5382] FIG. 5346: PRO82978

[5383] FIG. 5347: DNA326623,XM_{—}165960,gen.XM_{—}165960

[5384] FIG. 5348: PRO82979

[5385] FIG. 5349: DNA326624,XM_{—}114004,gen.XM_{—}114004

[5386] FIG. 5350: DNA326625,NM_{—}012181,gen.NM_{—}012181

[5387] FIG. 5351: PRO82980

[5388] FIG. 5352: DNA227249,NM_{—}007263,gen.NM_{—}007263

[5389] FIG. 5353: PRO37712

[5390] FIG. 5354: DNA326626,XM_{—}018515,gen.XM_{—}018515

[5391] FIG. 5355: DNA326627,NM_{—}033415,gen.NM_{—}033415

[5392] FIG. 5356: PRO82982

[5393] FIG. 5357: DNA326628,XM_{—}009330,gen.XM_{—}009330

[5394] FIG. 5358: DNA326629,NM_{—}134440,gen.NM_{—}134440

[5395] FIG. 5359: PRO82983

[5396] FIG. 5360: DNA326630,NM_{—}003721,gen.NM_{—}003721

[5397] FIG. 5361: PRO59220

[5398] FIG. 5362: DNA326631,NM_{—}015965,gen.NM_{—}015965

[5399] FIG. 5363: PRO82984

[5400] FIG. 5364: DNA326632,XM_{—}016378,gen.XM_{—}016378

[5401] FIG. 5365: PRO82985

[5402] FIG. 5366: DNA326633,XM_{—}114027,gen.XM_{—}114027

[5403] FIG. 5367: DNA326634,XM_{—}165963,gen.XM_{—}165963

[5404] FIG. 5368: PRO82987

[5405] FIG. 5369: DNA326635,XM_{—}015769,gen.XM_{—}015769

[5406] FIG. 5370: DNA326636,XM_{—}012812,gen.XM_{—}012812

[5407] FIG. 5371: DNA326637,XM_{—}085971,gen.XM_{—}085971

[5408] FIG. 5372: DNA326638,XM_{—}037662,gen.XM_{—}037662

[5409] FIG. 5373: PRO82991

[5410] FIG. 5374: DNA326639,NM_{—}001238,gen.NM_{—}001238

[5411] FIG. 5375: PRO82992

[5412] FIG. 5376: DNA326640,NM_{—}057182,gen.NM_{—}057182

[5413] FIG. 5377: PRO4756

[5414] FIG. 5378: DNA326641,XM_{—}009180,gen.XM_{—}009180

[5415] FIG. 5379: DNA326642,XM_{—}117118,gen.XM_{—}117118

[5416] FIG. 5380: DNA326643,XM_{—}092049,gen.XM_{—}092049

[5417] FIG. 5381: PRO82995

[5418] FIG. 5382: DNA326644,XM_{—}028672,gen.XM_{—}028672

[5419] FIG. 5383: DNA326645,XM_{—}028666,gen.XM_{—}028666

[5420] FIG. 5384: DNA326646,XM_{—}009338,gen.XM_{—}009338

[5421] FIG. 5385: DNA326647,XM_{—}048258,gen.XM_{—}048258

[5422] FIG. 5386: PRO82998

[5423] FIG. 5387: DNA256836,NM_{—}018468,gen.NM_{—}018468

[5424] FIG. 5388: PRO51767

[5425] FIG. 5389: DNA326648,NM_{—}024321,gen.NM_{—}024321

[5426] FIG. 5390: PRO82999

[5427] FIG. 5391A-B: DNA326649,XM_{—}049237,gen.XM_{—}049237

[5428] FIG. 5392: PRO83000

[5429] FIG. 5393: DNA326650,NM_{—}032635,gen.NM_{—}032635

[5430] FIG. 5394: PRO23845

[5431] FIG. 5395: DNA326651,XM_{—}115615,gen.XM_{—}115615

[5432] FIG. 5396A-B: DNA326652,XM_{—}091984,gen.XM_{—}091984

[5433] FIG. 5397: PRO83002

[5434] FIG. 5398: DNA326653,XM_{—}085986,gen.XM_{—}085986

[5435] FIG. 5399: DNA326654,XM_{—}032285,gen.XM_{—}032285

[5436] FIG. 5400: PRO83004

[5437] FIG. 5401: DNA326655,NM_{—}002812,gen.NM_{—}002812

[5438] FIG. 5402: PRO83005

[5439] FIG. 5403A-E: DNA326656,XM_{—}029455,gen.XM_{—}029455

[5440] FIG. 5404: DNA326657,XM_{—}029450,gen.XM_{—}029450

[5441] FIG. 5405: PRO83007

[5442] FIG. 5406: DNA326658,XM_{—}009149,gen.XM_{—}009149

[5443] FIG. 5407: PRO62500

[5444] FIG. 5408: DNA326659,XM_{—}056602,gen.XM_{—}056602

[5445] FIG. 5409: DNA326660,NM_{—}012237,gen.NM_{—}012237

[5446] FIG. 5410: PRO83008

[5447] FIG. 5411: DNA326661,NM_{—}030593,gen.NM_{—}030593

[5448] FIG. 5412: PRO83009

[5449] FIG. 5413: DNA326662,NM_{—}017827,gen.NM_{—}017827

[5450] FIG. 5414: PRO83010

[5451] FIG. 5415: DNA326663,NM_{—}021107,gen.NM_{—}021107

[5452] FIG. 5416: PRO83011

[5453] FIG. 5417: DNA326664,NM_{—}033363,gen.NM_{—}033363

[5454] FIG. 5418: PRO83012

[5455] FIG. 5419: DNA326665,XM_{—}059045,gen.XM_{—}059045

[5456] FIG. 5420: PRO83013

[5457] FIG. 5421: DNA273474,NM_{—}005884,gen.NM_{—}005884

[5458] FIG. 5422: PRO61458

[5459] FIG. 5423: DNA326666,XM_{—}046090,gen.XM_{—}046090

[5460] FIG. 5424: PRO83014

[5461] FIG. 5425: DNA326667,XM_{—}086004,gen.XM_{—}086004

[5462] FIG. 5426: DNA272347,NM_{—}001020,gen.NM_{—}001020

[5463] FIG. 5427: PRO60603

[5464] FIG. 5428A-B: DNA326668,NM_{—}003169,gen.NM_{—}003169

[5465] FIG. 5429: PRO12822

[5466] FIG. 5430: DNA326669,XM_{—}053074,gen.XM_{—}053074

[5467] FIG. 5431: PRO83016

[5468] FIG. 5432: DNA326670,NM_{—}016941,gen.NM_{—}016941

[5469] FIG. 5433: PRO83017

[5470] FIG. 5434: DNA256840,NM_{—}004714,gen.NM_{—}004714

[5471] FIG. 5435: PROS 1771

[5472] FIG. 5436: DNA326671,NM_{—}001436,gen.NM_{—}001436

[5473] FIG. 5437: PRO83018

[5474] FIG. 5438: DNA326672,XM_{—}016410,gen.XM_{—}016410

[5475] FIG. 5439: DNA326673,XM_{—}012860,gen.XM_{—}012860

[5476] FIG. 5440: DNA326674,XM_{—}097365,gen.XM_{—}097365

[5477] FIG. 5441: DNA274139,NM_{—}006503,gen.NM_{—}006503

[5478] FIG. 5442: PRO62075

[5479] FIG. 5443: DNA326675,XM_{—}009203,gen.XM_{—}009203

[5480] FIG. 5444: DNA326676,XM_{—}047409,gen.XM_{—}047409

[5481] FIG. 5445: DNA326677,XM_{—}047376,gen.XM_{—}047376

[5482] FIG. 5446A-B: DNA326678,XM_{—}047374,gen.XM_{—}047374

[5483] FIG. 5447: DNA326679,XM_{—}059052,gen.XM_{—}059052

[5484] FIG. 5448: DNA273600,NM_{—}004596,gen.NM_{—}004596

[5485] FIG. 5449: PRO61575

[5486] FIG. 5450: DNA326680,XM_{—}030914,gen.XM_{—}030914

[5487] FIG. 5451: DNA326681,NM_{—}052848,gen.NM_{—}052848

[5488] FIG. 5452: PRO83027

[5489] FIG. 5453: DNA326682,XM_{—}008912,gen.XM_{—}008912

[5490] FIG. 5454: DNA326683,NM_{—}020158,gen.NM_{—}20158

[5491] FIG. 5455: PRO83029

[5492] FIG. 5456: DNA326684,XM_{—}030901,gen.XM_{—}030901

[5493] FIG. 5457: PRO83030

[5494] FIG. 5458: DNA326685,NM_{—}018035,gen.NM_{—}018035

[5495] FIG. 5459: PRO83031

[5496] FIG. 5460: DNA326686,XM_{—}085874,gen.XM_{—}085874

[5497] FIG. 5461: DNA326687,XM_{—}085875,gen.XM_{—}085875

[5498] FIG. 5462: DNA326688,XM_{—}085876,gen.XM_{—}085876

[5499] FIG. 5463: DNA326689,XM_{—}058949,gen.XM_{—}058949

[5500] FIG. 5464: PRO83035

[5501] FIG. 5465: DNA326690,XM_{—}030895,gen.XM_{—}030895

[5502] FIG. 5466: DNA326691,XM_{—}1 15603,gen.XM_{—}115603

[5503] FIG. 5467: PRO083037

[5504] FIG. 5468: DNA326692,NM_{—}001022,gen.NM_{—}001022

[5505] FIG. 5469: PRO83038

[5506] FIG. 5470: DNA326693,NM_{—}004706,gen.NM_{—}004706

[5507] FIG. 5471: PRO83039

[5508] FIG. 5472: DNA326694,XM_{—}008878,gen.XM_{—}008878

[5509] FIG. 5473: PRO83040

[5510] FIG. 5474: DNA326695,NM_{—}022752,gen.NM_{—}022752

[5511] FIG. 5475: PRO83041

[5512] FIG. 5476: DNA151808,NM_{—}006494,gen.NM_{—}006494

[5513] FIG. 5477: PRO12892

[5514] FIG. 5478: DNA326696,NM_{—}001816,gen.NM_{—}001816

[5515] FIG. 5479: PRO34151

[5516] FIG. 5480: DNA326697,NM_{—}000554,gen.NM_{—}000554

[5517] FIG. 5481: PRO83042

[5518] FIG. 5482: DNA326698,XM_{—}049920,gen.XM_{—}049920

[5519] FIG. 5483: DNA326699,XM_{—}055859,gen.XM_{—}055859

[5520] FIG. 5484A-B: DNA326700,XM_{—}009125,gen.XM_{—}009125

[5521] FIG. 5485: DNA326701,XM_{—}008860,gen.XM_{—}008860

[5522] FIG. 5486: DNA326702,XM_{—}009036,gen.XM_{—}009036

[5523] FIG. 5487: DNA326703,XM_{—}085950,gen.XM_{—}085950

[5524] FIG. 5488: DNA326704,XM_{—}028263,gen.XM_{—}028263

[5525] FIG. 5489: DNA326705,XM_{—}085928,gen.XM_{—}085928

[5526] FIG. 5490: PRO36963

[5527] FIG. 5491: DNA326706,XM_{—}028267,gen.XM_{—}028267

[5528] FIG. 5492: DNA326707,NM_{—}013403,gen.NM_{—}013403

[5529] FIG. 5493: PRO83050

[5530] FIG. 5494: DNA103580,NM_{—}001743,gen.NM_{—}001743

[5531] FIG. 5495: PRO4904

[5532] FIG. 5496: DNA326708,XM_{—}009126,gen.XM_{—}009126

[5533] FIG. 5497: DNA326709,NM_{—}006247,gen.NM_{—}006247

[5534] FIG. 5498: PRO25881

[5535] FIG. 5499: DNA326710,NM_{—}003370,gen.NM_{—}003370

[5536] FIG. 5500: PRO83052

[5537] FIG. 5501: DNA326711,XM_{—}085856,gen.XM_{—}085856

[5538] FIG. 5502: DNA150784,NM_{—}001983,gen.NM_{—}001983

[5539] FIG. 5503: PRO 12800

[5540] FIG. 5504: DNA270931,NM_{—}012099,gen.NM_{—}012099

[5541] FIG. 5505: PRO59264

[5542] FIG. 5506A-B: DNA257531,NM_{—}031417,gen.NM_{—}031417

[5543] FIG. 5507: PRO52101

[5544] FIG. 5508: DNA326712,NM_{—}001294,gen.NM_{—}001294

[5545] FIG. 5509: PRO83054

[5546] FIG. 5510: DNA326713,XM_{—}097274,gen.XM_{—}097274

[5547] FIG. 5511: DNA88084,NM_{—}000041,gen.NM_{—}000041

[5548] FIG. 5512: PRO2644

[5549] FIG. 5513: DNA256533,NM_{—}006114,gen.NM_{—}006114

[5550] FIG. 5514: PRO51565

[5551] FIG. 5515: DNA251057,NM_{—}002856,gen.NM_{—}002856

[5552] FIG. 5516: PRO47354

[5553] FIG. 5517: DNA226011,NM_{—}005581,gen.NM_{—}005581

[5554] FIG. 5518: PRO36474

[5555] FIG. 5519: DNA326714,NM_{—}012116,gen.NM_{—}012116

[5556] FIG. 5520: PRO83056

[5557] FIG. 5521: DNA326715,XM_{—}097275,gen.XM_{—}097275

[5558] FIG. 5522: DNA326716,XM_{—}008851,gen.XM_{—}008851

[5559] FIG. 5523: DNA274289,NM_{—}016440,gen.NM_{—}016440

[5560] FIG. 5524: PRO62212

[5561] FIG. 5525: DNA326717,NM_{—}012068,gen.NM_{—}012068

[5562] FIG. 5526: PRO83059

[5563] FIG. 5527: DNA326718,XM_{—}085927,gen.XM_{—}085927

[5564] FIG. 5528: DNA326719,XM_{—}084023,gen.XM_{—}084023

[5565] FIG. 5529: DNA326720,XM_{—}167530,gen.XM_{—}167530

[5566] FIG. 5530: DNA326721,XM_{—}114025,gen.XM_{—}114025

[5567] FIG. 5531: DNA326722,XM_{—}008985,gen.XM_{—}008985

[5568] FIG. 5532: DNA326723,NM_{—}030973,gen.NM_{—}030973

[5569] FIG. 5533: PRO83065

[5570] FIG. 5534: DNA326724,NM_{—}025129,gen.NM_{—}025129

[5571] FIG. 5535: PRO83066

[5572] FIG. 5536: DNA326725,NM_{—}014203,gen.NM_{—}014203

[5573] FIG. 5537: DNA326726,XM_{—}085934,gen.XM_{—}085934

[5574] FIG. 5538: PRO83068

[5575] FIG. 5539: DNA326727,NM_{—}001536,gen.NM_{—}001536

[5576] FIG. 5540: PRO83069

[5577] FIG. 5541: DNA326728,XM_{—}165432,gen.XM_{—}165432

[5578] FIG. 5542: DNA274823,NM_{—}001571,gen.NM_{—}001571

[5579] FIG. 5543: PRO62582

[5580] FIG. 5544A-B: DNA326729,XM_{—}046313,gen.XM_{—}046313

[5581] FIG. 5545: PRO83071

[5582] FIG. 5546: DNA326730,NM_{—}015953,gen.NM_{—}015953

[5583] FIG. 5547: PRO83072

[5584] FIG. 5548: DNA326731,XM_{—}027904,gen.XM_{—}027904

[5585] FIG. 5549: DNA326732,XM_{—}084026,gen.XM_{—}084026

[5586] FIG. 5550: DNA290260,NM_{—}012423,gen.NM_{—}012423

[5587] FIG. 5551: PRO70385

[5588] FIG. 5552: DNA326733,XM_{—}058991,gen.XM_{—}058991

[5589] FIG. 5553: PRO83073

[5590] FIG. 5554: DNA326734,NM_{—}017916,gen.NM_{—}017916

[5591] FIG. 5555: PRO83074

[5592] FIG. 5556: DNA326735,NM_{—}003598,gen.NM_{—}003598

[5593] FIG. 5557: PRO83075

[5594] FIG. 5558: DNA326736,NM_{—}006666,gen.NM_{—}006666

[5595] FIG. 5559: PRO83076

[5596] FIG. 5560: DNA326737,XM_{—}114024,gen.XM_{—}114024

[5597] FIG. 5561: PRO83077

[5598] FIG. 5562: DNA304658,NM_{—}000146,gen.NM_{—}000146

[5599] FIG. 5563: PRO71085

[5600] FIG. 5564: DNA326738,NM_{—}004324,gen.NM_{—}004324

[5601] FIG. 5565: PRO38101

[5602] FIG. 5566: DNA326739,NM_{—}006184,gen.NM_{—}006184

[5603] FIG. 5567: PRO83078

[5604] FIG. 5568: DNA273066,NM_{—}001190,gen.NM_{—}001190

[5605] FIG. 5569: PRO61129

[5606] FIG. 5570: DNA326740,XM_{—}058987,gen.XM_{—}058987

[5607] FIG. 5571: DNA326741,NM_{—}000979,gen.NM_{—}000979

[5608] FIG. 5572: PRO83080

[5609] FIG. 5573: DNA326742,XM_{—}085935,gen.XM_{—}085935

[5610] FIG. 5574: DNA326743,NM_{—}031485,gen.NM_{—}031485

[5611] FIG. 5575: PRO61308

[5612] FIG. 5576: DNA103239,NM_{—}006801,gen.NM_{—}006801

[5613] FIG. 5577: PRO4569

[5614] FIG. 5578: DNA326744,XM_{—}046419,gen.XM_{—}046419

[5615] FIG. 5579: PRO83082

[5616] FIG. 5580: DNA326745,NM_{—}002691,gen.NM_{—}002691

[5617] FIG. 5581: PRO83083

[5618] FIG. 5582: DNA326746,XM_{—}056286,gen.XM_{—}056286

[5619] FIG. 5583: PRO83084

[5620] FIG. 5584: DNA326747,XM_{—}058990,gen.XM_{—}058990

[5621] FIG. 5585: PRO83085

[5622] FIG. 5586: DNA326748,XM_{—}091981,gen.XM_{—}091981

[5623] FIG. 5587: PRO83086

[5624] FIG. 5588: DNA326749,NM_{—}032712,gen.NM_{—}032712

[5625] FIG. 5589: PRO23238

[5626] FIG. 5590: DNA83154,NM_{—}001648,gen.NM_{—}001648

[5627] FIG. 5591: PRO2109

[5628] FIG. 5592: DNA326750,XM_{—}055658,gen.XM_{—}055658

[5629] FIG. 5593: DNA269481,NM_{—}001985,gen.NM_{—}001985

[5630] FIG. 5594: PRO57901

[5631] FIG. 5595: DNA326751,XM_{—}091886,gen.XM_{—}091886

[5632] FIG. 5596: PRO83087

[5633] FIG. 5597: DNA326752,XM_{—}008830,gen.XM_{—}008830

[5634] FIG. 5598: DNA326753,XM_{—}039908,gen.XM_{—}039908

[5635] FIG. 5599: PRO83089

[5636] FIG. 5600: DNA326754,NM_{—}015629,gen.NM_{—}015629

[5637] FIG. 5601: PRO83090

[5638] FIG. 5602: DNA326755,XM_{—}050236,gen.XM_{—}050236

[5639] FIG. 5603: DNA326756,XM_{—}050589,gen.XM_{—}050589

[5640] FIG. 5604: PRO83092

[5641] FIG. 5605: DNA326757,XM_{—}117128,gen.XM_{—}117128

[5642] FIG. 5606: PRO83093

[5643] FIG. 5607: DNA326758,XM_{—}059321,gen.XM_{—}059321

[5644] FIG. 5608: DNA326759,NM_{—}003283,gen.NM_{—}003283

[5645] FIG. 5609: PRO83095

[5646] FIG. 5610A-B: DNA326760,NM_{—}014931,gen.NM_{—}014931

[5647] FIG. 5611: PRO83096

[5648] FIG. 5612: DNA326761,XM_{—}035919,gen.XM_{—}035919

[5649] FIG. 5613: DNA326762,NM_{—}000991,gen.NM_{—}000991

[5650] FIG. 5614: PRO83098

[5651] FIG. 5615: DNA273346,NM_{—}014501,gen.NM_{—}014501

[5652] FIG. 5616: PRO61349

[5653] FIG. 5617: DNA326763,NM_{—}013333,gen.NM_{—}013333

[5654] FIG. 5618: PRO83099

[5655] FIG. 5619: DNA326764,NM_{—}007279,gen.NM_{—}007279

[5656] FIG. 5620: PRO83100

[5657] FIG. 5621: DNA326765,NM_{—}016202,gen.NM_{—}016202

[5658] FIG. 5622: PRO83101

[5659] FIG. 5623: DNA326766,XM_{—}034377,gen.XM_{—}034377

[5660] FIG. 5624: PRO83102

[5661] FIG. 5625: DNA272062,NM_{—}014453,gen.NM_{—}014453

[5662] FIG. 5626: PRO60333

[5663] FIG. 5627: DNA254548,NM_{—}005762,gen.NM_{—}005762

[5664] FIG. 5628: PRO49653

[5665] FIG. 5629: DNA326767,XM_{—}085972,gen.XM_{—}085972

[5666] FIG. 5630: PRO83103

[5667] FIG. 5631: DNA326768,NM_{—}032792,gen.NM_{—}032792

[5668] FIG. 5632: PRO83104

[5669] FIG. 5633: DNA326769,NM_{—}001009,gen.NM_{—}001009

[5670] FIG. 5634: PRO83105

[5671] FIG. 5635: DNA326770,XM_{—}058125,gen.XM_{—}058125

[5672] FIG. 5636: DNA326771,NM_{—}024691,gen.NM_{—}024691

[5673] FIG. 5637: PRO83107

[5674] FIG. 5638: DNA297288,NM_{—}021158,gen.NM_{—}021158

[5675] FIG. 5639: PRO70810

[5676] FIG. 5640: DNA304662,NM_{—}031229,gen.NM_{—}031229

[5677] FIG. 5641: PRO71089

[5678] FIG. 5642: DNA326772,NM_{—}031228,gen.NM_{—}031228

[5679] FIG. 5643: PRO83108

[5680] FIG. 5644: DNA326773,XM_{—}097749,gen.XM_{—}097749

[5681] FIG. 5645: PRO83109

[5682] FIG. 5646: DNA326774,XM_{—}055993,gen.XM_{—}055993

[5683] FIG. 5647: DNA326775,XM_{—}009622,gen.XM_{—}009622

[5684] FIG. 5648: DNA326776,NM_{—}000801,gen.NM_{—}000801

[5685] FIG. 5649: PRO59142

[5686] FIG. 5650: DNA326777,NM_{—}054014,gen.NM_{—}054014

[5687] FIG. 5651: PRO59142

[5688] FIG. 5652: DNA326778,NM_{—}016143,gen.NM_{—}016143

[5689] FIG. 5653: PRO83112

[5690] FIG. 5654: DNA287270,NM_{—}003091,gen.NM_{—}003091

[5691] FIG. 5655: PRO69541

[5692] FIG. 5656: DNA326779,NM_{—}052881,gen.NM_{—}052881

[5693] FIG. 5657: PRO83113

[5694] FIG. 5658: DNA326780,XM_{—}044914,gen.XM_{—}044914

[5695] FIG. 5659: PRO83114

[5696] FIG. 5660: DNA326781,XM_{—}044915,gen.XM_{—}044915

[5697] FIG. 5661: DNA326782,NM_{—}006899,gen.NM_{—}006899

[5698] FIG. 5662: PRO83116

[5699] FIG. 5663: DNA326783,NM_{—}019609,gen.NM_{—}019609

[5700] FIG. 5664: PRO83117

[5701] FIG. 5665: DNA326784,NM_{—}021826,gen.NM_{—}021826

[5702] FIG. 5666: PRO83118

[5703] FIG. 5667: DNA326785,XM_{—}045418,gen.XM_{—}045418

[5704] FIG. 5668: DNA287261,NM_{—}017874,gen.NM_{—}017874

[5705] FIG. 5669: PRO69533

[5706] FIG. 5670: DNA326786,XM_{—}086710,gen.XM_{—}086710

[5707] FIG. 5671: DNA326787,XM_{—}045451,gen.XM_{—}045451

[5708] FIG. 5672: PRO83121

[5709] FIG. 5673: DNA326788,XM_{—}114174,gen.XM_{—}114174

[5710] FIG. 5674: DNA326789,XM_{—}045460,gen.XM_{—}045460

[5711] FIG. 5675: DNA326790,XM_{—}059268,gen.XM_{—}059268

[5712] FIG. 5676A-B: DNA271010,NM_{—}014737,gen.NM_{—}014737

[5713] FIG. 5677: PRO59339

[5714] FIG. 5678: DNA326791,XM_{—}056035,gen.XM_{—}056035

[5715] FIG. 5679: DNA83170,NM_{—}001819,gen.NM_{—}001819

[5716] FIG. 5680: PRO2615

[5717] FIG. 5681: DNA227348,NM_{—}019095,gen.NM_{—}019095

[5718] FIG. 5682: PRO37811

[5719] FIG. 5683: DNA326792,NM_{—}003092,gen.NM_{—}003092

[5720] FIG. 5684: PRO83125

[5721] FIG. 5685: DNA287290,NM_{—}014426,gen.NM_{—}014426

[5722] FIG. 5686: PRO69560

[5723] FIG. 5687: DNA326793,XM_{—}086701,gen.XM_{—}086701

[5724] FIG. 5688: DNA326794,XM_{—}117209,gen.XM_{—}117209

[5725] FIG. 5689A-B: DNA326795,XM_{—}046520,gen.XM_{—}046520

[5726] FIG. 5690: PRO83128

[5727] FIG. 5691: DNA326796,XM_{—}115846,gen.XM_{—}115846

[5728] FIG. 5692: PRO83129

[5729] FIG. 5693: DNA326797,NM_{—}080820,gen.NM_{—}080820

[5730] FIG. 5694: PRO83130

[5731] FIG. 5695: DNA326798,XM_{—}086715,gen.XM_{—}086715

[5732] FIG. 5696: DNA326799,XM_{—}092760,gen.XM_{—}092760

[5733] FIG. 5697: PRO83132

[5734] FIG. 5698: DNA326800,NM_{—}012255,gen.NM_{—}012255

[5735] FIG. 5699: PRO83133

[5736] FIG. 5700: DNA326801,XM_{—}012970,gen.XM_{—}012970

[5737] FIG. 5701: DNA326802,XM_{—}042765,gen.XM_{—}042765

[5738] FIG. 5702: PRO83135

[5739] FIG. 5703: DNA150548,NM_{—}001247,gen.NM_{—}001247

[5740] FIG. 5704: PRO12324

[5741] FIG. 5705A-B: DNA326803,XM_{—}009436,gen.XM_{—}009436

[5742] FIG. 5706: DNA326804,XM_{—}114178,gen.XM_{—}114178

[5743] FIG. 5707: PRO83137

[5744] FIG. 5708: DNA326805,XM_{—}046160,gen.XM_{—}046160

[5745] FIG. 5709: PRO83138

[5746] FIG. 5710: DNA326806,XM_{—}046179,gen.XM_{—}046179

[5747] FIG. 5711: PRO83139

[5748] FIG. 5712: DNA326807,XM_{—}086745,gen.XM_{—}086745

[5749] FIG. 5713: DNA326808,NM_{—}138578,gen.NM_{—}138578

[5750] FIG. 5714: PRO83141

[5751] FIG. 5715: DNA326809,NM_{—}012112,gen.NM_{—}012112

[5752] FIG. 5716: PRO83142

[5753] FIG. 5717: DNA326810,XM_{—}086736,gen.XM_{—}086736

[5754] FIG. 5718: PRO83143

[5755] FIG. 5719: DNA326811,NM_{—}030815,gen.NM_{—}030815

[5756] FIG. 5720: PRO83144

[5757] FIG. 5721A-B: DNA150767,NM_{—}014742,gen.NM_{—}014742

[5758] FIG. 5722: PRO12460

[5759] FIG. 5723A-B: DNA326812,XM_{—}047007,gen.XM_{—}047007

[5760] FIG. 5724: PRO83145

[5761] FIG. 5725A-B: DNA326813,XM_{—}047011,gen.XM_{—}047011

[5762] FIG. 5726: PRO83146

[5763] FIG. 5727A-B: DNA326814,XM_{—}047018,gen.XM_{—}047018

[5764] FIG. 5728: DNA326815,XM_{—}009450,gen.XM_{—}009450

[5765] FIG. 5729: DNA326816,NM_{—}033197,gen.NM_{—}033197

[5766] FIG. 5730: PRO83149

[5767] FIG. 5731: DNA326817,XM_{—}097772,gen.XM_{—}097772

[5768] FIG. 5732: PRO83150

[5769] FIG. 5733: DNA326818,NM_{—}016732,gen.NM_{—}016732

[5770] FIG. 5734: DNA97298,NM_{—}003908,gen.NM_{—}003908

[5771] FIG. 5735: PRO3645

[5772] FIG. 5736: DNA326819,NM_{—}000687,gen.NM_{—}000687

[5773] FIG. 5737: PRO83152

[5774] FIG. 5738: DNA273517,NM_{—}000178,gen.NM_{—}000178

[5775] FIG. 5739: PRO61498

[5776] FIG. 5740: DNA326820,NM_{—}018217,gen.NM_{—}018217

[5777] FIG. 5741: PRO83153

[5778] FIG. 5742: DNA326821,NM_{—}002212,gen.NM_{—}002212

[5779] FIG. 5743: PRO60945

[5780] FIG. 5744A-C: DNA326822,NM_{—}07186,gen.NM_{—}007186

[5781] FIG. 5745: DNA226758,NM_{—}015966,gen.NM_{—}015966

[5782] FIG. 5746: PRO37221

[5783] FIG. 5747: DNA194701,NM_{—}03915,gen.NM_{—}003915

[5784] FIG. 5748: PRO24002

[5785] FIG. 5749: DNA326823,XM_{—}113380,gen.XM_{—}113380

[5786] FIG. 5750: DNA326824,NM_{—}016558,gen.NM_{—}016558

[5787] FIG. 5751: PRO83155

[5788] FIG. 5752: DNA326825,NM_{—}015511,gen.NM_{—}015511

[5789] FIG. 5753: PRO83156

[5790] FIG. 5754: DNA326826,XM_{—}009501,gen.XM_{—}009501

[5791] FIG. 5755: PRO83157

[5792] FIG. 5756: DNA326827,XM_{—}057236,gen.XM_{—}057236

[5793] FIG. 5757: DNA326828,NM_{—}024918,gen.NM_{—}024918

[5794] FIG. 5758: PRO83159

[5795] FIG. 5759: DNA326829,XM_{—}009642,gen.XM_{—}009642

[5796] FIG. 5760: DNA194807,NM_{—}006698,gen.NM_{—}006698

[5797] FIG. 5761: PRO24077

[5798] FIG. 5762: DNA326830,XM_{—}009686,gen.XM_{—}009686

[5799] FIG. 5763: DNA326831,NM_{—}030877,gen.NM_{—}030877

[5800] FIG. 5764: PRO83161

[5801] FIG. 5765: DNA326832,XM_{—}028806,gen.XM_{—}028806

[5802] FIG. 5766A-B: DNA326833,XM_{—}028810,gen.XM_{—}028810

[5803] FIG. 5767: PRO83163

[5804] FIG. 5768: DNA326834,XM_{—}012931,gen.XM_{—}012931

[5805] FIG. 5769: DNA326835,NM_{—}024855,gen.NM_{—}024855

[5806] FIG. 5770: PRO83165

[5807] FIG. 5771A-B: DNA227472,NM_{—}002660,gen.NM_{—}002660

[5808] FIG. 5772: PRO37935

[5809] FIG. 5773: DNA326836,XM_{—}097727,gen.XM_{—}097727

[5810] FIG. 5774: DNA103525,NM_{—}002466,gen.NM_{—}002466

[5811] FIG. 5775: PRO4852

[5812] FIG. 5776: DNA326837,XM_{—}029810,gen.XM_{—}029810

[5813] FIG. 5777: PRO83167

[5814] FIG. 5778: DNA326838,XM_{—}29822,gen.XM_{—}029822

[5815] FIG. 5779: DNA326839,NM_{—}002638,gen.NM_{—}002638

[5816] FIG. 5780: PRO2065

[5817] FIG. 5781: DNA326840,NM_{—}03064,gen.NM_{—}003064

[5818] FIG. 5782: PRO1720

[5819] FIG. 5783: DNA326841,NM_{—}015937,gen.NM_{—}015937

[5820] FIG. 5784: PRO83169

[5821] FIG. 5785: DNA273320,NM_{—}007019,gen.NM_{—}007019

[5822] FIG. 5786: PRO61327

[5823] FIG. 5787: DNA326842,NM_{—}033421,gen.NM_{—}033421

[5824] FIG. 5788: PRO83170

[5825] FIG. 5789: DNA88569,NM_{—}006227,gen.NM_{—}006227

[5826] FIG. 5790: PRO2420

[5827] FIG. 5791: DNA88239,NM_{—}004994,gen.NM_{—}004994

[5828] FIG. 5792: PRO2711

[5829] FIG. 5793: DNA326843,XM_{—}057374,gen.XM_{—}057374

[5830] FIG. 5794: DNA326844,XM_{—}114163,gen.XM_{—}114163

[5831] FIG. 5795A-B: DNA326845,XM_{—}097731,gen.XM_{—}097731

[5832] FIG. 5796A-B: DNA326846,XM_{—}030044,gen.XM_{—}030044

[5833] FIG. 5797: PRO83174

[5834] FIG. 5798: DNA326847,NM_{—}017895,gen.NM_{—}017895

[5835] FIG. 5799: PRO83175

[5836] FIG. 5800: DNA326848,XM_{—}097713,gen.XM_{—}097713

[5837] FIG. 5801: PRO83176

[5838] FIG. 5802: DNA326849,NM_{—}005985,gen.NM_{—}005985

[5839] FIG. 5803: PRO83177

[5840] FIG. 5804: DNA326850,NM_{—}003349,gen.NM_{—}003349

[5841] FIG. 5805: PRO83178

[5842] FIG. 5806: DNA326851,NM_{—}022442,gen.NM_{—}022442

[5843] FIG. 5807: PRO83179

[5844] FIG. 5808: DNA326852,NM_{—}005194,gen.NM_{—}005194

[5845] FIG. 5809: DNA326853,NM_{—}002827,gen.NM_{—}002827

[5846] FIG. 5810: PRO38066

[5847] FIG. 5811: DNA326854,NM_{—}003859,gen.NM_{—}003859

[5848] FIG. 5812: PRO83180

[5849] FIG. 5813: DNA326855,XM_{—}114165,gen.XM_{—}114165

[5850] FIG. 5814: DNA269526,NM_{—}001324,gen.NM_{—}001324

[5851] FIG. 5815: PRO57942

[5852] FIG. 5816: DNA326856,XM_{—}009549,gen.XM_{—}009549

[5853] FIG. 5817: PRO83182

[5854] FIG. 5818: DNA326857,XM_{—}030621,gen.XM_{—}030621

[5855] FIG. 5819: DNA326858,XM_{—}086648,gen.XM_{—}086648

[5856] FIG. 5820: PRO83183

[5857] FIG. 5821: DNA326859,XM_{—}009672,gen.XM_{—}009672

[5858] FIG. 5822: PRO83184

[5859] FIG. 5823A-B: DNA326860,XM_{—}009671,gen.XM_{—}009671

[5860] FIG. 5824: DNA326861,NM_{—}004738,gen.NM_{—}004738

[5861] FIG. 5825: PRO983

[5862] FIG. 5826: DNA326862,NM_{—}016592,gen.NM_{—}016592

[5863] FIG. 5827: PRO83185

[5864] FIG. 5828: DNA326863,NM_{—}080425,gen.NM_{—}080425

[5865] FIG. 5829: PRO83186

[5866] FIG. 5830: DNA304670,NM_{—}000516,gen.NM_{—}000516

[5867] FIG. 5831: PRO71097

[5868] FIG. 5832: DNA326864,NM_{—}080426,gen.NM_{—}080426

[5869] FIG. 5833: PRO83187

[5870] FIG. 5834: DNA326865,XM_{—}030699,gen.XM_{—}030699

[5871] FIG. 5835: PRO83188

[5872] FIG. 5836: DNA188229,NM_{—}000114,gen.NM_{—}000114

[5873] FIG. 5837: PRO21728

[5874] FIG. 5838: DNA326866,NM_{—}002792,gen.NM_{—}002792

[5875] FIG. 5839: PRO83189

[5876] FIG. 5840A-B: DNA326867,XM_{—}037202,gen.XM_{—}037202

[5877] FIG. 5841: PRO83190

[5878] FIG. 5842: DNA326868,XM_{—}037206,gen.XM_{—}037206

[5879] FIG. 5843: PRO83191

[5880] FIG. 5844: DNA103486,NM_{—}007002,gen.NM_{—}007002

[5881] FIG. 5845: PRO4813

[5882] FIG. 5846A-D: DNA326869,XM_{—}037217,gen.XM_{—}037217

[5883] FIG. 5847: DNA326870,NM_{—}001024,gen.NM_{—}001024

[5884] FIG. 5848: PRO83193

[5885] FIG. 5849: DNA326871,NM_{—}018270,gen.NM_{—}018270

[5886] FIG. 5850: PRO83194

[5887] FIG. 5851: DNA326872,XM_{—}028783,gen.XM_{—}028783

[5888] FIG. 5852: PRO83195

[5889] FIG. 5853: DNA326873,NM_{—}001853,gen.NM_{—}001853

[5890] FIG. 5854: PRO83196

[5891] FIG. 5855: DNA326874,NM_{—}080796,gen.NM_{—}080796

[5892] FIG. 5856: PRO83197

[5893] FIG. 5857: DNA326875,NM_{—}022105,gen.NM_{—}022105

[5894] FIG. 5858: PRO83198

[5895] FIG. 5859: DNA326876,NM_{—}080797,gen.NM_{—}080797

[5896] FIG. 5860: PRO83199

[5897] FIG. 5861: DNA326877,NM_{—}018209,gen.NM_{—}018209

[5898] FIG. 5862: PRO83200

[5899] FIG. 5863A-C: DNA326878,XM_{—}028834,gen.XM_{—}028834

[5900] FIG. 5864: PRO83201

[5901] FIG. 5865: DNA326879,NM_{—}024299,gen.NM_{—}024299

[5902] FIG. 5866: PRO83202

[5903] FIG. 5867A-C: DNA326880,XM_{—}028918,gen.XM_{—}028918

[5904] FIG. 5868: PRO83203

[5905] FIG. 5869: DNA326881,NM_{—}032527,gen.NM_{—}032527

[5906] FIG. 5870: PRO83204

[5907] FIG. 5871A-B: DNA326882,XM_{—}028966,gen.XM_{—}028966

[5908] FIG. 5872: PRO83205

[5909] FIG. 5873: DNA269746,NM_{—}012469,gen.NM_{—}012469

[5910] FIG. 5874: PRO58155

[5911] FIG. 5875: DNA326883,XM_{—}114154,gen.XM_{—}114154

[5912] FIG. 5876: DNA326884,XM_{—}072173,gen.XM_{—}072173

[5913] FIG. 5877: DNA326885,XM_{—}086759,gen.XM_{—}086759

[5914] FIG. 5878: DNA326886,XM_{—}086760,gen.XM_{—}086760

[5915] FIG. 5879: DNA326887,NM_{—}021219,gen.NM_{—}021219

[5916] FIG. 5880: PRO28687

[5917] FIG. 5881: DNA188732,NM_{—}000484,gen.NM_{—}000484

[5918] FIG. 5882: PRO25302

[5919] FIG. 5883: DNA326888,NM_{—}016940,gen.NM_{—}016940

[5920] FIG. 5884: PRO83210

[5921] FIG. 5885: DNA254572,NM_{—}006585,gen.NM_{—}006585

[5922] FIG. 5886: PRO49675

[5923] FIG. 5887: DNA326889,NM_{—}105806,gen.NM_{—}005806

[5924] FIG. 5888: PRO83211

[5925] FIG. 5889: DNA326890,XM_{—}114185,gen.XM_{—}114185

[5926] FIG. 5890: DNA254994,NM_{—}017613,gen.NM_{—}017613

[5927] FIG. 5891: PRO50083

[5928] FIG. 5892: DNA274129,NM_{—}001697,gen.NM_{—}001697

[5929] FIG. 5893: PRO62065

[5930] FIG. 5894: DNA326891,NM_{—}001757,gen.NM_{—}001757

[5931] FIG. 5895: PRO83212

[5932] FIG. 5896A-C: DNA151898,NM_{—}003316,gen.NM_{—}003316

[5933] FIG. 5897: PRO12135

[5934] FIG. 5898: DNA326892,NM_{—}003720,gen.NM_{—}003720

[5935] FIG. 5899: PRO83213

[5936] FIG. 5900: DNA326893,NM_{—}002606,gen.NM_{—}002606

[5937] FIG. 5901: PRO83214

[5938] FIG. 5902: DNA326894,XM_{—}033015,gen.XM_{—}033015

[5939] FIG. 5903: DNA326895,XM_{—}033016,gen.XM_{—}033016

[5940] FIG. 5904: PRO59669

[5941] FIG. 5905: DNA326896,NM_{—}003681,gen.NM_{—}003681

[5942] FIG. 5906: PRO69486

[5943] FIG. 5907: DNA326897,XM_{—}035999,gen.XM_{—}035999

[5944] FIG. 5908: DNA326898,NM_{—}020132,gen.NM_{—}020132

[5945] FIG. 5909: PRO83217

[5946] FIG. 5910: DNA326899,XM_{—}036011,gen.XM_{—}036011

[5947] FIG. 5911: DNA326900,NM_{—}013369,gen.NM_{—}013369

[5948] FIG. 5912: PRO83219

[5949] FIG. 5913: DNA326901,XM_{—}036042,gen.XM_{—}036042

[5950] FIG. 5914: DNA326902,XM_{—}086770,gen.XM_{—}086770

[5951] FIG. 5915: DNA326903,NM_{—}004928,gen.NM_{—}004928

[5952] FIG. 5916: PRO83222

[5953] FIG. 5917: DNA326904,XM_{—}036087,gen.XM_{—}036087

[5954] FIG. 5918: PRO83223

[5955] FIG. 5919: DNA326905,XM_{—}009805,gen.XM_{—}009805

[5956] FIG. 5920: PRO83224

[5957] FIG. 5921: DNA226409,NM_{—}004339,gen.NM_{—}004339

[5958] FIG. 5922: PRO36872

[5959] FIG. 5923: DNA326906,XM_{—}036107,gen.XM_{—}036107

[5960] FIG. 5924A-B: DNA326907,XM_{—}036175,gen.XM_{—}036175

[5961] FIG. 5925: DNA326908,XM_{—}097817,gen.XM_{—}097817

[5962] FIG. 5926A-B: DNA326909,XM_{—}054566,gen.XM_{—}054566

[5963] FIG. 5927: DNA326910,XM_{—}036755,gen.XM_{—}036755

[5964] FIG. 5928: DNA326911,XM_{—}086773,gen.XM_{—}086773

[5965] FIG. 5929: DNA326912,XM_{—}097807,gen.XM_{—}097807

[5966] FIG. 5930: DNA326913,XM_{—}086777,gen.XM_{—}086777

[5967] FIG. 5931: DNA326914,NM_{—}002340,gen.NM_{—}002340

[5968] FIG. 5932: PRO83233

[5969] FIG. 5933A-B: DNA326915,NM_{—}003906,gen.NM_{—}003906

[5970] FIG. 5934: PRO83234

[5971] FIG. 5935: DNA226617,NM_{—}006272,gen.NM_{—}006272

[5972] FIG. 5936: PRO37080

[5973] FIG. 5937: DNA326916,NM_{—}033070,gen.NM_{—}033070

[5974] FIG. 5938: PRO83235

[5975] FIG. 5939: DNA255046,NM_{—}017829,gen.NM_{—}017829

[5976] FIG. 5940: PRO50134

[5977] FIG. 5941: DNA326917,NM_{—}001696,gen.NM_{—}001696

[5978] FIG. 5942: PRO83236

[5979] FIG. 5943A-B: DNA326918,XM_{—}032996,gen.XM_{—}032996

[5980] FIG. 5944: PRO83237

[5981] FIG. 5945: DNA326919,XM_{—}167538,gen.XM_{—}167538

[5982] FIG. 5946: DNA326920,XM_{—}033090,gen.XM_{—}033090

[5983] FIG. 5947: DNA225954,NM_{—}000407,gen.NM_{—}000407

[5984] FIG. 5948: PRO36417

[5985] FIG. 5949: DNA326921,XM_{—}058918,gen.XM_{—}058918

[5986] FIG. 5950: DNA326922,XM_{—}097833,gen.XM_{—}097833

[5987] FIG. 5951: DNA326923,NM_{—}024627,gen.NM_{—}024627

[5988] FIG. 5952: PRO83242

[5989] FIG. 5953: DNA326924,XM_{—}086809,gen.XM_{—}086809

[5990] FIG. 5954: DNA326925,NM_{—}006440,gen.NM_{—}006440

[5991] FIG. 5955: PRO83244

[5992] FIG. 5956: DNA226561,NM_{—}000754,gen.NM_{—}000754

[5993] FIG. 5957: PRO37024

[5994] FIG. 5958: DNA326926,NM_{—}007310,gen.NM_{—}007310

[5995] FIG. 5959: PRO83245

[5996] FIG. 5960A-B: DNA326927,XM_{—}033813,gen.XM_{—}033813

[5997] FIG. 5961: DNA326928,NM_{—}022727,gen.NM_{—}022727

[5998] FIG. 5962: PRO83247

[5999] FIG. 5963: DNA326929,XM_{—}086805,gen.XM_{—}086805

[6000] FIG. 5964: DNA326930,XM_{—}086873,gen.XM_{—}086873

[6001] FIG. 5965: DNA257549,NM_{—}030573,gen.NM_{—}030573

[6002] FIG. 5966: PRO52119

[6003] FIG. 5967: DNA326931,XM_{—}096155,gen.XM_{—}096155

[6004] FIG. 5968: DNA326932,XM_{—}096156,gen.XM_{—}096156

[6005] FIG. 5969A-B: DNA326933,XM_{—}036937,gen.XM_{—}036937

[6006] FIG. 5970: PRO83252

[6007] FIG. 5971: DNA326934,XM_{—}097886,gen.XM_{—}097886

[6008] FIG. 5972: PRO83253

[6009] FIG. 5973: DNA304835,NM_{—}022044,gen.NM_{—}022044

[6010] FIG. 5974: PRO71242

[6011] FIG. 5975: DNA326935,NM_{—}006115,gen.NM_{—}006115

[6012] FIG. 5976: PRO37012

[6013] FIG. 5977: DNA326936,XM_{—}037682,gen.XM_{—}037682

[6014] FIG. 5978: PRO83254

[6015] FIG. 5979: DNA326937,NM_{—}002415,gen.NM_{—}002415

[6016] FIG. 5980: PRO83255

[6017] FIG. 5981A-B: DNA326938,XM_{—}037797,gen.XM_{—}037797

[6018] FIG. 5982: PRO83256

[6019] FIG. 5983: DNA326939,NM_{—}004175,gen.NM_{—}004175

[6020] FIG. 5984: PRO83257

[6021] FIG. 5985: DNA326940,XM_{—}086821,gen.XM_{—}086821

[6022] FIG. 5986: DNA326941,XM_{—}092888,gen.XM_{—}092888

[6023] FIG. 5987: DNA326942,NM_{—}005080,gen.NM_{—}005080

[6024] FIG. 5988: PRO83260

[6025] FIG. 5989: DNA269830,NM_{—}005243,gen.NM_{—}005243

[6026] FIG. 5990: PRO58232

[6027] FIG. 5991: DNA326943,NM_{—}006478,gen.NM_{—}006478

[6028] FIG. 5992: PRO83261

[6029] FIG. 5993A-B: DNA326944,XM_{—}037945,gen.XM_{—}037945

[6030] FIG. 5994: DNA103462,NM_{—}000268,gen.NM_{—}000268

[6031] FIG. 5995: PRO4789

[6032] FIG. 5996: DNA326945,NM_{—}032204,gen.NM_{—}032204

[6033] FIG. 5997: PRO83263

[6034] FIG. 5998: DNA326946,XM_{—}066291,gen.XM_{—}066291

[6035] FIG. 5999: DNA326947,NM_{—}005877,gen.NM_{—}005877

[6036] FIG. 6000: PRO62328

[6037] FIG. 6001: DNA326948,NM_{—}016498,gen.NM_{—}016498

[6038] FIG. 6002: PRO83265

[6039] FIG. 6003: DNA254141,NM_{—}014303,gen.NM_{—}014303

[6040] FIG. 6004: PRO49256

[6041] FIG. 6005A-B: DNA151882,NM_{—}014941,gen.NM_{—}014941

[6042] FIG. 6006: PRO12134

[6043] FIG. 6007: DNA326949,NM_{—}006932,gen.NM_{—}006932

[6044] FIG. 6008: PRO83266

[6045] FIG. 6009: DNA326950,NM_{—}134269,gen.NM_{—}134269

[6046] FIG. 6010: PRO83267

[6047] FIG. 6011: DNA270697,NM_{—}004147,gen.NM_{—}004147

[6048] FIG. 6012: PRO59061

[6049] FIG. 6013: DNA326951,XM_{—}059335,gen.XM_{—}059335

[6050] FIG. 6014: DNA326952,XM_{—}018539,gen.XM_{—}018539

[6051] FIG. 6015: DNA326953,NM_{—}014306,gen.NM_{—}014306

[6052] FIG. 6016: PRO83270

[6053] FIG. 6017: DNA326954,NM_{—}012179,gen.NM_{—}012179

[6054] FIG. 6018: PRO83271

[6055] FIG. 6019A-B: DNA326955,XM_{—}038584,gen.XM_{—}038584

[6056] FIG. 6020: DNA151752,NM_{—}002133,gen.NM_{—}002133

[6057] FIG. 6021: PRO12886

[6058] FIG. 6022: DNA326956,XM_{—}009947,gen.XM_{—}009947

[6059] FIG. 6023: PRO12845

[6060] FIG. 6024: DNA326957,XM_{—}114209,gen.XM_{—}114209

[6061] FIG. 6025A-B: DNA326958,NM_{—}002473,gen.NM_{—}002473

[6062] FIG. 6026: PRO83273

[6063] FIG. 6027: DNA188740,NM_{—}003753,gen.NM_{—}003753

[6064] FIG. 6028: PRO22481

[6065] FIG. 6029: DNA326959,NM_{—}021126,gen.NM_{—}021126

[6066] FIG. 6030: PRO70331

[6067] FIG. 6031: DNA326960,XM_{—}009967,gen.XM_{—}009967

[6068] FIG. 6032: DNA326961,NM_{—}013365,gen.NM_{—}013365

[6069] FIG. 6033: PRO83274

[6070] FIG. 6034: DNA290259,NM_{—}018957,gen.NM_{—}018957

[6071] FIG. 6035: PRO70383

[6072] FIG. 6036: DNA326962,NM_{—}020315,gen.NM_{—}020315

[6073] FIG. 6037: PRO83275

[6074] FIG. 6038: DNA304719,NM_{—}002305,gen.NM_{—}002305

[6075] FIG. 6039: PRO71145

[6076] FIG. 6040: DNA326963,NM_{—}007032,gen.NM_{—}007032

[6077] FIG. 6041: PRO83276

[6078] FIG. 6042: DNA326964,XM_{—}009973,gen.XM_{—}009973

[6079] FIG. 6043: DNA326965,XM_{—}086830,gen.XM_{—}086830

[6080] FIG. 6044: PRO83278

[6081] FIG. 6045: DNA254240,NM_{—}016091,gen.NM_{—}016091

[6082] FIG. 6046: PRO49352

[6083] FIG. 6047A-B: DNA326966,XM_{—}039236,gen.XM_{—}039236

[6084] FIG. 6048: PRO83279

[6085] FIG. 6049: DNA326967,NM_{—}006941,gen.NM_{—}006941

[6086] FIG. 6050: PRO83280

[6087] FIG. 6051: DNA326968,XM_{—}039248,gen.XM_{—}039248

[6088] FIG. 6052: DNA326969,NM_{—}012323,gen.NM_{—}012323

[6089] FIG. 6053: PRO83282

[6090] FIG. 6054: DNA326970,NM_{—}012264,gen.NM_{—}012264

[6091] FIG. 6055: PRO 12490

[6092] FIG. 6056: DNA326971,NM_{—}015373,gen.NM_{—}015373

[6093] FIG. 6057: PRO83283

[6094] FIG. 6058: DNA326972,NM_{—}020243,gen.NM_{—}020243

[6095] FIG. 6059: PRO23231

[6096] FIG. 6060: DNA326973,XM_{—}039339,gen.XM_{—}039339

[6097] FIG. 6061: DNA326974,NM_{—}000967,gen.NM_{—}000967

[6098] FIG. 6062: PRO83285

[6099] FIG. 6063: DNA326975,XM_{—}010000,gen.XM_{—}010000

[6100] FIG. 6064: DNA326976,XM_{—}010002,gen.XM_{—}010002

[6101] FIG. 6065: DNA326977,XM_{—}039372,gen.XM_{—}039372

[6102] FIG. 6066: DNA326978,XM_{—}013010,gen.XM_{—}013010

[6103] FIG. 6067: PRO83288

[6104] FIG. 6068: DNA254165,NM_{—}000026,gen.NM_{—}000026

[6105] FIG. 6069: PRO49278

[6106] FIG. 6070: DNA326979,NM_{—}003932,gen.NM_{—}003932

[6107] FIG. 6071: PRO4586

[6108] FIG. 6072: DNA326980,NM_{—}014248,gen.NM_{—}014248

[6109] FIG. 6073: PRO83289

[6110] FIG. 6074: DNA326981,XM_{—}086844,gen.XM_{—}086844

[6111] FIG. 6075: DNA219225,NM_{—}002883,gen.NM_{—}002883

[6112] FIG. 6076: PRO34531

[6113] FIG. 6077: DNA326982,NM_{—}003216,gen.NM_{—}003216

[6114] FIG. 6078: PRO83291

[6115] FIG. 6079: DNA270954,NM_{—}001098,gen.NM_{—}001098

[6116] FIG. 6080: PRO59285

[6117] FIG. 6081: DNA326983,NM_{—}001469,gen.NM_{—}001469

[6118] FIG. 6082: PRO4872

[6119] FIG. 6083: DNA326984,NM_{—}005008,gen.NM_{—}005008

[6120] FIG. 6084: PRO83292

[6121] FIG. 6085A-B: DNA326985,NM_{—}004599,gen.NM_{—}004599

[6122] FIG. 6086: PRO83293

[6123] FIG. 6087A-B: DNA326986,XM_{—}010024,gen.XM_{—}010024

[6124] FIG. 6088: DNA326987,XM_{—}040066,gen.XM_{—}040066

[6125] FIG. 6089: DNA326988,XM_{—}013015,gen.XM_{—}013015

[6126] FIG. 6090A-B: DNA326989,XM_{—}084084,gen.XM_{—}084084

[6127] FIG. 6091: DNA326990,XM_{—}040095,gen.XM_{—}040095

[6128] FIG. 6092: PRO83297

[6129] FIG. 6093: DNA326991,XM_{—}086875,gen.XM_{—}086875

[6130] FIG. 6094: DNA326992,XM_{—}010029,gen.XM_{—}010029

[6131] FIG. 6095: DNA326993,NM_{—}007311,gen.NM_{—}007311

[6132] FIG. 6096: PRO83300

[6133] FIG. 6097: DNA326994,NM_{—}015140,gen.NM_{—}015140

[6134] FIG. 6098: PRO83301

[6135] FIG. 6099: DNA326995,XM_{—}043614,gen.XM_{—}043614

[6136] FIG. 6100: PRO83302

[6137] FIG. 6101: DNA256070,NM_{—}022141,gen.NM_{—}022141

[6138] FIG. 6102: PRO51119

[6139] FIG. 6103: DNA326996,XM_{—}010040,gen.XM_{—}010040

[6140] FIG. 6104: DNA237931,NM_{—}005036,gen.NM_{—}005036

[6141] FIG. 6105: PRO39030

[6142] FIG. 6106A-B: DNA326997,XM_{—}027143,gen.XM_{—}027143

[6143] FIG. 6107: PRO83304

[6144] FIG. 6108A-B: DNA326998,XM_{—}010055,gen.XM_{—}010055

[6145] FIG. 6109: DNA326999,NM_{—}025204,gen.NM_{—}025204

[6146] FIG. 6110: PRO83306

[6147] FIG. 6111: DNA327000,XM_{—}041248,gen.XM_{—}041248

[6148] FIG. 6112: PRO83307

[6149] FIG. 6113: DNA327001,XM_{—}092966,gen.XM_{—}092966

[6150] FIG. 6114: DNA327002,XM_{—}037468,gen.XM_{—}037468

[6151] FIG. 6115: PRO83309

[6152] FIG. 6116: DNA327003,XM_{—}037474,gen.XM_{—}037474

[6153] FIG. 6117: PRO83310

[6154] FIG. 6118: DNA327004,XM_{—}013029,gen.XM_{—}013029

[6155] FIG. 6119: DNA327005,XM_{—}114724,gen.XM_{—}114724

[6156] FIG. 6120: PRO83312

[6157] FIG. 6121: DNA327006,XM_{—}115924,gen.XM_{—}115924

[6158] FIG. 6122: DNA327007,XM_{—}113585,gen.XM_{—}113585

[6159] FIG. 6123A-C: DNA327008,XM_{—}035465,gen.XM_{—}035465

[6160] FIG. 6124: DNA327009,NM_{—}002414,gen.NM_{—}002414

[6161] FIG. 6125: PRO2373

[6162] FIG. 6126: DNA269793,NM_{—}005333,gen.NM_{—}005333

[6163] FIG. 6127: PRO58198

[6164] FIG. 6128: DNA327010,XM_{—}088747,gen.XM_{—}088747

[6165] FIG. 6129: PRO83316

[6166] FIG. 6130: DNA327011,XM_{—}114720,gen.XM_{—}114720

[6167] FIG. 6131: DNA327012,XM_{—}115886,gen.XM_{—}115886

[6168] FIG. 6132: DNA327013,XM_{—}010272,gen.XM_{—}010272

[6169] FIG. 6133: PRO83319

[6170] FIG. 6134: DNA327014,NM_{—}006746,gen.NM_{—}006746

[6171] FIG. 6135: PRO83320

[6172] FIG. 6136: DNA327015,XM_{—}115890,gen.XM_{—}115890

[6173] FIG. 6137: PRO83321

[6174] FIG. 6138: DNA327016,NM_{—}000284,gen.NM_{—}000284

[6175] FIG. 6139: PRO59441

[6176] FIG. 6140: DNA327017,NM_{—}004595,gen.NM_{—}004595

[6177] FIG. 6141: PRO61744

[6178] FIG. 6142: DNA327018,XM_{—}166078,gen.XM_{—}166078

[6179] FIG. 6143: DNA327019,NM_{—}001415,gen.NM_{—}001415

[6180] FIG. 6144: PRO83323

[6181] FIG. 6145: DNA327020,XM_{—}013086,gen.XM_{—}013086

[6182] FIG. 6146: DNA327021,XM_{—}060030,gen.XM_{—}060030

[6183] FIG. 6147: DNA227689,NM_{—}002364,gen.NM_{—}002364

[6184] FIG. 6148: PRO38152

[6185] FIG. 6149: DNA274829,NM_{—}003662,gen.NM_{—}003662

[6186] FIG. 6150: PRO62588

[6187] FIG. 6151: DNA327022,XM_{—}088619,gen.XM_{—}088619

[6188] FIG. 6152: DNA327023,XM_{—}088622,gen.XM_{—}088622

[6189] FIG. 6153A-B: DNA327024,XM_{—}084288,gen.XM_{—}084288

[6190] FIG. 6154: PRO59168

[6191] FIG. 6155: DNA327025,XM_{—}054221,gen.XM_{—}054221

[6192] FIG. 6156: PRO83328

[6193] FIG. 6157: DNA327026,XM_{—}018019,gen.XM_{—}018019

[6194] FIG. 6158: DNA327027,XM_{—}088665,gen.XM_{—}088665

[6195] FIG. 6159: DNA327028,NM_{—}005300,gen.NM_{—}005300

[6196] FIG. 6160: PRO37083

[6197] FIG. 6161: DNA327029,XM_{—}018241,gen.XM_{—}018241

[6198] FIG. 6162: PRO83331

[6199] FIG. 6163: DNA327030,NM_{—}014138,gen.NM_{—}014138

[6200] FIG. 6164: PRO83332

[6201] FIG. 6165: DNA32703 1,NM_{—}005676,gen.NM_{—}005676

[6202] FIG. 6166: PRO83333

[6203] FIG. 6167: DNA327032,NM_{—}003334,gen.NM_{—}003334

[6204] FIG. 6168: PRO83334

[6205] FIG. 6169: DNA327033,XM_{—}010378,gen.XM_{—}010378

[6206] FIG. 6170: DNA327034,XM_{—}033884,gen.XM_{—}033884

[6207] FIG. 6171: PRO83335

[6208] FIG. 6172: DNA327035,XM_{—}033878,gen.XM_{—}033878

[6209] FIG. 6173: DNA327036,XM_{—}033862,gen.XM_{—}033862

[6210] FIG. 6174: DNA327037,NM_{—}004182,gen.NM_{—}004182

[6211] FIG. 6175: PRO83337

[6212] FIG. 6176: DNA327038,XM_{—}047032,gen.XM_{—}047032

[6213] FIG. 6177: DNA327039,XM_{—}047024,gen.XM_{—}047024

[6214] FIG. 6178: PRO83339

[6215] FIG. 6179: DNA327040,NM_{—}017883,gen.NM_{—}017883

[6216] FIG. 6180: PRO83340

[6217] FIG. 6181: DNA238039,NM_{—}005710,gen.NM_{—}005710

[6218] FIG. 6182: PRO39127

[6219] FIG. 6183: DNA327041,XM_{—}054098,gen.XM_{—}054098

[6220] FIG. 6184: PRO83341

[6221] FIG. 6185: DNA327042,NM_{—}002668,gen.NM_{—}002668

[6222] FIG. 6186: PRO34584

[6223] FIG. 6187: DNA271580,NM_{—}014008,gen.NM_{—}014008

[6224] FIG. 6188: PRO59868

[6225] FIG. 6189A-B: DNA327043,XM_{—}032930,gen.XM_{—}032930

[6226] FIG. 6190: DNA273992,NM_{—}004493,gen.NM_{—}004493

[6227] FIG. 6191: PRO61938

[6228] FIG. 6192A-B: DNA327044,XM_{—}050403,gen.XM_{—}050403

[6229] FIG. 6193: PRO83343

[6230] FIG. 6194: DNA327045,XM_{—}029187,gen.XM_{—}029187

[6231] FIG. 6195: PRO83344

[6232] FIG. 6196: DNA327046,XM_{—}013060,gen.XM_{—}013060

[6233] FIG. 6197: DNA227943,NM_{—}006787,gen.NM_{—}006787

[6234] FIG. 6198: PRO38406

[6235] FIG. 6199: DNA327047,NM_{—}014481,gen.NM_{—}014481

[6236] FIG. 6200: PRO83345

[6237] FIG. 6201: DNA327048,XM_{—}034935,gen.XM_{—}034935

[6238] FIG. 6202: PRO83346

[6239] FIG. 6203: DNA327049,XM_{—}084287,gen.XM_{—}084287

[6240] FIG. 6204: DNA327050,NM_{—}007268,gen.NM_{—}007268

[6241] FIG. 6205: PRO34043

[6242] FIG. 6206: DNA327051,XM_{—}015516,gen.XM_{—}015516

[6243] FIG. 6207A-B: DNA027052,XM_{—}013042,gen.XM_{—}013042

[6244] FIG. 6208: PRO83349

[6245] FIG. 6209: DNA327053,XM_{—}088630,gen.XM_{—}088630

[6246] FIG. 6210: DNA327054,NM_{—}031206,gen.NM_{—}031206

[6247] FIG. 6211: PRO83351

[6248] FIG. 6212: DNA327055,XM_{—}093050,gen.XM_{—}093050

[6249] FIG. 6213: PRO83352

[6250] FIG. 6214A-B: DNA225721,NM_{—}018977,gen.NM_{—}018977

[6251] FIG. 6215: PRO36184

[6252] FIG. 6216: DNA327056,XM_{—}010141,gen.XM_{—}010141

[6253] FIG. 6217: PRO38021

[6254] FIG. 6218: DNA327057,XM_{—}088689,gen.XM_{—}088689

[6255] FIG. 6219: PRO83353

[6256] FIG. 6220: DNA327058,XM_{—}088688,gen.XM_{—}088688

[6257] FIG. 6221: PRO83354

[6258] FIG. 6222: DNA327059,NM_{—}018486,gen.NM_{—}018486

[6259] FIG. 6223: PRO83355

[6260] FIG. 6224: DNA327060,NM_{—}001007,gen.NM_{—}001007

[6261] FIG. 6225: PRO42022

[6262] FIG. 6226: DNA327061,XM_{—}093130,gen.XM_{—}093130

[6263] FIG. 6227: DNA327062,XM_{—}084296,gen.XM_{—}084296

[6264] FIG. 6228: DNA327063,XM_{—}093241,gen.XM_{—}093241

[6265] FIG. 6229: DNA327064,XM_{—}084283,gen.XM_{—}084283

[6266] FIG. 6230: DNA273254,NM_{—}000291,gen.NM_{—}000291

[6267] FIG. 6231: PRO61271

[6268] FIG. 6232: DNA327065,XM_{—}018142,gen.XM_{—}018142

[6269] FIG. 6233: DNA327066,XM_{—}030373,gen.XM_{—}030373

[6270] FIG. 6234: PRO83360

[6271] FIG. 6235: DNA327067,XM_{—}165533,gen.XM_{—}165533

[6272] FIG. 6236: PRO83361

[6273] FIG. 6237: DNA327068,XM_{—}051476,gen.XM_{—}051476

[6274] FIG. 6238: DNA327069,XM_{—}051471,gen.XM_{—}051471

[6275] FIG. 6239: DNA270496,NM_{—}001325,gen.NM_{—}001325

[6276] FIG. 6240: PRO58875

[6277] FIG. 6241: DNA327070,XM_{—}033147,gen.XM_{—}033147

[6278] FIG. 6242: DNA327071,NM_{—}004085,gen.NM_{—}004085

[6279] FIG. 6243: PRO59022

[6280] FIG. 6244: DNA327072,NM_{—}021029,gen.NM_{—}021029

[6281] FIG. 6245: PRO10723

[6282] FIG. 6246: DNA327073,NM_{—}012286,gen.NM_{—}012286

[6283] FIG. 6247: PRO83365

[6284] FIG. 6248: DNA327074,NM_{—}024863,gen.NM_{—}024863

[6285] FIG. 6249: PRO83366

[6286] FIG. 6250: DNA327075,XM_{—}043643,gen.XM_{—}043643

[6287] FIG. 6251: DNA327076,NM_{—}052936,gen.NM_{—}052936

[6288] FIG. 6252: PRO83368

[6289] FIG. 6253: DNA327077,XM_{—}088710,gen.XM_{—}088710

[6290] FIG. 6254: PRO83369

[6291] FIG. 6255: DNA327078,XM_{—}166081,gen.XM_{—}166081

[6292] FIG. 6256: DNA327079,XM_{—}096303,gen.XM_{—}096303

[6293] FIG. 6257: DNA254785,NM_{—}032227,gen.NM_{—}032227

[6294] FIG. 6258: PRO49883

[6295] FIG. 6259: DNA327080,XM_{—}115923,gen.XM_{—}115923

[6296] FIG. 6260: PRO83372

[6297] FIG. 6261: DNA327081,XM_{—}066900,gen.XM_{—}066900

[6298] FIG. 6262: PRO83373

[6299] FIG. 6263: DNA327082,XM_{—}104983,gen.XM_{—}104983

[6300] FIG. 6264: PRO83374

[6301] FIG. 6265: DNA327083,XM_{—}088736,gen.XM_{—}088736

[6302] FIG. 6266: PRO83375

[6303] FIG. 6267: DNA327084,XM_{—}088738,gen.XM_{—}088738

[6304] FIG. 6268: DNA327085,XM_{—}088739,gen.XM_{—}088739

[6305] FIG. 6269: DNA327086,XM_{—}010117,gen.XM_{—}010117

[6306] FIG. 6270A-B: DNA76504,NM_{—}001560,gen.NM_{—}001560

[6307] FIG. 6271: PRO2537

[6308] FIG. 6272: DNA227181,NM_{—}006667,gen.NM_{—}006667

[6309] FIG. 6273: PRO37644

[6310] FIG. 6274: DNA327087,XM_{—}010362,gen.XM_{—}010362

[6311] FIG. 6275: DNA327088,XM_{—}016125,gen.XM_{—}016125

[6312] FIG. 6276: DNA327089,NM_{—}015129,gen.NM_{—}015129

[6313] FIG. 6277: PRO83381

[6314] FIG. 6278: DNA327090,NM_{—}001000,gen.NM_{—}001000

[6315] FIG. 6279: PRO10935

[6316] FIG. 6280: DNA327091,XM_{—}010436,gen.XM_{—}010436

[6317] FIG. 6281: DNA327092,XM_{—}115874,gen.XM_{—}115874

[6318] FIG. 6282: DNA327093,XM_{—}029461,gen.XM_{—}029461

[6319] FIG. 6283: PRO83383

[6320] FIG. 6284: DNA327094,XM_{—}017930,gen.XM_{—}017930

[6321] FIG. 6285: DNA227656,NM_{—}004208,gen.NM_{—}004208

[6322] FIG. 6286: PRO38119

[6323] FIG. 6287: DNA273487,NM_{—}004794,gen.NM_{—}004794

[6324] FIG. 6288: PRO61470

[6325] FIG. 6289: DNA327095,XM_{—}088745,gen.XM_{—}088745

[6326] FIG. 6290: PRO83385

[6327] FIG. 6291: DNA327096,XM_{—}114708,gen.XM_{—}114708

[6328] FIG. 6292: PRO83386

[6329] FIG. 6293: DNA327097,NM_{—}016267,gen.NM_{—}016267

[6330] FIG. 6294: PRO83387

[6331] FIG. 6295A-B: DNA327098,XM_{—}042963,gen.XM_{—}042963

[6332] FIG. 6296: PRO83388

[6333] FIG. 6297: DNA327099,XM_{—}042968,gen.XM_{—}042968

[6334] FIG. 6298: PRO83389

[6335] FIG. 6299: DNA327100,XM_{—}093219,gen.XM_{—}093219

[6336] FIG. 6300: DNA327101,NM_{—}016249,gen.NM_{—}016249

[6337] FIG. 6301: PRO83391

[6338] FIG. 6302: DNA327102,XM_{—}098995,gen.XM_{—}098995

[6339] FIG. 6303: PRO83392

[6340] FIG. 6304: DNA327103,XM_{—}041921,gen.XM_{—}041921

[6341] FIG. 6305: PRO83393

[6342] FIG. 6306: DNA327104,XM_{—}048905,gen.XM_{—}048905

[6343] FIG. 6307: PRO83394

[6344] FIG. 6308: DNA327105,NM_{—}005364,gen.NM_{—}005364

[6345] FIG. 6309: PRO83395

[6346] FIG. 6310: DNA327106,XM_{—}010178,gen.XM_{—}010178

[6347] FIG. 6311: DNA327107,XM_{—}088592,gen.XM_{—}088592

[6348] FIG. 6312: PRO25245

[6349] FIG. 6313: DNA327108,XM_{—}018108,gen.XM_{—}018108

[6350] FIG. 6314: PRO83397

[6351] FIG. 6315: DNA327109,XM_{—}018109,gen.XM_{—}018109

[6352] FIG. 6316: DNA327110,NM_{—}005362,gen.NM_{—}005362

[6353] FIG. 6317: PRO24021

[6354] FIG. 6318: DNA254783,NM_{—}001363,gen.NM_{—}001363

[6355] FIG. 6319: PRO49881

[6356] FIG. 6320: DNA327111,XM_{—}049337,gen.XM_{—}049337

[6357] FIG. 6321: DNA227917,NM_{—}019848,gen.NM_{—}019848

[6358] FIG. 6322: PRO38380

[6359] FIG. 6323: DNA327112,NM_{—}004699,gen.NM_{—}004699

[6360] FIG. 6324: PRO83400

[6361] FIG. 6325: DNA327113,XM_{—}048420,gen.XM_{—}048420

[6362] FIG. 6326: DNA327114,NM_{—}006013,gen.NM_{—}006013

[6363] FIG. 6327: PRO62466

[6364] FIG. 6328: DNA327115,XM_{—}048410,gen.XM_{—}048410

[6365] FIG. 6329A-C: DNA327116,XM_{—}048404,gen.XM_{—}048404

[6366] FIG. 6330A-C: DNA327117,NM_{—}004992,gen.NM_{—}004992

[6367] FIG. 6331: PRO83403

[6368] FIG. 6332: DNA227013,NM_{—}001569,gen.NM_{—}001569

[6369] FIG. 6333: PRO37476

[6370] FIG. 6334A-B: DNA225800,NM_{—}000425,gen.NM_{—}000425

[6371] FIG. 6335: PRO36263

[6372] FIG. 6336A-B: DNA327118,NM_{—}024003,gen.NM_{—}024003

[6373] FIG. 6337: PRO83404

[6374] FIG. 6338: DNA225655,NM_{—}006280,gen.NM_{—}006280

[6375] FIG. 6339: PRO36118

[6376] FIG. 6340: DNA276159,NM_{—}004135,gen.NM_{—}004135

[6377] FIG. 6341: PRO63299

[6378] FIG. 6342A-B: DNA230792,NM_{—}000033,gen.NM_{—}000033

[6379] FIG. 6343: PRO38730

[6380] FIG. 6344: DNA103558,NM_{—}005745,gen.NM_{—}005745

[6381] FIG. 6345: PRO4885

[6382] FIG. 6346: DNA327119,XM_{—}042155,gen.XM_{—}042155

[6383] FIG. 6347: PRO83405

[6384] FIG. 6348: DNA327120,XM_{—}042153,gen.XM_{—}042153

[6385] FIG. 6349: DNA327121,XM_{—}117555,gen.XM_{—}117555

[6386] FIG. 6350: DNA327122,XM_{—}084311,gen.XM_{—}084311

[6387] FIG. 6351: DNA327123,XM_{—}033232,gen.XM_{—}033232

[6388] FIG. 6352: DNA327124,XM_{—}117539,gen.XM_{—}117539

[6389] FIG. 6353: DNA327125,XM_{—}027952,gen.XM_{—}027952

[6390] FIG. 6354: DNA327126,XM_{—}114692,gen.XM_{—}114692

[6391] FIG. 6355A-B: DNA327127,XM_{—}165530,gen.XM_{—}165530

DNA Index (to Figure number)

| | |
|---|---|
| DNA0, 1188 | DNA171408, 48 |
| DNA103214, 218 | DNA188229, 5836 |
| DNA103217, 649 | DNA188351, 4782 |
| DNA103239, 5576 | DNA188396, 3480 |
| DNA103253, 188 | DNA188732, 5882 |
| DNA103320, 5272 | DNA188740, 6027 |
| DNA103380, 1677 | DNA188748, 146 |
| DNA103401, 4708 | DNA189315, 167 |
| DNA103421, 2982 | DNA189687, 3297 |
| DNA103436, 457 | DNA189697, 998 |
| DNA103462, 5994 | DNA189703, 4568 |
| DNA103471, 2070 | DNA193882, 585 |
| DNA103474, 3313 | DNA193955, 2193 |
| DNA103486, 5844 | DNA193957, 2947 |
| DNA103505, 1149 | DNA194600, 428 |
| DNA103506, 2990 | DNA194701, 5747 |
| DNA103509, 4110 | DNA194740, 854 |
| DNA103514, 3478 | DNA194805, 4530 |
| DNA103525, 5774 | DNA194807, 5760 |
| DNA103558, 6344 | DNA194827, 977 |
| DNA103580, 5494 | DNA196344, 576 |
| DNA103588, 2274 | DNA196349, 124 |
| DNA103593, 711 | DNA196351, 3600 |
| DNA129504, 4985 | DNA196642, 4877 |
| DNA131588, 2593 | DNA210134, 367 |
| DNA137231, 3667 | DNA210180, 3962 |
| DNA139747, 1368 | DNA218271, 5258 |
| DNA144601, 3051 | DNA218841, 2782 |
| DNA150457, 4936 | DNA219225, 6075 |
| DNA150485, 4305 | DNA219233, 4182 |
| DNA150548, 5703 | DNA225584, 1489 |
| DNA150562, 1153 | DNA225592, 1330 |
| DNA150679, 1732 | DNA225630, 2767 |
| DNA150725, 806 | DNA225631, 2174 |
| DNA150767, 5721 | DNA225632, 3473 |
| DNA150772, 2034 | DNA225649, 4042 |
| DNA150784, 5502 | DNA225655, 6338 |
| DNA150814, 4953 | DNA225671, 2506 |
| DNA150884, 1024 | DNA225721, 6214 |
| DNA150974, 3204 | DNA225752, 3376 |
| DNA150976, 1145 | DNA225800, 6334 |
| DNA150978, 3520 | DNA225809, 356 |
| DNA150997, 3526 | DNA225865, 3976 |
| DNA151010, 2546 | DNA225909, 1828 |
| DNA151017, 1066 | DNA225910, 1128 |
| DNA151148, 44 | DNA225919, 1446 |
| DNA151752, 6020 | DNA225920, 1511 |
| DNA151808, 5476 | DNA225921, 1515 |
| DNA151827, 3466 | DNA225954, 5947 |
| DNA151831, 4141 | DNA226005, 553 |
| DNA151882, 6005 | DNA226011, 5517 |
| DNA151893, 4079 | DNA226014, 3729 |
| DNA151898, 5896 | DNA226028, 3489 |
| DNA226080, 3206 | DNA227491, 2691 |
| DNA226105, 3992 | DNA227504, 594 |
| DNA226125, 409 | DNA227509, 3076 |
| DNA226217, 3004 | DNA227528, 803 |
| DNA226260, 271 | DNA227529, 346 |
| DNA226262, 105 | DNA227545, 698 |
| DNA226324, 4095 | DNA227559, 4161 |
| DNA226337, 2458 | DNA227575, 1508 |
| DNA226345, 2670 | DNA227577, 374 |
| DNA226389, 4820 | DNA227607, 1961 |
| DNA226409, 5921 | DNA227656, 6285 |
| DNA226416, 2262 | DNA227689, 6147 |
| DNA226418, 1791 | DNA227764, 4891 |
| DNA226428, 741 | DNA227795, 792 |
| DNA226496, 2565 | DNA227821, 36 |
| DNA226547, 1108 | DNA227873, 4841 |
| DNA226560, 2393 | DNA227917, 6321 |
| DNA226561, 5956 | DNA227924, 2099 |
| DNA226617, 5935 | DNA227929, 2206 |
| DNA226619, 474 | DNA227943, 6197 |
| DNA226646, 4224 | DNA230792, 6342 |
| DNA226758, 5745 | DNA234442, 4214 |
| DNA226771, 3498 | DNA237931, 6104 |
| DNA226793, 436 | DNA238039, 6181 |
| DNA226853, 3866 | DNA247474, 578 |
| DNA226872, 1689 | DNA247595, 2182 |
| DNA227013, 6332 | DNA251057, 5515 |
| DNA227055, 4939 | DNA252367, 1081 |
| DNA227071, 4889 | DNA253804, 1370 |
| DNA227084, 4742 | DNA254141, 6003 |
| DNA227088, 3220 | DNA254147, 1627 |
| DNA227092, 3593 | DNA254165, 6068 |
| DNA227094, 3628 | DNA254186, 3329 |
| DNA227165, 684 | DNA254198, 4719 |
| DNA227171, 3724 | DNA254204, 994 |
| DNA227172, 2964 | DNA254240, 6045 |
| DNA227173, 1573 | DNA254298, 499 |
| DNA227181, 6272 | DNA254346, 603 |
| DNA227190, 814 | DNA254532, 4487 |
| DNA227191, 3588 | DNA254543, 2740 |
| DNA227204, 1886 | DNA254548, 5627 |
| DNA227206, 4170 | DNA254572, 5885 |
| DNA227213, 157 | DNA254582, 1155 |
| DNA227234, 4626 | DNA254620, 1316 |
| DNA227246, 550 | DNA254624, 3468 |
| DNA227249, 5352 | DNA254771, 2693 |
| DNA227267, 2512 | DNA254777, 3777 |
| DNA227268, 2242 | DNA254781, 4374 |
| DNA227280, 5232 | DNA254783, 6318 |
| DNA227307, 1165 | DNA254785, 6257 |
| DNA227320, 1812 | DNA254791, 4898 |
| DNA227321, 3984 | DNA254994, 5890 |
| DNA227348, 5681 | DNA255046, 5939 |
| DNA227442, 1942 | DNA255078, 3113 |
| DNA227472, 5771 | DNA255340, 4208 |
| DNA227474, 3720 | DNA255370, 4265 |
| DNA255414, 4747 | DNA270721, 3295 |
| DNA255531, 859 | DNA270901, 4879 |
| DNA255696, 3109 | DNA270931, 5504 |
| DNA256070, 6101 | DNA270954, 6079 |
| DNA256072, 3511 | DNA270975, 4843 |
| DNA256503, 199 | DNA270979, 4805 |
| DNA256533, 5513 | DNA270991, 2662 |
| DNA256555, 5146 | DNA271003, 288 |
| DNA256813, 5056 | DNA271010, 5676 |
| DNA256836, 5387 | DNA271040, 1997 |
| DNA256840, 5434 | DNA271060, 751 |
| DNA256844, 4362 | DNA271171, 4507 |
| DNA256886, 4370 | DNA271187, 1093 |
| DNA256905, 545 | DNA271243, 703 |
| DNA257253, 1642 | DNA271324, 3380 |
| DNA257309, 2746 | DNA271344, 3550 |
| DNA257428, 4854 | DNA271418,2104 |
| DNA257511, 1437 | DNA271492, 3727 |
| DNA257531, 5506 | DNA271580, 6187 |
| DNA257549, 5965 | DNA271608, 934 |
| DNA257916, 402 | DNA271626, 1721 |
| DNA257965, 3415 | DNA271722, 2751 |
| DNA269431, 3101 | DNA271841, 5052 |
| DNA269481, 5593 | DNA271843, 3392 |
| DNA269498, 4059 | DNA271847, 2660 |
| DNA269526, 5814 | DNA271931, 1697 |
| DNA269593, 1854 | DNA271986, 519 |
| DNA269630, 5312 | DNA272024, 202 |
| DNA269708, 267 | DNA272050, 2600 |
| DNA269730, 1195 | DNA272062, 5625 |
| DNA269746, 5873 | DNA272090, 2348 |
| DNA269793, 6126 | DNA272127, 881 |
| DNA269803, 3284 | DNA272171, 1866 |
| DNA269809, 1687 | DNA272213, 2734 |
| DNA269816, 1646 | DNA272263, 1967 |
| DNA269830, 5989 | DNA272347, 5426 |
| DNA269858, 1270 | DNA272379, 3555 |
| DNA269894, 5298 | DNA272413, 3390 |
| DNA269910, 1062 | DNA272421, 5201 |
| DNA269930, 1097 | DNA272605, 1335 |
| DNA269952, 3093 | DNA272655, 2714 |
| DNA270015, 3864 | DNA272728, 3215 |
| DNA270134, 3208 | DNA272748, 235 |
| DNA270154, 746 | DNA272889, 4812 |
| DNA270254, 3896 | DNA273014, 4267 |
| DNA270315, 5206 | DNA273060, 194 |
| DNA270401, 1099 | DNA273066, 5568 |
| DNA270458, 3591 | DNA273088, 396 |
| DNA270496, 6239 | DNA273254, 6230 |
| DNA270613, 1892 | DNA273320, 5785 |
| DNA270615, 1386 | DNA273346, 5615 |
| DNA270621, 5234 | DNA273474, 5421 |
| DNA270675, 1850 | DNA273487, 6287 |
| DNA270677, 3823 | DNA273517, 5738 |
| DNA270697, 6011 | DNA273521, 3066 |
| DNA270711, 2371 | DNA273600, 5448 |
| DNA273694, 5023 | DNA287290, 5685 |
| DNA273712, 42 | DNA287291, 4919 |
| DNA273759, 2899 | DNA287319, 1969 |
| DNA273800, 689 | DNA287331, 4242 |
| DNA273839, 4360 | DNA287355, 4520 |
| DNA273865, 2246 | DNA287417, 3218 |
| DNA273919, 1182 | DNA287425, 4900 |
| DNA273992, 6190 | DNA287427, 4778 |
| DNA274002, 4476 | DNA287636, 5154 |
| DNA274034, 5277 | DNA287642, 2951 |
| DNA274058, 3912 | DNA288247, 2703 |
| DNA274101, 5115 | DNA288259, 1598 |
| DNA274129, 5892 | DNA289522, 4446 |
| DNA274139, 5441 | DNA289530, 2761 |
| DNA274178, 2491 | DNA290231, 1638 |
| DNA274180, 4516 | DNA290234, 540 |
| DNA274206, 1830 | DNA290259, 6034 |
| DNA274289, 5523 | DNA290260, 5550 |
| DNA274326, 2176 | DNA290264, 2007 |
| DNA274361, 3763 | DNA290284, 350 |
| DNA274487, 180 | DNA290292, 4728 |
| DNA274690, 5039 | DNA290294, 3620 |
| DNA274745, 192 | DNA290319,2680 |
| DNA274755, 4975 | DNA290585, 1459 |
| DNA274759, 340 | DNA290785, 2032 |
| DNA274761, 5199 | DNA294794, 438 |
| DNA274823, 5542 | DNA297288, 5638 |
| DNA274829, 6149 | DNA297388, 4699 |
| DNA275049, 662 | DNA297398, 3434 |
| DNA275066, 744 | DNA299899, 930 |
| DNA275139, 292 | DNA302016, 3827 |
| DNA275144, 4300 | DNA302020, 1718 |
| DNA275181, 4320 | DNA304459, 2986 |
| DNA275195, 651 | DNA304460, 1908 |
| DNA275240, 864 | DNA304488, 2996 |
| DNA275322, 2723 | DNA304658, 5562 |
| DNA275334, 2232 | DNA304661, 1946 |
| DNA275408, 4564 | DNA304662, 5640 |
| DNA275630, 1904 | DNA304666, 369 |
| DNA276159, 6340 | DNA304668, 1963 |
| DNA281436, 3900 | DNA304669, 3887 |
| DNA287167, 794 | DNA304670, 5830 |
| DNA287173, 31 | DNA304680, 1874 |
| DNA287189, 2265 | DNA304685, 2435 |
| DNA287216, 2701 | DNA304686, 220 |
| DNA287227, 1952 | DNA304694, 3717 |
| DNA287234, 5014 | DNA304699, 1986 |
| DNA287237, 3008 | DNA304704, 4575 |
| DNA287240, 5328 | DNA304707, 2254 |
| DNA287243, 5279 | DNA304710, 2308 |
| DNA287246, 1900 | DNA304715, 4714 |
| DNA287254, 3236 | DNA304716, 1912 |
| DNA287261, 5668 | DNA304719, 6038 |
| DNA287270, 5654 | DNA304720, 371 |
| DNA287271, 2763 | DNA304783, 3631 |
| DNA287282, 1582 | DNA304801, 2342 |
| DNA304805, 905 | DNA323771, 98 |
| DNA304835, 5973 | DNA323772, 99 |
| DNA323717, 1 | DNA323773, 101 |
| DNA323718, 2 | DNA323774, 102 |
| DNA323719, 3 | DNA323775, 103 |
| DNA323720, 4 | DNA323776, 107 |
| DNA323721, 6 | DNA323777, 109 |
| DNA323722, 8 | DNA323778, 110 |
| DNA323723, 10 | DNA323779, 112 |
| DNA323724, 12 | DNA323780, 113 |
| DNA323725, 14 | DNA323781, 114 |
| DNA323726, 15 | DNA323782, 116 |
| DNA323727, 17 | DNA323783, 118 |
| DNA323728, 19 | DNA323784, 120 |
| DNA323729, 20 | DNA323785, 122 |
| DNA323730, 22 | DNA323788, 126 |
| DNA323731, 24 | DNA323789, 127 |
| DNA323732, 26 | DNA323790, 129 |
| DNA323733, 28 | DNA323791, 130 |
| DNA323734, 29 | DNA323792, 131 |
| DNA323735, 33 | DNA323793, 133 |
| DNA323736, 34 | DNA323794, 134 |
| DNA323737, 38 | DNA323795, 135 |
| DNA323738, 40 | DNA323796, 136 |
| DNA323739, 41 | DNA323797, 137 |
| DNA323740, 46 | DNA323798, 139 |
| DNA323741, 50 | DNA323799, 140 |
| DNA323742, 52 | DNA323800, 141 |
| DNA323743, 54 | DNA323801, 142 |
| DNA323744, 55 | DNA323802, 144 |
| DNA323745, 57 | DNA323803, 145 |
| DNA323746, 58 | DNA323804, 148 |
| DNA323747, 59 | DNA323805, 150 |
| DNA323748, 60 | DNA323806, 152 |
| DNA323749, 62 | DNA323807, 154 |
| DNA323750, 64 | DNA323 808, 155 |
| DNA323751, 66 | DNA323809, 159 |
| DNA323752, 67 | DNA323810, 161 |
| DNA323753, 68 | DNA323811, 163 |
| DNA323754, 69 | DNA323812, 165 |
| DNA323755, 71 | DNA323813, 169 |
| DNA323756, 73 | DNA323814, 171 |
| DRA323757, 75 | DNA323815, 175 |
| DNA323758, 76 | DNA323816, 176 |
| DNA323759, 77 | DNA323817, 178 |
| DNA323760, 78 | DNA323818, 182 |
| DNA323761, 79 | DNA323819, 183 |
| DNA323762, 81 | DNA323820, 185 |
| DNA323763, 83 | DNA323821, 187 |
| DNA323764, 85 | DNA323822, 190 |
| DNA323765, 87 | DNA323823, 196 |
| DNA323766, 89 | DNA323824, 198 |
| DNA323767, 91 | DNA323825, 201 |
| DNA323768, 93 | DNA323826, 204 |
| DNA323769, 95 | DNA323827, 206 |
| DNA323770, 97 | DNA323828, 208 |
| DNA323829, 210 | DNA323885, 317 |
| DNA323830, 212 | DNA323886, 318 |
| DNA323831, 213 | DNA323887, 319 |
| DNA323832, 214 | DNA323888, 321 |
| DNA323833, 216 | DNA323889, 323 |
| DNA323834, 222 | DNA323890, 324 |
| DNA323835, 224 | DNA323891, 326 |
| DNA323836, 226 | DNA323892, 327 |
| DNA323837, 228 | DNA323893, 328 |
| DNA323838, 229 | DNA323894, 330 |
| DNA323839, 231 | DNA323895, 331 |
| DNA323840, 233 | DNA323896, 332 |
| DNA323841, 237 | DNA323897, 334 |
| DNA323842, 239 | DNA323898, 336 |
| DNA323843, 241 | DNA323899, 338 |
| DNA323844, 243 | DNA323900, 342 |
| DNA323845, 244 | DNA323901, 344 |
| DNA323846, 245 | DNA323902, 348 |
| DNA323847, 247 | DNA323903, 352 |
| DNA323848, 249 | DNA323904, 353 |
| DNA323849, 250 | DNA323905, 354 |
| DNA323850, 251 | DNA323906, 358 |
| DNA323851, 253 | DNA323907, 360 |
| DNA323852, 254 | DNA323908, 361 |
| DNA323853, 256 | DNA323909, 363 |
| DNA323854, 257 | DNA323910, 364 |
| DNA323855, 259 | DNA323911, 366 |
| DNA323856, 260 | DNA323912, 373 |
| DNA323857, 262 | DNA323913, 376 |
| DNA323858, 264 | DNA323914, 377 |
| DNA323859, 265 | DNA323915, 379 |
| DNA323860, 269 | DNA323916, 381 |
| DNA323861, 273 | DNA323917, 383 |
| DNA323862, 275 | DNA323918, 384 |
| DNA323863, 276 | DNA323919, 386 |
| DNA323864, 277 | DNA323920, 388 |
| DNA323865, 279 | DNA323921, 389 |
| DNA323866, 280 | DNA323922, 391 |
| DNA323867, 281 | DNA323923, 392 |
| DNA323868, 282 | DNA323924, 394 |
| DNA323869, 284 | DNA323925, 398 |
| DNA323870, 286 | DNA323926, 400 |
| DNA323871, 290 | DNA323927, 404 |
| DNA323872, 294 | DNA323928, 406 |
| DNA323873, 295 | DNA323929, 408 |
| DNA323874, 296 | DNA323930, 411 |
| DNA323875, 298 | DNA323931, 412 |
| DNA323876, 300 | DNA323932, 414 |
| DNA323877, 302 | DNA323933, 416 |
| DNA323 878, 304 | DNA323934, 418 |
| DNA323879, 306 | DNA323935, 420 |
| DNA323880, 308 | DNA323936, 422 |
| DNA323881, 310 | DNA323937, 424 |
| DNA323882, 312 | DNA323938, 426 |
| DNA323883, 314 | DNA323939, 430 |
| DNA323884, 315 | DNA323940, 432 |
| DNA323941, 433 | DNA323997, 537 |
| DNA323942, 434 | DNA323998, 538 |
| DNA323943, 440 | DNA323999, 542 |
| DNA323944, 442 | DNA324000, 543 |
| DNA323945, 444 | DNA324001, 544 |
| DNA323946, 446 | DNA324002, 547 |
| DNA323947, 448 | DNA324003, 548 |
| DNA323948, 450 | DNA324004, 552 |
| DNA323949, 451 | DNA324005, 555 |
| DNA323950, 452 | DNA324006, 557 |
| DNA323951, 454 | DNA324007, 560 |
| DNA323952, 455 | DNA324008, 561 |
| DNA323953, 459 | DNA324009, 562 |
| DNA323954, 461 | DNA324010, 564 |
| DNA323955, 463 | DNA324011, 566 |
| DNA323956, 465 | DNA324012, 567 |
| DNA323957, 466 | DNA324013, 568 |
| DNA323958, 468 | DNA324014, 569 |
| DNA323959, 470 | DNA324015, 571 |
| DNA323960, 472 | DNA324016, 573 |
| DNA323961, 473 | DNA324017, 575 |
| DNA323962, 476 | DNA324018, 580 |
| DNA323963, 477 | DNA324019, 581 |
| DNA323964, 479 | DNA324020, 582 |
| DNA323965, 481 | DNA324021, 583 |
| DNA323966, 483 | DNA324022, 587 |
| DNA323967, 484 | DNA324023, 589 |
| DNA323968, 485 | DNA324024, 591 |
| DNA323969, 486 | DNA324025, 592 |
| DNA323970, 488 | DNA324026, 593 |
| DNA323971, 490 | DNA324027, 596 |
| DNA323972, 492 | DNA324028, 598 |
| DNA323973, 493 | DNA324029, 599 |
| DNA323974, 494 | DNA324030, 600 |
| DNA323975, 495 | DNA324031, 601 |
| DNA323976, 497 | DNA324032, 602 |
| DNA323977, 501 | DNA324033, 605 |
| DNA323978, 503 | DNA324034, 606 |
| DNA323979, 505 | DNA324035, 608 |
| DNA323980, 507 | DNA324036, 610 |
| DNA323981, 509 | DNA324037, 612 |
| DNA323982, 511 | DNA324038, 614 |
| DNA323983, 513 | DNA324039, 616 |
| DNA323984, 515 | DNA324040, 618 |
| DNA323985, 517 | DNA324041, 619 |
| DNA323986, 521 | DNA324042, 620 |
| DNA323987, 522 | DNA324043, 622 |
| DNA323988, 523 | DNA324044, 626 |
| DNA323989, 524 | DNA324045, 628 |
| DNA323990, 525 | DNA324046, 630 |
| DNA323991, 527 | DNA324047, 632 |
| DNA323992, 529 | DNA324048, 634 |
| DNA323993, 531 | DNA324049, 636 |
| DNA323994, 532 | DNA324050, 638 |
| DNA323995, 534 | DNA324051, 639 |
| DNA323996, 535 | DNA324052, 641 |
| DNA324053, 642 | DNA324109, 763 |
| DNA324054, 643 | DNA324110, 764 |
| DNA324055, 645 | DNA324111, 766 |
| DNA324056, 647 | DNA324112, 768 |
| DNA324057, 653 | DNA324113, 770 |
| DNA324058, 655 | DNA324114, 771 |
| DNA324059, 657 | DNA324115, 772 |
| DNA324060, 659 | DNA324116, 773 |
| DNA324061, 661 | DNA324117, 775 |
| DNA324062, 664 | DNA324118, 776 |
| DNA324063, 665 | DNA324119, 777 |
| DNA324064, 667 | DNA324120, 779 |
| DNA324065, 669 | DNA324121, 780 |
| DNA324066, 670 | DNA324122, 782 |
| DNA324067, 672 | DNA324123, 783 |
| DNA324068, 674 | DNA324124, 784 |
| DNA324069, 676 | DNA324125, 785 |
| DNA324070, 678 | DNA324126, 787 |
| DNA324071, 680 | DNA324127, 788 |
| DNA324072, 681 | DNA324128, 789 |
| DNA324073, 683 | DNA324129, 791 |
| DNA324074, 686 | DNA324130, 796 |
| DNA324075, 690 | DNA324131, 798 |
| DNA324076, 692 | DNA324132, 800 |
| DNA324077, 694 | DNA324133, 801 |
| DNA324078, 696 | DNA324134, 805 |
| DNA324079, 700 | DNA324135, 808 |
| DNA324080, 701 | DNA324136, 810 |
| DNA324081, 705 | DNA324137, 812 |
| DNA324082, 707 | DNA324138, 816 |
| DNA324083, 709 | DNA324139, 817 |
| DNA324084, 713 | DNA324140, 818 |
| DNA324085, 715 | DNA324141, 820 |
| DNA324086, 716 | DNA324142, 822 |
| DNA324087, 717 | DNA324143, 823 |
| DNA324088, 719 | DNA324144, 824 |
| DNA324089, 721 | DNA324145, 825 |
| DNA324090, 723 | DNA324146, 827 |
| DNA324091, 725 | DNA324147, 829 |
| DNA324092, 726 | DNA324148, 831 |
| DNA324093, 727 | DNA324149, 832 |
| DNA324094, 729 | DNA324150, 834 |
| DNA324095, 731 | DNA324151, 836 |
| DNA324096, 733 | DNA324152, 838 |
| DNA324097, 734 | DNA324153, 839 |
| DNA324098, 736 | DNA324154, 841 |
| DNA324099, 738 | DNA324155, 842 |
| DNA324100, 740 | DNA324156, 843 |
| DNA324101, 743 | DNA324157, 845 |
| DNA324102, 748 | DNA324158, 847 |
| DNA324103, 749 | DNA324159, 849 |
| DNA324104, 753 | DNA324160, 850 |
| DNA324105, 755 | DNA324161, 851 |
| DNA324106, 757 | DNA324162, 853 |
| DNA324107, 759 | DNA324163, 856 |
| DNA324108, 761 | DNA324164, 857 |
| DNA324165, 858 | DNA324221, 962 |
| DNA324166, 861 | DNA324222, 964 |
| DNA324167, 862 | DNA324223, 965 |
| DNA324168, 866 | DNA324224, 966 |
| DNA324169, 867 | DNA324225, 968 |
| DNA324170, 869 | DNA324226, 970 |
| DNA324171, 871 | DNA324227, 971 |
| DNA324172, 873 | DNA324228, 973 |
| DNA324173, 875 | DNA324229, 975 |
| DNA324174, 877 | DNA324230, 979 |
| DNA324175, 878 | DNA324231, 980 |
| DNA324176, 880 | DNA324232, 982 |
| DNA324177, 883 | DNA324233, 984 |
| DNA324178, 885 | DNA324234, 985 |
| DNA324179, 887 | DNA324235, 986 |
| DNA324180, 889 | DNA324236, 988 |
| DNA324181, 891 | DNA324237, 990 |
| DNA324182, 893 | DNA324238, 992 |
| DNA324183, 894 | DNA324239, 993 |
| DNA324184, 896 | DNA324240, 996 |
| DNA324185, 900 | DNA324241, 1000 |
| DNA324186, 901 | DNA324242, 1002 |
| DNA324187, 903 | DNA324243, 1004 |
| DNA324188, 907 | DNA324244, 1006 |
| DNA324189, 909 | DNA324245, 1007 |
| DNA324190, 910 | DNA324246, 1009 |
| DNA324191, 911 | DNA324247, 1011 |
| DNA324192, 912 | DNA324248, 1012 |
| DNA324193, 914 | DNA324249, 1014 |
| DNA324194, 916 | DNA324250, 1016 |
| DNA324195, 918 | DNA324251, 1018 |
| DNA324196, 920 | DNA324252, 1020 |
| DNA324197, 921 | DNA324253, 1022 |
| DNA324198, 923 | DNA324254, 1026 |
| DNA324199, 925 | DNA324255, 1028 |
| DNA324200, 926 | DNA324256, 1029 |
| DNA324201, 927 | DNA324257, 1030 |
| DNA324202, 928 | DNA324258, 1032 |
| DNA324203, 929 | DNA324259, 1034 |
| DNA324204, 932 | DNA324260, 1036 |
| DNA324205, 933 | DNA324261, 1037 |
| DNA324206, 936 | DNA324262, 1039 |
| DNA324207, 938 | DNA324263, 1040 |
| DNA324208, 940 | DNA324264, 1041 |
| DNA324209, 941 | DNA324265, 1042 |
| DNA324210, 942 | DNA324266, 1043 |
| DNA324211, 944 | DNA324267, 1045 |
| DNA324212, 946 | DNA324268, 1047 |
| DNA324213, 948 | DNA324269, 1049 |
| DNA324214, 950 | DNA324270, 1051 |
| DNA324215, 952 | DNA324271, 1053 |
| DNA324216, 954 | DNA324272, 1055 |
| DNA324217, 955 | DNA324273, 1057 |
| DNA324218, 957 | DNA324274, 1059 |
| DNA324219, 958 | DNA324275, 1060 |
| DNA324220, 960 | DNA324276, 1064 |
| DNA324277, 1068 | DNA324333, 1186 |
| DNA324278, 1070 | DNA324334, 1187 |
| DNA324279, 1072 | DNA324335, 1190 |
| DNA324280, 1074 | DNA324336, 1192 |
| DNA324281, 1075 | DNA324337, 1193 |
| DNA324282, 1076 | DNA324338, 1197 |
| DNA324283, 1078 | DNA324339, 1198 |
| DNA324284, 1079 | DNA324340, 1199 |
| DNA324285, 1083 | DNA324341, 1201 |
| DNA324286, 1085 | DNA324342, 1202 |
| DNA324287, 1086 | DNA324343, 1203 |
| DNA324288, 1088 | DNA324344, 1204 |
| DNA324289, 1091 | DNA324345, 1205 |
| DNA324290, 1095 | DNA324346, 1206 |
| DNA324291, 1101 | DNA324347, 1208 |
| DNA324292, 1103 | DNA324348, 1209 |
| DNA324293, 1105 | DNA324349, 1211 |
| DNA324294, 1106 | DNA324350, 1213 |
| DNA324295, 1110 | DNA324351, 1214 |
| DNA324296, 1112 | DNA324352, 1216 |
| DNA324297, 1113 | DNA324353, 1218 |
| DNA324298, 1115 | DNA324354, 1220 |
| DNA324299, 1117 | DNA324355, 1221 |
| DNA324300, 1119 | DNA324356, 1225 |
| DNA324301, 1120 | DNA324357, 1227 |
| DNA324302, 1121 | DNA324358, 1229 |
| DNA324303, 1122 | DNA324359, 1231 |
| DNA324304, 1123 | DNA324360, 1232 |
| DNA324305, 1125 | DNA324361, 1234 |
| DNA324306, 1127 | DNA324362, 1235 |
| DNA324307, 1130 | DNA324363, 1237 |
| DNA324308, 1131 | DNA324364, 1238 |
| DNA324309, 1132 | DNA324365, 1240 |
| DNA324310, 1134 | DNA324366, 1242 |
| DNA324311, 1136 | DNA324367, 1243 |
| DNA324312, 1137 | DNA324368, 1244 |
| DNA324313, 1139 | DNA324369, 1245 |
| DNA324314, 1140 | DNA324370, 1246 |
| DNA324315, 1141 | DNA324371, 1248 |
| DNA324316, 1143 | DNA324372, 1250 |
| DNA324317, 1147 | DNA324373, 1252 |
| DNA324318, 1151 | DNA324374, 1254 |
| DNA324319, 1157 | DNA324375, 1255 |
| DNA324320, 1159 | DNA324376, 1256 |
| DNA324321, 1161 | DNA324377, 1258 |
| DNA324322, 1162 | DNA324378, 1260 |
| DNA324323, 1163 | DNA324379, 1262 |
| DNA324324, 1167 | DNA324380, 1263 |
| DNA324325, 1169 | DNA324381, 1264 |
| DNA324326, 1170 | DNA324382, 1265 |
| DNA324327, 1172 | DNA324383, 1266 |
| DNA324328, 1174 | DNA324384, 1267 |
| DNA324329, 1176 | DNA324385, 1268 |
| DNA324330, 1178 | DNA324386, 1272 |
| DNA324331, 1180 | DNA324387, 1274 |
| DNA324332, 1184 | DNA324388, 1275 |
| DNA324389, 1276 | DNA324445, 1376 |
| DNA324390, 1278 | DNA324446, 1378 |
| DNA324391, 1280 | DNA324447, 1380 |
| DNA324392, 1282 | DNA324448, 1382 |
| DNA324393, 1284 | DNA324449, 1384 |
| DNA324394, 1286 | DNA324450, 1388 |
| DNA324395, 1288 | DNA324451, 1390 |
| DNA324396, 1289 | DNA324452, 1392 |
| DNA324397, 1290 | DNA324453, 1394 |
| DNA324398, 1291 | DNA324454, 1396 |
| DNA324399, 1292 | DNA324455, 1398 |
| DNA324400, 1294 | DNA324456, 1400 |
| DNA324401, 1295 | DNA324457, 1402 |
| DNA324402, 1296 | DNA324458, 1404 |
| DNA324403, 1297 | DNA324459, 1406 |
| DNA324404, 1299 | DNA324460, 1408 |
| DNA324405, 1300 | DNA324461, 1410 |
| DNA324406, 1302 | DNA324462, 1412 |
| DNA324407, 1304 | DNA324463, 1413 |
| DNA324408, 1306 | DNA324464, 1414 |
| DNA324409, 1308 | DNA324465, 1416 |
| DNA324410, 1310 | DNA324466, 1417 |
| DNA324411, 1312 | DNA324467, 1418 |
| DNA324412, 1313 | DNA324468, 1419 |
| DNA324413, 1314 | DNA324469, 1421 |
| DNA324414, 1315 | DNA324470, 1423 |
| DNA324415, 1318 | DNA324471, 1424 |
| DNA324416, 1320 | DNA324472, 1425 |
| DNA324417, 1322 | DNA324473, 1427 |
| DNA324418, 1323 | DNA324474, 1429 |
| DNA324419, 1325 | DNA324475, 1430 |
| DNA324420, 1329 | DNA324476, 1432 |
| DNA324421, 1332 | DNA324478, 1433 |
| DNA324422, 1333 | DNA324479, 1434 |
| DNA324423, 1337 | DNA324480, 1435 |
| DNA324424, 1338 | DNA324481, 1439 |
| DNA324425, 1340 | DNA324482, 1440 |
| DNA324426, 1341 | DNA324483, 1441 |
| DNA324427, 1343 | DNA324484, 1442 |
| DNA324428, 1344 | DNA324485, 1443 |
| DNA324429, 1345 | DNA324486, 1445 |
| DNA324430, 1347 | DNA324487, 1448 |
| DNA324431, 1348 | DNA324488, 1449 |
| DNA324432, 1350 | DNA324489, 1451 |
| DNA324433, 1354 | DNA324490, 1452 |
| DNA324434, 1356 | DNA324491, 1453 |
| DNA324435, 1358 | DNA324492, 1455 |
| DNA324436, 1359 | DNA324493, 1456 |
| DNA324437, 1360 | DNA324494, 1457 |
| DNA324438, 1361 | DNA324495, 1461 |
| DNA324439, 1363 | DNA324496, 1463 |
| DNA324440, 1364 | DNA324497, 1464 |
| DNA324441, 1365 | DNA324498, 1465 |
| DNA324442, 1366 | DNA324499, 1466 |
| DNA324443, 1372 | DNA324500, 1468 |
| DNA324444, 1374 | DNA324501, 1469 |
| DNA324502, 1470 | DNA324559, 1556 |
| DNA324503, 1471 | DNA324560, 1557 |
| DNA324504, 1472 | DNA324561, 1559 |
| DNA324505, 1473 | DNA324562, 1561 |
| DNA324506, 1474 | DNA324563, 1562 |
| DNA324507, 1476 | DNA324564, 1564 |
| DNA324508, 1477 | DNA324565, 1565 |
| DNA324509, 1478 | DNA324566, 1567 |
| DNA324510, 1480 | DNA324567, 1568 |
| DNA324511, 1482 | DNA324568, 1570 |
| DNA324512, 1483 | DNA324569, 1572 |
| DNA324513, 1484 | DNA324570, 1575 |
| DNA324514, 1485 | DNA324571, 1577 |
| DNA324515, 1487 | DNA324572, 1579 |
| DNA324516, 1491 | DNA324573, 1581 |
| DNA324517, 1493 | DNA324574, 1584 |
| DNA324518, 1494 | DNA324575, 1586 |
| DNA324519, 1496 | DNA324576, 1587 |
| DNA324520, 1497 | DNA324577, 1588 |
| DNA324521, 1499 | DNA324578, 1590 |
| DNA324522, 1500 | DNA324579, 1591 |
| DNA324523, 1502 | DNA324580, 1592 |
| DNA324524, 1504 | DNA324581, 1593 |
| DNA324525, 1506 | DNA324582, 1595 |
| DNA324526, 1510 | DNA324583, 1596 |
| DNA324527, 1513 | DNA324584, 1597 |
| DNA324528, 1517 | DNA324585, 1600 |
| DNA324529, 1519 | DNA324586, 1602 |
| DNA324530, 1520 | DNA324587, 1604 |
| DNA324531, 1522 | DNA324588, 1606 |
| DNA324532, 1524 | DNA324589, 1608 |
| DNA324533, 1525 | DNA324590, 1609 |
| DNA324534, 1526 | DNA324591, 1610 |
| DNA324535, 1528 | DNA324592, 1611 |
| DNA324536, 1530 | DNA324593, 1612 |
| DNA324537, 1531 | DNA324594, 1614 |
| DNA324538, 1532 | DNA324595, 1615 |
| DNA324539, 1533 | DNA324596, 1617 |
| DNA324540, 1534 | DNA324597, 1619 |
| DNA324541, 1535 | DNA324598, 1621 |
| DNA324542, 1537 | DNA324599, 1622 |
| DNA324543, 1539 | DNA324600, 1623 |
| DNA324544, 1540 | DNA324601, 1624 |
| DNA324545, 1541 | DNA324602, 1626 |
| DNA324546, 1543 | DNA324603, 1629 |
| DNA324547, 1544 | DNA324604, 1631 |
| DNA324548, 1545 | DNA324605, 1632 |
| DNA324549, 1547 | DNA324606, 1634 |
| DNA324550, 1548 | DNA324607, 1636 |
| DNA324551, 1549 | DNA324608, 1640 |
| DNA324552, 1550 | DNA324609, 1641 |
| DNA324554, 1551 | DNA324610, 1644 |
| DNA324555, 1552 | DNA324611, 1648 |
| DNA324556, 1553 | DNA324612, 1650 |
| DNA324557, 1554 | DNA324613, 1652 |
| DNA324558, 1555 | DNA324614, 1654 |
| DNA324615, 1655 | DNA324671, 1768 |
| DNA324616, 1656 | DNA324672, 1770 |
| DNA324617, 1658 | DNA324673, 1772 |
| DNA324618, 1660 | DNA324674, 1774 |
| DNA324619, 1662 | DNA324675, 1776 |
| DNA324620, 1663 | DNA324676, 1778 |
| DNA324621, 1664 | DNA324677, 1779 |
| DNA324622, 1666 | DNA324678, 1781 |
| DNA324623, 1668 | DNA324679, 1783 |
| DNA324624, 1669 | DNA324680, 1785 |
| DNA324625, 1670 | DNA324681, 1787 |
| DNA324626, 1673 | DNA324682, 1789 |
| DNA324627, 1675 | DNA324683, 1793 |
| DNA324628, 1679 | DNA324684, 1795 |
| DNA324629, 1681 | DNA324685, 1797 |
| DNA324630, 1683 | DNA324686, 1798 |
| DNA324631, 1685 | DNA324687, 1799 |
| DNA324632, 1691 | DNA324688, 1800 |
| DNA324633, 1693 | DNA324689, 1802 |
| DNA324634, 1695 | DNA324690, 1803 |
| DNA324635, 1699 | DNA324691, 1805 |
| DNA324636, 1700 | DNA324692, 1807 |
| DNA324637, 1701 | DNA324693, 1808 |
| DNA324638, 1702 | DNA324694, 1810 |
| DNA324639, 1704 | DNA324695, 1811 |
| DNA324640, 1706 | DNA324696, 1814 |
| DNA324641, 1708 | DNA324697, 1816 |
| DNA324642, 1710 | DNA324698, 1817 |
| DNA324643, 1711 | DNA324699, 1818 |
| DNA324644, 1712 | DNA324700, 1819 |
| DNA324645, 1713 | DNA324701, 1820 |
| DNA324646, 1714 | DNA324702, 1821 |
| DNA324647, 1716 | DNA324703, 1823 |
| DNA324648, 1720 | DNA324704, 1824 |
| DNA324649, 1723 | DNA324705, 1826 |
| DNA324650, 1724 | DNA324706, 1832 |
| DNA324651, 1726 | DNA324707, 1834 |
| DNA324652, 1728 | DNA324708, 1836 |
| DNA324653, 1730 | DNA324709, 1838 |
| DNA324654, 1734 | DNA324710, 1840 |
| DNA324655, 1736 | DNA324711, 1841 |
| DNA324656, 1738 | DNA324712, 1842 |
| DNA324657, 1740 | DNA324713, 1843 |
| DNA324658, 1742 | DNA324714, 1845 |
| DNA324659, 1744 | DNA324715, 1846 |
| DNA324660, 1746 | DNA324716, 1848 |
| DNA324661, 1748 | DNA324717, 1852 |
| DNA324662, 1750 | DNA324718, 1856 |
| DNA324663, 1752 | DNA324719, 1857 |
| DNA324664, 1754 | DNA324720, 1858 |
| DNA324665, 1756 | DNA324721, 1859 |
| DNA324666, 1758 | DNA324722, 1860 |
| DNA324667, 1760 | DNA324723, 1861 |
| DNA324668, 1762 | DNA324724, 1862 |
| DNA324669, 1764 | DNA324725, 1863 |
| DNA324670, 1766 | DNA324726, 1865 |
| DNA324727, 1868 | DNA324784, 1988 |
| DNA324728, 1870 | DNA324785, 1990 |
| DNA324729, 1872 | DNA324786, 1992 |
| DNA324730, 1876 | DNA324787, 1994 |
| DNA324731, 1877 | DNA324788, 1995 |
| DNA324732, 1878 | DNA324789, 1999 |
| DNA324733, 1879 | DNA324790, 2000 |
| DNA324734, 1880 | DNA324791, 2002 |
| DNA324735, 1882 | DNA324792, 2004 |
| DNA324736, 1883 | DNA324793, 2006 |
| DNA324737, 1884 | DNA324794, 2009 |
| DNA324738, 1888 | DNA324795, 2011 |
| DNA324739, 1890 | DNA324796, 2013 |
| DNA324740, 1894 | DNA324797, 2015 |
| DNA324741, 1896 | DNA324798, 2016 |
| DNA324742, 1898 | DNA324799, 2017 |
| DNA324743, 1902 | DNA324800, 2019 |
| DNA324744, 1906 | DNA324801, 2021 |
| DNA324745, 1910 | DNA324802, 2023 |
| DNA324746, 1914 | DNA324803, 2025 |
| DNA324747, 1916 | DNA324804, 2027 |
| DNA324748, 1918 | DNA324805, 2029 |
| DNA324749, 1920 | DNA324806, 2031 |
| DNA324750, 1921 | DNA324807, 2036 |
| DNA324751, 1922 | DNA324808, 2037 |
| DNA324752, 1924 | DNA324809, 2039 |
| DNA324753, 1926 | DNA324810, 2041 |
| DNA324754, 1928 | DNA324811, 2042 |
| DNA324755, 1929 | DNA324812, 2044 |
| DNA324756, 1931 | DNA324813, 2045 |
| DNA324757, 1932 | DNA324814, 2047 |
| DNA324758, 1934 | DNA324815, 2049 |
| DNA324759, 1936 | DNA324816, 2050 |
| DNA324760, 1937 | DNA324817, 2052 |
| DNA324761, 1938 | DNA324818, 2054 |
| DNA324763, 1939 | DNA324819, 2056 |
| DNA324764, 1940 | DNA324820, 2057 |
| DNA324765, 1941 | DNA324821, 2058 |
| DNA324766, 1944 | DNA324822, 2059 |
| DNA324767, 1948 | DNA324823, 2060 |
| DNA324768, 1949 | DNA324824, 2062 |
| DNA324769, 1951 | DNA324825, 2064 |
| DNA324770, 1954 | DNA324826, 2065 |
| DNA324771, 1955 | DNA324827, 2066 |
| DNA324772, 1956 | DNA324828, 2068 |
| DNA324773, 1957 | DNA324829, 2069 |
| DNA324774, 1959 | DNA324830, 2072 |
| DNA324775, 1965 | DNA324831, 2074 |
| DNA324776, 1971 | DNA324832, 2075 |
| DNA324777, 1973 | DNA324833, 2077 |
| DNA324778, 1975 | DNA324834, 2079 |
| DNA324779, 1977 | DNA324835, 2080 |
| DNA324780, 1979 | DNA324836, 2081 |
| DNA324781, 1981 | DNA324837, 2083 |
| DNA324782, 1983 | DNA324838, 2085 |
| DNA324783, 1984 | DNA324839, 2087 |
| DNA324840, 2089 | DNA324897, 2184 |
| DNA324841, 2090 | DNA324898, 2186 |
| DNA324842, 2091 | DNA324899, 2188 |
| DNA324843, 2092 | DNA324900, 2190 |
| DNA324844, 2094 | DNA324901, 2191 |
| DNA324845, 2096 | DNA324902, 2195 |
| DNA324846, 2098 | DNA324903, 2197 |
| DNA324847, 2101 | DNA324904, 2198 |
| DNA324848, 2103 | DNA324905, 2200 |
| DNA324849, 2106 | DNA324906, 2202 |
| DNA324850, 2107 | DNA324907, 2203 |
| DNA324851, 2108 | DNA324908, 2204 |
| DNA324852, 2110 | DNA324909, 2205 |
| DNA324853, 2111 | DNA324910, 2208 |
| DNA324854, 2113 | DNA324911, 2210 |
| DNA324855, 2114 | DNA324912, 2212 |
| DNA324856, 2116 | DNA324913, 2214 |
| DNA324857, 2118 | DNA324914, 2216 |
| DNA324858, 2119 | DNA324915, 2218 |
| DNA324859, 2121 | DNA324916, 2219 |
| DNA324860, 2122 | DNA324917, 2220 |
| DNA324861, 2123 | DNA324918, 2222 |
| DNA324862, 2124 | DNA324919, 2224 |
| DNA324863, 2126 | DNA324920, 2225 |
| DNA324864, 2128 | DNA324921, 2226 |
| DNA324865, 2130 | DNA324922, 2228 |
| DNA324866, 2131 | DNA324923, 2230 |
| DNA324867, 2132 | DNA324924, 2234 |
| DNA324868, 2134 | DNA324925, 2236 |
| DNA324870, 2135 | DNA324926, 2238 |
| DNA324871, 2137 | DNA324927, 2240 |
| DNA324872, 2139 | DNA324928, 2244 |
| DNA324873, 2140 | DNA324929, 2245 |
| DNA324874, 2141 | DNA324930, 2248 |
| DNA324875, 2142 | DNA324931, 2249 |
| DNA324876, 2144 | DNA324932, 2251 |
| DNA324877, 2145 | DNA324933, 2253 |
| DNA324878, 2146 | DNA324934, 2256 |
| DNA324879, 2147 | DNA324935, 2258 |
| DNA324880, 2148 | DNA324936, 2259 |
| DNA324881, 2150 | DNA324937, 2260 |
| DNA324882, 2152 | DNA324938, 2264 |
| DNA324883, 2154 | DNA324939, 2267 |
| DNA324884, 2155 | DNA324940, 2269 |
| DNA324885, 2157 | DNA324941, 2271 |
| DNA324886, 2159 | DNA324942, 2273 |
| DNA324887, 2160 | DNA324943, 2276 |
| DNA324888, 2161 | DNA324944, 2278 |
| DNA324889, 2163 | DNA324945, 2280 |
| DNA324890, 2165 | DNA324946, 2281 |
| DNA324891, 2167 | DNA324947, 2282 |
| DNA324892, 2168 | DNA324948, 2284 |
| DNA324893, 2170 | DNA324949, 2286 |
| DNA324894, 2172 | DNA324950, 2288 |
| DNA324895, 2178 | DNA324951, 2290 |
| DNA324896, 2180 | DNA324952, 2292 |
| DNA324953, 2293 | DNA325010, 2395 |
| DNA324954, 2295 | DNA325011, 2396 |
| DNA324955, 2297 | DNA325012, 2398 |
| DNA324956, 2299 | DNA325013, 2400 |
| DNA324957, 2300 | DNA325014, 2402 |
| DNA324958, 2301 | DNA325015, 2403 |
| DNA324959, 2302 | DNA325016, 2404 |
| DNA324960, 2304 | DNA325017, 2406 |
| DNA324961, 2306 | DNA325018, 2407 |
| DNA324962, 2310 | DNA325019, 2409 |
| DNA324963, 2311 | DNA325020, 2411 |
| DNA324964, 2312 | DNA325021, 2413 |
| DNA324965, 2313 | DNA325022, 2414 |
| DNA324966, 2315 | DNA325023, 2416 |
| DNA324967, 2316 | DNA325024, 2417 |
| DNA324968, 2317 | DNA325025, 2418 |
| DNA324969, 2318 | DNA325026, 2420 |
| DNA324971, 2319 | DNA325027, 2422 |
| DNA324972, 2321 | DNA325028, 2423 |
| DNA324973, 2322 | DNA325029, 2425 |
| DNA324974, 2323 | DNA325030, 2427 |
| DNA324975, 2325 | DNA325031, 2429 |
| DNA324976, 2326 | DNA325032, 2430 |
| DNA324977, 2328 | DNA325033, 2432 |
| DNA324978, 2329 | DNA325034, 2433 |
| DNA324979, 2331 | DNA325035, 2434 |
| DNA324980, 2333 | DNA325036, 2437 |
| DNA324981, 2335 | DNA325037, 2439 |
| DNA324982, 2337 | DNA325038, 2440 |
| DNA324983, 2338 | DNA325039, 2442 |
| DNA324984, 2340 | DNA325040, 2444 |
| DNA324985, 2344 | DNA325041, 2446 |
| DNA324986, 2346 | DNA325042, 2447 |
| DNA324987, 2350 | DNA325043, 2449 |
| DNA324988, 2351 | DNA325044, 2451 |
| DNA324989, 2352 | DNA325045, 2453 |
| DNA324990, 2353 | DNA325046, 2454 |
| DNA324991, 2355 | DNA325047, 2455 |
| DNA324992, 2357 | DNA325048, 2456 |
| DNA324993, 2360 | DNA325049, 2460 |
| DNA324994, 2363 | DNA325050, 2462 |
| DNA324995, 2365 | DNA325051, 2464 |
| DNA324996, 2367 | DNA325052, 2466 |
| DNA324997, 2369 | DNA325053, 2467 |
| DNA324998, 2373 | DNA325054, 2469 |
| DNA324999, 2375 | DNA325055, 2470 |
| DNA325000, 2376 | DNA325056, 2471 |
| DNA325001, 2378 | DNA325057, 2472 |
| DNA325002, 2380 | DNA325058, 2473 |
| DNA325003, 2381 | DNA325059, 2475 |
| DNA325004, 2383 | DNA325060, 2476 |
| DNA325005, 2385 | DNA325061, 2478 |
| DNA325006, 2386 | DNA325062, 2480 |
| DNA325007, 2387 | DNA325063, 2482 |
| DNA325008, 2389 | DNA325064, 2483 |
| DNA325009, 2391 | DNA325065, 2485 |
| DNA325066, 2487 | DNA325122, 2586 |
| DNA325067, 2488 | DNA325123, 2588 |
| DNA325068, 2490 | DNA325124, 2590 |
| DNA325069, 2493 | DNA325125, 2592 |
| DNA325070, 2497 | DNA325126, 2595 |
| DNA325071, 2499 | DNA325127, 2596 |
| DNA325072, 2501 | DNA325128, 2598 |
| DNA325073, 2503 | DNA325129, 2602 |
| DNA325074, 2505 | DNA325130, 2604 |
| DNA325075, 2508 | DNA325131, 2605 |
| DNA325076, 2510 | DNA325132, 2606 |
| DNA325077, 2514 | DNA325133, 2608 |
| DNA325078, 2515 | DNA325134, 2609 |
| DNA325079, 2517 | DNA325135, 2611 |
| DNA325080, 2519 | DNA325136, 2612 |
| DNA325081, 2521 | DNA325137, 2613 |
| DNA325082, 2523 | DNA325138, 2614 |
| DNA325083, 2525 | DNA325139, 2616 |
| DNA325084, 2526 | DNA325140, 2618 |
| DNA325085, 2527 | DNA325141, 2619 |
| DNA325086, 2529 | DNA325143, 2620 |
| DNA325087, 2530 | DNA325144, 2622 |
| DNA325088, 2531 | DNA325145, 2623 |
| DNA325089, 2533 | DNA325146, 2625 |
| DNA325090, 2534 | DNA325147, 2626 |
| DNA325091, 2536 | DNA325148, 2627 |
| DNA325092, 2538 | DNA325149, 2628 |
| DNA325093, 2540 | DNA325150, 2629 |
| DNA325094, 2541 | DNA325151, 2631 |
| DNA325095, 2543 | DNA325152,2633 |
| DNA325096, 2544 | DNA325153, 2635 |
| DNA325097, 2548 | DNA325154, 2637 |
| DNA325098, 2550 | DNA325155, 2638 |
| DNA325099, 2552 | DNA325156, 2640 |
| DNA325100, 2554 | DNA325157, 2641 |
| DNA325101, 2556 | DNA325158, 2642 |
| DNA325102, 2557 | DNA325159, 2644 |
| DNA325103, 2558 | DNA325160, 2645 |
| DNA325104, 2559 | DNA325161, 2646 |
| DNA325105, 2560 | DNA325162, 2647 |
| DNA325106, 2561 | DNA325163,2649 |
| DNA325107, 2562 | DNA325164, 2651 |
| DNA325108, 2563 | DNA325165, 2653 |
| DNA325109, 2564 | DNA325166, 2655 |
| DNA325110, 2567 | DNA325167, 2657 |
| DNA325111, 2569 | DNA325168, 2659 |
| DNA325112, 2571 | DNA325169, 2664 |
| DNA325113, 2572 | DNA325170, 2666 |
| DNA325114, 2574 | DNA325171, 2668 |
| DNA325115, 2575 | DNA325172, 2672 |
| DNA325116, 2577 | DNA325173, 2673 |
| DNA325117, 2579 | DNA325174, 2675 |
| DNA325118, 2581 | DNA325175, 2677 |
| DNA325119, 2582 | DNA325176, 2679 |
| DNA325120, 2583 | DNA325177, 2682 |
| DNA325121, 2584 | DNA325178, 2684 |
| DNA325179, 2686 | DNA325235, 2803 |
| DNA325180, 2688 | DNA325236, 2804 |
| DNA325181, 2689 | DNA325237, 2806 |
| DNA325182, 2697 | DNA325238, 2808 |
| DNA325183, 2699 | DNA325239, 2809 |
| DNA325184, 2700 | DNA325240, 2811 |
| DNA325185, 2705 | DNA325241, 2813 |
| DNA325186, 2707 | DNA325242, 2815 |
| DNA325187, 2708 | DNA325243, 2817 |
| DNA325188, 2710 | DNA325244, 2818 |
| DNA325189, 2711 | DNA325245, 2819 |
| DNA325190, 2712 | DNA325246, 2820 |
| DNA325191, 2716 | DNA325247, 2822 |
| DNA325192, 2718 | DNA325248, 2824 |
| DNA325193, 2720 | DNA325249, 2825 |
| DNA325194, 2722 | DNA325250, 2826 |
| DNA325195, 2725 | DNA325251, 2828 |
| DNA325196, 2726 | DNA325252, 2830 |
| DNA325197, 2727 | DNA325253, 2832 |
| DNA325198, 2728 | DNA325254, 2833 |
| DNA325199, 2730 | DNA325255, 2834 |
| DNA325200, 2732 | DNA325256, 2836 |
| DNA325201, 2736 | DNA325257, 2838 |
| DNA325202, 2738 | DNA325258, 2839 |
| DNA325203, 2742 | DNA325259, 2841 |
| DNA325204, 2744 | DNA325260, 2843 |
| DNA325205, 2748 | DNA325261, 2845 |
| DNA325206, 2750 | DNA325262, 2846 |
| DNA325207, 2753 | DNA325263, 2847 |
| DNA325208, 2755 | DNA325264, 2849 |
| DNA325209, 2756 | DNA325265, 2851 |
| DNA325210, 2757 | DNA325266, 2852 |
| DNA325211, 2759 | DNA325267, 2854 |
| DNA325212, 2760 | DNA325268, 2855 |
| DNA325213, 2765 | DNA325269, 2857 |
| DNA325214, 2766 | DNA325270, 2859 |
| DNA325215, 2769 | DNA325271, 2860 |
| DNA325216, 2771 | DNA325272, 2862 |
| DNA325217, 2772 | DNA325273, 2864 |
| DNA325218, 2774 | DNA325274, 2866 |
| DNA325219, 2775 | DNA325275, 2868 |
| DNA325220, 2777 | DNA325276, 2870 |
| DNA325221, 2778 | DNA325277, 2871 |
| DNA325222, 2780 | DNA325278, 2873 |
| DNA325223, 2784 | DNA325279, 2874 |
| DNA325224, 2786 | DNA325280, 2875 |
| DNA325225, 2787 | DNA325281, 2876 |
| DNA325226, 2789 | DNA325282, 2878 |
| DNA325227, 2790 | DNA325283, 2879 |
| DNA325228, 2792 | DNA325284, 2881 |
| DNA325229, 2794 | DNA325285, 2883 |
| DNA325230, 2798 | DNA325286, 2885 |
| DNA325231, 2799 | DNA325287, 2887 |
| DNA325232, 2800 | DNA325288, 2889 |
| DNA325233, 2801 | DNA325289, 2891 |
| DNA325234, 2802 | DNA325290, 2893 |
| DNA325291, 2895 | DNA325347, 3000 |
| DNA325292, 2897 | DNA325348, 3002 |
| DNA325293, 2898 | DNA325349, 3006 |
| DNA325294, 2901 | DNA325350, 3010 |
| DNA325295, 2902 | DNA325351, 3012 |
| DNA325296, 2904 | DNA325352, 3013 |
| DNA325297, 2906 | DNA325353, 3015 |
| DNA325298, 2908 | DNA325354, 3016 |
| DNA325299, 2909 | DNA325355, 3017 |
| DNA325300, 2910 | DNA325356, 3019 |
| DNA325301, 2911 | DNA325357, 3020 |
| DNA325302, 2913 | DNA325358, 3022 |
| DNA325303, 2914 | DNA325359, 3024 |
| DNA325304, 2916 | DNA325360, 3026 |
| DNA325305, 2918 | DNA325361, 3028 |
| DNA325306, 2919 | DNA325362, 3029 |
| DNA325307, 2921 | DNA325363, 3031 |
| DNA325308, 2922 | DNA325364, 3033 |
| DNA325309, 2923 | DNA325365, 3035 |
| DNA325310, 2925 | DNA325366, 3037 |
| DNA325311, 2926 | DNA325367, 3039 |
| DNA325312, 2927 | DNA325368, 3041 |
| DNA325313, 2929 | DNA325369, 3042 |
| DNA325314, 2930 | DNA325370, 3044 |
| DNA325315, 2931 | DNA325371, 3045 |
| DNA325316, 2933 | DNA325372, 3047 |
| DNA325317, 2934 | DNA325373, 3049 |
| DNA325318, 2935 | DNA325374, 3053 |
| DNA325319, 2937 | DNA325375, 3055 |
| DNA325320, 2939 | DNA325376, 3057 |
| DNA325321, 2941 | DNA325377, 3058 |
| DNA325322, 2942 | DNA325378, 3059 |
| DNA325323, 2944 | DNA325379, 3061 |
| DNA325324, 2945 | DNA325380, 3063 |
| DNA325325, 2949 | DNA325381, 3065 |
| DNA325326, 2953 | DNA325382, 3068 |
| DNA325327, 2955 | DNA325383, 3070 |
| DNA325328, 2957 | DNA325384, 3072 |
| DNA325329, 2959 | DNA325385, 3073 |
| DNA325330, 2963 | DNA325386, 3074 |
| DNA325331, 2966 | DNA325387, 3075 |
| DNA325332, 2968 | DNA325388, 3078 |
| DNA325333, 2970 | DNA325389, 3080 |
| DNA325334, 2971 | DNA325390, 3082 |
| DNA325335, 2973 | DNA325391, 3084 |
| DNA325336, 2975 | DNA325392, 3086 |
| DNA325337, 2976 | DNA325393, 3088 |
| DNA325338, 2977 | DNA325394, 3089 |
| DNA325339, 2978 | DNA325395, 3091 |
| DNA325340, 2980 | DNA325396, 3095 |
| DNA325341, 2984 | DNA325397, 3097 |
| DNA325342, 2988 | DNA325398, 3099 |
| DNA325343, 2992 | DNA325399, 3103 |
| DNA325344, 2994 | DNA325400, 3104 |
| DNA325345, 2998 | DNA325401, 3106 |
| DNA325346, 2999 | DNA325402, 3107 |
| DNA325403, 3111 | DNA325459, 3212 |
| DNA325404, 3115 | DNA325460, 3214 |
| DNA325405, 3117 | DNA325461, 3217 |
| DNA325406, 3119 | DNA325462, 3222 |
| DNA325407, 3120 | DNA325463, 3223 |
| DNA325408, 3122 | DNA325464, 3224 |
| DNA325409, 3124 | DNA325465, 3225 |
| DNA325410, 3125 | DNA325466, 3227 |
| DNA325411, 3127 | DNA325467, 3228 |
| DNA325412, 3129 | DNA325468, 3230 |
| DNA325413, 3131 | DNA325469, 3232 |
| DNA325414, 3133 | DNA325470, 3234 |
| DNA325415, 3135 | DNA325471, 3238 |
| DNA325416, 3136 | DNA325472, 3240 |
| DNA325417, 3137 | DNA325473, 3242 |
| DNA325418, 3139 | DNA325474, 3244 |
| DNA325419, 3141 | DNA325475, 3247 |
| DNA325420, 3142 | DNA325476, 3248 |
| DNA325421, 3144 | DNA325477, 3249 |
| DNA325422, 3146 | DNA325478, 3251 |
| DNA325423, 3148 | DNA325479, 3253 |
| DNA325424, 3149 | DNA325480, 3255 |
| DNA325425, 3151 | DNA325481, 3256 |
| DNA325426, 3152 | DNA325482, 3258 |
| DNA325427, 3153 | DNA325483, 3260 |
| DNA325428, 3155 | DNA325484, 3261 |
| DNA325429, 3157 | DNA325485, 3263 |
| DNA325430, 3159 | DNA325486, 3264 |
| DNA325431, 3161 | DNA325487, 3266 |
| DNA325432, 3163 | DNA325488, 3268 |
| DNA325433, 3165 | DNA325489, 3269 |
| DNA325434, 3167 | DNA325490, 3270 |
| DNA325435, 3169 | DNA325491, 3271 |
| DNA325436, 3170 | DNA325492, 3273 |
| DNA325437, 3171 | DNA325493, 3275 |
| DNA325438, 3173 | DNA325494, 3276 |
| DNA325439, 3177 | DNA325495, 3278 |
| DNA325440, 3178 | DNA325496, 3279 |
| DNA325441, 3180 | DNA325497, 3281 |
| DNA325442, 3182 | DNA325498, 3283 |
| DNA325443, 3183 | DNA325499, 3286 |
| DNA325444, 3184 | DNA325500, 3287 |
| DNA325445, 3185 | DNA325501, 3288 |
| DNA325446, 3187 | DNA325502, 3289 |
| DNA325447, 3188 | DNA325503, 3291 |
| DNA325448, 3190 | DNA325504, 3293 |
| DNA325449, 3192 | DNA325505, 3294 |
| DNA325450, 3193 | DNA325506, 3299 |
| DNA325451, 3194 | DNA325507, 3301 |
| DNA325452, 3195 | DNA325508, 3303 |
| DNA325453, 3196 | DNA325509, 3304 |
| DNA325454, 3197 | DNA325510, 3306 |
| DNA325455, 3199 | DNA325511, 3308 |
| DNA325456, 3201 | DNA325512, 3310 |
| DNA325457, 3202 | DNA325513, 3311 |
| DNA325458, 3210 | DNA325514, 3315 |
| DNA325515, 3316 | DNA325571, 3417 |
| DNA325516, 3318 | DNA325572, 3418 |
| DNA325517, 3320 | DNA325573, 3420 |
| DNA325518, 3322 | DNA325574, 3422 |
| DNA325519, 3324 | DNA325575, 3424 |
| DNA325520, 3325 | DNA325576, 3426 |
| DNA325521, 3326 | DNA325577, 3427 |
| DNA325522, 3328 | DNA325578, 3428 |
| DNA325523, 3331 | DNA325579, 3429 |
| DNA325524, 3335 | DNA325580, 3430 |
| DNA325525, 3336 | DNA325581, 3432 |
| DNA325526, 3337 | DNA325582, 3436 |
| DNA325527, 3339 | DNA325583, 3437 |
| DNA325528, 3341 | DNA325584, 3439 |
| DNA325529, 3342 | DNA325585, 3441 |
| DNA325530, 3344 | DNA325586, 3442 |
| DNA325531, 3346 | DNA325587, 3444 |
| DNA325532, 3348 | DNA325588, 3446 |
| DNA325533, 3349 | DNA325589, 3448 |
| DNA325534, 3350 | DNA325590, 3450 |
| DNA325535, 3352 | DNA325591, 3451 |
| DNA325536, 3353 | DNA325592, 3454 |
| DNA325537, 3355 | DNA325593, 3455 |
| DNA325538, 3357 | DNA325594, 3457 |
| DNA325539, 3358 | DNA325595, 3458 |
| DNA325540, 3359 | DNA325596, 3460 |
| DNA325541, 3361 | DNA325597, 3462 |
| DNA325542, 3363 | DNA325598, 3463 |
| DNA325543, 3364 | DNA325599, 3465 |
| DNA325544, 3365 | DNA325600, 3470 |
| DNA325545, 3366 | DNA325601, 3472 |
| DNA325546, 3367 | DNA325602, 3475 |
| DNA325547, 3369 | DNA325603, 3482 |
| DNA325548, 3371 | DNA325604, 3483 |
| DNA325549, 3373 | DNA325605, 3485 |
| DNA325550, 3374 | DNA325606, 3486 |
| DNA325551, 3378 | DNA325607, 3488 |
| DNA325552, 3382 | DNA325608, 3491 |
| DNA325553, 3384 | DNA325609, 3493 |
| DNA325554, 3386 | DNA325610, 3494 |
| DNA325555, 3388 | DNA325611, 3495 |
| DNA325556, 3394 | DNA325612, 3496 |
| DNA325557, 3395 | DNA325613, 3500 |
| DNA325558, 3397 | DNA325614, 3501 |
| DNA325559, 3398 | DNA325615, 3503 |
| DNA325560, 3399 | DNA325616, 3504 |
| DNA325561, 3400 | DNA325617, 3506 |
| DNA325562, 3401 | DNA325618, 3507 |
| DNA325563, 3403 | DNA325619, 3509 |
| DNA325564, 3404 | DNA325620, 3513 |
| DNA325565, 3406 | DNA325621, 3515 |
| DNA325566, 3407 | DNA325622, 3517 |
| DNA325567, 3409 | DNA325623, 3519 |
| DNA325568, 3411 | DNA325624, 3522 |
| DNA325569, 3413 | DNA325625, 3528 |
| DNA325570, 3414 | DNA325626, 3529 |
| DNA325627, 3531 | DNA325683, 3634 |
| DNA325628, 3532 | DNA325684, 3635 |
| DNA325629, 3533 | DNA325685, 3636 |
| DNA325630, 3535 | DNA325686, 3638 |
| DNA325631, 3536 | DNA325687, 3640 |
| DNA325632, 3538 | DNA325688, 3641 |
| DNA325633, 3539 | DNA325689, 3642 |
| DNA325634, 3540 | DNA325690, 3643 |
| DNA325635, 3542 | DNA325691, 3645 |
| DNA325636, 3543 | DNA325692, 3646 |
| DNA325637, 3545 | DNA325693, 3648 |
| DNA325638, 3546 | DNA325694, 3650 |
| DNA325639, 3548 | DNA325695, 3652 |
| DNA325640, 3552 | DNA325696, 3654 |
| DNA325641, 3554 | DNA325697, 3656 |
| DNA325642, 3557 | DNA325698, 3658 |
| DNA325643, 3559 | DNA325699, 3659 |
| DNA325644, 3560 | DNA325700, 3660 |
| DNA325645, 3561 | DNA325701, 3662 |
| DNA325646, 3562 | DNA325702, 3663 |
| DNA325647, 3564 | DNA325703, 3665 |
| DNA325648, 3566 | DNA325704, 3669 |
| DNA325649, 3568 | DNA325705, 3671 |
| DNA325650, 3570 | DNA325706, 3672 |
| DNA325651, 3571 | DNA325707, 3674 |
| DNA325652, 3572 | DNA325708, 3676 |
| DNA325653, 3574 | DNA325709, 3680 |
| DNA325654, 3576 | DNA325710, 3681 |
| DNA325655, 3578 | DNA325711, 3683 |
| DNA325656, 3579 | DNA325712, 3685 |
| DNA325657, 3580 | DNA325713, 3687 |
| DNA325658, 3581 | DNA325714, 3689 |
| DNA325659, 3582 | DNA325715, 3691 |
| DNA325660, 3583 | DNA325716, 3693 |
| DNA325661, 3584 | DNA325717, 3695 |
| DNA325662, 3585 | DNA325718, 3697 |
| DNA325663, 3586 | DNA325719, 3699 |
| DNA325664, 3590 | DNA325720, 3700 |
| DNA325665, 3595 | DNA325721, 3702 |
| DNA325666, 3596 | DNA325722, 3704 |
| DNA325667, 3598 | DNA325723, 3705 |
| DNA325668, 3599 | DNA325724, 3707 |
| DNA325669, 3602 | DNA325725, 3708 |
| DNA325670, 3604 | DNA325726, 3710 |
| DNA325671, 3606 | DNA325727, 3712 |
| DNA325672, 3608 | DNA325728, 3714 |
| DNA325673, 3610 | DNA325729, 3715 |
| DNA325674, 3612 | DNA325730, 3719 |
| DNA325675, 3614 | DNA325731, 3722 |
| DNA325676, 3616 | DNA325732, 3726 |
| DNA325677, 3618 | DNA325733, 3731 |
| DNA325678, 3622 | DNA325734, 3732 |
| DNA325679, 3624 | DNA325736, 3734 |
| DNA325680, 3626 | DNA3 25737, 3736 |
| DNA325681, 3630 | DNA325738, 3737 |
| DNA325682, 3633 | DNA325739, 3739 |
| DNA325740, 3740 | DNA325797, 3841 |
| DNA325741, 3742 | DNA325798, 3843 |
| DNA325742, 3744 | DNA325799, 3845 |
| DNA325743, 3746 | DNA325800, 3847 |
| DNA325744, 3748 | DNA325801, 3849 |
| DNA325745, 3750 | DNA325802, 3851 |
| DNA325746, 3752 | DNA325803, 3853 |
| DNA325747, 3754 | DNA325804, 3855 |
| DNA325748, 3755 | DNA325805, 3856 |
| DNA325749, 3757 | DNA325806, 3857 |
| DNA325750, 3759 | DNA325807, 3859 |
| DNA325751, 3761 | DNA325808, 3861 |
| DNA325752, 3765 | DNA325809, 3862 |
| DNA325753, 3766 | DNA325810, 3868 |
| DNA325754, 3767 | DNA325811, 3869 |
| DNA325755, 3769 | DNA325812, 3870 |
| DNA325756, 3771 | DNA325813, 3872 |
| DNA325757, 3772 | DNA325814, 3874 |
| DNA325758, 3773 | DNA325815, 3876 |
| DNA325759, 3774 | DNA325816, 3877 |
| DNA325760, 3775 | DNA325817, 3878 |
| DNA325761, 3779 | DNA325818, 3880 |
| DNA325762, 3781 | DNA325819, 3881 |
| DNA325763, 3783 | DNA325820, 3883 |
| DNA325764, 3785 | DNA325821, 3884 |
| DNA325765, 3787 | DNA325822, 3886 |
| DNA325766, 3788 | DNA325823, 3889 |
| DNA325767, 3790 | DNA325824, 3891 |
| DNA325768, 3792 | DNA325825, 3893 |
| DNA325769, 3794 | DNA325826, 3895 |
| DNA325770, 3796 | DNA325827, 3898 |
| DNA325771, 3797 | DNA325828, 3902 |
| DNA325772, 3798 | DNA325829, 3903 |
| DNA325773, 3800 | DNA325830, 3904 |
| DNA325775, 3802 | DNA325831, 3906 |
| DNA325776, 3804 | DNA325832, 3908 |
| DNA325777, 3805 | DNA325833, 3910 |
| DNA325778, 3807 | DNA325834, 3914 |
| DNA325779, 3809 | DNA325835, 3916 |
| DNA325780, 3810 | DNA325836, 3917 |
| DNA325781, 3812 | DNA325837, 3918 |
| DNA325782, 3814 | DNA325838, 3920 |
| DNA325783, 3816 | DNA325839, 3921 |
| DNA325784, 3818 | DNA325840, 3923 |
| DNA325785, 3819 | DNA325841, 3924 |
| DNA325786, 3821 | DNA325842, 3925 |
| DNA325787, 3825 | DNA325843, 3926 |
| DNA325788, 3826 | DNA325844, 3928 |
| DNA325789, 3829 | DNA325845, 3930 |
| DNA325790, 3831 | DNA325847, 3931 |
| DNA325791, 3833 | DNA325848, 3932 |
| DNA325792, 3834 | DNA325849, 3933 |
| DNA325793, 3835 | DNA325850, 3935 |
| DNA325794, 3836 | DNA325851, 3937 |
| DNA325795, 3837 | DNA325852, 3938 |
| DNA325796, 3839 | DNA325853, 3940 |
| DNA325854, 3942 | DNA325910, 4037 |
| DNA325855, 3944 | DNA325911, 4039 |
| DNA325856, 3946 | DNA325912, 4040 |
| DNA325857, 3948 | DNA325913, 4044 |
| DNA325858, 3949 | DNA325914, 4045 |
| DNA325859, 3950 | DNA325915, 4046 |
| DNA325860, 3951 | DNA325916, 4048 |
| DNA325861, 3953 | DNA325917, 4050 |
| DNA325862, 3955 | DNA325918, 4052 |
| DNA325863, 3957 | DNA325919, 4054 |
| DNA325864, 3958 | DNA325920, 4055 |
| DNA325865, 3959 | DNA325921, 4057 |
| DNA325866, 3960 | DNA325922, 4061 |
| DNA325867, 3964 | DNA325923, 4063 |
| DNA325868, 3966 | DNA325924, 4065 |
| DNA325869, 3967 | DNA325925, 4067 |
| DNA325870, 3968 | DNA325926, 4068 |
| DNA325871, 3969 | DNA325927, 4069 |
| DNA325872, 3971 | DNA325928, 4071 |
| DNA325873, 3973 | DNA325929, 4072 |
| DNA325874, 3975 | DNA325930, 4073 |
| DNA325875, 3978 | DNA325931, 4074 |
| DNA325876, 3980 | DNA325932, 4075 |
| DNA325877, 3981 | DNA325933, 4077 |
| DNA325878, 3983 | DNA325934, 4081 |
| DNA325879, 3986 | DNA325935, 4082 |
| DNA325880, 3987 | DNA325936, 4084 |
| DNA325881, 3988 | DNA325937, 4086 |
| DNA325882, 3990 | DNA325938, 4088 |
| DNA325883, 3991 | DNA325939, 4090 |
| DNA325884, 3994 | DNA325940, 4091 |
| DNA325885, 3996 | DNA325941, 4092 |
| DNA325886, 3997 | DNA325942, 4094 |
| DNA325887, 3999 | DNA325943, 4097 |
| DNA325888, 4001 | DNA325944, 4098 |
| DNA325889, 4003 | DNA325945, 4100 |
| DNA325890, 4005 | DNA325946, 4101 |
| DNA325891, 4006 | DNA325947, 4103 |
| DNA325892, 4008 | DNA325948, 4105 |
| DNA325893, 4010 | DNA325949, 4106 |
| DNA325894, 4012 | DNA325950, 4108 |
| DNA325895, 4014 | DNA325951, 4112 |
| DNA325896, 4016 | DNA325952, 4114 |
| DNA325897, 4018 | DNA325953, 4115 |
| DNA325898, 4019 | DNA325954, 4116 |
| DNA325899, 4020 | DNA325955, 4118 |
| DNA325900, 4022 | DNA325956, 4119 |
| DNA325901, 4024 | DNA325957, 4120 |
| DNA325902, 4025 | DNA325958, 4121 |
| DNA325903, 4027 | DNA325959, 4122 |
| DNA325904, 4029 | DNA325960, 4123 |
| DNA325905, 4031 | DNA325961, 4124 |
| DNA325906, 4032 | DNA325962, 4125 |
| DNA325907, 4033 | DNA325963, 4127 |
| DNA325908, 4034 | DNA325964, 4129 |
| DNA325909, 4035 | DNA325965, 4130 |
| DNA325966, 4132 | DNA326022, 4239 |
| DNA325967, 4133 | DNA326023, 4241 |
| DNA325968, 4134 | DNA326024, 4244 |
| DNA325969, 4135 | DNA326025, 4245 |
| DNA325970, 4136 | DNA326026, 4246 |
| DNA325971, 4138 | DNA326027, 4248 |
| DNA325972, 4139 | DNA326028, 4250 |
| DNA325973, 4143 | DNA326029, 4251 |
| DNA325974, 4145 | DNA326030, 4252 |
| DNA325975, 4147 | DNA326031, 4254 |
| DNA325976, 4148 | DNA326032, 4256 |
| DNA325977, 4150 | DNA326033, 4257 |
| DNA325978, 4152 | DNA326034, 4259 |
| DNA325979, 4154 | DNA326035, 4261 |
| DNA325980, 4156 | DNA326036, 4263 |
| DNA325981, 4157 | DNA326037, 4269 |
| DNA325982, 4159 | DNA326038, 4270 |
| DNA325983, 4160 | DNA326039, 4272 |
| DNA325984, 4163 | DNA326040, 4273 |
| DNA325985, 4165 | DNA326041, 4275 |
| DNA325986, 4167 | DNA326042, 4277 |
| DNA325987, 4168 | DNA326043, 4278 |
| DNA325988, 4172 | DNA326044, 4279 |
| DNA325989, 4174 | DNA326045, 4281 |
| DNA325990, 4176 | DNA326046, 4282 |
| DNA325991, 4178 | DNA326047, 4283 |
| DNA325992, 4180 | DNA326048, 4285 |
| DNA325993, 4184 | DNA326049, 4286 |
| DNA325994, 4186 | DNA326050, 4287 |
| DNA325995, 4187 | DNA326051, 4289 |
| DNA325996, 4189 | DNA326052, 4290 |
| DNA325997, 4191 | DNA326053, 4292 |
| DNA325998, 4193 | DNA326054, 4293 |
| DNA325999, 4195 | DNA326055, 4295 |
| DNA326000, 4197 | DNA326056, 4296 |
| DNA326001, 4199 | DNA326057, 4298 |
| DNA326002, 4200 | DNA326058, 4302 |
| DNA326003, 4202 | DNA326059, 4304 |
| DNA326004, 4203 | DNA326060, 4307 |
| DNA326005, 4205 | DNA326061, 4309 |
| DNA326006, 4207 | DNA326062, 4310 |
| DNA326007, 4210 | DNA326063, 4311 |
| DNA326008, 4211 | DNA326064, 4312 |
| DNA326009, 4213 | DNA326065, 4314 |
| DNA326010, 4216 | DNA326066, 4315 |
| DNA326011, 4218 | DNA326067, 4317 |
| DNA326012, 4220 | DNA326068, 4319 |
| DNA326013, 4221 | DNA326069, 4322 |
| DNA326014, 4222 | DNA326070, 4323 |
| DNA326015, 4226 | DNA326071, 4325 |
| DNA326016, 4228 | DNA326072, 4326 |
| DNA326017, 4230 | DNA326073, 4327 |
| DNA326018, 4232 | DNA326074, 4329 |
| DNA326019, 4234 | DNA326075, 4331 |
| DNA326020, 4236 | DNA326076, 4333 |
| DNA326021, 4237 | DNA326077, 4334 |
| DNA326078, 4335 | DNA326134, 4444 |
| DNA326079, 4337 | DNA326135, 4448 |
| DNA326080, 4338 | DNA326136, 4449 |
| DNA326081, 4340 | DNA326137, 4451 |
| DNA326082, 4342 | DNA326138, 4453 |
| DNA326083, 4344 | DNA326139, 4454 |
| DNA326084, 4346 | DNA326140, 4456 |
| DNA326085, 4348 | DNA326141, 4458 |
| DNA326086, 4350 | DNA326142, 4460 |
| DNA326087, 4352 | DNA326143, 4461 |
| DNA326088, 4353 | DNA326144, 4462 |
| DNA326089, 4354 | DNA326145, 4463 |
| DNA326090, 4356 | DNA326146,4465 |
| DNA326091, 4358 | DNA326147, 4467 |
| DNA326092, 4364 | DNA326148,4468 |
| DNA326093, 4366 | DNA326149, 4470 |
| DNA326094, 4368 | DNA326150, 4472 |
| DNA326095, 4372 | DNA326151, 4474 |
| DNA326096, 4376 | DNA326152, 4478 |
| DNA326097, 4378 | DNA326153, 4479 |
| DNA326098, 4380 | DNA326154, 4480 |
| DNA326099, 4382 | DNA326155, 4482 |
| DNA326100, 4384 | DNA326156, 4483 |
| DNA326101, 4386 | DNA326157, 4484 |
| DNA326102, 4388 | DNA326158, 4485 |
| DNA326103, 4390 | DNA326159, 4489 |
| DNA326104, 4392 | DNA326160, 4490 |
| DNA326105, 4394 | DNA326161, 4491 |
| DNA326106, 4396 | DNA326162, 4493 |
| DNA326107, 4398 | DNA326163, 4495 |
| DNA326108, 4400 | DNA326164, 4497 |
| DNA326109, 4402 | DNA326165, 4498 |
| DNA326110, 4404 | DNA326166, 4500 |
| DNA326111, 4406 | DNA326167, 4502 |
| DNA326112, 4408 | DNA326168, 4504 |
| DNA326113, 4410 | DNA326169, 4505 |
| DNA326114, 4411 | DNA326170, 4509 |
| DNA326115, 4413 | DNA326171, 4511 |
| DNA326116, 4414 | DNA326172, 4513 |
| DNA326117, 4416 | DNA326173, 4514 |
| DNA326118, 4418 | DNA326174, 4518 |
| DNA326119, 4420 | DNA326175, 4522 |
| DNA326120, 4423 | DNA326176, 4524 |
| DNA326121, 4425 | DNA326177, 4526 |
| DNA326122, 4426 | DNA326178, 4527 |
| DNA326123, 4427 | DNA326179, 4528 |
| DNA326124, 4429 | DNA326180, 4532 |
| DNA326125, 4430 | DNA326181, 4534 |
| DNA326126, 4431 | DNA326182, 4535 |
| DNA326127, 4432 | DNA326183, 4537 |
| DNA326128, 4434 | DNA326184, 4538 |
| DNA326129, 4435 | DNA326185, 4539 |
| DNA326130, 4436 | DNA326186, 4541 |
| DNA326131, 4438 | DNA326187, 4543 |
| DNA326132, 4440 | DNA326188, 4544 |
| DNA326133, 4442 | DNA326189, 4545 |
| DNA326190, 4547 | DNA326246, 4651 |
| DNA326191, 4549 | DNA326247, 4653 |
| DNA326192, 4551 | DNA326248, 4654 |
| DNA326193, 4553 | DNA326249, 4656 |
| DNA326194, 4555 | DNA326250, 4658 |
| DNA326195, 4556 | DNA326251, 4659 |
| DNA326196, 4558 | DNA326252, 4661 |
| DNA326197, 4560 | DNA326253, 4663 |
| DNA326198, 4561 | DNA326254, 4665 |
| DNA326199, 4562 | DNA326255, 4667 |
| DNA326200, 4566 | DNA326256, 4669 |
| DNA326201, 4570 | DNA326257, 4671 |
| DNA326202, 4571 | DNA326258, 4672 |
| DNA326203, 4573 | DNA326259, 4674 |
| DNA326204, 4577 | DNA326260, 4675 |
| DNA326205, 4581 | DNA326261, 4677 |
| DNA326206, 4583 | DNA326262, 4678 |
| DNA326207, 4584 | DNA326263, 4680 |
| DNA326208, 4586 | DNA326264, 4682 |
| DNA326209, 4588 | DNA326265, 4684 |
| DNA326210, 4590 | DNA326266, 4686 |
| DNA326211, 4592 | DNA326267, 4689 |
| DNA326212, 4594 | DNA326268, 4691 |
| DNA326213, 4596 | DNA326269, 4693 |
| DNA326214, 4597 | DNA326270, 4694 |
| DNA326215, 4599 | DNA326271, 4695 |
| DNA326216, 4600 | DNA326272, 4696 |
| DNA326217, 4602 | DNA326273, 4697 |
| DNA326218, 4604 | DNA326274, 4701 |
| DNA326219, 4606 | DNA326275, 4703 |
| DNA326220, 4608 | DNA326276, 4704 |
| DNA326221, 4610 | DNA326277, 4706 |
| DNA326222, 4612 | DNA326278, 4707 |
| DNA326223, 4614 | DNA326279, 4710 |
| DNA326224, 4616 | DNA326280, 4712 |
| DNA326225, 4617 | DNA326281, 4713 |
| DNA326226, 4619 | DNA326282, 4716 |
| DNA326227, 4621 | DNA326283, 4718 |
| DNA326228, 4622 | DNA326284, 4721 |
| DNA326229, 4624 | DNA326285, 4723 |
| DNA326230, 4628 | DNA326286, 4724 |
| DNA326231, 4630 | DNA326287, 4725 |
| DNA326232, 4632 | DNA326288, 4727 |
| DNA326233, 4633 | DNA326289, 4730 |
| DNA326234, 4635 | DNA326290, 4732 |
| DNA326235, 4637 | DNA326291, 4734 |
| DNA326236, 4638 | DNA326292, 4735 |
| DNA326237, 4640 | DNA326293, 4737 |
| DNA326238, 4641 | DNA326294, 4739 |
| DNA326239, 4642 | DNA326295, 4741 |
| DNA326240, 4644 | DNA326296, 4744 |
| DNA326241, 4645 | DNA326297, 4745 |
| DNA326242, 4646 | DNA326298, 4749 |
| DNA326243, 4647 | DNA326299, 4750 |
| DNA326244, 4648 | DNA326300, 4751 |
| DNA326245, 4650 | DNA326301, 4752 |
| DNA326302, 4754 | DNA326358, 4867 |
| DNA326303, 4755 | DNA326359, 4869 |
| DNA326304, 4757 | DNA326360, 4871 |
| DNA326305, 4758 | DNA326361, 4873 |
| DNA326306, 4760 | DNA326362, 4875 |
| DNA326307, 4761 | DNA326363, 4880 |
| DNA326308, 4763 | DNA326364, 4881 |
| DNA326309, 4765 | DNA326365, 4883 |
| DNA326310, 4767 | DNA326366, 4885 |
| DNA326311, 4768 | DNA326367, 4893 |
| DNA326312, 4769 | DNA326368, 4895 |
| DNA326313, 4771 | DNA326369, 4897 |
| DNA326314, 4773 | DNA326370, 4902 |
| DNA326315, 4775 | DNA326371, 4905 |
| DNA326316, 4777 | DNA326372, 4906 |
| DNA326317, 4780 | DNA326373, 4908 |
| DNA326318, 4784 | DNA326374, 4910 |
| DNA326319, 4786 | DNA326375, 4911 |
| DNA326320, 4788 | DNA326376, 4913 |
| DNA326321, 4790 | DNA326377, 4915 |
| DNA326322, 4792 | DNA326378, 4916 |
| DNA326323, 4794 | DNA326379, 4917 |
| DNA326324, 4798 | DNA326380, 4921 |
| DNA326325, 4800 | DNA326381, 4923 |
| DNA326326, 4801 | DNA326382, 4924 |
| DNA326327, 4803 | DNA326383, 4926 |
| DNA326328, 4807 | DNA326384, 4927 |
| DNA326329, 4809 | DNA326385, 4929 |
| DNA326330, 4810 | DNA326386, 4931 |
| DNA326331, 4814 | DNA326387, 4933 |
| DNA326332, 4816 | DNA326388, 4935 |
| DNA326333, 4818 | DNA326389, 4938 |
| DNA326334, 4819 | DNA326390, 4941 |
| DNA326335, 4822 | DNA326391, 4942 |
| DNA326336, 4824 | DNA326392, 4943 |
| DNA326337, 4825 | DNA326393, 4944 |
| DNA326338, 4826 | DNA326394, 4945 |
| DNA326339, 4827 | DNA326395, 4946 |
| DNA326340, 4829 | DNA326396, 4948 |
| DNA326341, 4830 | DNA326397, 4950 |
| DNA326342, 4832 | DNA326398, 4951 |
| DNA326343, 4834 | DNA326399, 4955 |
| DNA326344, 4836 | DNA326400, 4957 |
| DNA326345, 4838 | DNA326401, 4958 |
| DNA326346, 4840 | DNA326402, 4960 |
| DNA326347, 4847 | DNA326403, 4962 |
| DNA326348, 4849 | DNA326404, 4965 |
| DNA326349, 4850 | DNA326405, 4967 |
| DNA326350, 4852 | DNA326406, 4969 |
| DNA326351, 4856 | DNA326407, 4971 |
| DNA326352, 4857 | DNA326408, 4973 |
| DNA326353, 4859 | DNA326409, 4977 |
| DNA326354, 4861 | DNA326410, 4978 |
| DNA326355, 4863 | DNA326411, 4980 |
| DNA326356, 4864 | DNA326412, 4982 |
| DNA326357, 4865 | DNA326413, 4984 |
| DNA326414, 4987 | DNA326470, 5078 |
| DNA326415, 4988 | DNA326471, 5080 |
| DNA326416, 4989 | DNA326472, 5082 |
| DNA326417, 4991 | DNA326473, 5083 |
| DNA326418, 4992 | DNA326474, 5084 |
| DNA326419, 4994 | DNA326475, 5086 |
| DNA326420, 4995 | DNA326476, 5088 |
| DNA326421, 4996 | DNA326477, 5089 |
| DNA326422, 4998 | DNA326478, 5090 |
| DNA326423, 4999 | DNA326479, 5092 |
| DNA326424, 5000 | DNA326480, 5093 |
| DNA326425, 5001 | DNA326481, 5095 |
| DNA326426, 5002 | DNA326482, 5097 |
| DNA326427, 5004 | DNA326483, 5098 |
| DNA326428, 5006 | DNA326484, 5100 |
| DNA326429, 5008 | DNA326485, 5102 |
| DNA326430, 5010 | DNA326486, 5104 |
| DNA326431, 5011 | DNA326487, 5106 |
| DNA326432, 5013 | DNA326488, 5108 |
| DNA326433, 5016 | DNA326489, 5109 |
| DNA326434, 5018 | DNA326490, 5110 |
| DNA326435, 5019 | DNA326491, 5112 |
| DNA326436, 5020 | DNA326492, 5113 |
| DNA326437, 5021 | DNA326493, 5114 |
| DNA326438, 5022 | DNA326494, 5117 |
| DNA326439, 5025 | DNA326495, 5119 |
| DNA326440, 5026 | DNA326496, 5120 |
| DNA326441, 5027 | DNA326497, 5122 |
| DNA326442, 5028 | DNA326498, 5124 |
| DNA326443, 5030 | DNA326499, 5126 |
| DNA326444, 5031 | DNA326500, 5128 |
| DNA326445, 5032 | DNA326501, 5130 |
| DNA326446, 5034 | DNA326502, 5131 |
| DNA326447, 5036 | DNA326503, 5132 |
| DNA326448, 5037 | DNA326504, 5134 |
| DNA326449, 5042 | DNA326505, 5135 |
| DNA326450, 5043 | DNA326506, 5137 |
| DNA326451, 5045 | DNA326507, 5138 |
| DNA326452, 5046 | DNA326508, 5140 |
| DNA326453, 5048 | DNA326509, 5141 |
| DNA326454, 5049 | DNA326510, 5143 |
| DNA326455, 5054 | DNA326511, 5145 |
| DNA326456, 5055 | DNA326512, 5148 |
| DNA326457, 5058 | DNA326513, 5150 |
| DNA326458, 5060 | DNA326514, 5152 |
| DNA326459, 5062 | DNA326515, 5155 |
| DNA326460, 5064 | DNA326516, 5157 |
| DNA326461, 5065 | DNA326517, 5159 |
| DNA326462, 5066 | DNA326518, 5160 |
| DNA326463, 5067 | DNA326519, 5161 |
| DNA326464, 5069 | DNA326520, 5163 |
| DNA326465, 5071 | DNA326521, 5165 |
| DNA326466, 5072 | DNA326522, 5166 |
| DNA326467, 5074 | DNA326523, 5168 |
| DNA326468, 5075 | DNA326524, 5169 |
| DNA326469, 5076 | DNA326525, 5171 |
| DNA326526, 5173 | DNA326583, 5270 |
| DNA326527, 5175 | DNA326584, 5274 |
| DNA326528, 5176 | DNA326585, 5276 |
| DNA326529, 5178 | DNA326586, 5281 |
| DNA326530, 5180 | DNA326587, 5283 |
| DNA326531, 5181 | DNA326588, 5285 |
| DNA326532, 5183 | DNA326589, 5286 |
| DNA326533, 5184 | DNA326590, 5288 |
| DNA326534, 5186 | DNA326591, 5290 |
| DNA326535, 5188 | DNA326592, 5292 |
| DNA326536, 5190 | DNA326593, 5294 |
| DNA326537, 5192 | DNA326594, 5295 |
| DNA326538, 5194 | DNA326595, 5297 |
| DNA326539, 5195 | DNA326596, 5300 |
| DNA326540, 5196 | DNA326597, 5302 |
| DNA326541, 5197 | DNA326598, 5303 |
| DNA326542, 5203 | DNA326599, 5305 |
| DNA326543, 5205 | DNA326600, 5307 |
| DNA326544, 5208 | DNA326601, 5308 |
| DNA326546, 5210 | DNA326602, 5310 |
| DNA326547, 5212 | DNA326603, 5311 |
| DNA326548, 5213 | DNA326604, 5314 |
| DNA326549, 5214 | DNA326605, 5316 |
| DNA326550, 5216 | DNA326606, 5317 |
| DNA326551, 5218 | DNA326607, 5319 |
| DNA326552, 5219 | DNA326608, 5321 |
| DNA326553, 5221 | DNA326609, 5323 |
| DNA326554, 5222 | DNA326610, 5325 |
| DNA326555, 5223 | DNA326611, 5326 |
| DNA326556, 5225 | DNA326612, 5330 |
| DNA326557, 5226 | DNA326613, 5331 |
| DNA326558, 5227 | DNA326614, 5332 |
| DNA326559, 5229 | DNA326615, 5334 |
| DNA326560, 5230 | DNA326616, 5336 |
| DNA326561, 5236 | DNA326617, 5337 |
| DNA326562, 5237 | DNA326618, 5338 |
| DNA326563, 5239 | DNA326619, 5339 |
| DNA326564, 5240 | DNA326620, 5341 |
| DNA326565, 5241 | DNA326621, 5343 |
| DNA326566, 5243 | DNA326622, 5345 |
| DNA326567, 5244 | DNA326623, 5347 |
| DNA326568, 5246 | DNA326624, 5349 |
| DNA326569, 5247 | DNA326625, 5350 |
| DNA326570, 5248 | DNA326626, 5354 |
| DNA326571, 5250 | DNA326627, 5355 |
| DNA326572, 5252 | DNA326628, 5357 |
| DNA326573, 5254 | DNA326629, 5358 |
| DNA326574, 5256 | DNA326630, 5360 |
| DNA326575, 5257 | DNA326631, 5362 |
| DNA326576, 5260 | DNA326632, 5364 |
| DNA326577, 5261 | DNA326633, 5366 |
| DNA326578, 5262 | DNA326634, 5367 |
| DNA326579, 5264 | DNA326635, 5369 |
| DNA326580, 5266 | DNA326636, 5370 |
| DNA326581, 5267 | DNA326637, 5371 |
| DNA326582, 5269 | DNA326638, 5372 |
| DNA326639, 5374 | DNA326695, 5474 |
| DNA326640, 5376 | DNA326696, 5478 |
| DNA326641, 5378 | DNA326697, 5480 |
| DNA326642, 5379 | DNA326698, 5482 |
| DNA326643, 5380 | DNA326699, 5483 |
| DNA326644, 5382 | DNA326700, 5484 |
| DNA326645, 5383 | DNA326701, 5485 |
| DNA326646, 5384 | DNA326702, 5486 |
| DNA326647, 5385 | DNA326703, 5487 |
| DNA326648, 5389 | DNA326704, 5488 |
| DNA326649, 5391 | DNA326705, 5489 |
| DNA326650, 5393 | DNA326706, 5491 |
| DNA326651, 5395 | DNA326707, 5492 |
| DNA326652, 5396 | DNA326708, 5496 |
| DNA326653, 5398 | DNA326709, 5497 |
| DNA326654, 5399 | DNA326710, 5499 |
| DNA326655, 5401 | DNA326711, 5501 |
| DNA326656, 5403 | DNA326712, 5508 |
| DNA326657, 5404 | DNA326713, 5510 |
| DNA326658, 5406 | DNA326714, 5519 |
| DNA326659, 5408 | DNA326715, 5521 |
| DNA326660, 5409 | DNA326716, 5522 |
| DNA326661, 5411 | DNA326717, 5525 |
| DNA326662, 5413 | DNA326718, 5527 |
| DNA326663, 5415 | DNA326719, 5528 |
| DNA326664, 5417 | DNA326720, 5529 |
| DNA326665, 5419 | DNA326721, 5530 |
| DNA326666, 5423 | DNA326722, 5531 |
| DNA326667, 5425 | DNA326723, 5532 |
| DNA326668, 5428 | DNA326724, 5534 |
| DNA326669, 5430 | DNA326725, 5536 |
| DNA326670, 5432 | DNA326726, 5537 |
| DNA326671, 5436 | DNA326727, 5539 |
| DNA326672, 5438 | DNA326728, 5541 |
| DNA326673, 5439 | DNA326729, 5544 |
| DNA326674, 5440 | DNA326730, 5546 |
| DNA326675, 5443 | DNA326731, 5548 |
| DNA326676, 5444 | DNA326732, 5549 |
| DNA326677, 5445 | DNA326733, 5552 |
| DNA326678, 5446 | DNA326734, 5554 |
| DNA326679, 5447 | DNA326735, 5556 |
| DNA326680, 5450 | DNA326736, 5558 |
| DNA326681, 5451 | DNA326737, 5560 |
| DNA326682, 5453 | DNA326738, 5564 |
| DNA326683, 5454 | DNA326739, 5566 |
| DNA326684, 5456 | DNA326740, 5570 |
| DNA326685, 5458 | DNA326741, 5571 |
| DNA326686, 5460 | DNA326742, 5573 |
| DNA326687, 5461 | DNA326743, 5574 |
| DNA326688, 5462 | DNA326744, 5578 |
| DNA326689, 5463 | DNA326745, 5580 |
| DNA326690, 5465 | DNA326746, 5582 |
| DNA326691, 5466 | DNA326747, 5584 |
| DNA326692, 5468 | DNA326748, 5586 |
| DNA326693, 5470 | DNA326749, 5588 |
| DNA326694, 5472 | DNA326750, 5592 |
| DNA326751, 5595 | DNA326807, 5712 |
| DNA326752, 5597 | DNA326808, 5713 |
| DNA326753, 5598 | DNA326809, 5715 |
| DNA326754, 5600 | DNA326810, 5717 |
| DNA326755, 5602 | DNA326811, 5719 |
| DNA326756, 5603 | DNA326812, 5723 |
| DNA326757, 5605 | DNA326813, 5725 |
| DNA326758, 5607 | DNA326814, 5727 |
| DNA326759, 5608 | DNA326815, 5728 |
| DNA326760, 5610 | DNA326816, 5729 |
| DNA326761, 5612 | DNA326817, 5731 |
| DNA326762, 5613 | DNA326818, 5733 |
| DNA326763, 5617 | DNA326819, 5736 |
| DNA326764, 5619 | DNA326820, 5740 |
| DNA326765, 5621 | DNA326821, 5742 |
| DNA326766, 5623 | DNA326822, 5744 |
| DNA326767, 5629 | DNA326823, 5749 |
| DNA326768, 5631 | DNA326824, 5750 |
| DNA326769, 5633 | DNA326825, 5752 |
| DNA326770, 5635 | DNA326826, 5754 |
| DNA326771, 5636 | DNA326827, 5756 |
| DNA326772, 5642 | DNA326828, 5757 |
| DNA326773, 5644 | DNA326829, 5759 |
| DNA326774, 5646 | DNA326830, 5762 |
| DNA326775, 5647 | DNA326831, 5763 |
| DNA326776, 5648 | DNA326832, 5765 |
| DNA326777, 5650 | DNA326833, 5766 |
| DNA326778, 5652 | DNA326834, 5768 |
| DNA326779, 5656 | DNA326835, 5769 |
| DNA326780, 5658 | DNA326836, 5773 |
| DNA326781, 5660 | DNA326837, 5776 |
| DNA326782, 5661 | DNA326838, 5778 |
| DNA326783, 5663 | DNA326839, 5779 |
| DNA326784, 5665 | DNA326840, 5781 |
| DNA326785, 5667 | DNA326841, 5783 |
| DNA326786, 5670 | DNA326842, 5787 |
| DNA326787, 5671 | DNA326843, 5793 |
| DNA326788, 5673 | DNA326844, 5794 |
| DNA326789, 5674 | DNA326845, 5795 |
| DNA326790, 5675 | DNA326846, 5796 |
| DNA326791, 5678 | DNA326847, 5798 |
| DNA326792, 5683 | DNA326848, 5800 |
| DNA326793, 5687 | DNA326849, 5802 |
| DNA326794, 5688 | DNA326850, 5804 |
| DNA326795, 5689 | DNA326851, 5806 |
| DNA326796, 5691 | DNA326852, 5808 |
| DNA326797, 5693 | DNA326853, 5809 |
| DNA326798, 5695 | DNA326854, 5811 |
| DNA326799, 5696 | DNA326855, 5813 |
| DNA326800, 5698 | DNA326856, 5816 |
| DNA326801, 5700 | DNA326857, 5818 |
| DNA326802, 5701 | DNA326858, 5819 |
| DNA326803, 5705 | DNA326859, 5821 |
| DNA326804, 5706 | DNA326860, 5823 |
| DNA326805, 5708 | DNA326861, 5824 |
| DNA326806, 5710 | DNA326862, 5826 |
| DNA326863, 5828 | DNA326919, 5945 |
| DNA326864, 5832 | DNA326920, 5946 |
| DNA326865, 5834 | DNA326921, 5949 |
| DNA326866, 5838 | DNA326922, 5950 |
| DNA326867, 5840 | DNA326923, 5951 |
| DNA326868, 5842 | DNA326924, 5953 |
| DNA326869, 5846 | DNA326925, 5954 |
| DNA326870, 5847 | DNA326926, 5958 |
| DNA326871, 5849 | DNA326927, 5960 |
| DNA326872, 5851 | DNA326928, 5961 |
| DNA326873, 5853 | DNA326929, 5963 |
| DNA326874, 5855 | DNA326930, 5964 |
| DNA326875, 5857 | DNA326931, 5967 |
| DNA326876, 5859 | DNA326932, 5968 |
| DNA326877, 5861 | DNA326933, 5969 |
| DNA326878, 5863 | DNA326934, 5971 |
| DNA326879, 5865 | DNA326935, 5975 |
| DNA326880, 5867 | DNA326936, 5977 |
| DNA326881, 5869 | DNA326937, 5979 |
| DNA326882, 5871 | DNA326938, 5981 |
| DNA326883, 5875 | DNA326939, 5983 |
| DNA326884, 5876 | DNA326940, 5985 |
| DNA326885, 5877 | DNA326941, 5986 |
| DNA326886, 5878 | DNA326942, 5987 |
| DNA326887, 5879 | DNA326943, 5991 |
| DNA326888, 5883 | DNA326944, 5993 |
| DNA326889, 5887 | DNA326945, 5996 |
| DNA326890, 5889 | DNA326946, 5998 |
| DNA326891, 5894 | DNA326947, 5999 |
| DNA326892, 5898 | DNA326948, 6001 |
| DNA326893, 5900 | DNA326949, 6007 |
| DNA326894, 5902 | DNA326950, 6009 |
| DNA326895, 5903 | DNA326951, 6013 |
| DNA326896, 5905 | DNA326952, 6014 |
| DNA326897, 5907 | DNA326953, 6015 |
| DNA326898, 5908 | DNA326954, 6017 |
| DNA326899, 5910 | DNA326955, 6019 |
| DNA326900, 5911 | DNA326956, 6022 |
| DNA326901, 5913 | DNA326957, 6024 |
| DNA326902, 5914 | DNA326958, 6025 |
| DNA326903, 5915 | DNA326959, 6029 |
| DNA326904, 5917 | DNA326960, 6031 |
| DNA326905, 5919 | DNA326961, 6032 |
| DNA326906, 5923 | DNA326962, 6036 |
| DNA326907, 5924 | DNA326963, 6040 |
| DNA326908, 5925 | DNA326964, 6042 |
| DNA326909, 5926 | DNA326965, 6043 |
| DNA326910, 5927 | DNA326966, 6047 |
| DNA326911, 5928 | DNA326967, 6049 |
| DNA326912, 5929 | DNA326968, 6051 |
| DNA326913, 5930 | DNA326969, 6052 |
| DNA326914, 5931 | DNA326970, 6054 |
| DNA326915, 5933 | DNA326971, 6056 |
| DNA326916, 5937 | DNA326972, 6058 |
| DNA326917, 5941 | DNA326973, 6060 |
| DNA326918, 5943 | DNA326974, 6061 |
| DNA326975, 6063 | DNA327031, 6165 |
| DNA326976, 6064 | DNA327032, 6167 |
| DNA326977, 6065 | DNA327033, 6169 |
| DNA326978, 6066 | DNA327034, 6170 |
| DNA326979, 6070 | DNA327035, 6172 |
| DNA326980, 6072 | DNA327036, 6173 |
| DNA326981, 6074 | DNA327037, 6174 |
| DNA326982, 6077 | DNA327038, 6176 |
| DNA326983, 6081 | DNA327039, 6177 |
| DNA326984, 6083 | DNA327040, 6179 |
| DNA326985, 6085 | DNA327041, 6183 |
| DNA326986, 6087 | DNA327042, 6185 |
| DNA326987, 6088 | DNA327043, 6189 |
| DNA326988, 6089 | DNA327044, 6192 |
| DNA326989, 6090 | DNA327045, 6194 |
| DNA326990, 6091 | DNA327046, 6196 |
| DNA326991, 6093 | DNA327047, 6199 |
| DNA326992, 6094 | DNA327048, 6201 |
| DNA326993, 6095 | DNA327049, 6203 |
| DNA326994, 6097 | DNA327050, 6204 |
| DNA326995, 6099 | DNA327051, 6206 |
| DNA326996, 6103 | DNA327052, 6207 |
| DNA326997, 6106 | DNA327053, 6209 |
| DNA326998, 6108 | DNA327054, 6210 |
| DNA326999, 6109 | DNA327055, 6212 |
| DNA327000, 6111 | DNA327056, 6216 |
| DNA327001, 6113 | DNA327057, 6218 |
| DNA327002, 6114 | DNA327058, 6220 |
| DNA327003, 6116 | DNA327059, 6222 |
| DNA327004, 6118 | DNA327060, 6224 |
| DNA327005, 6119 | DNA327061, 6226 |
| DNA327006, 6121 | DNA327062, 6227 |
| DNA327007, 6122 | DNA327063, 6228 |
| DNA327008, 6123 | DNA327064, 6229 |
| DNA327009, 6124 | DNA327065, 6232 |
| DNA327010, 6128 | DNA327066, 6233 |
| DNA327011, 6130 | DNA327067, 6235 |
| DNA327012, 6131 | DNA327068, 6237 |
| DNA327013, 6132 | DNA327069, 6238 |
| DNA327014, 6134 | DNA327070, 6241 |
| DNA327015, 6136 | DNA327071, 6242 |
| DNA327016, 6138 | DNA327072, 6244 |
| DNA327017, 6140 | DNA327073, 6246 |
| DNA327018, 6142 | DNA327074, 6248 |
| DNA327019, 6143 | DNA327075, 6250 |
| DNA327020, 6145 | DNA327076, 6251 |
| DNA327021, 6146 | DNA327077, 6253 |
| DNA327022, 6151 | DNA327078, 6255 |
| DNA327023, 6152 | DNA327079, 6256 |
| DNA327024, 6153 | DNA327080, 6259 |
| DNA327025, 6155 | DNA327081, 6261 |
| DNA327026, 6157 | DNA327082, 6263 |
| DNA327027, 6158 | DNA327083, 6265 |
| DNA327028, 6159 | DNA327084, 6267 |
| DNA327029, 6161 | DNA327085, 6268 |
| DNA327030, 6163 | DNA327086, 6269 |
| DNA327087, 6274 | DNA88051, 898 |
| DNA327088, 6275 | DNA88084, 5511 |
| DNA327089, 6276 | DNA88100, 1089 |
| DNA327090, 6278 | DNA88114, 3452 |
| DNA327091, 6280 | DNA88176, 3333 |
| DNA327092, 6281 | DNA88239, 5791 |
| DNA327093, 6282 | DNA88261, 4579 |
| DNA327094, 6284 | DNA88281, 5050 |
| DNA327095, 6289 | DNA88350, 2796 |
| DNA327096, 6291 | DNA88378, 4845 |
| DNA327097, 6293 | DNA88430, 4963 |
| DNA327098, 6295 | DNA88457, 5040 |
| DNA327099, 6297 | DNA88547, 1223 |
| DNA327100, 6299 | DNA88554, 4903 |
| DNA327101, 6300 | DNA88562, 2961 |
| DNA327102, 6302 | DNA88569, 5789 |
| DNA327103, 6304 | DNA89239, 1327 |
| DNA327104, 6306 | DNA89242, 2695 |
| DNA327105, 6308 | DNA97285, 3175 |
| DNA327106, 6310 | DNA97290, 4887 |
| DNA327107, 6311 | DNA97293, 4421 |
| DNA327108, 6313 | DNA97298, 5734 |
| DNA327109, 6315 | DNA97300, 4687 |
| DNA327110, 6316 | |
| DNA327111, 6320 | |
| DNA327112, 6323 | |
| DNA327113, 6325 | |
| DNA327114, 6326 | |
| DNA327115, 6328 | |
| DNA327116, 6329 | |
| DNA327117, 6330 | |
| DNA327118, 6336 | |
| DNA327119, 6346 | |
| DNA327120, 6348 | |
| DNA327121, 6349 | |
| DNA327122, 6350 | |
| DNA327123, 6351 | |
| DNA327124, 6352 | |
| DNA327125, 6353 | |
| DNA327126, 6354 | |
| DNA327127, 6355 | |
| DNA66475, 4796 | |
| DNA75863, 3245 | |
| DNA76504, 6270 | |
| DNA79101, 3678 | |
| DNA79129, 1352 | |
| DNA79313, 3524 | |
| DNA82328, 624 | |
| DNA83020, 1671 | |
| DNA83022, 2495 | |
| DNA83046, 558 | |
| DNA83085, 173 | |
| DNA83141, 2361 | |
| DNA83154, 5590 | |
| DNA83170, 5679 | |
| DNA83180, 3476 | |

[6392] PRO Index (to Figure number)

PRO, 1189
PRO10002, 487
PRO10194, 2441
PRO10297, 1479
PRO10360, 1923
PRO10400, 4928
PRO10404, 3952
PRO10485, 5127
PRO10498, 967
PRO10602, 1207
PRO10685, 1633
PRO10692, 644
PRO10723, 6245
PRO10760, 211
PRO1077, 5094
PRO10824, 2652
PRO10838, 3657
PRO10849, 1709
PRO10935, 6279
PRO11048, 1285
PRO11077, 1571
PRO1108, 2532
PRO1112, 2003
PRO11139, 2981
PRO11197, 833
PRO11213, 3655
PRO11262, 3172
PRO11265, 2589
PRO11403, 902, 4970
PRO11582, 556
PRO11601, 3521
PRO11691, 3186
PRO1182, 646
PRO119, 2229
PRO11982, 3915
PRO1204, 4797
PRO12077, 1420
PRO12130, 5315
PRO12134, 6006
PRO12135, 5897
PRO12187, 3412
PRO12198, 4142
PRO12199, 682
PRO12224, 3205
PRO12265, 4937
PRO12324, 5704
PRO124, 3121
PRO12416, 1733
PRO12448, 3385
PRO12460, 5722
PRO12468, 2185
PRO1248, 565
PRO12490, 6055
PRO12520, 1025
PRO12565, 1146
PRO12573, 3527
PRO12618, 45
PRO12683, 4399
PRO12774, 4306
PRO12779, 1154
PRO12792, 807
PRO12797, 2035
PRO12800, 5503
PRO12806, 4954
PRO12813, 3014
PRO12822, 5429
PRO12838, 2547
PRO12839, 3758
PRO12841, 1067
PRO12845, 6023
PRO1285, 1665
PRO12851, 2905
PRO12878, 3250
PRO12886, 6021
PRO12892, 5477
PRO12902, 3467
PRO12916, 4080
PRO1314, 1239
PRO1555, 2457
PRO1707, 625
PRO1720, 5782
PRO1869, 3909
PRO188, 530
PRO1910, 2835
PRO1927, 1847
PRO19615, 1822
PRO19933, 2109
PRO201, 5209
PRO20117, 3257, 3259
PRO20136, 49
PRO2018, 3246
PRO2042, 2496
PRO2054, 4066
PRO2065, 5780
PRO2066, 4049
PRO2077, 1217
PRO2109, 5591
PRO2146, 899
PRO21481, 2669
PRO2172, 1090
PRO21728, 5837
PRO21773, 3666
PRO21887, 4783
PRO21924, 3481
PRO2198, 4639
PRO22196, 94
PRO22262, 168
PRO22304, 147
PRO224, 5217
PRO22481, 6028
PRO22613, 5284
PRO22637, 4569
PRO2267, 5051
PRO2269, 61
PRO22771, 1625
PRO22897, 2339
PRO22907, 2634, 2636
PRO231, 329
PRO23123, 999
PRO23124, 949, 951
PRO23201, 2615
PRO23231, 6059
PRO23238, 5589
PRO23248, 2568
PRO23300, 586
PRO23362, 2194
PRO23364, 2948
PRO2355, 4512
PRO2373, 6125
PRO23746, 13
PRO23794, 5251
PRO23797, 2024, 2151
PRO23845, 5394
PRO23942, 429
PRO24002, 5748
PRO24021, 6317
PRO24028, 855
PRO24075, 4531
PRO24077, 5761
PRO24091, 978
PRO2420, 5790
PRO24831, 3307
PRO24851, 577
PRO24856, 125
PRO25115, 4878
PRO25245, 6312
PRO25302, 5882
PRO2537, 6271
PRO2549, 3679
PRO2551, 1353
PRO2555, 3525
PRO2560, 5096
PRO2561, 1672
PRO2569, 559
PRO2570, 2477
PRO2583, 174
PRO25845, 3298
PRO25849, 1853
PRO25881, 5498
PRO25985, 3156
PRO2604, 2362
PRO2610, 981
PRO2615, 5680
PRO26194, 82
PRO2622, 3477
PRO26228, 983
PRO2644, 5512
PRO2660, 3453
PRO2665, 922
PRO2672, 4550
PRO2685, 3334
PRO2711, 5792
PRO2718, 5282
PRO2719, 4580
PRO2720, 4219
PRO2732, 4175
PRO2733, 2443
PRO2758, 2797
PRO2769, 4846
PRO2788, 4964
PRO2799, 5041
PRO283, 3664
PRO2837, 1224
PRO2839, 4904
PRO2841, 3741, 3743
PRO2842, 2962
PRO2846, 3661
PRO2851, 177
PRO28687, 5880
PRO287, 1277
PRO2871, 3995
PRO2875, 2974
PRO2906, 1328
PRO2907, 2696
PRO292, 3134
PRO29371, 5329
PRO302, 4918
PRO303, 4409
PRO329, 504
PRO3344, 2484
PRO33679, 368
PRO33717, 3963
PRO33818, 2773
PRO34043, 6205
PRO34073, 3052
PRO34151, 5479
PRO34323, 5259
PRO34473, 2783
PRO3449, 3601
PRO34531, 6076
PRO34544, 1676
PRO34557, 4183
PRO34584, 6186
PRO36020, 1741
PRO36047, 1490
PRO36055, 1331
PRO36058, 1735
PRO36093, 2768
PRO36094, 2175
PRO36095, 3474
PRO36112, 4043
PRO36118, 6339
PRO36134, 2507
PRO36184, 6215
PRO36215, 3377
PRO36263, 6335
PRO36272, 357
PRO3629, 4355, 4357
PRO36305, 1960
PRO36316, 1958
PRO3632, 3176
PRO36328, 3977
PRO3637, 4888
PRO36372, 1829
PRO36373, 1129
PRO36382, 1447
PRO36383, 1512
PRO36384, 1516
PRO3640, 4422
PRO36417, 5948
PRO3645, 5735
PRO36468, 554
PRO3647, 4688
PRO36474, 5518
PRO36477, 3730
PRO36491, 3490
PRO36543, 3207
PRO36568, 3993
PRO36588, 410
PRO36680, 3005
PRO36693, 2656
PRO36723, 272
PRO36725, 106
PRO36735, 1096
PRO36787, 4096
PRO36800, 2459
PRO36808, 2671
PRO36841, 1919
PRO36852, 4821
PRO36872, 5922
PRO36879, 2263
PRO36881, 1792
PRO36891, 742
PRO36959, 2566
PRO36963, 5490
PRO36970, 3456
PRO37010, 1109
PRO37012, 5976
PRO37023, 2394
PRO37024, 5957
PRO37073, 2987
PRO37080, 5936
PRO37082, 475
PRO37083, 6160
PRO37091, 1765
PRO37109, 4225
PRO37221, 5746
PRO37234, 3499
PRO37256, 437
PRO37316, 3867
PRO37335, 1690
PRO37476, 6333
PRO37518, 4940
PRO37534, 4890
PRO37535, 385
PRO37540, 4990
PRO37547, 4743
PRO37551, 3221
PRO37555, 3594
PRO37557, 3629
PRO37628, 685
PRO37634, 3725
PRO37635, 2965
PRO37636, 1574
PRO37644, 6273
PRO37653, 815
PRO37654, 3589
PRO37667, 1887
PRO37669, 4171
PRO37675, 924
PRO37676, 158
PRO37697, 4627
PRO37709, 551
PRO37712, 5353
PRO37730, 2513
PRO37731, 2243
PRO37743, 5233
PRO37764, 4934
PRO37770, 1166
PRO37783, 1813
PRO37784, 3985
PRO37791, 4793
PRO37806, 498
PRO37811, 5682
PRO37905, 1943
PRO37935, 5772
PRO37937, 3721
PRO37938, 2461
PRO37951, 5164
PRO37954, 2692
PRO37961, 4343
PRO37967, 595
PRO37972, 3077
PRO37991, 804
PRO37992, 347
PRO38008, 699
PRO38010, 3459
PRO38021, 6217
PRO38022, 4162
PRO38028, 2667
PRO38038, 1509
PRO38040, 375
PRO38066, 5810
PRO38070, 1962
PRO38101, 5565
PRO38119, 6286
PRO38152, 6148
PRO38227, 4892
PRO38258, 793
PRO38284, 37
PRO38311, 4359
PRO38336, 4842
PRO38380, 6322
PRO38387, 2100
PRO38392, 2207
PRO38406, 6198
PRO38464, 4336
PRO38480, 4373
PRO38496, 5133
PRO38730, 6343
PRO38852, 4215
PRO39030, 6105
PRO39127, 6182
PRO39201, 4983
PRO39530, 4643
PRO39648, 3009
PRO39773, 2399
PRO4, 2535
PRO41882, 2366
PRO42022, 6225
PRO42208, 4519
PRO4348, 3577
PRO4379, 4179
PRO4426, 3632
PRO44999, 579
PRO45014, 2183
PRO4544, 219
PRO4547, 650
PRO4569, 5577
PRO4583, 189
PRO4586, 6071
PRO4605, 1450
PRO4650, 5273
PRO4666, 3682
PRO4676, 1599
PRO4710, 1678
PRO4729, 4709
PRO47354, 5516
PRO4738, 4799
PRO4749, 2983
PRO4756, 5377
PRO4763, 458
PRO4789, 5995
PRO4793, 3848
PRO4798, 2071
PRO4801, 3314
PRO4813, 5845
PRO4814, 4582
PRO4832, 1150
PRO4833, 2991
PRO48357, 1082
PRO4836, 4111
PRO4841, 3479
PRO4852, 5775
PRO4870, 3312
PRO4872, 6082
PRO4873, 3684
PRO4884, 1950
PRO4885, 6345
PRO4900, 3050
PRO4904, 4064, 5495
PRO4908, 1780
PRO4912, 2275
PRO4914, 617
PRO4917, 712
PRO4918, 765
PRO49182, 4705
PRO49209, 1371
PRO49256, 6004
PRO49262, 1628
PRO49278, 6069
PRO49298, 3330
PRO49310, 4720
PRO49316, 995
PRO49352, 6046
PRO49409, 500
PRO49457, 604
PRO49639, 4488
PRO49642, 343
PRO49648, 2741
PRO49653, 5628
PRO49675, 5886
PRO49685, 1156
PRO49722, 1317
PRO49726, 3469
PRO4984, 1909
PRO49869, 2694
PRO49875, 3778
PRO49879, 4375
PRO49881, 6319
PRO49883, 6258
PRO49888, 4899
PRO49967, 4578
PRO50083, 5891
PRO50095, 1133
PRO50134, 5940
PRO50165, 3114
PRO50409, 4209
PRO50438, 4266
PRO50481, 4748
PRO50582, 1927
PRO50596, 860
PRO50658, 4613
PRO50756, 3110
PRO51109, 1273
PRO51119, 6102
PRO51121, 3512
PRO51389, 2055
PRO51539, 200
PRO51565, 5514
PRO51586, 5147
PRO51744, 5057
PRO51767, 5388
PRO51771, 5435
PRO51775, 4363
PRO51815, 4371
PRO51836, 546
PRO51851, 1643
PRO51901, 2747
PRO52010, 4855
PRO52083, 1438
PRO52101, 5507
PRO52119, 5966
PRO52449, 403
PRO52492, 3416
PRO52537, 2924
PRO54594, 4204
PRO57307, 3327
PRO57854, 3102
PRO57901, 5594
PRO57917, 4060
PRO57942, 5815
PRO58006, 1855
PRO58042, 5313
PRO58046, 5123
PRO58092, 3899
PRO58118, 268
PRO58140, 1196
PRO58155, 5874
PRO58177, 1257
PRO58198, 6127
PRO58207, 3285
PRO58213, 1688
PRO58219, 1647
PRO58232, 5990
PRO58259, 1271
PRO58263, 2553
PRO58292, 5299
PRO58308, 1063
PRO58328, 1098
PRO58348, 3094
PRO58410, 3865
PRO58437, 2370
PRO58440, 3688
PRO58446, 5268
PRO58523, 3209
PRO58543, 747
PRO58606, 3300
PRO58642, 3897
PRO58702, 5207
PRO58784, 1100
PRO58837, 3592
PRO58875, 6240
PRO58939, 2877
PRO58974, 471
PRO58984, 1893
PRO58986, 1387
PRO58991, 5235
PRO58993, 1804
PRO59001, 3817
PRO59022, 6243
PRO59040, 1851
PRO59042, 3824
PRO59043, 3056
PRO59061, 6012
PRO59074, 2372
PRO59084, 3296
PRO59099, 128
PRO59136, 795
PRO59142, 5649, 5651
PRO59168, 6154
PRO59220, 5361
PRO59230, 2551
PRO59262, 3440
PRO59264, 5505
PRO59285, 6080
PRO59305, 4844
PRO59309, 4806
PRO59313, 959
PRO59321, 2663
PRO59328, 4912
PRO59332, 289
PRO59339, 5677
PRO59351, 2856
PRO59365, 1998
PRO59380, 2397
PRO59384, 752
PRO59441, 6139
PRO59491, 4508
PRO59504, 1094
PRO59544, 762
PRO59546, 230
PRO59558, 704
PRO59579, 2674
PRO59629, 3381
PRO59647, 3551
PRO59669, 5904
PRO59717, 2105
PRO59721, 3272
PRO59725, 462
PRO59785, 3728
PRO59868, 6188
PRO59895, 935
PRO59913, 1722
PRO60006, 2752
PRO60008, 3282
PRO60070, 4102
PRO60115, 2807
PRO60121, 5053
PRO60123, 3393
PRO60127, 2661
PRO6018, 395
PRO60207, 1698
PRO60261, 520
PRO60298, 203
PRO60311, 3345
PRO60321, 2601
PRO60325, 4450
PRO60333, 5626
PRO60360, 2349
PRO60397, 882
PRO60438, 1867
PRO60475, 2735
PRO60499, 4262
PRO60542, 1397
PRO60575, 4087
PRO60579, 2181
PRO60603, 5427
PRO60634, 3556
PRO60666, 3391
PRO60674, 5202
PRO60741, 1336
PRO60753, 872
PRO60781, 2715
PRO60800, 5073
PRO60815, 84
PRO60847, 3216
PRO60860, 236
PRO60924, 3575
PRO60945, 5743
PRO60956, 1495
PRO60979, 4813
PRO60991, 3087
PRO61085, 4268
PRO61113, 5070
PRO61125, 195
PRO61129, 5569
PRO61146, 397
PRO61219, 4260
PRO61238, 3323
PRO61246, 5003
PRO61250, 90
PRO61271, 6231
PRO61308, 5575
PRO61325, 781
PRO61327, 5786
PRO61349, 5616
PRO61458, 5422
PRO61470, 6288
PRO61498, 5739
PRO61502, 3067
PRO61575, 5449
PRO61638, 349
PRO61661, 5024
PRO61679, 43
PRO61688, 2250
PRO61721, 2900
PRO61744, 6141
PRO61761, 689
PRO61799, 4361
PRO61812, 2237
PRO61824, 2247
PRO61870, 1183
PRO61897, 2795
PRO61938, 6191
PRO61948, 4477
PRO61977, 5278
PRO61999, 3913
PRO62039, 5116
PRO62065, 5893
PRO62069, 2865
PRO62075, 5442
PRO62077, 516
PRO62099, 4070
PRO62108, 2492
PRO62110, 4517
PRO62112, 5242
PRO62135, 1831
PRO62153, 1171
PRO62212, 5524
PRO62225, 5179
PRO62236, 2781
PRO62239, 750
PRO62244, 2177
PRO62273, 3764
PRO62302, 5162
PRO62328, 6000
PRO62389, 181
PRO62466, 6327
PRO62500, 5407
PRO62518, 193
PRO62529, 341
PRO62531, 5200
PRO62574, 453
PRO62582, 5543
PRO62588, 6150
PRO62607, 637
PRO62617, 2882
PRO62760, 931
PRO62770, 663
PRO62780, 4666
PRO62786, 745
PRO62849, 293
PRO62852, 4301
PRO62882, 4321
PRO62893, 652
PRO62899, 5103
PRO62927, 865
PRO62981, 4717
PRO63000, 2724
PRO63009, 2233
PRO63052, 1972
PRO63068, 4565
PRO63082, 1680
PRO63226, 5238
PRO63253, 1905
PRO63299, 6341
PRO6360, 1077
PRO6373, 2213
PRO65, 848
PRO66265, 4670
PRO66275, 3901
PRO66279, 2127
PRO66282, 2129
PRO69461, 3302
PRO69463, 32
PRO69471, 3840
PRO69473, 3027, 3760
PRO69475, 2266
PRO69486, 5906
PRO69496, 2702
PRO69506, 1953
PRO69513, 5015
PRO69518, 5280
PRO69521, 1901
PRO69523, 3011
PRO69528, 3237
PRO69531, 906
PRO69533, 5669
PRO69541, 5655
PRO69542, 2764
PRO69549, 3461
PRO69554, 1583
PRO69560, 5686
PRO69561, 4920
PRO69568, 3254
PRO69584, 1970
PRO69595, 4243
PRO69617, 4521
PRO69635, 3138
PRO69674, 3219
PRO69681, 1301
PRO69682, 4901
PRO69684, 4779
PRO70011, 2704
PRO70138, 1968
PRO70258, 656
PRO70276, 4447
PRO70290, 2762
PRO703, 380
PRO70327, 1637, 1639
PRO70331, 6030
PRO70333, 541
PRO70383, 6035
PRO70385, 5551
PRO70393, 2008
PRO70433, 351
PRO70449, 4729
PRO70453, 3621
PRO70536, 1460
PRO70544, 2033
PRO70595, 2681
PRO70675, 991
PRO70694, 3786
PRO70703, 4976
PRO70754, 439
PRO70810, 5639
PRO70812, 4700
PRO70989, 3828, 3830
PRO70993, 1719
PRO71031, 3433, 3435
PRO71057, 2997
PRO71085, 5563
PRO71088, 1947
PRO71089, 5641
PRO71091, 2591
PRO71093, 370
PRO71095, 1964
PRO71096, 3888
PRO71097, 5831
PRO71103, 1148
PRO71106, 1875
PRO71111, 2436
PRO71112, 221
PRO71120, 3718
PRO71125, 1985, 1987
PRO71130, 4576
PRO71133, 2255
PRO71136, 2309
PRO71141, 4715
PRO71142, 1913
PRO71145, 6039
PRO71146, 372
PRO71211, 2343
PRO71242, 5974
PRO7143, 4986
PRO730, 4274
PRO7427, 2239
PRO7445, 2594
PRO80480, 5
PRO80481, 7
PRO80482, 9
PRO80483, 11
PRO80484, 16
PRO80485, 18
PRO80487, 21
PRO80488, 23
PRO80489, 25
PRO80490, 27
PRO80492, 30
PRO80493, 35
PRO80494, 39
PRO80497, 47
PRO80498, 51
PRO80499, 53
PRO80501, 56
PRO80505, 63
PRO80506, 65
PRO80510, 70
PRO80511, 72
PRO80512, 74
PRO80517, 80
PRO80518, 86
PRO80519, 88
PRO80520, 92
PRO80521, 96
PRO80524, 100
PRO80527, 104
PRO80528, 108
PRO80530, 111
PRO80533, 115
PRO80534, 117
PRO80535, 119
PRO80536, 121
PRO80537, 123
PRO80542, 132
PRO80547, 138
PRO80550, 143
PRO80553, 149
PRO80554, 151
PRO80555, 153
PRO80557, 156
PRO80558, 160
PRO80559, 162
PRO80560, 164
PRO80561, 166
PRO80562, 170
PRO80563, 172
PRO80565, 179
PRO80567, 184
PRO80568, 186
PRO80570, 191
PRO80571, 197
PRO80574, 205
PRO80575, 207
PRO80576, 209
PRO80579, 215
PRO80580, 217
PRO80581, 223
PRO80582, 225
PRO80583, 227
PRO80584, 232
PRO80585, 234
PRO80586, 238
PRO80587, 240
PRO80588, 242
PRO80591, 246
PRO80592, 248
PRO80593, 252
PRO80595, 255
PRO80597, 258
PRO80599, 261
PRO80600, 263
PRO80602, 266
PRO80603, 270
PRO80604, 274
PRO80607, 278
PRO80611, 283
PRO80612, 285
PRO80613, 287
PRO80614, 291
PRO80617, 297
PRO80618, 299
PRO80619, 301
PRO80620, 303
PRO80621, 305
PRO80622, 307
PRO80623, 309
PRO80624, 311
PRO80625, 313
PRO80627, 316
PRO80630, 320
PRO80631, 322
PRO80633, 325
PRO80638, 333
PRO80639, 335
PRO80640, 337
PRO80641, 339
PRO80642, 345
PRO80644, 355
PRO80645, 359
PRO80646, 362
PRO80648, 365
PRO80651, 378
PRO80652, 382
PRO80654, 387
PRO80656, 390
PRO80657, 393
PRO80658, 399
PRO80659, 401
PRO80660, 405
PRO80661, 407
PRO80664, 413
PRO80665, 415
PRO80666, 417
PRO80667, 419
PRO80668, 421
PRO80669, 423
PRO80670, 425
PRO80671, 427
PRO80672, 431
PRO80675, 435
PRO80676, 441
PRO80677, 443
PRO80678, 445
PRO80679, 447
PRO80680, 449
PRO80684, 456
PRO80685, 460
PRO80686, 464
PRO80688, 467
PRO80689, 469
PRO80693, 478
PRO80694, 480
PRO80695, 482
PRO80699, 489
PRO80700, 491
PRO80704, 496
PRO80705, 502
PRO80706, 506
PRO80707, 508
PRO80708, 510
PRO80709, 512
PRO80710, 514
PRO80711, 518
PRO80714, 526
PRO80715, 528
PRO80717, 533
PRO80719, 536
PRO80720, 539
PRO80725, 549
PRO80730, 563
PRO80734, 570
PRO80735, 572
PRO80736, 574
PRO80740, 584
PRO80741, 588
PRO80742, 590
PRO80745, 597
PRO80752, 607
PRO80753, 609
PRO80754, 611
PRO80755, 613
PRO80756, 615
PRO80759, 621
PRO80760, 623
PRO80761, 627
PRO80762, 629
PRO80763, 631
PRO80764, 633
PRO80765, 635
PRO80767, 640
PRO80770, 648
PRO80771, 654
PRO80772, 658
PRO80773, 660
PRO80775, 666
PRO80776, 668
PRO80778, 671
PRO80779, 673
PRO80780, 675
PRO80781, 677
PRO80782, 679
PRO80785, 687
PRO80786, 691
PRO80787, 693
PRO80788, 695
PRO80789, 697
PRO80790, 702
PRO80791, 708
PRO80792, 710
PRO80793, 714
PRO80796, 718
PRO80797, 720
PRO80798, 722
PRO80799, 724
PRO80802, 728
PRO80803, 730
PRO80804, 732
PRO80806, 735
PRO80807, 737
PRO80808, 739
PRO80811, 754
PRO80812, 756
PRO80813, 758
PRO80814, 760
PRO80816, 767
PRO80817, 769
PRO80820, 774
PRO80823, 778
PRO80827, 786
PRO80830, 790
PRO80832, 797
PRO80833, 799
PRO80835, 802
PRO80837, 809
PRO80838, 811
PRO80839, 813
PRO80842, 819
PRO80843, 821
PRO80846, 826
PRO80847, 828
PRO80848, 830
PRO80850, 835
PRO80851, 837
PRO80853, 840
PRO80856, 844
PRO80857, 846
PRO80860, 852
PRO80866, 863
PRO80868, 868
PRO80869, 870
PRO80870, 874
PRO80871, 876
PRO80873, 879
PRO80875, 884
PRO80876, 886
PRO80877, 888
PRO80878, 890
PRO80879, 892
PRO80881, 895
PRO80882, 897
PRO80883, 904
PRO80884, 908
PRO80888, 913
PRO80889, 915
PRO80890, 917
PRO80891, 919
PRO80900, 937
PRO80901, 939
PRO80903, 943
PRO80904, 945
PRO80905, 947
PRO80906, 953
PRO80908, 956
PRO80910, 961
PRO80911, 963
PRO80915, 972
PRO80916, 974
PRO80917, 976
PRO80920, 987
PRO80921, 989
PRO80924, 997
PRO80925, 1001
PRO80926, 1003
PRO80927, 1005
PRO80929, 1008
PRO80930, 1010
PRO80932, 1013
PRO80933, 1015
PRO80934, 1017
PRO80935, 1019
PRO80936, 1021
PRO80937, 1023
PRO80938, 1027
PRO80941, 1031
PRO80942, 1033
PRO80943, 1035
PRO80945, 1038
PRO80949, 1044
PRO80950, 1046
PRO80951, 1048
PRO80952, 1050
PRO80953, 1052
PRO80954, 1054
PRO80955, 1056
PRO80956, 1058
PRO80958, 1061
PRO80959, 1065
PRO80960, 1069
PRO80961, 1071
PRO80962, 1073
PRO80966, 1080
PRO80967, 1084
PRO80969, 1087
PRO80970, 1092
PRO80971, 1102
PRO80972, 1104
PRO80974, 1107
PRO80975, 1111
PRO80977, 1114
PRO80978, 1116
PRO80979, 1118
PRO80983, 1124
PRO80984, 1126
PRO80988, 1135
PRO80990, 1138
PRO80993, 1142
PRO80994, 1144
PRO80995, 1152
PRO80996, 1158
PRO80997, 1160
PRO80999, 1164
PRO81000, 1168
PRO81002, 1173
PRO81003, 1175
PRO81004, 1177
PRO81005, 1179
PRO81006, 1181
PRO81007, 1185
PRO81010, 1191
PRO81012, 1194
PRO81015, 1200
PRO81022, 1210
PRO81023, 1212
PRO81025, 1215
PRO81026, 1219
PRO81028, 1222
PRO81029, 1226
PRO81030, 1228
PRO81031, 1230
PRO81033, 1233
PRO81034, 1236
PRO81036, 1241
PRO81040, 1247
PRO81041, 1249
PRO81042, 1251
PRO81043, 1253
PRO81046, 1259
PRO81047, 1261
PRO81053, 1269
PRO81056, 1279
PRO81057, 1281
PRO81058, 1283
PRO81059, 1287
PRO81064, 1293
PRO81068, 1298
PRO81070, 1303
PRO81071, 1305
PRO81072, 1307
PRO81073, 1309
PRO81074, 1311
PRO81079, 1319
PRO81080, 1321
PRO81082, 1324
PRO81083, 1326
PRO81086, 1334
PRO81088, 1339
PRO81090, 1342
PRO81093, 1346
PRO81095, 1349
PRO81096, 1351
PRO81097, 1355
PRO81098, 1357
PRO81102, 1362
PRO81106, 1367
PRO81107, 1373
PRO81108, 1375
PRO81109, 1377
PRO81110, 1379
PRO81111, 1381
PRO81112, 1383
PRO81113, 1385
PRO81114, 1389
PRO81115, 1391
PRO81116, 1393
PRO81117, 1395
PRO81118, 1399
PRO81119, 1401
PRO81120, 1403
PRO81121, 1405
PRO81122, 1407
PRO81123, 1409
PRO81124, 1411
PRO81127, 1415
PRO81131, 1422
PRO81134, 1426
PRO81135, 1428
PRO81137, 1431
PRO81141, 1436
PRO81146, 1444
PRO81148, 1454
PRO81150, 1458
PRO81151, 1462
PRO81156, 1467
PRO81163, 1475
PRO81166, 1481
PRO81169, 1486
PRO81170, 1488
PRO81171, 1492
PRO81174, 1498
PRO81176, 1501
PRO81177, 1503
PRO81178, 1505
PRO81179, 1507
PRO81181, 1514
PRO81182, 1518
PRO81184, 1521
PRO81185, 1523
PRO81188, 1527
PRO81189, 1529
PRO81195, 1536
PRO81196, 1538
PRO81199, 1542
PRO81202, 1546
PRO81213, 1558
PRO81214, 1560
PRO81216, 1563
PRO81219, 1566
PRO81221, 1569
PRO81223, 1576
PRO81224, 1578
PRO81225, 1580
PRO81227, 1585
PRO81230, 1589
PRO81234, 1594
PRO81238, 1601
PRO81239, 1603
PRO81240, 1605
PRO81241, 1607
PRO81246, 1613
PRO81248, 1616
PRO81249, 1618
PRO81250, 1620
PRO81254, 1630
PRO81256, 1635
PRO81259, 1645
PRO81260, 1649
PRO81261, 1651
PRO81262, 1653
PRO81264, 1657
PRO81265, 1659
PRO81266, 1661
PRO81269, 1667
PRO81272, 1674
PRO81273, 1682
PRO81274, 1684
PRO81275, 1686
PRO81276, 1692
PRO81277, 1694
PRO81278, 1696
PRO81280, 1703
PRO81281, 1705
PRO81282, 1707
PRO81286, 1715
PRO81287, 1717
PRO81289, 1725
PRO81290, 1727
PRO81291, 1729
PRO81292, 1731
PRO81293, 1737
PRO81294, 1739
PRO81295, 1743
PRO81296, 1745
PRO81297, 1747
PRO81298, 1749
PRO81299, 1751
PRO81300, 1753
PRO81301, 1755
PRO81302, 1757
PRO81303, 1759
PRO81304, 1761
PRO81305, 1763
PRO81306, 1767
PRO81307, 1769
PRO81308, 1771
PRO81309, 1773
PRO81310, 1775
PRO81311, 1777
PRO81313, 1782
PRO81314, 1784
PRO81315, 1786
PRO81316, 1788
PRO81317, 1790
PRO81318, 1794
PRO81319, 1796
PRO81323, 1801
PRO81325, 1806
PRO81327, 1809
PRO81330, 1815
PRO81336, 1825
PRO81337, 1827
PRO81338, 1833
PRO81339, 1835
PRO81340, 1837
PRO81341, 1839
PRO81345, 1844
PRO81347, 1849
PRO81354, 1864
PRO81355, 1869
PRO81356, 1873
PRO81359, 1881
PRO81362, 1885
PRO81363, 1889
PRO81364, 1891
PRO81365, 1895
PRO81366, 1897
PRO81367, 1899
PRO81368, 1903
PRO81369, 1907
PRO81370, 1911
PRO81371, 1915
PRO81372, 1917
PRO81375, 1925
PRO81377, 1930
PRO81379, 1933
PRO81380, 1935
PRO81387, 1945
PRO81394, 1966
PRO81395, 1974
PRO81396, 1976
PRO81397, 1978
PRO81398, 1980
PRO81399, 1982
PRO81400, 1989
PRO81401, 1991
PRO81402, 1993
PRO81404, 1996
PRO81406, 2001
PRO81407, 2005
PRO81409, 2010
PRO81410, 2012
PRO81411, 2014
PRO81414, 2018
PRO81415, 2020
PRO81416, 2022
PRO81417, 2026
PRO81418, 2028
PRO81419, 2030
PRO81421, 2038
PRO81422, 2040
PRO81424, 2043
PRO81426, 2046
PRO81427, 2048
PRO81429, 2051
PRO81430, 2053
PRO81435, 2061
PRO81436, 2063
PRO81439, 2067
PRO81441, 2073
PRO81443, 2076
PRO81444, 2078
PRO81446, 2082
PRO81447, 2084
PRO81448, 2086
PRO81449, 2088
PRO81453, 2093
PRO81454, 2095
PRO81455, 2097
PRO81457, 2102
PRO81462, 2112
PRO81464, 2115
PRO81465, 2117
PRO81467, 2120
PRO81471, 2125
PRO81474, 2133
PRO81476, 2136
PRO81477, 2138
PRO81481, 2143
PRO81486, 2149
PRO81487, 2153
PRO81490, 2156
PRO81491, 2158
PRO81494, 2162
PRO81495, 2164
PRO81496, 2166
PRO81498, 2169
PRO81499, 2171
PRO81500, 2173
PRO81501, 2179
PRO81502, 2187
PRO81503, 2189
PRO81505, 2192
PRO81506, 2196
PRO81508, 2199
PRO81509, 2201
PRO81514, 2209
PRO81515, 2211
PRO81516, 2215
PRO81517, 2217
PRO81520, 2221
PRO81521, 2223
PRO81523, 2227
PRO81524, 2231
PRO81525, 2235
PRO81526, 2241
PRO81529, 2252
PRO81531, 2257
PRO81534, 2261
PRO81536, 2268
PRO81537, 2270
PRO81538, 2272
PRO81540, 2277
PRO81541, 2279
PRO81544, 2283
PRO81545, 2285
PRO81546, 2287
PRO81547, 2289
PRO81548, 2291
PRO81550, 2294
PRO81551, 2296
PRO81552, 2298
PRO81556, 2303
PRO81557, 2305
PRO81558, 2307
PRO81561, 2314
PRO81566, 2320
PRO81569, 2324
PRO81571, 2327
PRO81572, 2330
PRO81573, 2332
PRO81574, 2334
PRO81575, 2336
PRO81578, 2341
PRO81579, 2345
PRO81580, 2347
PRO81584, 2354
PRO81585, 2356
PRO81586, 2358
PRO81587, 2360
PRO81588, 2364
PRO81589, 2368
PRO81590, 2374
PRO81591, 2377
PRO81592, 2379
PRO81594, 2382
PRO81595, 2384
PRO81598, 2388
PRO81599, 2390
PRO81600, 2392
PRO81602, 2401
PRO81605, 2405
PRO81607, 2408
PRO81608, 2410
PRO81609, 2412
PRO81611, 2415
PRO81614, 2419
PRO81615, 2421
PRO81617, 2424
PRO81618, 2426
PRO81619, 2428
PRO81621, 2431
PRO81625, 2438
PRO81627, 2445
PRO81629, 2448
PRO81630, 2450
PRO81631, 2452
PRO81634, 2463
PRO81635, 2465
PRO81637, 2468
PRO81641, 2474
PRO81643, 2481
PRO81645, 2486
PRO81647, 2489
PRO81649, 2494
PRO81650, 2498
PRO81651, 2500
PRO81652, 2502
PRO81653, 2504
PRO81654, 2509
PRO81655, 2511
PRO81657, 2516
PRO81658, 2518
PRO81659, 2520
PRO81660, 2522
PRO81661, 2524
PRO81664, 2528
PRO81668, 2537
PRO81669, 2539
PRO81671, 2542
PRO81673, 2545
PRO81674, 2549
PRO81675, 2555
PRO81685, 2570
PRO81687, 2573
PRO81689, 2576
PRO81690, 2578
PRO81691, 2580
PRO81695, 2585
PRO81696, 2587
PRO81699, 2597
PRO81700, 2599
PRO81701, 2603
PRO81704, 2607
PRO81705, 2610
PRO81708, 2617
PRO81711, 2621
PRO81714, 2624
PRO81719, 2630
PRO81720, 2632
PRO81722, 2639
PRO81725, 2643
PRO81729, 2648
PRO81730, 2650
PRO81731, 2654
PRO81732, 2658
PRO81734, 2665
PRO81736, 2678
PRO81738, 2683
PRO81739, 2685
PRO81740, 2687
PRO81742, 2690
PRO81743, 2698
PRO81746, 2706
PRO81748, 2709
PRO81751, 2713
PRO81752, 2717
PRO81753, 2719
PRO81754, 2721
PRO81759, 2729
PRO81760, 2731
PRO81761, 2733
PRO81762, 2737
PRO81763, 2739
PRO81764, 2743
PRO81765, 2745
PRO81766, 2749
PRO81768, 2754
PRO81771, 2758
PRO81775, 2770
PRO81778, 2776
PRO81780, 2779
PRO81781, 2785
PRO81783, 2788
PRO81785, 2791
PRO81786, 2793
PRO81792, 2805
PRO81794, 2810
PRO81795, 2812
PRO81796, 2814
PRO81797, 2816
PRO81800, 2821
PRO81801, 2823
PRO81804, 2827
PRO81805, 2829
PRO81806, 2831
PRO81809, 2837
PRO81811, 2840
PRO81812, 2842
PRO81813, 2844
PRO81815, 2848
PRO81816, 2850
PRO81817, 2853
PRO81819, 2858
PRO81821, 2861
PRO81822, 2863
PRO81823, 2867
PRO81824, 2869
PRO81826, 2872
PRO81831, 2880
PRO81832, 2884
PRO81833, 2886
PRO81834, 2888
PRO81835, 2890
PRO81836, 2892
PRO81837, 2894
PRO81838, 2896
PRO81841, 2903
PRO81842, 2907
PRO81846, 2912
PRO81848, 2915
PRO81849, 2917
PRO81851, 2920
PRO81855, 2928
PRO81858, 2932
PRO81861, 2936
PRO81862, 2938
PRO81863, 2940
PRO81865, 2943
PRO81867, 2946
PRO81868, 2950
PRO81869, 2954
PRO81870, 2956
PRO81871, 2958
PRO81872, 2960
PRO81874, 2967
PRO81875, 2969
PRO81877, 2972
PRO81881, 2979
PRO81882, 2985
PRO81883, 2989
PRO81884, 2993
PRO81885, 2995
PRO81887, 3001
PRO81888, 3003
PRO81889, 3007
PRO81893, 3018
PRO81895, 3021
PRO81896, 3023
PRO81897, 3025
PRO81899, 3030
PRO81900, 3032
PRO81901, 3034
PRO81902, 3036
PRO81903, 3038
PRO81904, 3040
PRO81905, 3043
PRO81907, 3046
PRO81908, 3048
PRO81909, 3054
PRO81912, 3060
PRO81913, 3062
PRO81914, 3064
PRO81916, 3069
PRO81917, 3071
PRO81922, 3079
PRO81923, 3081
PRO81924, 3083
PRO81925, 3085
PRO81926, 3090
PRO81927, 3092
PRO81928, 3096
PRO81929, 3098
PRO81930, 3100
PRO81932, 3105
PRO81934, 3108
PRO81935, 3112
PRO81936, 3116
PRO81937, 3118
PRO81939, 3123
PRO81941, 3126
PRO81942, 3128
PRO81943, 3130
PRO81944, 3132
PRO81945, 3140
PRO81946, 3143
PRO81947, 3145
PRO81948, 3147
PRO81950, 3150
PRO81953, 3154
PRO81954, 3158
PRO81955, 3160
PRO81956, 3162
PRO81957, 3164
PRO81958, 3166
PRO81959, 3168
PRO81962, 3174
PRO81964, 3179
PRO81965, 3181
PRO81970, 3189
PRO81971, 3191
PRO81977, 3198
PRO81978, 3200
PRO81980, 3203
PRO81981, 3211
PRO81982, 3213
PRO81988, 3226
PRO81990, 3229
PRO81991, 3231
PRO81992, 3233
PRO81993, 3235
PRO81994, 3239
PRO81995, 3241
PRO81996, 3243
PRO81999, 3252
PRO82002, 3262
PRO82004, 3265
PRO82005, 3267
PRO82009, 3274
PRO82011, 3277
PRO82013, 3280
PRO82018, 3290
PRO82019, 3292
PRO82023, 3305
PRO82024, 3309
PRO82027, 3317
PRO82028, 3319
PRO82029, 3321
PRO82032, 3332
PRO82034, 3338
PRO82035, 3340
PRO82037, 3343
PRO82038, 3347
PRO82040, 3351
PRO82042, 3354
PRO82043, 3356
PRO82045, 3360
PRO82046, 3362
PRO82050, 3368
PRO82051, 3370
PRO82052, 3372
PRO82054, 3375
PRO82055, 3379
PRO82056, 3383
PRO82057, 3387
PRO82058, 3389
PRO82060, 3396
PRO82064, 3402
PRO82066, 3405
PRO82068, 3408
PRO82069, 3410
PRO82072, 3419
PRO82073, 3421
PRO82074, 3423
PRO82075, 3425
PRO82078, 3431
PRO82080, 3438
PRO82082, 3443
PRO82083, 3445
PRO82084, 3447
PRO82085, 3449
PRO82091, 3464
PRO82093, 3471
PRO82097, 3484
PRO82099, 3487
PRO82101, 3492
PRO82104, 3497
PRO82106, 3502
PRO82107, 3505
PRO82109, 3508
PRO82110, 3510
PRO82111, 3514
PRO82112, 3516
PRO82113, 3518
PRO82115, 3523
PRO82117, 3530
PRO82120, 3534
PRO82122, 3537
PRO82125, 3541
PRO82127, 3544
PRO82129, 3547
PRO82130, 3549
PRO82131, 3553
PRO82133, 3558
PRO82137, 3563
PRO82138, 3565
PRO82139, 3567
PRO82140, 3569
PRO82143, 3573
PRO82152, 3587
PRO82155, 3597
PRO82158, 3603
PRO82159, 3605
PRO82160, 3607
PRO82161, 3609
PRO82162, 3611
PRO82163, 3613
PRO82164, 3615
PRO82165, 3617
PRO82166, 3619
PRO82167, 3623
PRO82168, 3625
PRO82169, 3627
PRO82174, 3637
PRO82175, 3639
PRO82179, 3644
PRO82181, 3647
PRO82182, 3649
PRO82183, 3651
PRO82184, 3653
PRO82188, 3670
PRO82190, 3673
PRO82191, 3675
PRO82192, 3677
PRO82194, 3686
PRO82195, 3690
PRO82196, 3692
PRO82197, 3694
PRO82198, 3696
PRO82199, 3698
PRO82201, 3701
PRO82202, 3703
PRO82204, 3706
PRO82206, 3709
PRO82207, 3711
PRO82208, 3713
PRO82210, 3716
PRO82212, 3723
PRO82213, 3733
PRO82214, 3735
PRO82215, 3738
PRO82218, 3745
PRO82219, 3747
PRO82220, 3749
PRO82221, 3751
PRO82223, 3756
PRO82224, 3762
PRO82227, 3768
PRO82228, 3770
PRO82232, 3776
PRO82233, 3780
PRO82234, 3782
PRO82235, 3784
PRO82237, 3789
PRO82238, 3791
PRO82239, 3793
PRO82240, 3795
PRO82243, 3799
PRO82244, 3801
PRO82245, 3803
PRO82247, 3806
PRO82248, 3808
PRO82250, 3811
PRO82252, 3813
PRO82253, 3815
PRO82255, 3820
PRO82256, 3822
PRO82259, 3832
PRO82263, 3838
PRO82264, 3842
PRO82265, 3844
PRO82266, 3846
PRO82267, 3850
PRO82268, 3852
PRO82269, 3854
PRO82272, 3858
PRO82273, 3860
PRO82275, 3863
PRO82278, 3871
PRO82279, 3873
PRO82280, 3875
PRO82283, 3879
PRO82285, 3882
PRO82287, 3885
PRO82289, 3890
PRO82290, 3892
PRO82291, 3894
PRO82295, 3905
PRO82296, 3907
PRO82297, 3911
PRO82300, 3919
PRO82302, 3922
PRO82305, 3927
PRO82306, 3929
PRO82311, 3934
PRO82312, 3936
PRO82314, 3939
PRO82315, 3941
PRO82316, 3943
PRO82317, 3945
PRO82318, 3947
PRO82321, 3954
PRO82322, 3956
PRO82325, 3961
PRO82326, 3965
PRO82329, 3970
PRO82330, 3972
PRO82331, 3974
PRO82333, 3979
PRO82334, 3982
PRO82338, 3989
PRO82342, 3998
PRO82343, 4000
PRO82344, 4002
PRO82345, 4004
PRO82347, 4007
PRO82348, 4009
PRO82349, 4011
PRO82350, 4013
PRO82351, 4015
PRO82352, 4017
PRO82355, 4021
PRO82356, 4023
PRO82357, 4026
PRO82358, 4028
PRO82359, 4030
PRO82364, 4036
PRO82365, 4038
PRO82367, 4041
PRO82369, 4047
PRO82370, 4051
PRO82371, 4053
PRO82373, 4056
PRO82374, 4058
PRO82375, 4062
PRO82381, 4076
PRO82382, 4078
PRO82383, 4083
PRO82384, 4085
PRO82385, 4089
PRO82388, 4093
PRO82391, 4099
PRO82393, 4104
PRO82395, 4107
PRO82396, 4109
PRO82397, 4113
PRO82400, 4117
PRO82408, 4126
PRO82409, 4128
PRO82411, 4131
PRO82415, 4137
PRO82417, 4140
PRO82418, 4144
PRO82419, 4146
PRO82421, 4149
PRO82422, 4151
PRO82423, 4153
PRO82424, 4155
PRO82425, 4158
PRO82428, 4164
PRO82429, 4166
PRO82431, 4169
PRO82432, 4173
PRO82433, 4177
PRO82434, 4181
PRO82435, 4185
PRO82437, 4188
PRO82438, 4190
PRO82439, 4192
PRO82440, 4194
PRO82441, 4196
PRO82442, 4198
PRO82444, 4201
PRO82446, 4206
PRO82448, 4212
PRO82450, 4217
PRO82453, 4223
PRO82454, 4227
PRO82455, 4229
PRO82456, 4231
PRO82457, 4233
PRO82458, 4235
PRO82460, 4238
PRO82461, 4240
PRO82465, 4247
PRO82466, 4249
PRO82469, 4253
PRO82470, 4255
PRO82472, 4258
PRO82473, 4264
PRO82475, 4271
PRO82477, 4276
PRO82479, 4280
PRO82482, 4284
PRO82485, 4288
PRO82487, 4291
PRO82489, 4294
PRO82491, 4297
PRO82492, 4299
PRO82493, 4303
PRO82495, 4308
PRO82499, 4313
PRO82501, 4316
PRO82502, 4318
PRO82505, 4324
PRO82508, 4328
PRO82509, 4330
PRO82510, 4332
PRO82513, 4339
PRO82514, 4341
PRO82515, 4345
PRO82516, 4347
PRO82517, 4349
PRO82518, 4351
PRO82521, 4365
PRO82522, 4367
PRO82523, 4369
PRO82524, 4377
PRO82525, 4379
PRO82526, 4381
PRO82527, 4383
PRO82528, 4385
PRO82529, 4387
PRO82530, 4389
PRO82531, 4391
PRO82532, 4393
PRO82533, 4395
PRO82534, 4397
PRO82535, 4401
PRO82536, 4403
PRO82537, 4405
PRO82538, 4407
PRO82540, 4412
PRO82542, 4415
PRO82543, 4417
PRO82544, 4419
PRO82546, 4424
PRO82548, 4428
PRO82551, 4433
PRO82554, 4437
PRO82555, 4439
PRO82556, 4441
PRO82557, 4443
PRO82558, 4445
PRO82560, 4452
PRO82562, 4455
PRO82563, 4457
PRO82564, 4459
PRO82567, 4464
PRO82568, 4466
PRO82570, 4469
PRO82571, 4471
PRO82572, 4473
PRO82573, 4475
PRO82576, 4481
PRO82579, 4486
PRO82582, 4492
PRO82583, 4494
PRO82584, 4496
PRO82585, 4499
PRO82586, 4501
PRO82587, 4503
PRO82589, 4506
PRO82590, 4510
PRO82592, 4515
PRO82593, 4523
PRO82594, 4525
PRO82597, 4529
PRO82598, 4533
PRO82599, 4536
PRO82602, 4540
PRO82603, 4542
PRO82606, 4546
PRO82607, 4548
PRO82608, 4552
PRO82609, 4554
PRO82611, 4557
PRO82612, 4559
PRO82615, 4563
PRO82616, 4567
PRO82618, 4572
PRO82619, 4574
PRO82621, 4585
PRO82622, 4587
PRO82623, 4589
PRO82624, 4591
PRO82625, 4593
PRO82626, 4595
PRO82627, 4598
PRO82629, 4601
PRO82630, 4603
PRO82631, 4605
PRO82632, 4607
PRO82633, 4609
PRO82634, 4611
PRO82635, 4615
PRO82637, 4618
PRO82638, 4620
PRO82640, 4623
PRO82641, 4625
PRO82642, 4629
PRO82643, 4631
PRO82645, 4634
PRO82646, 4636
PRO82654, 4649
PRO82656, 4652
PRO82658, 4655
PRO82659, 4657
PRO82661, 4660
PRO82662, 4662
PRO82663, 4664
PRO82664, 4668
PRO82665, 4673
PRO82667, 4676
PRO82669, 4679
PRO82670, 4681
PRO82671, 4683
PRO82672, 4685
PRO82674, 4690
PRO82675, 4692
PRO82678, 4698
PRO82679, 4702
PRO82683, 4711
PRO82687, 4722
PRO82689, 4726
PRO82691, 4731
PRO82692, 4733
PRO82694, 4736
PRO82695, 4738
PRO82696, 4740
PRO82699, 4746
PRO82702, 4753
PRO82704, 4756
PRO82706, 4759
PRO82707, 4762
PRO82708, 4764
PRO82709, 4766
PRO82712, 4770
PRO82713, 4772
PRO82714, 4774
PRO82715, 4776
PRO82717, 4781
PRO82718, 4785
PRO82719, 4787
PRO82720, 4789
PRO82721, 4791
PRO82722, 4795
PRO82724, 4802
PRO82725, 4804
PRO82726, 4808
PRO82728, 4811
PRO82729, 4815
PRO82730, 4817
PRO82732, 4823
PRO82736, 4828
PRO82737, 4831
PRO82738, 4833
PRO82739, 4835
PRO82740, 4837
PRO82741, 4839
PRO82743, 4848
PRO82745, 4851
PRO82746, 4853
PRO82748, 4858
PRO82749, 4860
PRO82750, 4862
PRO82753, 4866
PRO82754, 4868
PRO82755, 4870
PRO82756, 4872
PRO82757, 4874
PRO82758, 4876
PRO82760, 4882
PRO82761, 4884
PRO82762, 4886
PRO82763, 4894
PRO82764, 4896
PRO82768, 4907
PRO82769, 4909
PRO82771, 4914
PRO82774, 4922
PRO82776, 4925
PRO82778, 4930
PRO82779, 4932
PRO82787, 4947
PRO82788, 4949
PRO82790, 4952
PRO82791, 4956
PRO82792, 4959
PRO82793, 4961
PRO82794, 4966
PRO82795, 4968
PRO82796, 4972
PRO82797, 4974
PRO82799, 4979
PRO82800, 4981
PRO82805, 4993
PRO82807, 4997
PRO82812, 5005
PRO82813, 5007
PRO82814, 5009
PRO82816, 5012
PRO82818, 5017
PRO82825, 5029
PRO82828, 5033
PRO82829, 5035
PRO82831, 5038
PRO82833, 5044
PRO82835, 5047
PRO82840, 5059
PRO82841, 5061
PRO82842, 5063
PRO82846, 5068
PRO82850, 5077
PRO82851, 5079
PRO82852, 5081
PRO82855, 5085
PRO82856, 5087
PRO82859, 5091
PRO82861, 5099
PRO82862, 5101
PRO82863, 5105
PRO82864, 5107
PRO82867, 5111
PRO82871, 5118
PRO82872, 5121
PRO82873, 5125
PRO82874, 5129
PRO82877, 5136
PRO82879, 5139
PRO82881, 5142
PRO82882, 5144
PRO82884, 5149
PRO82885, 5151
PRO82886, 5153
PRO82887, 5156
PRO82888, 5158
PRO82892, 5167
PRO82893, 5170
PRO82894, 5172
PRO82895, 5174
PRO82897, 5177
PRO82899, 5182
PRO82901, 5185
PRO82902, 5187
PRO82903, 5189
PRO82904, 5191
PRO82905, 5193
PRO82909, 5198
PRO82910, 5204
PRO82912, 5211
PRO82915, 5215
PRO82917, 5220
PRO82920, 5224
PRO82923, 5228
PRO82925, 5231
PRO82930, 5245
PRO82933, 5249
PRO82934, 5253
PRO82935, 5255
PRO82939, 5263
PRO82940, 5265
PRO82943, 5271
PRO82944, 5275
PRO82947, 5287
PRO82948, 5289
PRO82949, 5291
PRO82950, 5293
PRO82952, 5296
PRO82954, 5301
PRO82956, 5304
PRO82957, 5306
PRO82958, 5309
PRO82962, 5318
PRO82963, 5320
PRO82964, 5322
PRO82965, 5324
PRO82967, 5327
PRO82970, 5333
PRO82971, 5335
PRO82975, 5340
PRO82976, 5342
PRO82977, 5344
PRO82978, 5346
PRO82979, 5348
PRO82980, 5351
PRO82982, 5356
PRO82983, 5359
PRO82984, 5363
PRO82985, 5365
PRO82987, 5368
PRO82991, 5373
PRO82992, 5375
PRO82995, 5381
PRO82998, 5386
PRO82999, 5390
PRO83000, 5392
PRO83002, 5397
PRO83004, 5400
PRO83005, 5402
PRO83007, 5405
PRO83008, 5410
PRO83009, 5412
PRO83010, 5414
PRO83011, 5416
PRO83012, 5418
PRO83013, 5420
PRO83014, 5424
PRO83016, 5431
PRO83017, 5433
PRO83018, 5437
PRO83027, 5452
PRO83029, 5455
PRO83030, 5457
PRO83031, 5459
PRO83035, 5464
PRO83037, 5467
PRO83038, 5469
PRO83039, 5471
PRO83040, 5473
PRO83041, 5475
PRO83042, 5481
PRO83050, 5493
PRO83052, 5500
PRO83054, 5509
PRO83056, 5520
PRO83059, 5526
PRO83065, 5533
PRO83066, 5535
PRO83068, 5538
PRO83069, 5540
PRO83071, 5545
PRO83072, 5547
PRO83073, 5553
PRO83074, 5555
PRO83075, 5557
PRO83076, 5559
PRO83077, 5561
PRO83078, 5567
PRO83080, 5572
PRO83082, 5579
PRO83083, 5581
PRO83084, 5583
PRO83085, 5585
PRO83086, 5587
PRO83087, 5596
PRO83089, 5599
PRO83090, 5601
PRO83092, 5604
PRO83093, 5606
PRO83095, 5609
PRO83096, 5611
PRO83098, 5614
PRO83099, 5618
PRO83100, 5620
PRO83101, 5622
PRO83102, 5624
PRO83103, 5630
PRO83104, 5632
PRO83105, 5634
PRO83107, 5637
PRO83108, 5643
PRO83109, 5645
PRO83112, 5653
PRO83113, 5657
PRO83114, 5659
PRO83116, 5662
PRO83117, 5664
PRO83118, 5666
PRO83121, 5672
PRO83125, 5684
PRO83128, 5690
PRO83129, 5692
PRO83130, 5694
PRO83132, 5697
PRO83133, 5699
PRO83135, 5702
PRO83137, 5707
PRO83138, 5709
PRO83139, 5711
PRO83141, 5714
PRO83142, 5716
PRO83143, 5718
PRO83144, 5720
PRO83145, 5724
PRO83146, 5726
PRO83149, 5730
PRO83150, 5732
PRO83152, 5737
PRO83153, 5741
PRO83155, 5751
PRO83156, 5753
PRO83157, 5755
PRO83159, 5758
PRO83161, 5764
PRO83163, 5767
PRO83165, 5770
PRO83167, 5777
PRO83169, 5784
PRO83170, 5788
PRO83174, 5797
PRO83175, 5799
PRO83176, 5801
PRO83177, 5803
PRO83178, 5805
PRO83179, 5807
PRO83180, 5812
PRO83182, 5817
PRO83183, 5820
PRO83184, 5822
PRO83185, 5827
PRO83186, 5829
PRO83187, 5833
PRO83188, 5835
PRO83189, 5839
PRO83190, 5841
PRO83191, 5843
PRO83193, 5848
PRO83194, 5850
PRO83195, 5852
PRO83196, 5854
PRO83197, 5856
PRO83198, 5858
PRO83199, 5860
PRO83200, 5862
PRO83201, 5864
PRO83202, 5866
PRO83203, 5868
PRO83204, 5870
PRO83205, 5872
PRO83210, 5884
PRO83211, 5888
PRO83212, 5895
PRO83213, 5899
PRO83214, 5901
PRO83217, 5909
PRO83219, 5912
PRO83222, 5916
PRO83223, 5918
PRO83224, 5920
PRO83233, 5932
PRO83234, 5934
PRO83235, 5938
PRO83236, 5942
PRO83237, 5944
PRO83242, 5952
PRO83244, 5955
PRO83245, 5959
PRO83247, 5962
PRO83252, 5970
PRO83253, 5972
PRO83254, 5978
PRO83255, 5980
PRO83256, 5982
PRO83257, 5984
PRO83260, 5988
PRO83261, 5992
PRO83263, 5997
PRO83265, 6002
PRO83266, 6008
PRO83267, 6010
PRO83270, 6016
PRO83271, 6018
PRO83273, 6026
PRO83274, 6033
PRO83275, 6037
PRO83276, 6041
PRO83278, 6044
PRO83279, 6048
PRO83280, 6050
PRO83282, 6053
PRO83283, 6057
PRO83285, 6062
PRO83288, 6067
PRO83289, 6073
PRO83291, 6078
PRO83292, 6084
PRO83293, 6086
PRO83297, 6092
PRO83300, 6096
PRO83301, 6098
PRO83302, 6100
PRO83304, 6107
PRO83306, 6110
PRO83307, 6112
PRO83309, 6115
PRO83310, 6117
PRO83312, 6120
PRO83316, 6129
PRO83319, 6133
PRO83320, 6135
PRO83321, 6137
PRO83323, 6144
PRO83328, 6156
PRO83331, 6162
PRO83332, 6164
PRO83333, 6166
PRO83334, 6168
PRO83335, 6171
PRO83337, 6175
PRO83339, 6178
PRO83340, 6180
PRO83341, 6184
PRO83343, 6193
PRO83344, 6195
PRO83345, 6200
PRO83346, 6202
PRO83349, 6208
PRO83351, 6211
PRO83352, 6213
PRO83353, 6219
PRO83354, 6221
PRO83355, 6223
PRO83360, 6234
PRO83361, 6236
PRO83365, 6247
PRO83366, 6249
PRO83368, 6252
PRO83369, 6254
PRO83372, 6260
PRO83373, 6262
PRO83374, 6264
PRO83375, 6266
PRO83381, 6277
PRO83383, 6283
PRO83385, 6290
PRO83386, 6292
PRO83387, 6294
PRO83388, 6296
PRO83389, 6298
PRO83391, 6301
PRO83392, 6303
PRO83393, 6305
PRO83394, 6307
PRO83395, 6309
PRO83397, 6314
PRO83400, 6324
PRO83403, 6331
PRO83404, 6337
PRO83405, 6347
PRO868, 1871
PRO9112, 3668
PRO9785, 1369
PRO9819, 2676
PRO983, 5825
PRO9886, 706
PRO9902, 2952
PRO9980, 2479
PRO9984, 969
PRO9987, 3753

[6393] Accession Index (to Figure number)

NM_000018, 4669
NM_000026, 6068
NM_000029, 624
NM_000033, 6342
NM_000034, 4520
NM_000039, 3376
NM_000041, 5511
NM_000070, 4161
NM_000075, 3683
NM_000077, 2655
NM_000079, 898
NM_000090, 921
NM_000107, 3208
NM_000114, 5836
NM_000121, 5258
NM_000126, 4267
NM_000137, 4300
NM_000143, 636
NM_000146, 5562
NM_000154, 4967
NM_000156, 5122
NM_000165, 2099
NM_000177, 2796
NM_000178, 5738
NM_000179, 744
NM_000182, 713
NM_000183, 711
NM_000184, 3144
NM_000196, 4547
NM_000213, 4963
NM_000221, 701
NM_000224, 3593
NM_000227, 5040
NM_000228, 553
NM_000239, 3729
NM_000250, 4903
NM_000251, 741
NM_000268, 5994
NM_000269, 4889
NM_000274, 3076
NM_000284, 6138
NM_000291, 6230
NM_000358, 1671
NM_000365, 3460
NM_000368, 2806
NM_000385, 2262
NM_000386, 4843
NM_000396, 356
NM_000404, 1089
NM_000407, 5947
NM_000422, 4807
NM_000425, 6334
NM_000447, 594
NM_000484, 5882
NM_000505, 1828
NM_000508, 1511
NM_000509, 1515
NM_000516, 5830
NM_000517, 4354
NM_000521, 1627
NM_000526, 4816
NM_000532, 1260
NM_000554, 5480
NM_000558, 4356
NM_000559, 3142
NM_000569, 505
NM_000574, 558
NM_000576, 847
NM_000582, 1459
NM_000592, 1957
NM_000598, 2228
NM_000602, 2361
NM_000612, 3120
NM_000638, 4763
NM_000661, 1425
NM_000666, 1172
NM_000687, 5736
NM_000688, 1167
NM_000700, 2695
NM_000701, 312
NM_000743, 4259
NM_000754, 5956
NM_000760, 173
NM_000785, 3687
NM_000787, 2830
NM_000795, 3384
NM_000801, 5648
NM_000852, 3297
NM_000858, 612
NM_000893, 1327
NM_000895, 3763
NM_000930, 2534
NM_000931, 2536
NM_000942, 4218
NM_000954, 2868
NM_000964, 4820
NM_000967, 6061
NM_000969, 284
NM_000970, 3781
NM_000971, 2569
NM_000972, 2826
NM_000973, 2633
NM_000975, 87
NM_000976, 2780
NM_000977, 4633
NM_000978, 4801
NM_000979, 5571
NM_000980, 5334
NM_000981, 4798
NM_000982, 3091
NM_000983, 34
NM_000985, 5067
NM_000986, 1206
NM_000987, 4714
NM_000989, 2588
NM_000990, 3155
NM_000991, 5613
NM_000992, 1170
NM_000993, 832
NM_000994, 1064
NM_000997, 1570
NM_000998, 966
NM_001000, 6278
NM_001002, 3827
NM_001003, 4228
NM_001005, 3331
NM_001006, 1506
NM_001007, 6224
NM_001009, 5633
NM_001010, 2651
NM_001011, 643
NM_001012, 210
NM_001016, 2111
NM_001017, 3171
NM_001018, 5126
NM_001020, 5426
NM_001021, 4283
NM_001022, 5468
NM_001023, 2552
NM_001024, 5847
NM_001025, 1632
NM_001026, 2980
NM_001028, 3361
NM_001029, 3656
NM_001030, 440
NM_001034, 651
NM_001038, 3478
NM_001043, 4487
NM_001050, 4841
NM_001064, 1159
NM_001065, 3480
NM_001068, 1079
NM_001069, 2050
NM_001084, 2369
NM_001087, 994
NM_001098, 6079
NM_001101, 2174
NM_001102, 4040
NM_001122, 2649
NM_001134, 1446
NM_001154, 1489
NM_001157, 2990
NM_001168, 4985
NM_001190, 5568
NM_001199, 2495
NM_001207, 1624
NM_001211, 4139
NM_001218, 4203
NM_001235, 3333
NM_001238, 5374
NM_001247, 5703
NM_001255, 194
NM_001262, 229
NM_001273, 3468
NM_001274, 3411
NM_001275, 4065
NM_001283, 2365
NM_001287, 4372
NM_001288, 1969
NM_001293, 3337
NM_001294, 5508
NM_001313, 1396
NM_001319, 5141
NM_001320, 1971
NM_001324, 5814
NM_001325, 6239
NM_001333, 2736
NM_001344, 3984
NM_001350, 1942
NM_001363, 6318
NM_001407, 1132
NM_001415, 6143
NM_001416, 4687
NM_001418, 3163
NM_001428, 31
NM_001436, 5436
NM_001444, 2575
NM_001450, 836
NM_001463, 916
NM_001465, 1573
NM_001467, 3359
NM_001469, 6081
NM_001494, 2891
NM_001500, 2052
NM_001517, 1997
NM_001521, 689
NM_001530, 4016
NM_001536, 5539
NM_001539, 2660
NM_001540, 2308
NM_001553, 1435
NM_001554, 269
NM_001560, 6270
NM_001567, 3322
NM_001568, 2596
NM_001569, 6332
NM_001571, 5542
NM_001605, 4564
NM_001607, 1097
NM_001610, 3206
NM_001613, 3008
NM_001622, 1330
NM_001628, 2423
NM_001641, 3997
NM_001644, 3511
NM_001647, 1352
NM_001648, 5590
NM_001659, 3550
NM_001662, 2398
NM_001667, 3284
NM_001673, 2355
NM_001687, 5115
NM_001688, 308
NM_001696, 5941
NM_001697, 5892
NM_001710, 1959
NM_001734, 3452
NM_001743, 5494
NM_001747, 806
NM_001751, 3137
NM_001753, 2391
NM_001757, 5894
NM_001760, 1898
NM_001762, 2274
NM_001780, 3663
NM_001791, 81
NM_001816, 5478
NM_001819, 5679
NM_001827, 2714
NM_001831, 2506
NM_001833, 2689
NM_001842, 2668
NM_001853, 5853
NM_001861, 4614
NM_001862, 827
NM_001878, 392
NM_001907, 4579
NM_001909, 3133
NM_001920, 3740
NM_001930, 5267
NM_001935, 894
NM_001944, 5050
NM_001959, 950
NM_001961, 5178
NM_001964, 1689
NM_001969, 4098
NM_001970, 4697
NM_001975, 3458
NM_001983, 5502
NM_001985, 5593
NM_002003, 2834
NM_002004, 422
NM_002011, 1836
NM_002014, 3439
NM_002015, 3896
NM_002018, 4719
NM_002028, 4010
NM_002046, 3473
NM_002047, 2265
NM_002075, 3463
NM_002079, 3066
NM_002083, 4012
NM_002084, 1704
NM_002085, 5112
NM_002086, 4953
NM_002087, 4845
NM_002106, 1478
NM_002109, 1779
NM_002128, 3887
NM_002129, 1522
NM_002130, 1582
NM_002133, 6020
NM_002137, 2210
NM_002157, 930
NM_002161, 2716
NM_002168, 4293
NM_002178, 3600
NM_002211, 2919
NM_002212, 5742
NM_002229, 5272
NM_002265, 4834
NM_002273, 3591
NM_002274, 4814
NM_002275, 4812
NM_002276, 4810
NM_002295, 1108
NM_002305, 6038
NM_002306, 4022
NM_002339, 3115
NM_002340, 5931
NM_002342, 3476
NM_002345, 3752
NM_002355, 3489
NM_002358, 1485
NM_002364, 6147
NM_002385, 5086
NM_002386, 4626
NM_002388, 1866
NM_002396, 5069
NM_002397, 1646
NM_002401, 4933
NM_002411, 3245
NM_002413, 1494
NM_002414, 6124
NM_002415, 5979
NM_002453, 751
NM_002466, 5774
NM_002468, 1095
NM_002473, 6025
NM_002477, 1368
NM_002484, 4416
NM_002486, 2734
NM_002489, 2193
NM_002492, 1297
NM_002512, 4887
NM_002520, 1803
NM_002537, 4210
NM_002539, 659
NM_002567, 3816
NM_002568, 2593
NM_002574, 220
NM_002588, 1728
NM_002606, 5900
NM_002615, 4647
NM_002617, 12
NM_002632, 4052
NM_002634, 4939
NM_002638, 5779
NM_002654, 4242
NM_002660, 5771
NM_002668, 6185
NM_002689, 3289
NM_002691, 5580
NM_002707, 681
NM_002712, 1030
NM_002720, 4518
NM_002727, 2961
NM_002730, 5298
NM_002733, 3555
NM_002766, 4975
NM_002787, 2254
NM_002789, 4261
NM_002792, 5838
NM_002793, 2137
NM_002796, 346
NM_002802, 4059
NM_002803, 2378
NM_002809, 4805
NM_002810, 348
NM_002812, 5401
NM_002813, 3837
NM_002815, 4778
NM_002819, 5102
NM_002827, 5809
NM_002846, 980
NM_002854, 1188
NM_002856, 5515
NM_002857, 481
NM_002863, 4029
NM_002870, 438
NM_002878, 4784
NM_002883, 6075
NM_002887, 1800
NM_002913, 1427
NM_002915, 3891
NM_002921, 3002
NM_002923, 540
NM_002934, 3992
NM_002938, 1386
NM_002946, 127
NM_002947, 2188
NM_002948, 1076
NM_002952, 4382
NM_002954, 749
NM_002961, 369
NM_002965, 364
NM_002979, 235
NM_003002, 3390
NM_003021, 5161
NM_003025, 5188
NM_003055, 2947
NM_003064, 5781
NM_003072, 5254
NM_003076, 3568
NM_003088, 2176
NM_003090, 4320
NM_003091, 5654
NM_003092, 5683
NM_003104, 4187
NM_003107, 2032
NM_003123, 4511
NM_003124, 789
NM_003128, 746
NM_003132, 50
NM_003137, 1916
NM_003143, 2435
NM_003145, 409
NM_003146, 3215
NM_003149, 1099
NM_003169, 5428
NM_003181, 2135
NM_003216, 6077
NM_003283, 5608
NM_003287, 2104
NM_003289, 2680
NM_003290, 5312
NM_003295, 3900
NM_003310, 649
NM_003316, 5896
NM_003334, 6167
NM_003349, 5804
NM_003350, 2546
NM_003365, 1134
NM_003366, 4421
NM_003370, 5499
NM_003374, 1677
NM_003375, 2982
NM_003378, 2367
NM_003389, 2728
NM_003400, 761
NM_003401, 1636
NM_003406, 2590
NM_003418, 1250
NM_003453, 3864
NM_003461, 2440
NM_003472, 2034
NM_003516, 459
NM_003564, 474
NM_003598, 5556
NM_003617, 497
NM_003624, 5214
NM_003626, 3316
NM_003646, 3197
NM_003662, 6149
NM_003680, 157
NM_003681, 5905
NM_003685, 5203
NM_003687, 1673
NM_003689, 71
NM_003712, 5093
NM_003714, 1812
NM_003720, 5898
NM_003721, 5360
NM_003722, 1335
NM_003729, 288
NM_003735, 1730
NM_003736, 1732
NM_003739, 2883
NM_003752, 4449
NM_003753, 6027
NM_003755, 5234
NM_003756, 2598
NM_003757, 148
NM_003765, 5288
NM_003766, 4865
NM_003779, 468
NM_003780, 199
NM_003787, 5052
NM_003815, 457
NM_003824, 3313
NM_003836, 4088
NM_003837, 2723
NM_003859, 5811
NM_003876, 4708
NM_003877, 3757
NM_003906, 5933
NM_003908, 5734
NM_003915, 5747
NM_003932, 6070
NM_003937, 881
NM_003938, 5148
NM_003971, 4891
NM_003973, 1110
NM_003979, 3498
NM_004000, 306
NM_004004, 3866
NM_004044, 955
NM_004048, 4178
NM_004053, 1900
NM_004060, 1791
NM_004074, 3264
NM_004084, 2476
NM_004085, 6242
NM_004092, 3099
NM_004111, 3253
NM_004117, 1918
NM_004127, 5008
NM_004134, 1693
NM_004135, 6340
NM_004147, 6011
NM_004152, 5154
NM_004159, 1952
NM_004175, 5983
NM_004176, 4742
NM_004178, 3614
NM_004181, 1430
NM_004182, 6174
NM_004193, 3045
NM_004203, 4402
NM_004208, 6285
NM_004217, 4699
NM_004219, 1795
NM_004240, 5206
NM_004247, 4879
NM_004261, 273
NM_004265, 3249
NM_004309, 5002
NM_004322, 3256
NM_004323, 2662
NM_004324, 5564
NM_004335, 5328
NM_004339, 5921
NM_004341, 692
NM_004345, 1128
NM_004360, 4549
NM_004398, 3392
NM_004401, 48
NM_004404, 1034
NM_004435, 2761
NM_004448, 4796
NM_004461, 5279
NM_004483, 4602
NM_004493, 6190
NM_004509, 1012
NM_004510, 1014
NM_004524, 4960
NM_004539, 5072
NM_004547, 1218
NM_004550, 470
NM_004551, 3199
NM_004555, 4586
NM_004573, 4141
NM_004595, 6140
NM_004596, 5448
NM_004599, 6085
NM_004618, 4716
NM_004632, 414
NM_004635, 1155
NM_004636, 1149
NM_004637, 1246
NM_004638, 1979
NM_004639, 1973
NM_004640, 1986
NM_004673, 529
NM_004691, 4545
NM_004697, 2751
NM_004699, 6323
NM_004701, 4197
NM_004704, 1182
NM_004706, 5470
NM_004714, 5434
NM_004725, 3093
NM_004728, 2959
NM_004735, 1026
NM_004738, 5824
NM_004739, 3230
NM_004766, 1270
NM_004767, 576
NM_004772, 1650
NM_004781, 44
NM_004794, 6287
NM_004813, 3190
NM_004821, 1787
NM_004844, 1066
NM_004846, 998
NM_004859, 4921
NM_004870, 4689
NM_004889, 2342
NM_004893, 1685
NM_004905, 511
NM_004911, 2442
NM_004928, 5915
NM_004930, 69
NM_004933, 4638
NM_004939, 662
NM_004957, 2775
NM_004960, 4465
NM_004964, 150
NM_004973, 2039
NM_004982, 3526
NM_004990, 3669
NM_004992, 6330
NM_004994, 5791
NM_004995, 3976
NM_005000, 2396
NM_005002, 3448
NM_005003, 4446
NM_005004, 3063
NM_005005, 2606
NM_005008, 6083
NM_005015, 3981
NM_005016, 3620
NM_005022, 4665
NM_005030, 4442
NM_005036, 6104
NM_005042, 3524
NM_005053, 5283
NM_005072, 4581
NM_005080, 5987
NM_005109, 1093
NM_005110, 1854
NM_005112, 1421
NM_005115, 4500
NM_005132, 3962
NM_005141, 1508
NM_005163, 4110
NM_005171, 3574
NM_005174, 2895
NM_005194, 5808
NM_005217, 2478
NM_005220, 4946
NM_005224, 5104
NM_005243, 5989
NM_005269, 3667
NM_005271, 3004
NM_005291, 854
NM_005300, 6159
NM_005313, 4174
NM_005324, 4969
NM_005330, 3146
NM_005333, 6126
NM_005345, 1963
NM_005346, 1961
NM_005347, 2790
NM_005348, 4092
NM_005362, 6316
NM_005364, 6308
NM_005370, 5314
NM_005371, 3689
NM_005378, 657
NM_005389, 2126
NM_005432, 4101
NM_005439, 3466
NM_005440, 4877
NM_005452, 1944
NM_005474, 4850
NM_005490, 5208
NM_005498, 5241
NM_005514, 2155
NM_005517, 110
NM_005520, 1850
NM_005548, 4568
NM_005563, 105
NM_005566, 3175
NM_005572, 404
NM_005573, 1718
NM_005581, 5517
NM_005594, 3628
NM_005614, 2460
NM_005617, 1708
NM_005620, 340
NM_005623, 4782
NM_005632, 4362
NM_005657, 4170
NM_005663, 1382
NM_005676, 6165
NM_005686, 550
NM_005692, 2458
NM_005693, 3204
NM_005698, 424
NM_005710, 6181
NM_005713, 1602
NM_005717, 517
NM_005718, 1055
NM_005720, 2348
NM_005724, 4273
NM_005726, 3695
NM_005729, 2986
NM_005731, 996
NM_005745, 6344
NM_005754, 1697
NM_005762, 5627
NM_005770, 4176
NM_005775, 2491
NM_005783, 829
NM_005787, 1316
NM_005796, 4575
NM_005806, 5887
NM_005826, 83
NM_005830, 3898
NM_005831, 4911
NM_005833, 2792
NM_005837, 2326
NM_005850, 461
NM_005851, 3301
NM_005855, 1024
NM_005866, 2670
NM_005877, 5999
NM_005884, 5421
NM_005889, 3509
NM_005911, 808
NM_005915, 864
NM_005917, 764
NM_005918, 2306
NM_005973, 389
NM_005981, 3681
NM_005983, 1579
NM_005985, 5802
NM_005997, 350
NM_006000, 982
NM_006012, 5201
NM_006013, 6326
NM_006019, 3304
NM_006023, 2899
NM_006039, 4936
NM_006053, 3306
NM_006058, 1702
NM_006066, 218
NM_006067, 4612
NM_006098, 1852
NM_006101, 5023
NM_006109, 3973
NM_006110, 4423
NM_006112, 159
NM_006114, 5513
NM_006115, 5975
NM_006128, 2497
NM_006131, 2499
NM_006132, 2501
NM_006136, 2393
NM_006169, 3380
NM_006184, 5566
NM_006227, 5789
NM_006230, 2246
NM_006245, 1892
NM_006247, 5497
NM_006250, 3522
NM_006253, 3831
NM_006262, 3546
NM_006265, 2600
NM_006271, 374
NM_006272, 5935
NM_006280, 6338
NM_006289, 2682
NM_006295, 1967
NM_006303, 2178
NM_006330, 2550
NM_006335, 571
NM_006339, 5171
NM_006342, 1374
NM_006349, 2371
NM_006354, 1049
NM_006362, 3242
NM_006365, 396
NM_006373, 4875
NM_006384, 4305
NM_006387, 5319
NM_006395, 1062
NM_006397, 5277
NM_006401, 2732
NM_006427, 4106
NM_006428, 4360
NM_006429, 792
NM_006430, 759
NM_006432, 4048
NM_006435, 3113
NM_006439, 1504
NM_006440, 5954
NM_006453, 4384
NM_006455, 4822
NM_006470, 4725
NM_006478, 5991
NM_006488, 703
NM_006494, 5476
NM_006503, 5441
NM_006513, 298
NM_006516, 188
NM_006523, 3055
NM_006530, 3727
NM_006556, 452
NM_006559, 146
NM_006576, 3697
NM_006585, 5885
NM_006586, 1894
NM_006589, 428
NM_006600, 118
NM_006601, 3636
NM_006621, 300
NM_006625, 93
NM_006636, 794
NM_006646, 3881
NM_006659, 3101
NM_006666, 5558
NM_006667, 6272
NM_006670, 2070
NM_006693, 2344
NM_006694, 436
NM_006698, 5760
NM_006708, 1904
NM_006711, 4392
NM_006746, 6134
NM_006761, 4642
NM_006763, 548
NM_006764, 1151
NM_006769, 271
NM_006787, 6197
NM_006791, 4279
NM_006799, 4408
NM_006801, 5576
NM_006805, 1687
NM_006808, 2740
NM_006810, 1223
NM_006812, 3678
NM_006815, 3847
NM_006816, 1830
NM_006817, 3785
NM_006821, 4046
NM_006824, 192
NM_006825, 3807
NM_006826, 655
NM_006833, 2338
NM_006835, 1449
NM_006837, 2565
NM_006839, 814
NM_006842, 3295
NM_006844, 5308
NM_006854, 2184
NM_006862, 344
NM_006888, 4063
NM_006899, 5661
NM_006908, 2182
NM_006924, 4908
NM_006928, 3660
NM_006932, 6007
NM_006938, 5039
NM_006941, 6049
NM_006942, 4691
NM_006990, 124
NM_007002, 5844
NM_007019, 5785
NM_007032, 6040
NM_007034, 267
NM_007046, 705
NM_007047, 2029
NM_007062, 3805
NM_007065, 5237
NM_007074, 4516
NM_007085, 1216
NM_007096, 2691
NM_007100, 1366
NM_007103, 3299
NM_007104, 1922
NM_007158, 302
NM_007165, 5152
NM_007173, 3348
NM_007178, 3501
NM_007184, 1165
NM_007186, 5744
NM_007190, 3089
NM_007209, 2794
NM_007242, 4566
NM_007244, 3520
NM_007260, 89
NM_007262, 42
NM_007263, 5352
NM_007268, 6204
NM_007273, 3455
NM_007275, 1153
NM_007276, 2214
NM_007279, 5619
NM_007310, 5958
NM_007311, 6095
NM_007317, 4507
NM_007355, 1874
NM_007364, 4277
NM_007372, 4931
NM_012068, 5525
NM_012098, 2782
NM_012099, 5504
NM_012100, 977
NM_012101, 3420
NM_012111, 4055
NM_012112, 5715
NM_012116, 5519
NM_012138, 4838
NM_012170, 4265
NM_012179, 6017
NM_012181, 5350
NM_012203, 2693
NM_012207, 2955
NM_012237, 5409
NM_012248, 4451
NM_012255, 5698
NM_012264, 6054
NM_012286, 6246
NM_012296, 3344
NM_012323, 6052
NM_012391, 1929
NM_012412, 2236
NM_012423, 5550
NM_012437, 381
NM_012458, 5155
NM_012469, 5873
NM_012486, 596
NM_013237, 1834
NM_013247, 801
NM_013265, 3279
NM_013274, 3037
NM_013277, 3566
NM_013296, 292
NM_013333, 5617
NM_013336, 1238
NM_013341, 903
NM_013363, 1276
NM_013365, 6032
NM_013369, 5911
NM_013375, 2027
NM_013393, 2165
NM_013402, 3251
NM_013403, 5492
NM_013406, 5269
NM_013407, 5270
NM_013417, 2718
NM_013442, 2675
NM_013451, 3013
NM_014003, 4592
NM_014008, 6187
NM_014033, 3576
NM_014035, 1664
NM_014042, 3320
NM_014062, 4556
NM_014063, 2251
NM_014107, 2077
NM_014138, 6163
NM_014166, 3906
NM_014172, 2862
NM_014173, 5326
NM_014176, 578
NM_014184, 585
NM_014188, 17
NM_014189, 1390
NM_014190, 1388
NM_014203, 5536
NM_014214, 5032
NM_014226, 4095
NM_014236, 626
NM_014248, 6072
NM_014255, 3631
NM_014267, 3173
NM_014275, 1846
NM_014285, 2820
NM_014294, 2567
NM_014303, 6003
NM_014306, 6015
NM_014311, 3606
NM_014320, 2116
NM_014321, 4476
NM_014325, 3777
NM_014335, 4182
NM_014341, 1906
NM_014353, 4386
NM_014408, 167
NM_014413, 2180
NM_014426, 5685
NM_014444, 4168
NM_014445, 1284
NM_014452, 1870
NM_014453, 5625
NM_014481, 6199
NM_014501, 5615
NM_014502, 3220
NM_014515, 3724
NM_014556, 1394
NM_014571, 142
NM_014585, 923
NM_014587, 4370
NM_014610, 3232
NM_014624, 367
NM_014649, 5199
NM_014663, 202
NM_014670, 934
NM_014685, 4530
NM_014713, 667
NM_014736, 4214
NM_014737, 5676
NM_014742, 5721
NM_014747, 180
NM_014748, 684
NM_014752, 3329
NM_014773, 1721
NM_014776, 3792
NM_014778, 3878
NM_014800, 2259
NM_014814, 1195
NM_014829, 1681
NM_014837, 519
NM_014847, 446
NM_014849, 463
NM_014851, 36
NM_014868, 3823
NM_014887, 3889
NM_014919, 1378
NM_014931, 5610
NM_014933, 1457
NM_014941, 6005
NM_014972, 4628
NM_015043, 1843
NM_015062, 3042
NM_015064, 3430
NM_015068, 2319
NM_015129, 6276
NM_015140, 6097
NM_015179, 3024
NM_015322, 4226
NM_015324, 3149
NM_015373, 6056
NM_015388, 1886
NM_015438, 3470
NM_015449, 444
NM_015453, 1043
NM_015472, 1282
NM_015484, 99
NM_015511, 5752
NM_015533, 3225
NM_015544, 4780
NM_015584, 4761
NM_015629, 5600
NM_015636, 686
NM_015640, 260
NM_015644, 1057
NM_015646, 3720
NM_015665, 3604
NM_015702, 885
NM_015714, 555
NM_015853, 3238
NM_015920, 4205
NM_015932, 3884
NM_015934, 941
NM_015937, 5783
NM_015953, 5546
NM_015965, 5362
NM_015966, 5745
NM_016003, 2172
NM_016016, 4847
NM_016022, 334
NM_016026, 4037
NM_016030, 647
NM_016059, 1908
NM_016085, 694
NM_016091, 6045
NM_016095, 4610
NM_016111, 4374
NM_016119, 3912
NM_016143, 5652
NM_016169, 3051
NM_016174, 2767
NM_016176, 26
NM_016183, 73
NM_016202, 5621
NM_016223, 3210
NM_016249, 6300
NM_016263, 5169
NM_016267, 6293
NM_016286, 5006
NM_016292, 4414
NM_016304, 4193
NM_016328, 2293
NM_016357, 3572
NM_016359, 4152
NM_016361, 328
NM_016410, 2664
NM_016440, 5523
NM_016445, 4035
NM_016456, 564
NM_016498, 6001
NM_016526, 3107
NM_016539, 5181
NM_016558, 5750
NM_016567, 3097
NM_016579, 5216
NM_016587, 2216
NM_016592, 5826
NM_016638, 3843
NM_016639, 4398
NM_016641, 4335
NM_016645, 4302
NM_016647, 2614
NM_016732, 5733
NM_016838, 887
NM_016839, 889
NM_016930, 1400
NM_016940, 5883
NM_016941, 5432
NM_017443, 2753
NM_017458, 4498
NM_017491, 1419
NM_017546, 834
NM_017566, 4617
NM_017572, 5146
NM_017595, 4871
NM_017601, 1902
NM_017610, 4195
NM_017613, 5890
NM_017647, 4929
NM_017668, 4327
NM_017670, 3266
NM_017684, 4208
NM_017722, 5286
NM_017751, 859
NM_017760, 2467
NM_017761, 91
NM_017768, 262
NM_017777, 4906
NM_017789, 825
NM_017797, 5143
NM_017801, 1081
NM_017803, 4584
NM_017807, 4003
NM_017815, 3971
NM_017822, 3552
NM_017825, 165
NM_017827, 5413
NM_017829, 5939
NM_017847, 513
NM_017853, 4594
NM_017868, 3386
NM_017874, 5668
NM_017876, 5098
NM_017882, 4224
NM_017883, 6179
NM_017891, 8
NM_017895, 5798
NM_017900, 22
NM_017901, 3810
NM_017910, 674
NM_017916, 5554
NM_017952, 812
NM_017955, 4112
NM_017974, 1020
NM_018019, 4737
NM_018023, 1306
NM_018032, 4358
NM_018034, 1575
NM_018035, 5458
NM_018047, 1706
NM_018048, 3517
NM_018054, 4436
NM_018066, 116
NM_018070, 239
NM_018085, 569
NM_018096, 4792
NM_018110, 4535
NM_018113, 3548
NM_018116, 420
NM_018122, 535
NM_018124, 4588
NM_018135, 1880
NM_018154, 5300
NM_018174, 5332
NM_018188, 10
NM_018209, 5861
NM_018212, 587
NM_018217, 5740
NM_018238, 2437
NM_018242, 4747
NM_018250, 2510
NM_018253, 418
NM_018255, 5056
NM_018270, 5849
NM_018310, 2527
NM_018346, 4898
NM_018357, 4232
NM_018410, 1018
NM_018454, 4154
NM_018457, 3610
NM_018463, 3442
NM_018464, 2951
NM_018468, 5387
NM_018486, 6222
NM_018509, 4900
NM_018607, 721
NM_018660, 2512
NM_018668, 4312
NM_018674, 973
NM_018686, 3513
NM_018912, 1734
NM_018913, 1736
NM_018914, 1738
NM_018915, 1740
NM_018916, 1742
NM_018917, 1744
NM_018918, 1746
NM_018919, 1748
NM_018920, 1750
NM_018921, 1752
NM_018922, 1754
NM_018923, 1756
NM_018924, 1758
NM_018925, 1760
NM_018926, 1762
NM_018927, 1764
NM_018928, 1766
NM_018929, 1768
NM_018947, 2208
NM_018948, 41
NM_018950, 2017
NM_018955, 4728
NM_018957, 6034
NM_018977, 6214
NM_019013, 4682
NM_019058, 2971
NM_019059, 2206
NM_019082, 2242
NM_019095, 5681
NM_019099, 310
NM_019554, 371
NM_019606, 2333
NM_019609, 5663
NM_019619, 2916
NM_019848, 6321
NM_019852, 3988
NM_019887, 3839
NM_020037, 4895
NM_020038, 4893
NM_020132, 5908
NM_020134, 709
NM_020149, 4136
NM_020158, 5454
NM_020188, 4604
NM_020230, 5232
NM_020243, 6058
NM_020299, 2425
NM_020315, 6036
NM_020320, 2075
NM_020347, 1113
NM_020401, 3717
NM_020414, 4069
NM_020418, 1180
NM_020548, 871
NM_020675, 896
NM_020677, 4340
NM_020701, 1248
NM_020990, 4172
NM_020992, 3017
NM_021019, 3646
NM_021029, 6244
NM_021079, 4883
NM_021095, 698
NM_021103, 803
NM_021104, 3654
NM_021107, 5415
NM_021121, 948
NM_021126, 6029
NM_021129, 2964
NM_021130, 2238
NM_021141, 958
NM_021154, 2701
NM_021158, 5638
NM_021177, 1965
NM_021178, 4006
NM_021195, 4400
NM_021213, 4919
NM_021219, 5879
NM_021226, 2945
NM_021626, 4917
NM_021709, 4108
NM_021728, 4020
NM_021826, 5665
NM_021830, 3033
NM_021831, 707
NM_021870, 1517
NM_021871, 1513
NM_021932, 3109
NM_021934, 3588
NM_021948, 394
NM_021953, 3444
NM_021966, 4079
NM_021999, 3908
NM_022003, 3369
NM_022039, 3039
NM_022044, 5973
NM_022048, 4216
NM_022105, 5857
NM_022137, 4042
NM_022141, 6101
NM_022158, 5016
NM_022170, 2288
NM_022171, 1145
NM_022362, 3029
NM_022369, 4246
NM_022371, 527
NM_022442, 5806
NM_022453, 988
NM_022458, 2464
NM_022461, 1086
NM_022485, 1045
NM_022550, 1638
NM_022551, 1946
NM_022552, 717
NM_022566, 4296
NM_022727, 5961
NM_022744, 4468
NM_022747, 4084
NM_022748, 2226
NM_022752, 5474
NM_022758, 1926
NM_022770, 4539
NM_022778, 107
NM_022839, 4290
NM_022963, 1838
NM_023009, 152
NM_023011, 3940
NM_023032, 3691
NM_023033, 3693
NM_023078, 2620
NM_023936, 4378
NM_023942, 2449
NM_024003, 6336
NM_024026, 3872
NM_024027, 645
NM_024029, 5250
NM_024031, 4458
NM_024033, 2427
NM_024040, 3047
NM_024045, 2957
NM_024048, 4470
NM_024067, 2186
NM_024068, 3643
NM_024070, 2335
NM_024089, 3935
NM_024098, 3218
NM_024099, 3236
NM_024104, 5323
NM_024111, 4148
NM_024294, 1924
NM_024297, 4672
NM_024299, 5865
NM_024319, 614
NM_024321, 5389
NM_024329, 62
NM_024330, 379
NM_024333, 5186
NM_024339, 4396
NM_024407, 5120
NM_024507, 4406
NM_024516, 4502
NM_024537, 3938
NM_024567, 2508
NM_024571, 4350
NM_024572, 719
NM_024586, 247
NM_024589, 4346
NM_024602, 206
NM_024603, 241
NM_024613, 2584
NM_024627, 5951
NM_024640, 137
NM_024653, 2373
NM_024658, 3960
NM_024664, 183
NM_024668, 1724
NM_024671, 4454
NM_024691, 5636
NM_024709, 603
NM_024748, 1526
NM_024824, 4057
NM_024844, 4955
NM_024854, 3529
NM_024855, 5769
NM_024863, 6248
NM_024881, 5321
NM_024900, 1491
NM_024918, 5757
NM_024942, 3095
NM_025070, 2541
NM_025072, 2772
NM_025108, 4411
NM_025129, 5534
NM_025150, 358
NM_025164, 3374
NM_025168, 1863
NM_025197, 4830
NM_025202, 1000
NM_025203, 678
NM_025204, 6109
NM_025205, 1414
NM_025207, 455
NM_025226, 499
NM_025232, 2503
NM_025233, 4859
NM_025234, 4270
NM_025241, 5190
NM_025263, 2007
NM_030567, 1826
NM_030573, 5965
NM_030579, 4553
NM_030587, 196
NM_030593, 5411
NM_030775, 3432
NM_030782, 1545
NM_030815, 5719
NM_030819, 4573
NM_030877, 5763
NM_030900, 2232
NM_030920, 332
NM_030921, 1272
NM_030925, 3910
NM_030926, 1009
NM_030935, 2331
NM_030973, 5532
NM_031157, 3612
NM_031206, 6210
NM_031213, 5138
NM_031228, 5642
NM_031229, 5640
NM_031243, 2212
NM_031263, 2708
NM_031289, 3496
NM_031300, 1832
NM_031417, 5506
NM_031434, 2456
NM_031443, 2234
NM_031453, 2902
NM_031459, 131
NM_031465, 3446
NM_031472, 3261
NM_031478, 4522
NM_031479, 3665
NM_031482, 1629
NM_031484, 3070
NM_031485, 5574
NM_031901, 336
NM_031925, 2304
NM_031942, 905
NM_031966, 1598
NM_031968, 5014
NM_031989, 3622
NM_031990, 5100
NM_031992, 2290
NM_032023, 2923
NM_032038, 4495
NM_032088, 1770
NM_032092, 1772
NM_032112, 3031
NM_032140, 4571
NM_032162, 4310
NM_032164, 2340
NM_032196, 4150
NM_032204, 5996
NM_032207, 5317
NM_032211, 3068
NM_032212, 843
NM_032219, 1370
NM_032227, 6257
NM_032271, 4388
NM_032280, 1642
NM_032288, 1354
NM_032292, 412
NM_032299, 3395
NM_032313, 1437
NM_032322, 4771
NM_032323, 402
NM_032324, 630
NM_032330, 4485
NM_032331, 1318
NM_032333, 2996
NM_032338, 3712
NM_032342, 2746
NM_032343, 1235
NM_032350, 2163
NM_032361, 1814
NM_032376, 4854
NM_032377, 5262
NM_032379, 3346
NM_032383, 1280
NM_032390, 875
NM_032402, 1776
NM_032403, 1774
NM_032486, 4444
NM_032527, 5869
NM_032565, 3914
NM_032626, 4440
NM_032627, 5345
NM_032635, 5393
NM_032636, 296
NM_032637, 1577
NM_032642, 3434
NM_032656, 3851
NM_032667, 3240
NM_032712, 5588
NM_032726, 990
NM_032737, 5157
NM_032738, 503
NM_032747, 3061
NM_032750, 1174
NM_032753, 5173
NM_032756, 222
NM_032792, 5631
NM_032799, 2763
NM_032814, 3812
NM_032822, 785
NM_032827, 810
NM_032864, 245
NM_032871, 3326
NM_032872, 122
NM_032873, 3415
NM_032890, 606
NM_032904, 3794
NM_032905, 2893
NM_032907, 4248
NM_032928, 2860
NM_032929, 2081
NM_032933, 5037
NM_032951, 2284
NM_032953, 2286
NM_032958, 2376
NM_032989, 3258
NM_032997, 2949
NM_032999, 2295
NM_033008, 1176
NM_033010, 1178
NM_033011, 2538
NM_033022, 2978
NM_033046, 796
NM_033070, 5937
NM_033161, 2828
NM_033197, 5729
NM_033219, 2730
NM_033251, 4635
NM_033296, 1404
NM_033301, 2635
NM_033316, 1348
NM_033363, 5417
NM_033410, 4456
NM_033415, 5355
NM_033416, 878
NM_033421, 5787
NM_033440, 60
NM_033534, 15
NM_033544, 4315
NM_033551, 1785
NM_052837, 426
NM_052848, 5451
NM_052859, 1157
NM_052862, 488
NM_052881, 5656
NM_052886, 2602
NM_052936, 6251
NM_052963, 2616
NM_052984, 3685
NM_053043, 2462
NM_053056, 3311
NM_053275, 3829
NM_054012, 2822
NM_054013, 1848
NM_054014, 5650
NM_054016, 95
NM_057089, 2363
NM_057161, 1890
NM_057169, 3790
NM_057174, 3188
NM_057182, 5376
NM_058164, 5230
NM_058179, 2703
NM_058192, 4366
NM_058193, 3422
NM_058195, 2653
NM_058196, 2657
NM_058199, 2836
NM_078467, 1912
NM_079423, 3648
NM_079425, 3650
NM_080424, 1016
NM_080425, 5828
NM_080426, 5832
NM_080491, 3342
NM_080592, 696
NM_080594, 4394
NM_080598, 1984
NM_080648, 3999
NM_080649, 4001
NM_080670, 1726
NM_080686, 1981
NM_080687, 3942
NM_080702, 1977
NM_080703, 1975
NM_080796, 5855
NM_080797, 5859
NM_080820, 5693
NM_080822, 4654
NM_106552, 670
NM_130398, 639
NM_130442, 2260
NM_130468, 4143
NM_130898, 434
NM_133330, 1376
NM_133332, 1380
NM_133373, 4885
NM_133375, 4222
NM_133436, 2357
NM_133480, 1051
NM_133481, 1053
NM_133483, 3676
NM_133503, 3742
NM_133504, 3744
NM_133505, 3746
NM_133506, 3750
NM_133507, 3748
NM_133627, 4786
NM_133629, 4790
NM_133630, 4788
NM_133637, 798
NM_133645, 2066
NM_134269, 6009
NM_134323, 3616
NM_134324, 3618
NM_134440, 5358
NM_138385, 1372
NM_138391, 545
NM_138427, 4739
NM_138434, 2451
NM_138443, 5060
NM_238483, 1037
NM_138578, 5713
NM_138614, 1125
NM_138699, 1406
NM_138801, 727
NM_138924, 5124
XM_001289, 524
XM_001299, 33
XM_001389, 1453
XM_001468, 342
XM_001472, 250
XM_001482, 3658
XM_001589, 24
XM_001616, 101
XM_001640, 126
XM_001807, 135
XM_001812, 134
XM_001826, 78
XM_001897, 486
XM_001914, 567
XM_001916, 568
XM_001958, 599
XM_002068, 523
XM_002105, 141
XM_002114, 113
XM_002217, 845
XM_002255, 1361
XM_002435, 700
XM_002447, 877
XM_002480, 680
XM_002540, 1006
XM_002611, 823
XM_002636, 964
XM_002647, 770
XM_002669, 946
XM_002674, 776
XM_002704, 853
XM_002727, 788
XM_002739, 779
XM_002742, 1036
XM_002828, 1143
XM_002854, 1187
XM_002855, 1186
XM_002859, 1274
XM_002899, 1127
XM_003213, 1162
XM_003222, 1119
XM_003245, 1136
XM_003305, 1451
XM_003435, 1432
XM_003477, 1530
XM_003511, 1448
XM_003555, 1500
XM_003611, 2083
XM_003716, 1811
XM_003771, 1644
XM_003789, 1712
XM_003825, 1540
XM_003830, 1666
XM_003841, 1699
XM_003869, 1572
XM_003896, 1581
XM_003937, 1710
XM_004009, 1565
XM_004098, 3704
XM_004151, 2065
XM_004256, 2114
XM_004297, 2113
XM_004330, 3194
XM_004379, 2122
XM_004383, 2130
XM_004526, 2110
XM_004627, 2402
XM_004901, 2292
XM_005060, 2605
XM_005086, 1042
XM_005100, 2908
XM_005180, 1332
XM_005305, 2485
XM_005348, 2755
XM_005365, 2760
XM_005490, 2707
XM_005525, 2727
XM_005543, 2666
XM_005675, 3103
XM_005698, 3053
XM_005724, 2878
XM_005938, 3058
XM_005969, 3088
XM_006139, 3127
XM_006170, 3201
XM_006212, 3167
XM_006290, 98
XM_006297, 3196
XM_006424, 3151
XM_006432, 3371
XM_006464, 3355
XM_006467, 3399
XM_006475, 3135
XM_006483, 3136
XM_006529, 3281
XM_006533, 3270
XM_006566, 3849
XM_006578, 3736
XM_006589, 3766
XM_006595, 3835
XM_006694, 3535
XM_006710, 3626
XM_006748, 3536
XM_006826, 3559
XM_006887, 3765
XM_006925, 3485
XM_006936, 3483
XM_006937, 5074
XM_006947, 3482
XM_006958, 3475
XM_007002, 3797
XM_007003, 3796
XM_007199, 3923
XM_007254, 4097
XM_007272, 4081
XM_007288, 3968
XM_007293, 3967
XM_007315, 3958
XM_007316, 3957
XM_007324, 4027
XM_007328, 4024
XM_007441, 4045
XM_007483, 4072
XM_007488, 4005
XM_007491, 3996
XM_007531, 4167
XM_007545, 4156
XM_007623, 4221
XM_007651, 4189
XM_007751, 4129
XM_007963, 4474
XM_007988, 4430
XM_008064, 4509
XM_008065, 4497
XM_008106, 4463
XM_008126, 4353
XM_008150, 4800
XM_008231, 4694
XM_008253, 4926
XM_008323, 4750
XM_008334, 4671
XM_008351, 4856
XM_008401, 4867
XM_008402, 4869
XM_008432, 4902
XM_008441, 4686
XM_008459, 4915
XM_008462, 4777
XM_008486, 4760
XM_008509, 4658
XM_008538, 4684
XM_008557, 4650
XM_008579, 4809
XM_008679, 4693
XM_008695, 5089
XM_008723, 5054
XM_008812, 5083
XM_008830, 5597
XM_008851, 5522
XM_008854, 5325
XM_008860, 5485
XM_008878, 5472
XM_008887, 5243
XM_008912, 5453
XM_008985, 5531
XM_009010, 5205
XM_009036, 5486
XM_009063, 5274
XM_009082, 5256
XM_009125, 5484
XM_009126, 5496
XM_009149, 5406
XM_009180, 5378
XM_009203, 5443
XM_009222, 5165
XM_009277, 5113
XM_009279, 5110
XM_009293, 5338
XM_009303, 5310
XM_009330, 5357
XM_009338, 5384
XM_009436, 5705
XM_009450, 5728
XM_009501, 5754
XM_009549, 5816
XM_009622, 5647
XM_009642, 5759
XM_009671, 5823
XM_009672, 5821
XM_009686, 5762
XM_009805, 5919
XM_009947, 6022
XM_009967, 6031
XM_009973, 6042
XM_010000, 6063
XM_010002, 6064
XM_010024, 6087
XM_010029, 6094
XM_010040, 6103
XM_010055, 6108
XM_010117, 6269
XM_010141, 6216
XM_010156, 5266
XM_010178, 6310
XM_010272, 6132
XM_010362, 6274
XM_010378, 6169
XM_010436, 6280
XM_010494, 3429
XM_010615, 253
XM_010636, 451
XM_010664, 133
XM_010682, 581
XM_010712, 182
XM_010732, 593
XM_010778, 925
XM_010852, 938
XM_010858, 1004
XM_010866, 992
XM_010881, 771
XM_010886, 755
XM_010938, 4641
XM_010941, 1433
XM_010953, 1130
XM_010978, 1290
XM_011074, 1320
XM_011089, 5076
XM_011117, 2059
XM_011118, 4941
XM_011129, 1423
XM_011160, 1365
XM_011548, 2411
XM_011618, 2400
XM_011629, 2533
XM_011642, 2586
XM_011650, 66
XM_011657, 2592
XM_011749, 2798
XM_011752, 2786
XM_011769, 2562
XM_011778, 2832
XM_011988, 3260
XM_012124, 3836
XM_012145, 3761
XM_012159, 3494
XM_012162, 3598
XM_012179, 5337
XM_012182, 3638
XM_012184, 3861
XM_012219, 3759
XM_012272, 3543
XM_012284, 2395
XM_012376, 3990
XM_012377, 3983
XM_012398, 4133
XM_012418, 4199
XM_012462, 4322
XM_012487, 4555
XM_012549, 4734
XM_012569, 4461
XM_012609, 4945
XM_012615, 4744
XM_012634, 4950
XM_012638, 3874
XM_012642, 4849
XM_012651, 4916
XM_012676, 4675
XM_012741, 5031
XM_012798, 5212
XM_012812, 5370
XM_012860, 5439
XM_012862, 5195
XM_012913, 5114
XM_012931, 5768
XM_012970, 5700
XM_013010, 6066
XM_013015, 6089
XM_013029, 6118
XM_013042, 6207
XM_013060, 6196
XM_013086, 6145
XM_013112, 2530
XM_013127, 2577
XM_015234, 75
XM_015241, 5088
XM_015243, 3148
XM_015258, 2244
XM_015366, 4239
XM_015434, 547
XM_015462, 1208
XM_015468, 3596
XM_015476, 3585
XM_015481, 3580
XM_015516, 6206
XM_015563, 1525
XM_015652, 2937
XM_015697, 5264
XM_015700, 4478
XM_015705, 3214
XM_015717, 257
XM_015755, 5046
XM_015769, 5369
XM_015835, 4311
XM_015840, 3921
XM_015842, 3932
XM_015920, 909
XM_015922, 911
XM_016047, 2604
XM_016076, 4237
XM_016093, 2992
XM_016113, 2712
XM_016125, 6275
XM_016139, 3170
XM_016164, 276
XM_016170, 1554
XM_016199, 600
XM_016288, 880
XM_016308, 2726
XM_016334, 1294
XM_016345, 1799
XM_016351, 3924
XM_016378, 5364
XM_016382, 5036
XM_016410, 5438
XM_016480, 326
XM_016486, 4071
XM_016487, 4068
XM_016605, 3708
XM_016625, 773
XM_016640, 3538
XM_016674, 1652
XM_016700, 2433
XM_016713, 4165
XM_016733, 2256
XM_016843, 766
XM_016857, 1941
XM_016871, 5180
XM_016985, 4213
XM_017080, 3436
XM_017096, 4644
XM_017204, 5240
XM_017234, 4712
XM_017240, 4135
XM_017315, 67
XM_017356, 1291
XM_017364, 1105
XM_017369, 3394
XM_017432, 3895
XM_017442, 2313
XM_017474, 1679
XM_017483, 2280
XM_017508, 3710
XM_017517, 2080
XM_017578, 4980
XM_017591, 1701
XM_017641, 1544
XM_017698, 861
XM_017816, 2581
XM_017831, 2119
XM_017846, 109
XM_017857, 1640
XM_017914, 3953
XM_017925, 1476
XM_017930, 6284
XM_017931, 2659
XM_017971, 4319
XM_017984, 4338
XM_017996, 2711
XM_018006, 2710
XM_018019, 6157
XM_018039, 784
XM_018041, 642
XM_018054, 4123
XM_018088, 4472
XM_018108, 6313
XM_018109, 6315
XM_018136, 161
XM_018142, 6232
XM_018149, 1264
XM_018167, 3015
XM_018182, 2098
XM_018205, 64
XM_018241, 6161
XM_018279, 3057
XM_018287, 2595
XM_018301, 763
XM_018332, 314
XM_018359, 2281
XM_018399, 3918
XM_018432, 4331
XM_018473, 1658
XM_018515, 5354
XM_018523, 1359
XM_018534, 4840
XM_018539, 6014
XM_018540, 841
XM_026944, 2787
XM_026951, 2771
XM_026968, 2769
XM_026985, 2766
XM_026987, 2765
XM_027102, 3802
XM_027143, 6106
XM_027161, 1220
XM_027214, 2385
XM_027309, 4329
XM_027313, 226
XM_027365, 4334
XM_027412, 4368
XM_027440, 2505
XM_027558, 4352
XM_027651, 2490
XM_027679, 2488
XM_027825, 4661
XM_027904, 5548
XM_027916, 76
XM_027952, 6353
XM_027963, 936
XM_027964, 1619
XM_027983, 213
XM_028034, 940
XM_028064, 5119
XM_028067, 5117
XM_028151, 4562
XM_028192, 3117
XM_028263, 5488
XM_028267, 5491
XM_028322, 4075
XM_028347, 4074
XM_028358, 4073
XM_028398, 4667
XM_028417, 4678
XM_028643, 3624
XM_028662, 3561
XM_028666, 5383
XM_028672, 5382
XM_028744, 5025
XM_028760, 3554
XM_028783, 5851
XM_028806, 5765
XM_028810, 5766
XM_028834, 5863
XM_028848, 4390
XM_028918, 5867
XM_028966, 5871
XM_029031, 169
XM_029096, 1539
XM_029104, 1314
XM_029132, 1313
XM_029136, 1310
XM_029168, 2841
XM_029187, 6194
XM_029228, 2069
XM_029288, 4067
XM_029369, 1198
XM_029438, 4656
XM_029450, 5404
XM_029455, 5403
XM_029461, 6282
XM_029567, 2609
XM_029631, 3602
XM_029728, 3595
XM_029746, 2128
XM_029805, 3507
XM_029810, 5776
XM_029822, 5778
XM_029842, 176
XM_029844, 145
XM_030044, 5796
XM_030203, 1028
XM_030268, 2543
XM_030274, 2544
XM_030326, 3187
XM_030373, 6233
XM_030417, 1112
XM_030423, 154
XM_030447, 3065
XM_030470, 68
XM_030485, 5159
XM_030529, 862
XM_030582, 883
XM_030621, 5818
XM_030699, 5834
XM_030714, 5145
XM_030720, 5137
XM_030721, 5135
XM_030771, 1821
XM_030777, 1823
XM_030782, 1824
XM_030812, 1256
XM_030834, 952
XM_030895, 5465
XM_030901, 5456
XM_030914, 5450
XM_030920, 40
XM_031025, 4032
XM_031074, 4039
XM_031251, 5307
XM_031263, 5305
XM_031273, 5303
XM_031276, 5302
XM_031292, 4295
XM_031320, 1445
XM_031345, 5292
XM_031354, 4292
XM_031404, 4285
XM_031415, 4767
XM_031427, 4769
XM_031466, 4765
XM_031515, 4147
XM_031519, 731
XM_031527, 733
XM_031536, 4758
XM_031554, 4145
XM_031585, 782
XM_031586, 783
XM_031596, 780
XM_031617, 4138
XM_031626, 738
XM_031718, 4159
XM_031807, 3491
XM_031857, 5184
XM_031866, 3041
XM_031890, 3044
XM_031917, 5176
XM_031944, 5066
XM_031949, 3049
XM_031992, 3059
XM_032020, 5281
XM_032121, 2455
XM_032201, 4836
XM_032216, 2454
XM_032269, 1221
XM_032285, 5399
XM_032391, 216
XM_032403, 4180
XM_032443, 3930
XM_032476, 2976
XM_032520, 2970
XM_032553, 1626
XM_032588, 3457
XM_032614, 3462
XM_032710, 5247
XM_032719, 5248
XM_032724, 5252
XM_032759, 1700
XM_032766, 4864
XM_032774, 5257
XM_032782, 5261
XM_032813, 4863
XM_032817, 4861
XM_032852, 4857
XM_032895, 1590
XM_032902, 1588
XM_032930, 6189
XM_032944, 2470
XM_032996, 5943
XM_033015, 5902
XM_033016, 5903
XM_033090, 5946
XM_033147, 6241
XM_033227, 3450
XM_033232, 6351
XM_033251, 3959
XM_033263, 3472
XM_033294, 1123
XM_033337, 3964
XM_033355, 2819
XM_033359, 2818
XM_033360, 2817
XM_033361, 2815
XM_033362, 2811
XM_033380, 2809
XM_033385, 2808
XM_033391, 3969
XM_033424, 2774
XM_033435, 3975
XM_033445, 3980
XM_033457, 2777
XM_033460, 2778
XM_033553, 3991
XM_033595, 3994
XM_033654, 79
XM_033683, 77
XM_033689, 4646
XM_033714, 4645
XM_033813, 5960
XM_033862, 6173
XM_033876, 2383
XM_033878, 6172
XM_033884, 6170
XM_033910, 2134
XM_033912, 2132
XM_033922, 4606
XM_034000, 501
XM_034082, 454
XM_034321, 1502
XM_034375, 4460
XM_034377, 5623
XM_034431, 3185
XM_034586, 4376
XM_034590, 4380
XM_034640, 2638
XM_034662, 319
XM_034671, 318
XM_034710, 1466
XM_034713, 1468
XM_034744, 1655
XM_034862, 1675
XM_034890, 4184
XM_034897, 4256
XM_034935, 6201
XM_034952, 857
XM_034953, 4116
XM_035014, 4119
XM_035103, 2824
XM_035107, 2439
XM_035109, 2825
XM_035220, 800
XM_035368, 2626
XM_035370, 2631
XM_035373, 2629
XM_035465, 6123
XM_035485, 3571
XM_035490, 3564
XM_035497, 3562
XM_035572, 1392
XM_035625, 5197
XM_035627, 5196
XM_035636, 5194
XM_035638, 5192
XM_035640, 5034
XM_035662, 2483
XM_035680, 2482
XM_035824, 1402
XM_035919, 5612
XM_035986, 1456
XM_035999, 5907
XM_036002, 1440
XM_036011, 5910
XM_036042, 5913
XM_036087, 5917
XM_036104, 4965
XM_036107, 5923
XM_036115, 4971
XM_036118, 1262
XM_036175, 5924
XM_036299, 155
XM_036339, 3178
XM_036413, 2469
XM_036450, 664
XM_036462, 4827
XM_036465, 4825
XM_036500, 573
XM_036507, 575
XM_036528, 4410
XM_036556, 566
XM_036593, 2939
XM_036659, 4707
XM_036680, 4342
XM_036727, 4134
XM_036744, 433
XM_036755, 5927
XM_036785, 4982
XM_036829, 442
XM_036845, 450
XM_036934, 448
XM_036937, 5969
XM_036938, 1197
XM_037002, 1668
XM_037056, 2107
XM_037101, 873
XM_037108, 831
XM_037147, 3212
XM_037173, 3202
XM_037195, 4988
XM_037196, 4987
XM_037202, 5840
XM_037206, 5842
XM_037217, 5846
XM_037260, 1608
XM_037329, 591
XM_037377, 1300
XM_037381, 1299
XM_037423, 1163
XM_037468, 6114
XM_037474, 6116
XM_037565, 5106
XM_037572, 5109
XM_037600, 1304
XM_037657, 2608
XM_037662, 5372
XM_037682, 5977
XM_037741, 2276
XM_037778, 4244
XM_037797, 5981
XM_037808, 3263
XM_037875, 2045
XM_037945, 5993
XM_037971, 4897
XM_038030, 2855
XM_038049, 2864
XM_038063, 2866
XM_038098, 5343
XM_038146, 5339
XM_038221, 1695
XM_038243, 1341
XM_038308, 3737
XM_038371, 3902
XM_038391, 2757
XM_038424, 5018
XM_038536, 2909
XM_038576, 734
XM_038584, 6019
XM_038659, 3533
XM_038791, 3841
XM_038852, 244
XM_038872, 5062
XM_038911, 237
XM_038946, 1840
XM_039165, 1413
XM_039173, 1416
XM_039176, 1417
XM_039225, 4125
XM_039236, 6047
XM_039248, 6051
XM_039306, 4551
XM_039339, 6060
XM_039372, 6065
XM_039395, 3732
XM_039474, 4794
XM_039654, 2646
XM_039702, 4200
XM_039712, 716
XM_039721, 321
XM_039723, 5140
XM_039796, 1292
XM_039805, 1258
XM_039908, 5598
XM_039910, 4721
XM_039921, 4732
XM_039952, 1213
XM_039975, 1783
XM_040009, 377
XM_040066, 6088
XM_040095, 6091
XM_040221, 3707
XM_040267, 2879
XM_040272, 2876
XM_040321, 1524
XM_040498, 2417
XM_040623, 2074
XM_040644, 3734
XM_040709, 315
XM_040752, 1493
XM_040853, 2218
XM_040898, 4100
XM_040942, 4094
XM_040952, 4090
XM_041014, 4086
XM_041020, 2697
XM_041059, 1670
XM_041100, 3503
XM_041209, 3925
XM_041211, 1161
XM_041221, 1410
XM_041235, 4008
XM_041248, 6111
XM_041473, 3928
XM_041484, 3944
XM_041507, 1147
XM_041583, 4957
XM_041678, 5027
XM_041694, 1614
XM_041712, 1592
XM_041872, 5090
XM_041879, 353
XM_041884, 354
XM_041921, 6304
XM_041964, 4680
XM_042018, 5095
XM_042025, 1600
XM_042153, 6348
XM_042155, 6346
XM_042168, 1286
XM_042301, 1474
XM_042326, 1032
XM_042422, 2145
XM_042473, 2148
XM_042618, 1229
XM_042621, 4596
XM_042658, 2561
XM_042695, 1364
XM_042698, 4710
XM_042765, 5701
XM_042781, 2434
XM_042788, 2744
XM_042841, 1072
XM_042852, 3339
XM_042860, 1070
XM_042963, 6295
XM_042967, 537
XM_042968, 6297
XM_043047, 4577
XM_043173, 866
XM_043220, 3111
XM_043340, 1805
XM_043388, 1808
XM_043589, 2998
XM_043605, 2999
XM_043614, 6099
XM_043643, 6250
XM_043771, 1568
XM_044075, 416
XM_044077, 391
XM_044127, 398
XM_044128, 408
XM_044166, 406
XM_044172, 411
XM_044334, 3859
XM_044354, 2968
XM_044367, 4938
XM_044372, 4943
XM_044376, 4935
XM_044394, 4927
XM_044426, 4924
XM_044523, 4304
XM_044533, 4307
XM_044565, 4269
XM_044569, 4272
XM_044593, 4278
XM_044608, 5213
XM_044619, 5210
XM_044627, 2563
XM_044866, 2139
XM_044914, 5658
XM_044915, 5660
XM_044932, 3129
XM_044957, 3131
XM_045010, 3821
XM_045044, 4749
XM_045104, 4989
XM_045140, 2973
XM_045151, 5226
XM_045170, 928
XM_045183, 4651
XM_045187, 3833
XM_045283, 757
XM_045290, 1214
XM_045296, 2759
XM_045401, 2403
XM_045418, 5667
XM_045451, 5671
XM_045460, 5674
XM_045499, 3276
XM_045525, 3278
XM_045535, 4751
XM_045551, 4752
XM_045581, 4996
XM_045602, 3856
XM_045612, 3273
XM_045613, 3271
XM_045642, 3269
XM_045667, 3074
XM_045681, 4287
XM_045750, 3157
XM_045802, 3826
XM_045856, 2407
XM_045901, 4852
XM_045952, 2413
XM_045963, 3834
XM_046001, 2414
XM_046035, 4453
XM_046041, 3726
XM_046057, 1443
XM_046090, 5423
XM_046160, 5708
XM_046179, 5710
XM_046313, 5544
XM_046349, 187
XM_046401, 1085
XM_046419, 5578
XM_046450, 201
XM_046464, 522
XM_046472, 5004
XM_046481, 4999
XM_046520, 5689
XM_046551, 212
XM_046557, 208
XM_046565, 204
XM_046642, 3951
XM_046648, 3950
XM_046651, 3949
XM_046743, 3035
XM_046765, 5020
XM_046767, 5022
XM_046769, 5021
XM_046822, 5150
XM_046836, 2722
XM_046863, 2720
XM_046918, 112
XM_046932, 4958
XM_046934, 5160
XM_047007, 5723
XM_047011, 5725
XM_047018, 5727
XM_047024, 6177
XM_047032, 6176
XM_047083, 2521
XM_047175, 690
XM_047374, 5446
XM_047376, 5445
XM_047409, 5444
XM_047436, 4624
XM_047477, 1429
XM_047479, 495
XM_047499, 610
XM_047525, 4632
XM_047545, 616
XM_047561, 1137
XM_047584, 5131
XM_047600, 5132
XM_047964, 1798
XM_048088, 753
XM_048119, 4344
XM_048258, 5385
XM_048286, 3255
XM_048351, 5218
XM_048364, 5219
XM_048404, 6329
XM_048410, 6328
XM_048420, 6325
XM_048471, 5082
XM_048479, 2679
XM_048518, 2684
XM_048539, 2686
XM_048603, 3674
XM_048654, 4829
XM_048690, 1007
XM_048780, 57
XM_048859, 2881
XM_048905, 6306
XM_048943, 3640
XM_048957, 3931
XM_048991, 3642
XM_049048, 3652
XM_049108, 820
XM_049113, 822
XM_049116, 818
XM_049141, 3586
XM_049148, 3581
XM_049150, 3659
XM_049197, 3161
XM_049201, 3772
XM_049211, 3771
XM_049226, 2623
XM_049237, 5391
XM_049247, 2618
XM_049282, 5223
XM_049310, 139
XM_049337, 6320
XM_049354, 4275
XM_049372, 4317
XM_049421, 2637
XM_049502, 5236
XM_049561, 5239
XM_049663, 3493
XM_049680, 476
XM_049690, 483
XM_049742, 14
XM_049795, 3082
XM_049899, 2121
XM_049904, 3937
XM_049920, 5482
XM_049931, 4995
XM_049934, 4994
XM_049937, 4818
XM_050074, 3528
XM_050101, 4773
XM_050159, 4880
XM_050194, 4462
XM_050200, 1487
XM_050215, 2525
XM_050236, 5602
XM_050265, 2278
XM_050278, 4103
XM_050293, 2487
XM_050403, 6192
XM_050430, 2389
XM_050435, 5227
XM_050506, 2583
XM_050534, 4348
XM_050552, 1234
XM_050589, 5603
XM_050638, 979
XM_050660, 5330
XM_050731, 2571
XM_050891, 984
XM_050962, 975
XM_050964, 4220
XM_051219, 4479
XM_051264, 1237
XM_051298, 2612
XM_051364, 5290
XM_051430, 3398
XM_051435, 3358
XM_051463, 4230
XM_051471, 6238
XM_051476, 6237
XM_051489, 3367
XM_051518, 1131
XM_051556, 6
XM_051586, 5092
XM_051712, 4025
XM_051716, 3373
XM_051763, 4727
XM_051778, 4600
XM_051860, 4298
XM_051877, 515
XM_052113, 3378
XM_052310, 1060
XM_052313, 1535
XM_052336, 1477
XM_052460, 3714
XM_052474, 3719
XM_052530, 1424
XM_052542, 3755
XM_052626, 1398
XM_052635, 5166
XM_052641, 3769
XM_052661, 5168
XM_052721, 2056
XM_052725, 2784
XM_052786, 3153
XM_052862, 3404
XM_052893, 3825
XM_052974, 608
XM_052989, 817
XM_053074, 5430
XM_053122, 1363
XM_053164, 3641
XM_053183, 58
XM_053206, 2875
XM_053245, 400
XM_053323, 1078
XM_053585, 4252
XM_053633, 544
XM_053712, 1074
XM_053717, 4663
XM_053787, 3283
XM_053796, 3288
XM_053952, 3722
XM_053955, 1859
XM_054038, 4832
XM_054098, 6183
XM_054221, 6155
XM_054344, 4973
XM_054474, 2933
XM_054475, 2935
XM_054520, 1047
XM_054566, 5926
XM_054706, 2146
XM_054752, 2849
XM_054763, 2852
XM_054856, 3193
XM_054868, 228
XM_054900, 4309
XM_054978, 295
XM_055013, 3853
XM_055061, 4826
XM_055132, 4514
XM_055195, 4427
XM_055199, 4942
XM_055230, 5336
XM_055254, 954
XM_055369, 3397
XM_055481, 251
XM_055551, 1461
XM_055573, 3086
XM_055641, 2064
XM_055658, 5592
XM_055686, 5163
XM_055771, 4505
XM_055859, 5483
XM_055880, 583
XM_055993, 5646
XM_056035, 5678
XM_056082, 4648
XM_056260, 4438
XM_056286, 5582
XM_056315, 1723
XM_056317, 4077
XM_056346, 3645
XM_056353, 3662
XM_056421, 5175
XM_056481, 3545
XM_056602, 5408
XM_056681, 3700
XM_056730, 4775
XM_056884, 618
XM_056923, 521
XM_056957, 1471
XM_056963, 1793
XM_056970, 628
XM_056996, 3798
XM_057020, 4257
XM_057074, 5260
XM_057150, 4619
XM_057236, 5756
XM_057374, 5793
XM_057492, 1548
XM_057664, 740
XM_057780, 2557
XM_057994, 1541
XM_058039, 1934
XM_058098, 986
XM_058116, 4526
XM_058125, 5635
XM_058210, 4018
XM_058232, 5225
XM_058240, 102
XM_058247, 466
XM_058266, 2144
XM_058267, 1278
XM_058343, 3020
XM_058361, 3078
XM_058405, 552
XM_058406, 3084
XM_058414, 3159
XM_058450, 3352
XM_058505, 3125
XM_058528, 3671
XM_058556, 3773
XM_058567, 3504
XM_058574, 3454
XM_058602, 3022
XM_058611, 3926
XM_058618, 4091
XM_058636, 4118
XM_058646, 3986
XM_058647, 3978
XM_058677, 4061
XM_058684, 4186
XM_058699, 4250
XM_058702, 294
XM_058739, 4621
XM_058745, 4543
XM_058784, 4404
XM_058796, 4337
XM_058830, 4803
XM_058867, 4755
XM_058900, 4730
XM_058918, 5949
XM_058927, 1441
XM_058949, 5463
XM_058967, 5295
XM_058968, 2619
XM_058977, 3920
XM_058987, 5570
XM_058990, 5584
XM_058991, 5552
XM_059045, 5419
XM_059052, 5447
XM_059066, 114
XM_059067, 120
XM_059088, 130
XM_059094, 465
XM_059117, 103
XM_059120, 562
XM_059133, 224
XM_059171, 171
XM_059180, 256
XM_059191, 492
XM_059201, 1
XM_059210, 330
XM_059214, 185
XM_059230, 55
XM_059268, 5675
XM_059321, 5607
XM_059335, 6013
XM_059351, 920
XM_059368, 653
XM_059372, 1029
XM_059422, 968
XM_059461, 971
XM_059465, 907
XM_059516, 1266
XM_059557, 1068
XM_059561, 1059
XM_059583, 1252
XM_059593, 1434
XM_059623, 1519
XM_059628, 1442
XM_059633, 1469
XM_059637, 2804
XM_059653, 1596
XM_059669, 1617
XM_059709, 1604
XM_059720, 2914
XM_059741, 2118
XM_059745, 2131
XM_059773, 2141
XM_059776, 2062
XM_059801, 1939
XM_059839, 2430
XM_059876, 2282
XM_059933, 2531
XM_059945, 2838
XM_059961, 2859
XM_059966, 2871
XM_059979, 2644
XM_059986, 2813
XM_059998, 2673
XM_060006, 2647
XM_060012, 4115
XM_060030, 6146
XM_060042, 4281
XM_060067, 1499
XM_060331, 509
XM_060517, 531
XM_060976, 2885
XM_061125, 2931
XM_061126, 2930
XM_062437, 3775
XM_063639, 4234
XM_064091, 4597
XM_065884, 777
XM_066291, 5998
XM_066900, 6261
XM_067264, 1240
XM_067325, 5030
XM_067715, 1169
XM_068164, 1497
XM_068395, 1789
XM_068853, 1714
XM_068919, 2085
XM_068963, 2072
XM_070188, 2480
XM_070203, 2473
XM_070873, 2742
XM_071178, 2705
XM_071580, 1557
XM_071605, 2381
XM_071623, 1439
XM_071801, 4122
XM_071873, 4630
XM_071937, 2152
XM_072173, 5876
XM_072430, 2387
XM_072526, 2857
XM_076414, 1199
XM_083842, 3026
XM_083852, 3141
XM_083864, 3774
XM_083866, 3715
XM_083868, 3590
XM_083892, 3787
XM_083939, 4364
XM_083966, 4923
XM_083983, 4881
XM_084007, 5055
XM_084014, 5246
XM_084023, 5528
XM_084026, 5549
XM_084055, 580
XM_084084, 6090
XM_084110, 1340
XM_084111, 1243
XM_084120, 1315
XM_084123, 1263
XM_084129, 1231
XM_084141, 1041
XM_084158, 1465
XM_084168, 1547
XM_084179, 1591
XM_084180, 1781
XM_084204, 2079
XM_084238, 2453
XM_084241, 2337
XM_084270, 2851
XM_084283, 6229
XM_084287, 6203
XM_084288, 6153
XM_084296, 6227
XM_084311, 6350
XM_084359, 3073
XM_084372, 3016
XM_084385, 2944
XM_084413, 3028
XM_084420, 2910
XM_084429, 2911
XM_084450, 2942
XM_084451, 2953
XM_084467, 2994
XM_084477, 3010
XM_084480, 3012
XM_084505, 3080
XM_084514, 3180
XM_084515, 3183
XM_084516, 3182
XM_084517, 3184
XM_084522, 3424
XM_084525, 3428
XM_084527, 3169
XM_084570, 3357
XM_084601, 3353
XM_084610, 3350
XM_084632, 3072
XM_084645, 3731
XM_084654, 3388
XM_084658, 3382
XM_084681, 3195
XM_084702, 3287
XM_084739, 3124
XM_084742, 3122
XM_084770, 3515
XM_084789, 3599
XM_084800, 3783
XM_084801, 3672
XM_084807, 3531
XM_084808, 3818
XM_084824, 3630
XM_084841, 3540
XM_084866, 3557
XM_084884, 3583
XM_084885, 3582
XM_084889, 3814
XM_084901, 3488
XM_084909, 3702
XM_084912, 3705
XM_084918, 3500
XM_084922, 3495
XM_084941, 3788
XM_084946, 3800
XM_084948, 3804
XM_084982, 3870
XM_084997, 3933
XM_084998, 2142
XM_085017, 3893
XM_085044, 3916
XM_085065, 4044
XM_085066, 4033
XM_085068, 1480
XM_085106, 3987
XM_085125, 4031
XM_085127, 4014
XM_085141, 4019
XM_085151, 4050
XM_085162, 4054
XM_085166, 3955
XM_085203, 4130
XM_085204, 4132
XM_085215, 4282
XM_085239, 4254
XM_085249, 4236
XM_085262, 4314
XM_085280, 4289
XM_085283, 4211
XM_085307, 4160
XM_085327, 4622
XM_085340, 4448
XM_085393, 4480
XM_085395, 4482
XM_085408, 4637
XM_085434, 4524
XM_085442, 4513
XM_085445, 4425
XM_085452, 4435
XM_085471, 4558
XM_085475, 4561
XM_085483, 4616
XM_085525, 4323
XM_085531, 4977
XM_085545, 4741
XM_085548, 4735
XM_085563, 4991
XM_085581, 472
XM_085589, 4948
XM_085613, 4724
XM_085627, 4951
XM_085636, 4873
XM_085672, 4757
XM_085687, 4659
XM_085691, 4677
XM_085716, 4992
XM_085722, 4745
XM_085735, 5019
XM_085743, 4718
XM_085775, 5058
XM_085779, 5075
XM_085788, 5049
XM_085789, 5043
XM_085790, 5045
XM_085791, 5042
XM_085856, 5501
XM_085862, 5244
XM_085874, 5460
XM_085875, 5461
XM_085876, 5462
XM_085909, 5297
XM_085916, 5285
XM_085917, 5276
XM_085927, 5527
XM_085928, 5489
XM_085934, 5537
XM_085935, 5573
XM_085950, 5487
XM_085971, 5371
XM_085972, 5629
XM_085981, 4599
XM_085986, 5398
XM_086004, 5425
XM_086074, 5311
XM_086101, 5128
XM_086102, 5130
XM_086116, 5331
XM_086132, 304
XM_086138, 282
XM_086142, 557
XM_086151, 46
XM_086164, 277
XM_086165, 279
XM_086166, 281
XM_086167, 280
XM_086178, 4
XM_086180, 19
XM_086204, 38
XM_086228, 1356
XM_086244, 601
XM_086245, 602
XM_086257, 632
XM_086271, 383
XM_086278, 4434
XM_086282, 543
XM_086296, 331
XM_086324, 214
XM_086328, 542
XM_086343, 265
XM_086357, 85
XM_086360, 29
XM_086375, 97
XM_086378, 485
XM_086381, 479
XM_086384, 178
XM_086389, 243
XM_086391, 231
XM_086397, 323
XM_086400, 366
XM_086428, 2161
XM_086431, 589
XM_086432, 592
XM_086444, 136
XM_086481, 490
XM_086484, 494
XM_086485, 493
XM_086494, 538
XM_086515, 324
XM_086518, 317
XM_086543, 190
XM_086552, 432
XM_086564, 388
XM_086567, 430
XM_086586, 52
XM_086587, 54
XM_086648, 5819
XM_086701, 5687
XM_086710, 5670
XM_086715, 5695
XM_086736, 5717
XM_086745, 5712
XM_086759, 5877
XM_086760, 5878
XM_086770, 5914
XM_086773, 5928
XM_086777, 5930
XM_086779, 5064
XM_086805, 5963
XM_086809, 5953
XM_086821, 5985
XM_086830, 6043
XM_086844, 6074
XM_086873, 5964
XM_086875, 6093
XM_086920, 805
XM_086923, 849
XM_086925, 850
XM_086944, 933
XM_086950, 858
XM_086961, 926
XM_086980, 791
XM_087028, 942
XM_087038, 2803
XM_087040, 842
XM_087041, 2800
XM_087045, 932
XM_087051, 748
XM_087061, 912
XM_087062, 914
XM_087068, 775
XM_087069, 772
XM_087118, 891
XM_087122, 839
XM_087151, 683
XM_087162, 985
XM_087166, 993
XM_087181, 965
XM_087193, 726
XM_087195, 725
XM_087206, 669
XM_087211, 743
XM_087218, 1011
XM_087240, 901
XM_087254, 1302
XM_087268, 1203
XM_087278, 1358
XM_087284, 1075
XM_087289, 1323
XM_087295, 1322
XM_087297, 1360
XM_087322, 1312
XM_087331, 1211
XM_087341, 1267
XM_087342, 1265
XM_087346, 1115
XM_087349, 1106
XM_087359, 1343
XM_087370, 1101
XM_087392, 1333
XM_087410, 1347
XM_087448, 1184
XM_087480, 3000
XM_087498, 1463
XM_087514, 1483
XM_087527, 1455
XM_087583, 1418
XM_087588, 1120
XM_087597, 1549
XM_087599, 1551
XM_087600, 1553
XM_087601, 1550
XM_087610, 1597
XM_087611, 1595
XM_087614, 1564
XM_087621, 1711
XM_087635, 1660
XM_087637, 1662
XM_087652, 1713
XM_087659, 1537
XM_087686, 1543
XM_087710, 3247
XM_087713, 1559
XM_087745, 1656
XM_087773, 1816
XM_087790, 1631
XM_087823, 1858
XM_087834, 2123
XM_087836, 2124
XM_087853, 2090
XM_087855, 2089
XM_087939, 2000
XM_087945, 1990
XM_087955, 3857
XM_087960, 1883
XM_087990, 1936
XM_087991, 2154
XM_088009, 3106
XM_088020, 1621
XM_088073, 2386
XM_088099, 2416
XM_088103, 2418
XM_088105, 2409
XM_088107, 605
XM_088119, 2422
XM_088122, 2420
XM_088135, 2446
XM_088180, 2352
XM_088239, 2297
XM_088264, 2195
XM_088294, 2529
XM_088316, 2611
XM_088321, 2628
XM_088323, 2574
XM_088325, 2572
XM_088336, 2519
XM_088338, 2515
XM_088370, 2613
XM_088399, 2559
XM_088401, 2560
XM_088422, 2839
XM_088426, 2833
XM_088459, 2847
XM_088461, 2870
XM_088472, 1472
XM_088550, 2640
XM_088552, 2641
XM_088553, 2642
XM_088563, 2672
XM_088569, 2748
XM_088571, 2750
XM_088587, 4120
XM_088588, 4114
XM_088589, 4121
XM_088592, 6311
XM_088619, 6151
XM_088622, 6152
XM_088630, 6209
XM_088637, 2700
XM_088638, 768
XM_088665, 6158
XM_088688, 6220
XM_088689, 6218
XM_088710, 6253
XM_088736, 6265
XM_088738, 6267
XM_088739, 6268
XM_088745, 6289
XM_088747, 6128
XM_088788, 338
XM_088863, 286
XM_088945, 507
XM_089030, 622
XM_089138, 254
XM_089514, 3019
XM_089551, 3006
XM_090218, 3542
XM_090413, 3779
XM_090458, 3767
XM_090833, 638
XM_090914, 4082
XM_090991, 4191
XM_091076, 1091
XM_091100, 4263
XM_091108, 4124
XM_091159, 4157
XM_091270, 4483
XM_091399, 4590
XM_091420, 4544
XM_091786, 3426
XM_091886, 5595
XM_091938, 5221
XM_091981, 5586
XM_091984, 5396
XM_092042, 5108
XM_092046, 5341
XM_092049, 5380
XM_092135, 672
XM_092158, 918
XM_092346, 944
XM_092489, 867
XM_092517, 676
XM_092545, 970
XM_092760, 5696
XM_092888, 5986
XM_092966, 6113
XM_093050, 6212
XM_093130, 6226
XM_093219, 6299
XM_093241, 6228
XM_093423, 1308
XM_093487, 1255
XM_093546, 1201
XM_093624, 1083
XM_094243, 1797
XM_094440, 1561
XM_094741, 1862
XM_094855, 2060
XM_095146, 2432
XM_095371, 2475
XM_095545, 2514
XM_095667, 2554
XM_096038, 3699
XM_096060, 4241
XM_096146, 3539
XM_096149, 661
XM_096155, 5967
XM_096156, 5968
XM_096169, 1022
XM_096172, 787
XM_096195, 1190
XM_096198, 1117
XM_096203, 1464
XM_096303, 6256
XM_096486, 3315
XM_096520, 3165
XM_096544, 3119
XM_096566, 3680
XM_096572, 3819
XM_096597, 3739
XM_096606, 3608
XM_096620, 3578
XM_096630, 3486
XM_096661, 3441
XM_096744, 4034
XM_096772, 3966
XM_096842, 4245
XM_096844, 4286
XM_097043, 4984
XM_097193, 5001
XM_097195, 5000
XM_097204, 4754
XM_097232, 5048
XM_097274, 5510
XM_097275, 5521
XM_097300, 5222
XM_097365, 5440
XM_097420, 5134
XM_097453, 2068
XM_097519, 561
XM_097565, 249
XM_097639, 352
XM_097649, 198
XM_097713, 5800
XM_097727, 5773
XM_097731, 5795
XM_097749, 5644
XM_097772, 5731
XM_097801, 5929
XM_097817, 5925
XM_097833, 5950
XM_097886, 5971
XM_097976, 715
XM_098004, 729
XM_098047, 962
XM_098048, 960
XM_098109, 1345
XM_098111, 1245
XM_098154, 1232
XM_098158, 1103
XM_098173, 1227
XM_098248, 1384
XM_098351, 1609
XM_098352, 1611
XM_098354, 1610
XM_098362, 1634
XM_098387, 1778
XM_098405, 1534
XM_098468, 2108
XM_098599, 619
XM_098654, 2447
XM_098669, 2466
XM_098747, 2582
XM_098761, 2564
XM_098913, 2843
XM_098943, 2725
XM_098995, 6302
XM_099467, 363
XM_102377, 4432
XM_103946, 665
XM_104983, 6263
XM_105236, 1289
XM_105658, 1325
XM_106246, 1520
XM_106739, 1562
XM_107825, 2225
XM_109162, 3075
XM_113223, 3268
XM_113224, 3275
XM_113226, 3400
XM_113229, 3366
XM_113230, 3363
XM_113238, 3152
XM_113266, 4202
XM_113268, 4207
XM_113291, 4429
XM_113293, 4467
XM_113299, 4504
XM_113303, 5013
XM_113310, 4723
XM_113315, 4944
XM_113324, 4674
XM_113325, 4703
XM_113328, 4695
XM_113330, 5011
XM_113334, 4819
XM_113343, 5028
XM_113348, 5316
XM_113352, 5294
XM_113360, 386
XM_113361, 598
XM_113369, 361
XM_113374, 140
XM_113379, 473
XM_113380, 5749
XM_113390, 929
XM_113395, 1193
XM_113397, 1244
XM_113405, 1140
XM_113408, 1296
XM_113409, 1202
XM_113410, 1088
XM_113417, 1254
XM_113422, 1329
XM_113425, 1452
XM_113452, 1556
XM_113454, 1841
XM_113463, 1654
XM_113467, 1720
XM_113468, 1845
XM_113476, 1860
XM_113531, 2526
XM_113532, 2627
XM_113540, 2548
XM_113557, 2493
XM_113564, 2846
XM_113585, 6122
XM_113615, 2927
XM_113702, 3862
XM_113712, 3635
XM_113719, 3560
XM_113726, 3584
XM_113730, 3519
XM_113737, 3855
XM_113739, 3437
XM_113752, 3946
XM_113759, 4105
XM_113823, 4163
XM_113836, 4326
XM_113840, 4608
XM_113843, 4420
XM_113845, 4418
XM_113853, 4570
XM_113855, 4560
XM_113874, 4431
XM_113876, 4426
XM_113882, 4640
XM_113892, 4978
XM_113901, 4653
XM_113919, 4905
XM_113929, 4696
XM_113931, 4706
XM_113938, 4824
XM_113943, 5010
XM_113945, 4998
XM_113951, 4962
XM_113988, 5229
XM_114004, 5349
XM_114018, 5097
XM_114024, 5560
XM_114025, 5530
XM_114027, 5366
XM_114030, 560
XM_114044, 129
XM_114055, 384
XM_114062, 3
XM_114097, 376
XM_114098, 360
XM_114109, 525
XM_114125, 259
XM_114137, 634
XM_114153, 484
XM_114154, 5875
XM_114163, 5794
XM_114165, 5813
XM_114174, 5673
XM_114178, 5706
XM_114185, 5889
XM_114209, 6024
XM_114215, 816
XM_114229, 838
XM_114247, 824
XM_114266, 851
XM_114267, 856
XM_114298, 957
XM_114301, 1225
XM_114309, 1242
XM_114323, 1141
XM_114328, 1344
XM_114356, 1288
XM_114364, 1122
XM_114368, 1510
XM_114401, 1496
XM_114424, 1473
XM_114426, 1470
XM_114434, 1555
XM_114435, 1552
XM_114437, 1567
XM_114439, 1586
XM_114440, 1587
XM_114442, 1584
XM_114453, 1819
XM_114457, 1817
XM_114469, 1623
XM_114482, 1683
XM_114492, 2106
XM_114497, 2058
XM_114555, 2429
XM_114578, 2444
XM_114602, 2404
XM_114613, 2625
XM_114617, 2517
XM_114618, 2523
XM_114640, 2556
XM_114646, 2756
XM_114649, 2873
XM_114655, 2854
XM_114661, 2677
XM_114662, 2688
XM_114669, 2845
XM_114677, 2802
XM_114678, 2801
XM_114679, 2799
XM_114686, 2699
XM_114692, 6354
XM_114708, 6291
XM_114720, 6130
XM_114724, 6119
XM_114798, 233
XM_114862, 3104
XM_114894, 2977
XM_114981, 3139
XM_115031, 3286
XM_115062, 3364
XM_115063, 3365
XM_115081, 3177
XM_115117, 3570
XM_115140, 3634
XM_115197, 3809
XM_115215, 3948
XM_115352, 4333
XM_115480, 4910
XM_115603, 5466
XM_115615, 5395
XM_115672, 869
XM_115706, 1039
XM_115722, 1040
XM_115825, 1002
XM_115846, 5691
XM_115874, 6281
XM_115886, 6131
XM_115890, 6136
XM_115923, 6259
XM_115924, 6121
XM_116034, 1338
XM_116058, 1295
XM_116071, 1204
XM_116072, 1205
XM_116204, 1532
XM_116205, 1533
XM_116247, 1484
XM_116285, 1408
XM_116307, 1691
XM_116340, 1807
XM_116365, 1856
XM_116427, 1648
XM_116439, 1593
XM_116447, 1606
XM_116465, 1716
XM_116511, 1857
XM_116514, 1861
XM_116524, 2140
XM_116806, 2789
XM_116818, 2738
XM_116853, 1139
XM_116856, 1810
XM_116863, 2975
XM_116913, 3845
XM_116926, 3451
XM_117061, 4913
XM_117066, 4768
XM_117096, 5084
XM_117118, 5379
XM_117122, 5183
XM_117128, 5605
XM_117159, 2
XM_117181, 534
XM_117184, 163
XM_117185, 582
XM_117196, 641
XM_117209, 5688
XM_117264, 736
XM_117311, 1337
XM_117351, 1412
XM_117387, 1622
XM_117398, 1641
XM_117444, 2471
XM_117449, 2160
XM_117452, 2472
XM_117481, 2406
XM_117487, 2622
XM_117519, 2874
XM_117539, 6352
XM_117555, 6349
XM_117692, 28
XM_118637, 4251
XM_165390, 3427
XM_165410, 4583
XM_165411, 4413
XM_165418, 4713
XM_165421, 4701
XM_165422, 4704
XM_165432, 5541
XM_165438, 144
XM_165439, 620
XM_165442, 59
XM_165443, 477
XM_165448, 723
XM_165451, 1268
XM_165465, 1531
XM_165470, 1528
XM_165473, 1482
XM_165483, 1818
XM_165484, 1820
XM_165488, 1615
XM_165499, 2057
XM_165514, 2579
XM_165530, 6355
XM_165533, 6235
XM_165551, 2913
XM_165555, 2889
XM_165557, 2897
XM_165560, 2925
XM_165563, 2926
XM_165567, 2921
XM_165571, 3407
XM_165584, 3414
XM_165586, 3413
XM_165592, 3401
XM_165598, 3303
XM_165600, 3310
XM_165610, 3222
XM_165611, 3217
XM_165612, 3223
XM_165616, 3325
XM_165627, 3335
XM_165628, 3341
XM_165631, 3328
XM_165636, 3903
XM_165639, 3917
XM_165645, 4534
XM_165647, 4528
XM_165648, 4537
XM_165649, 4527
XM_165656, 4484
XM_165657, 4493
XM_165658, 4489
XM_165669, 2091
XM_165692, 2159
XM_165698, 1949
XM_165717, 1954
XM_165728, 2036
XM_165738, 1999
XM_165740, 1865
XM_165743, 1937
XM_165747, 1948
XM_165749, 2037
XM_165758, 2013
XM_165764, 2011
XM_165765, 1988
XM_165770, 1951
XM_165771, 1983
XM_165772, 1876
XM_165777, 2044
XM_165794, 1921
XM_165799, 2006
XM_165801, 1956
XM_165809, 2016
XM_165836, 2350
XM_165839, 2346
XM_165841, 2197
XM_165860, 2167
XM_165867, 2249
XM_165870, 2245
XM_165872, 2253
XM_165876, 2258
XM_165877, 2240
XM_165882, 2248
XM_165888, 2934
XM_165890, 2929
XM_165891, 2941
XM_165903, 3633
XM_165905, 3579
XM_165906, 3532
XM_165910, 3465
XM_165921, 4127
XM_165923, 4325
XM_165954, 5026
XM_165960, 5347
XM_165963, 5367
XM_165975, 327
XM_165976, 373
XM_165977, 264
XM_165978, 532
XM_165981, 290
XM_165983, 275
XM_165984, 175
XM_165994, 927
XM_165998, 893
XM_166007, 910
XM_166008, 900
XM_166011, 1121
XM_166014, 1275
XM_166015, 1192
XM_166017, 1350
XM_166026, 1669
XM_166027, 1663
XM_166028, 1842
XM_166029, 1802
XM_166037, 1612
XM_166042, 2054
XM_166049, 2147
XM_166063, 2540
XM_166064, 2558
XM_166078, 6142
XM_166081, 6255
XM_166093, 2984
XM_166125, 2966
XM_166157, 2922
XM_166174, 3409
XM_166177, 3406
XM_166181, 3403
XM_166196, 3308
XM_166232, 3227
XM_166234, 3224
XM_166235, 3293
XM_166236, 3294
XM_166239, 3349
XM_166253, 3336
XM_166266, 3904
XM_166273, 3886
XM_166277, 4532
XM_166282, 4491
XM_166285, 4490
XM_166288, 5071
XM_166303, 2092
XM_166310, 2101
XM_166327, 2157
XM_166333, 1932
XM_166336, 2021
XM_166340, 1882
XM_166349, 1872
XM_166353, 2002
XM_166357, 2049
XM_166360, 1938
XM_166361, 2009
XM_166362, 1884
XM_166363, 1940
XM_166376, 2004
XM_166381, 1992
XM_166392, 2019
XM_166401, 1995
XM_166402, 1896
XM_166406, 2015
XM_166412, 1910
XM_166417, 1914
XM_166419, 1920
XM_166425, 1888
XM_166446, 2042
XM_166457, 1878
XM_166459, 1931
XM_166469, 1879
XM_166480, 1955
XM_166482, 2351
XM_166485, 2353
XM_166494, 2224
XM_166504, 2222
XM_166505, 2202
XM_166506, 2200
XM_166509, 2219
XM_166512, 2205
XM_166513, 2220
XM_166514, 2203
XM_166515, 2204
XM_166521, 2198
XM_166523, 2170
XM_166531, 2190
XM_166540, 2191
XM_166541, 2168
XM_166594, 2230
XM_166599, 20
XM_166605, 3506
XM_166629, 2988
XM_166665, 2918
XM_166717, 2906
XM_166743, 3418
XM_167008, 5080
XM_167016, 2087
XM_167027, 2094
XM_167037, 2096
XM_167046, 2150
XM_167128, 2023
XM_167161, 2025
XM_167169, 1868
XM_167179, 2031
XM_167196, 2041
XM_167225, 2047
XM_167339, 2264
XM_167363, 5065
XM_167366, 1209
XM_167374, 2898
XM_167395, 2963
XM_167411, 2901
XM_167414, 2904
XM_167433, 3324
XM_167437, 3192
XM_167439, 3876
XM_167453, 4538
XM_167456, 4541
XM_167476, 2321
XM_167477, 2325
XM_167483, 2328
XM_167484, 2329
XM_167494, 2273
XM_167498, 2301
XM_167500, 2299
XM_167502, 2312
XM_167504, 2300
XM_167518, 3754
XM_167530, 5529
XM_167538, 5945
XM_167558, 2645
XM_167626, 2887
XM_167716, 3244
XM_167726, 3248
XM_167747, 3234
XM_167748, 3228
XM_167780, 3417
XM_167804, 3291
XM_167853, 3318
XM_167892, 3883
XM_167906, 3877
XM_167911, 3868
XM_167918, 3869
XM_168054, 2103
XM_168070, 1928
XM_168104, 1994
XM_168123, 1877
XM_168181, 2322
XM_168251, 2323
XM_168354, 2271
XM_168378, 2269
XM_168435, 2316
XM_168450, 2315
XM_168454, 2302
XM_168461, 2311
XM_168464, 2317
XM_168470, 2310
XM_168548, 2375
XM_168572, 2380
XM_168586, 2360
XM_169414, 3880
XM_169540, 5078
XM_170195, 2267
XM_170427, 2318

[6394] Source Index (to Figure number)

gen.NM_000018,4669
gen.NM_000026,6068
gen.NM_000029,624
gen.NM_000033,6342
gen.NM_000034,4520
gen.NM_000039,3376
gen.NM_000041,5511
gen.NM_000070,4161
gen.NM_000075,3683
gen.NM_000077,2655
gen.NM_000079,898
gen.NM_000090,921
gen.NM_000107,3208
gen.NM_000114,5836
gen.NM_000121,5258
gen.NM_000126,4267
gen.NM_000137,4300
gen.NM_000143,636
gen.NM_000146,5562
gen.NM_000154,4967
gen.NM_000156,5122
gen.NM_000165,2099
gen.NM_000177,2796
gen.NM_000178,5738
gen.NM_000179,744
gen.NM_000182,713
gen.NM_000183,711
gen.NM_000184,3144
gen.NM_000196,4547
gen.NM_000213,4963
gen.NM_000221,701
gen.NM_000224,3593
gen.NM_000227,5040
gen.NM_000228,553
gen.NM_000239,3729
gen.NM_000250,4903
gen.NM_000251,741
gen.NM_000268,5994
gen.NM_000269,4889
gen.NM_000274,3076
gen.NM_000284,6138
gen.NM_000291,6230
gen.NM_000358,1671
gen.NM_000365,3460
gen.NM_000368,2806
gen.NM_000385,2262
gen.NM_000386,4843
gen.NM_000396,356
gen.NM_000404,1089
gen.NM_000407,5947
gen.NM_000422,4807
gen.NM_000425,6334
gen.NM_000447,594
gen.NM_000484,5882
gen.NM_000505,1828
gen.NM_000508,1511
gen.NM_000509,1515
gen.NM_000516,5830
gen.NM_000517,4354
gen.NM_000521,1627
gen.NM_000526,4816
gen.NM_000532,1260
gen.NM_000554,5480
gen.NM_000558,4356
gen.NM_000559,3142
gen.NM_000569,505
gen.NM_000574,558
gen.NM_000576,847
gen.NM_000582,1459
gen.NM_000592,1957
gen.NM_000598,2228
gen.NM_000602,2361
gen.NM_000612,3120
gen.NM_000638,4763
gen.NM_000661,1425
gen.NM_000666,1172
gen.NM_000687,5736
gen.NM_000688,1167
gen.NM_000700,2695
gen.NM_000701,312
gen.NM_000743,4259
gen.NM_000754,5956
gen.NM_000760,173
gen.NM_000785,3687
gen.NM_000787,2830
gen.NM_000795,3384
gen.NM_000801,5648
gen.NM_000852,3297
gen.NM_000858,612
gen.NM_000893,1327
gen.NM_000895,3763
gen.NM_000930,2534
gen.NM_000931,2536
gen.NM_000942,4218
gen.NM_000954,2868
gen.NM_000964,4820
gen.NM_000967,6061
gen.NM_000969,284
gen.NM_000970,3781
gen.NM_000971,2569
gen.NM_000972,2826
gen.NM_000973,2633
gen.NM_000975,87
gen.NM_000976,2780
gen.NM_000977,4633
gen.NM_000978,4801
gen.NM_000979,5571
gen.NM_000980,5334
gen.NM_000981,4798
gen.NM_000982,3091
gen.NM_000983,34
gen.NM_000985,5067
gen.NM_000986,1206
gen.NM_000987,4714
gen.NM_000989,2588
gen.NM_000990,3155
gen.NM_000991,5613
gen.NM_000992,1170
gen.NM_000993,832
gen.NM_000994,1064
gen.NM_000997,1570
gen.NM_000998,966
gen.NM_001000,6278
gen.NM_001002,3827
gen.NM_001003,4228
gen.NM_001005,3331
gen.NM_001006,1506
gen.NM_001007,6224
gen.NM_001009,5633
gen.NM_001010,2651
gen.NM_001011,643
gen.NM_001012,210
gen.NM_001016,2111
gen.NM_001017,3171
gen.NM_001018,5126
gen.NM_001020,5426
gen.NM_001021,4283
gen.NM_001022,5468
gen.NM_001023,2552
gen.NM_001024,5847
gen.NM_001025,1632
gen.NM_001026,2980
gen.NM_001028,3361
gen.NM_001029,3656
gen.NM_001030,440
gen.NM_001034,651
gen.NM_001038,3478
gen.NM_001043,4487
gen.NM_001050,4841
gen.NM_001064,1159
gen.NM_001065,3480
gen.NM_001068,1079
gen.NM_001069,2050
gen.NM_001084,2369
gen.NM_001087,994
gen.NM_001098,6079
gen.NM_001101,2174
gen.NM_001102,4040
gen.NM_001122,2649
gen.NM_001134,1446
gen.NM_001154,1489
gen.NM_001157,2990
gen.NM_001168,4985
gen.NM_001190,5568
gen.NM_001199,2495
gen.NM_001207,1624
gen.NM_001211,4139
gen.NM_001218,4203
gen.NM_001235,3333
gen.NM_001238,5374
gen.NM_001247,5703
gen.NM_001255,194
gen.NM_001262,229
gen.NM_001273,3468
gen.NM_001274,3411
gen.NM_001275,4065
gen.NM_001283,2365
gen.NM_001287,4372
gen.NM_001288,1969
gen.NM_001293,3337
gen.NM_001294,5508
gen.NM_001313,1396
gen.NM_001319,5141
gen.NM_001320,1971
gen.NM_001324,5814
gen.NM_001325,6239
gen.NM_001333,2736
gen.NM_001344,3984
gen.NM_001350,1942
gen.NM_001363,6318
gen.NM_001407,1132
gen.NM_001415,6143
gen.NM_001416,4687
gen.NM_001418,3163
gen.NM_001428,31
gen.NM_001436,5436
gen.NM_001444,2575
gen.NM_001450,836
gen.NM_001463,916
gen.NM_001465,1573
gen.NM_001467,3359
gen.NM_001469,6081
gen.NM_001494,2891
gen.NM_001500,2052
gen.NM_001517,1997
gen.NM_001521,689
gen.NM_001530,4016
gen.NM_001536,5539
gen.NM_001539,2660
gen.NM_001540,2308
gen.NM_001553,1435
gen.NM_001554,269
gen.NM_001560,6270
gen.NM_001567,3322
gen.NM_001568,2596
gen.NM_001569,6332
gen.NM_001571,5542
gen.NM_001605,4564
gen.NM_001607,1097
gen.NM_001610,3206
gen.NM_001613,3008
gen.NM_001622,1330
gen.NM_001628,2423
gen.NM_001641,3997
gen.NM_001644,3511
gen.NM_001647,1352
gen.NM_001648,5590
gen.NM_001659,3550
gen.NM_001662,2398
gen.NM_001667,3284
gen.NM_001673,2355
gen.NM_001687,5115
gen.NM_001688,308
gen.NM_001696,5941
gen.NM_001697,5892
gen.NM_001710,1959
gen.NM_001734,3452
gen.NM_001743,5494
gen.NM_001747,806
gen.NM_001751,3137
gen.NM_001753,2391
gen.NM_001757,5894
gen.NM_001760,1898
gen.NM_001762,2274
gen.NM_001780,3663
gen.NM_001791,81
gen.NM_001816,5478
gen.NM_001819,5679
gen.NM_001827,2714
gen.NM_001831,2506
gen.NM_001833,2689
gen.NM_001842,2668
gen.NM_001853,5853
gen.NM_001861,4614
gen.NM_001862,827
gen.NM_001878,392
gen.NM_001907,4579
gen.NM_001909,3133
gen.NM_001920,3740
gen.NM_001930,5267
gen.NM_001935,894
gen.NM_001944,5050
gen.NM_001959,950
gen.NM_001961,5178
gen.NM_001964,1689
gen.NM_001969,4098
gen.NM_001970,4697
gen.NM_001975,3458
gen.NM_001983,5502
gen.NM_001985,5593
gen.NM_002003,2834
gen.NM_002004,422
gen.NM_002011,1836
gen.NM_002014,3439
gen.NM_002015,3896
gen.NM_002018,4719
gen.NM_002028,4010
gen.NM_002046,3473
gen.NM_002047,2265
gen.NM_002075,3463
gen.NM_002079,3066
gen.NM_002083,4012
gen.NM_002084,1704
gen.NM_002085,5112
gen.NM_002086,4953
gen.NM_002087,4845
gen.NM_002106,1478
gen.NM_002109,1779
gen.NM_002128,3887
gen.NM_002129,1522
gen.NM_002130,1582
gen.NM_002133,6020
gen.NM_002137,2210
gen.NM_002157,930
gen.NM_002161,2716
gen.NM_002168,4293
gen.NM_002178,3600
gen.NM_002211,2919
gen.NM_002212,5742
gen.NM_002229,5272
gen.NM_002265,4834
gen.NM_002273,3591
gen.NM_002274,4814
gen.NM_002275,4812
gen.NM_002276,4810
gen.NM_002295,1108
gen.NM_002305,6038
gen.NM_002306,4022
gen.NM_002339,3115
gen.NM_002340,5931
gen.NM_002342,3476
gen.NM_002345,3752
gen.NM_002355,3489
gen.NM_002358,1485
gen.NM_002364,6147
gen.NM_002385,5086
gen.NM_002386,4626
gen.NM_002388,1866
gen.NM_002396,5069
gen.NM_002397,1646
gen.NM_002401,4933
gen.NM_002411,3245
gen.NM_002413,1494
gen.NM_002414,6124
gen.NM_002415,5979
gen.NM_002453,751
gen.NM_002466,5774
gen.NM_002468,1095
gen.NM_002473,6025
gen.NM_002477,1368
gen.NM_002484,4416
gen.NM_002486,2734
gen.NM_002489,2193
gen.NM_002492,1297
gen.NM_002512,4887
gen.NM_002520,1803
gen.NM_002537,4210
gen.NM_002539,659
gen.NM_002567,3816
gen.NM_002568,2593
gen.NM_002574,220
gen.NM_002588,1728
gen.NM_002606,5900
gen.NM_002615,4647
gen.NM_002617,12
gen.NM_002632,4052
gen.NM_002634,4939
gen.NM_002638,5779
gen.NM_002654,4242
gen.NM_002660,5771
gen.NM_002668,6185
gen.NM_002689,3289
gen.NM_002691,5580
gen.NM_002707,681
gen.NM_002712,1030
gen.NM_002720,4518
gen.NM_002727,2961
gen.NM_002730,5298
gen.NM_002733,3555
gen.NM_002766,4975
gen.NM_002787,2254
gen.NM_002789,4261
gen.NM_002792,5838
gen.NM_002793,2137
gen.NM_002796,346
gen.NM_002802,4059
gen.NM_002803,2378
gen.NM_002809,4805
gen.NM_002810,348
gen.NM_002812,5401
gen.NM_002813,3837
gen.NM_002815,4778
gen.NM_002819,5102
gen.NM_002827,5809
gen.NM_002846,980
gen.NM_002854,1188
gen.NM_002856,5515
gen.NM_002857,481
gen.NM_002863,4029
gen.NM_002870,438
gen.NM_002878,4784
gen.NM_002883,6075
gen.NM_002887,1800
gen.NM_002913,1427
gen.NM_002915,3891
gen.NM_002921,3002
gen.NM_002923,540
gen.NM_002934,3992
gen.NM_002938,1386
gen.NM_002946,127
gen.NM_002947,2188
gen.NM_002948,1076
gen.NM_002952,4382
gen.NM_002954,749
gen.NM_002961,369
gen.NM_002965,364
gen.NM_002979,235
gen.NM_003002,3390
gen.NM_003021,5161
gen.NM_003025,5188
gen.NM_003055,2947
gen.NM_003064,5781
gen.NM_003072,5254
gen.NM_003076,3568
gen.NM_003088,2176
gen.NM_003090,4320
gen.NM_003091,5654
gen.NM_003092,5683
gen.NM_003104,4187
gen.NM_003107,2032
gen.NM_003123,4511
gen.NM_003124,789
gen.NM_003128,746
gen.NM_003132,50
gen.NM_003137,1916
gen.NM_003143,2435
gen.NM_003145,409
gen.NM_003146,3215
gen.NM_003149,1099
gen.NM_003169,5428
gen.NM_003181,2135
gen.NM_003216,6077
gen.NM_003283,5608
gen.NM_003287,2104
gen.NM_003289,2680
gen.NM_003290,5312
gen.NM_003295,3900
gen.NM_003310,649
gen.NM_003316,5896
gen.NM_003334,6167
gen.NM_003349,5804
gen.NM_003350,2546
gen.NM_003365,1134
gen.NM_003366,4421
gen.NM_003370,5499
gen.NM_003374,1677
gen.NM_003375,2982
gen.NM_003378,2367
gen.NM_003389,2728
gen.NM_003400,761
gen.NM_003401,1636
gen.NM_003406,2590
gen.NM_003418,1250
gen.NM_003453,3864
gen.NM_003461,2440
gen.NM_003472,2034
gen.NM_003516,459
gen.NM_003564,474
gen.NM_003598,5556
gen.NM_003617,497
gen.NM_003624,5214
gen.NM_003626,3316
gen.NM_003646,3197
gen.NM_003662,6149
gen.NM_003680,157
gen.NM_003681,5905
gen.NM_003685,5203
gen.NM_003687,1673
gen.NM_003689,71
gen.NM_003712,5093
gen.NM_003714,1812
gen.NM_003720,5898
gen.NM_003721,5360
gen.NM_003722,1335
gen.NM_003729,288
gen.NM_003735,1730
gen.NM_003736,1732
gen.NM_003739,2883
gen.NM_003752,4449
gen.NM_003753,6027
gen.NM_003755,5234
gen.NM_003756,2598
gen.NM_003757,148
gen.NM_003765,5288
gen.NM_003766,4865
gen.NM_003779,468
gen.NM_003780,199
gen.NM_003787,5052
gen.NM_003815,457
gen.NM_003824,3313
gen.NM_003836,4088
gen.NM_003837,2723
gen.NM_003859,5811
gen.NM_003876,4708
gen.NM_003877,3757
gen.NM_003906,5933
gen.NM_003908,5734
gen.NM_003915,5747
gen.NM_003932,6070
gen.NM_003937,881
gen.NM_003938,5148
gen.NM_003971,4891
gen.NM_003973,1110
gen.NM_003979,3498
gen.NM_004000,306
gen.NM_004004,3866
gen.NM_004044,955
gen.NM_004048,4178
gen.NM_004053,1900
gen.NM_004060,1791
gen.NM_004074,3264
gen.NM_004084,2476
gen.NM_004085,6242
gen.NM_004092,3099
gen.NM_004111,3253
gen.NM_004117,1918
gen.NM_004127,5008
gen.NM_004134,1693
gen.NM_004135,6340
gen.NM_004147,6011
gen.NM_004152,5154
gen.NM_004159,1952
gen.NM_004175,5983
gen.NM_004176,4742
gen.NM_004178,3614
gen.NM_004181,1430
gen.NM_004182,6174
gen.NM_004193,3045
gen.NM_004203,4402
gen.NM_004208,6285
gen.NM_004217,4699
gen.NM_004219,1795
gen.NM_004240,5206
gen.NM_004247,4879
gen.NM_004261,273
gen.NM_004265,3249
gen.NM_004309,5002
gen.NM_004322,3256
gen.NM_004323,2662
gen.NM_004324,5564
gen.NM_004335,5328
gen.NM_004339,5921
gen.NM_004341,692
gen.NM_004345,1128
gen.NM_004360,4549
gen.NM_004398,3392
gen.NM_004401,48
gen.NM_004404,1034
gen.NM_004435,2761
gen.NM_004448,4796
gen.NM_004461,5279
gen.NM_004483,4602
gen.NM_004493,6190
gen.NM_004509,1012
gen.NM_004510,1014
gen.NM_004524,4960
gen.NM_004539,5072
gen.NM_004547,1218
gen.NM_004550,470
gen.NM_004551,3199
gen.NM_004555,4586
gen.NM_004573,4141
gen.NM_004595,6140
gen.NM_004596,5448
gen.NM_004599,6085
gen.NM_004618,4716
gen.NM_004632,414
gen.NM_004635,1155
gen.NM_004636,1149
gen.NM_004637,1246
gen.NM_004638,1979
gen.NM_004639,1973
gen.NM_004640,1986
gen.NM_004673,529
gen.NM_004691,4545
gen.NM_004697,2751
gen.NM_004699,6323
gen.NM_004701,4197
gen.NM_004704,1182
gen.NM_004706,5470
gen.NM_004714,5434
gen.NM_004725,3093
gen.NM_004728,2959
gen.NM_004735,1026
gen.NM_004738,5824
gen.NM_004739,3230
gen.NM_004766,1270
gen.NM_004767,576
gen.NM_004772,1650
gen.NM_004781,44
gen.NM_004794,6287
gen.NM_004813,3190
gen.NM_004821,1787
gen.NM_004844,1066
gen.NM_004846,998
gen.NM_004859,4921
gen.NM_004870,4689
gen.NM_004889,2342
gen.NM_004893,1685
gen.NM_004905,511
gen.NM_004911,2442
gen.NM_004928,5915
gen.NM_004930,69
gen.NM_004933,4638
gen.NM_004939,662
gen.NM_004957,2775
gen.NM_004960,4465
gen.NM_004964,150
gen.NM_004973,2039
gen.NM_004982,3526
gen.NM_004990,3669
gen.NM_004992,6330
gen.NM_004994,5791
gen.NM_004995,3976
gen.NM_005000,2396
gen.NM_005002,3448
gen.NM_005003,4446
gen.NM_005004,3063
gen.NM_005005,2606
gen.NM_005008,6083
gen.NM_005015,3981
gen.NM_005016,3620
gen.NM_005022,4665
gen.NM_005030,4442
gen.NM_005036,6104
gen.NM_005042,3524
gen.NM_005053,5283
gen.NM_005072,4581
gen.NM_005080,5987
gen.NM_005109,1093
gen.NM_005110,1854
gen.NM_005112,1421
gen.NM_005115,4500
gen.NM_005132,3962
gen.NM_005141,1508
gen.NM_005163,4110
gen.NM_005171,3574
gen.NM_005174,2895
gen.NM_005194,5808
gen.NM_005217,2478
gen.NM_005220,4946
gen.NM_005224,5104
gen.NM_005243,5989
gen.NM_005269,3667
gen.NM_005271,3004
gen.NM_005291,854
gen.NM_005300,6159
gen.NM_005313,4174
gen.NM_005324,4969
gen.NM_005330,3146
gen.NM_005333,6126
gen.NM_005345,1963
gen.NM_005346,1961
gen.NM_005347,2790
gen.NM_005348,4092
gen.NM_005362,6316
gen.NM_005364,6308
gen.NM_005370,5314
gen.NM_005371,3689
gen.NM_005378,657
gen.NM_005389,2126
gen.NM_005432,4101
gen.NM_005439,3466
gen.NM_005440,4877
gen.NM_005452,1944
gen.NM_005474,4850
gen.NM_005490,5208
gen.NM_005498,5241
gen.NM_005514,2155
gen.NM_005517,110
gen.NM_005520,1850
gen.NM_005548,4568
gen.NM_005563,105
gen.NM_005566,3175
gen.NM_005572,404
gen.NM_005573,1718
gen.NM_005581,5517
gen.NM_005594,3628
gen.NM_005614,2460
gen.NM_005617,1708
gen.NM_005620,340
gen.NM_005623,4782
gen.NM_005632,4362
gen.NM_005657,4170
gen.NM_005663,1382
gen.NM_005676,6165
gen.NM_005686,550
gen.NM_005692,2458
gen.NM_005693,3204
gen.NM_005698,424
gen.NM_005710,6181
gen.NM_005713,1602
gen.NM_005717,517
gen.NM_005718,1055
gen.NM_005720,2348
gen.NM_005724,4273
gen.NM_005726,3695
gen.NM_005729,2986
gen.NM_005731,996
gen.NM_005745,6344
gen.NM_005754,1697
gen.NM_005762,5627
gen.NM_005770,4176
gen.NM_005775,2491
gen.NM_005783,829
gen.NM_005787,1316
gen.NM_005796,4575
gen.NM_005806,5887
gen.NM_005826,83
gen.NM_005830,3898
gen.NM_005831,4911
gen.NM_005833,2792
gen.NM_005837,2326
gen.NM_005850,461
gen.NM_005851,3301
gen.NM_005855,1024
gen.NM_005866,2670
gen.NM_005877,5999
gen.NM_005884,5421
gen.NM_005889,3509
gen.NM_005911,808
gen.NM_005915,864
gen.NM_005917,764
gen.NM_005918,2306
gen.NM_005973,389
gen.NM_005981,3681
gen.NM_005983,1579
gen.NM_005985,5802
gen.NM_005997,350
gen.NM_006000,982
gen.NM_006012,5201
gen.NM_006013,6326
gen.NM_006019,3304
gen.NM_006023,2899
gen.NM_006039,4936
gen.NM_006053,3306
gen.NM_006058,1702
gen.NM_006066,218
gen.NM_006067,4612
gen.NM_006098,1852
gen.NM_006101,5023
gen.NM_006109,3973
gen.NM_006110,4423
gen.NM_006112,159
gen.NM_006114,5513
gen.NM_006115,5975
gen.NM_006128,2497
gen.NM_006131,2499
gen.NM_006132,2501
gen.NM_006136,2393
gen.NM_006169,3380
gen.NM_006184,5566
gen.NM_006227,5789
gen.NM_006230,2246
gen.NM_006245,1892
gen.NM_006247,5497
gen.NM_006250,3522
gen.NM_006253,3831
gen.NM_006262,3546
gen.NM_006265,2600
gen.NM_006271,374
gen.NM_006272,5935
gen.NM_006280,6338
gen.NM_006289,2682
gen.NM_006295,1967
gen.NM_006303,2178
gen.NM_006330,2550
gen.NM_006335,571
gen.NM_006339,5171
gen.NM_006342,1374
gen.NM_006349,2371
gen.NM_006354,1049
gen.NM_006362,3242
gen.NM_006365,396
gen.NM_006373,4875
gen.NM_006384,4305
gen.NM_006387,5319
gen.NM_006395,1062
gen.NM_006397,5277
gen.NM_006401,2732
gen.NM_006427,4106
gen.NM_006428,4360
gen.NM_006429,792
gen.NM_006430,759
gen.NM_006432,4048
gen.NM_006435,3113
gen.NM_006439,1504
gen.NM_006440,5954
gen.NM_006453,4384
gen.NM_006455,4822
gen.NM_006470,4725
gen.NM_006478,5991
gen.NM_006488,703
gen.NM_006494,5476
gen.NM_006503,5441
gen.NM_006513,298
gen.NM_006516,188
gen.NM_006523,3055
gen.NM_006530,3727
gen.NM_006556,452
gen.NM_006559,146
gen.NM_006576,3697
gen.NM_006585,5885
gen.NM_006586,1894
gen.NM_006589,428
gen.NM_006600,118
gen.NM_006601,3636
gen.NM_006621,300
gen.NM_006625,93
gen.NM_006636,794
gen.NM_006646,3881
gen.NM_006659,3101
gen.NM_006666,5558
gen.NM_006667,6272
gen.NM_006670,2070
gen.NM_006693,2344
gen.NM_006694,436
gen.NM_006698,5760
gen.NM_006708,1904
gen.NM_006711,4392
gen.NM_006746,6134
gen.NM_006761,4642
gen.NM_006763,548
gen.NM_006764,1151
gen.NM_006769,271
gen.NM_006787,6197
gen.NM_006791,4279
gen.NM_006799,4408
gen.NM_006801,5576
gen.NM_006805,1687
gen.NM_006808,2740
gen.NM_006810,1223
gen.NM_006812,3678
gen.NM_006815,3847
gen.NM_006816,1830
gen.NM_006817,3785
gen.NM_006821,4046
gen.NM_006824,192
gen.NM_006825,3807
gen.NM_006826,655
gen.NM_006833,2338
gen.NM_006835,1449
gen.NM_006837,2565
gen.NM_006839,814
gen.NM_006842,3295
gen.NM_006844,5308
gen.NM_006854,2184
gen.NM_006862,344
gen.NM_006888,4063
gen.NM_006899,5661
gen.NM_006908,2182
gen.NM_006924,4908
gen.NM_006928,3660
gen.NM_006932,6007
gen.NM_006938,5039
gen.NM_006941,6049
gen.NM_006942,4691
gen.NM_006990,124
gen.NM_007002,5844
gen.NM_007019,5785
gen.NM_007032,6040
gen.NM_007034,267
gen.NM_007046,705
gen.NM_007047,2029
gen.NM_007062,3805
gen.NM_007065,5237
gen.NM_007074,4516
gen.NM_007085,1216
gen.NM_007096,2691
gen.NM_007100,1366
gen.NM_007103,3299
gen.NM_007104,1922
gen.NM_007158,302
gen.NM_007165,5152
gen.NM_007173,3348
gen.NM_007178,3501
gen.NM_007184,1165
gen.NM_007186,5744
gen.NM_007190,3089
gen.NM_007209,2794
gen.NM_007242,4566
gen.NM_007244,3520
gen.NM_007260,89
gen.NM_007262,42
gen.NM_007263,5352
gen.NM_007268,6204
gen.NM_007273,3455
gen.NM_007275,1153
gen.NM_007276,2214
gen.NM_007279,5619
gen.NM_007310,5958
gen.NM_007311,6095
gen.NM_007317,4507
gen.NM_007355,1874
gen.NM_007364,4277
gen.NM_007372,4931
gen.NM_012068,5525
gen.NM_012098,2782
gen.NM_012099,5504
gen.NM_012100,977
gen.NM_012101,3420
gen.NM_012111,4055
gen.NM_012112,5715
gen.NM_012116,5519
gen.NM_012138,4838
gen.NM_012170,4265
gen.NM_012179,6017
gen.NM_012181,5350
gen.NM_012203,2693
gen.NM_012207,2955
gen.NM_012237,5409
gen.NM_012248,4451
gen.NM_012255,5698
gen.NM_012264,6054
gen.NM_012286,6246
gen.NM_012296,3344
gen.NM_012323,6052
gen.NM_012391,1929
gen.NM_012412,2236
gen.NM_012423,5550
gen.NM_012437,381
gen.NM_012458,5155
gen.NM_012469,5873
gen.NM_012486,596
gen.NM_013237,1834
gen.NM_013247,801
gen.NM_013265,3279
gen.NM_013274,3037
gen.NM_013277,3566
gen.NM_013296,292
gen.NM_013333,5617
gen.NM_013336,1238
gen.NM_013341,903
gen.NM_013363,1276
gen.NM_013365,6032
gen.NM_013369,5911
gen.NM_013375,2027
gen.NM_013393,2165
gen.NM_013402,3251
gen.NM_013403,5492
gen.NM_013406,5269
gen.NM_013407,5270
gen.NM_013417,2718
gen.NM_013442,2675
gen.NM_013451,3013
gen.NM_014003,4592
gen.NM_014008,6187
gen.NM_014033,3576
gen.NM_014035,1664
gen.NM_014042,3320
gen.NM_014062,4556
gen.NM_014063,2251
gen.NM_014107,2077
gen.NM_014138,6163
gen.NM_014166,3906
gen.NM_014172,2862
gen.NM_014173,5326
gen.NM_014176,578
gen.NM_014184,585
gen.NM_014188,17
gen.NM_014189,1390
gen.NM_014190,1388
gen.NM_014203,5536
gen.NM_014214,5032
gen.NM_014226,4095
gen.NM_014236,626
gen.NM_014248,6072
gen.NM_014255,3631
gen.NM_014267,3173
gen.NM_014275,1846
gen.NM_014285,2820
gen.NM_014294,2567
gen.NM_014303,6003
gen.NM_014306,6015
gen.NM_014311,3606
gen.NM_014320,2116
gen.NM_014321,4476
gen.NM_014325,3777
gen.NM_014335,4182
gen.NM_014341,1906
gen.NM_014353,4386
gen.NM_014408,167
gen.NM_014413,2180
gen.NM_014426,5685
gen.NM_014444,4168
gen.NM_014445,1284
gen.NM_014452,1870
gen.NM_014453,5625
gen.NM_014481,6199
gen.NM_014501,5615
gen.NM_014502,3220
gen.NM_014515,3724
gen.NM_014556,1394
gen.NM_014571,142
gen.NM_014585,923
gen.NM_014587,4370
gen.NM_014610,3232
gen.NM_014624,367
gen.NM_014649,5199
gen.NM_014663,202
gen.NM_014670,934
gen.NM_014685,4530
gen.NM_014713,667
gen.NM_014736,4214
gen.NM_014737,5676
gen.NM_014742,5721
gen.NM_014747,180
gen.NM_014748,684
gen.NM_014752,3329
gen.NM_014773,1721
gen.NM_014776,3792
gen.NM_014778,3878
gen.NM_014800,2259
gen.NM_014814,1195
gen.NM_014829,1681
gen.NM_014837,519
gen.NM_014847,446
gen.NM_014849,463
gen.NM_014851,36
gen.NM_014868,3823
gen.NM_014887,3889
gen.NM_014919,1378
gen.NM_014931,5610
gen.NM_014933,1457
gen.NM_014941,6005
gen.NM_014972,4628
gen.NM_015043,1843
gen.NM_015062,3042
gen.NM_015064,3430
gen.NM_015068,2319
gen.NM_015129,6276
gen.NM_015140,6097
gen.NM_015179,3024
gen.NM_015322,4226
gen.NM_015324,3149
gen.NM_015373,6056
gen.NM_015388,1886
gen.NM_015438,3470
gen.NM_015449,444
gen.NM_015453,1043
gen.NM_015472,1282
gen.NM_015484,99
gen.NM_015511,5752
gen.NM_015533,3225
gen.NM_015544,4780
gen.NM_015584,4761
gen.NM_015629,5600
gen.NM_015636,686
gen.NM_015640,260
gen.NM_015644,1057
gen.NM_015646,3720
gen.NM_015665,3604
gen.NM_015702,885
gen.NM_015714,555
gen.NM_015853,3238
gen.NM_015920,4205
gen.NM_015932,3884
gen.NM_015934,941
gen.NM_015937,5783
gen.NM_015953,5546
gen.NM_015965,5362
gen.NM_015966,5745
gen.NM_016003,2172
gen.NM_016016,4847
gen.NM_016022,334
gen.NM_016026,4037
gen.NM_016030,647
gen.NM_016059,1908
gen.NM_016085,694
gen.NM_016091,6045
gen.NM_016095,4610
gen.NM_016111,4374
gen.NM_016119,3912
gen.NM_016143,5652
gen.NM_016169,3051
gen.NM_016174,2767
gen.NM_016176,26
gen.NM_016183,73
gen.NM_016202,5621
gen.NM_016223,3210
gen.NM_016249,6300
gen.NM_016263,5169
gen.NM_016267,6293
gen.NM_016286,5006
gen.NM_016292,4414
gen.NM_016304,4193
gen.NM_016328,2293
gen.NM_016357,3572
gen.NM_016359,4152
gen.NM_016361,328
gen.NM_016410,2664
gen.NM_016440,5523
gen.NM_016445,4035
gen.NM_016456,564
gen.NM_016498,6001
gen.NM_016526,3107
gen.NM_016539,5181
gen.NM_016558,5750
gen.NM_016567,3097
gen.NM_016579,5216
gen.NM_016587,2216
gen.NM_016592,5826
gen.NM_016638,3843
gen.NM_016639,4398
gen.NM_016641,4335
gen.NM_016645,4302
gen.NM_016647,2614
gen.NM_016732,5733
gen.NM_016838,887
gen.NM_016839,889
gen.NM_016930,1400
gen.NM_016940,5883
gen.NM_016941,5432
gen.NM_017443,2753
gen.NM_017458,4498
gen.NM_017491,1419
gen.NM_017546,834
gen.NM_017566,4617
gen.NM_017572,5146
gen.NM_017595,4871
gen.NM_017601,1902
gen.NM_017610,4195
gen.NM_017613,5890
gen.NM_017647,4929
gen.NM_017668,4327
gen.NM_017670,3266
gen.NM_017684,4208
gen.NM_017722,5286
gen.NM_017751,859
gen.NM_017760,2467
gen.NM_017761,91
gen.NM_017768,262
gen.NM_017777,4906
gen.NM_017789,825
gen.NM_017797,5143
gen.NM_017801,1081
gen.NM_017803,4584
gen.NM_017807,4003
gen.NM_017815,3971
gen.NM_017822,3552
gen.NM_017825,165
gen.NM_017827,5413
gen.NM_017829,5939
gen.NM_017847,513
gen.NM_017853,4594
gen.NM_017868,3386
gen.NM_017874,5668
gen.NM_017876,5098
gen.NM_017882,4224
gen.NM_017883,6179
gen.NM_017891,8
gen.NM_017895,5798
gen.NM_017900,22
gen.NM_017901,3810
gen.NM_017910,674
gen.NM_017916,5554
gen.NM_017952,812
gen.NM_017955,4112
gen.NM_017974,1020
gen.NM_018019,4737
gen.NM_018023,1306
gen.NM_018032,4358
gen.NM_018034,1575
gen.NM_018035,5458
gen.NM_018047,1706
gen.NM_018048,3517
gen.NM_018054,4436
gen.NM_018066,116
gen.NM_018070,239
gen.NM_018085,569
gen.NM_018096,4792
gen.NM_018110,4535
gen.NM_018113,3548
gen.NM_018116,420
gen.NM_018122,535
gen.NM_018124,4588
gen.NM_018135,1880
gen.NM_018154,5300
gen.NM_018174,5332
gen.NM_018188,10
gen.NM_018209,5861
gen.NM_018212,587
gen.NM_018217,5740
gen.NM_018238,2437
gen.NM_018242,4747
gen.NM_018250,2510
gen.NM_018253,418
gen.NM_018255,5056
gen.NM_018270,5849
gen.NM_018310,2527
gen.NM_018346,4898
gen.NM_018357,4232
gen.NM_018410,1018
gen.NM_018454,4154
gen.NM_018457,3610
gen.NM_018463,3442
gen.NM_018464,2951
gen.NM_018468,5387
gen.NM_018486,6222
gen.NM_018509,4900
gen.NM_018607,721
gen.NM_018660,2512
gen.NM_018668,4312
gen.NM_018674,973
gen.NM_018686,3513
gen.NM_018912,1734
gen.NM_018913,1736
gen.NM_018914,1738
gen.NM_018915,1740
gen.NM_018916,1742
gen.NM_018917,1744
gen.NM_018918,1746
gen.NM_018919,1748
gen.NM_018920,1750
gen.NM_018921,1752
gen.NM_018922,1754
gen.NM_018923,1756
gen.NM_018924,1758
gen.NM_018925,1760
gen.NM_018926,1762
gen.NM_018927,1764
gen.NM_018928,1766
gen.NM_018929,1768
gen.NM_018947,2208
gen.NM_018948,41
gen.NM_018950,2017
gen.NM_018955,4728
gen.NM_018957,6034
gen.NM_018977,6214
gen.NM_019013,4682
gen.NM_019058,2971
gen.NM_019059,2206
gen.NM_019082,2242
gen.NM_019095,5681
gen.NM_019099,310
gen.NM_019554,371
gen.NM_019606,2333
gen.NM_019609,5663
gen.NM_019619,2916
gen.NM_019848,6321
gen.NM_019852,3988
gen.NM_019887,3839
gen.NM_020037,4895
gen.NM_020038,4893
gen.NM_020132,5908
gen.NM_020134,709
gen.NM_020149,4136
gen.NM_020158,5454
gen.NM_020188,4604
gen.NM_020230,5232
gen.NM_020243,6058
gen.NM_020299,2425
gen.NM_020315,6036
gen.NM_020320,2075
gen.NM_020347,1113
gen.NM_020401,3717
gen.NM_020414,4069
gen.NM_020418,1180
gen.NM_020548,871
gen.NM_020675,896
gen.NM_020677,4340
gen.NM_020701,1248
gen.NM_020990,4172
gen.NM_020992,3017
gen.NM_021019,3646
gen.NM_021029,6244
gen.NM_021079,4883
gen.NM_021095,698
gen.NM_021103,803
gen.NM_021104,3654
gen.NM_021107,5415
gen.NM_021121,948
gen.NM_021126,6029
gen.NM_021129,2964
gen.NM_021130,2238
gen.NM_021141,958
gen.NM_021154,2701
gen.NM_021158,5638
gen.NM_021177,1965
gen.NM_021178,4006
gen.NM_021195,4400
gen.NM_021213,4919
gen.NM_021219,5879
gen.NM_021226,2945
gen.NM_021626,4917
gen.NM_021709,4108
gen.NM_021728,4020
gen.NM_021826,5665
gen.NM_021830,3033
gen.NM_021831,707
gen.NM_021870,1517
gen.NM_021871,1513
gen.NM_021932,3109
gen.NM_021934,3588
gen.NM_021948,394
gen.NM_021953,3444
gen.NM_021966,4079
gen.NM_021999,3908
gen.NM_022003,3369
gen.NM_022039,3039
gen.NM_022044,5973
gen.NM_022048,4216
gen.NM_022105,5857
gen.NM_022137,4042
gen.NM_022141,6101
gen.NM_022158,5016
gen.NM_022170,2288
gen.NM_022171,1145
gen.NM_022362,3029
gen.NM_022369,4246
gen.NM_022371,527
gen.NM_022442,5806
gen.NM_022453,988
gen.NM_022458,2464
gen.NM_022461,1086
gen.NM_022485,1045
gen.NM_022550,1638
gen.NM_022551,1946
gen.NM_022552,717
gen.NM_022566,4296
gen.NM_022727,5961
gen.NM_022744,4468
gen.NM_022747,4084
gen.NM_022748,2226
gen.NM_022752,5474
gen.NM_022758,1926
gen.NM_022770,4539
gen.NM_022778,107
gen.NM_022839,4290
gen.NM_022963,1838
gen.NM_023009,152
gen.NM_023011,3940
gen.NM_023032,3691
gen.NM_023033,3693
gen.NM_023078,2620
gen.NM_023936,4378
gen.NM_023942,2449
gen.NM_024003,6336
gen.NM_024026,3872
gen.NM_024027,645
gen.NM_024029,5250
gen.NM_024031,4458
gen.NM_024033,2427
gen.NM_024040,3047
gen.NM_024045,2957
gen.NM_024048,4470
gen.NM_024067,2186
gen.NM_024068,3643
gen.NM_024070,2335
gen.NM_024089,3935
gen.NM_024098,3218
gen.NM_024099,3236
gen.NM_024104,5323
gen.NM_024111,4148
gen.NM_024294,1924
gen.NM_024297,4672
gen.NM_024299,5865
gen.NM_024319,614
gen.NM_024321,5389
gen.NM_024329,62
gen.NM_024330,379
gen.NM_024333,5186
gen.NM_024339,4396
gen.NM_024407,5120
gen.NM_024507,4406
gen.NM_024516,4502
gen.NM_024537,3938
gen.NM_024567,2508
gen.NM_024571,4350
gen.NM_024572,719
gen.NM_024586,247
gen.NM_024589,4346
gen.NM_024602,206
gen.NM_024603,241
gen.NM_024613,2584
gen.NM_024627,5951
gen.NM_024640,137
gen.NM_024653,2373
gen.NM_024658,3960
gen.NM_024664,183
gen.NM_024668,1724
gen.NM_024671,4454
gen.NM_024691,5636
gen.NM_024709,603
gen.NM_024748,1526
gen.NM_024824,4057
gen.NM_024844,4955
gen.NM_024854,3529
gen.NM_024855,5769
gen.NM_024863,6248
gen.NM_024881,5321
gen.NM_024900,1491
gen.NM_024918,5757
gen.NM_024942,3095
gen.NM_025070,2541
gen.NM_025072,2772
gen.NM_025108,4411
gen.NM_025129,5534
gen.NM_025150,358
gen.NM_025164,3374
gen.NM_025168,1863
gen.NM_025197,4830
gen.NM_025202,1000
gen.NM_025203,678
gen.NM_025204,6109
gen.NM_025205,1414
gen.NM_025207,455
gen.NM_025226,499
gen.NM_025232,2503
gen.NM_025233,4859
gen.NM_025234,4270
gen.NM_025241,5190
gen.NM_025263,2007
gen.NM_030567,1826
gen.NM_030573,5965
gen.NM_030579,4553
gen.NM_030587,196
gen.NM_030593,5411
gen.NM_030775,3432
gen.NM_030782,1545
gen.NM_030815,5719
gen.NM_030819,4573
gen.NM_030877,5763
gen.NM_030900,2232
gen.NM_030920,332
gen.NM_030921,1272
gen.NM_030925,3910
gen.NM_030926,1009
gen.NM_030935,2331
gen.NM_030973,5532
gen.NM_031157,3612
gen.NM_031206,6210
gen.NM_031213,5138
gen.NM_031228,5642
gen.NM_031229,5640
gen.NM_031243,2212
gen.NM_031263,2708
gen.NM_031289,3496
gen.NM_031300,1832
gen.NM_031417,5506
gen.NM_031434,2456
gen.NM_031443,2234
gen.NM_031453,2902
gen.NM_031459,131
gen.NM_031465,3446
gen.NM_031472,3261
gen.NM_031478,4522
gen.NM_031479,3665
gen.NM_031482,1629
gen.NM_031484,3070
gen.NM_031485,5574
gen.NM_031901,336
gen.NM_031925,2304
gen.NM_031942,905
gen.NM_031966,1598
gen.NM_031968,5014
gen.NM_031989,3622
gen.NM_031990,5100
gen.NM_031992,2290
gen.NM_032023,2923
gen.NM_032038,4495
gen.NM_032088,1770
gen.NM_032092,1772
gen.NM_032112,3031
gen.NM_032140,4571
gen.NM_032162,4310
gen.NM_032164,2340
gen.NM_032196,4150
gen.NM_032204,5996
gen.NM_032207,5317
gen.NM_032211,3068
gen.NM_032212,843
gen.NM_032219,1370
gen.NM_032227,6257
gen.NM_032271,4388
gen.NM_032280,1642
gen.NM_032288,1354
gen.NM_032292,412
gen.NM_032299,3395
gen.NM_032313,1437
gen.NM_032322,4771
gen.NM_032323,402
gen.NM_032324,630
gen.NM_032330,4485
gen.NM_032331,1318
gen.NM_032333,2996
gen.NM_032338,3712
gen.NM_032342,2746
gen.NM_032343,1235
gen.NM_032350,2163
gen.NM_032361,1814
gen.NM_032376,4854
gen.NM_032377,5262
gen.NM_032379,3346
gen.NM_032383,1280
gen.NM_032390,875
gen.NM_032402,1776
gen.NM_032403,1774
gen.NM_032486,4444
gen.NM_032527,5869
gen.NM_032565,3914
gen.NM_032626,4440
gen.NM_032627,5345
gen.NM_032635,5393
gen.NM_032636,296
gen.NM_032637,1577
gen.NM_032642,3434
gen.NM_032656,3851
gen.NM_032667,3240
gen.NM_032712,5588
gen.NM_032726,990
gen.NM_032737,5157
gen.NM_032738,503
gen.NM_032747,3061
gen.NM_032750,1174
gen.NM_032753,5173
gen.NM_032756,222
gen.NM_032792,5631
gen.NM_032799,2763
gen.NM_032814,3812
gen.NM_032822,785
gen.NM_032827,810
gen.NM_032864,245
gen.NM_032871,3326
gen.NM_032872,122
gen.NM_032873,3415
gen.NM_032890,606
gen.NM_032904,3794
gen.NM_032905,2893
gen.NM_032907,4248
gen.NM_032928,2860
gen.NM_032929,2081
gen.NM_032933,5037
gen.NM_032951,2284
gen.NM_032953,2286
gen.NM_032958,2376
gen.NM_032989,3258
gen.NM_032997,2949
gen.NM_032999,2295
gen.NM_033008,1176
gen.NM_033010,1178
gen.NM_033011,2538
gen.NM_033022,2978
gen.NM_033046,796
gen.NM_033070,5937
gen.NM_033161,2828
gen.NM_033197,5729
gen.NM_033219,2730
gen.NM_033251,4635
gen.NM_033296,1404
gen.NM_033301,2635
gen.NM_033316,1348
gen.NM_033363,5417
gen.NM_033410,4456
gen.NM_033415,5355
gen.NM_033416,878
gen.NM_033421,5787
gen.NM_033440,60
gen.NM_033534,15
gen.NM_033544,4315
gen.NM_033551,1785
gen.NM_052837,426
gen.NM_052848,5451
gen.NM_052859,1157
gen.NM_052862,488
gen.NM_052881,5656
gen.NM_052886,2602
gen.NM_052936,6251
gen.NM_052963,2616
gen.NM_052984,3685
gen.NM_053043,2462
gen.NM_053056,3311
gen.NM_053275,3829
gen.NM_054012,2822
gen.NM_054013,1848
gen.NM_054014,5650
gen.NM_054016,95
gen.NM_057089,2363
gen.NM_057161,1890
gen.NM_057169,3790
gen.NM_057174,3188
gen.NM_057182,5376
gen.NM_058164,5230
gen.NM_058179,2703
gen.NM_058192,4366
gen.NM_058193,3422
gen.NM_058195,2653
gen.NM_058196,2657
gen.NM_058199,2836
gen.NM_078467,1912
gen.NM_079423,3648
gen.NM_079425,3650
gen.NM_080424,1016
gen.NM_080425,5828
gen.NM_080426,5832
gen.NM_080491,3342
gen.NM_080592,696
gen.NM_080594,4394
gen.NM_080598,1984
gen.NM_080648,3999
gen.NM_080649,4001
gen.NM_080670,1726
gen.NM_080686,1981
gen.NM_080687,3942
gen.NM_080702,1977
gen.NM_080703,1975
gen.NM_080796,5855
gen.NM_080797,5859
gen.NM_080820,5693
gen.NM_080822,4654
gen.NM_106552,670
gen.NM_130398,639
gen.NM_130442,2260
gen.NM_130468,4143
gen.NM_130898,434
gen.NM_133330,1376
gen.NM_133332,1380
gen.NM_133373,4885
gen.NM_133375,4222
gen.NM_133436,2357
gen.NM_133480,1051
gen.NM_133481,1053
gen.NM_133483,3676
gen.NM_133503,3742
gen.NM_133504,3744
gen.NM_133505,3746
gen.NM_133506,3750
gen.NM_133507,3748
gen.NM_133627,4786
gen.NM_133629,4790
gen.NM_133630,4788
gen.NM_133637,798
gen.NM_133645,2066
gen.NM_134269,6009
gen.NM_134323,3616
gen.NM_134324,3618
gen.NM_134440,5358
gen.NM_138385,1372
gen.NM_138391,545
gen.NM_138427,4739
gen.NM_138434,2451
gen.NM_138443,5060
gen.NM_138483,1037
gen.NM_138578,5713
gen.NM_138614,1125
gen.NM_138699,1406
gen.NM_138801,727
gen.NM_138924,5124
gen.XM_001289,524
gen.XM_001299,33
gen.XM_001389,1453
gen.XM_001468,342
gen.XM_001472,250
gen.XM_001482,3658
gen.XM_001589,24
gen.XM_001616,101
gen.XM_001640,126
gen.XM_001807,135
gen.XM_001812,134
gen.XM_001826,78
gen.XM_001897,486
gen.XM_001914,567
gen.XM_001916,568
gen.XM_001958,599
gen.XM_002068,523
gen.XM_002105,141
gen.XM_002114,113
gen.XM_002217,845
gen.XM_002255,1361
gen.XM_002435,700
gen.XM_002447,877
gen.XM_002480,680
gen.XM_002540,1006
gen.XM_002611,823
gen.XM_002636,964
gen.XM_002647,770
gen.XM_002669,946
gen.XM_002674,776
gen.XM_002704,853
gen.XM_002727,788
gen.XM_002739,779
gen.XM_002742,1036
gen.XM_002828,1143
gen.XM_002854,1187
gen.XM_002855,1186
gen.XM_002859,1274
gen.XM_002899,1127
gen.XM_003213,1162
gen.XM_003222,1119
gen.XM_003245,1136
gen.XM_003305,1451
gen.XM_003435,1432
gen.XM_003477,1530
gen.XM_003511,1448
gen.XM_003555,1500
gen.XM_003611,2083
gen.XM_003716,1811
gen.XM_003771,1644
gen.XM_003789,1712
gen.XM_003825,1540
gen.XM_003830,1666
gen.XM_003841,1699
gen.XM_003869,1572
gen.XM_003896,1581
gen.XM_003937,1710
gen.XM_004009,1565
gen.XM_004098,3704
gen.XM_004151,2065
gen.XM_004256,2114
gen.XM_004297,2113
gen.XM_004330,3194
gen.XM_004379,2122
gen.XM_004383,2130
gen.XM_004526,2110
gen.XM_004627,2402
gen.XM_004901,2292
gen.XM_005060,2605
gen.XM_005086,1042
gen.XM_005100,2908
gen.XM_005180,1332
gen.XM_005305,2485
gen.XM_005348,2755
gen.XM_005365,2760
gen.XM_005490,2707
gen.XM_005525,2727
gen.XM_005543,2666
gen.XM_005675,3103
gen.XM_005698,3053
gen.XM_005724,2878
gen.XM_005938,3058
gen.XM_005969,3088
gen.XM_006139,3127
gen.XM_006170,3201
gen.XM_006212,3167
gen.XM_006290,98
gen.XM_006297,3196
gen.XM_006424,3151
gen.XM_006432,3371
gen.XM_006464,3355
gen.XM_006467,3399
gen.XM_006475,3135
gen.XM_006483,3136
gen.XM_006529,3281
gen.XM_006533,3270
gen.XM_006566,3849
gen.XM_006578,3736
gen.XM_006589,3766
gen.XM_006595,3835
gen.XM_006694,3535
gen.XM_006710,3626
gen.XM_006748,3536
gen.XM_006826,3559
gen.XM_006887,3765
gen.XM_006925,3485
gen.XM_006936,3483
gen.XM_006937,5074
gen.XM_006947,3482
gen.XM_006958,3475
gen.XM_007002,3797
gen.XM_007003,3796
gen.XM_007199,3923
gen.XM_007254,4097
gen.XM_007272,4081
gen.XM_007288,3968
gen.XM_007293,3967
gen.XM_007315,3958
gen.XM_007316,3957
gen.XM_007324,4027
gen.XM_007328,4024
gen.XM_007441,4045
gen.XM_007483,4072
gen.XM_007488,4005
gen.XM_007491,3996
gen.XM_007531,4167
gen.XM_007545,4156
gen.XM_007623,4221
gen.XM_007651,4189
gen.XM_007751,4129
gen.XM_007963,4474
gen.XM_007988,4430
gen.XM_008064,4509
gen.XM_008065,4497
gen.XM_008106,4463
gen.XM_008126,4353
gen.XM_008150,4800
gen.XM_008231,4694
gen.XM_008253,4926
gen.XM_008323,4750
gen.XM_008334,4671
gen.XM_008351,4856
gen.XM_008401,4867
gen.XM_008402,4869
gen.XM_008432,4902
gen.XM_008441,4686
gen.XM_008459,4915
gen.XM_008462,4777
gen.XM_008486,4760
gen.XM_008509,4658
gen.XM_008538,4684
gen.XM_008557,4650
gen.XM_008579,4809
gen.XM_008679,4693
gen.XM_008695,5089
gen.XM_008723,5054
gen.XM_008812,5083
gen.XM_008830,5597
gen.XM_008851,5522
gen.XM_008854,5325
gen.XM_008860,5485
gen.XM_008878,5472
gen.XM_008887,5243
gen.XM_008912,5453
gen.XM_008985,5531
gen.XM_009010,5205
gen.XM_009036,5486
gen.XM_009063,5274
gen.XM_009082,5256
gen.XM_009125,5484
gen.XM_009126,5496
gen.XM_009149,5406
gen.XM_009180,5378
gen.XM_009203,5443
gen.XM_009222,5165
gen.XM_009277,5113
gen.XM_009279,5110
gen.XM_009293,5338
gen.XM_009303,5310
gen.XM_009330,5357
gen.XM_009338,5384
gen.XM_009436,5705
gen.XM_009450,5728
gen.XM_009501,5754
gen.XM_009549,5816
gen.XM_009622,5647
gen.XM_009642,5759
gen.XM_009671,5823
gen.XM_009672,5821
gen.XM_009686,5762
gen.XM_009805,5919
gen.XM_009947,6022
gen.XM_009967,6031
gen.XM_009973,6042
gen.XM_010000,6063
gen.XM_010002,6064
gen.XM_010024,6087
gen.XM_010029,6094
gen.XM_010040,6103
gen.XM_010055,6108
gen.XM_010117,6269
gen.XM_010141,6216
gen.XM_010156,5266
gen.XM_010178,6310
gen.XM_010272,6132
gen.XM_010362,6274
gen.XM_010378,6169
gen.XM_010436,6280
gen.XM_010494,3429
gen.XM_010615,253
gen.XM_010636,451
gen.XM_010664,133
gen.XM_010682,581
gen.XM_010712,182
gen.XM_010732,593
gen.XM_010778,925
gen.XM_010852,938
gen.XM_010858,1004
gen.XM_010866,992
gen.XM_010881,771
gen.XM_010886,755
gen.XM_010938,4641
gen.XM_010941,1433
gen.XM_010953,1130
gen.XM_010978,1290
gen.XM_011074,1320
gen.XM_011089,5076
gen.XM_011117,2059
gen.XM_011118,4941
gen.XM_011129,1423
gen.XM_011160,1365
gen.XM_011548,2411
gen.XM_011618,2400
gen.XM_011629,2533
gen.XM_011642,2586
gen.XM_011650,66
gen.XM_011657,2592
gen.XM_011749,2798
gen.XM_011752,2786
gen.XM_011769,2562
gen.XM_011778,2832
gen.XM_011988,3260
gen.XM_012124,3836
gen.XM_012145,3761
gen.XM_012159,3494
gen.XM_012162,3598
gen.XM_012179,5337
gen.XM_012182,3638
gen.XM_012184,3861
gen.XM_012219,3759
gen.XM_012272,3543
gen.XM_012284,2395
gen.XM_012376,3990
gen.XM_012377,3983
gen.XM_012398,4133
gen.XM_012418,4199
gen.XM_012462,4322
gen.XM_012487,4555
gen.XM_012549,4734
gen.XM_012569,4461
gen.XM_012609,4945
gen.XM_012615,4744
gen.XM_012634,4950
gen.XM_012638,3874
gen.XM_012642,4849
gen.XM_012651,4916
gen.XM_012676,4675
gen.XM_012741,5031
gen.XM_012798,5212
gen.XM_012812,5370
gen.XM_012860,5439
gen.XM_012862,5195
gen.XM_012913,5114
gen.XM_012931,5768
gen.XM_012970,5700
gen.XM_013010,6066
gen.XM_013015,6089
gen.XM_013029,6118
gen.XM_013042,6207
gen.XM_013060,6196
gen.XM_013086,6145
gen.XM_013112,2530
gen.XM_013127,2577
gen.XM_015234,75
gen.XM_015241,5088
gen.XM_015243,3148
gen.XM_015258,2244
gen.XM_015366,4239
gen.XM_015434,547
gen.XM_015462,1208
gen.XM_015468,3596
gen.XM_015476,3585
gen.XM_015481,3580
gen.XM_015516,6206
gen.XM_015563,1525
gen.XM_015652,2937
gen.XM_015697,5264
gen.XM_015700,4478
gen.XM_015705,3214
gen.XM_015717,257
gen.XM_015755,5046
gen.XM_015769,5369
gen.XM_015835,4311
gen.XM_015840,3921
gen.XM_015842,3932
gen.XM_015920,909
gen.XM_015922,911
gen.XM_016047,2604
gen.XM_016076,4237
gen.XM_016093,2992
gen.XM_016113,2712
gen.XM_016125,6275
gen.XM_016139,3170
gen.XM_016164,276
gen.XM_016170,1554
gen.XM_016199,600
gen.XM_016288,880
gen.XM_016308,2726
gen.XM_016334,1294
gen.XM_016345,1799
gen.XM_016351,3924
gen.XM_016378,5364
gen.XM_016382,5036
gen.XM_016410,5438
gen.XM_016480,326
gen.XM_016486,4071
gen.XM_016487,4068
gen.XM_016605,3708
gen.XM_016625,773
gen.XM_016640,3538
gen.XM_016674,1652
gen.XM_016700,2433
gen.XM_016713,4165
gen.XM_016733,2256
gen.XM_016843,766
gen.XM_016857,1941
gen.XM_016871,5180
gen.XM_016985,4213
gen.XM_017080,3436
gen.XM_017096,4644
gen.XM_017204,5240
gen.XM_017234,4712
gen.XM_017240,4135
gen.XM_017315,67
gen.XM_017356,1291
gen.XM_017364,1105
gen.XM_017369,3394
gen.XM_017432,3895
gen.XM_017442,2313
gen.XM_017474,1679
gen.XM_017483,2280
gen.XM_017508,3710
gen.XM_017517,2080
gen.XM_017578,4980
gen.XM_017591,1701
gen.XM_017641,1544
gen.XM_017698,861
gen.XM_017816,2581
gen.XM_017831,2119
gen.XM_017846,109
gen.XM_017857,1640
gen.XM_017914,3953
gen.XM_017925,1476
gen.XM_017930,6284
gen.XM_017931,2659
gen.XM_017971,4319
gen.XM_017984,4338
gen.XM_017996,2711
gen.XM_018006,2710
gen.XM_018019,6157
gen.XM_018039,784
gen.XM_018041,642
gen.XM_018054,4123
gen.XM_018088,4472
gen.XM_018108,6313
gen.XM_018109,6315
gen.XM_018136,161
gen.XM_018142,6232
gen.XM_018149,1264
gen.XM_018167,3015
gen.XM_018182,2098
gen.XM_018205,64
gen.XM_018241,6161
gen.XM_018279,3057
gen.XM_018287,2595
gen.XM_018301,763
gen.XM_018332,314
gen.XM_018359,2281
gen.XM_018399,3918
gen.XM_018432,4331
gen.XM_018473,1658
gen.XM_018515,5354
gen.XM_018523,1359
gen.XM_018534,4840
gen.XM_018539,6014
gen.XM_018540,841
gen.XM_026944,2787
gen.XM_026951,2771
gen.XM_026968,2769
gen.XM_026985,2766
gen.XM_026987,2765
gen.XM_027102,3802
gen.XM_027143,6106
gen.XM_027161,1220
gen.XM_027214,2385
gen.XM_027309,4329
gen.XM_027313,226
gen.XM_027365,4334
gen.XM_027412,4368
gen.XM_027440,2505
gen.XM_027558,4352
gen.XM_027651,2490
gen.XM_027679,2488
gen.XM_027825,4661
gen.XM_027904,5548
gen.XM_027916,76
gen.XM_027952,6353
gen.XM_027963,936
gen.XM_027964,1619
gen.XM_027983,213
gen.XM_028034,940
gen.XM_028064,5119
gen.XM_028067,5117
gen.XM_028151,4562
gen.XM_028192,3117
gen.XM_028263,5488
gen.XM_028267,5491
gen.XM_028322,4075
gen.XM_028347,4074
gen.XM_028358,4073
gen.XM_028398,4667
gen.XM_028417,4678
gen.XM_028643,3624
gen.XM_028662,3561
gen.XM_028666,5383
gen.XM_028672,5382
gen.XM_028744,5025
gen.XM_028760,3554
gen.XM_028783,5851
gen.XM_028806,5765
gen.XM_028810,5766
gen.XM_028834,5863
gen.XM_028848,4390
gen.XM_028918,5867
gen.XM_028966,5871
gen.XM_029031,169
gen.XM_029096,1539
gen.XM_029104,1314
gen.XM_029132,1313
gen.XM_029136,1310
gen.XM_029168,2841
gen.XM_029187,6194
gen.XM_029228,2069
gen.XM_029288,4067
gen.XM_029369,1198
gen.XM_029438,4656
gen.XM_029450,5404
gen.XM_029455,5403
gen.XM_029461,6282
gen.XM_029567,2609
gen.XM_029631,3602
gen.XM_029728,3595
gen.XM_029746,2128
gen.XM_029805,3507
gen.XM_029810,5776
gen.XM_029822,5778
gen.XM_029842,176
gen.XM_029844,145
gen.XM_030044,5796
gen.XM_030203,1028
gen.XM_030268,2543
gen.XM_030274,2544
gen.XM_030326,3187
gen.XM_030373,6233
gen.XM_030417,1112
gen.XM_030423,154
gen.XM_030447,3065
gen.XM_030470,68
gen.XM_030485,5159
gen.XM_030529,862
gen.XM_030582,883
gen.XM_030621,5818
gen.XM_030699,5834
gen.XM_030714,5145
gen.XM_030720,5137
gen.XM_030721,5135
gen.XM_030771,1821
gen.XM_030777,1823
gen.XM_030782,1824
gen.XM_030812,1256
gen.XM_030834,952
gen.XM_030895,5465
gen.XM_030901,5456
gen.XM_030914,5450
gen.XM_030920,40
gen.XM_031025,4032
gen.XM_031074,4039
gen.XM_031251,5307
gen.XM_031263,5305
gen.XM_031273,5303
gen.XM_031276,5302
gen.XM_031292,4295
gen.XM_031320,1445
gen.XM_031345,5292
gen.XM_031354,4292
gen.XM_031404,4285
gen.XM_031415,4767
gen.XM_031427,4769
gen.XM_031466,4765
gen.XM_031515,4147
gen.XM_031519,731
gen.XM_031527,733
gen.XM_031536,4758
gen.XM_031554,4145
gen.XM_031586,782
gen.XM_031586,783
gen.XM_031596,780
gen.XM_031617,4138
gen.XM_031626,738
gen.XM_031718,4159
gen.XM_031807,3491
gen.XM_031857,5184
gen.XM_031866,3041
gen.XM_031890,3044
gen.XM_031917,5176
gen.XM_031944,5066
gen.XM_031949,3049
gen.XM_031992,3059
gen.XM_032020,5281
gen.XM_032121,2455
gen.XM_032201,4836
gen.XM_032216,2454
gen.XM_032269,1221
gen.XM_032285,5399
gen.XM_032391,216
gen.XM_032403,4180
gen.XM_032443,3930
gen.XM_032476,2976
gen.XM_032520,2970
gen.XM_032553,1626
gen.XM_032588,3457
gen.XM_032614,3462
gen.XM_032710,5247
gen.XM_032719,5248
gen.XM_032724,5252
gen.XM_032759,1700
gen.XM_032766,4864
gen.XM_032774,5257
gen.XM_032782,5261
gen.XM_032813,4863
gen.XM_032817,4861
gen.XM_032852,4857
gen.XM_032895,1590
gen.XM_032902,1588
gen.XM_032930,6189
gen.XM_032944,2470
gen.XM_032996,5943
gen.XM_033015,5902
gen.XM_033016,5903
gen.XM_033090,5946
gen.XM_033147,6241
gen.XM_033227,3450
gen.XM_033232,6351
gen.XM_033251,3959
gen.XM_033263,3472
gen.XM_033294,1123
gen.XM_033337,3964
gen.XM_033355,2819
gen.XM_033359,2818
gen.XM_033360,2817
gen.XM_033361,2815
gen.XM_033362,2811
gen.XM_033380,2809
gen.XM_033385,2808
gen.XM_033391,3969
gen.XM_033424,2774
gen.XM_033435,3975
gen.XM_033445,3980
gen.XM_033457,2777
gen.XM_033460,2778
gen.XM_033553,3991
gen.XM_033595,3994
gen.XM_033654,79
gen.XM_033683,77
gen.XM_033689,4646
gen.XM_033714,4645
gen.XM_033813,5960
gen.XM_033862,6173
gen.XM_033876,2383
gen.XM_033878,6172
gen.XM_033884,6170
gen.XM_033910,2134
gen.XM_033912,2132
gen.XM_033922,4606
gen.XM_034000,501
gen.XM_034082,454
gen.XM_034321,1502
gen.XM_034375,4460
gen.XM_034377,5623
gen.XM_034431,3185
gen.XM_034586,4376
gen.XM_034590,4380
gen.XM_034640,2638
gen.XM_034662,319
gen.XM_034671,318
gen.XM_034710,1466
gen.XM_034713,1468
gen.XM_034744,1655
gen.XM_034862,1675
gen.XM_034890,4184
gen.XM_034897,4256
gen.XM_034935,6201
gen.XM_034952,857
gen.XM_034953,4116
gen.XM_035014,4119
gen.XM_035103,2824
gen.XM_035107,2439
gen.XM_035109,2825
gen.XM_035220,800
gen.XM_035368,2626
gen.XM_035370,2631
gen.XM_035373,2629
gen.XM_035465,6123
gen.XM_035485,3571
gen.XM_035490,3564
gen.XM_035497,3562
gen.XM_035572,1392
gen.XM_035625,5197
gen.XM_035627,5196
gen.XM_035636,5194
gen.XM_035638,5192
gen.XM_035640,5034
gen.XM_035662,2483
gen.XM_035680,2482
gen.XM_035824,1402
gen.XM_035919,5612
gen.XM_035986,1456
gen.XM_035999,5907
gen.XM_036002,1440
gen.XM_036011,5910
gen.XM_036042,5913
gen.XM_036087,5917
gen.XM_036104,4965
gen.XM_036107,5923
gen.XM_036115,4971
gen.XM_036118,1262
gen.XM_036175,5924
gen.XM_036299,155
gen.XM_036339,3178
gen.XM_036413,2469
gen.XM_036450,664
gen.XM_036462,4827
gen.XM_036465,4825
gen.XM_036500,573
gen.XM_036507,575
gen.XM_036528,4410
gen.XM_036556,566
gen.XM_036593,2939
gen.XM_036659,4707
gen.XM_036680,4342
gen.XM_036727,4134
gen.XM_036744,433
gen.XM_036755,5927
gen.XM_036785,4982
gen.XM_036829,442
gen.XM_036845,450
gen.XM_036934,448
gen.XM_036937,5969
gen.XM_036938,1197
gen.XM_037002,1668
gen.XM_037056,2107
gen.XM_037101,873
gen.XM_037108,831
gen.XM_037147,3212
gen.XM_037173,3202
gen.XM_037195,4988
gen.XM_037196,4987
gen.XM_037202,5840
gen.XM_037206,5842
gen.XM_037217,5846
gen.XM_037260,1608
gen.XM_037329,591
gen.XM_037377,1300
gen.XM_037381,1299
gen.XM_037423,1163
gen.XM_037468,6114
gen.XM_037474,6116
gen.XM_037565,5106
gen.XM_037572,5109
gen.XM_037600,1304
gen.XM_037657,2608
gen.XM_037662,5372
gen.XM_037682,5977
gen.XM_037741,2276
gen.XM_037778,4244
gen.XM_037797,5981
gen.XM_037808,3263
gen.XM_037875,2045
gen.XM_037945,5993
gen.XM_037971,4897
gen.XM_038030,2855
gen.XM_038049,2864
gen.XM_038063,2866
gen.XM_038098,5343
gen.XM_038146,5339
gen.XM_038221,1695
gen.XM_038243,1341
gen.XM_038308,3737
gen.XM_038371,3902
gen.XM_038391,2757
gen.XM_038424,5018
gen.XM_038536,2909
gen.XM_038576,734
gen.XM_038584,6019
gen.XM_038659,3533
gen.XM_038791,3841
gen.XM_038852,244
gen.XM_038872,5062
gen.XM_038911,237
gen.XM_038946,1840
gen.XM_039165,1413
gen.XM_039173,1416
gen.XM_039176,1417
gen.XM_039225,4125
gen.XM_039236,6047
gen.XM_039248,6051
gen.XM_039306,4551
gen.XM_039339,6060
gen.XM_039372,6065
gen.XM_039395,3732
gen.XM_039474,4794
gen.XM_039654,2646
gen.XM_039702,4200
gen.XM_039712,716
gen.XM_039721,321
gen.XM_039723,5140
gen.XM_039796,1292
gen.XM_039805,1258
gen.XM_039908,5598
gen.XM_039910,4721
gen.XM_039921,4732
gen.XM_039952,1213
gen.XM_039975,1783
gen.XM_040009,377
gen.XM_040066,6088
gen.XM_040095,6091
gen.XM_040221,3707
gen.XM_040267,2879
gen.XM_040272,2876
gen.XM_040321,1524
gen.XM_040498,2417
gen.XM_040623,2074
gen.XM_040644,3734
gen.XM_040709,315
gen.XM_040752,1493
gen.XM_040853,2218
gen.XM_040898,4100
gen.XM_040942,4094
gen.XM_040952,4090
gen.XM_041014,4086
gen.XM_041020,2697
gen.XM_041059,1670
gen.XM_041100,3503
gen.XM_041209,3925
gen.XM_041211,1161
gen.XM_041221,1410
gen.XM_041235,4008
gen.XM_041248,6111
gen.XM_041473,3928
gen.XM_041484,3944
gen.XM_041507,1147
gen.XM_041583,4957
gen.XM_041678,5027
gen.XM_041694,1614
gen.XM_041712,1592
gen.XM_041872,5090
gen.XM_041879,353
gen.XM_041884,354
gen.XM_041921,6304
gen.XM_041964,4680
gen.XM_042018,5095
gen.XM_042025,1600
gen.XM_042153,6348
gen.XM_042155,6346
gen.XM_042168,1286
gen.XM_042301,1474
gen.XM_042326,1032
gen.XM_042422,2145
gen.XM_042473,2148
gen.XM_042618,1229
gen.XM_042621,4596
gen.XM_042658,2561
gen.XM_042695,1364
gen.XM_042698,4710
gen.XM_042765,5701
gen.XM_042781,2434
gen.XM_042788,2744
gen.XM_042841,1072
gen.XM_042852,3339
gen.XM_042860,1070
gen.XM_042963,6295
gen.XM_042967,537
gen.XM_042968,6297
gen.XM_043047,4577
gen.XM_043173,866
gen.XM_043220,3111
gen.XM_043340,1805
gen.XM_043388,1808
gen.XM_043589,2998
gen.XM_043605,2999
gen.XM_043614,6099
gen.XM_043643,6250
gen.XM_043771,1568
gen.XM_044075,416
gen.XM_044077,391
gen.XM_044127,398
gen.XM_044128,408
gen.XM_044166,406
gen.XM_044172,411
gen.XM_044334,3859
gen.XM_044354,2968
gen.XM_044367,4938
gen.XM_044372,4943
gen.XM_044376,4935
gen.XM_044394,4927
gen.XM_044426,4924
gen.XM_044523,4304
gen.XM_044533,4307
gen.XM_044565,4269
gen.XM_044569,4272
gen.XM_044593,4278
gen.XM_044608,5213
gen.XM_044619,5210
gen.XM_044627,2563
gen.XM_044866,2139
gen.XM_044914,5658
gen.XM_044915,5660
gen.XM_044932,3129
gen.XM_044957,3131
gen.XM_045010,3821
gen.XM_045044,4749
gen.XM_045104,4989
gen.XM_045140,2973
gen.XM_045151,5226
gen.XM_045170,928
gen.XM_045183,4651
gen.XM_045187,3833
gen.XM_045283,757
gen.XM_045290,1214
gen.XM_045296,2759
gen.XM_045401,2403
gen.XM_045418,5667
gen.XM_045451,5671
gen.XM_045460,5674
gen.XM_045499,3276
gen.XM_045525,3278
gen.XM_045535,4751
gen.XM_045551,4752
gen.XM_045581,4996
gen.XM_045602,3856
gen.XM_045612,3273
gen.XM_045613,3271
gen.XM_045642,3269
gen.XM_045667,3074
gen.XM_045681,4287
gen.XM_045750,3157
gen.XM_045802,3826
gen.XM_045856,2407
gen.XM_045901,4852
gen.XM_045952,2413
gen.XM_045963,3834
gen.XM_046001,2414
gen.XM_046035,4453
gen.XM_046041,3726
gen.XM_046057,1443
gen.XM_046090,5423
gen.XM_046160,5708
gen.XM_046179,5710
gen.XM_046313,5544
gen.XM_046349,187
gen.XM_046401,1085
gen.XM_046419,5578
gen.XM_046450,201
gen.XM_046464,522
gen.XM_046472,5004
gen.XM_046481,4999
gen.XM_046520,5689
gen.XM_046551,212
gen.XM_046557,208
gen.XM_046565,204
gen.XM_046642,3951
gen.XM_046648,3950
gen.XM_046651,3949
gen.XM_046743,3035
gen.XM_046765,5020
gen.XM_046767,5022
gen.XM_046769,5021
gen.XM_046822,5150
gen.XM_046836,2722
gen.XM_046863,2720
gen.XM_046918,112
gen.XM_046932,4958
gen.XM_046934,5160
gen.XM_047007,5723
gen.XM_047011,5725
gen.XM_047018,5727
gen.XM_047024,6177
gen.XM_047032,6176
gen.XM_047083,2521
gen.XM_047175,690
gen.XM_047374,5446
gen.XM_047376,5445
gen.XM_047409,5444
gen.XM_047436,4624
gen.XM_047477,1429
gen.XM_047479,495
gen.XM_047499,610
gen.XM_047525,4632
gen.XM_047545,616
gen.XM_047561,1137
gen.XM_047584,5131
gen.XM_047600,5132
gen.XM_047964,1798
gen.XM_048088,753
gen.XM_048119,4344
gen.XM_048258,5385
gen.XM_048286,3255
gen.XM_048351,5218
gen.XM_048364,5219
gen.XM_048404,6329
gen.XM_048410,6328
gen.XM_048420,6325
gen.XM_048471,5082
gen.XM_048479,2679
gen.XM_048518,2684
gen.XM_048539,2684
gen.XM_048603,3674
gen.XM_048654,4829
gen.XM_048690,1007
gen.XM_048780,57
gen.XM_048859,2881
gen.XM_048905,6306
gen.XM_048943,3640
gen.XM_048957,3931
gen.XM_048991,3642
gen.XM_049048,3652
gen.XM_049108,820
gen.XM_049113,822
gen.XM_049116,818
gen.XM_049141,3586
gen.XM_049148,3581
gen.XM_049150,3659
gen.XM_049197,3161
gen.XM_049201,3772
gen.XM_049211,3771
gen.XM_049226,2623
gen.XM_049237,5391
gen.XM_049247,2618
gen.XM_049282,5223
gen.XM_049310,139
gen.XM_049337,6320
gen.XM_049354,4275
gen.XM_049372,4317
gen.XM_049421,2637
gen.XM_049502,5236
gen.XM_049561,5239
gen.XM_049663,3493
gen.XM_049680,476
gen.XM_049690,483
gen.XM_049742,14
gen.XM_049795,3082
gen.XM_049899,2121
gen.XM_049904,3937
gen.XM_049920,5482
gen.XM_049931,4995
gen.XM_049934,4994
gen.XM_049937,4818
gen.XM_050074,3528
gen.XM_050101,4773
gen.XM_050159,4880
gen.XM_050194,4462
gen.XM_050200,1487
gen.XM_050215,2525
gen.XM_050236,5602
gen.XM_050265,2278
gen.XM_050278,4103
gen.XM_050293,2487
gen.XM_050403,6192
gen.XM_050430,2389
gen.XM_050435,5227
gen.XM_050506,2583
gen.XM_050534,4348
gen.XM_050552,1234
gen.XM_050589,5603
gen.XM_050638,979
gen.XM_050660,5330
gen.XM_050731,2571
gen.XM_050891,984
gen.XM_050962,975
gen.XM_050964,4220
gen.XM_051219,4479
gen.XM_051264,1237
gen.XM_051298,2612
gen.XM_051364,5290
gen.XM_051430,3398
gen.XM_051435,3358
gen.XM_051463,4230
gen.XM_051471,6238
gen.XM_051476,6237
gen.XM_051489,3367
gen.XM_051518,1131
gen.XM_051556,6
gen.XM_051586,5092
gen.XM_051712,4025
gen.XM_051716,3373
gen.XM_051763,4727
gen.XM_051778,4600
gen.XM_051860,4298
gen.XM_051877,515
gen.XM_052113,3378
gen.XM_052310,1060
gen.XM_052313,1535
gen.XM_052336,1477
gen.XM_052460,3714
gen.XM_052474,3719
gen.XM_052530,1424
gen.XM_052542,3755
gen.XM_052626,1398
gen.XM_052635,5166
gen.XM_052641,3769
gen.XM_052661,5168
gen.XM_052721,2056
gen.XM_052725,2784
gen.XM_052786,3153
gen.XM_052862,3404
gen.XM_052893,3825
gen.XM_052974,608
gen.XM_052989,817
gen.XM_053074,5430
gen.XM_053122,1363
gen.XM_053164,3641
gen.XM_053183,58
gen.XM_053206,2875
gen.XM_053245,400
gen.XM_053323,1078
gen.XM_053585,4252
gen.XM_053633,544
gen.XM_053712,1074
gen.XM_053717,4663
gen.XM_053787,3283
gen.XM_053796,3288
gen.XM_053952,3722
gen.XM_053955,1859
gen.XM_054038,4832
gen.XM_054098,6183
gen.XM_054221,6155
gen.XM_054344,4973
gen.XM_054474,2933
gen.XM_054475,2935
gen.XM_054520,1047
gen.XM_054566,5926
gen.XM_054706,2146
gen.XM_054752,2849
gen.XM_054763,2852
gen.XM_054856,3193
gen.XM_054868,228
gen.XM_054900,4309
gen.XM_054978,295
gen.XM_055013,3853
gen.XM_055061,4826
gen.XM_055132,4514
gen.XM_055195,4427
gen.XM_055199,4942
gen.XM_055230,5336
gen.XM_055254,954
gen.XM_055369,3397
gen.XM_055481,251
gen.XM_055551,1461
gen.XM_055573,3086
gen.XM_055641,2064
gen.XM_055658,5592
gen.XM_055686,5163
gen.XM_055771,4505
gen.XM_055859,5483
gen.XM_055880,583
gen.XM_055993,5646
gen.XM_056035,5678
gen.XM_056082,4648
gen.XM_056260,4438
gen.XM_056286,5582
gen.XM_056315,1723
gen.XM_056317,4077
gen.XM_056346,3645
gen.XM_056353,3662
gen.XM_056421,5175
gen.XM_056481,3545
gen.XM_056602,5408
gen.XM_056681,3700
gen.XM_056730,4775
gen.XM_056884,618
gen.XM_056923,521
gen.XM_056957,1471
gen.XM_056963,1793
gen.XM_056970,628
gen.XM_056996,3798
gen.XM_057020,4257
gen.XM_057074,5260
gen.XM_057150,4619
gen.XM_057236,5756
gen.XM_057374,5793
gen.XM_057492,1548
gen.XM_057664,740
gen.XM_057780,2557
gen.XM_057994,1541
gen.XM_058039,1934
gen.XM_058098,986
gen.XM_058116,4526
gen.XM_058125,5635
gen.XM_058210,4018
gen.XM_058232,5225
gen.XM_058240,102
gen.XM_058247,466
gen.XM_058266,2144
gen.XM_058267,1278
gen.XM_058343,3020
gen.XM_058361,3078
gen.XM_058405,552
gen.XM_058406,3084
gen.XM_058414,3159
gen.XM_058450,3352
gen.XM_058505,3125
gen.XM_058528,3671
gen.XM_058556,3773
gen.XM_058567,3504
gen.XM_058574,3454
gen.XM_058602,3022
gen.XM_058611,3926
gen.XM_058618,4091
gen.XM_058636,4118
gen.XM_058646,3986
gen.XM_058647,3978
gen.XM_058677,4061
gen.XM_058684,4186
gen.XM_058699,4250
gen.XM_058702,294
gen.XM_058739,4621
gen.XM_058745,4543
gen.XM_058784,4404
gen.XM_058796,4337
gen.XM_058830,4803
gen.XM_058867,4755
gen.XM_058900,4730
gen.XM_058918,5949
gen.XM_058927,1441
gen.XM_058949,5463
gen.XM_058967,5295
gen.XM_058968,2619
gen.XM_058977,3920
gen.XM_058987,5570
gen.XM_058990,5584
gen.XM_058991,5552
gen.XM_059045,5419
gen.XM_059052,5447
gen.XM_059066,114
gen.XM_059067,120
gen.XM_059088,130
gen.XM_059094,465
gen.XM_059117,103
gen.XM_059120,562
gen.XM_059133,224
gen.XM_059171,171
gen.XM_059180,256
gen.XM_059191,492
gen.XM_059201,1
gen.XM_059210,330
gen.XM_059214,185
gen.XM_059230,55
gen.XM_059268,5675
gen.XM_059321,5607
gen.XM_059335,6013
gen.XM_059351,920
gen.XM_059368,653
gen.XM_059372,1029
gen.XM_059422,968
gen.XM_059461,971
gen.XM_059465,907
gen.XM_059516,1266
gen.XM_059557,1068
gen.XM_059561,1059
gen.XM_059583,1252
gen.XM_059593,1434
gen.XM_059623,1519
gen.XM_059628,1442
gen.XM_059633,1469
gen.XM_059637,2804
gen.XM_059653,1596
gen.XM_059669,1617
gen.XM_059709,1604
gen.XM_059720,2914
gen.XM_059741,2118
gen.XM_059745,2131
gen.XM_059773,2141
gen.XM_059776,2062
gen.XM_059801,1939
gen.XM_059839,2430
gen.XM_059876,2282
gen.XM_059933,2531
gen.XM_059945,2838
gen.XM_059961,2859
gen.XM_059966,2871
gen.XM_059979,2644
gen.XM_059986,2813
gen.XM_059998,2673
gen.XM_060006,2647
gen.XM_060012,4115
gen.XM_060030,6146
gen.XM_060042,4281
gen.XM_060067,1499
gen.XM_060331,509
gen.XM_060517,531
gen.XM_060976,2885
gen.XM_061125,2931
gen.XM_061126,2930
gen.XM_062437,3775
gen.XM_063639,4234
gen.XM_064091,4597
gen.XM_065884,777
gen.XM_066291,5998
gen.XM_066900,6261
gen.XM_067264,1240
gen.XM_067325,5030
gen.XM_067715,1169
gen.XM_068164,1497
gen.XM_068395,1789
gen.XM_068853,1714
gen.XM_068919,2085
gen.XM_068963,2072
gen.XM_070188,2480
gen.XM_070203,2473
gen.XM_070873,2742
gen.XM_071178,2705
gen.XM_071580,1557
gen.XM_071605,2381
gen.XM_071623,1439
gen.XM_071801,4122
gen.XM_071873,4630
gen.XM_071937,2152
gen.XM_072173,5876
gen.XM_072430,2387
gen.XM_072526,2857
gen.XM_076414,1199
gen.XM_083842,3026
gen.XM_083852,3141
gen.XM_083864,3774
gen.XM_083866,3715
gen.XM_083868,3590
gen.XM_083892,3787
gen.XM_083939,4364
gen.XM_083966,4923
gen.XM_083983,4881
gen.XM_084007,5055
gen.XM_084014,5246
gen.XM_084023,5528
gen.XM_084026,5549
gen.XM_084055,580
gen.XM_084084,6090
gen.XM_084110,1340
gen.XM_084111,1243
gen.XM_084120,1315
gen.XM_084123,1263
gen.XM_084129,1231
gen.XM_084141,1041
gen.XM_084158,1465
gen.XM_084168,1547
gen.XM_084179,1591
gen.XM_084180,1781
gen.XM_084204,2079
gen.XM_084238,2453
gen.XM_084241,2337
gen.XM_084270,2851
gen.XM_084283,6229
gen.XM_084287,6203
gen.XM_084288,6153
gen.XM_084296,6227
gen.XM_084311,6350
gen.XM_084359,3073
gen.XM_084372,3016
gen.XM_084385,2944
gen.XM_084413,3028
gen.XM_084420,2910
gen.XM_084429,2911
gen.XM_084450,2942
gen.XM_084451,2953
gen.XM_084467,2994
gen.XM_084477,3010
gen.XM_084480,3012
gen.XM_084505,3080
gen.XM_084514,3180
gen.XM_084515,3183
gen.XM_084516,3182
gen.XM_084517,3184
gen.XM_084522,3424
gen.XM_084525,3428
gen.XM_084527,3169
gen.XM_084570,3357
gen.XM_084601,3353
gen.XM_084610,3350
gen.XM_084632,3072
gen.XM_084645,3731
gen.XM_084654,3388
gen.XM_084658,3382
gen.XM_084681,3195
gen.XM_084702,3287
gen.XM_084739,3124
gen.XM_084742,3122
gen.XM_084770,3515
gen.XM_084789,3599
gen.XM_084800,3783
gen.XM_084801,3672
gen.XM_084807,3531
gen.XM_084808,3818
gen.XM_084824,3630
gen.XM_084841,3540
gen.XM_084866,3557
gen.XM_084884,3583
gen.XM_084885,3582
gen.XM_084889,3814
gen.XM_084901,3488
gen.XM_084909,3702
gen.XM_084912,3705
gen.XM_084918,3500
gen.XM_084922,3495
gen.XM_084941,3788
gen.XM_084946,3800
gen.XM_084948,3804
gen.XM_084982,3870
gen.XM_084997,3933
gen.XM_084998,2142
gen.XM_085017,3893
gen.XM_085044,3916
gen.XM_085065,4044
gen.XM_085066,4033
gen.XM_085068,1480
gen.XM_085106,3987
gen.XM_085125,4031
gen.XM_085127,4014
gen.XM_085141,4019
gen.XM_085151,4050
gen.XM_085162,4054
gen.XM_085166,3955
gen.XM_085203,4130
gen.XM_085204,4132
gen.XM_085215,4282
gen.XM_085239,4254
gen.XM_085249,4236
gen.XM_085262,4314
gen.XM_085280,4289
gen.XM_085283,4211
gen.XM_085307,4160
gen.XM_085327,4622
gen.XM_085340,4448
gen.XM_085393,4480
gen.XM_085395,4482
gen.XM_085408,4637
gen.XM_085434,4524
gen.XM_085442,4513
gen.XM_085445,4425
gen.XM_085452,4435
gen.XM_085471,4558
gen.XM_085475,4561
gen.XM_085483,4616
gen.XM_085525,4323
gen.XM_085531,4977
gen.XM_085545,4741
gen.XM_085548,4735
gen.XM_085563,4991
gen.XM_085581,472
gen.XM_085589,4948
gen.XM_085613,4724
gen.XM_085627,4951
gen.XM_085636,4873
gen.XM_085672,4757
gen.XM_085687,4659
gen.XM_085691,4677
gen.XM_085716,4992
gen.XM_085722,4745
gen.XM_085735,5019
gen.XM_085743,4718
gen.XM_085775,5058
gen.XM_085779,5075
gen.XM_085788,5049
gen.XM_085789,5043
gen.XM_085790,5045
gen.XM_085791,5042
gen.XM_085856,5501
gen.XM_085862,5244
gen.XM_085874,5460
gen.XM_085875,5461
gen.XM_085876,5462
gen.XM_085909,5297
gen.XM_085916,5285
gen.XM_085917,5276
gen.XM_085927,5527
gen.XM_085928,5489
gen.XM_085934,5537
gen.XM_085935,5573
gen.XM_085950,5487
gen.XM_085971,5371
gen.XM_085972,5629
gen.XM_085981,4599
gen.XM_085986,5398
gen.XM_086004,5425
gen.XM_086074,5311
gen.XM_086101,5128
gen.XM_086102,5130
gen.XM_086116,5331
gen.XM_086132,304
gen.XM_086138,282
gen.XM_086142,557
gen.XM_086151,46
gen.XM_086164,277
gen.XM_086165,279
gen.XM_086166,281
gen.XM_086167,280
gen.XM_086178,4
gen.XM_086180,19
gen.XM_086204,38
gen.XM_086228,1356
gen.XM_086244,601
gen.XM_086245,602
gen.XM_086257,632
gen.XM_086271,383
gen.XM_086278,4434
gen.XM_086282,543
gen.XM_086296,331
gen.XM_086324,214
gen.XM_086328,542
gen.XM_086343,265
gen.XM_086357,85
gen.XM_086360,29
gen.XM_086375,97
gen.XM_086378,485
gen.XM_086381,479
gen.XM_086384,178
gen.XM_086389,243
gen.XM_086391,231
gen.XM_086397,323
gen.XM_086400,366
gen.XM_086428,2161
gen.XM_086431,589
gen.XM_086432,592
gen.XM_086444,136
gen.XM_086481,490
gen.XM_086484,494
gen.XM_086485,493
gen.XM_086494,538
gen.XM_086515,324
gen.XM_086518,317
gen.XM_086543,190
gen.XM_086552,432
gen.XM_086564,388
gen.XM_086567,430
gen.XM_086586,52
gen.XM_086587,54
gen.XM_086648,5819
gen.XM_086701,5687
gen.XM_086710,5670
gen.XM_086715,5695
gen.XM_086736,5717
gen.XM_086745,5712
gen.XM_086759,5877
gen.XM_086760,5878
gen.XM_086770,5914
gen.XM_086773,5928
gen.XM_086777,5930
gen.XM_086779,5064
gen.XM_086805,5963
gen.XM_086809,5953
gen.XM_086821,5985
gen.XM_086830,6043
gen.XM_086844,6074
gen.XM_086873,5964
gen.XM_086875,6093
gen.XM_086920,805
gen.XM_086923,849
gen.XM_086925,850
gen.XM_086944,933
gen.XM_086950,858
gen.XM_086961,926
gen.XM_086980,791
gen.XM_087028,942
gen.XM_087038,2803
gen.XM_087040,842
gen.XM_087041,2800
gen.XM_087045,932
gen.XM_087051,748
gen.XM_087061,912
gen.XM_087062,914
gen.XM_087068,775
gen.XM_087069,772
gen.XM_087118,891
gen.XM_087122,839
gen.XM_087151,683
gen.XM_087162,985
gen.XM_087166,993
gen.XM_087181,965
gen.XM_087193,726
gen.XM_087195,725
gen.XM_087206,669
gen.XM_087211,743
gen.XM_087218,1011
gen.XM_087240,901
gen.XM_087254,1302
gen.XM_087268,1203
gen.XM_087278,1358
gen.XM_087284,1075
gen.XM_087289,1323
gen.XM_087295,1322
gen.XM_087297,1360
gen.XM_087322,1312
gen.XM_087331,1211
gen.XM_087341,1267
gen.XM_087342,1265
gen.XM_087346,1115
gen.XM_087349,1106
gen.XM_087359,1343
gen.XM_087370,1101
gen.XM_087392,1333
gen.XM_087410,1347
gen.XM_087448,1184
gen.XM_087480,3000
gen.XM_087498,1463
gen.XM_087514,1483
gen.XM_087527,1455
gen.XM_087583,1418
gen.XM_087588,1120
gen.XM_087597,1549
gen.XM_087599,1551
gen.XM_087600,1553
gen.XM_087601,1550
gen.XM_087610,1597
gen.XM_087611,1595
gen.XM_087614,1564
gen.XM_087621,1711
gen.XM_087635,1660
gen.XM_087637,1662
gen.XM_087652,1713
gen.XM_087659,1537
gen.XM_087686,1543
gen.XM_087710,3247
gen.XM_087713,1559
gen.XM_087745,1656
gen.XM_087773,1816
gen.XM_087790,1631
gen.XM_087823,1858
gen.XM_087834,2123
gen.XM_087836,2124
gen.XM_087853,2090
gen.XM_087855,2089
gen.XM_087939,2000
gen.XM_087945,1990
gen.XM_087955,3857
gen.XM_087960,1883
gen.XM_087990,1936
gen.XM_087991,2154
gen.XM_088009,3106
gen.XM_088020,1621
gen.XM_088073,2386
gen.XM_088099,2416
gen.XM_088103,2418
gen.XM_088105,2409
gen.XM_088107,605
gen.XM_088119,2422
gen.XM_088122,2420
gen.XM_088135,2446
gen.XM_088180,2352
gen.XM_088239,2297
gen.XM_088264,2195
gen.XM_088294,2529
gen.XM_088316,2611
gen.XM_088321,2628
gen.XM_088323,2574
gen.XM_088325,2572
gen.XM_088336,2519
gen.XM_088338,2515
gen.XM_088370,2613
gen.XM_088399,2559
gen.XM_088401,2560
gen.XM_088422,2839
gen.XM_088426,2833
gen.XM_088459,2847
gen.XM_088461,2870
gen.XM_088472,1472
gen.XM_088550,2640
gen.XM_088552,2641
gen.XM_088553,2642
gen.XM_088563,2672
gen.XM_088569,2748
gen.XM_088571,2750
gen.XM_088587,4120
gen.XM_088588,4114
gen.XM_088589,4121
gen.XM_088592,6311
gen.XM_088619,6151
gen.XM_088622,6152
gen.XM_088630,6209
gen.XM_088637,2700
gen.XM_088638,768
gen.XM_088665,6158
gen.XM_088688,6220
gen.XM_088689,6218
gen.XM_088710,6253
gen.XM_088736,6265
gen.XM_088738,6267
gen.XM_088739,6268
gen.XM_088745,6289
gen.XM_088747,6128
gen.XM_088788,338
gen.XM_088863,286
gen.XM_088945,507
gen.XM_089030,622
gen.XM_089138,254
gen.XM_089514,3019
gen.XM_089551,3006
gen.XM_090218,3542
gen.XM_090413,3779
gen.XM_090458,3767
gen.XM_090833,638
gen.XM_090914,4082
gen.XM_090991,4191
gen.XM_091076,1091
gen.XM_091100,4263
gen.XM_091108,4124
gen.XM_091159,4157
gen.XM_091270,4483
gen.XM_091399,4590
gen.XM_091420,4544
gen.XM_091786,3426
gen.XM_091886,5595
gen.XM_091938,5221
gen.XM_091981,5586
gen.XM_091984,5396
gen.XM_092042,5108
gen.XM_092046,5341
gen.XM_092049,5380
gen.XM_092135,672
gen.XM_092158,918
gen.XM_092346,944
gen.XM_092489,867
gen.XM_092517,676
gen.XM_092545,970
gen.XM_092760,5696
gen.XM_092888,5986
gen.XM_092966,6113
gen.XM_093050,6212
gen.XM_093130,6226
gen.XM_093219,6299
gen.XM_093241,6228
gen.XM_093423,1308
gen.XM_093487,1255
gen.XM_093546,1201
gen.XM_093624,1083
gen.XM_094243,1797
gen.XM_094440,1561
gen.XM_094741,1862
gen.XM_094855,2060
gen.XM_095146,2432
gen.XM_095371,2475
gen.XM_095545,2514
gen.XM_095667,2554
gen.XM_096038,3699
gen.XM_096060,4241
gen.XM_096146,3539
gen.XM_096149,661
gen.XM_096155,5967
gen.XM_096156,5968
gen.XM_096169,1022
gen.XM_096172,787
gen.XM_096195,1190
gen.XM_096198,1117
gen.XM_096203,1464
gen.XM_096303,6256
gen.XM_096486,3315
gen.XM_096520,3165
gen.XM_096544,3119
gen.XM_096566,3680
gen.XM_096572,3819
gen.XM_096597,3739
gen.XM_096606,3608
gen.XM_096620,3578
gen.XM_096630,3486
gen.XM_096661,3441
gen.XM_096744,4034
gen.XM_096772,3966
gen.XM_096842,4245
gen.XM_096844,4286
gen.XM_097043,4984
gen.XM_097193,5001
gen.XM_097195,5000
gen.XM_097204,4754
gen.XM_097232,5048
gen.XM_097274,5510
gen.XM_097275,5521
gen.XM_097300,5222
gen.XM_097365,5440
gen.XM_097420,5134
gen.XM_097453,2068
gen.XM_097519,561
gen.XM_097565,249
gen.XM_097639,352
gen.XM_097649,198
gen.XM_097713,5800
gen.XM_097727,5773
gen.XM_097731,5795
gen.XM_097749,5644
gen.XM_097772,5731
gen.XM_097807,5929
gen.XM_097817,5925
gen.XM_097833,5950
gen.XM_097886,5971
gen.XM_097976,715
gen.XM_098004,729
gen.XM_098047,962
gen.XM_098048,960
gen.XM_098109,1345
gen.XM_098111,1245
gen.XM_098154,1232
gen.XM_098158,1103
gen.XM_098173,1227
gen.XM_098248,1384
gen.XM_098351,1609
gen.XM_098352,1611
gen.XM_098354,1610
gen.XM_098362,1634
gen.XM_098387,1778
gen.XM_098405,1534
gen.XM_098468,2108
gen.XM_098599,619
gen.XM_098654,2447
gen.XM_098669,2466
gen.XM_098747,2582
gen.XM_098761,2564
gen.XM_098913,2843
gen.XM_098943,2725
gen.XM_098995,6302
gen.XM_099467,363
gen.XM_102377,4432
gen.XM_103946,665
gen.XM_104983,6263
gen.XM_105236,1289
gen.XM_105658,1325
gen.XM_106246,1520
gen.XM_106739,1562
gen.XM_107825,2225
gen.XM_109162,3075
gen.XM_113223,3268
gen.XM_113224,3275
gen.XM_113226,3400
gen.XM_113229,3366
gen.XM_113230,3363
gen.XM_113238,3152
gen.XM_113266,4202
gen.XM_113268,4207
gen.XM_113291,4429
gen.XM_113293,4467
gen.XM_113299,4504
gen.XM_113303,5013
gen.XM_113310,4723
gen.XM_113315,4944
gen.XM_113324,4674
gen.XM_113325,4703
gen.XM_113328,4695
gen.XM_113330,5011
gen.XM_113334,4819
gen.XM_113343,5028
gen.XM_113348,5316
gen.XM_113352,5294
gen.XM_113360,386
gen.XM_113361,598
gen.XM_113369,361
gen.XM_113374,140
gen.XM_113379,473
gen.XM_113380,5749
gen.XM_113390,929
gen.XM_113395,1193
gen.XM_113397,1244
gen.XM_113405,1140
gen.XM_113408,1296
gen.XM_113409,1202
gen.XM_113410,1088
gen.XM_113417,1254
gen.XM_113422,1329
gen.XM_113425,1452
gen.XM_113452,1556
gen.XM_113454,1841
gen.XM_113463,1654
gen.XM_113467,1720
gen.XM_113468,1845
gen.XM_113476,1860
gen.XM_113531,2526
gen.XM_113532,2627
gen.XM_113540,2548
gen.XM_113557,2493
gen.XM_113564,2846
gen.XM_113585,6122
gen.XM_113615,2927
gen.XM_113702,3862
gen.XM_113712,3635
gen.XM_113719,3560
gen.XM_113726,3584
gen.XM_113730,3519
gen.XM_113737,3855
gen.XM_113739,3437
gen.XM_113752,3946
gen.XM_113759,4105
gen.XM_113823,4163
gen.XM_113836,4326
gen.XM_113840,4608
gen.XM_113843,4420
gen.XM_113845,4418
gen.XM_113853,4570
gen.XM_113855,4560
gen.XM_113874,4431
gen.XM_113876,4426
gen.XM_113882,4640
gen.XM_113892,4978
gen.XM_113901,4653
gen.XM_113919,4905
gen.XM_113929,4696
gen.XM_113931,4706
gen.XM_113938,4824
gen.XM_113943,5010
gen.XM_113945,4998
gen.XM_113951,4962
gen.XM_113988,5229
gen.XM_114004,5349
gen.XM_114018,5097
gen.XM_114024,5560
gen.XM_114025,5530
gen.XM_114027,5366
gen.XM_114030,560
gen.XM_114044,129
gen.XM_114055,384
gen.XM_114062,3
gen.XM_114097,376
gen.XM_114098,360
gen.XM_114109,525
gen.XM_114125,259
gen.XM_114137,634
gen.XM_114153,484
gen.XM_114154,5875
gen.XM_114163,5794
gen.XM_114165,5813
gen.XM_114174,5673
gen.XM_114178,5706
gen.XM_114185,5889
gen.XM_114209,6024
gen.XM_114215,816
gen.XM_114229,838
gen.XM_114247,824
gen.XM_114266,851
gen.XM_114267,856
gen.XM_114298,957
gen.XM_114301,1225
gen.XM_114309,1242
gen.XM_114323,1141
gen.XM_114328,1344
gen.XM_114356,1288
gen.XM_114364,1122
gen.XM_114368,1510
gen.XM_114401,1496
gen.XM_114424,1473
gen.XM_114426,1470
gen.XM_114434,1555
gen.XM_114435,1552
gen.XM_114437,1567
gen.XM_114439,1586
gen.XM_114440,1587
gen.XM_114442,1584
gen.XM_114453,1819
gen.XM_114457,1817
gen.XM_114469,1623
gen.XM_114482,1683
gen.XM_114492,2106
gen.XM_114497,2058
gen.XM_114555,2429
gen.XM_114578,2444
gen.XM_114602,2404
gen.XM_114613,2625
gen.XM_114617,2517
gen.XM_114618,2523
gen.XM_114640,2556
gen.XM_114646,2756
gen.XM_114649,2873
gen.XM_114655,2854
gen.XM_114661,2677
gen.XM_114662,2688
gen.XM_114669,2845
gen.XM_114677,2802
gen.XM_114678,2801
gen.XM_114679,2799
gen.XM_114686,2699
gen.XM_114692,6354
gen.XM_114708,6291
gen.XM_114720,6130
gen.XM_114724,6119
gen.XM_114798,233
gen.XM_114862,3104
gen.XM_114894,2977
gen.XM_114981,3139
gen.XM_115031,3286
gen.XM_115062,3364
gen.XM_115063,3365
gen.XM_115081,3177
gen.XM_115117,3570
gen.XM_115140,3634
gen.XM_115197,3809
gen.XM_115215,3948
gen.XM_115352,4333
gen.XM_115480,4910
gen.XM_115603,5466
gen.XM_115615,5395
gen.XM_115672,869
gen.XM_115706,1039
gen.XM_115722,1040
gen.XM_115825,1002
gen.XM_115846,5691
gen.XM_115874,6281
gen.XM_115886,6131
gen.XM_115890,6136
gen.XM_115923,6259
gen.XM_115924,6121
gen.XM_116034,1338
gen.XM_116058,1295
gen.XM_116071,1204
gen.XM_116072,1205
gen.XM_116204,1532
gen.XM_116205,1533
gen.XM_116247,1484
gen.XM_116285,1408
gen.XM_116307,1691
gen.XM_116340,1807
gen.XM_116365,1856
gen.XM_116427,1648
gen.XM_116439,1593
gen.XM_116447,1606
gen.XM_116465,1716
gen.XM_116511,1857
gen.XM_116514,1861
gen.XM_116524,2140
gen.XM_116806,2789
gen.XM_116818,2738
gen.XM_116853,1139
gen.XM_116856,1810
gen.XM_116863,2975
gen.XM_116913,3845
gen.XM_116926,3451
gen.XM_117061,4913
gen.XM_117066,4768
gen.XM_117096,5084
gen.XM_117118,5379
gen.XM_117122,5183
gen.XM_117128,5605
gen.XM_117159,2
gen.XM_117181,534
gen.XM_117184,163
gen.XM_117185,582
gen.XM_117196,641
gen.XM_117209,5688
gen.XM_117264,736
gen.XM_117311,1337
gen.XM_117351,1412
gen.XM_117387,1622
gen.XM_117398,1641
gen.XM_117444,2471
gen.XM_117449,2160
gen.XM_117452,2472
gen.XM_117481,2406
gen.XM_117487,2622
gen.XM_117519,2874
gen.XM_117539,6352
gen.XM_117555,6349
gen.XM_117692,28
gen.XM_118637,4251
gen.XM_165390,3427
gen.XM_165410,4583
gen.XM_165411,4413
gen.XM_165418,4713
gen.XM_165421,4701
gen.XM_165422,4704
gen.XM_165432,5541
gen.XM_165438,144
gen.XM_165439,620
gen.XM_165442,59
gen.XM_165443,477
gen.XM_165448,723
gen.XM_165451,1268
gen.XM_165465,1531
gen.XM_165470,1528
gen.XM_165473,1482
gen.XM_165483,1818
gen.XM_165484,1820
gen.XM_165488,1615
gen.XM_165499,2057
gen.XM_165514,2579
gen.XM_165530,6355
gen.XM_165533,6235
gen.XM_165551,2913
gen.XM_165555,2889
gen.XM_165557,2897
gen.XM_165560,2925
gen.XM_165563,2926
gen.XM_165567,2921
gen.XM_165571,3407
gen.XM_165584,3414
gen.XM_165586,3413
gen.XM_165592,3401
gen.XM_165598,3303
gen.XM_165600,3310
gen.XM_165610,3222
gen.XM_165611,3217
gen.XM_165612,3223
gen.XM_165616,3325
gen.XM_165627,3335
gen.XM_165628,3341
gen.XM_165631,3328
gen.XM_165636,3903
gen.XM_165639,3917
gen.XM_165645,4534
gen.XM_165647,4528
gen.XM_165648,4537
gen.XM_165649,4527
gen.XM_165656,4484
gen.XM_165657,4493
gen.XM_165658,4489
gen.XM_165669,2091
gen.XM_165692,2159
gen.XM_165698,1949
gen.XM_165717,1954
gen.XM_165728,2036
gen.XM_165738,1999
gen.XM_165740,1865
gen.XM_165743,1937
gen.XM_165747,1948
gen.XM_165749,2037
gen.XM_165758,2013
gen.XM_165764,2011
gen.XM_165765,1988
gen.XM_165770,1951
gen.XM_165771,1983
gen.XM_165772,1876
gen.XM_165777,2044
gen.XM_165794,1921
gen.XM_165799,2006
gen.XM_165801,1956
gen.XM_165809,2016
gen.XM_165836,2350
gen.XM_165839,2346
gen.XM_165841,2197
gen.XM_165860,2167
gen.XM_165867,2249
gen.XM_165870,2245
gen.XM_165872,2253
gen.XM_165876,2258
gen.XM_165877,2240
gen.XM_165882,2248
gen.XM_165888,2934
gen.XM_165890,2929
gen.XM_165891,2941
gen.XM_165903,3633
gen.XM_165905,3579
gen.XM_165906,3532
gen.XM_165910,3465
gen.XM_165921,4127
gen.XM_165923,4325
gen.XM_165954,5026
gen.XM_165960,5347
gen.XM_165963,5367
gen.XM_165975,327
gen.XM_165976,373
gen.XM_165977,264
gen.XM_165978,532
gen.XM_165981,290
gen.XM_165983,275
gen.XM_165984,175
gen.XM_165994,927
gen.XM_165998,893
gen.XM_166007,910
gen.XM_166008,900
gen.XM_166011,1121
gen.XM_166014,1275
gen.XM_166015,1192
gen.XM_166017,1350
gen.XM_166026,1669
gen.XM_166027,1663
gen.XM_166028,1842
gen.XM_166029,1802
gen.XM_166037,1612
gen.XM_166042,2054
gen.XM_166049,2147
gen.XM_166063,2540
gen.XM_166064,2558
gen.XM_166078,6142
gen.XM_166081,6255
gen.XM_166093,2984
gen.XM_166125,2966
gen.XM_166157,2922
gen.XM_166174,3409
gen.XM_166177,3406
gen.XM_166181,3403
gen.XM_166196,3308
gen.XM_166232,3227
gen.XM_166234,3224
gen.XM_166235,3293
gen.XM_166236,3294
gen.XM_166239,3349
gen.XM_166253,3336
gen.XM_166266,3904
gen.XM_166273,3886
gen.XM_166277,4532
gen.XM_166282,4491
gen.XM_166285,4490
gen.XM_166288,5071
gen.XM_166303,2092
gen.XM_166310,2101
gen.XM_166327,2157
gen.XM_166333,1932
gen.XM_166336,2021
gen.XM_166340,1882
gen.XM_166349,1872
gen.XM_166353,2002
gen.XM_166357,2049
gen.XM_166360,1938
gen.XM_166361,2009
gen.XM_166362,1884
gen.XM_166363,1940
gen.XM_166376,2004
gen.XM_166381,1992
gen.XM_166392,2019
gen.XM_166401,1995
gen.XM_166402,1896
gen.XM_166406,2015
gen.XM_166412,1910
gen.XM_166417,1914
gen.XM_166419,1920
gen.XM_166425,1888
gen.XM_166446,2042
gen.XM_166457,1878
gen.XM_166459,1931
gen.XM_166469,1879
gen.XM_166480,1955
gen.XM_166482,2351
gen.XM_166485,2353
gen.XM_166494,2224
gen.XM_166504,2222
gen.XM_166505,2202
gen.XM_166506,2200
gen.XM_166509,2219
gen.XM_166512,2205
gen.XM_166513,2220
gen.XM_166514,2203
gen.XM_166515,2204
gen.XM_166521,2198
gen.XM_166523,2170
gen.XM_166531,2190
gen.XM_166540,2191
gen.XM_166541,2168
gen.XM_166594,2230
gen.XM_166599,20
gen.XM_166605,3506
gen.XM_166629,2988
gen.XM_166665,2918
gen.XM_166717,2906
gen.XM_166743,3418
gen.XM_167008,5080
gen.XM_167016,2087
gen.XM_167027,2094
gen.XM_167037,2096
gen.XM_167046,2150
gen.XM_167128,2023
gen.XM_167161,2025
gen.XM_167169,1868
gen.XM_167179,2031
gen.XM_167196,2041
gen.XM_167225,2047
gen.XM_167339,2264
gen.XM_167363,5065
gen.XM_167366,1209
gen.XM_167374,2898
gen.XM_167395,2963
gen.XM_167411,2901
gen.XM_167414,2904
gen.XM_167433,3324
gen.XM_167437,3192
gen.XM_167439,3876
gen.XM_167453,4538
gen.XM_167456,4541
gen.XM_167476,2321
gen.XM_167477,2325
gen.XM_167483,2328
gen.XM_167484,2329
gen.XM_167494,2273
gen.XM_167498,2301
gen.XM_167500,2299
gen.XM_167502,2312
gen.XM_167504,2300
gen.XM_167518,3754
gen.XM_167530,5529
gen.XM_167538,5945
gen.XM_167558,2645
gen.XM_167626,2887
gen.XM_167716,3244
gen.XM_167726,3248
gen.XM_167747,3234
gen.XM_167748,3228
gen.XM_167780,3417
gen.XM_167804,3291
gen.XM_167853,3318
gen.XM_167892,3883
gen.XM_167906,3877
gen.XM_167911,3868
gen.XM_167918,3869
gen.XM_168054,2103
gen.XM_168070,1928
gen.XM_168104,1994
gen.XM_168123,1877
gen.XM_168181,2322
gen.XM_168251,2323
gen.XM_168354,2271
gen.XM_168378,2269
gen.XM_168435,2316
gen.XM_168450,2315
gen.XM_168454,2302
gen.XM_168461,2311
gen.XM_168464,2317
gen.XM_168470,2310
gen.XM_168548,2375
gen.XM_168572,2380
gen.XM_168586,2360
gen.XM_169414,3880
gen.XM_169540,5078
gen.XM_170195,2267
gen.XM_170427,2318

### DETAILED DESCRIPTION OF THE PREFERRED EMBODIMENTS

I. Definitions

[6395] The terms “TAT polypeptide” and “TAT” as used herein and when immediately followed by a numerical designation,refer to various polypeptides, wherein the complete designation (i.e.,TAT/number) refers to specific polypeptide sequences as described herein. The terms “TAT/number polypeptide” and “TAT/number” wherein the term “number” is provided as an actual numerical designation as used herein encompass native sequence polypeptides, polypeptide variants and fragments of native sequence polypeptides and polypeptide variants (which are further defined herein). The TAT polypeptides described herein may be isolated from a variety of sources, such as from human tissue types or from another source, or prepared by recombinant or synthetic methods. The term “TAT polypeptide” refers to each individual TAT/number polypeptide disclosed herein. All disclosures in this specification which refer to the “TAT polypeptide” refer to each of the polypeptides individually as well as jointly. For example, descriptions of the preparation of, purification of, derivation of, formation of antibodies to or against, formation of TAT binding oligopeptides to or against, formation of TAT binding organic molecules to or against, administration of, compositions containing, treatment of a disease with, etc., pertain to each polypeptide of the invention individually. The term “TAT polypeptide” also includes variants of the TAT/number polypeptides disclosed herein.

[6396] A “native sequence TAT polypeptide” comprises a polypeptide having the same amino acid sequence as the corresponding TAT polypeptide derived from nature. Such native sequence TAT polypeptides can be isolated from nature or can be produced by recombinant or synthetic means. The term “native sequence TAT polypeptide” specifically encompasses naturally-occurring truncated or secreted forms of the specific TAT polypeptide (e.g., an extracellular domain sequence), naturally-occurring variant forms (e.g., alternatively spliced forms) and naturally-occurring allelic variants of the polypeptide. In certain embodiments of the invention, the native sequence TAT polypeptides disclosed herein are mature or full-length native sequence polypeptides comprising the full-length amino acids sequences shown in the accompanying figures. Start and stop codons (if indicated) are shown in bold font and underlined in the figures. Nucleic acid residues indicated as “N” in the accompanying figures are any nucleic acid residue. However, while the TAT polypeptides disclosed in the accompanying figures are shown to begin with methionine residues designated herein as amino acid position 1 in the figures, it is conceivable and possible that other methionine residues located either upstream or downstream from the amino acid position 1 in the figures may be employed as the starting amino acid residue for the TAT polypeptides.

[6397] The TAT polypeptide “extracellular domain” or “ECD” refers to a form of the TAT polypeptide which is essentially free of the transmembrane and cytoplasmic domains. Ordinarily, a TAT polypeptide ECD will have less than 1% of such transmembrane and/or cytoplasmic domains and preferably, will have less than 0.5% of such domains. It will be understood that any transmembrane domains identified for the TAT polypeptides of the present invention are identified pursuant to criteria routinely employed in the art for identifying that type of hydrophobic domain. The exact boundaries of a transmembrane domain may vary but most likely by no more than about 5 amino acids at either end of the domain as initially identified herein. Optionally, therefore, an extracellular domain of a TAT polypeptide may contain from about 5 or fewer amino acids on either side of the transmembrane domain/extracellular domain boundary as identified in the Examples or specification and such polypeptides, with or without the associated signal peptide, and nucleic acid encoding them, are contemplated by the present invention.

[6398] The approximate location of the “signal peptides” of the various TAT polypeptides disclosed herein may be shown in the present specification and/or the accompanying figures. It is noted, however, that the C-terminal boundary of a signal peptide may vary, but most likely by no more than about 5 amino acids on either side of the signal peptide C-terminal boundary as initially identified herein, wherein the C-terminal boundary of the signal peptide may be identified pursuant to criteria routinely employed in the art for identifying that type of amino acid sequence element (e.g., Nielsen et al., Prot. Eng. 10:1-6 (1997) and von Heinje et al., Nucl. Acids. Res. 14:4683-4690 (1986)). Moreover, it is also recognized that, in some cases, cleavage of a signal sequence from a secreted polypeptide is not entirely uniform, resulting in more than one secreted species. These mature polypeptides, where the signal peptide is cleaved within no more than about 5 amino acids on either side of the C-terminal boundary of the signal peptide as identified herein, and the polynucleotides encoding them, are contemplated by the present invention.

[6399] “TAT polypeptide variant” means a TAT polypeptide, preferably an active TAT polypeptide, as defined herein having at least about 80% amino acid sequence identity with a full-length native sequence TAT polypeptide sequence as disclosed herein, a TAT polypeptide sequence lacking the signal peptide as disclosed herein, an extracellular domain of a TAT polypeptide, with or without the signal peptide, as disclosed herein or any other fragment of a full-length TAT polypeptide sequence as disclosed herein (such as those encoded by a nucleic acid that represents only a portion of the complete coding sequence for a full-length TAT polypeptide). Such TAT polypeptide variants include, for instance, TAT polypeptides wherein one or more amino acid residues are added, or deleted, at the N- or C-terminus of the full-length native amino acid sequence. Ordinarily, a TAT polypeptide variant will have at least about 80% amino acid sequence identity, alternatively at least about 81%, 82%, 83%, 84%, 85%, 86%, 87%, 88%, 89%, 90%, 91%, 92%, 93%, 94%, 95%, 96%, 97%, 98%, or 99% amino acid sequence identity, to a full-length native sequence TAT polypeptide sequence as disclosed herein, a TAT polypeptide sequence lacking the signal peptide as disclosed herein, an extracellular domain of a TAT polypeptide, with or without the signal peptide, as disclosed herein or any other specifically defined fragment of a full-length TAT polypeptide sequence as disclosed herein. Ordinarily, TAT variant polypeptides are at least about 10 amino acids in length, alternatively at least about 20, 30, 40, 50, 60, 70, 80, 90, 100, 110, 120, 130, 140, 150, 160, 170, 180, 190, 200, 210, 220, 230, 240, 250, 260, 270, 280, 290, 300, 310, 320, 330, 340, 350, 360, 370, 380, 390, 400, 410, 420, 430, 440, 450, 460, 470, 480, 490, 500, 510, 520, 530, 540, 550, 560, 570, 580, 590, 600 amino acids in length, or more. Optionally, TAT variant polypeptides will have no more than one conservative amino acid substitution as compared to the native TAT polypeptide sequence, alternatively no more than 2, 3, 4, 5, 6, 7, 8, 9, or 10 conservative amino acid substitution as compared to the native TAT polypeptide sequence.

[6400] “Percent (%) amino acid sequence identity” with respect to the TAT polypeptide sequences identified herein is defined as the percentage of amino acid residues in a candidate sequence that are identical with the amino acid residues in the specific TAT polypeptide sequence, after aligning the sequences and introducing gaps, if necessary, to achieve the maximum percent sequence identity, and not considering any conservative substitutions as part of the sequence identity. Alignment for purposes of determining percent amino acid sequence identity can be achieved in various ways that are within the skill in the art, for instance, using publicly available computer software such as BLAST, BLAST-2, ALIGN or Megalign (DNASTAR) software. Those skilled in the art can determine appropriate parameters for measuring alignment, including any algorithms needed to achieve maximal alignment over the full length of the sequences being compared. For purposes herein, however, % amino acid sequence identity values are generated using the sequence comparison computer program ALIGN-2, wherein the complete source code for the ALIGN-2 program is provided in Table 1 below. The ALIGN-2 sequence comparison computer program was authored by Genentech, Inc. and the source code shown in Table 1 below has been filed with user documentation in the U.S. Copyright Office, Washington D.C., 20559, where it is registered under U.S. Copyright Registration No. TXU510087. The ALIGN-2 program is publicly available through Genentech, Inc., South San Francisco, Calif. or may be compiled from the source code provided in Table 1 below. The ALIGN-2 program should be compiled for use on a UNIX operating system, preferably digital UNIX V4.0D. All sequence comparison parameters are set by the ALIGN-2 program and do not vary.

[6401] In situations where ALIGN-2 is employed for amino acid sequence comparisons, the % amino acid sequence identity of a given amino acid sequence A to, with, or against a given amino acid sequence B (which can alternatively be phrased as a given amino acid sequence A that has or comprises a certain % amino acid sequence identity to, with, or against a given amino acid sequence B) is calculated as follows:
100 times the fraction X/Y
where X is the number of amino acid residues scored as identical matches by the sequence alignment program ALIGN-2 in that program's alignment of A and B, and where Y is the total number of amino acid residues in B. It will be appreciated that where the length of amino acid sequence A is not equal to the length of amino acid sequence B, the % amino acid sequence identity of A to B will not equal the % amino acid sequence identity of B to A. As examples of % amino acid sequence identity calculations using this method, Tables 2 and 3 demonstrate how to calculate the % amino acid sequence identity of the amino acid sequence designated “Comparison Protein” to the amino acid sequence designated “TAT”, wherein “TAT” represents the amino acid sequence of a hypothetical TAT polypeptide of interest, “Comparison Protein” represents the amino acid sequence of a polypeptide against which the “TAT” polypeptide of interest is being compared, and “X, “Y” and “Z” each represent different hypothetical amino acid residues. Unless specifically stated otherwise, all % amino acid sequence identity values used herein are obtained as described in the immediately preceding paragraph using the ALIGN-2 computer program.

[6402] “TAT variant polynucleotide” or “TAT variant nucleic acid sequence” means a nucleic acid molecule which encodes a TAT polypeptide, preferably an active TAT polypeptide, as defined herein and which has at least about 80% nucleic acid sequence identity with a nucleotide acid sequence encoding a full-length native sequence TAT polypeptide sequence as disclosed herein, a full-length native sequence TAT polypeptide sequence lacking the signal peptide as disclosed herein, an extracellular domain of a TAT polypeptide, with or without the signal peptide, as disclosed herein or any other fragment, of a full-length TAT polypeptide sequence as disclosed herein (such as those encoded by a nucleic acid that represents only a portion of the complete coding sequence for a full-length TAT polypeptide). Ordinarily, a TAT variant polynucleotide will have at least about 80% nucleic acid sequence identity, alternatively at least about 81%, 82%, 83%, 84%, 85%, 86%, 87%, 88%, 89%, 90%, 91%, 92%, 93%, 94%, 95%, 96%, 97%, 98%, or 99% nucleic acid sequence identity with a nucleic acid sequence encoding a full-length native sequence TAT polypeptide sequence as disclosed herein, a full-length native sequence TAT polypeptide sequence lacking the signal peptide as disclosed herein, an extracellular domain of a TAT polypeptide, with or without the signal sequence, as disclosed herein or any other fragment of a full-length TAT polypeptide sequence as disclosed herein. Variants do not encompass the native nucleotide sequence.

[6403] Ordinarily, TAT variant polynucleotides are at least about 5 nucleotides in length, alternatively at least about 6, 7, 8, 9, 10, 11, 12, 13, 14, 15, 16, 17, 18, 19, 20, 21, 22, 23, 24, 25, 26, 27, 28, 29, 30, 35, 40, 45, 50, 55, 60, 65, 70, 75, 80, 85, 90, 95, 100, 105, 110, 115, 120, 125, 130, 135, 140, 145, 150, 155, 160, 165, 170, 175, 180, 185, 190, 195, 200, 210, 220, 230, 240, 250, 260, 270, 280, 290, 300, 310, 320, 330, 340, 350, 360, 370, 380, 390, 400, 410, 420, 430, 440, 450, 460, 470, 480, 490, 500, 510, 520, 530, 540, 550, 560, 570, 580, 590, 600, 610, 620, 630, 640, 650, 660, 670, 680, 690, 700, 710, 720, 730, 740, 750, 760, 770, 780, 790, 800, 810, 820, 830, 840, 850, 860, 870, 880, 890, 900, 910, 920, 930, 940, 950, 960, 970, 980, 990, or 1000 nucleotides in length, wherein in this context the term “about” means the referenced nucleotide sequence length plus or minus 10% of that referenced length.

[6404] “Percent (%) nucleic acid sequence identity” with respect to TAT-encoding nucleic acid sequences identified herein is defined as the percentage of nucleotides in a candidate sequence that are identical with the nucleotides in the TAT nucleic acid sequence of interest, after aligning the sequences and introducing gaps, if necessary, to achieve the maximum percent sequence identity. Alignment for purposes of determining percent nucleic acid sequence identity can be achieved in various ways that are within the skill in the art, for instance, using publicly available computer software such as BLAST, BLAST-2, ALIGN or Megalign (DNASTAR) software. For purposes herein, however, % nucleic acid sequence identity values are generated using the sequence comparison computer program ALIGN-2, wherein the complete source code for the ALIGN-2 program is provided in Table 1 below. The ALIGN-2 sequence comparison computer program was authored by Genentech, Inc. and the source code shown in Table 1 below has been filed with user documentation in the U.S. Copyright Office, Washington D.C., 20559, where it is registered under U.S. Copyright Registration No. TXU510087. The ALIGN-2 program is publicly available through Genentech, Inc., South San Francisco, Calif. or may be compiled from the source code provided in Table 1 below. The ALIGN-2 program should be compiled for use on a UNIX operating system, preferably digital UNIX V4.0D. All sequence comparison parameters are set by the ALIGN-2 program and do not vary.

[6405] In situations where ALIGN-2 is employed for nucleic acid sequence comparisons, the % nucleic acid sequence identity of a given nucleic acid sequence C to, with, or against a given nucleic acid sequence D (which can alternatively be phrased as a given nucleic acid sequence C that has or comprises a certain % nucleic acid sequence identity to, with, or against a given nucleic acid sequence D) is calculated as follows:
100 times the fraction W/Z
where W is the number of nucleotides scored as identical matches by the sequence alignment program ALIGN-2 in that program's alignment of C and D, and where Z is the total number of nucleotides in D. It will be appreciated that where the length of nucleic acid sequence C is not equal to the length of nucleic acid sequence D, the % nucleic acid sequence identity of C to D will not equal the % nucleic acid sequence identity of D to C. As examples of % nucleic acid sequence identity calculations, Tables 4 and 5, demonstrate how to calculate the % nucleic acid sequence identity of the nucleic acid sequence designated “Comparison DNA” to the nucleic acid sequence designated “TAT-DNA”, wherein “TAT-DNA” represents a hypothetical TAT-encoding nucleic acid sequence of interest, “Comparison DNA” represents the nucleotide sequence of a nucleic acid molecule against which the “TAT-DNA” nucleic acid molecule of interest is being compared, and “N”, “L” and “V” each represent different hypothetical nucleotides. Unless specifically stated otherwise, all % nucleic acid sequence identity values used herein are obtained as described in the immediately preceding paragraph using the ALIGN-2 computer program.

[6406] In other embodiments, TAT variant polynucleotides are nucleic acid molecules that encode a TAT polypeptide and which are capable of hybridizing, preferably under stringent hybridization and wash conditions, to nucleotide sequences encoding a full-length TAT polypeptide as disclosed herein. TAT variant polypeptides may be those that are encoded by a TAT variant polynucleotide.

[6407] The term “full-length coding region” when used in reference to a nucleic acid encoding a TAT polypeptide refers to the sequence of nucleotides which encode the full-length TAT polypeptide of the invention (which is often shown between start and stop codons, inclusive thereof, in the accompanying figures). The term “full-length coding region” when used in reference to an ATCC deposited nucleic acid refers to the TAT polypeptide-encoding portion of the cDNA that is inserted into the vector deposited with the ATCC (which is often shown between start and stop codons, inclusive thereof, in the accompanying figures).

[6408] “Isolated,” when used to describe the various TAT polypeptides disclosed herein, means polypeptide that has been identified and separated and/or recovered from a component of its natural environment. Contaminant components of its natural environment are materials that would typically interfere with diagnostic or therapeutic uses for the polypeptide, and may include enzymes, hormones, and other proteinaceous or non-proteinaceous solutes. In preferred embodiments, the polypeptide will be purified (1) to a degree sufficient to obtain at least 15 residues of N-terminal or internal amino acid sequence by use of a spinning cup sequenator, or (2) to homogeneity by SDS-PAGE under non-reducing or reducing conditions using Coomassie blue or, preferably, silver stain. Isolated polypeptide includes polypeptide in situ within recombinant cells, since at least one component of the TAT polypeptide natural environment will not be present. Ordinarily, however, isolated polypeptide will be prepared by at least one purification step.

[6409] An “isolated” TAT polypeptide-encoding nucleic acid or other polypeptide-encoding nucleic acid is a nucleic acid molecule that is identified and separated from at least one contaminant nucleic acid molecule with which it is ordinarily associated in the natural source of the polypeptide-encoding nucleic acid. An isolated polypeptide-encoding nucleic acid molecule is other than in the form or setting in which it is found in nature. Isolated polypeptide-encoding nucleic acid molecules therefore are distinguished from the specific polypeptide-encoding nucleic acid molecule as it exists in natural cells. However, an isolated polypeptide-encoding nucleic acid molecule includes polypeptide-encoding nucleic acid molecules contained in cells that ordinarily express the polypeptide where, for example, the nucleic acid molecule is in a chromosomal location different from that of natural cells.

[6410] The term “control sequences” refers to DNA sequences necessary for the expression of an operably linked coding sequence in a particular host organism. The control sequences that are suitable for prokaryotes, for example, include a promoter, optionally an operator sequence, and a ribosome binding site. Eukaryotic cells are known to utilize promoters, polyadenylation signals, and enhancers.

[6411] Nucleic acid is “operably linked” when it is placed into a functional relationship with another nucleic acid sequence. For example, DNA for a presequence or secretory leader is operably linked to DNA for a polypeptide if it is expressed as a preprotein that participates in the secretion of the polypeptide; a promoter or enhancer is operably linked to a coding sequence if it affects the transcription of the sequence; or a ribosome binding site is operably linked to a coding sequence if it is positioned so as to facilitate translation. Generally, “operably linked” means that the DNA sequences being linked are contiguous, and, in the case of a secretory leader, contiguous and in reading phase. However, enhancers do not have to be contiguous. Linking is accomplished by ligation at convenient restriction sites. If such sites do not exist, the synthetic oligonucleotide adaptors or linkers are used in accordance with conventional practice.

[6412] “Stringency” of hybridization reactions is readily determinable by one of ordinary skill in the art, and generally is an empirical calculation dependent upon probe length, washing temperature, and salt concentration. In general, longer probes require higher temperatures for proper annealing, while shorter probes need lower temperatures. Hybridization generally depends on the ability of denatured DNA to reanneal when complementary strands are present in an environment below their melting temperature. The higher the degree of desired homology between the probe and hybridizable sequence, the higher the relative temperature which can be used. As a result, it follows that higher relative temperatures would tend to make the reaction conditions more stringent, while lower temperatures less so. For additional details and explanation of stringency of hybridization reactions, see Ausubel et al., Current Protocols in Molecular Biology, Wiley Interscience Publishers, (1995).

[6413] “Stringent conditions” or “high stringency conditions”, as defined herein, may be identified by those that: (1) employ low ionic strength and high temperature for washing, for example 0.015 M sodium chloride/0.0015 M sodium citrate/0.1% sodium dodecyl sulfate at 50° C.; (2) employ during hybridization a denaturing agent, such as formamide, for example, 50% (v/v) formamide with 0.1% bovine serum albumin/0.1% Ficoll/0.1% polyvinylpyrrolidone/50 mM sodium phosphate buffer at pH 6.5 with 750 mM sodium chloride, 75 mM sodium citrate at 42° C.; or (3) overnight hybridization in a solution that employs 50% formamide, 5×SSC (0.75 M NaCl, 0.075 M sodium citrate), 50 mM sodium phosphate (pH 6.8), 0.1% sodium pyrophosphate, 5× Denhardt's solution, sonicated salmon sperm DNA (50 μg/ml), 0.1% SDS, and 10% dextran sulfate at 42° C., with a 10 minute wash at 42° C. in 0.2×SSC (sodium chloride/sodium citrate) followed by a 10 minute high-stringency wash consisting of 0.1×SSC containing EDTA at 55° C.

[6414] “Moderately stringent conditions” may be identified as described by Sambrook et al., Molecular Cloning: A Laboratory Manual, New York: Cold Spring Harbor Press, 1989, and include the use of washing solution and hybridization conditions (e.g., temperature, ionic strength and % SDS) less stringent that those described above. An example of moderately stringent conditions is overnight incubation at 37° C. in a solution comprising: 20% formamide, 5×SSC (150 mM NaCl, 15 mM trisodium citrate), 50 mM sodium phosphate (pH 7.6), 5× Denhardt's solution, 10% dextran sulfate, and 20 mg/ml denatured sheared salmon sperm DNA, followed by washing the filters in 1×SSC at about 37-50° C. The skilled artisan will recognize how to adjust the temperature, ionic strength, etc. as necessary to accommodate factors such as probe length and the like.

[6415] The term “epitope tagged” when used herein refers to a chimeric polypeptide comprising a TAT polypeptide or anti-TAT antibody fused to a “tag polypeptide”. The tag polypeptide has enough residues to provide an epitope against which an antibody can be made, yet is short enough such that it does not interfere with activity of the polypeptide to which it is fused. The tag polypeptide preferably also is fairly unique so that the antibody does not substantially cross-react with other epitopes. Suitable tag polypeptides generally have at least six amino acid residues and usually between about 8 and 50 amino acid residues (preferably, between about 10 and 20 amino acid residues).

[6416] “Active” or “activity” for the purposes herein refers to form(s) of a TAT polypeptide which retain a biological and/or an immunological activity of native or naturally-occurring TAT, wherein “biological” activity refers to a biological function (either inhibitory or stimulatory) caused by a native or naturally-occurring TAT other than the ability to induce the production of an antibody against an antigenic epitope possessed by a native or naturally-occurring TAT and an “immunological” activity refers to the ability to induce the production of an antibody against an antigenic epitope possessed by a native or naturally-occurring TAT.

[6417] The term “antagonist” is used in the broadest sense, and includes any molecule that partially or fully blocks, inhibits, or neutralizes a biological activity of a native TAT polypeptide disclosed herein. In a similar manner, the term “agonist” is used in the broadest sense and includes any molecule that mimics a biological activity of a native TAT polypeptide disclosed herein. Suitable agonist or antagonist molecules specifically include agonist or antagonist antibodies or antibody fragments, fragments or amino acid sequence variants of native TAT polypeptides, peptides, antisense oligonucleotides, small organic molecules, etc. Methods for identifying agonists or antagonists of a TAT polypeptide may comprise contacting a TAT polypeptide with a candidate agonist or antagonist molecule and measuring a detectable change in one or more biological activities normally associated with the TAT polypeptide.

[6418] “Treating” or “treatment” or “alleviation” refers to both therapeutic treatment and prophylactic or preventative measures, wherein the object is to prevent or slow down (lessen) the targeted pathologic condition or disorder. Those in need of treatment include those already with the disorder as well as those prone to have the disorder or those in whom the disorder is to be prevented. A subject or mammal is successfully “treated” for a TAT polypeptide-expressing cancer if, after receiving a therapeutic amount of an anti-TAT antibody, TAT binding oligopeptide or TAT binding organic molecule according to the methods of the present invention, the patient shows observable and/or measurable reduction in or absence of one or more of the following: reduction in the number of cancer cells or absence of the cancer cells; reduction in the tumor size; inhibition (i.e., slow to some extent and preferably stop) of cancer cell infiltration into peripheral organs including the spread of cancer into soft tissue and bone; inhibition (i.e., slow to some extent and preferably stop) of tumor metastasis; inhibition, to some extent, of tumor growth; and/or relief to some extent, one or more of the symptoms associated with the specific cancer; reduced morbidity and mortality, and improvement in quality of life issues. To the extent the anti-TAT antibody or TAT binding oligopeptide may prevent growth and/or kill existing cancer cells, it may be cytostatic and/or cytotoxic. Reduction of these signs or symptoms may also be felt by the patient.

[6419] The above parameters for assessing successful treatment and improvement in the disease are readily measurable by routine procedures familiar to a physician. For cancer therapy, efficacy can be measured, for example, by assessing the time to disease progression (TTP) and/or determining the response rate (RR). Metastasis can be determined by staging tests and by bone scan and tests for calcium level and other enzymes to determine spread to the bone. CT scans can also be done to look for spread to the pelvis and lymph nodes in the area. Chest X-rays and measurement of liver enzyme levels by known methods are used to look for metastasis to the lungs and liver, respectively. Other routine methods for monitoring the disease include transrectal ultrasonography (TRUS) and transrectal needle biopsy (TRNB).

[6420] For bladder cancer, which is a more localized cancer, methods to determine progress of disease include urinary cytologic evaluation by cystoscopy, monitoring for presence of blood in the urine, visualization of the urothelial tract by sonography or an intravenous pyelogram, computed tomography (CT) and magnetic resonance imaging (MRI). The presence of distant metastases can be assessed by CT of the abdomen, chest x-rays, or radionuclide imaging of the skeleton.

[6421] “Chronic” administration refers to administration of the agent(s) in a continuous mode as opposed to an acute mode, so as to maintain the initial therapeutic effect (activity) for an extended period of time. “Intermittent” administration is treatment that is not consecutively done without interruption, but rather is cyclic in nature.

[6422] “Mammal” for purposes of the treatment of, alleviating the symptoms of or diagnosis of a cancer refers to any animal classified as a mammal, including humans, domestic and farm animals, and zoo, sports, or pet animals, such as dogs, cats, cattle, horses, sheep, pigs, goats, rabbits, etc. Preferably, the mammal is human.

[6423] Administration “in combination with” one or more further therapeutic agents includes simultaneous (concurrent) and consecutive administration in any order.

[6424] “Carriers” as used herein include pharmaceutically acceptable carriers, excipients, or stabilizers which are nontoxic to the cell or mammal being exposed thereto at the dosages and concentrations employed. Often the physiologically acceptable carrier is an aqueous pH buffered solution. Examples of physiologically acceptable carriers include buffers such as phosphate, citrate, and other organic acids; antioxidants including ascorbic acid; low molecular weight (less than about 10 residues) polypeptide; proteins, such as serum albumin, gelatin, or immunoglobulins; hydrophilic polymers such as polyvinylpyrrolidone; amino acids such as glycine, glutamine, asparagine, arginine or lysine; monosaccharides, disaccharides, and other carbohydrates including glucose, mannose, or dextrins; chelating agents such as EDTA; sugar alcohols such as mannitol or sorbitol; salt-forming counterions such as sodium; and/or nonionic surfactants such as TWEEN®, polyethylene glycol (PEG), and PLURONICS®.

[6425] By “solid phase” or “solid support” is meant a non-aqueous matrix to which an antibody, TAT binding oligopeptide or TAT binding organic molecule of the present invention can adhere or attach. Examples of solid phases encompassed herein include those formed partially or entirely of glass (e.g., controlled pore glass), polysaccharides (e.g., agarose), polyacrylamides, polystyrene, polyvinyl alcohol and silicones. In certain embodiments, depending on the context, the solid phase can comprise the well of an assay plate; in others it is a purification column (e.g., an affinity chromatography column). This term also includes a discontinuous solid phase of discrete particles, such as those described in U.S. Pat. No. 4,275,149.

[6426] A “liposome” is a small vesicle composed of various types of lipids, phospholipids and/or surfactant which is useful for delivery of a drug (such as a TAT polypeptide, an antibody thereto or a TAT binding oligopeptide) to a mammal. The components of the liposome are commonly arranged in a bilayer formation, similar to the lipid arrangement of biological membranes.

[6427] A “small” molecule or “small” organic molecule is defined herein to have a molecular weight below about 500 Daltons.

[6428] An “effective amount” of a polypeptide, antibody, TAT binding oligopeptide, TAT binding organic molecule or an agonist or antagonist thereof as disclosed herein is an amount sufficient to carry out a specifically stated purpose. An “effective amount” may be determined empirically and in a routine manner, in relation to the stated purpose.

[6429] The term “therapeutically effective amount” refers to an amount of an antibody, polypeptide, TAT binding oligopeptide, TAT binding organic molecule or other drug effective to “treat” a disease or disorder in a subject or mammal. In the case of cancer, the therapeutically effective amount of the drug may reduce the number of cancer cells; reduce the tumor size; inhibit (i.e., slow to some extent and preferably stop) cancer cell infiltration into peripheral organs; inhibit (i.e., slow to some extent and preferably stop) tumor metastasis; inhibit, to some extent, tumor growth; and/or relieve to some extent one or more of the symptoms associated with the cancer. See the definition herein of “treating”. To the extent the drug may prevent growth and/or kill existing cancer cells, it may be cytostatic and/or cytotoxic.

[6430] A “growth inhibitory amount” of an anti-TAT antibody, TAT polypeptide, TAT binding oligopeptide or TAT binding organic molecule is an amount capable of inhibiting the growth of a cell, especially tumor, e.g., cancer cell, either in vitro or in vivo. A “growth inhibitory amount” of an anti-TAT antibody, TAT polypeptide, TAT binding oligopeptide or TAT binding organic molecule for purposes of inhibiting neoplastic cell growth may be determined empirically and in a routine manner.

[6431] A “cytotoxic amount” of an anti-TAT antibody, TAT polypeptide, TAT binding oligopeptide or TAT binding organic molecule is an amount capable of causing the destruction of a cell, especially tumor, e.g., cancer cell, either in vitro or in vivo. A “cytotoxic amount” of an anti-TAT antibody, TAT polypeptide, TAT binding oligopeptide or TAT binding organic molecule for purposes of inhibiting neoplastic cell growth may be determined empirically and in a routine manner.

[6432] The term “antibody” is used in the broadest sense and specifically covers, for example, single anti-TAT monoclonal antibodies (including agonist, antagonist, and neutralizing antibodies), anti-TAT antibody compositions with polyepitopic specificity, polyclonal antibodies, single chain anti-TAT antibodies, and fragments of anti-TAT antibodies (see below) as long as they exhibit the desired biological or immunological activity. The term “immunoglobulin” (Ig) is used interchangeable with antibody herein.

[6433] An “isolated antibody” is one which has been identified and separated and/or recovered from a component of its natural environment. Contaminant components of its natural environment are materials which would interfere with diagnostic or therapeutic uses for the antibody, and may include enzymes, hormones, and other proteinaceous or nonproteinaceous solutes. In preferred embodiments, the antibody will be purified (1) to greater than 95% by weight of antibody as determined by the Lowry method, and most preferably more than 99% by weight, (2) to a degree sufficient to obtain at least 15 residues of N-terminal or internal amino acid sequence by use of a spinning cup sequenator, or (3) to homogeneity by SDS-PAGE under reducing or nonreducing conditions using Coomassie blue or, preferably, silver stain. Isolated antibody includes the antibody in situ within recombinant cells since at least one component of the antibody's natural environment will not be present. Ordinarily, however, isolated antibody will be prepared by at least one purification step.

[6434] The basic 4-chain antibody unit is a heterotetrameric glycoprotein composed of two identical light (L) chains and two identical heavy (H) chains (an IgM antibody consists of 5 of the basic heterotetramer unit along with an additional polypeptide called J chain, and therefore contain 10 antigen binding sites, while secreted IgA antibodies can polymerize to form polyvalent assemblages comprising 2-5 of the basic 4-chain units along with J chain). In the case of IgGs, the 4-chain unit is generally about 150,000 daltons. Each L chain is linked to a H chain by one covalent disulfide bond, while the two H chains are linked to each other by one or more disulfide bonds depending on the H chain isotype. Each H and L chain also has regularly spaced intrachain disulfide bridges. Each H chain has at the N-terminus, a variable domain (V_{H}) followed by three constant domains (C_{H}) for each of the α and γ chains and four C_{H} domains for μ and ε isotypes. Each L chain has at the N-terminus, a variable domain (V_{L}) followed by a constant domain (C_{L}) at its other end. The V_{L} is aligned with the V_{H} and the C_{L} is aligned with the first constant domain of the heavy chain (C_{H}1). Particular amino acid residues are believed to form an interface between the light chain and heavy chain variable domains. The pairing of a V_{H} and V_{L} together forms a single antigen-binding site. For the structure and properties of the different classes of antibodies, see, e.g., Basic and Clinical Immunology, 8th edition, Daniel P. Stites, Abba I. Terr and Tristram G. Parslow (eds.), Appleton & Lange, Norwalk, Conn., 1994, page 71 and Chapter 6.

[6435] The L chain from any vertebrate species can be assigned to one of two clearly distinct types, called kappa and lambda, based on the amino acid sequences of their constant domains. Depending on the amino acid sequence of the constant domain of their heavy chains (C_{H}), immunoglobulins can be assigned to different classes or isotypes. There are five classes of immunoglobulins: IgA, IgD, IgE, IgG, and IgM, having heavy chains designated α, δ, ε, γ, and μ, respectively. They and a classes are further divided into subclasses on the basis of relatively minor differences in C_{H} sequence and function, e.g., humans express the following subclasses: IgG1, IgG2, IgG3, IgG4, IgA1, and IgA2.

[6436] The term “variable” refers to the fact that certain segments of the variable domains differ extensively in sequence among antibodies. The V domain mediates antigen binding and define specificity of a particular antibody for its particular antigen. However, the variability is not evenly distributed across the 110-amino acid span of the variable domains. Instead, the V regions consist of relatively invariant stretches called framework regions (FRs) of 15-30 amino acids separated by shorter regions of extreme variability called “hypervariable regions” that are each 9-12 amino acids long. The variable domains of native heavy and light chains each comprise four FRs, largely adopting a β-sheet configuration, connected by three hypervariable regions, which form loops connecting, and in some cases forming part of, the β-sheet structure. The hypervariable regions in each chain are held together in close proximity by the FRs and, with the hypervariable regions from the other chain, contribute to the formation of the antigen-binding site of antibodies (see Kabat et al., Sequences of Proteins of Immunological Interest, 5th Ed. Public Health Service, National Institutes of Health, Bethesda, Md. (1991)). The constant domains are not involved directly in binding an antibody to an antigen, but exhibit various effector functions, such as participation of the antibody in antibody dependent cellular cytotoxicity (ADCC).

[6437] The term “hypervariable region” when used herein refers to the amino acid residues of an antibody which are responsible for antigen-binding. The hypervariable region generally comprises amino acid residues from a “complementarity determining region” or “CDR” (e.g. around about residues 24-34 (L1), 50-56 (L2) and 89-97 (L3) in the V_{L}, and around about 1-35 (H1), 50-65 (H2) and 95-102 (H3) in the V_{H}; Kabat et al., Sequences of Proteins of Immunological Interest, 5th Ed. Public Health Service, National Institutes of Health, Bethesda, Md. (1991)) and/or those residues from a “hypervariable loop” (e.g. residues 26-32 (L1), 50-52 (L2) and 91-96 (L3) in the V_{L}, and 26-32 (H1), 53-55 (H2) and 96-101 (H3) in the V_{H}; Chothia and Lesk J. Mol. Biol. 196:901-917 (1987)).

[6438] The term “monoclonal antibody” as used herein refers to an antibody obtained from a population of substantially homogeneous antibodies, i.e., the individual antibodies comprising the population are identical except for possible naturally occurring mutations that may be present in minor amounts. Monoclonal antibodies are highly specific, being directed against a single antigenic site. Furthermore, in contrast to polyclonal antibody preparations which include different antibodies directed against different determinants (epitopes), each monoclonal antibody is directed against a single determinant on the antigen. In addition to their specificity, the monoclonal antibodies are advantageous in that they may be synthesized uncontaminated by other antibodies. The modifier “monoclonal” is not to be construed as requiring production of the antibody by any particular method. For example, the monoclonal antibodies useful in the present invention may be prepared by the hybridoma methodology first described by Kohler et al., Nature, 256:495 (1975), or may be made using recombinant DNA methods in bacterial, eukaryotic animal or plant cells (see, e.g., U.S. Pat. No. 4,816,567). The “monoclonal antibodies” may also be isolated from phage antibody libraries using the techniques described in Clackson et al., Nature, 352:624-628 (1991) and Marks et al., J. Mol. Biol., 222:581-597 (1991), for example.

[6439] The monoclonal antibodies herein include “chimeric” antibodies in which a portion of the heavy and/or light chain is identical with or homologous to corresponding sequences in antibodies derived from a particular species or belonging to a particular antibody class or subclass, while the remainder of the chain(s) is identical with or homologous to corresponding sequences in antibodies derived from another species or belonging to another antibody class or subclass, as well as fragments of such antibodies, so long as they exhibit the desired biological activity (see U.S. Pat. No. 4,816,567; and Morrison et al., Proc. Natl. Acad. Sci. USA, 81:6851-6855 (1984)). Chimeric antibodies of interest herein include “primatized” antibodies comprising variable domain antigen-binding sequences derived from a non-human primate (e.g. Old World Monkey, Ape etc), and human constant region sequences.

[6440] An “intact” antibody is one which comprises an antigen-binding site as well as a C_{L} and at least heavy chain constant domains, C_{H}1, C_{H}2 and C_{H}3. The constant domains may be native sequence constant domains (e.g. human native sequence constant domains) or amino acid sequence variant thereof. Preferably, the intact antibody has one or more effector functions.

[6441] “Antibody fragments” comprise a portion of an intact antibody, preferably the antigen binding or variable region of the intact antibody. Examples of antibody fragments include Fab, Fab′, F(ab′)₂, and Fv fragments; diabodies; linear antibodies (see U.S. Pat. No. 5,641,870, Example 2; Zapata et al., Protein Eng. 8(10): 1057-1062 [1995]); single-chain antibody molecules; and multispecific antibodies formed from antibody fragments.

[6442] Papain digestion of antibodies produces two identical antigen-binding fragments, called “Fab” fragments, and a residual “Fc” fragment, a designation reflecting the ability to crystallize readily. The Fab fragment consists of an entire L chain along with the variable region domain of the H chain (V_{H}), and the first constant domain of one heavy chain (C_{H}1). Each Fab fragment is monovalent with respect to antigen binding, i.e., it has a single antigen-binding site. Pepsin treatment of an antibody yields a single large F(ab′)₂ fragment which roughly corresponds to two disulfide linked Fab fragments having divalent antigen-binding activity and is still capable of cross-linking antigen. Fab′ fragments differ from Fab fragments by having additional few residues at the carboxy terminus of the C_{H}1 domain including one or more cysteines from the antibody hinge region. Fab′-SH is the designation herein for Fab′ in which the cysteine residue(s) of the constant domains bear a free thiol group. F(ab′)₂ antibody fragments originally were produced as pairs of Fab′ fragments which have hinge cysteines between them. Other chemical couplings of antibody fragments are also known.

[6443] The Fc fragment comprises the carboxy-terminal portions of both H chains held together by disulfides. The effector functions of antibodies are determined by sequences in the Pc region, which region is also the part recognized by Pc receptors (FcR) found on certain types of cells.

[6444] “Fv” is the minimum antibody fragment which contains a complete antigen-recognition and -binding site. This fragment consists of a dimer of one heavy- and one light-chain variable region domain in tight, non-covalent association. From the folding of these two domains emanate six hypervariable loops (3 loops each from the H and L chain) that contribute the amino acid residues for antigen binding and confer antigen binding specificity to the antibody. However, even a single variable domain (or half of an Fv comprising only three CDRs specific for an antigen) has the ability to recognize and bind antigen, although at a lower affinity than the entire binding site.

[6445] “Single-chain Fv” also abbreviated as “sFv” or “scFv” are antibody fragments that comprise the V_{H} and V_{L} antibody domains connected into a single polypeptide chain. Preferably, the sFv polypeptide further comprises a polypeptide linker between the V_{H} and V_{L} domains which enables the sFv to form the desired structure for antigen binding. For a review of sFv, see Pluckthun in The Pharmacology of Monoclonal Antibodies, vol. 113, Rosenburg and Moore eds., Springer-Verlag, New York, pp. 269-315 (1994); Borrebaeck 1995, infra.

[6446] The term “diabodies” refers to small antibody fragments prepared by constructing sFv fragments (see preceding paragraph) with short linkers (about 5-10 residues) between the V_{H} and V_{L} domains such that inter-chain but not intra-chain pairing of the V domains is achieved, resulting in a bivalent fragment, i.e., fragment having two antigen-binding sites. Bispecific diabodies are heterodimers of two “crossover” sFv fragments in which the V_{H} and V_{L} domains of the two antibodies are present on different polypeptide chains. Diabodies are described more fully in, for example, EP 404,097; WO 93/11161; and Hollinger et al., Proc. Natl. Acad. Sci. USA, 90:6444-6448 (1993).

[6447] “Humanized” forms of non-human (e.g., rodent) antibodies are chimeric antibodies that contain minimal sequence derived from the non-human antibody. For the most part, humanized antibodies are human immunoglobulins (recipient antibody) in which residues from a hypervariable region of the recipient are replaced by residues from a hypervariable region of a non-human species (donor antibody) such as mouse, rat, rabbit or non-human primate having the desired antibody specificity, affinity, and capability. In some instances, framework region (FR) residues of the human immunoglobulin are replaced by corresponding non-human residues. Furthermore, humanized antibodies may comprise residues that are not found in the recipient antibody or in the donor antibody. These modifications are made to further refine antibody performance. In general, the humanized antibody will comprise substantially all of at least one, and typically two, variable domains, in which all or substantially all of the hypervariable loops correspond to those of a non-human immunoglobulin and all or substantially all of the FRs are those of a human immunoglobulin sequence. The humanized antibody optionally also will comprise at least a portion of an immunoglobulin constant region (Fc), typically that of a human immunoglobulin. For further details, see Jones et al., Nature 321:522-525 (1986); Riechmann et al., Nature 332:323-329 (1988); and Presta, Curr. Op. Struct. Biol. 2:593-596 (1992).

[6448] A “species-dependent antibody,” e.g., a mammalian anti-human IgE antibody, is an antibody which has a stronger binding affinity for an antigen from a first mammalian species than it has for a homologue of that antigen from a second mammalian species. Normally, the species-dependent antibody “bind specifically” to a human antigen (i.e., has a binding affinity (Kd) value of no more than about 1×10⁻⁷ M, preferably no more than about 1×10⁻⁸ and most preferably no more than about 1×10⁻⁹ M) but has a binding affinity for a homologue of the antigen from a second non-human mammalian species which is at least about 50 fold, or at least about 500 fold, or at least about 1000 fold, weaker than its binding affinity for the human antigen. The species-dependent antibody can be of any of the various types of antibodies as defined above, but preferably is a humanized or human antibody.

[6449] A “TAT binding oligopeptide” is an oligopeptide that binds, preferably specifically, to a TAT polypeptide as described herein. TAT binding oligopeptides may be chemically synthesized using known oligopeptide synthesis methodology or may be prepared and purified using recombinant technology. TAT binding oligopeptides are usually at least about 5 amino acids in length, alternatively at least about 6, 7, 8, 9, 10, 11, 12, 13, 14, 15, 16, 17, 18, 19, 20, 21, 22, 23, 24, 25, 26, 27, 28, 29, 30, 31, 32, 33, 34, 35, 36, 37, 38, 39, 40, 41, 42, 43, 44, 45, 46, 47, 48, 49, 50, 51, 52, 53, 54, 55, 56, 57, 58, 59, 60, 61, 62, 63, 64, 65, 66, 67, 68, 69, 70, 71, 72, 73, 74, 75, 76, 77, 78, 79, 80, 81, 82, 83, 84, 85, 86, 87, 88, 89, 90, 91, 92, 93, 94, 95, 96, 97, 98, 99, or 100 amino acids in length or more, wherein such oligopeptides that are capable of binding, preferably specifically, to a TAT polypeptide as described herein. TAT binding oligopeptides may be identified without undue experimentation using well known techniques. In this regard, it is noted that techniques for screening oligopeptide libraries for oligopeptides that are capable of specifically binding to a polypeptide target are well known in the art (see, e.g., U.S. Pat. Nos. 5,556,762, 5,750,373, 4,708,871, 4,833,092, 5,223,409, 5,403,484, 5,571,689, 5,663,143; PCT Publication Nos. WO 84/03506 and WO84/03564; Geysen et al., Proc. Natl. Acad. Sci. U.S.A., 81:3998-4002 (1984); Geysen et al., Proc. Natl. Acad. Sci. U.S.A., 82:178-182 (1985); Geysen et al., in Synthetic Peptides as Antigens, 130-149 (1986); Geysen et al., J. Immunol. Meth., 102:259-274 (1987); Schoofs et al., J. Immunol., 140:611-616 (1988), Cwirla, S. E. et al. (1990) Proc. Natl. Acad. Sci. USA, 87:6378; Lowman, H. B. et al. (1991) Biochemistry, 30:10832; Clackson, T. et al. (1991) Nature, 352: 624; Marks, J. D. et al. (1991), J. Mol. Biol., 222:581; Kang, A. S. et al. (1991) Proc. Natl. Acad. Sci. USA, 88:8363, and Smith, G. P. (1991) Current Opin. Biotechnol., 2:668).

[6450] A “TAT binding organic molecule” is an organic molecule other than an oligopeptide or antibody as defined herein that binds, preferably specifically, to a TAT polypeptide as described herein. TAT binding organic molecules may be identified and chemically synthesized using known methodology (see, e.g., PCT Publication Nos. WO00/00823 and WO00/39585). TAT binding organic molecules are usually less than about 2000 daltons in size, alternatively less than about 1500, 750, 500, 250 or 200 daltons in size, wherein such organic molecules that are capable of binding, preferably specifically, to a TAT polypeptide as described herein may be identified without undue experimentation using well known techniques. In this regard, it is noted that techniques for screening organic molecule libraries for molecules that are capable of binding to a polypeptide target are well known in the art (see, e.g., PCT Publication Nos. WO00/00823 and WO00/39585).

[6451] An antibody, oligopeptide or other organic molecule “which binds” an antigen of interest, e.g. a tumor-associated polypeptide antigen target, is one that binds the antigen with sufficient affinity such that the antibody, oligopeptide or other organic molecule is useful as a diagnostic and/or therapeutic agent in targeting a cell or tissue expressing the antigen, and does not significantly cross-react with other proteins. In such embodiments, the extent of binding of the antibody, oligopeptide or other organic molecule to a “non-target” protein will be less than about 10% of the binding of the antibody, oligopeptide or other organic molecule to its particular target protein as determined by fluorescence activated cell sorting (FACS) analysis or radioimmunoprecipitation (RIA). With regard to the binding of an antibody, oligopeptide or other organic molecule to a target molecule, the term “specific binding” or “specifically binds to” or is “specific for” a particular polypeptide or an epitope on a particular polypeptide target means binding that is measurably different from a non-specific interaction. Specific binding can be measured, for example, by determining binding of a molecule compared to binding of a control molecule, which generally is a molecule of similar structure that does not have binding activity. For example, specific binding can be determined by competition with a control molecule that is similar to the target, for example, an excess of non-labeled target. In this case, specific binding is indicated if the binding of the labeled target to a probe is competitively inhibited by excess unlabeled target. The term “specific binding” or “specifically binds to” or is “specific for” a particular polypeptide or an epitope on a particular polypeptide target as used herein can be exhibited, for example, by a molecule having a Kd for the target of at least about 10⁻⁴ M, alternatively at least about 10⁻⁵ M, alternatively at least about 10⁻⁶ M, alternatively at least about 10⁻⁷ M, alternatively at least about 10⁻⁸ M, alternatively at least about 10⁻⁹ M, alternatively at least about 10⁻¹⁰ M, alternatively at least about 10⁻¹¹ M, alternatively at least about 10⁻¹² M, or greater. In one embodiment, the term “specific binding” refers to binding where a molecule binds to a particular polypeptide or epitope on a particular polypeptide without substantially binding to any other polypeptide or polypeptide epitope.

[6452] An antibody, oligopeptide or other organic molecule that “inhibits the growth of tumor cells expressing a TAT polypeptide” or a “growth inhibitory” antibody, oligopeptide or other organic molecule is one which results in measurable growth inhibition of cancer cells expressing or overexpressing the appropriate TAT polypeptide. The TAT polypeptide may be a transmembrane polypeptide expressed on the surface of a cancer cell or may be a polypeptide that is produced and secreted by a cancer cell. Preferred growth inhibitory anti-TAT antibodies, oligopeptides or organic molecules inhibit growth of TAT-expressing tumor cells by greater than 20%, preferably from about 20% to about 50%, and even more preferably, by greater than 50% (e.g., from about 50% to about 100%) as compared to the appropriate control, the control typically being tumor cells not treated with the antibody, oligopeptide or other organic molecule being tested. In one embodiment, growth inhibition can be measured at an antibody concentration of about 0.1 to 30 μg/ml or about 0.5 nM to 200 nM in cell culture, where the growth inhibition is determined 1-10 days after exposure of the tumor cells to the antibody. Growth inhibition of tumor cells in vivo can be determined in various ways such as is described in the Experimental Examples section below. The antibody is growth inhibitory in vivo if administration of the anti-TAT antibody at about 1 μg/kg to about 100 mg/kg body weight results in reduction in tumor size or tumor cell proliferation within about 5 days to 3 months from the first administration of the antibody, preferably within about 5 to 30 days.

[6453] An antibody, oligopeptide or other organic molecule which “induces apoptosis” is one which induces programmed cell death as determined by binding of annexin V, fragmentation of DNA, cell shrinkage, dilation of endoplasmic reticulum, cell fragmentation, and/or formation of membrane vesicles (called apoptotic bodies). The cell is usually one which overexpresses a TAT polypeptide. Preferably the cell is a tumor cell, e.g., a prostate, breast, ovarian, stomach, endometrial, lung, kidney, colon, bladder cell. Various methods are available for evaluating the cellular events associated with apoptosis. For example, phosphatidyl serine (PS) translocation can be measured by annexin binding; DNA fragmentation can be evaluated through DNA laddering; and nuclear/chromatin condensation along with DNA fragmentation can be evaluated by any increase in hypodiploid cells. Preferably, the antibody, oligopeptide or other organic molecule which induces apoptosis is one which results in about 2 to 50 fold, preferably about 5 to 50 fold, and most preferably about 10 to 50 fold, induction of annexin binding relative to untreated cell in an annexin binding assay.

[6454] Antibody “effector functions” refer to those biological activities attributable to the Fc region (a native sequence Fc region or amino acid sequence variant Fc region) of an antibody, and vary with the antibody isotype. Examples of antibody effector functions include: C1q binding and complement dependent cytotoxicity; Fc receptor binding; antibody-dependent cell-mediated cytotoxicity (ADCC); phagocytosis; down regulation of cell surface receptors (e.g., B cell receptor); and B cell activation.

[6455] “Antibody-dependent cell-mediated cytotoxicity” or “ADCC” refers to a form of cytotoxicity in which secreted Ig bound onto Fc receptors (FcRs) present on certain cytotoxic cells (e.g., Natural Killer (NK) cells, neutrophils, and macrophages) enable these cytotoxic effector cells to bind specifically to an antigen-bearing target cell and subsequently kill the target cell with cytotoxins. The antibodies “arm” the cytotoxic cells and are absolutely required for such killing. The primary cells for mediating ADCC, NK cells, express FcγRIII only, whereas monocytes express PcγRI, FcγRII and FcγRIII. FcR expression on hematopoietic cells is summarized in Table 3 on page 464 of Ravetch and Kinet, Annu. Rev. Immunol. 9:457-92 (1991). To assess ADCC activity of a molecule of interest, an in vitro ADCC assay, such as that described in U.S. Pat. No. 5,500,362 or 5,821,337 may be performed. Useful effector cells for such assays include peripheral blood mononuclear cells (PBMC) and Natural Killer (NK) cells. Alternatively, or additionally, ADCC activity of the molecule of interest may be assessed in vivo, e.g., in a animal model such as that disclosed in Clynes et al. (USA) 95:652-656 (1998).

[6456] “Fc receptor” or “FcR” describes a receptor that binds to the Fc region of an antibody. The preferred FcR is a native sequence human FcR. Moreover, a preferred FcR is one which binds an IgG antibody (a gamma receptor) and includes receptors of the FcγRI, FcγRII and FcγRIII subclasses, including allelic variants and alternatively spliced forms of these receptors. FcγRII receptors include FcγRIIA (an “activating receptor”) and FcγRIIB (an “inhibiting receptor”), which have similar amino acid sequences that differ primarily in the cytoplasmic domains thereof. Activating receptor FcγRIIA contains an immunoreceptor tyrosine-based activation motif (ITAM) in its cytoplasmic domain. Inhibiting receptor FcγRIIB contains an immunoreceptor tyrosine-based inhibition motif (ITIM) in its cytoplasmic domain. (see review M. in Daëron, Annu. Rev. Immunol. 15:203-234 (1997)). FcRs are reviewed in Ravetch and Kinet, Annu. Rev. Immunol. 9:457-492 (1991); Capel et al., Immunomethods 4:25-34 (1994); and de Haas et al., J. Lab. Clin. Med. 126:330-41 (1995). Other FcRs, including those to be identified in the future, are encompassed by the term “FcR” herein. The term also includes the neonatal receptor, FcRn, which is responsible for the transfer of maternal IgGs to the fetus (Guyer et al., J. Immunol. 117:587 (1976) and Kim et al., J. Immunol. 24:249 (1994)).

[6457] “Human effector cells” are leukocytes which express one or more FcRs and perform effector functions. Preferably, the cells express at least FcγRIII and perform ADCC effector function. Examples of human leukocytes which mediate ADCC include peripheral blood mononuclear cells (PBMC), natural killer (NK) cells, monocytes, cytotoxic T cells and neutrophils; with PBMCs and NK cells being preferred. The effector cells may be isolated from a native source, e.g., from blood.

[6458] “Complement dependent cytotoxicity” or “CDC” refers to the lysis of a target cell in the presence of complement. Activation of the classical complement pathway is initiated by the binding of the first component of the complement system (C1q) to antibodies (of the appropriate subclass) which are bound to their cognate antigen. To assess complement activation, a CDC assay, e.g., as described in Gazzano-Santoro et al., J. Immunol. Methods 202:163 (1996), may be performed.

[6459] The terms “cancer” and “cancerous” refer to or describe the physiological condition in mammals that is typically characterized by unregulated cell growth. Examples of cancer include, but are not limited to, carcinoma, lymphoma, blastoma, sarcoma, and leukemia or lymphoid malignancies. More particular examples of such cancers include squamous cell cancer (e.g., epithelial squamous cell cancer), lung cancer including small-cell lung cancer, non-small cell lung cancer, adenocarcinoma of the lung and squamous carcinoma of the lung, cancer of the peritoneum, hepatocellular cancer, gastric or stomach cancer including gastrointestinal cancer, pancreatic cancer, glioblastoma, cervical cancer, ovarian cancer, liver cancer, bladder cancer, cancer of the urinary tract, hepatoma, breast cancer, colon cancer, rectal cancer, colorectal cancer, endometrial or uterine carcinoma, salivary gland carcinoma, kidney or renal cancer, prostate cancer, vulval cancer, thyroid cancer, hepatic carcinoma, anal carcinoma, penile carcinoma, melanoma, multiple myeloma and B-cell lymphoma, brain, as well as head and neck cancer, and associated metastases.

[6460] The terms “cell proliferative disorder” and “proliferative disorder” refer to disorders that are associated with some degree of abnormal cell proliferation. In one embodiment, the cell proliferative disorder is cancer.

[6461] “Tumor”, as used herein, refers to all neoplastic cell growth and proliferation, whether malignant or benign, and all pre-cancerous and cancerous cells and tissues.

[6462] An antibody, oligopeptide or other organic molecule which “induces cell death” is one which causes a viable cell to become nonviable. The cell is one which expresses a TAT polypeptide, preferably a cell that overexpresses a TAT polypeptide as compared to a normal cell of the same tissue type. The TAT polypeptide may be a transmembrane polypeptide expressed on the surface of a cancer cell or may be a polypeptide that is produced and secreted by a cancer cell. Preferably, the cell is a cancer cell, e.g., a breast, ovarian, stomach, endometrial, salivary gland, lung, kidney, colon, thyroid, pancreatic or bladder cell. Cell death in vitro may be determined in the absence of complement and immune effector cells to distinguish cell death induced by antibody-dependent cell-mediated cytotoxicity (ADCC) or complement dependent cytotoxicity (CDC). Thus, the assay for cell death may be performed using heat inactivated serum (i.e., in the absence of complement) and in the absence of immune effector cells. To determine whether the antibody, oligopeptide or other organic molecule is able to induce cell death, loss of membrane integrity as evaluated by uptake of propidium iodide (PI), trypan blue (see Moore et al. Cytotechnology 17:1-11 (1995)) or 7AAD can be assessed relative to untreated cells. Preferred cell death-inducing antibodies, oligopeptides or other organic molecules are those which induce PI uptake in the PI uptake assay in BT474 cells.

[6463] A “TAT-expressing cell” is a cell which expresses an endogenous or transfected TAT polypeptide either on the cell surface or in a secreted form. A “TAT-expressing cancer” is a cancer comprising cells that have a TAT polypeptide present on the cell surface or that produce and secrete a TAT polypeptide. A “TAT-expressing cancer” optionally produces sufficient levels of TAT polypeptide on the surface of cells thereof, such that an anti-TAT antibody, oligopeptide ot other organic molecule can bind thereto and have a therapeutic effect with respect to the cancer. In another embodiment, a “TAT-expressing cancer” optionally produces and secretes sufficient levels of TAT polypeptide, such that an anti-TAT antibody, oligopeptide ot other organic molecule antagonist can bind thereto and have a therapeutic effect with respect to the cancer. With regard to the latter, the antagonist may be an antisense oligonucleotide which reduces, inhibits or prevents production and secretion of the secreted TAT polypeptide by tumor cells. A cancer which “overexpresses” a TAT polypeptide is one which has significantly higher levels of TAT polypeptide at the cell surface thereof, or produces and secretes, compared to a noncancerous cell of the same tissue type. Such overexpression may be caused by gene amplification or by increased transcription or translation. TAT polypeptide overexpression may be determined in a diagnostic or prognostic assay by evaluating increased levels of the TAT protein present on the surface of a cell, or secreted by the cell (e.g., via an immunohistochemistry assay using anti-TAT antibodies prepared against an isolated TAT polypeptide which may be prepared using recombinant DNA technology from an isolated nucleic acid encoding the TAT polypeptide; FACS analysis, etc.). Alternatively, or additionally, one may measure levels of TAT polypeptide-encoding nucleic acid or mRNA in the cell, e.g., via fluorescent in situ hybridization using a nucleic acid based probe corresponding to a TAT-encoding nucleic acid or the complement thereof; (FISH; see WO98/45479 published October, 1998), Southern blotting, Northern blotting, or polymerase chain reaction (PCR) techniques, such as real time quantitative PCR (RT-PCR). One may also study TAT polypeptide overexpression by measuring shed antigen in a biological fluid such as serum, e.g, using antibody-based assays (see also, e.g., U.S. Pat. No. 4,933,294 issued Jun. 12, 1990; WO91/05264 published Apr. 18, 1991; U.S. Pat. No. 5,401,638 issued Mar. 28, 1995; and Sias et al., J. Immunol. Methods 132:73-80 (1990)). Aside from the above assays, various in vivo assays are available to the skilled practitioner. For example, one may expose cells within the body of the patient to an antibody which is optionally labeled with a detectable label, e.g., a radioactive isotope, and binding of the antibody to cells in the patient can be evaluated, e.g., by external scanning for radioactivity or by analyzing a biopsy taken from a patient previously exposed to the antibody.

[6464] As used herein, the term “immunoadhesin” designates antibody-like molecules which combine the binding specificity of a heterologous protein (an “adhesin”) with the effector functions of immunoglobulin constant domains. Structurally, the immunoadhesins comprise a fusion of an amino acid sequence with the desired binding specificity which is other than the antigen recognition and binding site of an antibody (i.e., is “heterologous”), and an immunoglobulin constant domain sequence. The adhesin part of an immunoadhesin molecule typically is a contiguous amino acid sequence comprising at least the binding site of a receptor or a ligand. The immunoglobulin constant domain sequence in the immunoadhesin may be obtained from any immunoglobulin, such as IgG-1, IgG-2, IgG-3, or IgG-4 subtypes, IgA (including IgA-1 and IgA-2), IgE, IgD or IgM.

[6465] The word “label” when used herein refers to a detectable compound or composition which is conjugated directly or indirectly to the antibody, oligopeptide or other organic molecule so as to generate a “labeled” antibody, oligopeptide or other organic molecule. The label may be detectable by itself (e.g. radioisotope labels or fluorescent labels) or, in the case of an enzymatic label, may catalyze chemical alteration of a substrate compound or composition which is detectable.

[6466] The term “cytotoxic agent” as used herein refers to a substance that inhibits or prevents the function of cells and/or causes destruction of cells. The term is intended to include radioactive isotopes (e.g., At²¹¹, I¹³¹, I¹²⁵, Y⁹⁰, Re¹⁸⁶, Re¹⁸⁸, Sm¹⁵³, Bi²¹², P³² and radioactive isotopes of Lu), chemotherapeutic agents e.g. methotrexate, adriamicin, vinca alkaloids (vincristine, vinblastine, etoposide), doxorubicin, melphalan, mitomycin C, chlorambucil, daunorubicin or other intercalating agents, enzymes and fragments thereof such as nucleolytic enzymes, antibiotics, and toxins such as small molecule toxins or enzymatically active toxins of bacterial, fungal, plant or animal origin, including fragments and/or variants thereof, and the various antitumor or anticancer agents disclosed below. Other cytotoxic agents are described below. A tumoricidal agent causes destruction of tumor cells.

[6467] A “growth inhibitory agent” when used herein refers to a compound or composition which inhibits growth of a cell, especially a TAT-expressing cancer cell, either in vitro or in vivo. Thus, the growth inhibitory agent may be one which significantly reduces the percentage of TAT-expressing cells in S phase. Examples of growth inhibitory agents include agents that block cell cycle progression (at a place other than S phase), such as agents that induce G1 arrest and M-phase arrest. Classical M-phase blockers include the vincas (vincristine and vinblastine), taxanes, and topoisomerase II inhibitors such as doxorubicin, epirubicin, daunorubicin, etoposide, and bleomycin. Those agents that arrest G1 also spill over into S-phase arrest, for example, DNA alkylating agents such as tamoxifen, prednisone, dacarbazine, mechlorethamine, cisplatin, methotrexate, 5-fluorouracil, and ara-C. Further information can be found in The Molecular Basis of Cancer, Mendelsohn and Israel, eds., Chapter 1, entitled “Cell cycle regulation, oncogenes, and antineoplastic drugs” by Murakami et al. (WB Saunders: Philadelphia, 1995), especially p. 13. The taxanes (paclitaxel and docetaxel) are anticancer drugs both derived from the yew tree. Docetaxel (TAXOTERE®, Rhone-Poulenc Rorer), derived from the European yew, is a semisynthetic analogue of paclitaxel (TAXOL®, Bristol-Myers Squibb). Paclitaxel and docetaxel promote the assembly of microtubules from tubulin dimers and stabilize microtubules by preventing depolymerization, which results in the inhibition of mitosis in cells.

[6468] “Doxorubicin” is an anthracycline antibiotic. The full chemical name of doxorubicin is (8S-cis)-10-[(3-amino-2,3,6-trideoxya-α-L-lyxo-hexapyranosyl)oxy]-7,8,9,10-tetrahydro-6,8,11-trihydroxy-8-(hydroxyacetyl)-1-methoxy-5,12-naphthacenedione.

[6469] The term “cytokine” is a generic term for proteins released by one cell population which act on another cell as intercellular mediators. Examples of such cytokines are lymphokines, monokines, and traditional polypeptide hormones. Included among the cytokines are growth hormone such as human growth hormone, N-methionyl human growth hormone, and bovine growth hormone; parathyroid hormone; thyroxine; insulin; proinsulin; relaxin; prorelaxin; glycoprotein hormones such as follicle stimulating hormone (FSH), thyroid stimulating hormone (TSH), and luteinzing hormone (LH); hepatic growth factor; fibroblast growth factor; prolactin; placental lactogen; tumor necrosis factor-α and -β; mullerian-inhibiting substance; mouse gonadotropin-associated peptide; inhibin; activin; vascular endothelial growth factor; integrin; thrombopoietin (TPO); nerve growth factors such as NGF-β; platelet-growth factor; transforming growth factors (TGFs) such as TGF-α and TGF-β; insulin-like growth factor-I and -II; erythropoietin (EPO); osteoinductive factors; interferons such as interferon -α, -β, and -γ; colony stimulating factors (CSFs) such as macrophage-CSF (M-CSF); granulocyte-macrophage-CSF (GM-CSF); and granulocyte-CSF (G-CSF); interleukins (ILs) such as IL-1, IL-1a, IL-2, IL-3, IL-4, IL-5, IL-6, IL-7, IL-8, IL-9, IL-11, IL-12; a tumor necrosis factor such as TNF-α or TNF-β; and other polypeptide factors including LIP and kit ligand (KL). As used herein, the term cytokine includes proteins from natural sources or from recombinant cell culture and biologically active equivalents of the native sequence cytokines.

[6470] The term “package insert” is used to refer to instructions customarily included in commercial packages of therapeutic products, that contain information about the indications, usage, dosage, administration, contraindications and/or warnings concerning the use of such therapeutic products.

TABLE 2

| | | |
|---|---|---|
| TAT | XXXXXXXXXXXXXXX | (Length = 15 amino acids) |
| Comparison | XXXXXYYYYYYY | (Length = 12 amino acids) |
| Protein | | |

% amino acid sequence identity = (the number of identically matching amino acid residues between the two polypeptide sequences as determined by ALIGN-2) divided by (the total number of amino acid residues of the TAT polypeptide) = 5 divided by 15 = 33.3%

[6471] TABLE 3

| | | |
|---|---|---|
| TAT | XXXXXXXXXX | (Length = 10 amino acids) |
| Comparison | XXXXXYYYYYYZZYZ | (Length = 15 amino acids) |
| Protein | | |

% amino acid sequence identity = (the number of identically matching amino acid residues between the two polypeptide sequences as determined by ALIGN-2) divided by (the total number of amino acid residues of the TAT polypeptide) = 5 divided by 10 = 50%

[6472] TABLE 4

| | | |
|---|---|---|
| TAT-DNA | NNNNNNNNNNNNNN | (Length = 14 nucleotides) |
| Comparison | NNNNNNLLLLLLLLLL | (Length = 16 nucleotides) |
| DNA | | |

% nucleic acid sequence identity = (the number of identically matching nucleotides between the two nucleic acid sequences as determined by ALIGN-2) divided by (the total number of nucleotides of the TAT-DNA nucleic acid sequence) = 6 divided by 14 = 42.9%

[6473] TABLE 5

| | | |
|---|---|---|
| TAT-DNA | NNNNNNNNNNNN | (Length = 12 nucleotides) |
| Comparison DNA | NNNNLLLVV | (Length = 9 nucleotides) |

% nucleic acid sequence identity = (the number of identically matching nucleotides between the two nucleic acid sequences as determined by ALIGN-2) divided by (the total number of nucleotides of the TAT-DNA nucleic acid sequence) = 4 divided by 12 = 33.3%

II. Compositions and Methods of the Invention

[6474] A. Anti-TAT Antibodies

[6475] In one embodiment, the present invention provides anti-TAT antibodies which may find use herein as therapeutic and/or diagnostic agents. Exemplary antibodies include polyclonal, monoclonal, humanized, bispecific, and heteroconjugate antibodies.

[6476] 1. Polyclonal Antibodies

[6477] Polyclonal antibodies are preferably raised in animals by multiple subcutaneous (sc) or intraperitoneal (ip) injections of the relevant antigen and an adjuvant. It may be useful to conjugate the relevant antigen (especially when synthetic peptides are used) to a protein that is immunogenic in the species to be immunized. For example, the antigen can be conjugated to keyhole limpet hemocyanin (KLH), serum albumin, bovine thyroglobulin, or soybean trypsin inhibitor, using a bifunctional or derivatizing agent, e.g., maleimidobenzoyl sulfosuccinimide ester (conjugation through cysteine residues), N-hydroxysuccinimide (through lysine residues), glutaraldehyde, succinic anhydride, SOCl₂, or R¹N═C═NR, where R and R¹ are different alkyl groups.

[6478] Animals are immunized against the antigen, immunogenic conjugates, or derivatives by combining, e.g., 100 μg or 5 μg of the protein or conjugate (for rabbits or mice, respectively) with 3 volumes of Freund's complete adjuvant and injecting the solution intradermally at multiple sites. One month later, the animals are boosted with ⅕ to 1/10 the original amount of peptide or conjugate in Freund's complete adjuvant by subcutaneous injection at multiple sites. Seven to 14 days later, the animals are bled and the serum is assayed for antibody titer. Animals are boosted until the titer plateaus. Conjugates also can be made in recombinant cell culture as protein fusions. Also, aggregating agents such as alum are suitably used to enhance the immune response.

[6479] 2. Monoclonal Antibodies

[6480] Monoclonal antibodies may be made using the hybridoma method first described by Kohler et al., Nature, 256:495 (1975), or may be made by recombinant DNA methods (U.S. Pat. No. 4,816,567).

[6481] In the hybridoma method, a mouse or other appropriate host animal, such as a hamster, is immunized as described above to elicit lymphocytes that produce or are capable of producing antibodies that will specifically bind to the protein used for immunization. Alternatively, lymphocytes may be immunized in vitro. After immunization, lymphocytes are isolated and then fused with a myeloma cell line using a suitable fusing agent, such as polyethylene glycol, to form a hybridoma cell (Goding, Monoclonal Antibodies: Principles and Practice, pp. 59-103 (Academic Press, 1986)).

[6482] The hybridoma cells thus prepared are seeded and grown in a suitable culture medium which medium preferably contains one or more substances that inhibit the growth or survival of the unfused, parental myeloma cells (also referred to as fusion partner). For example, if the parental myeloma cells lack the enzyme hypoxanthine guanine phosphoribosyl transferase (HGPRT or HPRT), the selective culture medium for the hybridomas typically will include hypoxanthine, aminopterin, and thymidine (HAT medium), which substances prevent the growth of HGPRT-deficient cells.

[6483] Preferred fusion partner myeloma cells are those that fuse efficiently, support stable high-level production of antibody by the selected antibody-producing cells, and are sensitive to a selective medium that selects against the unfused parental cells. Preferred myeloma cell lines are murine myeloma lines, such as those derived from MOPC-21 and MPC-11 mouse tumors available from the Salk Institute Cell Distribution Center, San Diego, Calif. USA, and SP-2 and derivatives e.g., X63-Ag8653 cells available from the American Type Culture Collection, Manassas, Va., USA. Human myeloma and mouse-human heteromyeloma cell lines also have been described for the production of human monoclonal antibodies (Kozbor, J. Immunol., 133:3001 (1984); and Brodeur et al., Monoclonal Antibody Production Techniques and Applications, pp. 51-63 (Marcel Dekker, Inc., New York, 1987)).

[6484] Culture medium in which hybridoma cells are growing is assayed for production of monoclonal antibodies directed against the antigen. Preferably, the binding specificity of monoclonal antibodies produced by hybridoma cells is determined by immunoprecipitation or by an in vitro binding assay, such as radioimmunoassay (RIA) or enzyme-linked immunosorbent assay (ELISA).

[6485] The binding affinity of the monoclonal antibody can, for example, be determined by the Scatchard analysis described in Munson et al., Anal. Biochem., 107:220 (1980).

[6486] Once hybridoma cells that produce antibodies of the desired specificity, affinity, and/or activity are identified, the clones may be subcloned by limiting dilution procedures and grown by standard methods (Goding, Monoclonal Antibodies: Principles and Practice, pp. 59-103 (Academic Press, 1986)). Suitable culture media for this purpose include, for example, D-MEM or RPMI-1640 medium. In addition, the hybridoma cells may be grown in vivo as ascites tumors in an animal e.g, by i.p. injection of the cells into mice.

[6487] The monoclonal antibodies secreted by the subclones are suitably separated from the culture medium, ascites fluid, or serum by conventional antibody purification procedures such as, for example, affinity chromatography (e.g., using protein A or protein G-Sepharose) or ion-exchange chromatography, hydroxylapatite chromatography, gel electrophoresis, dialysis, etc.

[6488] DNA encoding the monoclonal antibodies is readily isolated and sequenced using conventional procedures (e.g., by using oligonucleotide probes that are capable of binding specifically to genes encoding the heavy and light chains of murine antibodies). The hybridoma cells serve as a preferred source of such DNA. Once isolated, the DNA may be placed into expression vectors, which are then transfected into host cells such as E. coli cells, simian COS cells, Chinese Hamster Ovary (CHO) cells, or myeloma cells that do not otherwise produce antibody protein, to obtain the synthesis of monoclonal antibodies in the recombinant host cells. Review articles on recombinant expression in bacteria of DNA encoding the antibody include Skerra et al., Curr. Opinion in Immunol., 5:256-262 (1993) and Plückthun, Immunol. Revs. 130:151-188 (1992).

[6489] In a further embodiment, monoclonal antibodies or antibody fragments can be isolated from antibody phage libraries generated using the techniques described in McCafferty et al., Nature, 348:552-554 (1990). Clackson et al., Nature, 352:624-628 (1991) and Marks et al., J. Mol. Biol., 222:581-597 (1991) describe the isolation of murine and human antibodies, respectively, using phage libraries. Subsequent publications describe the production of high affinity (nM range) human antibodies by chain shuffling (Marks et al., Bio/Technology, 10:779-783 (1992)), as well as combinatorial infection and in vivo recombination as a strategy for constructing very large phage libraries (Waterhouse et al., Nuc. Acids. Res. 21:2265-2266 (1993)). Thus, these techniques are viable alternatives to traditional monoclonal antibody hybridoma techniques for isolation of monoclonal antibodies.

[6490] The DNA that encodes the antibody may be modified to produce chimeric or fusion antibody polypeptides, for example, by substituting human heavy chain and light chain constant domain (C_{H} and C_{L}) sequences for the homologous murine sequences (U.S. Pat. No. 4,816,567; and Morrison, et al., Proc. Natl. Acad. Sci. USA, 81:6851 (1984)), or by fusing the immunoglobulin coding sequence with all or part of the coding sequence for a non-immunoglobulin polypeptide (heterologous polypeptide). The non-immunoglobulin polypeptide sequences can substitute for the constant domains of an antibody, or they are substituted for the variable domains of one antigen-combining site of an antibody to create a chimeric bivalent antibody comprising one antigen-combining site having specificity for an antigen and another antigen-combining site having specificity for a different antigen.

[6491] 3. Human and Humanized Antibodies

[6492] The anti-TAT antibodies of the invention may further comprise humanized antibodies or human antibodies. Humanized forms of non-human (e.g., murine) antibodies are chimeric immunoglobulins, immunoglobulin chains or fragments thereof (such as Pv, Fab, Fab′, F(ab′)₂ or other antigen-binding subsequences of antibodies) which contain minimal sequence derived from non-human immunoglobulin. Humanized antibodies include human immunoglobulins (recipient antibody) in which residues from a complementary determining region (CDR) of the recipient are replaced by residues from a CDR of a non-human species (donor antibody) such as mouse, rat or rabbit having the desired specificity, affinity and capacity. In some instances, Fv framework residues of the human immunoglobulin are replaced by corresponding non-human residues. Humanized antibodies may also comprise residues which are found neither in the recipient antibody nor in the imported CDR or framework sequences. In general, the humanized antibody will comprise substantially all of at least one, and typically two, variable domains, in which all or substantially all of the CDR regions correspond to those of a non-human immunoglobulin and all or substantially all of the FR regions are those of a human immunoglobulin consensus sequence. The humanized antibody optimally also will comprise at least a portion of an immunoglobulin constant region (Fc), typically that of a human immunoglobulin [Jones et al., Nature, 321:522-525 (1986); Riechmann et al., Nature, 332:323-329 (1988); and Presta, Curr. Op. Struct. Biol. 2:593-596 (1992)].

[6493] Methods for humanizing non-human antibodies are well known in the art. Generally, a humanized antibody has one or more amino acid residues introduced into it from a source which is non-human. These non-human amino acid residues are often referred to as “import” residues, which are typically taken from an “import” variable domain. Humanization can be essentially performed following the method of Winter and co-workers [Jones et al., Nature, 321:522-525 (1986); Riechmann et al., Nature, 332:323-327 (1988); Verhoeyen et al., Science, 239:1534-1536 (1988)], by substituting rodent CDRs or CDR sequences for the corresponding sequences of a human antibody. Accordingly, such “humanized” antibodies are chimeric antibodies (U.S. Pat. No. 4,816,567), wherein substantially less than an intact human variable domain has been substituted by the corresponding sequence from a non-human species. In practice, humanized antibodies are typically human antibodies in which some CDR residues and possibly some FR residues are substituted by residues from analogous sites in rodent antibodies.

[6494] The choice of human variable domains, both light and heavy, to be used in making the humanized antibodies is very important to reduce antigenicity and HAMA response (human anti-mouse antibody) when the antibody is intended for human therapeutic use. According to the so-called “best-fit” method, the sequence of the variable domain of a rodent antibody is screened against the entire library of known human variable domain sequences. The human V domain sequence which is closest to that of the rodent is identified and the human framework region (FR) within it accepted for the humanized antibody (Sims et al., J. Immunol. 151:2296 (1993); Chothia et al., J. Mol. Biol., 196:901 (1987)). Another method uses a particular framework region derived from the consensus sequence of all human antibodies of a particular subgroup of light or heavy chains. The same framework may be used for several different humanized antibodies (Carter et al., Proc. Natl. Acad. Sci. USA, 89:4285 (1992); Presta et al., J. Immunol. 151:2623 (1993)).

[6495] It is further important that antibodies be humanized with retention of high binding affinity for the antigen and other favorable biological properties. To achieve this goal, according to a preferred method, humanized antibodies are prepared by a process of analysis of the parental sequences and various conceptual humanized products using three dimensional models of the parental and humanized sequences. Three-dimensional immunoglobulin models are commonly available and are familiar to those skilled in the art. Computer programs are available which illustrate and display probable three-dimensional conformational structures of selected candidate immunoglobulin sequences. Inspection of these displays permits analysis of the likely role of the residues in the functioning of the candidate immunoglobulin sequence, i.e., the analysis of residues that influence the ability of the candidate immunoglobulin to bind its antigen. In this way, FR residues can be selected and combined from the recipient and import sequences so that the desired antibody characteristic, such as increased affinity for the target antigen(s), is achieved. In general, the hypervariable region residues are directly and most substantially involved in influencing antigen binding.

[6496] Various forms of a humanized anti-TAT antibody are contemplated. For example, the humanized antibody may be an antibody fragment, such as a Fab, which is optionally conjugated with one or more cytotoxic agent(s) in order to generate an immunoconjugate. Alternatively, the humanized antibody may be an intact antibody, such as an intact IgG1 antibody.

[6497] As an alternative to humanization, human antibodies can be generated. For example, it is now possible to produce transgenic animals (e.g., mice) that are capable, upon immunization, of producing a full repertoire of human antibodies in the absence of endogenous immunoglobulin production. For example, it has been described that the homozygous deletion of the antibody heavy-chain joining region (J_{H}) gene in chimeric and germ-line mutant mice results in complete inhibition of endogenous antibody production. Transfer of the human germ-line immunoglobulin gene array into such germ-line mutant mice will result in the production of human antibodies upon antigen challenge. See, e.g., Jakobovits et al., Proc. Natl. Acad. Sci. USA, 90:2551 (1993); Jakobovits et al., Nature, 362:255-258 (1993); Bruggemann et al., Year in Immuno. 7:33 (1993); U.S. Pat. Nos. 5,545,806, 5,569,825, 5,591,669 (all of GenPharm); U.S. Pat. No. 5,545,807; and WO 97/17852.

[6498] Alternatively, phage display technology (McCafferty et al., Nature 348:552-553 [1990]) can be used to produce human antibodies and antibody fragments in vitro, from immunoglobulin variable (V) domain gene repertoires from unimmunized donors. According to this technique, antibody V domain genes are cloned in-frame into either a major or minor coat protein gene of a filamentous bacteriophage, such as M13 or fd, and displayed as functional antibody fragments on the surface of the phage particle. Because the filamentous particle contains a single-stranded DNA copy of the phage genome, selections based on the functional properties of the antibody also result in selection of the gene encoding the antibody exhibiting those properties. Thus, the phage mimics some of the properties of the B-cell. Phage display can be performed in a variety of formats, reviewed in, e.g., Johnson, Kevin S. and Chiswell, David J., Current Opinion in Structural Biology 3:564-571 (1993). Several sources of V-gene segments can be used for phage display. Clackson et al., Nature, 352:624-628(1991) isolated a diverse array of anti-oxazolone antibodies from a small random combinatorial library of V genes derived from the spleens of immunized mice. A repertoire of V genes from unimmunized human donors can be constructed and antibodies to a diverse array of antigens (including self-antigens) can be isolated essentially following the techniques described by Marks et al., J. Mol. Biol. 222:581-597 (1991), or Griffith et al., EMBO J. 12:725-734 (1993). See, also, U.S. Pat. Nos. 5,565,332 and 5,573,905.

[6499] As discussed above, human antibodies may also be generated by in vitro activated B cells (see U.S. Pat. Nos. 5,567,610 and 5,229,275).

[6500] 4. Antibody Fragments

[6501] In certain circumstances there are advantages of using antibody fragments, rather than whole antibodies. The smaller size of the fragments allows for rapid clearance, and may lead to improved access to solid tumors.

[6502] Various techniques have been developed for the production of antibody fragments. Traditionally, these fragments were derived via proteolytic digestion of intact antibodies (see, e.g., Morimoto et al., Journal of Biochemical and Biophysical Methods 24:107-117 (1992); and Brennan et al., Science, 229:81 (1985)). However, these fragments can now be produced directly by recombinant host cells. Fab, Fv and ScFv antibody fragments can all be expressed in and secreted from E. coli, thus allowing the facile production of large amounts of these fragments. Antibody fragments can be isolated from the antibody phage libraries discussed above. Alternatively, Fab′-SH fragments can be directly recovered from E. coli and chemically coupled to form F(ab′)₂ fragments (Carter et al., Bio/Technology 10:163-167 (1992)). According to another approach, F(ab′)₂ fragments can be isolated directly from recombinant host cell culture. Fab and F(ab′)₂ fragment with increased in vivo half-life comprising a salvage receptor binding epitope residues are described in U.S. Pat. No. 5,869,046. Other techniques for the production of antibody fragments will be apparent to the skilled practitioner. In other embodiments, the antibody of choice is a single chain Fv fragment (scFv). See WO 93/16185; U.S. Pat. No. 5,571,894; and U.S. Pat. No. 5,587,458. Fv and sFv are the only species with intact combining sites that are devoid of constant regions; thus, they are suitable for reduced nonspecific binding during in vivo use. sFv fusion proteins may be constructed to yield fusion of an effector protein at either the amino or the carboxy terminus of an sFv. See Antibody Engineering, ed. Borrebaeck, supra. The antibody fragment may also be a “linear antibody”, e.g., as described in U.S. Pat. No. 5,641,870 for example. Such linear antibody fragments may be monospecific or bispecific.

[6503] 5. Bispecific Antibodies

[6504] Bispecific antibodies are antibodies that have binding specificities for at least two different epitopes. Exemplary bispecific antibodies may bind to two different epitopes of a TAT protein as described herein. Other such antibodies may combine a TAT binding site with a binding site for another protein. Alternatively, an anti-TAT arm may be combined with an arm which binds to a triggering molecule on a leukocyte such as a T-cell receptor molecule (e.g. CD3), or Fc receptors for IgG (FcγR), such as FcγRI (CD64), FcγRfII (CD32) and FcγRIII (CD16), so as to focus and localize cellular defense mechanisms to the TAT-expressing cell. Bispecific antibodies may also be used to localize cytotoxic agents to cells which express TAT. These antibodies possess a TAT-binding arm and an arm which binds the cytotoxic agent (e.g., saporin, anti-interferon-α, vinca alkaloid, ricin A chain, methotrexate or radioactive isotope hapten). Bispecific antibodies can be prepared as full length antibodies or antibody fragments (e.g., F(ab′)₂ bispecific antibodies).

[6505] WO 96/16673 describes a bispecific anti-ErbB2/anti-FcγRIII antibody and U.S. Pat. No. 5,837,234 discloses a bispecific anti-ErbB2/anti-FcγRI antibody. A bispecific anti-ErbB2/Fc α antibody is shown in WO98/02463. U.S. Pat. No. 5,821,337 teaches a bispecific anti-ErbB2/anti-CD3 antibody.

[6506] Methods for making bispecific antibodies are known in the art. Traditional production of full length bispecific antibodies is based on the co-expression of two immunoglobulin heavy chain-light chain pairs, where the two chains have different specificities (Millstein et al., Nature 305:537-539 (1983)). Because of the random assortment of immunoglobulin heavy and light chains, these hybridomas (quadromas) produce a potential mixture of 10 different antibody molecules, of which only one has the correct bispecific structure. Purification of the correct molecule, which is usually done by affinity chromatography steps, is rather cumbersome, and the product yields are low. Similar procedures are disclosed in WO 93/08829, and in Traunecker et al., EMBO J. 10:3655-3659 (1991).

[6507] According to a different approach, antibody variable domains with the desired binding specificities (antibody-antigen combining sites) are fused to immunoglobulin constant domain sequences. Preferably, the fusion is with an Ig heavy chain constant domain, comprising at least part of the hinge, C_{H}2, and C_{H}3 regions. It is preferred to have the first heavy-chain constant region (C_{H}1) containing the site necessary for light chain bonding, present in at least one of the fusions. DNAs encoding the immunoglobulin heavy chain fusions and, if desired, the immunoglobulin light chain, are inserted into separate expression vectors, and are co-transfected into a suitable host cell. This provides for greater flexibility in adjusting the mutual proportions of the three polypeptide fragments in embodiments when unequal ratios of the three polypeptide chains used in the construction provide the optimum yield of the desired bispecific antibody. It is, however, possible to insert the coding sequences for two or all three polypeptide chains into a single expression vector when the expression of at least two polypeptide chains in equal ratios results in high yields or when the ratios have no significant affect on the yield of the desired chain combination.

[6508] In a preferred embodiment of this approach, the bispecific antibodies are composed of a hybrid immunoglobulin heavy chain with a first binding specificity in one arm, and a hybrid immunoglobulin heavy chain-light chain pair (providing a second binding specificity) in the other arm. It was found that this asymmetric structure facilitates the separation of the desired bispecific compound from unwanted immunoglobulin chain combinations, as the presence of an immunoglobulin light chain in only one half of the bispecific molecule provides for a facile way of separation. This approach is disclosed in WO 94/04690. For further details of generating bispecific antibodies see, for example, Suresh et al., Methods in Enzymology 121:210 (1986).

[6509] According to another approach described in U.S. Pat. No. 5,731,168, the interface between a pair of antibody molecules can be engineered to maximize the percentage of heterodimers which are recovered from recombinant cell culture. The preferred interface comprises at least a part of the C_{H}3 domain. In this method, one or more small amino acid side chains from the interface of the first antibody molecule are replaced with larger side chains (e.g., tyrosine or tryptophan). Compensatory “cavities” of identical or similar size to the large side chain(s) are created on the interface of the second antibody molecule by replacing large amino acid side chains with smaller ones (e.g., alanine or threonine). This provides a mechanism for increasing the yield of the heterodimer over other unwanted end-products such as homodimers.

[6510] Bispecific antibodies include cross-linked or “heteroconjugate” antibodies. For example, one of the antibodies in the heteroconjugate can be coupled to avidin, the other to biotin. Such antibodies have, for example, been proposed to target immune system cells to unwanted cells (U.S. Pat. No. 4,676,980), and for treatment of HIV infection (WO 91/00360, WO 92/200373, and EP 03089). Heteroconjugate antibodies may be made using any convenient cross-linking methods. Suitable cross-liting agents are well known in the art, and are disclosed in U.S. Pat. No. 4,676,980, along with a number of cross-linking techniques.

[6511] Techniques for generating bispecific antibodies from antibody fragments have also been described in the literature. For example, bispecific antibodies can be prepared using chemical linkage. Brennan et al., Science 229:81 (1985) describe a procedure wherein intact antibodies are proteolytically cleaved to generate F(ab′)₂ fragments. These fragments are reduced in the presence of the dithiol complexing agent, sodium arsenite, to stabilize vicinal dithiols and prevent intermolecular disulfide formation. The Fab′ fragments generated are then converted to thionitrobenzoate (TNB) derivatives. One of the Fab′-TNB derivatives is then reconverted to the Fab′-thiol by reduction with mercaptoethylamine and is mixed with an equimolar amount of the other Fab′-TNB derivative to form the bispecific antibody. The bispecific antibodies produced can be used as agents for the selective immobilization of enzymes.

[6512] Recent progress has facilitated the direct recovery of Fab′-SH fragments from E. coli, which can be chemically coupled to form bispecific antibodies. Shalaby et al., J. Exp. Med. 175: 217-225 (1992) describe the production of a fully humanized bispecific antibody F(ab′)₂ molecule. Each Fab′ fragment was separately secreted from E. coli and subjected to directed chemical coupling in vitro to form the bispecific antibody. The bispecific antibody thus formed was able to bind to cells overexpressing the ErbB2 receptor and normal human T cells, as well as trigger the lytic activity of human cytotoxic lymphocytes against human breast tumor targets.

[6513] Various techniques for making and isolating bispecific antibody fragments directly from recombinant cell culture have also been described. For example, bispecific antibodies have been produced using leucine zippers. Kostelny et al., J. Immunol. 148(5):1547-1553 (1992). The leucine zipper peptides from the Fos and Jun proteins were linked to the Fab′ portions of two different antibodies by gene fusion. The antibody homodimers were reduced at the hinge region to form monomers and then re-oxidized to form the antibody heterodimers. This method can also be utilized for the production of antibody homodimers. The “diabody” technology described by Hollinger et al., Proc. Natl. Acad. Sci. USA 90:6444-6448 (1993) has provided an alternative mechanism for making bispecific antibody fragments. The fragments comprise a V_{H} connected to a V_{L} by a linker which is too short to allow pairing between the two domains on the same chain. Accordingly, the V_{H} and V_{L} domains of one fragment are forced to pair with the complementary V_{L} and V_{H} domains of another fragment, thereby forming two antigen-binding sites. Another strategy for making bispecific antibody fragments by the use of single-chain Fv (sFv) dimers has also been reported. See Gruber et al., J. Immunol., 152:5368 (1994).

[6514] Antibodies with more than two valencies are contemplated. For example, trispecific antibodies can be prepared. Tutt et al., J. Immunol. 147:60 (1991).

[6515] 6. Heteroconjugate Antibodies

[6516] Heteroconjugate antibodies are also within the scope of the present invention. Heteroconjugate antibodies are composed of two covalently joined antibodies. Such antibodies have, for example, been proposed to target immune system cells to unwanted cells [U.S. Pat. No. 4,676,980], and for treatment of HIV infection [WO 91/00360; WO 92/200373; EP 03089]. It is contemplated that the antibodies may be prepared in vitro using known methods in synthetic protein chemistry, including those involving crosslinking agents. For example, immunotoxins may be constructed using a disulfide exchange reaction or by forming a thioether bond. Examples of suitable reagents for this purpose include iminothiolate and methyl-4-mercaptobutyrimidate and those disclosed, for example, in U.S. Pat. No. 4,676,980.

[6517] 7. Multivalent Antibodies

[6518] A multivalent antibody may be internalized (and/or catabolized) faster than a bivalent antibody by a cell expressing an antigen to which the antibodies bind. The antibodies of the present invention can be multivalent antibodies (which are other than of the IgM class) with three or more antigen binding sites (e.g. tetravalent antibodies), which can be readily produced by recombinant expression of nucleic acid encoding the polypeptide chains of the antibody. The multivalent antibody can comprise a dimerization domain and three or more antigen binding sites. The preferred dimerization domain comprises (or consists of) an Fc region or a hinge region. In this scenario, the antibody will comprise an Fc region and three or more antigen binding sites amino-terminal to the Fc region. The preferred multivalent antibody herein comprises (or consists of) three to about eight, but preferably four, antigen binding sites. The multivalent antibody comprises at least one polypeptide chain (and preferably two polypeptide chains), wherein the polypeptide chain(s) comprise two or more variable domains. For instance, the polypeptide chain(s) may comprise VD1-(X1)ₙ-VD2-(X2)ₙ-Fc, wherein VD1 is a first variable domain, VD2 is a second variable domain, Fc is one polypeptide chain of an Fc region, X1 and X2 represent an amino acid or polypeptide, and n is 0 or 1. For instance, the polypeptide chain(s) may comprise: VH-CH1-flexible linker-VH-CH1-Fc region chain; or VH-CH1-VH-CH1-Fc region chain. The multivalent antibody herein preferably further comprises at least two (and preferably four) light chain variable domain polypeptides. The multivalent antibody herein may, for instance, comprise from about two to about eight light chain variable domain polypeptides. The light chain variable domain polypeptides contemplated here comprise a light chain variable domain and, optionally, further comprise a CL domain.

[6519] 8. Effector Function Engineering

[6520] It may be desirable to modify the antibody of the invention with respect to effector function, e.g., so as to enhance antigen-dependent cell-mediated cyotoxicity (ADCC) and/or complement dependent cytotoxicity (CDC) of the antibody. This may be achieved by introducing one or more amino acid substitutions in an Fc region of the antibody. Alternatively or additionally, cysteine residue(s) may be introduced in the Fc region, thereby allowing interchain disulfide bond formation in this region. The homodimeric antibody thus generated may have improved internalization capability and/or increased complement-mediated cell killing and antibody-dependent cellular cytotoxicity (ADCC). See Caron et al., J. Exp Med. 176:1191-1195 (1992) and Shopes, B. J. Immunol. 148:2918-2922 (1992). Homodimeric antibodies with enhanced anti-tumor activity may also be prepared using heterobifunctional cross-linkers as described in Wolff et al., Cancer Research 53:2560-2565 (1993). Alternatively, an antibody can be engineered which has dual Fc regions and may thereby have enhanced complement lysis and ADCC capabilities. See Stevenson et al., Anti-Cancer Drug Design 3:219-230 (1989).

[6521] To increase the serum half life of the antibody, one may incorporate a salvage receptor binding epitope into the antibody (especially an antibody fragment) as described in U.S. Pat. No. 5,739,277, for example. As used herein, the term “salvage receptor binding epitope” refers to an epitope of the Pc region of an IgG molecule (e.g., IgG₁, IgG₂, IgG₃, or IgG₄) that is responsible for increasing the in vivo serum half-life of the IgG molecule.

[6522] 9. Immunoconjugates

[6523] The invention also pertains to immunoconjugates comprising an antibody conjugated to a cytotoxic agent such as a chemotherapeutic agent, a growth inhibitory agent, a toxin (e.g., an enzymatically active toxin of bacterial, fungal, plant, or animal origin, or fragments thereof), or a radioactive isotope (i.e., a radioconjugate).

[6524] Chemotherapeutic agents useful in the generation of such immunoconjugates have been described above. Enzymatically active toxins and fragments thereof that can be used include diphtheria A chain, nonbinding active fragments of diphtheria toxin, exotoxin A chain (from Pseudomonas aeruginosa), ricin A chain, abrin A chain, modeccin A chain, alpha-sarcin, Aleurites fordii proteins, dianthin proteins, Phytolaca americana proteins (PAPI, PAPII, and PAP-S), momordica charantia inhibitor, curcin, crotin, sapaonaria officinalis inhibitor, gelonin, mitogellin, restrictocin, phenomycin, enomycin, and the tricothecenes. A variety of radionuclides are available for the production of radioconjugated antibodies. Examples include ²¹²Bi, ¹³¹I, ¹³¹In, ⁹⁰Y, and ¹⁸⁶Re. Conjugates of the antibody and cytotoxic agent are made using a variety of bifunctional protein-coupling agents such as N-succinimidyl-3-(2-pyridyldithiol) propionate (SPDP), iminothiolane (IT), bifunctional derivatives of imidoesters (such as dimethyl adipimidate HCL), active esters (such as disuccinimidyl suberate), aldehydes (such as glutareldehyde), bis-azido compounds (such as bis (p-azidobenzoyl) hexanediamine), bis-diazonium derivatives (such as bis-(p-diazoniumbenzoyl)-ethylenediamine), diisocyanates (such as tolyene 2,6-diisocyanate), and bis-active fluorine compounds (such as 1,5-difluoro-2,4-dinitrobenzene). For example, a ricin immunotoxin can be prepared as described in Vitetta et al., Science, 238: 1098 (1987). Carbon-14-labeled 1-isothiocyanatobenzyl-3-methyldiethylene triaminepentaacetic acid (MX-DTPA) is an exemplary chelating agent for conjugation of radionucleotide to the antibody. See WO94/11026.

[6525] Conjugates of an antibody and one or more small molecule toxins, such as a calicheamicin, maytansinoids, a trichothene, and CC1065, and the derivatives of these toxins that have toxin activity, are also contemplated herein.

Maytansine and Maytansinoids

[6526] In one preferred embodiment, an anti-TAT antibody (full length or fragments) of the invention is conjugated to one or more maytansinoid molecules.

[6527] Maytansinoids are mitototic inhibitors which act by inhibiting tubulin polymerization. Maytansine was first isolated from the east African shrub Maytenus serrata (U.S. Pat. No. 3,896,111). Subsequently, it was discovered that certain microbes also produce maytansinoids, such as maytansinol and C-3 maytansinol esters (U.S. Pat. No. 4,151,042). Synthetic maytansinol and derivatives and analogues thereof are disclosed, for example, in U.S. Pat. Nos. 4,137,230; 4,248,870; 4,256,746; 4,260,608; 4,265,814; 4,294,757; 4,307,016; 4,308,268; 4,308,269; 4,309,428; 4,313,946; 4,315,929; 4,317,821; 4,322,348; 4,331,598; 4,361,650; 4,364,866; 4,424,219; 4,450,254; 4,362,663; and 4,371,533, the disclosures of which are hereby expressly incorporated by reference.

Maytansinoid-Antibody Conjugates

[6528] In an attempt to improve their therapeutic index, maytansine and maytansinoids have been conjugated to antibodies specifically binding to tumor cell antigens. Immunoconjugates containing maytansinoids and their therapeutic use are disclosed, for example, in U.S. Pat. Nos. 5,208,020, 5,416,064 and European Patent EP 0 425 235 B1, the disclosures of which are hereby expressly incorporated by reference. Liu et al., Proc. Natl. Acad. Sci. USA 93:8618-8623 (1996) described immunoconjugates comprising a maytansinoid designated DM1 linked to the monoclonal antibody C242 directed against human colorectal cancer. The conjugate was found to be highly cytotoxic towards cultured colon cancer cells, and showed antitumor activity in an in vivo tumor growth assay. Chari et al., Cancer Research 52:127-131 (1992) describe immunoconjugates in which a maytansinoid was conjugated via a disulfide linker to the murine antibody A7 binding to an antigen on human colon cancer cell lines, or to another murine monoclonal antibody TA.1 that binds the HER-2/neu oncogene. The cytotoxicity of the TA.1-maytansonoid conjugate was tested in vitro on the human breast cancer cell line SK-BR-3, which expresses 3×10⁵ HER-2 surface antigens per cell. The drug conjugate achieved a degree of cytotoxicity similar to the free maytansonid drug, which could be increased by increasing the number of maytansinoid molecules per antibody molecule. The A7-maytansinoid conjugate showed low systemic cytotoxicity in mice.

Anti-TAT Polypeptide Antibody-Maytansinoid Conjugates (Immunoconjugates)

[6529] Anti-TAT antibody-maytansinoid conjugates are prepared by chemically linking an anti-TAT antibody to a maytansinoid molecule without significantly diminishing the biological activity of either the antibody or the maytansinoid molecule. An average of 3-4 maytansinoid molecules conjugated per antibody molecule has shown efficacy in enhancing cytotoxicity of target cells without negatively affecting the function or solubility of the antibody, although even one molecule of toxin/antibody would be expected to enhance cytotoxicity over the use of naked antibody. Maytansinoids are well known in the art and can be synthesized by known techniques or isolated from natural sources. Suitable maytansinoids are disclosed, for example, in U.S. Pat. No. 5,208,020 and in the other patents and nonpatent publications referred to hereinabove. Preferred maytansinoids are maytansinol and maytansinol analogues modified in the aromatic ring or at other positions of the maytansinol molecule, such as various maytansinol esters.

[6530] There are many linking groups known in the art for making antibody-maytansinoid conjugates, including, for example, those disclosed in U.S. Pat. No. 5,208,020 or EP Patent 0 425 235 B1, and Chari et al., Cancer Research 52:127-131 (1992). The linking groups include disufide groups, thioether groups, acid labile groups, photolabile groups, peptidase labile groups, or esterase labile groups, as disclosed in the above-identified patents, disulfide and thioether groups being preferred.

[6531] Conjugates of the antibody and maytansinoid may be made using a variety of bifunctional protein coupling agents such as N-succinimidyl-3-(2-pyridyldithio) propionate (SPDP), succinimidyl-4-(N-maleimidomethyl) cyclohexane-1-carboxylate, iminothiolane (IT), bifunctional derivatives of imidoesters (such as dimethyl adipimidate HCL), active esters (such as disuccinimidyl suberate), aldehydes (such as glutareldehyde), bis-azido compounds (such as bis (p-azidobenzoyl) hexanediamine), bis-diazonium derivatives (such as bis-(pdiazoniumbenzoyl)-ethylenedianine), diisocyanates (such as toluene 2,6-diisocyanate), and bis-active fluorine compounds (such as 1,5-difluoro-2,4-dinitrobenzene). Particularly preferred coupling agents include N-succinimidyl-3-(2-pyridyldithio) propionate (SPDP) (Carlsson et al., Biochem. J. 173:723-737 [1978]) and N-succinimidyl-4-(2-pyridylthio)pentanoate (SPP) to provide for a disulfide linkage.

[6532] The linker may be attached to the maytansinoid molecule at various positions, depending on the type of the link. For example, an ester linkage may be formed by reaction with a hydroxyl group using conventional coupling techniques. The reaction may occur at the C-3 position having a hydroxyl group, the C-14 position modified with hyrdoxymethyl, the C-15 position modified with a hydroxyl group, and the C-20 position having a hydroxyl group. In a preferred embodiment, the linkage is formed at the C-3 position of maytansinol or a maytansinol analogue.

Calicheamicin

[6533] Another immunoconjugate of interest comprises an anti-TAT antibody conjugated to one or more calicheamicin molecules. The calicheamicin family of antibiotics are capable of producing double-stranded DNA breaks at sub-picomolar concentrations. For the preparation of conjugates of the calicheamicin family, see U.S. Pat. Nos. 5,712,374, 5,714,586, 5,739,116, 5,767,285, 5,770,701, 5,770,710, 5,773,001, 5,877,296 (all to American Cyanamid Company). Structural analogues of calicheamicin which may be used include, but are not limited to, γ₁^{I}, α₂^{I}, α₃^{I}, N-acetyl-γ₁^{I}, PSAG and θ₁^{I} (Hinman et al., Cancer Research 53:3336-3342 (1993), Lode et al., Cancer Research 58:2925-2928 (1998) and the aforementioned U.S. patents to American Cyanamid). Another anti-tumor drug that the antibody can be conjugated is QFA which is an antifolate. Both calicheamicin and QFA have intracellular sites of action and do not readily cross the plasma membrane. Therefore, cellular uptake of these agents through antibody mediated internalization greatly enhances their cytotoxic effects.

Other Cytotoxic Agents

[6534] Other antitumor agents that can be conjugated to the anti-TAT antibodies of the invention include BCNU, streptozoicin, vincristine and 5-fluorouracil, the family of agents known collectively LL-E33288 complex described in U.S. Pat. Nos. 5,053,394, 5,770,710, as well as esperamicins (U.S. Pat. No. 5,877,296).

[6535] Enzymatically active toxins and fragments thereof which can be used include diphtheria A chain, nonbinding active fragments of diphtheria toxin, exotoxin A chain (from Pseudomonas aeruginosa), ricin A chain, abrin A chain, modeccin A chain, alpha-sarcin, Aleurites fordii proteins, dianthin proteins, Phytolaca americana proteins (PAPI, PAPII, and PAP-S), momordica charantia inhibitor, curcin, crotin, sapaonaria officinalis inhibitor, gelonin, mitogellin, restrictocin, phenomycin, enomycin and the tricothecenes. See, for example, WO 93/21232 published Oct. 28, 1993.

[6536] The present invention further contemplates an immunoconjugate formed between an antibody and a compound with nucleolytic activity (e.g., a ribonuclease or a DNA endonuclease such as a deoxyribonuclease; DNase).

[6537] For selective destruction of the tumor, the antibody may comprise a highly radioactive atom. A variety of radioactive isotopes are available for the production of radioconjugated anti-TAT antibodies. Examples include At²¹¹, I¹³¹, I¹²⁵, Y⁹⁰, Re¹⁸⁶, Re¹⁸⁸, Sm¹⁵³, Bi²¹², P³², Pb²¹² and radioactive isotopes of Lu. When the conjugate is used for diagnosis, it may comprise a radioactive atom for scintigraphic studies, for example tc^{99m} or I¹²³, or a spin label for nuclear magnetic resonance (NMR) imaging (also known as magnetic resonance imaging, mri), such as iodine-123 again, iodine-131, indium-111, fluorine-19, carbon-13, nitrogen-15, oxygen-17, gadolinium, manganese or iron.

[6538] The radio- or other labels may be incorporated in the conjugate in known ways. For example, the peptide may be biosynthesized or may be synthesized by chemical amino acid synthesis using suitable amino acid precursors involving, for example, fluorine-19 in place of hydrogen. Labels such as tc^{99m} or I¹²³, .Re¹⁸⁶, Re¹⁸⁸ and In¹¹¹ can be attached via a cysteine residue in the peptide. Yttrium-90 can be attached via a lysine residue. The IODOGEN method (Fraker et al (1978) Biochem. Biophys. Res. Commun. 80: 49-57 can be used to incorporate iodine-123. “Monoclonal Antibodies Immunoscintigraphy” (Chatal, CRC Press 1989) describes other methods in detail.

[6539] Conjugates of the antibody and cytotoxic agent may be made using a variety of bifunctional protein coupling agents such as N-succinimidyl-3-(2-pyridyldithio) propionate (SPDP), succinimidyl-4-(N-maleimidomethyl) cyclohexane-1-carboxylate, iminothiolane (IT), bifunctional derivatives of imidoesters (such as dimethyl adipimidate HCL), active esters (such as disuccinimidyl suberate), aldehydes (such as glutareldehyde), bis-azido compounds (such as bis (p-azidobenzoyl) hexanediamine), bis-diazonium derivatives (such as bis-(p-diazoniumbenzoyl)-ethylenediamine), diisocyanates (such as tolyene 2,6-diisocyanate), and bis-active fluorine compounds (such as 1,5-difluoro-2,4-dinitrobenzene). For example, a ricin immunotoxin can be prepared as described in Vitetta et al., Science 238:1098 (1987). Carbon-14-labeled 1-isothiocyanatobenzyl-3-methyldiethylene triaminepentaacetic acid (MX-DTPA) is an exemplary chelating agent for conjugation of radionucleotide to the antibody. See WO94/11026. The linker may be a “cleavable linker” facilitating release of the cytotoxic drug in the cell. For example, an acid-labile linker, peptidase-sensitive linker, photolabile linker, dimethyl linker or disulfide-containing linker (Chari et al., Cancer Research 52:127-131 (1992); U.S. Pat. No. 5,208,020) may be used.

[6540] Alternatively, a fusion protein comprising the anti-TAT antibody and cytotoxic agent may be made, e.g., by recombinant techniques or peptide synthesis. The length of DNA may comprise respective regions encoding the two portions of the conjugate either adjacent one another or separated by a region encoding a linker peptide which does not destroy the desired properties of the conjugate.

[6541] In yet another embodiment, the antibody may be conjugated to a “receptor” (such streptavidin) for utilization in tumor pre-targeting wherein the antibody-receptor conjugate is administered to the patient, followed by removal of unbound conjugate from the circulation using a clearing agent and then administration of a “ligand” (e.g., avidin) which is conjugated to a cytotoxic agent (e.g., a radionucleotide).

[6542] 10. Immunoliposomes

[6543] The anti-TAT antibodies disclosed herein may also be formulated as immunoliposomes. A “liposome” is a small vesicle composed of various types of lipids, phospholipids and/or surfactant which is useful for delivery of a drug to a mammal. The components of the liposome are commonly arranged in a bilayer formation, similar to the lipid arrangement of biological membranes. Liposomes containing the antibody are prepared by methods known in the art, such as described in Epstein et al., Proc. Natl. Acad. Sci. USA 82:3688 (1985); Hwang et al., Proc. Natl. Acad. Sci. USA 77:4030 (1980); U.S. Pat. Nos. 4,485,045 and 4,544,545; and WO97/38731 published Oct. 23, 1997. Liposomes with enhanced circulation time are disclosed in U.S. Pat. No. 5,013,556.

[6544] Particularly useful liposomes can be generated by the reverse phase evaporation method with a lipid composition comprising phosphatidylcholine, cholesterol and PEG-derivatized phosphatidylethanolamine (PEG-PE). Liposomes are extruded through filters of defined pore size to yield liposomes with the desired diameter. Fab′ fragments of the antibody of the present invention can be conjugated to the liposomes as described in Martin et al., J. Biol. Chem. 257:286-288 (1982) via a disulfide interchange reaction. A chemotherapeutic agent is optionally contained within the liposome. See Gabizon et al., J. National Cancer Inst. 81(19):1484 (1989).

[6545] B. TAT Binding Oligopeptides

[6546] TAT binding oligopeptides of the present invention are oligopeptides that bind, preferably specifically, to a TAT polypeptide as described herein. TAT binding oligopeptides may be chemically synthesized using known oligopeptide synthesis methodology or may be prepared and purified using recombinant technology. TAT binding oligopeptides are usually at least about 5 amino acids in length, alternatively at least about 6, 7, 8, 9, 10, 11, 12, 13, 14, 15, 16, 17, 18, 19, 20, 21, 22, 23, 24, 25, 26, 27, 28, 29, 30, 31, 32, 33, 34, 35, 36, 37, 38, 39, 40, 41, 42, 143, 44, 45, 46, 47, 48, 49, 50, 51, 52, 53, 54, 55, 56, 57, 58, 59, 60, 61, 62, 63, 64, 65, 66, 67, 68, 69, 70, 71, 72, 73, 74, 75, 76, 77, 78, 79, 80, 81, 82, 83, 84, 85, 86, 87, 88, 89, 90, 91, 92, 93, 94, 95, 96, 97, 98, 99, or 100 amino acids in length or more, wherein such oligopeptides that are capable of binding, preferably specifically, to a TAT polypeptide as described herein. TAT binding oligopeptides may be identified without undue experimentation using well known techniques. In this regard, it is noted that techniques for screening oligopeptide libraries for oligopeptides that are capable of specifically binding to a polypeptide target are well known in the art (see, e.g., U.S. Pat. Nos. 5,556,762, 5,750,373, 4,708,871, 4,833,092, 5,223,409, 5,403,484, 5,571,689, 5,663,143; PCT Publication Nos. WO 84/03506 and WO84/03564; Geysen et al., Proc. Natl. Acad. Sci. U.S.A., 81:3998-4002 (1984); Geysen et al., Proc. Natl. Acad. Sci. U.S.A., 82:178-182 (1985); Geysen et al., in Synthetic Peptides as Antigens, 130-149 (1986); Geysen et al., J. Immunol. Meth., 102:259-274 (1987); Schoofs et al., J. Immunol., 140:611-616 (1988), Cwirla, S. E. et al. (1990) Proc. Natl. Acad. Sci. USA, 87:6378; Lowman, H. B. et al. (1991) Biochemistry, 30:10832; Clackson, T. et al. (1991) Nature, 352: 624; Marks, J. D. et al. (1991), J. Mol. Biol., 222:581; Kang, A. S. et al. (1991) Proc. Natl. Acad. Sci. USA, 88:8363, and Smith, G. P. (1991) Current Opin. Biotechnol., 2:668).

[6547] In this regard, bacteriophage (phage) display is one well known technique which allows one to screen large oligopeptide libraries to identify member(s) of those libraries which are capable of specifically binding to a polypeptide target. Phage display is a technique by which variant polypeptides are displayed as fusion proteins to the coat protein on the surface of bacteriophage particles (Scott, J. K. and Smith, G. P. (1990) Science 249: 386). The utility of phage display lies in the fact that large libraries of selectively randomized protein variants (or randomly cloned cDNAs) can be rapidly and efficiently sorted for those sequences that bind to a target molecule with high affinity. Display of peptide (Cwirla, S. E. et al. (1990) Proc. Natl. Acad. Sci. USA, 87:6378) or protein (Lowman, H. B. et al. (1991) Biochemistry, 30:10832; Clackson, T. et al. (1991) Nature, 352: 624; Marks, J. D. et al. (1991), J. Mol. Biol., 222:581; Kang, A. S. et al. (1991) Proc. Natl. Acad. Sci. USA, 88:8363) libraries on phage have been used for screening millions of polypeptides or oligopeptides for ones with specific binding properties (Smith, G. P. (1991) Current Opin. Biotechnol., 2:668). Sorting phage libraries of random mutants requires a strategy for constructing and propagating a large number of variants, a procedure for affinity purification using the target receptor, and a means of evaluating the results of binding enrichments. U.S. Pat. Nos. 5,223,409, 5,403,484, 5,571,689, and 5,663,143.

[6548] Although most phage display methods have used filamentous phage, lambdoid phage display systems (WO 95/34683; U.S. Pat. No. 5,627,024), T4 phage display systems (Ren, Z-J. et al. (1998) Gene 215:439; Zhu, Z. (1997) CAN 33:534; Jiang, J. et al. (1997) can 128:44380; Ren, Z-J. et al. (1997) CAN 127:215644; Ren, Z-J. (1996) Protein Sci. 5:1833; Efimov, V. P. et al. (1995) Virus Genes 10:173) and T7 phage display systems (Smith, G. P. and Scott, J. K. (1993) Methods in Enzymology, 217, 228-257; U.S. Pat. No. 5,766,905) are also known.

[6549] Many other improvements and variations of the basic phage display concept have now been developed. These improvements enhance the ability of display systems to screen peptide libraries for binding to selected target molecules and to display functional proteins with the potential of screening these proteins for desired properties. Combinatorial reaction devices for phage display reactions have been developed (WO 98/14277) and phage display libraries have been used to analyze and control bimolecular interactions (WO 98/20169; WO 98/20159) and properties of constrained helical peptides (WO 98/20036). WO 97/35196 describes a method of isolating an affinity ligand in which a phage display library is contacted with one solution in which the ligand will bind to a target molecule and a second solution in which the affinity ligand will not bind to the target molecule, to selectively isolate binding ligands. WO 97/46251 describes a method of biopanning a random phage display library with an affinity purified antibody and then isolating binding phage, followed by a micropanning process using microplate wells to isolate high affinity binding phage. The use of Staphlylococcus aureus protein A as an affinity tag has also been reported (Li et al. (1998) Mol Biotech., 9:187). WO 97/47314 describes the use of substrate subtraction libraries to distinguish enzyme specificities using a combinatorial library which may be a phage display library. A method for selecting enzymes suitable for use in detergents using phage display is described in WO 97/09446. Additional methods of selecting specific binding proteins are described in U.S. Pat. Nos. 5,498,538, 5,432,018, and WO 98/15833.

[6550] Methods of generating peptide libraries and screening these libraries are also disclosed in U.S. Pat. Nos. 5,723,286, 5,432,018, 5,580,717, 5,427,908, 5,498,530, 5,770,434, 5,734,018, 5,698,426, 5,763,192, and 5,723,323.

[6551] C. TAT Binding Organic Molecules

[6552] TAT binding organic molecules are organic molecules other than oligopeptides or antibodies as defined herein that bind, preferably specifically, to a TAT polypeptide as described herein. TAT binding organic molecules may be identified and chemically synthesized using known methodology (see, e.g., PCT Publication Nos. WO00/00823 and WO00/39585). TAT binding organic molecules are usually less than about 2000 daltons in size, alternatively less than about 1500, 750, 500, 250 or 200 daltons in size, wherein such organic molecules that are capable of binding, preferably specifically, to a TAT polypeptide as described herein may be identified without undue experimentation using well known techniques. In this regard, it is noted that techniques for screening organic molecule libraries for molecules that are capable of binding to a polypeptide target are well known in the art (see, e.g., PCT Publication Nos. WO00/00823 and WO00/39585). TAT binding organic molecules may be, for example, aldehydes, ketones, oximes, hydrazones, semicarbazones, carbazides, primary amines, secondary amines, tertiary amines, N-substituted hydrazines, hydrazides, alcohols, ethers, thiols, thioethers, disulfides, carboxylic acids, esters, amides, ureas, carbamates, carbonates, ketals, thioketals, acetals, thioacetals, aryl halides, aryl sulfonates, alkyl halides, alkyl sulfonates, aromatic compounds, heterocyclic compounds, anilines, alkenes, alkynes, diols, amino alcohols, oxazolidines, oxazolines, thiazolidines, thiazolines, enamines, sulfonamides, epoxides, aziridines, isocyanates, sulfonyl chlorides, diazo compounds, acid chlorides, or the like.

[6553] D. Screening for Anti-TAT Antibodies, TAT Binding Oligopeptides and TAT Binding Organic Molecules with the Desired Properties

[6554] Techniques for generating antibodies, oligopeptides and organic molecules that bind to TAT polypeptides have been described above. One may further select antibodies, oligopeptides or other organic molecules with certain biological characteristics, as desired.

[6555] The growth inhibitory effects of an anti-TAT antibody, oligopeptide or other organic molecule of the invention may be assessed by methods known in the art, e.g., using cells which express a TAT polypeptide either endogenously or following transfection with the TAT gene. For example, appropriate tumor cell lines and TAT-transfected cells may treated with an anti-TAT monoclonal antibody, oligopeptide or other organic molecule of the invention at various concentrations for a few days (e.g., 2-7) days and stained with crystal violet or MTT or analyzed by some other colorimetric assay. Another method of measuring proliferation would be by comparing ³H-thymidine uptake by the cells treated in the presence or absence an anti-TAT antibody, TAT binding oligopeptide or TAT binding organic molecule of the invention. After treatment, the cells are harvested and the amount of radioactivity incorporated into the DNA quantitated in a scintillation counter. Appropriate positive controls include treatment of a selected cell line with a growth inhibitory antibody known to inhibit growth of that cell line. Growth inhibition of tumor cells in vivo can be determined in various ways known in the art. Preferably, the tumor cell is one that overexpresses a TAT polypeptide. Preferably, the anti-TAT antibody, TAT binding oligopeptide or TAT binding organic molecule will inhibit cell proliferation of a TAT-expressing tumor cell in vitro or in vivo by about 25-100% compared to the untreated tumor cell, more preferably, by about 30-100%, and even more preferably by about 50-100% or 70-100%, in one embodiment, at an antibody concentration of about 0.5 to 30 μg/ml. Growth inhibition can be measured at an antibody concentration of about 0.5 to 30 μg/ml or about 0.5 nM to 200 nM in cell culture, where the growth inhibition is determined 1-10 days after exposure of the tumor cells to the antibody. The antibody is growth inhibitory in vivo if administration of the anti-TAT antibody at about 1 μg/kg to about 100 mg/kg body weight results in reduction in tumor size or reduction of tumor cell proliferation within about 5 days to 3 months from the first administration of the antibody, preferably within about 5 to 30 days.

[6556] To select for an anti-TAT antibody, TAT binding oligopeptide or TAT binding organic molecule which induces cell death, loss of membrane integrity as indicated by, e.g., propidium iodide (PI), trypan blue or 7AAD uptake may be assessed relative to control. A PI uptake assay can be performed in the absence of complement and immune effector cells. TAT polypeptide-expressing tumor cells are incubated with medium alone or medium containing the appropriate anti-TAT antibody (e.g, at about 10 μg/ml), TAT binding oligopeptide or TAT binding organic molecule. The cells are incubated for a 3 day time period. Following each treatment, cells are washed and aliquoted into 35 mm strainer-capped 12×75 tubes (1 ml per tube, 3 tubes per treatment group) for removal of cell clumps. Tubes then receive PI (10 μg/ml). Samples may be analyzed using a FACSCAN® flow cytometer and FACSCONVERT® CellQuest software (Becton Dickinson). Those anti-TAT antibodies, TAT binding oligopeptides or TAT binding organic molecules that induce statistically significant levels of cell death as determined by PI uptake may be selected as cell death-inducing anti-TAT antibodies, TAT binding oligopeptides or TAT binding organic molecules.

[6557] To screen for antibodies, oligopeptides or other organic molecules which bind to an epitope on a TAT polypeptide bound by an antibody of interest, a routine cross-blocking assay such as that described in Antibodies, A Laboratory Manual, Cold Spring Harbor Laboratory, Ed Harlow and David Lane (1988), can be performed. This assay can be used to determine if a test antibody, oligopeptide or other organic molecule binds the same site or epitope as a known anti-TAT antibody. Alternatively, or additionally, epitope mapping can be performed by methods known in the art. For example, the antibody sequence can be mutagenized such as by alanine scanning, to identify contact residues. The mutant antibody is initailly tested for binding with polyclonal antibody to ensure proper folding. In a different method, peptides corresponding to different regions of a TAT polypeptide can be used in competition assays with the test antibodies or with a test antibody and an antibody with a characterized or known epitope.

[6558] E. Antibody Dependent Enzyme Mediated Prodrug Therapy (ADEPT)

[6559] The antibodies of the present invention may also be used in ADEPT by conjugating the antibody to a prodrug-activating enzyme which converts a prodrug (e.g., a peptidyl chemotherapeutic agent, see WO81/01145) to an active anti-cancer drug. See, for example, WO 88/07378 and U.S. Pat. No. 4,975,278.

[6560] The enzyme component of the immunoconjugate useful for ADEPT includes any enzyme capable of acting on a prodrug in such a way so as to covert it into its more active, cytotoxic form.

[6561] Enzymes that are useful in the method of this invention include, but are not limited to, alkaline phosphatase useful for converting phosphate-containing prodrugs into free drugs; arylsulfatase useful for converting sulfate-containing prodrugs into free drugs; cytosine deaminase useful for converting non-toxic 5-fluorocytosine into the anti-cancer drug, 5-fluorouracil; proteases, such as serratia protease, thermolysin, subtilisin, carboxypeptidases and cathepsins (such as cathepsins B and L), that are useful for converting peptide-containing prodrugs into free drugs; D-alanylcarboxypeptidases, useful for converting prodrugs that contain D-amino acid substituents; carbohydrate-cleaving enzymes such as β-galactosidase and neuraminidase useful for converting glycosylated prodrugs into free drugs; β-lactamase useful for converting drugs derivatized with β-lactams into free drugs; and penicillin amidases, such as penicillin V amidase or penicillin G amidase, useful for converting drugs derivatized at their amine nitrogens with phenoxyacetyl or phenylacetyl groups, respectively, into free drugs. Alternatively, antibodies with enzymatic activity, also known in the art as “abzymes”, can be used to convert the prodrugs of the invention into free active drugs (see, e.g., Massey, Nature 328:457-458 (1987)). Antibody-abzyme conjugates can be prepared as described herein for delivery of the abzyme to a tumor cell population.

[6562] The enzymes of this invention can be covalently bound to the anti-TAT antibodies by techniques well known in the art such as the use of the heterobifunctional crosslinking reagents discussed above. Alternatively, fusion proteins comprising at least the antigen binding region of an antibody of the invention linked to at least a functionally active portion of an enzyme of the invention can be constructed using recombinant DNA techniques well known in the art (see, e.g., Neuberger et al., Nature 312:604-608 (1984).

[6563] F. Full-Length TAT Polypeptides

[6564] The present invention also provides newly identified and isolated nucleotide sequences encoding polypeptides referred to in the present application as TAT polypeptides. In particular, cDNAs (partial and full-length) encoding various TAT polypeptides have been identified and isolated, as disclosed in further detail in the Examples below.

[6565] As disclosed in the Examples below, various cDNA clones have been deposited with the ATCC. The actual nucleotide sequences of those clones can readily be determined by the skilled artisan by sequencing of the deposited clone using routine methods in the art. The predicted amino acid sequence can be determined from the nucleotide sequence using routine skill. For the TAT polypeptides and encoding nucleic acids described herein, in some cases, Applicants have identified what is believed to be the reading frame best identifiable with the sequence information available at the time.

[6566] G. Anti-TAT Antibody and TAT Polypeptide Variants

[6567] In addition to the anti-TAT antibodies and full-length native sequence TAT polypeptides described herein, it is contemplated that anti-TAT antibody and TAT polypeptide variants can be prepared. Anti-TAT antibody and TAT polypeptide variants can be prepared by introducing appropriate nucleotide changes into the encoding DNA, and/or by synthesis of the desired antibody or polypeptide. Those skilled in the art will appreciate that amino acid changes may alter post-translational processes of the anti-TAT antibody or TAT polypeptide, such as changing the number or position of glycosylation sites or altering the membrane anchoring characteristics.

[6568] Variations in the anti-TAT antibodies and TAT polypeptides described herein, can be made, for example, using any of the techniques and guidelines for conservative and non-conservative mutations set forth, for instance, in U.S. Pat. No. 5,364,934. Variations may be a substitution, deletion or insertion of one or more codons encoding the antibody or polypeptide that results in a change in the amino acid sequence as compared with the native sequence antibody or polypeptide. Optionally the variation is by substitution of at least one amino acid with any other amino acid in one or more of the domains of the anti-TAT antibody or TAT polypeptide. Guidance in determining which amino acid residue may be inserted, substituted or deleted without adversely affecting the desired activity may be found by comparing the sequence of the anti-TAT antibody or TAT polypeptide with that of homologous known protein molecules and minimizing the number of amino acid sequence changes made in regions of high homology. Amino acid substitutions can be the result of replacing one amino acid with another amino acid having similar structural and/or chemical properties, such as the replacement of a leucine with a serine, i.e., conservative amino acid replacements. Insertions or deletions may optionally be in the range of about 1 to 5 amino acids. The variation allowed may be determined by systematically making insertions, deletions or substitutions of amino acids in the sequence and testing the resulting variants for activity exhibited by the full-length or mature native sequence.

[6569] Anti-TAT antibody and TAT polypeptide fragments are provided herein. Such fragments may be truncated at the N-terminus or C-terminus, or may lack internal residues, for example, when compared with a full length native antibody or protein. Certain fragments lack amino acid residues that are not essential for a desired biological activity of the anti-TAT antibody or TAT polypeptide.

[6570] Anti-TAT antibody and TAT polypeptide fragments may be prepared by any of a number of conventional techniques. Desired peptide fragments may be chemically synthesized. An alternative approach involves generating antibody or polypeptide fragments by enzymatic digestion, e.g., by treating the protein with an enzyme known to cleave proteins at sites defined by particular amino acid residues, or by digesting the DNA with suitable restriction enzymes and isolating the desired fragment. Yet another suitable technique involves isolating and amplifying a DNA fragment encoding a desired antibody or polypeptide fragment, by polymerase chain reaction (PCR). Oligonucleotides that define the desired termini of the DNA fragment are employed at the 5′ and 3′ primers in the PCR. Preferably, anti-TAT antibody and TAT polypeptide fragments share at least one biological and/or immunological activity with the native anti-TAT antibody or TAT polypeptide disclosed herein.

[6571] In particular embodiments, conservative substitutions of interest are shown in Table 6 under the heading of preferred substitutions. If such substitutions result in a change in biological activity, then more substantial changes, denominated exemplary substitutions in Table 6, or as further described below in reference to amino acid classes, are introduced and the products screened.

TABLE 6

| Original | Exemplary | Preferred |
|---|---|---|
| Residue | Substitutions | Substitutions |
| Ala (A) | val; leu; ile | val |
| Arg (R) | lys; gln; asn | lys |
| Asn (N) | gln; his; lys; arg | gln |
| Asp (D) | glu | glu |
| Cys (C) | ser | ser |
| Gln (Q) | asn | asn |
| Glu (E) | asp | asp |
| Gly (G) | pro; ala | ala |
| His (H) | asn; gln; lys; arg | arg |
| Ile (I) | leu; val; met; ala; phe; | leu |
| | norleucine | |
| Leu (L) | norleucine; ile; val; | ile |
| | met; ala; phe | |
| Lys (K) | arg; gln; asn | arg |
| Met (M) | leu; phe; ile | leu |
| Phe (F) | leu; val; ile; ala; tyr | leu |
| Pro (P) | ala | ala |
| Ser (S) | thr | thr |
| Thr (T) | ser | ser |
| Trp (W) | tyr; phe | tyr |
| Tyr (Y) | trp; phe; thr; ser | phe |
| Val (V) | ile; leu; met; phe; | leu |
| | ala; norleucine | |

[6572] Substantial modifications in function or immunological identity of the anti-TAT antibody or TAT polypeptide are accomplished by selecting substitutions that differ significantly in their effect on maintaining (a) the structure of the polypeptide backbone in the area of the substitution, for example, as a sheet or helical conformation, (b) the charge or hydrophobicity of the molecule at the target site, or (c) the bulk of the side chain. Naturally occurring residues are divided into groups based on common side-chain properties:

(1) hydrophobic: norleucine, met, ala, val, leu, ile;

(2) neutral hydrophilic: cys, ser, thr;

(3) acidic: asp, glu;

(4) basic: asn, gln, his, lys, arg;

(5) residues that influence chain orientation: gly, pro; and

(6) aromatic: trp, tyr, phe.

[6573] Non-conservative substitutions will entail exchanging a member of one of these classes for another class. Such substituted residues also may be introduced into the conservative substitution sites or, more preferably, into the remaining (non-conserved) sites.

[6574] The variations can be made using methods known in the art such as oligonucleotide-mediated (site-directed) mutagenesis, alanine scanning, and PCR mutagenesis. Site-directed mutagenesis [Carter et al. Nucl. Acids Res., 13:4331 (1986); Zoller et al., Nucl. Acids Res., 10:6487 (1987)], cassette mutagenesis [Wells et al., Gene, 34:315 (1985)], restriction selection mutagenesis [Wells et al., Philos. Trans. R. Soc. London SerA, 317:415 (1986)] or other known techniques can be performed on the cloned DNA to produce the anti-TAT antibody or TAT polypeptide variant DNA.

[6575] Scanning amino acid analysis can also be employed to identify one or more amino acids along a contiguous sequence. Among the preferred scanning amino acids are relatively small, neutral amino acids. Such amino acids include alanine, glycine, serine, and cysteine. Alanine is typically a preferred scanning amino acid among this group because it eliminates the side-chain beyond the beta-carbon and is less likely to alter the main-chain conformation of the variant [Cunningham and Wells, Science, 244:1081-1085 (1989)]. Alanine is also typically preferred because it is the most common amino acid. Further, it is frequently found in both buried and exposed positions [Creighton, The Proteins, (W.H. Freeman & Co., N.Y.); Chothia, J. Mol. Biol., 150:1 (1976)]. If alanine substitution does not yield adequate amounts of variant, an isoteric amino acid can be used.

[6576] Any cysteine residue not involved in maintaining the proper conformation of the anti-TAT antibody or TAT polypeptide also may be substituted, generally with serine, to improve the oxidative stability of the molecule and prevent aberrant crosslinking. Conversely, cysteine bond(s) may be added to the anti-TAT antibody or TAT polypeptide to improve its stability (particularly where the antibody is an antibody fragment such as an Fv fragment).

[6577] A particularly preferred type of substitutional variant involves substituting one or more hypervariable region residues of a parent antibody (e.g., a humanized or human antibody). Generally, the resulting variant(s) selected for further development will have improved biological properties relative to the parent antibody from which they are generated. A convenient way for generating such substitutional variants involves affinity maturation using phage display. Briefly, several hypervariable region sites (e.g., 6-7 sites) are mutated to generate all possible amino substitutions at each site. The antibody variants thus generated are displayed in a monovalent fashion from filamentous phage particles as fusions to the gene III product of M13 packaged within each particle. The phage-displayed variants are then screened for their biological activity (e.g., binding affinity) as herein disclosed. In order to identify candidate hypervariable region sites for modification, alanine scanning mutagenesis can be performed to identify hypervariable region residues contributing significantly to antigen binding. Alternatively, or additionally, it may be beneficial to analyze a crystal structure of the antigen-antibody complex to identify contact points between the antibody and human TAT polypeptide. Such contact residues and neighboring residues are candidates for substitution according to the techniques elaborated herein. Once such variants are generated, the panel of variants is subjected to screening as described herein and antibodies with superior properties in one or more relevant assays may be selected for further development.

[6578] Nucleic acid molecules encoding amino acid sequence variants of the anti-TAT antibody are prepared by a variety of methods known in the art. These methods include, but are not limited to, isolation from a natural source (in the case of naturally occurring amino acid sequence variants) or preparation by oligonucleotide-mediated (or site-directed) mutagenesis, PCR mutagenesis, and cassette mutagenesis of an earlier prepared variant or a non-variant version of the anti-TAT antibody.

[6579] H. Modifications of Anti-TAT Antibodies and TAT Polypeptides

[6580] Covalent modifications of anti-TAT antibodies and TAT polypeptides are included within the scope of this invention. One type of covalent modification includes reacting targeted amino acid residues of an anti-TAT antibody or TAT polypeptide with an organic derivatizing agent that is capable of reacting with selected side chains or the N- or C-terminal residues of the anti-TAT antibody or TAT polypeptide. Derivatization with bifunctional agents is useful, for instance, for crosslinking anti-TAT antibody or TAT polypeptide to a water-insoluble support matrix or surface for use in the method for purifying anti-TAT antibodies, and vice-versa. Commonly used crosslinking agents include, e.g., 1,1-bis(diazoacetyl)-2-phenylethane, glutaraldehyde, N-hydroxysuccinimide esters, for example, esters with 4-azidosalicylic acid, homobifunctional imidoesters, including disuccinimidyl esters such as 3,3′-dithiobis(succinidylpropionate), bifunctional maleimides such as bis-N-maleimido-1,8-octane and agents such as methyl-3-[(p-azidophenyl)dithio]propioimidate.

[6581] Other modifications include deamidation of glutaminyl and asparaginyl residues to the corresponding glutamyl and aspartyl residues, respectively, hydroxylation of proline and lysine, phosphorylation of hydroxyl groups of seryl or threonyl residues, methylation of the α-amino groups of lysine, arginine, and histidine side chains [T. E. Creighton, Proteins: Structure and Molecular Properties, W.H. Freeman & Co., San Francisco, pp. 79-86 (1983)], acetylation of the N-terminal amine, and amidation of any C-terminal carboxyl group.

[6582] Another type of covalent modification of the anti-TAT antibody or TAT polypeptide included within the scope of this invention comprises altering the native glycosylation pattern of the antibody or polypeptide. “Altering the native glycosylation pattern” is intended for purposes herein to mean deleting one or more carbohydrate moieties found in native sequence anti-TAT antibody or TAT polypeptide (either by removing the underlying glycosylation site or by deleting the glycosylation by chemical and/or enzymatic means), and/or adding one or more glycosylation sites that are not present in the native sequence anti-TAT antibody or TAT polypeptide. In addition, the phrase includes qualitative changes in the glycosylation of the native proteins, involving a change in the nature and proportions of the various carbohydrate moieties present.

[6583] Glycosylation of antibodies and other polypeptides is typically either N-linked or O-linked. N-linked refers to the attachment of the carbohydrate moiety to the side chain of an asparagine residue. The tripeptide sequences asparagine-X-serine and asparagine-X-threonine, where X is any amino acid except proline, are the recognition sequences for enzymatic attachment of the carbohydrate moiety to the asparagine side chain. Thus, the presence of either of these tripeptide sequences in a polypeptide creates a potential glycosylation site. O-linked glycosylation refers to the attachment of one of the sugars N-aceylgalactosamine, galactose, or xylose to a hydroxyamino acid, most commonly serine or threonine, although 5-hydroxyproline or 5-hydroxylysine may also be used.

[6584] Addition of glycosylation sites to the anti-TAT antibody or TAT polypeptide is conveniently accomplished by altering the amino acid sequence such that it contains one or more of the above-described tripeptide sequences (for N-linked glycosylation sites). The alteration may also be made by the addition of, or substitution by, one or more serine or threonine residues to the sequence of the original anti-TAT antibody or TAT polypeptide (for O-linked glycosylation sites). The anti-TAT antibody or TAT polypeptide amino acid sequence may optionally be altered through changes at the DNA level, particularly by mutating the DNA encoding the anti-TAT antibody or TAT polypeptide at preselected bases such that codons are generated that will translate into the desired amino acids.

[6585] Another means of increasing the number of carbohydrate moieties on the anti-TAT antibody or TAT polypeptide is by chemical or enzymatic coupling of glycosides to the polypeptide. Such methods are described in the art, e.g., in WO 87/05330 published 11 Sep. 1987, and in Aplin and Wriston, CRC Crit. Rev. Biochem., pp. 259-306 (1981).

[6586] Removal of carbohydrate moieties present on the anti-TAT antibody or TAT polypeptide may be accomplished chemically or enzymatically or by mutational substitution of codons encoding for amino acid residues that serve as targets for glycosylation. Chemical deglycosylation techniques are known in the art and described, for instance, by Hakimuddin, et al., Arch. Biochem. Biophys., 259:52 (1987) and by Edge et al., Anal. Biochem., 118:131 (1981). Enzymatic cleavage of carbohydrate moieties on polypeptides can be achieved by the use of a variety of endo- and exo-glycosidases as described by Thotakura et al., Meth. Enzymol., 138:350 (1987).

[6587] Another type of covalent modification of anti-TAT antibody or TAT polypeptide comprises linking the antibody or polypeptide to one of a variety of nonproteinaceous polymers, e.g., polyethylene glycol (PEG), polypropylene glycol, or polyoxyalkylenes, in the manner set forth in U.S. Pat. Nos. 4,640,835; 4,496,689; 4,301,144; 4,670,417; 4,791,192 or 4,179,337. The antibody or polypeptide also may be entrapped in microcapsules prepared, for example, by coacervation techniques or by interfacial polymerization (for example, hydroxymethylcellulose or gelatin-microcapsules and poly-(methylmethacylate) microcapsules, respectively), in colloidal drug delivery systems (for example, liposomes, albumin microspheres, microemulsions, nano-particles and nanocapsules), or in macroemulsions. Such techniques are disclosed in Remington's Pharmaceutical Sciences, 16th edition, Oslo, A., Ed., (1980).

[6588] The anti-TAT antibody or TAT polypeptide of the present invention may also be modified in a way to form chimeric molecules comprising an anti-TAT antibody or TAT polypeptide fused to another, heterologous polypeptide or amino acid sequence.

[6589] In one embodiment, such a chimeric molecule comprises a fusion of the anti-TAT antibody or TAT polypeptide with a tag polypeptide which provides an epitope to which an anti-tag antibody can selectively bind. The epitope tag is generally placed at the amino- or carboxyl-terminus of the anti-TAT antibody or TAT polypeptide. The presence of such epitope-tagged forms of the anti-TAT antibody or TAT polypeptide can be detected using an antibody against the tag polypeptide. Also, provision of the epitope tag enables the anti-TAT antibody or TAT polypeptide to be readily purified by affinity purification using an anti-tag antibody or another type of affinity matrix that binds to the epitope tag. Various tag polypeptides and their respective antibodies are well known in the art. Examples include poly-histidine (poly-his) or poly-histidine-glycine (poly-his-gly) tags; the flu HA tag polypeptide and its antibody 12CA5 [Field et al., Mol. Cell. Biol., 8:2159-2165 (1988)]; the c-myc tag and the 8F9, 3C7, 6E10, G4, B7 and 9E10 antibodies thereto [Evan et al., Molecular and Cellular Biology, 5:3610-3616 (1985)]; and the Herpes Simplex virus glycoprotein D (gD) tag and its antibody [Paborsky et al., Protein Engineering, 3(6):547-553 (1990)]. Other tag polypeptides include the Flag-peptide [Hopp et al., BioTechnology 6: 1204-1210 (1988)]; the KT3 epitope peptide [Martin et al., Science, 255:192-194 (1992)]; an α-tubulin epitope peptide [Skinner et al., J. Biol. Chem., 266:15163-15166 (1991)]; and the T7 gene 10 protein peptide tag [Lutz-Freyermuth et al., Proc. Natl. Acad. Sci. USA, 87:6393-6397 (1990)].

[6590] In an alternative embodiment, the chimeric molecule may comprise a fusion of the anti-TAT antibody or TAT polypeptide with an immunoglobulin or a particular region of an immunoglobulin. For a bivalent form of the chimeric molecule (also referred to as an “immunoadhesin”), such a fusion could be to the Fc region of an IgG molecule. The Ig fusions preferably include the substitution of a soluble (transmembrane domain deleted or inactivated) form of an anti-TAT antibody or TAT polypeptide in place of at least one variable region within an Ig molecule. In a particularly preferred embodiment, the immunoglobulin fusion includes the hinge, CH₂ and CH₃, or the hinge, CH₁, CH₂ and CH₃ regions of an IgG1 molecule. For the production of immunoglobulin fusions see also U.S. Pat. No. 5,428,130 issued Jun. 27, 1995.

[6591] I. Preparation of Anti-TAT Antibodies and TAT Polypeptides

[6592] The description below relates primarily to production of anti-TAT antibodies and TAT polypeptides by culturing cells transformed or transfected with a vector containing anti-TAT antibody- and TAT polypeptide-encoding nucleic acid. It is, of course, contemplated that alternative methods, which are well known in the art, may be employed to prepare anti-TAT antibodies and TAT polypeptides. For instance, the appropriate amino acid sequence, or portions thereof, may be produced by direct peptide synthesis using solid-phase techniques [see, e.g., Stewart et al., Solid-Phase Peptide Synthesis, W.H. Freeman Co., San Francisco, Calif. (1969); Merrifield, J. Am. Chem. Soc., 85:2149-2154 (1963)]. In vitro protein synthesis may be performed using manual techniques or by automation. Automated synthesis may be accomplished, for instance, using an Applied Biosystems Peptide Synthesizer (Foster City, Calif.) using manufacturer's instructions. Various portions of the anti-TAT antibody or TAT polypeptide may be chemically synthesized separately and combined using chemical or enzymatic methods to produce the desired anti-TAT antibody or TAT polypeptide.

[6593] 1. Isolation of DNA Encoding Anti-TAT Antibody or TAT Polypeptide

[6594] DNA encoding anti-TAT antibody or TAT polypeptide may be obtained from a cDNA library prepared from tissue believed to possess the anti-TAT antibody or TAT polypeptide mRNA and to express it at a detectable level. Accordingly, human anti-TAT antibody or TAT polypeptide DNA can be conveniently obtained from a cDNA library prepared from human tissue. The anti-TAT antibody- or TAT polypeptide-encoding gene may also be obtained from a genomic library or by known synthetic procedures (e.g., automated nucleic acid synthesis).

[6595] Libraries can be screened with probes (such as oligonucleotides of at least about 20-80 bases) designed to identify the gene of interest or the protein encoded by it. Screening the cDNA or genomic library with the selected probe may be conducted using standard procedures, such as described in Sambrook et al., Molecular Cloning: A Laboratory Manual (New York: Cold Spring Harbor Laboratory Press, 1989). An alternative means to isolate the gene encoding anti-TAT antibody or TAT polypeptide is to use PCR methodology [Sambrook et al., supra: Dieffenbach et al., PCR Primer: A Laboratory Manual (Cold Spring Harbor Laboratory Press, 1995)].

[6596] Techniques for screening a cDNA library are well known in the art. The oligonucleotide sequences selected as probes should be of sufficient length and sufficiently unambiguous that false positives are minimized. The oligonucleotide is preferably labeled such that it can be detected upon hybridization to DNA in the library being screened. Methods of labeling are well known in the art, and include the use of radiolabels like ³²P-labeled ATP, biotinylation or enzyme labeling. Hybridization conditions, including moderate stringency and high stringency, are provided in Sambrook et al., supra.

[6597] Sequences identified in such library screening methods can be compared and aligned to other known sequences deposited and available in public databases such as GenBank or other private sequence databases. Sequence identity (at either the amino acid or nucleotide level) within defined regions of the molecule or across the full-length sequence can be determined using methods known in the art and as described herein.

[6598] Nucleic acid having protein coding sequence may be obtained by screening selected cDNA or genomic libraries using the deduced amino acid sequence disclosed herein for the first time, and, if necessary, using conventional primer extension procedures as described in Sambrook et al., supra, to detect precursors and processing intermediates of mRNA that may not have been reverse-transcribed into cDNA.

[6599] 2. Selection and Transformation of Host Cells

[6600] Host cells are transfected or transformed with expression or cloning vectors described herein for anti-TAT antibody or TAT polypeptide production and cultured in conventional nutrient media modified as appropriate for inducing promoters, selecting transformants, or amplifying the genes encoding the desired sequences. The culture conditions, such as media, temperature, pH and the like, can be selected by the skilled artisan without undue experimentation. In general, principles, protocols, and practical techniques for maximizing the productivity of cell cultures can be found in Mammalian Cell Biotechnology: a Practical Approach, M. Butler, ed. (IRL Press, 1991) and Sambrook et al., supra.

[6601] Methods of eukaryotic cell transfection and prokaryotic cell transformation are known to the ordinarily skilled artisan, for example, CaCl₂, CaPO₄, liposome-mediated and electroporation. Depending on the host cell used, transformation is performed using standard techniques appropriate to such cells. The calcium treatment employing calcium chloride, as described in Sambrook et al., supra, or electroporation is generally used for prokaryotes. Infection with Agrobacterium tumefaciens is used for transformation of certain plant cells, as described by Shaw et al., Gene, 23:315 (1983) and WO 89/05859 published 29 Jun. 1989. For mammalian cells without such cell walls, the calcium phosphate precipitation method of Graham and van der Eb, Virology, 52:456-457 (1978) can be employed. General aspects of mammalian cell host system transfections have been described in U.S. Pat. No. 4,399,216. Transformations into yeast are typically carried out according to the method of Van Solingen et al., J. Bact., 130:946 (1977) and Hsiao et al., Proc. Natl. Acad. Sci. (USA), 76:3829 (1979). However, other methods for introducing DNA into cells, such as by nuclear microinjection, electroporation, bacterial protoplast fusion with intact cells, or polycations, e.g., polybrene, polyornithine, may also be used. For various techniques for transforming mammalian cells, see Keown et al., Methods in Enzymology, 185:527-537 (1990) and Mansour et al., Nature, 336:348-352 (1988).

[6602] Suitable host cells for cloning or expressing the DNA in the vectors herein include prokaryote, yeast, or higher eukaryote cells. Suitable prokaryotes include but are not limited to eubacteria, such as Gram-negative or Gram-positive organisms, for example, Enterobacteriaceae such as E. coli. Various E. coli strains are publicly available, such as E. coli K12 strain MM294 (ATCC 31,446); E. coli X1776 (ATCC 31,537); E. coli strain W3110 (ATCC 27,325) and K5 772 (ATCC 53,635). Other suitable prokaryotic host cells include Enterobacteriaceae such as Escherichia, e.g., E. coli, Enterobacter, Erwinia, Klebsiella, Proteus, Salmonella, e.g., Salmonella typhimurium, Serratia, e.g., Serratia marcescans, and Shigella, as well as Bacilli such as B. subtilis and B. licheniformis (e.g., B. licheniformis 41P disclosed in DD 266,710 published 12 Apr. 1989), Pseudomonas such as P. aeruginosa, and Streptomyces. These examples are illustrative rather than limiting. Strain W3110 is one particularly preferred host or parent host because it is a common host strain for recombinant DNA product fermentations. Preferably, the host cell secretes minimal amounts of proteolytic enzymes. For example, strain W3110 may be modified to effect a genetic mutation in the genes encoding proteins endogenous to the host, with examples of such hosts including E. coli W3110 strain 1A2, which has the complete genotype tonA; E. coli W3110 strain 9E4, which has the complete genotype tonA ptr3; E. coli W3110 strain 27C7 (ATCC 55,244), which has the complete genotype tonA ptr3 phoA E15 (argF-lac)169 degP ompT kan^{r}; E. coli W3110 strain 37D6, which has the complete genotype tonA ptr3 phoA E15 (argF-lac)169 degP ompT rbs7 ilvG kan^{r}; E. coli W3110 strain 40B4, which is strain 37D6 with a non-kanamycin resistant degP deletion mutation; and an E. coli strain having mutant periplasmic protease disclosed in U.S. Pat. No. 4,946,783 issued 7 Aug. 1990. Alternatively, in vitro methods of cloning, e.g., PCR or other nucleic acid polymerase reactions, are suitable.

[6603] Full length antibody, antibody fragments, and antibody fusion proteins can be produced in bacteria, in particular when glycosylation and Fc effector function are not needed, such as when the therapeutic antibody is conjugated to a cytotoxic agent (e.g., a toxin) and the immunoconjugate by itself shows effectiveness in tumor cell destruction. Full length antibodies have greater half life in circulation. Production in E. coli is faster and more cost efficient. For expression of antibody fragments and polypeptides in bacteria, see, e.g., U.S. Pat. No. 5,648,237 (Carter et. al.), U.S. Pat. No. 5,789,199 (Joly et al.), and U.S. Pat. No. 5,840,523 (Simmons et al.) which describes translation initiation regio (TIR) and signal sequences for optimizing expression and secretion, these patents incorporated herein by reference. After expression, the antibody is isolated from the E. coli cell paste in a soluble fraction and can be purified through, e.g., a protein A or G column depending on the isotype. Final purification can be carried out similar to the process for purifying antibody expressed e.g, in CHO cells.

[6604] In addition to prokaryotes, eukaryotic microbes such as filamentous fungi or yeast are suitable cloning or expression hosts for anti-TAT antibody- or TAT polypeptide-encoding vectors. Saccharomyces cerevisiae is a commonly used lower eukaryotic host microorganism. Others include Schizosaccharomyces pombe (Beach and Nurse, Nature, 290: 140 [1981]; EP 139,383 published 2 May 1985); Kluyveromyces hosts (U.S. Pat. No. 4,943,529; Fleer et al., Bio/Technology, 9:968-975 (1991)) such as, e.g., K. lactis (MW98-8C, CBS683, CBS4574; Louvencourt et al., J. Bacteriol., 154(2):737-742 [1983]), K. fragilis (ATCC 12,424), K. bulgaricus (ATCC 16,045), K. wickeramii (ATCC 24,178), K. waltii (ATCC 56,500), K. drosophilarum (ATCC 36,906; Van den Berg et al., Bio/Technology, 8:135 (1990)), K. thermotolerans, and K. marxianus; yarrowia (EP 402,226); Pichia pastoris (EP 183,070; Sreekrishna et al., J. Basic Microbiol., 28:265-278 [1988]); Candida; Trichoderma reesia (EP 244,234); Neurospora crassa (Case et al., Proc. Natl. Acad. Sci. USA, 76:5259-5263 [1979]); Schwanniomyces such as Schwanniomyces occidentalis (EP 394,538 published 31 Oct. 1990); and filamentous fungi such as, e.g., Neurospora, Penicillium, Tolypocladium (WO 91/00357 published 10 Jan. 1991), and Aspergillus hosts such as A. nidulans (Ballance et al., Biochem. Biophys. Res. Commun., 112:284-289 [1983]; Tilburn et al., Gene, 26:205-221 [1983]; Yelton et al., Proc. Natl. Acad. Sci. USA, 81: 1470-1474 [1984]) and A. niger (Kelly and Hynes, EMBO J., 4:475-479 [1985]). Methylotropic yeasts are suitable herein and include, but are not limited to, yeast capable of growth on methanol selected from the genera consisting of Hansenula, Candida, Kloeckera, Pichia, Saccharomyces, Torulopsis, and Rhodotorula. A list of specific species that are exemplary of this class of yeasts may be found in C. Anthony, The Biochemistry of Methylotrophs, 269 (1982).

[6605] Suitable host cells for the expression of glycosylated anti-TAT antibody or TAT polypeptide are derived from multicellular organisms. Examples of invertebrate cells include insect cells such as Drosophila S2 and Spodoptera Sf9, as well as plant cells, such as cell cultures of cotton, corn, potato, soybean, petunia, tomato, and tobacco. Numerous baculoviral strains and variants and corresponding permissive insect host cells from hosts such as Spodoptera frugiperda (caterpillar), Aedes aegypti (mosquito), Aedes albopictus (mosquito), Drosophila melanogaster (fruitfly), and Bombyx mori have been identified. A variety of viral strains for transfection are publicly available, e.g., the L-1 variant of Autographa californica NPV and the Bm-5 strain of Bombyx mori NPV, and such viruses may be used as the virus herein according to the present invention, particularly for transfection of Spodoptera frugiperda cells.

[6606] However, interest has been greatest in vertebrate cells, and propagation of vertebrate cells in culture (tissue culture) has become a routine procedure. Examples of useful mammalian host cell lines are monkey kidney CV1 line transformed by SV40 (COS-7, ATCC CRL 1651); human embryonic kidney line (293 or 293 cells subcloned for growth in suspension culture, Graham et al., J. Gen Virol. 36:59 (1977)); baby hamster kidney cells (BHK, ATCC CCL 10); Chinese hamster ovary cells/-DHFR (CHO, Urlaub et al., Proc. Natl. Acad. Sci. USA77:4216 (1980)); mouse sertoli cells (TM4, Mather, Biol. Reprod. 23:243-251 (1980)); monkey kidney cells (CV1 ATCC CCL 70); African green monkey kidney cells (VERO-76, ATCC CRL-1587); human cervical carcinoma cells (HELA, ATCC CCL 2); canine kidney cells (MDCK, ATCC CCL 34); buffalo rat liver cells (BRL 3A, ATCC CRL 1442); human lung cells (W138, ATCC CCL 75); human liver cells (Hep G2, HB 8065); mouse mammary tumor (MMT 060562, ATCC CCL51); TRI cells (Mather et al., Annals N.Y. Acad. Sci. 383:44-68 (1982)); MRC 5 cells; FS4 cells; and a human hepatoma line (Hep G2).

[6607] Host cells are transformed with the above-described expression or cloning vectors for anti-TAT antibody or TAT polypeptide production and cultured in conventional nutrient media modified as appropriate for inducing promoters, selecting transformants, or amplifying the genes encoding the desired sequences.

[6608] 3. Selection and Use of a Replicable Vector

[6609] The nucleic acid (e.g., cDNA or genomic DNA) encoding anti-TAT antibody or TAT polypeptide may be inserted into a replicable vector for cloning (amplification of the DNA) or for expression. Various vectors are publicly available. The vector may, for example, be in the form of a plasmid, cosmid, viral particle, or phage. The appropriate nucleic acid sequence may be inserted into the vector by a variety of procedures. In general, DNA is inserted into an appropriate restriction endonuclease site(s) using techniques known in the art. Vector components generally include, but are not limited to, one or more of a signal sequence, an origin of replication, one or more marker genes, an enhancer element, a promoter, and a transcription termination sequence. Construction of suitable vectors containing one or more of these components employs standard ligation techniques which are known to the skilled artisan.

[6610] The TAT may be produced recombinantly not only directly, but also as a fusion polypeptide with a heterologous polypeptide, which may be a signal sequence or other polypeptide having a specific cleavage site at the N-terminus of the mature protein or polypeptide. In general, the signal sequence may be a component of the vector, or it may be a part of the anti-TAT antibody- or TAT polypeptide-encoding DNA that is inserted into the vector. The signal sequence may be a prokaryotic signal sequence selected, for example, from the group of the alkaline phosphatase, penicillinase, 1pp, or heat-stable enterotoxin II leaders. For yeast secretion the signal sequence may be, e.g., the yeast invertase leader, alpha factor leader (including Saccharomyces and Kluyveromyces α-factor leaders, the latter described in U.S. Pat. No. 5,010,182), or acid phosphatase leader, the C. albicans glucoamylase leader (EP 362,179 published 4 Apr. 1990), or the signal described in WO 90/13646 published 15 Nov. 1990. In mammalian cell expression, mammalian signal sequences may be used to direct secretion of the protein, such as signal sequences from secreted polypeptides of the same or related species, as well as viral secretory leaders.

[6611] Both expression and cloning vectors contain a nucleic acid sequence that enables the vector to replicate in one or more selected host cells. Such sequences are well known for a variety of bacteria, yeast, and viruses. The origin of replication from the plasmid pBR322 is suitable for most Gram-negative bacteria, the 21 plasmid origin is suitable for yeast, and various viral origins (SV40, polyoma, adenovirus, VSV or BPV) are useful for cloning vectors in mammalian cells.

[6612] Expression and cloning vectors will typically contain a selection gene, also termed a selectable marker. Typical selection genes encode proteins that (a) confer resistance to antibiotics or other toxins, e.g., ampicillin, neomycin, methotrexate, or tetracycline, (b) complement auxotrophic deficiencies, or (c) supply critical nutrients not available from complex media, e.g., the gene encoding D-alanine racemase for Bacilli.

[6613] An example of suitable selectable markers for mammalian cells are those that enable the identification of cells competent to take up the anti-TAT antibody- or TAT polypeptide-encoding nucleic acid, such as DHFR or thymidine kinase. An appropriate host cell when wild-type DHFR is employed is the CHO cell line deficient in DHFR activity, prepared and propagated as described by Urlaub et al., Proc. Natl. Acad. Sci. USA, 77:4216 (1980). A suitable selection gene for use in yeast is the trp1 gene present in the yeast plasmid YRp7 [Stinchcomb et al., Nature, 282:39 (1979); Kingsman et al., Gene, 7:141 (1979); Tschemper et al., Gene, 10:157 (1980)]. The trp1 gene provides a selection marker for a mutant strain of yeast lacking the ability to grow in tryptophan, for example, ATCC No. 44076 or PEP4-1 [Jones, Genetics, 85:12 (1977)].

[6614] Expression and cloning vectors usually contain a promoter operably linked to the anti-TAT antibody- or TAT polypeptide-encoding nucleic acid sequence to direct mRNA synthesis. Promoters recognized by a variety of potential host cells are well known. Promoters suitable for use with prokaryotic hosts include the β-lactamase and lactose promoter systems [Chang et al., Nature, 275:615 (1978); Goeddel et al., Nature, 281:544 (1979)], alkaline phosphatase, a tryptophan (trp) promoter system [Goeddel, Nucleic Acids Res. 8:4057 (1980); EP 36,776], and hybrid promoters such as the tac promoter [deBoer et al., Proc. Natl. Acad. Sci. USA, 80:21-25 (1983)]. Promoters for use in bacterial systems also will contain a Shine-Dalgarno (S.D.) sequence operably linked to the DNA encoding anti-TAT antibody or TAT polypeptide.

[6615] Examples of suitable promoting sequences for use with yeast hosts include the promoters for 3-phosphoglycerate kinase [Hitzeman et al., J. Biol. Chem., 255:2073 (1980)] or other glycolytic enzymes [Hess et al., J. Adv. Enzyme Reg., 7:149 (1968); Holland, Biochemistry, 17:4900 (1978)], such as enolase, glyceraldehyde-3-phosphate dehydrogenase, hexokinase, pyruvate decarboxylase, phosphofructokinase, glucose-6-phosphate isomerase, 3-phosphoglycerate mutase, pyruvate kinase, triosephosphate isomerase, phosphoglucose isomerase, and glucokinase.

[6616] Other yeast promoters, which are inducible promoters having the additional advantage of transcription controlled by growth conditions, are the promoter regions for alcohol dehydrogenase 2, isocytochrome C, acid phosphatase, degradative enzymes associated with nitrogen metabolism, metallothionein, glyceraldehyde-3-phosphate dehydrogenase, and enzymes responsible for maltose and galactose utilization. Suitable vectors and promoters for use in yeast expression are further described in EP 73,657.

[6617] Anti-TAT antibody or TAT polypeptide transcription from vectors in mammalian host cells is controlled, for example, by promoters obtained from the genomes of viruses such as polyoma virus, fowlpox virus (UK 2,211,504 published 5 Jul. 1989), adenovirus (such as Adenovirus 2), bovine papilloma virus, avian sarcoma virus, cytomegalovirus, a retrovirus, hepatitis-B virus and Simian Virus 40 (SV40), from heterologous mammalian promoters, e.g., the actin promoter or an immunoglobulin promoter, and from heat-shock promoters, provided such promoters are compatible with the host cell systems.

[6618] Transcription of a DNA encoding the anti-TAT antibody or TAT polypeptide by higher eukaryotes may be increased by inserting an enhancer sequence into the vector. Enhancers are cis-acting elements of DNA, usually about from 10 to 300 bp, that act on a promoter to increase its transcription. Many enhancer sequences are now known from mammalian genes (globin, elastase, albumin, α-fetoprotein, and insulin). Typically, however, one will use an enhancer from a eukaryotic cell virus. Examples include the SV40 enhancer on the late side of the replication origin (bp 100-270), the cytomegalovirus early promoter enhancer, the polyoma enhancer on the late side of the replication origin, and adenovirus enhancers. The enhancer may be spliced into the vector at a position 5′ or 3′ to the anti-TAT antibody or TAT polypeptide coding sequence, but is preferably located at a site 5′ from the promoter.

[6619] Expression vectors used in eukaryotic host cells (yeast, fungi, insect, plant, animal, human, or nucleated cells from other multicellular organisms) will also contain sequences necessary for the termination of transcription and for stabilizing the mRNA. Such sequences are commonly available from the 5′ and, occasionally 3′, untranslated regions of eukaryotic or viral DNAs or cDNAs. These regions contain nucleotide segments transcribed as polyadenylated fragments in the untranslated portion of the mRNA encoding anti-TAT antibody or TAT polypeptide.

[6620] Still other methods, vectors, and host cells suitable for adaptation to the synthesis of anti-TAT antibody or TAT polypeptide in recombinant vertebrate cell culture are described in Gething et al., Nature, 293:620-625 (1981); Mantei et al., Nature, 281:4046 (1979); EP 117,060; and EP 117,058.

[6621] 4. Culturing the Host Cells

[6622] The host cells used to produce the anti-TAT antibody or TAT polypeptide of this invention may be cultured in a variety of media. Commercially available media such as Ham's F10 (Sigma), Minimal Essential Medium ((MEM), (Sigma), RPMI-1640 (Sigma), and Dulbecco's Modified Eagle's Medium ((DMEM), Sigma) are suitable for culturing the host cells. In addition, any of the media described in Ham et al Meth. Enz. 58:44 (1979), Barnes et al., Anal. Biochem. 102:255 (1980), U.S. Pat. Nos. 4,767,704; 4,657,866; 4,927,762; 4,560,655; or 5,122,469; WO 90/03430; WO 87/00195; or U.S. Pat. Re. 30,985 may be used as culture media for the host cells. Any of these media may be supplemented as necessary with hormones and/or other growth factors (such as insulin, transferrin, or epidermal growth factor), salts (such as sodium chloride, calcium, magnesium, and phosphate), buffers (such as HEPES), nucleotides (such as adenosine and thymidine), antibiotics (such as GENTAMYCIN™ drug), trace elements (defined as inorganic compounds usually present at final concentrations in the micromolar range), and glucose or an equivalent energy source. Any other necessary supplements may also be included at appropriate concentrations that would be known to those skilled in the art. The culture conditions, such as temperature, pH, and the like, are those previously used with the host cell selected for expression, and will be apparent to the ordinarily skilled artisan.

[6623] 5. Detecting Gene Amplification/Expression

[6624] Gene amplification and/or expression may be measured in a sample directly, for example, by conventional Southern blotting, Northern blotting to quantitate the transcription of mRNA [Thomas, Proc. Natl. Acad. Sci. USA, 77:5201-5205 (1980)], dot blotting (DNA analysis), or in situ hybridization, using an appropriately labeled probe, based on the sequences provided herein. Alternatively, antibodies may be employed that can recognize specific duplexes, including DNA duplexes, RNA duplexes, and DNA-RNA hybrid duplexes or DNA-protein duplexes. The antibodies in turn may be labeled and the assay may be carried out where the duplex is bound to a surface, so that upon the formation of duplex on the surface, the presence of antibody bound to the duplex can be detected.

[6625] Gene expression, alternatively, may be measured by immunological methods, such as immunohistochemical staining of cells or tissue sections and assay of cell culture or body fluids, to quantitate directly the expression of gene product. Antibodies useful for immunohistochemical staining and/or assay of sample fluids may be either monoclonal or polyclonal, and may be prepared in any mammal. Conveniently, the antibodies may be prepared against a native sequence TAT polypeptide or against a synthetic peptide based on the DNA sequences provided herein or against exogenous sequence fused to TAT DNA and encoding a specific antibody epitope.

[6626] 6. Purification of Anti-TAT Antibody and TAT Polypeptide

[6627] Forms of anti-TAT antibody and TAT polypeptide may be recovered from culture medium or from host cell lysates. If membrane-bound, it can be released from the membrane using a suitable detergent solution (e.g. Triton-X 100) or by enzymatic cleavage. Cells employed in expression of anti-TAT antibody and TAT polypeptide can be disrupted by various physical or chemical means, such as freeze-thaw cycling, sonication, mechanical disruption, or cell lysing agents.

[6628] It may be desired to purify anti-TAT antibody and TAT polypeptide from recombinant cell proteins or polypeptides. The following procedures are exemplary of suitable purification procedures: by fractionation on an ion-exchange column; ethanol precipitation; reverse phase HPLC; chromatography on silica or on a cation-exchange resin such as DEAE; chromatofocusing; SDS-PAGE; ammonium sulfate precipitation; gel filtration using, for example, Sephadex G-75; protein A Sepharose columns to remove contaminants such as IgG; and metal chelating columns to bind epitope-tagged forms of the anti-TAT antibody and TAT polypeptide. Various methods of protein purification may be employed and such methods are known in the art and described for example in Deutscher, Methods in Enzymology, 182 (1990); Scopes, Protein Purification: Principles and Practice, Springer-Verlag, New York (1982). The purification step(s) selected will depend, for example, on the nature of the production process used and the particular anti-TAT antibody or TAT polypeptide produced.

[6629] When using recombinant techniques, the antibody can be produced intracellularly, in the periplasmic space, or directly secreted into the medium. If the antibody is produced intracellularly, as a first step, the particulate debris, either host cells or lysed fragments, are removed, for example, by centrifugation or ultrafiltration. Carter et al., Bio/Technology 10:163-167 (1992) describe a procedure for isolating antibodies which are secreted to the periplasmic space of E. coli. Briefly, cell paste is thawed in the presence of sodium acetate (pH 3.5), EDTA, and phenylmethylsulfonylfluoride (PMSF) over about 30 min. Cell debris can be removed by centrifugation. Where the antibody is secreted into the medium, supernatants from such expression systems are generally first concentrated using a commercially available protein concentration filter, for example, an Amicon or Millipore Pellicon ultrafiltration unit. A protease inhibitor such as PMSF may be included in any of the foregoing steps to inhibit proteolysis and antibiotics may be included to prevent the growth of adventitious contaminants.

[6630] The antibody composition prepared from the cells can be purified using, for example, hydroxylapatite chromatography, gel electrophoresis, dialysis, and affinity chromatography, with affinity chromatography being the preferred purification technique. The suitability of protein A as an affinity ligand depends on the species and isotype of any immunoglobulin Fc domain that is present in the antibody. Protein A can be used to purify antibodies that are based on human γ1, γ2 or γ4 heavy chains (Lindmark et al., J. Immunol. Meth. 62:1-13 (1983)). Protein G is recommended for all mouse isotypes and for human γ3 (Guss et al., EMBO J. 5:15671575 (1986)). The matrix to which the affinity ligand is attached is most often agarose, but other matrices are available. Mechanically stable matrices such as controlled pore glass or poly(styrenedivinyl)benzene allow for faster flow rates and shorter processing times than can be achieved with agarose. Where the antibody comprises a C_{H}3 domain, the Bakerbond ABX™ resin (J. T. Baker, Phillipsburg, N.J.) is useful for purification. Other techniques for protein purification such as fractionation on an ion-exchange column, ethanol precipitation, Reverse Phase HPLC, chromatography on silica, chromatography on heparin SEPHAROSE™ chromatography on an anion or cation exchange resin (such as a polyaspartic acid column), chromatofocusing, SDS-PAGE, and ammonium sulfate precipitation are also available depending on the antibody to be recovered.

[6631] Following any preliminary purification step(s), the mixture comprising the antibody of interest and contaminants may be subjected to low pH hydrophobic interaction chromatography using an elution buffer at a pH between about 2.5-4.5, preferably performed at low salt concentrations (e.g., from about 0-0.25M salt).

[6632] J. Pharmaceutical Formulations

[6633] Therapeutic formulations of the anti-TAT antibodies, TAT binding oligopeptides, TAT binding organic molecules and/or TAT polypeptides used in accordance with the present invention are prepared for storage by mixing the antibody, polypeptide, oligopeptide or organic molecule having the desired degree of purity with optional pharmaceutically acceptable carriers, excipients or stabilizers (Remington's Pharmaceutical Sciences 16th edition, Osol, A. Ed. (1980)), in the form of lyophilized formulations or aqueous solutions. Acceptable carriers, excipients, or stabilizers are nontoxic to recipients at the dosages and concentrations employed, and include buffers such as acetate, Tris, phosphate, citrate, and other organic acids; antioxidants including ascorbic acid and methionine; preservatives (such as octadecyldimethylbenzyl ammonium chloride; hexamethonium chloride; benzalkonium chloride, benzethonium chloride; phenol, butyl or benzyl alcohol; alkyl parabens such as methyl or propyl paraben; catechol; resorcinol; cyclohexanol; 3-pentanol; and m-cresol); low molecular weight (less than about 10 residues) polypeptides; proteins, such as serum albumin, gelatin, or immunoglobulins; hydrophilic polymers such as polyvinylpyrrolidone; amino acids such as glycine, glutamine, asparagine, histidine, arginine, or lysine; monosaccharides, disaccharides, and other carbohydrates including glucose, mannose, or dextrins; chelating agents such as EDTA; tonicifiers such as trehalose and sodium chloride; sugars such as sucrose, mannitol, trehalose or sorbitol; surfactant such as polysorbate; salt-forming counter-ions such as sodium; metal complexes (e.g., Zn-protein complexes); and/or non-ionic surfactants such as TWEEN®, PLURONICS® or polyethylene glycol (PEG). The antibody preferably comprises the antibody at a concentration of between 5-200 mg/ml, preferably between 10-100 mg/ml.

[6634] The formulations herein may also contain more than one active compound as necessary for the particular indication being treated, preferably those with complementary activities that do not adversely affect each other. For example, in addition to an anti-TAT antibody, TAT binding oligopeptide, or TAT binding organic molecule, it may be desirable to include in the one formulation, an additional antibody, e.g., a second anti-TAT antibody which binds a different epitope on the TAT polypeptide, or an antibody to some other target such as a growth factor that affects the growth of the particular cancer. Alternatively, or additionally, the composition may further comprise a chemotherapeutic agent, cytotoxic agent, cytokine, growth inhibitory agent, anti-hormonal agent, and/or cardioprotectant. Such molecules are suitably present in combination in amounts that are effective for the purpose intended.

[6635] The active ingredients may also be entrapped in microcapsules prepared, for example, by coacervation techniques or by interfacial polymerization, for example, hydroxymethylcellulose or gelatin-microcapsules and poly-(methylmethacylate) microcapsules, respectively, in colloidal drug delivery systems (for example, liposomes, albumin microspheres, microemulsions, nano-particles and nanocapsules) or in macroemulsions. Such techniques are disclosed in Remington's Pharmaceutical Sciences, 16th edition, Osol, A. Ed. (1980).

[6636] Sustained-release preparations may be prepared. Suitable examples of sustained-release preparations include semi-permeable matrices of solid hydrophobic polymers containing the antibody, which matrices are in the form of shaped articles, e.g., films, or microcapsules. Examples of sustained-release matrices include polyesters, hydrogels (for example, poly(2-hydroxyethyl-methacrylate), or poly(vinylalcohol)), polylactides (U.S. Pat. No. 3,773,919), copolymers of L-glutamic acid and γ ethyl-L-glutamate, non-degradable ethylene-vinyl acetate, degradable lactic acid-glycolic acid copolymers such as the LUPRON DEPOT® (injectable microspheres composed of lactic acid-glycolic acid copolymer and leuprolide acetate), and poly-D-(−)-3-hydroxybutyric acid.

[6637] The formulations to be used for in vivo administration must be sterile. This is readily accomplished by filtration through sterile filtration membranes.

[6638] K. Diagnosis and Treatment with Anti-TAT Antibodies, TAT Binding Oligopeptides and TAT Binding Organic Molecules

[6639] To determine TAT expression in the cancer, various diagnostic assays are available. In one embodiment, TAT polypeptide overexpression may be analyzed by immunohistochemistry (IHC). Parrafin embedded tissue sections from a tumor biopsy may be subjected to the IHC assay and accorded a TAT protein staining intensity criteria as follows:

[6640] Score 0—no staining is observed or membrane staining is observed in less than 10% of tumor cells.

[6641] Score 1+—a faint/barely perceptible membrane staining is detected in more than 10% of the tumor cells. The cells are only stained in part of their membrane.

[6642] Score 2+—a weak to moderate complete membrane staining is observed in more than 10% of the tumor cells.

[6643] Score 3+—a moderate to strong complete membrane staining is observed in more than 10% of the tumor cells.

[6644] Those tumors with 0 or 1+ scores for TAT polypeptide expression may be characterized as not overexpressing TAT, whereas those tumors with 2+ or 3+ scores may be characterized as overexpressing TAT.

[6645] Alternatively, or additionally, FISH assays such as the INFORM® (sold by Ventana, Ariz.) or PATHVISION® (Vysis, Illinois) may be carried out on formalin-fixed, paraffin-embedded tumor tissue to determine the extent (if any) of TAT overexpression in the tumor.

[6646] TAT overexpression or amplification may be evaluated using an in vivo diagnostic assay, e.g., by administering a molecule (such as an antibody, oligopeptide or organic molecule) which binds the molecule to be detected and is tagged with a detectable label (e.g., a radioactive isotope or a fluorescent label) and externally scanning the patient for localization of the label.

[6647] As described above, the anti-TAT antibodies, oligopeptides and organic molecules of the invention have various non-therapeutic applications. The anti-TAT antibodies, oligopeptides and organic molecules of the present invention can be useful for diagnosis and staging of TAT polypeptide-expressing cancers (e.g., in radioimaging). The antibodies, oligopeptides and organic molecules are also useful for purification or immunoprecipitation of TAT polypeptide from cells, for detection and quantitation of TAT polypeptide in vitro, e.g., in an ELISA or a Western blot, to kill and eliminate TAT-expressing cells from a population of mixed cells as a step in the purification of other cells.

[6648] Currently, depending on the stage of the cancer, cancer treatment involves one or a combination of the following therapies: surgery to remove the cancerous tissue, radiation therapy, and chemotherapy. Anti-TAT antibody, oligopeptide or organic molecule therapy may be especially desirable in elderly patients who do not tolerate the toxicity and side effects of chemotherapy well and in metastatic disease where radiation therapy has limited usefulness. The tumor targeting anti-TAT antibodies, oligopeptides and organic molecules of the invention are useful to alleviate TAT-expressing cancers upon initial diagnosis of the disease or during relapse. For therapeutic applications, the anti-TAT antibody, oligopeptide or organic molecule can be used alone, or in combination therapy with, e.g., hormones, antiangiogens, or radiolabelled compounds, or with surgery, cryotherapy, and/or radiotherapy. Anti-TAT antibody, oligopeptide or organic molecule treatment can be administered in conjunction with other forms of conventional therapy, either consecutively with, pre- or post-conventional therapy. Chemotherapeutic drugs such as TAXOTERE® (docetaxel), TAXOL® (palictaxel), estramustine and mitoxantrone are used in treating cancer, in particular, in good risk patients. In the present method of the invention for treating or alleviating cancer, the cancer patient can be administered anti-TAT antibody, oligopeptide or organic molecule in conduction with treatment with the one or more of the preceding chemotherapeutic agents. In particular, combination therapy with palictaxel and modified derivatives (see, e.g., EP0600517) is contemplated. The anti-TAT antibody, oligopeptide or organic molecule will be administered with a therapeutically effective dose of the chemotherapeutic agent. In another embodiment, the anti-TAT antibody, oligopeptide or organic molecule is administered in conjunction with chemotherapy to enhance the activity and efficacy of the chemotherapeutic agent, e.g., paclitaxel. The Physicians' Desk Reference (PDR) discloses dosages of these agents that have been used in treatment of various cancers. The dosing regimen and dosages of these aforementioned chemotherapeutic drugs that are therapeutically effective will depend on the particular cancer being treated, the extent of the disease and other factors familiar to the physician of skill in the art and can be determined by the physician.

[6649] In one particular embodiment, a conjugate comprising an anti-TAT antibody, oligopeptide or organic molecule conjugated with a cytotoxic agent is administered to the patient. Preferably, the immunoconjugate bound to the TAT protein is internalized by the cell, resulting in increased therapeutic efficacy of the immunoconjugate in killing the cancer cell to which it binds. In a preferred embodiment, the cytotoxic agent targets or interferes with the nucleic acid in the cancer cell. Examples of such cytotoxic agents are described above and include maytansinoids, calicheamicins, ribonucleases and DNA endonucleases.

[6650] The anti-TAT antibodies, oligopeptides, organic molecules or toxin conjugates thereof are administered to a human patient, in accord with known methods, such as intravenous administration, e.g., as a bolus or by continuous infusion over a period of time, by intramuscular, intraperitoneal, intracerobrospinal, subcutaneous, intra-articular, intrasynovial, intrathecal, oral, topical, or inhalation routes. Intravenous or subcutaneous administration of the antibody, oligopeptide or organic molecule is preferred.

[6651] Other therapeutic regimens may be combined with the administration of the anti-TAT antibody, oligopeptide or organic molecule. The combined administration includes co-administration, using separate formulations or a single pharmaceutical formulation, and consecutive administration in either order, wherein preferably there is a time period while both (or all) active agents simultaneously exert their biological activities. Preferably such combined therapy results in a synergistic therapeutic effect.

[6652] It may also be desirable to combine administration of the anti-TAT antibody or antibodies, oligopeptides or organic molecules, with administration of an antibody directed against another tumor antigen associated with the particular cancer.

[6653] In another embodiment, the therapeutic treatment methods of the present invention involves the combined administration of an anti-TAT antibody (or antibodies), oligopeptides or organic molecules and one or more chemotherapeutic agents or growth inhibitory agents, including co-administration of cocktails of different chemotherapeutic agents. Chemotherapeutic agents include estramustine phosphate, prednimustine, cisplatin, 5-fluorouracil, melphalan, cyclophosphamide, hydroxyurea and hydroxyureataxanes (such as paclitaxel and doxetaxel) and/or anthracycline antibiotics. Preparation and dosing schedules for such chemotherapeutic agents may be used according to manufacturers' instructions or as determined empirically by the skilled practitioner. Preparation and dosing schedules for such chemotherapy are also described in Chemotherapy Service Ed., M. C. Perry, Williams & Wilkins, Baltimore, Md. (1992).

[6654] The antibody, oligopeptide or organic molecule may be combined with an anti-hormonal compound; e.g., an anti-estrogen compound such as tamoxifen; an anti-progesterone such as onapristone (see, EP 616 812); or an anti-androgen such as flutamide, in dosages known for such molecules. Where the cancer to be treated is androgen independent cancer, the patient may previously have been subjected to anti-androgen therapy and, after the cancer becomes androgen independent, the anti-TAT antibody, oligopeptide or organic molecule (and optionally other agents as described herein) may be administered to the patient.

[6655] Sometimes, it may be beneficial to also co-administer a cardioprotectant (to prevent or reduce myocardial dysfunction associated with the therapy) or one or more cytokines to the patient. In addition to the above therapeutic regimes, the patient may be subjected to surgical removal of cancer cells and/or radiation therapy, before, simultaneously with, or post antibody, oligopeptide or organic molecule therapy. Suitable dosages for any of the above co-administered agents are those presently used and may be lowered due to the combined action (synergy) of the agent and anti-TAT antibody, oligopeptide or organic molecule.

[6656] For the prevention or treatment of disease, the dosage and mode of administration will be chosen by the physician according to known criteria. The appropriate dosage of antibody, oligopeptide or organic molecule will depend on the type of disease to be treated, as defined above, the severity and course of the disease, whether the antibody, oligopeptide or organic molecule is administered for preventive or therapeutic purposes, previous therapy, the patient's clinical history and response to the antibody, oligopeptide or organic molecule, and the discretion of the attending physician. The antibody, oligopeptide or organic molecule is suitably administered to the patient at one time or over a series of treatments. Preferably, the antibody, oligopeptide or organic molecule is administered by intravenous infusion or by subcutaneous injections. Depending on the type and severity of the disease, about 1 μg/kg to about 50 mg/kg body weight (e.g., about 0.1-15 mg/kg/dose) of antibody can be an initial candidate dosage for administration to the patient, whether, for example, by one or more separate administrations, or by continuous infusion. A dosing regimen can comprise administering an initial loading dose of about 4 mg/kg, followed by a weekly maintenance dose of about 2 mg/kg of the anti-TAT antibody. However, other dosage regimens may be useful. A typical daily dosage might range from about 1 μg/kg to 100 mg/kg or more, depending on the factors mentioned above. For repeated administrations over several days or longer, depending on the condition, the treatment is sustained until a desired suppression of disease symptoms occurs. The progress of this therapy can be readily monitored by conventional methods and assays and based on criteria known to the physician or other persons of skill in the art.

[6657] Aside from administration of the antibody protein to the patient, the present application contemplates administration of the antibody by gene therapy. Such administration of nucleic acid encoding the antibody is encompassed by the expression “administering a therapeutically effective amount of an antibody”. See, for example, WO96/07321 published Mar. 14, 1996 concerning the use of gene therapy to generate intracellular antibodies.

[6658] There are two major approaches to getting the nucleic acid (optionally contained in a vector) into the patient's cells; in vivo and ex vivo. For in vivo delivery the nucleic acid is injected directly into the patient, usually at the site where the antibody is required. For ex vivo treatment, the patient's cells are removed, the nucleic acid is introduced into these isolated cells and the modified cells are administered to the patient either directly or, for example, encapsulated within porous membranes which are implanted into the patient (see, e.g., U.S. Pat. Nos. 4,892,538 and 5,283,187). There are a variety of techniques available for introducing nucleic acids into viable cells. The techniques vary depending upon whether the nucleic acid is transferred into cultured cells in vitro, or in vivo in the cells of the intended host. Techniques suitable for the transfer of nucleic acid into mammalian cells in vitro include the use of liposomes, electroporation, microinjection, cell fusion, DEAE-dextran, the calcium phosphate precipitation method, etc. A commonly used vector for ex vivo delivery of the gene is a retroviral vector.

[6659] The currently preferred in vivo nucleic acid transfer techniques include transfection with viral vectors (such as adenovirus, Herpes simplex I virus, or adeno-associated virus) and lipid-based systems (useful lipids for lipid-mediated transfer of the gene are DOTMA, DOPE and DC-Chol, for example). For review of the currently known gene marking and gene therapy protocols see Anderson et al., Science 256:808-813 (1992). See also WO 93/25673 and the references cited therein.

[6660] The anti-TAT antibodies of the invention can be in the different forms encompassed by the definition of “antibody” herein. Thus, the antibodies include full length or intact antibody, antibody fragments, native sequence antibody or amino acid variants, humanized, chimeric or fusion antibodies, immunoconjugates, and functional fragments thereof. In fusion antibodies an antibody sequence is fused to a heterologous polypeptide sequence. The antibodies can be modified in the Fc region to provide desired effector functions. As discussed in more detail in the sections herein, with the appropriate Fc regions, the naked antibody bound on the cell surface can induce cytotoxicity, e.g., via antibody-dependent cellular cytotoxicity (ADCC) or by recruiting complement in complement dependent cytotoxicity, or some other mechanism. Alternatively, where it is desirable to eliminate or reduce effector function, so as to minimize side effects or therapeutic complications, certain other Fc regions may be used.

[6661] In one embodiment, the antibody competes for binding or bind substantially to, the same epitope as the antibodies of the invention. Antibodies having the biological characteristics of the present anti-TAT antibodies of the invention are also contemplated, specifically including the in vivo tumor targeting and any cell proliferation inhibition or cytotoxic characteristics.

[6662] Methods of producing the above antibodies are described in detail herein.

[6663] The present anti-TAT antibodies, oligopeptides and organic molecules are useful for treating a TAT-expressing cancer or alleviating one or more symptoms of the cancer in a mammal. Such a cancer includes prostate cancer, cancer of the urinary tract, lung cancer, breast cancer, colon cancer and ovarian cancer, more specifically, prostate adenocarcinoma, renal cell carcinomas, colorectal adenocarcinomas, lung adenocarcinomas, lung squamous cell carcinomas, and pleural mesothelioma. The cancers encompass metastatic cancers of any of the preceding. The antibody, oligopeptide or organic molecule is able to bind to at least a portion of the cancer cells that express TAT polypeptide in the mammal. In a preferred embodiment, the antibody, oligopeptide or organic molecule is effective to destroy or kill TAT-expressing tumor cells or inhibit the growth of such tumor cells, in vitro or in vivo, upon binding to TAT polypeptide on the cell. Such an antibody includes a naked anti-TAT antibody (not conjugated to any agent). Naked antibodies that have cytotoxic or cell growth inhibition properties can be further harnessed with a cytotoxic agent to render them even more potent in tumor cell destruction. Cytotoxic properties can be conferred to an anti-TAT antibody by, e.g., conjugating the antibody with a cytotoxic agent, to form an immunoconjugate as described herein. The cytotoxic agent or a growth inhibitory agent is preferably a small molecule. Toxins such as calicheamicin or a maytansinoid and analogs or derivatives thereof, are preferable.

[6664] The invention provides a composition comprising an anti-TAT antibody, oligopeptide or organic molecule of the invention, and a carrier. For the purposes of treating cancer, compositions can be administered to the patient in need of such treatment, wherein the composition can comprise one or more anti-TAT antibodies present as an immunoconjugate or as the naked antibody. In a further embodiment, the compositions can comprise these antibodies, oligopeptides or organic molecules in combination with other therapeutic agents such as cytotoxic or growth inhibitory agents, including chemotherapeutic agents. The invention also provides formulations comprising an anti-TAT antibody, oligopeptide or organic molecule of the invention, and a carrier. In one embodiment, the formulation is a therapeutic formulation comprising a pharmaceutically acceptable carrier.

[6665] Another aspect of the invention is isolated nucleic acids encoding the anti-TAT antibodies. Nucleic acids encoding both the H and L chains and especially the hypervariable region residues, chains which encode the native sequence antibody as well as variants, modifications and humanized versions of the antibody, are encompassed.

[6666] The invention also provides methods useful for treating a TAT polypeptide-expressing cancer or alleviating one or more symptoms of the cancer in a mammal, comprising administering a therapeutically effective amount of an anti-TAT antibody, oligopeptide or organic molecule to the mammal. The antibody, oligopeptide or organic molecule therapeutic compositions can be administered short term (acute) or chronic, or intermittent as directed by physician. Also provided are methods of inhibiting the growth of, and killing a TAT polypeptide-expressing cell.

[6667] The invention also provides kits and articles of manufacture comprising at least one anti-TAT antibody, oligopeptide or organic molecule. Kits containing anti-TAT antibodies, oligopeptides or organic molecules find use, e.g., for TAT cell killing assays, for purification or immunoprecipitation of TAT polypeptide from cells. For example, for isolation and purification of TAT, the kit can contain an anti-TAT antibody, oligopeptide or organic molecule coupled to beads (e.g., sepharose beads). Kits can be provided which contain the antibodies, oligopeptides or organic molecules for detection and quantitation of TAT in vitro, e.g., in an ELISA or a Western blot. Such antibody, oligopeptide or organic molecule useful for detection may be provided with a label such as a fluorescent or radiolabel.

[6668] L. Articles of Manufacture and Kits

[6669] Another embodiment of the invention is an article of manufacture containing materials useful for the treatment of anti-TAT expressing cancer. The article of manufacture comprises a container and a label or package insert on or associated with the container. Suitable containers include, for example, bottles, vials, syringes, etc. The containers may be formed from a variety of materials such as glass or plastic. The container holds a composition which is effective for treating the cancer condition and may have a sterile access port (for example the container may be an intravenous solution bag or a vial having a stopper pierceable by a hypodermic injection needle). At least one active agent in the composition is an anti-TAT antibody, oligopeptide or organic molecule of the invention. The label or package insert indicates that the composition is used for treating cancer. The label or package insert will further comprise instructions for administering the antibody, oligopeptide or organic molecule composition to the cancer patient. Additionally, the article of manufacture may further comprise a second container comprising a pharmaceutically-acceptable buffer, such as bacteriostatic water for injection (BWFI), phosphate-buffered saline, Ringer's solution and dextrose solution. It may further include other materials desirable from a commercial and user standpoint, including other buffers, diluents, filters, needles, and syringes.

[6670] Kits are also provided that are useful for various purposes, e.g., for TAT-expressing cell killing assays, for purification or immunoprecipitation of TAT polypeptide from cells. For isolation and purification of TAT polypeptide, the kit can contain an anti-TAT antibody, oligopeptide or organic molecule coupled to beads (e.g., sepharose beads). Kits can be provided which contain the antibodies, oligopeptides or organic molecules for detection and quantitation of TAT polypeptide in vitro, e.g., in an ELISA or a Western blot. As with the article of manufacture, the kit comprises a container and a label or package insert on or associated with the container. The container holds a composition comprising at least one anti-TAT antibody, oligopeptide or organic molecule of the invention. Additional containers may be included that contain, e.g., diluents and buffers, control antibodies. The label or package insert may provide a description of the composition as well as instructions for the intended in vitro or diagnostic use.

[6671] M. Uses for TAT Polypeptides and TAT-Polypeptide Encoding Nucleic Acids

[6672] Nucleotide sequences (or their complement) encoding TAT polypeptides have various applications in the art of molecular biology, including uses as hybridization probes, in chromosome and gene mapping and in the generation of anti-sense RNA and DNA probes. TAT-encoding nucleic acid will also be useful for the preparation of TAT polypeptides by the recombinant techniques described herein, wherein those TAT polypeptides may find use, for example, in the preparation of anti-TAT antibodies as described herein.

[6673] The full-length native sequence TAT gene, or portions thereof, may be used as hybridization probes for a cDNA library to isolate the full-length TAT cDNA or to isolate still other cDNAs (for instance, those encoding naturally-occurring variants of TAT or TAT from other species) which have a desired sequence identity to the native TAT sequence disclosed herein. Optionally, the length of the probes will be about 20 to about 50 bases. The hybridization probes may be derived from at least partially novel regions of the full length native nucleotide sequence wherein those regions may be determined without undue experimentation or from genomic sequences including promoters, enhancer elements and introns of native sequence TAT. By way of example, a screening method will comprise isolating the coding region of the TAT gene using the known DNA sequence to synthesize a selected probe of about 40 bases. Hybridization probes may be labeled by a variety of labels, including radionucleotides such as ³²P or ³⁵S, or enzymatic labels such as alkaline phosphatase coupled to the probe via avidin/biotin coupling systems. Labeled probes having a sequence complementary to that of the TAT gene of the present invention can be used to screen libraries of human cDNA, genomic DNA or mRNA to determine which members of such libraries the probe hybridizes to. Hybridization techniques are described in further detail in the Examples below. Any EST sequences disclosed in the present application may similarly be employed as probes, using the methods disclosed herein.

[6674] Other useful fragments of the TAT-encoding nucleic acids include antisense or sense oligonucleotides comprising a singe-stranded nucleic acid sequence (either RNA or DNA) capable of binding to target TAT mRNA (sense) or TAT DNA (antisense) sequences. Antisense or sense oligonucleotides, according to the present invention, comprise a fragment of the coding region of TAT DNA. Such a fragment generally comprises at least about 14 nucleotides, preferably from about 14 to 30 nucleotides. The ability to derive an antisense or a sense oligonucleotide, based upon a cDNA sequence encoding a given protein is described in, for example, Stein and Cohen (Cancer Res. 48:2659, 1988) and van der Krol et al. (BioTechniques 6:958, 1988).

[6675] Binding of antisense or sense oligonucleotides to target nucleic acid sequences results in the formation of duplexes that block transcription or translation of the target sequence by one of several means, including enhanced degradation of the duplexes, premature termination of transcription or translation, or by other means. Such methods are encompassed by the present invention. The antisense oligonucleotides thus may be used to block expression of TAT proteins, wherein those TAT proteins may play a role in the induction of cancer in mammals. Antisense or sense oligonucleotides further comprise oligonucleotides having modified sugar-phosphodiester backbones (or other sugar linkages, such as those described in WO 91/06629) and wherein such sugar linkages are resistant to endogenous nucleases. Such oligonucleotides with resistant sugar linkages are stable in vivo (i.e., capable of resisting enzymatic degradation) but retain sequence specificity to be able to bind to target nucleotide sequences.

[6676] Preferred intragenic sites for antisense binding include the region incorporating the translation initiation/start codon (5′-AUG/5′-ATG) or termination/stop codon (5′-UAA, 5′-UAG and 5-UGA/5′-TAA, 5′-TAG and 5′-TGA) of the open reading frame (ORF) of the gene. These regions refer to a portion of the mRNA or gene that encompasses from about 25 to about 50 contiguous nucleotides in either direction (i.e., 5′ or 3′) from a translation initiation or termination codon. Other preferred regions for antisense binding include: introns; exons; intron-exon junctions; the open reading frame (ORF) or “coding region,” which is the region between the translation initiation codon and the translation termination codon; the 5′ cap of an mRNA which comprises an N7-methylated guanosine residue joined to the 5′-most residue of the mRNA via a 5′-5′ triphosphate linkage and includes 5′ cap structure itself as well as the first 50 nucleotides adjacent to the cap; the 5′ untranslated region (5′UTR), the portion of an mRNA in the 5′ direction from the translation initiation codon, and thus including nucleotides between the 5′ cap site and the translation initiation codon of an mRNA or corresponding nucleotides on the gene; and the 3′ untranslated region (3′UTR), the portion of an mRNA in the 3′ direction from the translation termination codon, and thus including nucleotides between the translation termination codon and 3′ end of an mRNA or corresponding nucleotides on the gene.

[6677] Specific examples of preferred antisense compounds useful for inhibiting expression of TAT proteins include oligonucleotides containing modified backbones or non-natural internucleoside linkages. Oligonucleotides having modified backbones include those that retain a phosphorus atom in the backbone and those that do not have a phosphorus atom in the backbone. For the purposes of this specification, and as sometimes referenced in the art, modified oligonucleotides that do not have a phosphorus atom in their internucleoside backbone can also be considered to be oligonucleosides. Preferred modified oligonucleotide backbones include, for example, phosphorothioates, chiral phosphorothioates, phosphorodithioates, phosphotriesters, aminoalkylphosphotri-esters, methyl and other alkyl phosphonates including 3′-alkylene phosphonates, 5′-alkylene phosphonates and chiral phosphonates, phosphinates, phosphoramidates including 3′-amino phosphoramidate and aminoalkylphosphoramidates, thionophosphoramidates, thionoalkylphosphonates, thionoalkylphosphotriesters, selenophosphates and borano-phosphates having normal 3′-5′ linkages, 2′-5′ linked analogs of these, and those having inverted polarity wherein one or more internucleotide linkages is a 3′ to 3′, 5′ to 5′ or 2′ to 2′ linkage. Preferred oligonucleotides having inverted polarity comprise a single 3′ to 3′ linkage at the 3′-most internucleotide linkage i.e. a single inverted nucleoside residue which may be abasic (the nucleobase is missing or has a hydroxyl group in place thereof). Various salts, mixed salts and free acid forms are also included. Representative United States patents that teach the preparation of phosphorus-containing linkages include, but are not limited to, U.S. Pat. Nos.: 3,687,808; 4,469,863; 4,476,301; 5,023,243; 5,177,196; 5,188,897; 5,264,423; 5,276,019; 5,278,302; 5,286,717; 5,321,131; 5,399,676; 5,405,939; 5,453,496; 5,455,233; 5,466,677; 5,476,925; 5,519,126; 5,536,821; 5,541,306; 5,550,111; 5,563,253; 5,571,799; 5,587,361; 5,194,599; 5,565,555; 5,527,899; 5,721,218; 5,672,697 and 5,625,050, each of which is herein incorporated by reference.

[6678] Preferred modified oligonucleotide backbones that do not include a phosphorus atom therein have backbones that are formed by short chain alkyl or cycloalkyl internucleoside linkages, mixed heteroatom and alkyl or cycloalkyl internucleoside linkages, or one or more short chain heteroatomic or heterocyclic internucleoside linkages. These include those having morpholino linkages (formed in part from the sugar portion of a nucleoside); siloxane backbones; sulfide, sulfoxide and sulfone backbones; formacetyl and thioformacetyl backbones; methylene formacetyl and thioformacetyl backbones; riboacetyl backbones; alkene containing backbones; sulfamate backbones; methyleneimino and methylenehydrazino backbones; sulfonate and sulfonamide backbones; amide backbones; and others having mixed N, O, S and CH.sub.2 component parts. Representative United States patents that teach the preparation of such oligonucleosides include, but are not limited to, U.S. Pat. Nos. 5,034,506; 5,166,315; 5,185,444; 5,214,134; 5,216,141; 5,235,033; 5,264,562; 5,264,564; 5,405,938; 5,434,257; 5,466,677; 5,470,967; 5,489,677; 5,541,307; 5,561,225; 5,596,086; 5,602,240; 5,610,289; 5,602,240; 5,608,046; 5,610,289; 5,618,704; 5,623,070; 5,663,312; 5,633,360; 5,677,437; 5,792,608; 5,646,269 and 5,677,439, each of which is herein incorporated by reference.

[6679] In other preferred antisense oligonucleotides, both the sugar and the internucleoside linkage, i.e., the backbone, of the nucleotide units are replaced with novel groups. The base units are maintained for hybridization with an appropriate nucleic acid target compound. One such oligomeric compound, an oligonucleotide mimetic that has been shown to have excellent hybridization properties, is referred to as a peptide nucleic acid (PNA). In PNA compounds, the sugar-backbone of an oligonucleotide is replaced with an amide containing backbone, in particular an aminoethylglycine backbone. The nucleobases are retained and are bound directly or indirectly to aza nitrogen atoms of the amide portion of the backbone. Representative United States patents that teach the preparation of PNA compounds include, but are not limited to, U.S. Pat. Nos.: 5,539,082; 5,714,331; and 5,719,262, each of which is herein incorporated by reference. Further teaching of PNA compounds can be found in Nielsen et al., Science, 1991, 254, 1497-1500.

[6680] Preferred antisense oligonucleotides incorporate phosphorothioate backbones and/or heteroatom backbones, and in particular —CH₂—NH—O—CH₂—, —CH₂—N(CH₃)—O—CH₂— [known as a methylene (methylimino) or MMI backbone], —CH₂—O—N(CH₃)—CH₂—, —CH₂—N(CH₃)—N(CH₃)—CH₂— and —O—N(CH₃)—CH₂—CH₂— [wherein the native phosphodiester backbone is represented as —O—P—O—CH₂—] described in the above referenced U.S. Pat. No. 5,489,677, and the amide backbones of the above referenced U.S. Pat. No. 5,602,240. Also preferred are antisense oligonucleotides having morpholino backbone structures of the above-referenced U.S. Pat. No. 5,034,506.

[6681] Modified oligonucleotides may also contain one or more substituted sugar moieties. Preferred oligonucleotides comprise one of the following at the 2′ position: OH; P; O-alkyl, S-alkyl, or N-alkyl; O-alkenyl, S-alkenyl, or N-alkenyl; O-alkynyl, S-alkynl or N-alkynyl; or O-alkyl-O-alkyl, wherein the alkyl, alkenyl and alkynyl may be substituted or unsubstituted C₁ to C₁₀ alkyl or C₂ to C₁₀ alkenyl and alkynyl. Particularly preferred are O[(CH₂)ₙO]ₘCH₃, O(CH₂)ₙOCH₃, O(CH₂)ₙNH₂, O(CH₂)ₙCH₃, O(CH₂)ₙONH₂, and O(CH₂)ₙON[(CH₂)ₙCH₃)]₂, where n and m are from 1 to about 10. Other preferred antisense oligonucleotides comprise one of the following at the 2′ position: C₁ to C₁₀ lower alkyl, substituted lower alkyl, alkenyl, alkynyl, alkaryl, aralkyl, O-alkaryl or O-aralkyl, SH, SCH₃, OCN, Cl, Br, CN, CF₃, OCF₃, SOCH₃, SO₂ CH₃, ONO₂, NO₂, N₃, NH₂, heterocycloalkyl, heterocycloalkaryl, aminoalkylamino, polyalkylamino, substituted silyl, an RNA cleaving group, a reporter group, an intercalator, a group for improving the pharmacokinetic properties of an oligonucleotide, or a group for improving the pharmacodynamic properties of an oligonucleotide, and other substituents having similar properties. A preferred modification includes 2′-methoxyethoxy (2′-O—CH₂CH₂OCH₃, also known as 2′-O-(2-methoxyethyl) or 2′-MOE) (Martin et al., Helv. Chim. Acta, 1995, 78, 486-504) i.e., an alkoxyalkoxy group. A further preferred modification includes 2′-dimethylaminooxyethoxy, i.e., a O(CH₂)₂ON(CH₃)₂ group, also known as 2′-DMAOE, as described in examples hereinbelow, and 2′-dimethylaminoethoxyethoxy (also known in the art as 2′-O-dimethylaminoethoxyethyl or 2′-DMAEOE), i.e., 2′-O—CH₂—O—CH₂—N(CH₂).

[6682] A further prefered modification includes Locked Nucleic Acids (LNAs) in which the 2′-hydroxyl group is linked to the 3′ or 4′ carbon atom of the sugar ring thereby forming a bicyclic sugar moiety. The linkage is preferably a methelyne (—CH₂—)ₙ group bridging the 2′ oxygen atom and the 4′ carbon atom wherein n is 1 or 2. LNAs and preparation thereof are described in WO 98/39352 and WO 99/14226.

[6683] Other preferred modifications include 2′-methoxy (2′-O—CH₃), 2′-aminopropoxy (2′-OCH₂CH₂CH₂NH₂), 2′-allyl (2′-CH₂—CH═CH₂), 2′-O-allyl (2′-O—CH₂—CH═CH₂) and 2′-fluoro (2′-F). The 2′-modification may be in the arabino (up) position or ribo (down) position. A preferred 2′-arabino modification is 2′-F. Similar modifications may also be made at other positions on the oligonucleotide, particularly the 3′ position of the sugar on the 3′ terminal nucleotide or in 2′-5′ linked oligonucleotides and the 5′ position of 5′ terminal nucleotide. Oligonucleotides may also have sugar mimetics such as cyclobutyl moieties in place of the pentofuranosyl sugar. Representative United States patents that teach the preparation of such modified sugar structures include, but are not limited to, U.S. Pat. Nos. 4,981,957; 5,118,800; 5,319,080; 5,359,044; 5,393,878; 5,446,137; 5,466,786; 5,514,785; 5,519,134; 5,567,811; 5,576,427; 5,591,722; 5,597,909; 5,610,300; 5,627,053; 5,639,873; 5,646,265; 5,658,873; 5,670,633; 5,792,747; and 5,700,920, each of which is herein incorporated by reference in its entirety.

[6684] Oligonucleotides may also include nucleobase (often referred to in the art simply as “base”) modifications or substitutions. As used herein, “unmodified” or “natural” nucleobases include the purine bases adenine (A) and guanine (G), and the pyrimidine bases thymine (T), cytosine (C) and uracil (U). Modified nucleobases include other synthetic and natural nucleobases such as 5-methylcytosine (5-me-C), 5-hydroxymethyl cytosine, xanthine, hypoxanthine, 2-aminoadenine, 6-methyl and other alkyl derivatives of adenine and guanine, 2-propyl and other alkyl derivatives of adenine and guanine, 2-thiouracil, 2-thiothymine and 2-thiocytosine, 5-halouracil and cytosine, 5-propynyl (—C═C—CH₃ or —CH₂—C═CH) uracil and cytosine and other alkynyl derivatives of pyrimidine bases, 6-azo uracil, cytosine and thymine, 5-uracil (pseudouracil), 4-thiouracil, 8-halo, 8-amino, 8-thiol, 8-thioalkyl, 8-hydroxyl and other 8-substituted adenines and guanines, 5-halo particularly 5-bromo, 5-trifluoromethyl and other 5-substituted uracils and cytosines, 7-methylguanine and 7-methyladenine, 2-F-adenine, 2-amino-adenine, 8-azaguanine and 8-azaadenine, 7-deazaguanine and 7-deazaadenine and 3-deazaguanine and 3-deazaadenine. Further modified nucleobases include tricyclic pyrimidines such as phenoxazine cytidine(1H-pyrimido[5,4-b][1,4]benzoxazin-2(3H)-one), phenothiazine cytidine (1H-pyrimido[5,4-b][1,4]benzothiazin-2(3H)-one), G-clamps such as a substituted phenoxazine cytidine (e.g. 9-(2-aminoethoxy)-H-pyrimido[5,4-b][1,4]benzoxazin-2(3H)-one), carbazole cytidine (2H-pyrimido[4,5-b]indol-2-one), pyridoindole cytidine (H-pyrido[3′,2′:4,5]pyrrolo[2,3-d]pyrimidin-2-one). Modified nucleobases may also include those in which the purine or pyrimidine base is replaced with other heterocycles, for example 7-deaza-adenine, 7-deazaguanosine, 2-aminopyridine and 2-pyridone. Further nucleobases include those disclosed in U.S. Pat. No. 3,687,808, those disclosed in The Concise Encyclopedia Of Polymer Science And Engineering, pages 858-859, Kroschwitz, J. I., ed. John Wiley & Sons, 1990, and those disclosed by Englisch et al., Angewandte Chemie, International Edition, 1991, 30, 613. Certain of these nucleobases are particularly useful for increasing the binding affinity of the oligomeric compounds of the invention. These include 5-substituted pyrimidines, 6-azapyrimidines and N-2, N-6 and O-6 substituted purines, including 2-aminopropyladenine, 5-propynyluracil and 5-propynylcytosine. 5-methylcytosine substitutions have been shown to increase nucleic acid duplex stability by 0.6-1.2.degree. C. (Sanghvi et al, Antisense Research and Applications, CRC Press, Boca Raton, 1993, pp. 276-278) and are preferred base substitutions, even more particularly when combined with 2′-O-methoxyethyl sugar modifications. Representative United States patents that teach the preparation of modified nucleobases include, but are not limited to: U.S. Pat. No. 3,687,808, as well as U.S. Pat. Nos. 4,845,205; 5,130,302; 5,134,066; 5,175,273; 5,367,066; 5,432,272; 5,457,187; 5,459,255; 5,484,908; 5,502,177; 5,525,711; 5,552,540; 5,587,469; 5,594,121, 5,596,091; 5,614,617; 5,645,985; 5,830,653; 5,763,588; 6,005,096; 5,681,941 and 5,750,692, each of which is herein incorporated by reference.

[6685] Another modification of antisense oligonucleotides chemically linking to the oligonucleotide one or more moieties or conjugates which enhance the activity, cellular distribution or cellular uptake of the oligonucleotide. The compounds of the invention can include conjugate groups covalently bound to functional groups such as primary or secondary hydroxyl groups. Conjugate groups of the invention include intercalators, reporter molecules, polyamines, polyamides, polyethylene glycols, polyethers, groups that enhance the pharmacodynamic properties of oligomers, and groups that enhance the pharmacokinetic properties of oligomers. Typical conjugates groups include cholesterols, lipids, cation lipids, phospholipids, cationic phospholipids, biotin, phenazine, folate, phenanthridine, anthraquinone, acridine, fluoresceins, rhodamines, coumarins, and dyes. Groups that enhance the pharmacodynamic properties, in the context of this invention, include groups that improve oligomer uptake, enhance oligomer resistance to degradation, and/or strengthen sequence-specific hybridization with RNA. Groups that enhance the pharmacokinetic properties, in the context of this invention, include groups that improve oligomer uptake, distribution, metabolism or excretion. Conjugate moieties include but are not limited to lipid moieties such as a cholesterol moiety (Letsinger et al., Proc. Natl. Acad. Sci. USA, 1989, 86, 6553-6556), cholic acid (Manoharan et al., Bioorg. Med. Chem. Let., 1994, 4, 1053-1060), a thioether, e.g., hexyl-S-tritylthiol (Manoharan et al., Ann. N.Y. Acad. Sci., 1992, 660, 306-309; Manoharan et al., Bioorg. Med. Chem. Let., 1993, 3, 2765-2770), a thiocholesterol (Oberhauser et al., Nucl. Acids Res., 1992, 20, 533-538), an aliphatic chain, e.g., dodecandiol or undecyl residues (Saison-Behmoaras et al., EMBO J., 1991, 10, 1111-1118; Kabanov et al., FEBS Lett., 1990, 259, 327-330; Svinarchuk et al., Biochimie, 1993, 75, 49-54), a phospholipid, e.g., di-hexadecyl-rac-glycerol or triethyl-ammonium 1,2-di-O-hexadecyl-rac-glycero-3-H-phosphonate (Manoharan et al., Tetrahedron Lett., 1995, 36, 3651-3654; Shea et al., Nucl. Acids Res., 1990, 18, 3777-3783), a polyamine or a polyethylene glycol chain (Manoharan et al., Nucleosides & Nucleotides, 1995, 14, 969-973), or adamantane acetic acid (Manoharan et al., Tetrahedron Lett., 1995, 36, 3651-3654), a palmityl moiety (Mishra et al., Biochim. Biophys. Acta, 1995, 1264, 229-237), or an octadecylamine or hexylamino-carbonyl-oxycholesterol moiety. Oligonucleotides of the invention may also be conjugated to active drug substances, for example, aspirin, warfarin, phenylbutazone, ibuprofen, suprofen, fenbufen, ketoprofen, (S)-(+)-pranoprofen, carprofen, dansylsarcosine, 2,3,5-triiodobenzoic acid, flufenamic acid, folinic acid, a benzothiadiazide, chlorothiazide, a diazepine, indomethicin, a barbiturate, a cephalosporin, a sulfa drug, an antidiabetic, an antibacterial or an antibiotic. Oligonucleotide-drug conjugates and their preparation are described in U.S. patent application Ser. No. 09/334,130 (filed Jun. 15, 1999) and U.S. Pat. Nos.: 4,828,979; 4,948,882; 5,218,105; 5,525,465; 5,541,313; 5,545,730; 5,552,538; 5,578,717, 5,580,731; 5,580,731; 5,591,584; 5,109,124; 5,118,802; 5,138,045; 5,414,077; 5,486,603; 5,512,439; 5,578,718; 5,608,046; 4,587,044; 4,605,735; 4,667,025; 4,762,779; 4,789,737; 4,824,941; 4,835,263; 4,876,335; 4,904,582; 4,958,013; 5,082,830; 5,112,963; 5,214,136; 5,082,830; 5,112,963; 5,214,136; 5,245,022; 5,254,469; 5,258,506; 5,262,536; 5,272,250; 5,292,873; 5,317,098; 5,371,241, 5,391,723; 5,416,203, 5,451,463; 5,510,475; 5,512,667; 5,514,785; 5,565,552; 5,567,810; 5,574,142; 5,585,481; 5,587,371; 5,595,726; 5,597,696; 5,599,923; 5,599,928 and 5,688,941, each of which is herein incorporated by reference.

[6686] It is not necessary for all positions in a given compound to be uniformly modified, and in fact more than one of the aforementioned modifications may be incorporated in a single compound or even at a single nucleoside within an oligonucleotide. The present invention also includes antisense compounds which are chimeric compounds. “Chimeric” antisense compounds or “chimeras,” in the context of this invention, are antisense compounds, particularly oligonucleotides, which contain two or more chemically distinct regions, each made up of at least one monomer unit, i.e., a nucleotide in the case of an oligonucleotide compound. These oligonucleotides typically contain at least one region wherein the oligonucleotide is modified so as to confer upon the oligonucleotide increased resistance to nuclease degradation, increased cellular uptake, and/or increased binding affinity for the target nucleic acid. An additional region of the oligonucleotide may serve as a substrate for enzymes capable of cleaving RNA:DNA or RNA:RNA hybrids. By way of example, RNase H is a cellular endonuclease which cleaves the RNA strand of an RNA:DNA duplex. Activation of RNase H, therefore, results in cleavage of the RNA target, thereby greatly enhancing the efficiency of oligonucleotide inhibition of gene expression. Consequently, comparable results can oftenbe obtained with shorter oligonucleotides when chimeric oligonucleotides are used, compared to phosphorothioate deoxyoligonucleotides hybridizing to the same target region. Chimeric antisense compounds of the invention may be formed as composite structures of two or more oligonucleotides, modified oligonucleotides, oligonucleosides and/or oligonucleotide mimetics as described above. Preferred chimeric antisense oligonucleotides incorporate at least one 2′ modified sugar (preferably 2′-O—(CH₂)₂—O—CH₃) at the 3′ terminal to confer nuclease resistance and a region with at least 4 contiguous 2′-H sugars to confer RNase H activity. Such compounds have also been referred to in the art as hybrids or gapmers. Preferred gapmers have a region of 2′ modified sugars (preferably 2′-O—(CH₂)₂—O—CH₃) at the 3′-terminal and at the 5′ terminal separated by at least one region having at least 4 contiguous 2′-H sugars and preferably incorporate phosphorothioate backbone linkages. Representative United States patents that teach the preparation of such hybrid structures include, but are not limited to, U.S. Pat. Nos. 5,013,830; 5,149,797; 5,220,007; 5,256,775; 5,366,878; 5,403,711; 5,491,133; 5,565,350; 5,623,065; 5,652,355; 5,652,356; and 5,700,922, each of which is herein incorporated by reference in its entirety.

[6687] The antisense compounds used in accordance with this invention may be conveniently and routinely made through the well-known technique of solid phase synthesis. Equipment for such synthesis is sold by several vendors including, for example, Applied Biosystems (Foster City, Calif.). Any other means for such synthesis known in the art may additionally or alternatively be employed. It is well known to use similar techniques to prepare oligonucleotides such as the phosphorothioates and alkylated derivatives. The compounds of the invention may also be admixed, encapsulated, conjugated or otherwise associated with other molecules, molecule structures or mixtures of compounds, as for example, liposomes, receptor targeted molecules, oral, rectal, topical or other formulations, for assisting in uptake, distribution and/or absorption. Representative United States patents that teach the preparation of such uptake, distribution and/or absorption assisting formulations include, but are not limited to, U.S. Pat. Nos. 5,108,921; 5,354,844; 5,416,016; 5,459,127; 5,521,291; 5,543,158; 5,547,932; 5,583,020; 5,591,721; 4,426,330; 4,534,899; 5,013,556; 5,108,921; 5,213,804; 5,227,170; 5,264,221; 5,356,633; 5,395,619; 5,416,016; 5,417,978; 5,462,854; 5,469,854; 5,512,295; 5,527,528; 5,534,259; 5,543,152; 5,556,948; 5,580,575; and 5,595,756, each of which is herein incorporated by reference.

[6688] Other examples of sense or antisense oligonucleotides include those oligonucleotides which are covalently linked to organic moieties, such as those described in WO 90/10048, and other moieties that increases affinity of the oligonucleotide for a target nucleic acid sequence, such as poly-(L-lysine). Further still, intercalating agents, such as ellipticine, and alkylating agents or metal complexes may be attached to sense or antisense oligonucleotides to modify binding specificities of the antisense or sense oligonucleotide for the target nucleotide sequence.

[6689] Antisense or sense oligonucleotides may be introduced into a cell containing the target nucleic acid sequence by any gene transfer method, including, for example, CaPO₄-mediated DNA transfection, electroporation, or by using gene transfer vectors such as Epstein-Barr virus. In a preferred procedure, an antisense or sense oligonucleotide is inserted into a suitable retroviral vector. A cell containing the target nucleic acid sequence is contacted with the recombinant retroviral vector, either in vivo or ex vivo. Suitable retroviral vectors include, but are not limited to, those derived from the murine retrovirus M-MuLV, N2 (a retrovirus derived from M-MuLV), or the double copy vectors designated DCT5A, DCT5B and DCT5C (see WO 90/13641).

[6690] Sense or antisense oligonucleotides also may be introduced into a cell containing the target nucleotide sequence by formation of a conjugate with a ligand binding molecule, as described in WO 91/04753. Suitable ligand binding molecules include, but are not limited to, cell surface receptors, growth factors, other cytokines, or other ligands that bind to cell surface receptors. Preferably, conjugation of the ligand binding molecule does not substantially interfere with the ability of the ligand binding molecule to bind to its corresponding molecule or receptor, or block entry of the sense or antisense oligonucleotide or its conjugated version into the cell.

[6691] Alternatively, a sense or an antisense oligonucleotide may be introduced into a cell containing the target nucleic acid sequence by formation of an oligonucleotide-lipid complex, as described in WO 90/10448. The sense or antisense oligonucleotide-lipid complex is preferably dissociated within the cell by an endogenous lipase.

[6692] Antisense or sense RNA or DNA molecules are generally at least about 5 nucleotides in length, alternatively at least about 6, 7, 8, 9, 10, 11, 12, 13, 14, 15, 16, 17, 18, 19, 20, 21, 22, 23, 24, 25, 26, 27, 28, 29, 30, 35, 40, 45, 50, 55, 60, 65, 70, 75, 80, 85, 90, 95, 100, 105, 110, 115, 120, 125, 130, 135, 140, 145, 150, 155, 160, 165, 170, 175, 180, 185, 190, 195, 200, 210, 220, 230, 240, 250, 260, 270, 280, 290, 300, 310, 320, 330, 340, 350, 360, 370, 380, 390, 400, 410, 420, 430, 440, 450, 460, 470, 480, 490, 500, 510, 520, 530, 540, 550, 560, 570, 580, 590, 600, 610, 620, 630, 640, 650, 660, 670, 680, 690, 700, 710, 720, 730, 740, 750, 760, 770, 780, 790, 800, 810, 820, 830, 840, 850, 860, 870, 880, 890, 900, 910, 920, 930, 940, 950, 960, 970, 980, 990, or 1000 nucleotides in length, wherein in this context the term “about” means the referenced nucleotide sequence length plus or minus 10% of that referenced length.

[6693] The probes may also be employed in PCR techniques to generate a pool of sequences for identification of closely related TAT coding sequences.

[6694] Nucleotide sequences encoding a TAT can also be used to construct hybridization probes for mapping the gene which encodes that TAT and for the genetic analysis of individuals with genetic disorders. The nucleotide sequences provided herein may be mapped to a chromosome and specific regions of a chromosome using known techniques, such as in situ hybridization, linkage analysis against known chromosomal markers, and hybridization screening with libraries.

[6695] When the coding sequences for TAT encode a protein which binds to another protein (example, where the TAT is a receptor), the TAT can be used in assays to identify the other proteins or molecules involved in the binding interaction. By such methods, inhibitors of the receptor/ligand binding interaction can be identified. Proteins involved in such binding interactions can also be used to screen for peptide or small molecule inhibitors or agonists of the binding interaction. Also, the receptor TAT can be used to isolate correlative ligand(s). Screening assays can be designed to find lead compounds that mimic the biological activity of a native TAT or a receptor for TAT. Such screening assays will include assays amenable to high-throughput screening of chemical libraries, making them particularly suitable for identifying small molecule drug candidates. Small molecules contemplated include synthetic organic or inorganic compounds. The assays can be performed in a variety of formats, including protein-protein binding assays, biochemical screening assays, immunoassays and cell based assays, which are well characterized in the art.

[6696] Nucleic acids which encode TAT or its modified forms can also be used to generate either transgenic animals or “knock out” animals which, in turn, are useful in the development and screening of therapeutically useful reagents. A transgenic animal (e.g., a mouse or rat) is an animal having cells that contain a transgene, which transgene was introduced into the animal or an ancestor of the animal at a prenatal, e.g., an embryonic stage. A transgene is a DNA which is integrated into the genome of a cell from which a transgenic animal develops. In one embodiment, cDNA encoding TAT can be used to clone genomic DNA encoding TAT in accordance with established techniques and the genomic sequences used to generate transgenic animals that contain cells which express DNA encoding TAT. Methods for generating transgenic animals, particularly animals such as mice or rats, have become conventional in the art and are described, for example, in U.S. Pat. Nos. 4,736,866 and 4,870,009. Typically, particular cells would be targeted for TAT transgene incorporation with tissue-specific enhancers. Transgenic animals that include a copy of a transgene encoding TAT introduced into the germ line of the animal at an embryonic stage can be used to examine the effect of increased expression of DNA encoding TAT. Such animals can be used as tester animals for reagents thought to confer protection from, for example, pathological conditions associated with its overexpression. In accordance with this facet of the invention, an animal is treated with the reagent and a reduced incidence of the pathological condition, compared to untreated animals bearing the transgene, would indicate a potential therapeutic intervention for the pathological condition.

[6697] Alternatively, non-human homologues of TAT can be used to construct a TAT “knock out” animal which has a defective or altered gene encoding TAT as a result of homologous recombination between the endogenous gene encoding TAT and altered genomic DNA encoding TAT introduced into an embryonic stem cell of the animal. For example, cDNA encoding TAT can be used to clone genomic DNA encoding TAT in accordance with established techniques. A portion of the genomic DNA encoding TAT can be deleted or replaced with another gene, such as a gene encoding a selectable marker which can be used to monitor integration. Typically, several kilobases of unaltered flanking DNA (both at the 5′ and 3′ ends) are included in the vector [see e.g., Thomas and Capecchi, Cell, 51:503 (1987) for a description of homologous recombination vectors]. The vector is introduced into an embryonic stem cell line (e.g., by electroporation) and cells in which the introduced DNA has homologously recombined with the endogenous DNA are selected [see e.g., Li et al., Cell. 69:915 (1992)]. The selected cells are then injected into a blastocyst of an animal (e.g., a mouse or rat) to form aggregation chimeras [see e.g., Bradley, in Teratocarcinomas and Embryonic Stem Cells: A Practical Approach, E. J. Robertson, ed. (IRL, Oxford, 1987), pp. 113-152]. A chimeric embryo can then be implanted into a suitable pseudopregnant female foster animal and the embryo brought to term to create a “knock out” animal. Progeny harboring the homologously recombined DNA in their germ cells can be identified by standard techniques and used to breed animals in which all cells of the animal contain the homologously recombined DNA. Knockout animals can be characterized for instance, for their ability to defend against certain pathological conditions and for their development of pathological conditions due to absence of the TAT polypeptide.

[6698] Nucleic acid encoding the TAT polypeptides may also be used in gene therapy. In gene therapy applications, genes are introduced into cells in order to achieve in vivo synthesis of a therapeutically effective genetic product, for example for replacement of a defective gene. “Gene therapy” includes both conventional gene therapy where a lasting effect is achieved by a single treatment, and the administration of gene therapeutic agents, which involves the one time or repeated administration of a therapeutically effective DNA or mRNA. Antisense RNAs and DNAs can be used as therapeutic agents for blocking the expression of certain genes in vivo. It has already been shown that short antisense oligonucleotides can be imported into cells where they act as inhibitors, despite their low intracellular concentrations caused by their restricted uptake by the cell membrane. (Zamecnik et al., Proc. Natl. Acad. Sci. USA 83:4143-4146 [1986]). The oligonucleotides can be modified to enhance their uptake, e.g. by substituting their negatively charged phosphodiester groups by uncharged groups.

[6699] There are a variety of techniques available for introducing nucleic acids into viable cells. The techniques vary depending upon whether the nucleic acid is transferred into cultured cells in vitro, or in vivo in the cells of the intended host. Techniques suitable for the transfer of nucleic acid into mammalian cells in vitro include the use of liposomes, electroporation, microinjection, cell fusion, DEAE-dextran, the calcium phosphate precipitation method, etc. The currently preferred in vivo gene transfer techniques include transfection with viral (typically retroviral) vectors and viral coat protein-liposome mediated transfection (Dzau et al., Trends in Biotechnology 11, 205-210 [1993]). In some situations it is desirable to provide the nucleic acid source with an agent that targets the target cells, such as an antibody specific for a cell surface membrane protein or the target cell, a ligand for a receptor on the target cell, etc. Where liposomes are employed, proteins which bind to a cell surface membrane protein associated with endocytosis may be used for targeting and/or to facilitate uptake, e.g. capsid proteins or fragments thereof tropic for a particular cell type, antibodies for proteins which undergo internalization in cycling, proteins that target intracellular localization and enhance intracellular half-life. The technique of receptor-mediated endocytosis is described, for example, by Wu et al., J. Biol. Chem. 262, 4429-4432 (1987); and Wagner et al., Proc. Natl. Acad. Sci. USA 87, 3410-3414 (1990). For review of gene marking and gene therapy protocols see Anderson et al., Science 256, 808-813 (1992).

[6700] The nucleic acid molecules encoding the TAT polypeptides or fragments thereof described herein are useful for chromosome identification In this regard, there exists an ongoing need to identify new chromosome markers, since relatively few chromosome marking reagents, based upon actual sequence data are presently available. Each TAT nucleic acid molecule of the present invention can be used as a chromosome marker.

[6701] The TAT polypeptides and nucleic acid molecules of the present invention may also be used diagnostically for tissue typing, wherein the TAT polypeptides of the present invention may be differentially expressed in one tissue as compared to another, preferably in a diseased tissue as compared to a normal tissue of the same tissue type. TAT nucleic acid molecules will find use for generating probes for PCR, Northern analysis, Southern analysis and Western analysis.

[6702] This invention encompasses methods of screening compounds to identify those that mimic the TAT polypeptide (agonists) or prevent the effect of the TAT polypeptide (antagonists). Screening assays for antagonist drug candidates are designed to identify compounds that bind or complex with the TAT polypeptides encoded by the genes identified herein, or otherwise interfere with the interaction of the encoded polypeptides with other cellular proteins, including e.g., inhibiting the expression of TAT polypeptide from cells. Such screening assays will include assays amenable to high-throughput screening of chemical libraries, making them particularly suitable for identifying small molecule drug candidates.

[6703] The assays can be performed in a variety of formats, including protein-protein binding assays, biochemical screening assays, immunoassays, and cell-based assays, which are well characterized in the art.

[6704] All assays for antagonists are common in that they call for contacting the drug candidate with a TAT polypeptide encoded by a nucleic acid identified herein under conditions and for a time sufficient to allow these two components to interact.

[6705] In binding assays, the interaction is binding and the complex formed can be isolated or detected in the reaction mixture. In a particular embodiment, the TAT polypeptide encoded by the gene identified herein or the drug candidate is immobilized on a solid phase, e.g., on a microtiter plate, by covalent or non-covalent attachments. Non-covalent attachment generally is accomplished by coating the solid surface with a solution of the TAT polypeptide and drying. Alternatively, an immobilized antibody, e.g., a monoclonal antibody, specific for the TAT polypeptide to be immobilized can be used to anchor it to a solid surface. The assay is performed by adding the non-immobilized component, which may be labeled by a detectable label, to the immobilized component, e.g., the coated surface containing the anchored component. When the reaction is complete, the non-reacted components are removed, e.g., by washing, and complexes anchored on the solid surface are detected. When the originally non-immobilized component carries a detectable label, the detection of label immobilized on the surface indicates that complexing occurred. Where the originally non-immobilized component does not carry a label, complexing can be detected, for example, by using a labeled antibody specifically binding the immobilized complex.

[6706] If the candidate compound interacts with but does not bind to a particular TAT polypeptide encoded by a gene identified herein, its interaction with that polypeptide can be assayed by methods well known for detecting protein-protein interactions. Such assays include traditional approaches, such as, e.g., cross-linking, co-immunoprecipitation, and co-purification through gradients or chromatographic columns. In addition, protein-protein interactions can be monitored by using a yeast-based genetic system described by Fields and co-workers (Fields and Song, Nature (London), 340:245-246 (1989); Chien et al., Proc. Natl. Acad. Sci. USA, 88:9578-9582 (1991)) as disclosed by Chevray and Nathans, Proc. Natl. Acad. Sci. USA, 89: 5789-5793 (1991). Many transcriptional activators, such as yeast GAL4, consist of two physically discrete modular domains, one acting as the DNA-binding domain, the other one functioning as the transcription-activation domain. The yeast expression system described in the foregoing publications (generally referred to as the “two-hybrid system”) takes advantage of this property, and employs two hybrid proteins, one in which the target protein is fused to the DNA-binding domain of GAL4, and another, in which candidate activating proteins are fused to the activation domain. The expression of a GAL1-lacZ reporter gene under control of a GAL4-activated promoter depends on reconstitution of GAL4 activity via protein-protein interaction. Colonies containing interacting polypeptides are detected with a chromogenic substrate for β-galactosidase. A complete kit (MATCHMAKER™) for identifying protein-protein interactions between two specific proteins using the two-hybrid technique is commercially available from Clontech. This system can also be extended to map protein domains involved in specific protein interactions as well as to pinpoint amino acid residues that are crucial for these interactions.

[6707] Compounds that interfere with the interaction of a gene encoding a TAT polypeptide identified herein and other intra- or extracellular components can be tested as follows: usually a reaction mixture is prepared containing the product of the gene and the intra- or extracellular component under conditions and for a time allowing for the interaction and binding of the two products. To test the ability of a candidate compound to inhibit binding, the reaction is run in the absence and in the presence of the test compound. In addition, a placebo may be added to a third reaction mixture, to serve as positive control. The binding (complex formation) between the test compound and the intra- or extracellular component present in the mixture is monitored as described hereinabove. The formation of a complex in the control reaction(s) but not in the reaction mixture containing the test compound indicates that the test compound interferes with the interaction of the test compound and its reaction partner.

[6708] To assay for antagonists, the TAT polypeptide may be added to a cell along with the compound to be screened for a particular activity and the ability of the compound to inhibit the activity of interest in the presence of the TAT polypeptide indicates that the compound is an antagonist to the TAT polypeptide. Alternatively, antagonists may be detected by combining the TAT polypeptide and a potential antagonist with membrane-bound TAT polypeptide receptors or recombinant receptors under appropriate conditions for a competitive inhibition assay. The TAT polypeptide can be labeled, such as by radioactivity, such that the number of TAT polypeptide molecules bound to the receptor can be used to determine the effectiveness of the potential antagonist. The gene encoding the receptor can be identified by numerous methods known to those of skill in the art, for example, ligand panning and FACS sorting. Coligan et al., Current Protocols in Immun., 1(2): Chapter 5 (1991). Preferably, expression cloning is employed wherein polyadenylated RNA is prepared from a cell responsive to the TAT polypeptide and a cDNA library created from this RNA is divided into pools and used to transfect COS cells or other cells that are not responsive to the TAT polypeptide. Transfected cells that are grown on glass slides are exposed to labeled TAT polypeptide. The TAT polypeptide can be labeled by a variety of means including iodination or inclusion of a recognition site for a site-specific protein kinase. Following fixation and incubation, the slides are subjected to autoradiographic analysis. Positive pools are identified and sub-pools are prepared and re-transfected using an interactive sub-pooling and re-screening process, eventually yielding a single clone that encodes the putative receptor.

[6709] As an alternative approach for receptor identification, labeled TAT polypeptide can be photoaffinity-linked with cell membrane or extract preparations that express the receptor molecule. Cross-linked material is resolved by PAGE and exposed to X-ray film. The labeled complex containing the receptor can be excised, resolved into peptide fragments, and subjected to protein micro-sequencing. The amino acid sequence obtained from micro-sequencing would be used to design a set of degenerate oligonucleotide probes to screen a cDNA library to identify the gene encoding the putative receptor.

[6710] In another assay for antagonists, mammalian cells or a membrane preparation expressing the receptor would be incubated with labeled TAT polypeptide in the presence of the candidate compound. The ability of the compound to enhance or block this interaction could then be measured.

[6711] More specific examples of potential antagonists include an oligonucleotide that binds to the fusions of immunoglobulin with TAT polypeptide, and, in particular, antibodies including, without limitation, poly- and monoclonal antibodies and antibody fragments, single-chain antibodies, anti-idiotypic antibodies, and chimeric or humanized versions of such antibodies or fragments, as well as human antibodies and antibody fragments. Alternatively, a potential antagonist may be a closely related protein, for example, a mutated form of the TAT polypeptide that recognizes the receptor but imparts no effect, thereby competitively inhibiting the action of the TAT polypeptide.

[6712] Another potential TAT polypeptide antagonist is an antisense RNA or DNA construct prepared using antisense technology, where, e.g., an antisense RNA or DNA molecule acts to block directly the translation of mRNA by hybridizing to targeted mRNA and preventing protein translation. Antisense technology can be used to control gene expression through triple-helix formation or antisense DNA or RNA, both of which methods are based on binding of a polynucleotide to DNA or RNA. For example, the 5′ coding portion of the polynucleotide sequence, which encodes the mature TAT polypeptides herein, is used to design an antisense RNA oligonucleotide of from about 10 to 40 base pairs in length. A DNA oligonucleotide is designed to be complementary to a region of the gene involved in transcription (triple helix—see Lee et al., Nucl. Acids Res., 6:3073 (1979); Cooney et al., Science, 241: 456 (1988); Dervan et al., Science, 251:1360 (1991)), thereby preventing transcription and the production of the TAT polypeptide. The antisense RNA oligonucleotide hybridizes to the mRNA in vivo and blocks translation of the mRNA molecule into the TAT polypeptide (antisense—Okano, Neurochem., 56:560 (1991); Oligodeoxynucleotides as Antisense Inhibitors of Gene Expression (CRC Press: Boca Raton, Fla., 1988). The oligonucleotides described above can also be delivered to cells such that the antisense RNA or DNA may be expressed in vivo to inhibit production of the TAT polypeptide. When antisense DNA is used, oligodeoxyribonucleotides derived from the translation-initiation site, e.g., between about −10 and +10 positions of the target gene nucleotide sequence, are preferred.

[6713] Potential antagonists include small molecules that bind to the active site, the receptor binding site, or growth factor or other relevant binding site of the TAT polypeptide, thereby blocking the normal biological activity of the TAT polypeptide. Examples of small molecules include, but are not limited to, small peptides or peptide-like molecules, preferably soluble peptides, and synthetic non-peptidyl organic or inorganic compounds.

[6714] Ribozymes are enzymatic RNA molecules capable of catalyzing the specific cleavage of RNA. Ribozymes act by sequence-specific hybridization to the complementary target RNA, followed by endonucleolytic cleavage. Specific ribozyme cleavage sites within a potential RNA target can be identified by known techniques. For further details see, e.g., Ross Current Biology, 4:469-471 (1994), and PCT publication No. WO 97/33551 (published Sep. 18, 1997).

[6715] Nucleic acid molecules in triple-helix formation used to inhibit transcription should be single-stranded and composed of deoxynucleotides. The base composition of these oligonucleotides is designed such that it promotes triple-helix formation via Hoogsteen base-pairing rules, which generally require sizeable stretches of purines or pyrimidines on one strand of a duplex. For further details see, e.g., PCT publication No. WO 97/33551, supra.

[6716] These small molecules can be identified by any one or more of the screening assays discussed hereinabove and/or by any other screening techniques well known for those skilled in the art.

[6717] Isolated TAT polypeptide-encoding nucleic acid can be used herein for recombinantly producing TAT polypeptide using techniques well known in the art and as described herein. In turn, the produced TAT polypeptides can be employed for generating anti-TAT antibodies using techniques well known in the art and as described herein.

[6718] Antibodies specifically binding a TAT polypeptide identified herein, as well as other molecules identified by the screening assays disclosed hereinbefore, can be administered for the treatment of various disorders, including cancer, in the form of pharmaceutical compositions.

[6719] If the TAT polypeptide is intracellular and whole antibodies are used as inhibitors, internalizing antibodies are preferred. However, lipofections or liposomes can also be used to deliver the antibody, or an antibody fragment, into cells. Where antibody fragments are used, the smallest inhibitory fragment that specifically binds to the binding domain of the target protein is preferred. For example, based upon the variable-region sequences of an antibody, peptide molecules can be designed that retain the ability to bind the target protein sequence. Such peptides can be synthesized chemically and/or produced by recombinant DNA technology. See, e.g., Marasco et al., Proc. Natl. Acad. Sci. USA, 90: 7889-7893 (1993).

[6720] The formulation herein may also contain more than one active compound as necessary for the particular indication being treated, preferably those with complementary activities that do not adversely affect each other. Alternatively, or in addition, the composition may comprise an agent that enhances its function, such as, for example, a cytotoxic agent, cytokine, chemotherapeutic agent, or growth-inhibitory agent. Such molecules are suitably present in combination in amounts that are effective for the purpose intended.

[6721] The following examples are offered for illustrative purposes only, and are not intended to limit the scope of the present invention in any way.

[6722] All patent and literature references cited in the present specification are hereby incorporated by reference in their entirety.

### EXAMPLES

[6723] Commercially available reagents referred to in the examples were used according to manufacturer's instructions unless otherwise indicated. The source of those cells identified in the following examples, and throughout the specification, by ATCC accession numbers is the American Type Culture Collection, Manassas, Va.

### Example 1

### Analysis of Differential TAT Polypeptide Expression by GEPIS

[6724] An expressed sequence tag (EST) DNA database (LIFESEQ®, Incyte Pharmaceuticals, Palo Alto, Calif.) was searched and interesting EST sequences were identified by GEPIS. Gene expression profiling in silico (GEPIS) is a bioinformatics tool developed at Genentech, Inc. that characterizes genes of interest for new cancer therapeutic targets. GEPIS takes advantage of large amounts of EST sequence and library information to determine gene expression profiles. GEPIS is capable of determining the expression profile of a gene based upon its proportional correlation with the number of its occurrences in EST databases, and it works by integrating the LIFESEQ® EST relational database and Genentech proprietary information in a stringent and statistically meaningful way. In this example, GEPIS is used to identify and cross-validate novel tumor antigens, although GEPIS can be configured to perform either very specific analyses or broad screening tasks. For the initial screen, GEPIS is used to identify EST sequences from the LIFESEQ® database that correlate to expression in a particular tissue or tissues of interest (often a tumor tissue of interest). Then, GEPIS was employed to generate a complete tissue expression profile for the various sequences of interest. Using this type of screening bioinformatics, various TAT polypeptides (and their encoding nucleic acid molecules) were identified as being significantly overexpressed in a particular type of cancer or certain cancers as compared to other cancers and/or normal non-cancerous tissues. The rating of GEPIS hits is based upon several criteria including, for example, tissue specificity, tumor specificity and expression level in normal essential and/or normal proliferating tissues. The following is a list of molecules whose tissue expression profile as determined by GEPIS evidences significant upregulation of expression in a specific tumor or tumors as compared to other tumor(s) and/or normal tissues and optionally relatively low expression in normal essential and/or normal proliferating tissues.

[6725] Under each tissue heading shown below is a list of the cDNA sequences that are detectably overexpressed in tumor tissue of the indicated tissue type as compared to normal non-tumor tissue of the same tissue type. As such, the molecules listed below (and the polypeptides they encode) are excellent nucleic acid (and polypeptide) targets for the diagnosis and therapy of cancer in mammals.

PERIPHERAL NERVOUS SYSTEM

| | | | | | |
|---|---|---|---|---|---|
| DNA324303 | DNA324573 | DNA324681 | DNA325296 | DNA325405 | DNA325407 |
| DNA325408 | DNA325409 | DNA325410 | DNA325449 | DNA325503 | DNA326083 |
| DNA326231 | DNA188229 | DNA327080 | DNA327081 | DNA327082 | |

[6726] BRAIN

| | | | | | |
|---|---|---|---|---|---|
| DNA323721 | DNA323722 | DNA323723 | DNA323724 | DNA323726 | DNA323727 |
| DNA323728 | DNA323729 | DNA323731 | DNA323732 | DNA287173 | DNA151148 |
| DNA323740 | DNA323742 | DNA323743 | DNA323744 | DNA323751 | DNA323753 |
| DNA323755 | DNA323757 | DNA323759 | DNA323764 | DNA323765 | DNA323778 |
| DNA323781 | DNA323783 | DNA323785 | DNA323795 | DNA323796 | DNA323797 |
| DNA323805 | DNA323810 | DNA323811 | DNA323812 | DNA323814 | DNA83085 |
| DNA323817 | DNA323821 | DNA273060 | DNA323823 | DNA323824 | DNA256503 |
| DNA323825 | DNA323826 | DNA323828 | DNA323829 | DNA323830 | DNA323833 |
| DNA103214 | DNA323834 | DNA323837 | DNA323838 | DNA323839 | DNA323846 |
| DNA323856 | DNA323859 | DNA323863 | DNA323869 | DNA323871 | DNA323874 |
| DNA323882 | DNA323887 | DNA323888 | DNA323892 | DNA323893 | DNA323897 |
| DNA323898 | DNA323900 | DNA323901 | DNA323902 | DNA323908 | DNA210134 |
| DNA323912 | DNA323918 | DNA323921 | DNA323922 | DNA323923 | DNA323924 |
| DNA323925 | DNA323926 | DNA257916 | DNA323927 | DNA323931 | DNA323936 |
| DNA323937 | DNA323938 | DNA323939 | DNA323940 | DNA323942 | DNA226793 |
| DNA294794 | DNA323943 | DNA323944 | DNA323946 | DNA323947 | DNA323950 |
| DNA323951 | DNA103436 | DNA323953 | DNA323958 | DNA323959 | DNA323961 |
| DNA226619 | DNA323962 | DNA323964 | DNA323969 | DNA323970 | DNA323973 |
| DNA323974 | DNA323975 | DNA323976 | DNA323977 | DNA323979 | DNA323980 |
| DNA323991 | DNA323992 | DNA323994 | DNA323995 | DNA324000 | DNA324001 |
| DNA324002 | DNA324003 | DNA227246 | DNA324004 | DNA324008 | DNA324009 |
| DNA324010 | DNA324011 | DNA324012 | DNA196344 | DNA193882 | DNA324024 |
| DNA324034 | DNA324037 | DNA324042 | DNA324046 | DNA324047 | DNA324048 |
| DNA324050 | DNA324051 | DNA324055 | DNA275195 | DNA324059 | DNA324060 |
| DNA275049 | DNA324063 | DNA324065 | DNA324066 | DNA324067 | DNA324071 |
| DNA324072 | DNA324073 | DNA227165 | DNA324074 | DNA324076 | DNA324077 |
| DNA324078 | DNA324079 | DNA324080 | DNA271243 | DNA324081 | DNA324082 |
| DNA324084 | DNA324088 | DNA324090 | DNA324091 | DNA324092 | DNA324099 |
| DNA324101 | DNA324106 | DNA324109 | DNA324111 | DNA324112 | DNA324121 |
| DNA324122 | DNA324123 | DNA324128 | DNA324129 | DNA227795 | DNA324130 |
| DNA324131 | DNA324132 | DNA324133 | DNA227528 | DNA324134 | DNA150725 |
| DNA324136 | DNA324138 | DNA324139 | DNA324141 | DNA324146 | DNA324152 |
| DNA324153 | DNA324155 | DNA324159 | DNA324160 | DNA324161 | DNA324162 |
| DNA194740 | DNA324166 | DNA324175 | DNA324176 | DNA272127 | DNA324177 |
| DNA324182 | DNA324184 | DNA324186 | DNA324188 | DNA324194 | DNA324197 |
| DNA324198 | DNA324203 | DNA324204 | DNA324207 | DNA324209 | DNA324210 |
| DNA324216 | DNA324218 | DNA324220 | DNA324221 | DNA324222 | DNA324223 |
| DNA324224 | DNA324227 | DNA324228 | DNA194827 | DNA324230 | DNA324231 |
| DNA324233 | DNA324234 | DNA324235 | DNA324237 | DNA324239 | DNA254204 |
| DNA324240 | DNA189697 | DNA324243 | DNA324246 | DNA324251 | DNA324253 |
| DNA150884 | DNA324256 | DNA324258 | DNA324260 | DNA324262 | DNA324264 |
| DNA324269 | DNA324270 | DNA324271 | DNA324274 | DNA324275 | DNA269910 |
| DNA324279 | DNA324285 | DNA324286 | DNA324288 | DNA324290 | DNA270401 |
| DNA226547 | DNA324295 | DNA324296 | DNA324299 | DNA324300 | DNA324304 |
| DNA324305 | DNA324308 | DNA324309 | DNA324310 | DNA324313 | DNA324314 |
| DNA324315 | DNA324316 | DNA324317 | DNA103505 | DNA324318 | DNA324319 |
| DNA324320 | DNA324323 | DNA324327 | DNA324328 | DNA324329 | DNA324330 |
| DNA324331 | DNA324333 | DNA324336 | DNA324338 | DNA324342 | DNA324343 |
| DNA324353 | DNA88547 | DNA324356 | DNA324358 | DNA324359 | DNA324361 |
| DNA324363 | DNA324364 | DNA324365 | DNA324366 | DNA324367 | DNA324368 |
| DNA324369 | DNA324371 | DNA324377 | DNA324387 | DNA324388 | DNA324389 |
| DNA324390 | DNA324397 | DNA324398 | DNA324410 | DNA324411 | DNA324412 |
| DNA324413 | DNA254620 | DNA324415 | DNA324417 | DNA324418 | DNA89239 |
| DNA324420 | DNA225592 | DNA324422 | DNA324428 | DNA324429 | DNA324434 |
| DNA324435 | DNA324437 | DNA324441 | DNA324442 | DNA324443 | DNA324448 |
| DNA324449 | DNA324457 | DNA324465 | DNA324466 | DNA324467 | DNA324472 |
| DNA257511 | DNA324483 | DNA324485 | DNA324486 | DNA225919 | DNA324487 |
| DNA324491 | DNA324495 | DNA324496 | DNA324497 | DNA324498 | DNA324510 |
| DNA324512 | DNA324513 | DNA324516 | DNA324518 | DNA324519 | DNA324521 |
| DNA324524 | DNA324525 | DNA227575 | DNA324526 | DNA225920 | DNA324527 |
| DNA225921 | DNA324528 | DNA324531 | DNA324532 | DNA324533 | DNA324534 |
| DNA324538 | DNA324540 | DNA324541 | DNA324542 | DNA324545 | DNA324546 |
| DNA324548 | DNA324558 | DNA324559 | DNA324564 | DNA324577 | DNA324578 |
| DNA288259 | DNA324590 | DNA324591 | DNA324595 | DNA324596 | DNA324597 |
| DNA324600 | DNA324604 | DNA324605 | DNA324613 | DNA324614 | DNA324615 |
| DNA324616 | DNA324618 | DNA324619 | DNA324620 | DNA324624 | DNA324625 |
| DNA83020 | DNA324626 | DNA103380 | DNA226872 | DNA324632 | DNA324640 |
| DNA324642 | DNA324643 | DNA324645 | DNA324646 | DNA324647 | DNA324649 |
| DNA324651 | DNA324652 | DNA324653 | DNA150679 | DNA324654 | DNA324655 |
| DNA324656 | DNA324657 | DNA324658 | DNA324659 | DNA324660 | DNA324661 |
| DNA324662 | DNA324663 | DNA324664 | DNA324665 | DNA324666 | DNA324667 |
| DNA324668 | DNA324669 | DNA324670 | DNA324671 | DNA324672 | DNA324673 |
| DNA324674 | DNA324675 | DNA324676 | DNA324678 | DNA324681 | DNA324682 |
| DNA324685 | DNA324686 | DNA324691 | DNA324694 | DNA324696 | DNA324697 |
| DNA324698 | DNA324700 | DNA324701 | DNA324702 | DNA324704 | DNA324705 |
| DNA225909 | DNA274206 | DNA324706 | DNA324707 | DNA324710 | DNA324711 |
| DNA324714 | DNA324715 | DNA324716 | DNA270675 | DNA324717 | DNA269593 |
| DNA324718 | DNA324719 | DNA324720 | DNA324721 | DNA272171 | DNA324728 |
| DNA324729 | DNA304680 | DNA324730 | DNA324734 | DNA324736 | DNA324737 |
| DNA227204 | DNA324738 | DNA324740 | DNA287246 | DNA324743 | DNA324745 |
| DNA304716 | DNA324748 | DNA324749 | DNA324750 | DNA324751 | DNA324755 |
| DNA324756 | DNA324757 | DNA324758 | DNA227442 | DNA324766 | DNA324767 |
| DNA324768 | DNA324769 | DNA287227 | DNA324771 | DNA324772 | DNA324773 |
| DNA324774 | DNA272263 | DNA287319 | DNA324777 | DNA324778 | DNA324779 |
| DNA324782 | DNA324784 | DNA324785 | DNA324786 | DNA324787 | DNA271040 |
| DNA324789 | DNA324791 | DNA324792 | DNA324794 | DNA324796 | DNA324797 |
| DNA324798 | DNA324799 | DNA324803 | DNA324804 | DNA324805 | DNA324809 |
| DNA324810 | DNA324812 | DNA324817 | DNA324819 | DNA324820 | DNA324821 |
| DNA324826 | DNA324830 | DNA324836 | DNA324837 | DNA324838 | DNA324840 |
| DNA324841 | DNA324842 | DNA324844 | DNA324853 | DNA324866 | DNA324873 |
| DNA324876 | DNA324877 | DNA324878 | DNA324879 | DNA324884 | DNA324885 |
| DNA324886 | DNA324889 | DNA324890 | DNA324891 | DNA324892 | DNA324894 |
| DNA225631 | DNA274326 | DNA324895 | DNA324896 | DNA324899 | DNA324902 |
| DNA324903 | DNA324906 | DNA324907 | DNA324908 | DNA324916 | DNA324917 |
| DNA324918 | DNA324920 | DNA324922 | DNA275334 | DNA324924 | DNA324925 |
| DNA324929 | DNA273865 | DNA324931 | DNA324932 | DNA304707 | DNA324938 |
| DNA324944 | DNA324945 | DNA324947 | DNA324952 | DNA324953 | DNA324955 |
| DNA324960 | DNA304710 | DNA324962 | DNA324963 | DNA324965 | DNA324966 |
| DNA324968 | DNA324969 | DNA324972 | DNA324973 | DNA324974 | DNA324977 |
| DNA324978 | DNA324979 | DNA324980 | DNA324982 | DNA324984 | DNA272090 |
| DNA324988 | DNA324989 | DNA324990 | DNA324996 | DNA324997 | DNA324998 |
| DNA324999 | DNA325002 | DNA325005 | DNA325006 | DNA325012 | DNA325013 |
| DNA325014 | DNA325015 | DNA325019 | DNA325020 | DNA325024 | DNA325026 |
| DNA325027 | DNA325032 | DNA325033 | DNA325034 | DNA325035 | DNA325037 |
| DNA325040 | DNA325041 | DNA325043 | DNA325044 | DNA325045 | DNA325046 |
| DNA325047 | DNA325050 | DNA325052 | DNA325054 | DNA325062 | DNA325064 |
| DNA325065 | DNA274178 | DNA325069 | DNA83022 | DNA325070 | DNA325071 |
| DNA325072 | DNA325073 | DNA225671 | DNA325075 | DNA325076 | DNA227267 |
| DNA325082 | DNA325083 | DNA325084 | DNA325085 | DNA325088 | DNA325102 |
| DNA325103 | DNA325105 | DNA325106 | DNA325111 | DNA325112 | DNA325116 |
| DNA325117 | DNA325118 | DNA325119 | DNA325126 | DNA325128 | DNA325132 |
| DNA325136 | DNA325137 | DNA325138 | DNA325139 | DNA325140 | DNA325141 |
| DNA325143 | DNA325144 | DNA325145 | DNA325146 | DNA325147 | DNA325148 |
| DNA325150 | DNA325151 | DNA325152 | DNA325153 | DNA325155 | DNA325156 |
| DNA325157 | DNA325160 | DNA325161 | DNA325163 | DNA325164 | DNA325165 |
| DNA325166 | DNA325167 | DNA325168 | DNA325170 | DNA325171 | DNA226345 |
| DNA325173 | DNA325174 | DNA325181 | DNA227491 | DNA254771 | DNA89242 |
| DNA325182 | DNA325184 | DNA325187 | DNA325190 | DNA272655 | DNA275322 |
| DNA325197 | DNA325199 | DNA325200 | DNA272213 | DNA325202 | DNA325203 |
| DNA325204 | DNA257309 | DNA325206 | DNA325209 | DNA325211 | DNA325212 |
| DNA289530 | DNA287271 | DNA325214 | DNA325216 | DNA325217 | DNA325218 |
| DNA325219 | DNA325220 | DNA325221 | DNA325222 | DNA218841 | DNA325223 |
| DNA325226 | DNA325229 | DNA88350 | DNA325235 | DNA325236 | DNA325237 |
| DNA325240 | DNA325243 | DNA325246 | DNA325247 | DNA325249 | DNA325250 |
| DNA325252 | DNA325253 | DNA325257 | DNA325258 | DNA325261 | DNA325262 |
| DNA325264 | DNA325265 | DNA325266 | DNA325267 | DNA325268 | DNA325269 |
| DNA325270 | DNA325271 | DNA325273 | DNA325274 | DNA325275 | DNA325276 |
| DNA325278 | DNA325279 | DNA325283 | DNA325288 | DNA325290 | DNA325292 |
| DNA325293 | DNA325296 | DNA325301 | DNA325302 | DNA325303 | DNA325304 |
| DNA325307 | DNA325309 | DNA325310 | DNA325312 | DNA325314 | DNA325315 |
| DNA325316 | DNA325318 | DNA325319 | DNA325320 | DNA325322 | DNA325324 |
| DNA193957 | DNA325325 | DNA325326 | DNA325328 | DNA325329 | DNA325331 |
| DNA325333 | DNA325334 | DNA325335 | DNA325336 | DNA325337 | DNA325338 |
| DNA325341 | DNA304459 | DNA325342 | DNA325343 | DNA325344 | DNA325346 |
| DNA325347 | DNA325348 | DNA325349 | DNA325355 | DNA325360 | DNA325361 |
| DNA325362 | DNA325363 | DNA325364 | DNA325365 | DNA325369 | DNA325372 |
| DNA325375 | DNA325381 | DNA325384 | DNA325385 | DNA325393 | DNA325395 |
| DNA269952 | DNA325396 | DNA325397 | DNA325400 | DNA325402 | DNA325403 |
| DNA325404 | DNA325405 | DNA325407 | DNA325408 | DNA325409 | DNA325410 |
| DNA325413 | DNA325414 | DNA325415 | DNA325417 | DNA325418 | DNA325423 |
| DNA325425 | DNA325426 | DNA325430 | DNA325434 | DNA97285 | DNA325446 |
| DNA325451 | DNA325452 | DNA325453 | DNA325456 | DNA325457 | DNA150974 |
| DNA325458 | DNA287417 | DNA227088 | DNA325462 | DNA325464 | DNA325465 |
| DNA325466 | DNA325469 | DNA287254 | DNA325471 | DNA325474 | DNA325476 |
| DNA325477 | DNA325479 | DNA325480 | DNA325481 | DNA325482 | DNA325483 |
| DNA325484 | DNA325489 | DNA325491 | DNA325492 | DNA325493 | DNA325495 |
| DNA325496 | DNA325497 | DNA325498 | DNA269803 | DNA325500 | DNA325501 |
| DNA325503 | DNA325505 | DNA270721 | DNA189687 | DNA325506 | DNA325511 |
| DNA325512 | DNA325513 | DNA103474 | DNA325514 | DNA325516 | DNA325517 |
| DNA325518 | DNA325519 | DNA325520 | DNA325521 | DNA325522 | DNA325523 |
| DNA88176 | DNA325529 | DNA325530 | DNA325534 | DNA325535 | DNA325539 |
| DNA325540 | DNA325541 | DNA325544 | DNA325545 | DNA325546 | DNA325547 |
| DNA325549 | DNA225752 | DNA325551 | DNA325553 | DNA325554 | DNA325557 |
| DNA325561 | DNA325563 | DNA325566 | DNA325568 | DNA325571 | DNA325572 |
| DNA325573 | DNA325574 | DNA325575 | DNA325579 | DNA325580 | DNA325583 |
| DNA325585 | DNA325586 | DNA325587 | DNA88114 | DNA325592 | DNA325593 |
| DNA325596 | DNA325597 | DNA325600 | DNA325601 | DNA225632 | DNA83180 |
| DNA325603 | DNA325608 | DNA325618 | DNA150997 | DNA325625 | DNA325631 |
| DNA325636 | DNA325638 | DNA325639 | DNA325642 | DNA325643 | DNA325649 |
| DNA325650 | DNA325651 | DNA325652 | DNA325653 | DNA325654 | DNA325655 |
| DNA325656 | DNA325657 | DNA325658 | DNA325659 | DNA325660 | DNA325661 |
| DNA325664 | DNA270458 | DNA227092 | DNA325665 | DNA325669 | DNA325670 |
| DNA325673 | DNA325674 | DNA325675 | DNA325676 | DNA325677 | DNA325679 |
| DNA325680 | DNA325681 | DNA325683 | DNA325684 | DNA325687 | DNA325688 |
| DNA325689 | DNA325690 | DNA325691 | DNA325695 | DNA325698 | DNA325702 |
| DNA325706 | DNA79101 | DNA325709 | DNA325711 | DNA325712 | DNA325717 |
| DNA325720 | DNA325721 | DNA325723 | DNA325724 | DNA325731 | DNA226014 |
| DNA325733 | DNA325736 | DNA325739 | DNA325747 | DNA325750 | DNA325752 |
| DNA325755 | DNA325758 | DNA325761 | DNA325762 | DNA325763 | DNA325766 |
| DNA325768 | DNA325773 | DNA325775 | DNA325776 | DNA325782 | DNA325786 |
| DNA325787 | DNA302016 | DNA325789 | DNA325793 | DNA325794 | DNA325796 |
| DNA325797 | DNA325802 | DNA325806 | DNA325807 | DNA325808 | DNA325809 |
| DNA226853 | DNA325811 | DNA325812 | DNA325814 | DNA325818 | DNA325819 |
| DNA270254 | DNA281436 | DNA325837 | DNA325838 | DNA325840 | DNA325843 |
| DNA325844 | DNA325850 | DNA325851 | DNA325852 | DNA325855 | DNA325856 |
| DNA325858 | DNA325859 | DNA325870 | DNA325875 | DNA325878 | DNA325885 |
| DNA325895 | DNA325902 | DNA225649 | DNA325913 | DNA325915 | DNA325918 |
| DNA325919 | DNA325922 | DNA325924 | DNA325928 | DNA325932 | DNA325935 |
| DNA325938 | DNA325942 | DNA325943 | DNA325946 | DNA325947 | DNA325949 |
| DNA325950 | DNA325951 | DNA325956 | DNA325960 | DNA325974 | DNA325975 |
| DNA325976 | DNA325977 | DNA325980 | DNA325981 | DNA325985 | DNA325986 |
| DNA325991 | DNA325992 | DNA325994 | DNA325995 | DNA325996 | DNA326002 |
| DNA326003 | DNA326005 | DNA326006 | DNA326007 | DNA326010 | DNA326011 |
| DNA226646 | DNA326022 | DNA287331 | DNA326024 | DNA326025 | DNA326026 |
| DNA326028 | DNA326029 | DNA326030 | DNA326032 | DNA326034 | DNA326038 |
| DNA326039 | DNA326040 | DNA326041 | DNA326042 | DNA326046 | DNA326047 |
| DNA326049 | DNA326052 | DNA326053 | DNA326057 | DNA326061 | DNA326062 |
| DNA326064 | DNA326066 | DNA326068 | DNA275181 | DNA326069 | DNA326071 |
| DNA326075 | DNA326076 | DNA326078 | DNA326079 | DNA326080 | DNA326085 |
| DNA326086 | DNA326087 | DNA326091 | DNA273839 | DNA256844 | DNA326092 |
| DNA326093 | DNA256886 | DNA326095 | DNA254781 | DNA326096 | DNA326097 |
| DNA326098 | DNA326099 | DNA326100 | DNA326102 | DNA326103 | DNA326109 |
| DNA326110 | DNA326111 | DNA326112 | DNA326113 | DNA326114 | DNA326115 |
| DNA326116 | DNA326117 | DNA326120 | DNA326121 | DNA326122 | DNA326123 |
| DNA326124 | DNA326125 | DNA326128 | DNA326129 | DNA326130 | DNA326132 |
| DNA326133 | DNA326136 | DNA326139 | DNA326140 | DNA326141 | DNA326144 |
| DNA326145 | DNA326146 | DNA326147 | DNA326149 | DNA326154 | DNA326156 |
| DNA326157 | DNA326158 | DNA254532 | DNA326161 | DNA326162 | DNA326163 |
| DNA326168 | DNA271171 | DNA326170 | DNA326171 | DNA326174 | DNA287355 |
| DNA326177 | DNA326178 | DNA326182 | DNA326185 | DNA326186 | DNA326188 |
| DNA326189 | DNA326190 | DNA326195 | DNA326196 | DNA326197 | DNA326198 |
| DNA326200 | DNA326201 | DNA326202 | DNA326204 | DNA88261 | DNA326205 |
| DNA326206 | DNA326207 | DNA326208 | DNA326209 | DNA326211 | DNA326213 |
| DNA326214 | DNA326218 | DNA326219 | DNA326221 | DNA326222 | DNA326226 |
| DNA326228 | DNA326232 | DNA326233 | DNA326234 | DNA326238 | DNA326241 |
| DNA326242 | DNA326248 | DNA326250 | DNA326251 | DNA326252 | DNA326253 |
| DNA326254 | DNA326257 | DNA326258 | DNA326260 | DNA326264 | DNA326266 |
| DNA97300 | DNA326267 | DNA326268 | DNA326269 | DNA326270 | DNA326271 |
| DNA326273 | DNA297388 | DNA326274 | DNA326276 | DNA326277 | DNA326278 |
| DNA326283 | DNA254198 | DNA326288 | DNA326289 | DNA326290 | DNA326291 |
| DNA326292 | DNA326294 | DNA326295 | DNA326296 | DNA255414 | DNA326298 |
| DNA326299 | DNA326300 | DNA326303 | DNA326307 | DNA326308 | DNA326311 |
| DNA326312 | DN326318 | DNA326319 | DNA326320 | DNA326321 | DNA326322 |
| DNA326323 | DNA66475 | DNA270979 | DNA326328 | DNA326329 | DNA326330 |
| DNA272889 | DNA326331 | DNA326332 | DNA326333 | DNA226389 | DNA326335 |
| DNA326336 | DNA326337 | DNA326340 | DNA326342 | DNA326343 | DNA326345 |
| DNA326346 | DNA88378 | DNA326347 | DNA326350 | DNA257428 | DNA326353 |
| DNA326354 | DNA326356 | DNA326359 | DNA326362 | DNA196642 | DNA270901 |
| DNA326363 | DNA326366 | DNA326367 | DNA326368 | DNA254791 | DNA287425 |
| DNA326372 | DNA326375 | DNA326376 | DNA326378 | DNA326379 | DNA287291 |
| DNA326381 | DNA326382 | DNA326383 | DNA326384 | DNA326386 | DNA326387 |
| DNA150457 | DNA326389 | DNA227055 | DNA326392 | DNA326394 | DNA326396 |
| DNA326397 | DNA326399 | DNA326401 | DNA326403 | DNA88430 | DNA326406 |
| DNA326411 | DNA326412 | DNA326413 | DNA129504 | DNA326415 | DNA326416 |
| DNA326417 | DNA326418 | DNA326419 | DNA326425 | DNA326426 | DNA326427 |
| DNA326428 | DNA326429 | DNA326430 | DNA326431 | DNA326434 | DNA326438 |
| DNA273694 | DNA326439 | DNA326449 | DNA326450 | DNA326451 | DNA326452 |
| DNA326453 | DNA326454 | DNA326457 | DNA326461 | DNA326462 | DNA326465 |
| DNA326470 | DNA326471 | DNA326478 | DNA326481 | DNA326482 | DNA326483 |
| DNA326484 | DNA326485 | DNA326487 | DNA326489 | DNA326490 | DNA326491 |
| DNA326492 | DNA326493 | DNA274101 | DNA326494 | DNA326495 | DNA326496 |
| DNA326499 | DNA326502 | DNA326505 | DNA326506 | DNA326509 | DNA326510 |
| DNA326511 | DNA326514 | DNA287636 | DNA326515 | DNA326516 | DNA326518 |
| DNA326519 | DNA326520 | DNA326521 | DNA326522 | DNA326523 | DNA326528 |
| DNA326529 | DNA326530 | DNA326531 | DNA326532 | DNA326533 | DNA326534 |
| DNA326535 | DNA326536 | DNA326537 | DNA326538 | DNA326540 | DNA274761 |
| DNA272421 | DNA326542 | DNA326546 | DNA326547 | DNA326548 | DNA326550 |
| DNA326552 | DNA326555 | DNA326557 | DNA326559 | DNA227280 | DNA326561 |
| DNA326563 | DNA326569 | DNA326570 | DNA326571 | DNA326572 | DNA326575 |
| DNA218271 | DNA326577 | DNA326578 | DNA326579 | DNA103320 | DNA326584 |
| DNA326585 | DNA274034 | DNA326586 | DNA326587 | DNA326588 | DNA326589 |
| DNA326590 | DNA326591 | DNA326592 | DNA326595 | DNA326596 | DNA326597 |
| DNA326598 | DNA326599 | DNA326600 | DNA326601 | DNA326602 | DNA326603 |
| DNA269630 | DNA326604 | DNA326605 | DNA326609 | DNA326610 | DNA287240 |
| DNA326618 | DNA326622 | DNA326623 | DNA326624 | DNA326625 | DNA227249 |
| DNA326626 | DNA326628 | DNA326633 | DNA326634 | DNA326638 | DNA326641 |
| DNA326642 | DNA326644 | DNA326645 | DNA326646 | DNA326647 | DNA256836 |
| DNA326648 | DNA326650 | DNA326653 | DNA326654 | DNA326656 | DNA326657 |
| DNA326658 | DNA326659 | DNA326662 | DNA326663 | DNA326664 | DNA272347 |
| DNA326669 | DNA326670 | DNA256840 | DNA326671 | DNA326672 | DNA326673 |
| DNA326674 | DNA326677 | DNA326679 | DNA273600 | DNA326680 | DNA326682 |
| DNA326684 | DNA326685 | DNA326686 | DNA326687 | DNA326688 | DNA326689 |
| DNA326691 | DNA326692 | DNA151808 | DNA326696 | DNA326698 | DNA326699 |
| DNA326700 | DNA326702 | DNA326705 | DNA326706 | DNA326710 | DNA326711 |
| DNA326713 | DNA88084 | DNA256533 | DNA251057 | DNA326715 | DNA326716 |
| DNA326717 | DNA326718 | DNA326721 | DNA326722 | DNA326723 | DNA326726 |
| DNA326727 | DNA326729 | DNA326730 | DNA326731 | DNA326734 | DNA326735 |
| DNA326736 | DNA326737 | DNA326739 | DNA273066 | DNA326742 | DNA326743 |
| DNA103239 | DNA326744 | DNA326745 | DNA326746 | DNA326747 | DNA326748 |
| DNA326749 | DNA269481 | DNA326751 | DNA326752 | DNA326754 | DNA326756 |
| DNA326758 | DNA326760 | DNA326761 | DNA273346 | DNA326763 | DNA326765 |
| DNA326766 | DNA272062 | DNA326768 | DNA326769 | DNA326770 | DNA326771 |
| DNA297288 | DNA304662 | DNA326772 | DNA326774 | DNA287270 | DNA326780 |
| DNA326781 | DNA326783 | DNA326785 | DNA287261 | DNA326789 | DNA83170 |
| DNA326796 | DNA326798 | DNA326805 | DNA326806 | DNA150767 | DNA326812 |
| DNA326813 | DNA326817 | DNA326818 | DNA326819 | DNA326820 | DNA326821 |
| DNA226758 | DNA194701 | DNA326823 | DNA326824 | DNA326828 | DNA326829 |
| DNA326831 | DNA326833 | DNA326835 | DNA227472 | DNA326836 | DNA103525 |
| DNA326840 | DNA326841 | DNA273320 | DNA326842 | DNA88569 | DNA326843 |
| DNA326848 | DNA326849 | DNA326852 | DNA326853 | DNA326856 | DNA326857 |
| DNA326861 | DNA326862 | DNA326863 | DNA304670 | DNA326864 | DNA326866 |
| DNA103486 | DNA326869 | DNA326878 | DNA326879 | DNA326884 | DNA326886 |
| DNA326887 | DNA326888 | DNA254572 | DNA326889 | DNA254994 | DNA326891 |
| DNA326894 | DNA326896 | DNA36897 | DNA326901 | DNA226409 | DNA326908 |
| DNA326911 | DNA326912 | DNA326913 | DNA326914 | DNA326916 | DNA255046 |
| DNA225954 | DNA326921 | DNA326922 | DNA326928 | DNA326929 | DNA326930 |
| DNA257549 | DNA304835 | DNA326935 | DNA326940 | DNA269830 | DNA326945 |
| DNA326946 | DNA326948 | DNA254141 | DNA151882 | DNA326949 | DNA326950 |
| DNA326951 | DNA326952 | DNA326953 | DNA326956 | DNA326958 | DNA188740 |
| DNA326959 | DNA290259 | DNA304719 | DNA326963 | DNA326964 | DNA326965 |
| DNA254240 | DNA326970 | DNA326972 | DNA326973 | DNA326974 | DNA326976 |
| DNA326977 | DNA326981 | DNA219225 | DNA270954 | DNA326983 | DNA326985 |
| DNA326988 | DNA326989 | DNA326990 | DNA326991 | DNA326992 | DNA326993 |
| DNA256070 | DNA327000 | DNA327002 | DNA327003 | DNA327004 | DNA327005 |
| DNA269793 | DNA327011 | DNA227689 | DNA274829 | DNA327022 | DNA327023 |
| DNA327024 | DNA327025 | DNA327028 | DNA327030 | DNA327034 | DNA327035 |
| DNA327036 | DNA327042 | DNA271580 | DNA327043 | DNA273992 | DNA327045 |
| DNA327046 | DNA327047 | DNA327051 | DNA327054 | DNA225721 | DNA327058 |
| DNA327059 | DNA327060 | DNA327061 | DNA327062 | DNA327067 | DNA327068 |
| DNA327075 | DNA327076 | DNA327077 | DNA327078 | DNA327085 | DNA76504 |
| DNA327093 | DNA273487 | DNA327098 | DNA327099 | DNA254783 | DNA227917 |
| DNA327112 | DNA327113 | DNA327115 | DNA327116 | DNA227013 | DNA225800 |
| DNA327118 | DNA225655 | DNA327119 | DNA327120 | DNA327126 | DNA327127 |

[6727] HEAD AND NECK

| | | | | | |
|---|---|---|---|---|---|
| DNA323805 | DNA323843 | DNA323861 | DNA323883 | DNA323899 | DNA323907 |
| DNA323908 | DNA323909 | DNA323986 | DNA324001 | DNA324039 | DNA270154 |
| DNA324139 | DNA324202 | DNA324258 | DNA324263 | DNA324325 | DNA324338 |
| DNA324393 | DNA272605 | DNA324425 | DNA324480 | DNA324588 | DNA324651 |
| DNA324721 | DNA324751 | DNA324784 | DNA324812 | DNA324830 | DNA227924 |
| DNA324874 | DNA324884 | DNA131588 | DNA89242 | DNA325196 | DNA325303 |
| DNA325352 | DNA325377 | DNA325503 | DNA189687 | DNA325526 | DNA325573 |
| DNA150978 | DNA325624 | DNA79313 | DNA325655 | DNA325656 | DNA325657 |
| DNA325658 | DNA325661 | DNA227094 | DNA254777 | DNA325799 | DNA325801 |
| DNA226853 | DNA325832 | DNA274058 | DNA325857 | DNA325917 | DNA325941 |
| DNA325953 | DNA325968 | DNA325989 | DNA325991 | DNA326015 | DNA326048 |
| DNA326076 | DNA326119 | DNA326135 | DNA326159 | DNA326172 | DNA287355 |
| DNA326316 | DNA326324 | DNA326329 | DNA326331 | DNA326332 | DNA88457 |
| DNA88281 | DNA226011 | DNA326738 | DNA273517 | DNA326839 | DNA326873 |
| DNA326884 | DNA326958 | DNA327038 | DNA327078 | | |

[6728] PLACENTA

| | | | | | |
|---|---|---|---|---|---|
| DNA323721 | DNA323723 | DNA323728 | DNA323729 | DNA323734 | DNA287173 |
| DNA323736 | DNA227821 | DNA323738 | DNA323739 | DNA273712 | DNA323741 |
| DNA323747 | DNA323750 | DNA323753 | DNA323756 | DNA323763 | DNA323765 |
| DNA323766 | DNA323773 | DNA323776 | DNA323777 | DNA323778 | DNA323781 |
| DNA323782 | DNA323783 | DNA323784 | DNA196349 | DNA323789 | DNA323791 |
| DNA323792 | DNA323793 | DNA323794 | DNA323800 | DNA323804 | DNA227213 |
| DNA323809 | DNA323811 | DNA189315 | DNA323817 | DNA323819 | DNA323820 |
| DNA323822 | DNA274745 | DNA273060 | DNA272024 | DNA323829 | DNA323831 |
| DNA323832 | DNA323833 | DNA304686 | DNA323834 | DNA323835 | DNA323839 |
| DNA323840 | DNA323841 | DNA323842 | DNA323847 | DNA323856 | DNA323857 |
| DNA323858 | DNA323859 | DNA226260 | DNA323862 | DNA323863 | DNA323867 |
| DNA323868 | DNA323869 | DNA323870 | DNA271003 | DNA323871 | DNA323872 |
| DNA323874 | DNA323875 | DNA323876 | DNA323880 | DNA323882 | DNA323887 |
| DNA323888 | DNA323891 | DNA323892 | DNA323896 | DNA323900 | DNA227529 |
| DNA323902 | DNA323905 | DNA323906 | DNA227577 | DNA323914 | DNA323915 |
| DNA323916 | DNA323920 | DNA323925 | DNA323927 | DNA226125 | DNA323936 |
| DNA323940 | DNA323941 | DNA323944 | DNA323947 | DNA323952 | DNA323954 |
| DNA323959 | DNA323963 | DNA323964 | DNA323966 | DNA323971 | DNA323972 |
| DNA323973 | DNA323974 | DNA323980 | DNA323981 | DNA323996 | DNA323999 |
| DNA324004 | DNA324009 | DNA324014 | DNA324018 | DNA324026 | DNA324030 |
| DNA324031 | DNA324032 | DNA324035 | DNA324037 | DNA324038 | DNA324042 |
| DNA324043 | DNA324044 | DNA324047 | DNA324048 | DNA324049 | DNA324054 |
| DNA275195 | DNA324060 | DNA324063 | DNA324067 | DNA324068 | DNA324070 |
| DNA324072 | DNA324073 | DNA324089 | DNA324090 | DNA324091 | DNA324092 |
| DNA324093 | DNA324096 | DNA324101 | DNA275066 | DNA324106 | DNA324109 |
| DNA324110 | DNA324111 | DNA324112 | DNA324115 | DNA324119 | DNA227795 |
| DNA287167 | DNA324130 | DNA324133 | DNA324134 | DNA150725 | DNA324140 |
| DNA324141 | DNA324142 | DNA324143 | DNA324144 | DNA324150 | DNA324151 |
| DNA324152 | DNA324153 | DNA324154 | DNA324156 | DNA275240 | DNA324169 |
| DNA324170 | DNA324171 | DNA324172 | DNA324175 | DNA324182 | DNA324186 |
| DNA304805 | DNA324189 | DNA324190 | DNA324191 | DNA324193 | DNA324195 |
| DNA324199 | DNA324200 | DNA324201 | DNA324203 | DNA324204 | DNA271608 |
| DNA324206 | DNA324207 | DNA324209 | DNA324210 | DNA324212 | DNA324213 |
| DNA324214 | DNA324215 | DNA324218 | DNA324219 | DNA324224 | DNA324226 |
| DNA324230 | DNA189697 | DNA324244 | DNA324247 | DNA324254 | DNA324258 |
| DNA324260 | DNA324266 | DNA324268 | DNA324269 | DNA324270 | DNA324271 |
| DNA324272 | DNA324274 | DNA324276 | DNA151017 | DNA324277 | DNA324281 |
| DNA324282 | DNA324289 | DNA271187 | DNA269930 | DNA324292 | DNA324293 |
| DNA324294 | DNA226547 | DNA324295 | DNA324298 | DNA324302 | DNA324308 |
| DNA324310 | DNA324311 | DNA324313 | DNA324316 | DNA150562 | DNA254582 |
| DNA324320 | DNA324322 | DNA324326 | DNA324337 | DNA269730 | DNA324338 |
| DNA324339 | DNA324340 | DNA324341 | DNA324343 | DNA324344 | DNA324347 |
| DNA324348 | DNA324350 | DNA324351 | DNA324358 | DNA324360 | DNA324365 |
| DNA324368 | DNA324373 | DNA324375 | DNA324376 | DNA324379 | DNA324380 |
| DNA269858 | DNA324387 | DNA324390 | DNA324396 | DNA324398 | DNA324399 |
| DNA324400 | DNA324402 | DNA324405 | DNA324408 | DNA324409 | DNA324411 |
| DNA324412 | DNA324416 | DNA324417 | DNA324418 | DNA324419 | DNA324423 |
| DNA324430 | DNA324431 | DNA324432 | DNA324434 | DNA324436 | DNA324437 |
| DNA324444 | DNA324445 | DNA324446 | DNA324447 | DNA324448 | DNA270615 |
| DNA324450 | DNA324451 | DNA324452 | DNA324459 | DNA324460 | DNA324461 |
| DNA324463 | DNA324464 | DNA324468 | DNA324469 | DNA324472 | DNA324473 |
| DNA324478 | DNA324479 | DNA257511 | DNA324481 | DNA324483 | DNA324491 |
| DNA324495 | DNA324496 | DNA324501 | DNA324502 | DNA324508 | DNA324510 |
| DNA324512 | DNA324519 | DNA324520 | DNA324521 | DNA324525 | DNA324529 |
| DNA324530 | DNA324531 | DNA324537 | DNA324538 | DNA324539 | DNA324541 |
| DNA324542 | DNA324543 | DNA324544 | DNA324545 | DNA324547 | DNA324549 |
| DNA324550 | DNA324561 | DNA324563 | DNA324564 | DNA324565 | DNA227173 |
| DNA324570 | DNA324571 | DNA324572 | DNA287282 | DNA324576 | DNA324579 |
| DNA324581 | DNA324582 | DNA324583 | DNA324584 | DNA288259 | DNA324586 |
| DNA324590 | DNA324591 | DNA324592 | DNA324593 | DNA324595 | DNA324596 |
| DNA324597 | DNA324598 | DNA324599 | DNA324600 | DNA324601 | DNA324603 |
| DNA324604 | DNA257253 | DNA324611 | DNA324613 | DNA324616 | DNA324617 |
| DNA324618 | DNA324619 | DNA324621 | DNA324622 | DNA324624 | DNA103380 |
| DNA324629 | DNA324630 | DNA324631 | DNA324632 | DNA324633 | DNA324634 |
| DNA324641 | DNA324645 | DNA324646 | DNA324647 | DNA302020 | DNA324650 |
| DNA324677 | DNA324678 | DNA324680 | DNA324682 | DNA226418 | DNA324685 |
| DNA324687 | DNA324688 | DNA324689 | DNA324690 | DNA324693 | DNA227320 |
| DNA324696 | DNA324697 | DNA324707 | DNA324712 | DNA324715 | DNA324716 |
| DNA270675 | DNA324717 | DNA324720 | DNA324722 | DNA324723 | DNA324725 |
| DNA324727 | DNA304680 | DNA324730 | DNA324735 | DNA324736 | DNA324737 |
| DNA324741 | DNA324742 | DNA275630 | DNA324745 | DNA324746 | DNA324751 |
| DNA324752 | DNA324753 | DNA324754 | DNA324756 | DNA324759 | DNA324760 |
| DNA324761 | DNA324763 | DNA324764 | DNA324765 | DNA304661 | DNA324771 |
| DNA324775 | DNA324776 | DNA324777 | DNA324778 | DNA324779 | DNA324780 |
| DNA324781 | DNA324783 | DNA304699 | DNA324785 | DNA271040 | DNA324790 |
| DNA324794 | DNA324796 | DNA324797 | DNA324806 | DNA324811 | DNA324818 |
| DNA324820 | DNA324822 | DNA324824 | DNA324827 | DNA324830 | DNA324832 |
| DNA324833 | DNA324835 | DNA324840 | DNA324841 | DNA324844 | DNA324846 |
| DNA271418 | DNA324849 | DNA324853 | DNA324857 | DNA324859 | DNA324860 |
| DNA324862 | DNA324864 | DNA324866 | DNA324868 | DNA324871 | DNA324872 |
| DNA324889 | DNA324891 | DNA225631 | DNA274326 | DNA324895 | DNA247595 |
| DNA324898 | DNA324900 | DNA324901 | DNA324902 | DNA324909 | DNA324915 |
| DNA324916 | DNA324917 | DNA324920 | DNA275334 | DNA324925 | DNA324926 |
| DNA324928 | DNA324929 | DNA273865 | DNA324934 | DNA324936 | DNA324937 |
| DNA287189 | DNA324939 | DNA324940 | DNA103588 | DNA324950 | DNA324951 |
| DNA324952 | DNA324961 | DNA324965 | DNA324966 | DNA324967 | DNA324968 |
| DNA324975 | DNA324976 | DNA324982 | DNA324986 | DNA272090 | DNA324989 |
| DNA324990 | DNA324991 | DNA324992 | DNA324993 | DNA324994 | DNA324995 |
| DNA270711 | DNA325001 | DNA325002 | DNA325003 | DNA325004 | DNA325006 |
| DNA325008 | DNA325013 | DNA325015 | DNA325021 | DNA325024 | DNA325026 |
| DNA325027 | DNA325028 | DNA325030 | DNA325033 | DNA325034 | DNA325042 |
| DNA325048 | DNA226337 | DNA325051 | DNA325053 | DNA325067 | DNA325078 |
| DNA325079 | DNA325080 | DNA325081 | DNA325087 | DNA325088 | DNA325095 |
| DNA325099 | DNA325101 | DNA325102 | DNA325103 | DNA325104 | DNA325105 |
| DNA325106 | DNA226496 | DNA325111 | DNA325113 | DNA325114 | DNA325116 |
| DNA325117 | DNA325118 | DNA325119 | DNA325123 | DNA131588 | DNA325126 |
| DNA325128 | DNA325129 | DNA325132 | DNA325133 | DNA325136 | DNA325139 |
| DNA325140 | DNA325141 | DNA325144 | DNA325146 | DNA325150 | DNA325152 |
| DNA325153 | DNA325156 | DNA325157 | DNA325162 | DNA325164 | DNA325168 |
| DNA271847 | DNA270991 | DNA325173 | DNA325174 | DNA325175 | DNA325176 |
| DNA325179 | DNA325181 | DNA227491 | DNA325182 | DNA325183 | DNA325184 |
| DNA325185 | DNA325187 | DNA325189 | DNA325190 | DNA325196 | DNA325200 |
| DNA325201 | DNA325202 | DNA254543 | DNA325206 | DNA325209 | DNA325213 |
| DNA325214 | DNA325215 | DNA325219 | DNA325222 | DNA325223 | DNA325225 |
| DNA325228 | DNA325229 | DNA325232 | DNA325244 | DNA325248 | DNA325250 |
| DNA325253 | DNA325259 | DNA325260 | DNA325263 | DNA325265 | DNA325272 |
| DNA325277 | DNA325280 | DNA325289 | DNA325293 | DNA273759 | DNA325294 |
| DNA325301 | DNA325303 | DNA325305 | DNA325308 | DNA325311 | DNA325326 |
| DNA325328 | DNA325329 | DNA325334 | DNA103421 | DNA325343 | DNA325344 |
| DNA325346 | DNA325347 | DNA325353 | DNA325356 | DNA325358 | DNA325359 |
| DNA325360 | DNA325364 | DNA325366 | DNA325370 | DNA325375 | DNA325378 |
| DNA325381 | DNA273521 | DNA325383 | DNA325384 | DNA325389 | DNA325394 |
| DNA325395 | DNA269431 | DNA325405 | DNA325412 | DNA325418 | DNA325424 |
| DNA325430 | DNA325431 | DNA325439 | DNA325441 | DNA325442 | DNA325443 |
| DNA325444 | DNA325445 | DNA325447 | DNA325448 | DNA325451 | DNA325452 |
| DNA325454 | DNA325455 | DNA325456 | DNA270134 | DNA325460 | DNA287417 |
| DNA325463 | DNA325464 | DNA325465 | DNA325468 | DNA325470 | DNA325475 |
| DNA325478 | DNA325479 | DNA325480 | DNA325483 | DNA325486 | DNA325487 |
| DNA325488 | DNA325490 | DNA325494 | DNA325498 | DNA325504 | DNA270721 |
| DNA325506 | DNA325507 | DNA325508 | DNA325513 | DNA325522 | DNA325523 |
| DNA325527 | DNA325529 | DNA325530 | DNA325534 | DNA325535 | DNA325541 |
| DNA325544 | DNA271843 | DNA325556 | DNA325557 | DNA325560 | DNA325567 |
| DNA25570 | DNA325576 | DNA325582 | DNA325584 | DNA325587 | DNA325589 |
| DNA325593 | DNA325595 | DNA325596 | DNA325597 | DNA254624 | DNA325601 |
| DNA225632 | DNA325602 | DNA325610 | DNA325611 | DNA325616 | DNA325618 |
| DNA325621 | DNA325625 | DNA325626 | DNA325627 | DNA325632 | DNA325633 |
| DNA271344 | DNA325640 | DNA325642 | DNA325644 | DNA325645 | DNA325648 |
| DNA227191 | DNA270458 | DNA227092 | DNA325666 | DNA325674 | DNA325680 |
| DNA325681 | DNA304783 | DNA325685 | DNA325686 | DNA325688 | DNA325689 |
| DNA325695 | DNA325699 | DNA325700 | DNA325701 | DNA325704 | DNA325707 |
| DNA325711 | DNA325712 | DNA325720 | DNA325724 | DNA325727 | DNA325728 |
| DNA325729 | DNA304694 | DNA325730 | DNA227474 | DNA325731 | DNA227171 |
| DNA325732 | DNA271492 | DNA325733 | DNA325736 | DNA325737 | DNA325739 |
| DNA325750 | DNA325751 | DNA325752 | DNA325758 | DNA325760 | DNA325762 |
| DNA325763 | DNA325772 | DNA325773 | DNA325775 | DNA325776 | DNA325782 |
| DNA325783 | DNA325784 | DNA325785 | DNA325786 | DNA270677 | DNA325787 |
| DNA302016 | DNA325789 | DNA325792 | DNA325798 | DNA325802 | DNA325805 |
| DNA325806 | DNA325809 | DNA270015 | DNA325810 | DNA325811 | DNA325812 |
| DNA325813 | DNA325814 | DNA325816 | DNA325818 | DNA325820 | DNA304669 |
| DNA281436 | DNA325828 | DNA325829 | DNA325830 | DNA325833 | DNA325834 |
| DNA325837 | DNA325838 | DNA325843 | DNA325844 | DNA325847 | DNA325860 |
| DNA325861 | DNA325862 | DNA325863 | DNA325865 | DNA325866 | DNA325867 |
| DNA325872 | DNA325874 | DNA325876 | DNA325877 | DNA325880 | DNA325881 |
| DNA325882 | DNA325886 | DNA325887 | DNA325888 | DNA325889 | DNA325893 |
| DNA325900 | DNA325903 | DNA325904 | DNA325906 | DNA325908 | DNA325910 |
| DNA325911 | DNA325912 | DNA325913 | DNA325921 | DNA269498 | DNA325922 |
| DNA325925 | DNA325926 | DNA325927 | DNA325933 | DNA325935 | DNA325936 |
| DNA325939 | DNA325941 | DNA325944 | DNA325947 | DNA325948 | DNA325949 |
| DNA325950 | DNA103509 | DNA325959 | DNA325961 | DNA325962 | DNA325963 |
| DNA325965 | DNA325966 | DNA325972 | DNA325973 | DNA325980 | DNA325982 |
| DNA325983 | DNA227559 | DNA325985 | DNA325987 | DNA325988 | DNA325994 |
| DNA325995 | DNA325997 | DNA326001 | DNA326002 | DNA326003 | DNA326010 |
| DNA326016 | DNA326019 | DNA326020 | DNA326021 | DNA326022 | DNA326023 |
| DNA287331 | DNA326028 | DNA326036 | DNA326041 | DNA326044 | DNA326046 |
| DNA326047 | DNA326050 | DNA326051 | DNA326056 | DNA275144 | DNA326058 |
| DNA326063 | DNA326070 | DNA326073 | DNA326075 | DNA326081 | DNA326082 |
| DNA326084 | DNA326088 | DNA273839 | DNA326094 | DNA326097 | DNA326099 |
| DNA326103 | DNA326104 | DNA326105 | DNA326106 | DNA326108 | DNA326116 |
| DNA326117 | DNA326118 | DNA326121 | DNA326122 | DNA326124 | DNA326125 |
| DNA326128 | DNA326129 | DNA326134 | DNA289522 | DNA326136 | DNA326150 |
| DNA326151 | DNA274002 | DNA326152 | DNA326153 | DNA326154 | DNA326155 |
| DNA326156 | DNA326157 | DNA326167 | DNA326168 | DNA271171 | DNA326173 |
| DNA287355 | DNA326176 | DNA326179 | DNA194805 | DNA326181 | DNA326183 |
| DNA326184 | DNA326186 | DNA326188 | DNA326191 | DNA326192 | DNA326195 |
| DNA326196 | DNA326197 | DNA326198 | DNA275408 | DNA326200 | DNA189703 |
| DNA326201 | DNA326203 | DNA304704 | DNA326208 | DNA326210 | DNA326211 |
| DNA326212 | DNA326214 | DNA326217 | DNA326222 | DNA326223 | DNA326224 |
| DNA326225 | DNA326227 | DNA227234 | DNA326233 | DNA326234 | DNA326249 |
| DNA326251 | DNA326252 | DNA326255 | DNA326260 | DNA326261 | DNA326262 |
| DNA97300 | DNA326268 | DNA326272 | DNA326273 | DNA326278 | DNA103401 |
| DNA326285 | DNA326288 | DNA290292 | DNA326289 | DNA326291 | DNA326292 |
| DNA326296 | DNA326305 | DNA326311 | DNA326313 | DNA326314 | DNA326315 |
| DNA326316 | DNA287427 | DNA326322 | DNA326324 | DNA326325 | DNA326326 |
| DNA326330 | DNA326334 | DNA326338 | DNA326339 | DNA326340 | DNA326342 |
| DNA326343 | DNA326344 | DNA326356 | DNA326361 | DNA270901 | DNA326364 |
| DNA97290 | DNA227071 | DNA326369 | DNA287425 | DNA326377 | DNA326381 |
| DNA326384 | DNA326385 | DNA326387 | DNA326388 | DNA227055 | DNA326395 |
| DNA326396 | DNA326397 | DNA150814 | DNA326399 | DNA326406 | DNA326407 |
| DNA326408 | DNA326409 | DNA326410 | DNA326411 | DNA129504 | DNA326415 |
| DNA326421 | DNA326424 | DNA326427 | DNA326430 | DNA326435 | DNA326445 |
| DNA326448 | DNA326449 | DNA326450 | DNA326451 | DNA326452 | DNA326453 |
| DNA326454 | DNA256813 | DNA326457 | DNA326459 | DNA326463 | DNA326464 |
| DNA326466 | DNA326467 | DNA326468 | DNA326469 | DNA326471 | DNA326472 |
| DNA326474 | DNA326477 | DNA326483 | DNA326484 | DNA326485 | DNA326486 |
| DNA326487 | DNA326488 | DNA326489 | DNA326490 | DNA326491 | DNA326495 |
| DNA326496 | DNA326499 | DNA326507 | DNA326508 | DNA326510 | DNA326513 |
| DNA326514 | DNA287636 | DNA326515 | DNA326516 | DNA326518 | DNA326520 |
| DNA326524 | DNA326525 | DNA326529 | DNA326530 | DNA326544 | DNA326548 |
| DNA326549 | DNA326551 | DNA326553 | DNA326557 | DNA326559 | DNA227280 |
| DNA270621 | DNA326563 | DNA326564 | DNA326565 | DNA326567 | DNA326569 |
| DNA326579 | DNA326580 | DNA326585 | DNA287243 | DNA326589 | DNA326593 |
| DNA326594 | DNA326595 | DNA269894 | DNA326596 | DNA326597 | DNA326603 |
| DNA326604 | DNA326606 | DNA326607 | DNA326611 | DNA326612 | DNA326613 |
| DNA326616 | DNA326624 | DNA227249 | DNA326626 | DNA326627 | DNA326631 |
| DNA326632 | DNA326633 | DNA326634 | DNA326636 | DNA326637 | DNA326639 |
| DNA326640 | DNA326641 | DNA326643 | DNA326649 | DNA326651 | DNA326657 |
| DNA273474 | DNA272347 | DNA326669 | DNA326671 | DNA274139 | DNA273600 |
| DNA326680 | DNA326681 | DNA326683 | DNA326686 | DNA326687 | DNA326688 |
| DNA326689 | DNA326690 | DNA326691 | DNA326695 | DNA326698 | DNA326702 |
| DNA326704 | DNA326705 | DNA326706 | DNA326707 | DNA103580 | DNA256533 |
| DNA326714 | DNA274289 | DNA326717 | DNA326719 | DNA326720 | DNA326724 |
| DNA326727 | DNA326728 | DNA274823 | DNA290260 | DNA326733 | DNA326736 |
| DNA273066 | DNA326741 | DNA326742 | DNA326749 | DNA326755 | DNA326756 |
| DNA326757 | DNA326758 | DNA326760 | DNA273346 | DNA254548 | DNA326767 |
| DNA326769 | DNA297288 | DNA326775 | DNA326776 | DNA326777 | DNA326778 |
| DNA287270 | DNA326780 | DNA326781 | DNA326782 | DNA326784 | DNA326786 |
| DNA326787 | DNA326788 | DNA271010 | DNA287290 | DNA326793 | DNA326794 |
| DNA326796 | DNA326797 | DNA326798 | DNA326799 | DNA326804 | DNA326807 |
| DNA326808 | DNA326809 | DNA326812 | DNA326814 | DNA326815 | DNA97298 |
| DNA326819 | DNA326822 | DNA194701 | DNA326827 | DNA326831 | DNA103525 |
| DNA326845 | DNA326847 | DNA326855 | DNA326856 | DNA326858 | DNA326866 |
| DNA103486 | DNA326870 | DNA326871 | DNA326873 | DNA326877 | DNA326879 |
| DNA326880 | DNA326881 | DNA269746 | DNA326883 | DNA326884 | DNA326885 |
| DNA326886 | DNA254572 | DNA274129 | DNA326895 | DNA326899 | DNA326900 |
| DNA326901 | DNA326902 | DNA326915 | DNA226617 | DNA326917 | DNA326920 |
| DNA326921 | DNA326928 | DNA326933 | DNA326934 | DNA326935 | DNA326936 |
| DNA326937 | DNA326938 | DNA326940 | DNA326941 | DNA269830 | DNA326943 |
| DNA326944 | DNA103462 | DNA326946 | DNA326947 | DNA254141 | DNA270697 |
| DNA326952 | DNA326953 | DNA151752 | DNA326956 | DNA326957 | DNA188740 |
| DNA326964 | DNA326965 | DNA254240 | DNA326966 | DNA326967 | DNA326968 |
| DNA326974 | DNA326975 | DNA326976 | DNA326977 | DNA326978 | DNA254165 |
| DNA326980 | DNA326981 | DNA270954 | DNA326983 | DNA326984 | DNA326985 |
| DNA326986 | DNA326988 | DNA326989 | DNA326990 | DNA326992 | DNA326994 |
| DNA326996 | DNA326997 | DNA326999 | DNA327003 | DNA327005 | DNA327015 |
| DNA327018 | DNA327021 | DNA327023 | DNA327025 | DNA327029 | DNA327030 |
| DNA327031 | DNA327032 | DNA327037 | DNA327039 | DNA238039 | DNA273992 |
| DNA327046 | DNA327047 | DNA327048 | DNA327049 | DNA327051 | DNA327054 |
| DNA327058 | DNA327060 | DNA327062 | DNA327063 | DNA327064 | DNA327067 |
| DNA327068 | DNA327069 | DNA327070 | DNA327071 | DNA327073 | DNA327074 |
| DNA327077 | DNA327078 | DNA327079 | DNA254785 | DNA327086 | DNA327087 |
| DNA327088 | DNA327094 | DNA327095 | DNA327096 | DNA327097 | DNA327103 |
| DNA327104 | DNA327105 | DNA327107 | DNA327108 | DNA327109 | DNA327110 |
| DNA254783 | DNA327111 | DNA327114 | DNA327115 | DNA327116 | DNA327117 |
| DNA227013 | DNA230792 | DNA103558 | DNA327122 | DNA327123 | |

[6729] PINEAL GLAND

| | | | | | |
|---|---|---|---|---|---|
| DNA287173 | DNA323879 | DNA323924 | DNA273088 | DNA323988 | DNA324002 |
| DNA324042 | DNA324048 | DNA324090 | DNA324091 | DNA324092 | DNA324216 |
| DNA324229 | DNA324246 | DNA324296 | DNA324340 | DNA324341 | DNA324521 |
| DNA324554 | DNA324561 | DNA324575 | DNA324636 | DNA324642 | DNA324731 |
| DNA324737 | DNA227607 | DNA304668 | DNA287319 | DNA324784 | DNA324815 |
| DNA324816 | DNA324872 | DNA324885 | DNA225631 | DNA324905 | DNA324930 |
| DNA226416 | DNA324940 | DNA324943 | DNA325026 | DNA325027 | DNA225671 |
| DNA325208 | DNA325231 | DNA325234 | DNA325296 | DNA325475 | DNA271324 |
| DNA325601 | DNA225632 | DNA325642 | DNA325644 | DNA325786 | DNA302016 |
| DNA325789 | DNA325803 | DNA325804 | DNA325883 | DNA325932 | DNA326099 |
| DNA28755 | DNA326363 | DNA326543 | DNA326672 | DNA326909 | DNA326910 |
| DNA327009 | DNA327023 | DNA327025 | DNA327121 | | |

[6730] LYMPH NODE

| | | | | | |
|---|---|---|---|---|---|
| DNA227213 | DNA323858 | DNA323859 | DNA323862 | DNA323863 | DNA323864 |
| DNA323866 | DNA323872 | DNA323887 | DNA323925 | DNA226619 | DNA324056 |
| DNA324091 | DNA324092 | DNA324099 | DNA324100 | DNA324113 | DNA324154 |
| DNA324155 | DNA324193 | DNA324204 | DNA324218 | DNA324417 | DNA324418 |
| DNA324434 | DNA324472 | DNA324495 | DNA324501 | DNA324503 | DNA324504 |
| DNA324505 | DNA324521 | DNA324525 | DNA324551 | DNA324552 | DNA324554 |
| DNA324555 | DNA324556 | DNA324557 | DNA324558 | DNA324574 | DNA324575 |
| DNA324595 | DNA324596 | DNA324613 | DNA324632 | DNA324645 | DNA324682 |
| DNA324690 | DNA304680 | DNA324737 | DNA324756 | DNA324785 | DNA324790 |
| DNA324828 | DNA324829 | DNA324841 | DNA324904 | DNA324905 | DNA324906 |
| DNA324907 | DNA324908 | DNA324981 | DNA324982 | DNA324989 | DNA324991 |
| DNA324992 | DNA325006 | DNA325079 | DNA325111 | DNA325126 | DNA325156 |
| DNA325157 | DNA325179 | DNA287216 | DNA288247 | DNA325231 | DNA325233 |
| DNA325234 | DNA325235 | DNA325236 | DNA325250 | DNA325326 | DNA325346 |
| DNA325347 | DNA325360 | DNA325384 | DNA325389 | DNA325535 | DNA325576 |
| DNA325601 | DNA225632 | DNA325625 | DNA325642 | DNA325683 | DNA325684 |
| DNA325750 | DNA325752 | DNA325758 | DNA325786 | DNA302016 | DNA325789 |
| DNA325913 | DNA151893 | DNA325935 | DNA325954 | DNA325955 | DNA325985 |
| DNA325991 | DNA325994 | DNA326002 | DNA326022 | DNA287331 | DNA326041 |
| DNA326046 | DNA326047 | DNA326075 | DNA326095 | DNA326099 | DNA326121 |
| DNA326146 | DNA97300 | DNA270975 | DNA326373 | DNA326416 | DNA326427 |
| DNA326449 | DNA326457 | DNA326459 | DNA326463 | DNA326633 | DNA326742 |
| DNA326885 | DNA326952 | DNA326974 | DNA327023 | DNA327025 | |

[6731] COLON

| | | | | | |
|---|---|---|---|---|---|
| DNA287173 | DNA323865 | DNA323867 | DNA323871 | DNA323947 | DNA323964 |
| DNA324039 | DNA324048 | DNA324090 | DNA324091 | DNA324092 | DNA324111 |
| DNA324112 | DNA227795 | DNA324155 | DNA226547 | DNA324417 | DNA324418 |
| DNA324423 | DNA324437 | DNA324495 | DNA324496 | DNA324501 | DNA324502 |
| DNA324504 | DNA324505 | DNA324521 | DNA324525 | DNA324550 | DNA324552 |
| DNA324556 | DNA324557 | DNA324558 | DNA324575 | DNA324604 | DNA324613 |
| DNA324624 | DNA324697 | DNA324717 | DNA324720 | DNA304680 | DNA324737 |
| DNA324756 | DNA324785 | DNA324790 | DNA324828 | DNA324829 | DNA324865 |
| DNA324904 | DNA324905 | DNA324906 | DNA324907 | DNA324908 | DNA324989 |
| DNA325026 | DNA325027 | DNA325033 | DNA325068 | DNA325104 | DNA325105 |
| DNA325106 | DNA325116 | DNA325128 | DNA325129 | DNA325156 | DNA325157 |
| DNA325182 | DNA325183 | DNA325184 | DNA325231 | DNA325232 | DNA325233 |
| DNA325234 | DNA325235 | DNA325236 | DNA325250 | DNA325326 | DNA325347 |
| DNA325358 | DNA325414 | DNA325418 | DNA189687 | DNA325570 | DNA325601 |
| DNA225632 | DNA325605 | DNA325619 | DNA256072 | DNA325642 | DNA325644 |
| DNA270458 | DNA227092 | DNA325731 | DNA226014 | DNA325786 | DNA302016 |
| DNA325789 | DNA325810 | DNA325811 | DNA325812 | DNA325913 | DNA325914 |
| DNA325941 | DNA325985 | DNA326002 | DNA287331 | DNA326099 | DNA326121 |
| DNA326122 | DNA326124 | DNA326136 | DNA326330 | DNA326396 | DNA326457 |
| DNA326529 | DNA326617 | DNA326633 | DNA326634 | DNA326651 | DNA290260 |
| DNA273517 | DNA326886 | DNA226409 | DNA326958 | DNA327025 | DNA327029 |
| DNA327067 | | | | | |

[6732] PANCREAS

| | | | | | |
|---|---|---|---|---|---|
| DNA323732 | DNA287173 | DNA323745 | DNA323778 | DNA323781 | DNA323783 |
| DNA323803 | DNA323806 | DNA323808 | DNA323815 | DNA103253 | DNA304686 |
| DNA323856 | DNA323864 | DNA323866 | DNA323878 | DNA323882 | DNA210134 |
| DNA323920 | DNA323923 | DNA323927 | DNA323951 | DNA226619 | DNA226005 |
| DNA83046 | DNA324017 | DNA324042 | DNA324048 | DNA324073 | DNA324091 |
| DNA324092 | DNA324119 | DNA227795 | DNA227528 | DNA324139 | DNA324155 |
| DNA324193 | DNA324195 | DNA324197 | DNA324216 | DNA324220 | DNA324221 |
| DNA324229 | DNA324317 | DNA324320 | DNA324340 | DNA324341 | DNA324352 |
| DNA324364 | DNA324366 | DNA324367 | DNA324380 | DNA324398 | DNA324412 |
| DNA324417 | DNA324418 | DNA324495 | DNA324501 | DNA324504 | DNA324505 |
| DNA324521 | DNA324536 | DNA324552 | DNA324557 | DNA324558 | DNA288259 |
| DNA324591 | DNA83020 | DNA324636 | DNA324642 | DNA324697 | DNA324702 |
| DNA324715 | DNA324716 | DNA324717 | DNA304680 | DNA324737 | DNA227204 |
| DNA324744 | DNA324756 | DNA324770 | DNA272263 | DNA324784 | DNA324790 |
| DNA324795 | DNA324824 | DNA324828 | DNA324829 | DNA324850 | DNA324858 |
| DNA324880 | DNA324884 | DNA324885 | DNA324891 | DNA225631 | DNA274326 |
| DNA324896 | DNA324904 | DNA324906 | DNA324922 | DNA324930 | DNA324935 |
| DNA304710 | DNA324962 | DNA324963 | DNA324972 | DNA324973 | DNA324977 |
| DNA272090 | DNA83141 | DNA325009 | DNA325027 | DNA325033 | DNA304685 |
| DNA325064 | DNA325079 | DNA325099 | DNA325104 | DNA325105 | DNA325106 |
| DNA325126 | DNA325136 | DNA325146 | DNA325156 | DNA325157 | DNA290319 |
| DNA254771 | DNA89242 | DNA325184 | DNA325185 | DNA325202 | DNA325229 |
| DNA88350 | DNA325233 | DNA325235 | DNA325236 | DNA325247 | DNA325254 |
| DNA325262 | DNA325268 | DNA325296 | DNA325330 | DNA325332 | DNA325335 |
| DNA325336 | DNA287237 | DNA325355 | DNA325360 | DNA325384 | DNA325398 |
| DNA325403 | DNA325405 | DNA325411 | DNA325414 | DNA325418 | DNA325428 |
| DNA97285 | DNA325450 | DNA325453 | DNA325475 | DNA325493 | DNA325506 |
| DNA325532 | DNA325548 | DNA325596 | DNA325601 | DNA225632 | DNA226771 |
| DNA325642 | DNA325655 | DNA325656 | DNA325657 | DNA325658 | DNA325660 |
| DNA325661 | DNA325663 | DNA270458 | DNA227092 | DNA196351 | DNA325680 |
| DNA325740 | DNA325741 | DNA325742 | DNA325743 | DNA325744 | DNA325745 |
| DNA325746 | DNA325750 | DNA325752 | DNA325757 | DNA325758 | DNA325760 |
| DNA325775 | DNA325776 | DNA325786 | DNA325788 | DNA325803 | DNA325804 |
| DNA325826 | DNA325912 | DNA103509 | DNA325952 | DNA325953 | DNA326003 |
| DNA326016 | DNA287331 | DNA326047 | DNA326053 | DNA326055 | DNA326058 |
| DNA150485 | DNA326060 | DNA326072 | DNA326092 | DNA326099 | DNA326110 |
| DNA326129 | DNA326157 | DNA326165 | DNA326166 | DNA287355 | DNA326210 |
| DNA326220 | DNA326233 | DNA326234 | DNA97300 | DNA326288 | DNA326291 |
| DNA326292 | DNA326300 | DNA326328 | DNA326330 | DNA326331 | DNA326333 |
| DNA326352 | DNA326370 | DNA326378 | DNA326397 | DNA88430 | DNA326410 |
| DNA326415 | DNA326416 | DNA326426 | DNA326480 | DNA326481 | DNA326482 |
| DNA256555 | DNA326523 | DNA326563 | DNA326577 | DNA326603 | DNA326604 |
| DNA326615 | DNA326621 | DNA326625 | DNA227249 | DNA326646 | DNA326657 |
| DNA326663 | DNA326664 | DNA326665 | DNA326666 | DNA326667 | DNA272347 |
| DNA326668 | DNA326669 | DNA326671 | DNA274139 | DNA326675 | DNA326680 |
| DNA326692 | DNA326698 | DNA326712 | DNA326717 | DNA304658 | DNA326752 |
| DNA326760 | DNA326762 | DNA273346 | DNA254548 | DNA326769 | DNA326776 |
| DNA326777 | DNA287270 | DNA326790 | DNA326803 | DNA326818 | DNA326829 |
| DNA194807 | DNA103525 | DNA326860 | DNA326879 | DNA226409 | DNA326907 |
| DNA326911 | DNA326912 | DNA326913 | DNA326952 | DNA326955 | DNA304719 |
| DNA327023 | DNA327025 | DNA327042 | DNA273254 | DNA327116 | DNA227013 |
| DNA103558 | DNA327120 | | | | |

[6733] PROSTATE

| | | | | | |
|---|---|---|---|---|---|
| DNA287173 | DNA323749 | DNA323774 | DNA323779 | DNA323780 | DNA323806 |
| DNA323820 | DNA304686 | DNA323850 | DNA323864 | DNA323866 | DNA323867 |
| DNA323871 | DNA323877 | DNA323882 | DNA227529 | DNA323925 | DNA323927 |
| DNA323944 | DNA226619 | DNA323964 | DNA323980 | DNA323982 | DNA271986 |
| DNA324001 | DNA324004 | DNA83046 | DNA324023 | DNA227504 | DNA324027 |
| DNA324042 | DNA324048 | DNA324057 | DNA324058 | DNA324073 | DNA324090 |
| DNA324091 | DNA324092 | DNA324101 | DNA324111 | DNA324112 | DNA324115 |
| DNA324116 | DNA324117 | DNA227795 | DNA324154 | DNA324155 | DNA324178 |
| DNA324203 | DNA324219 | DNA324230 | DNA324260 | DNA324293 | DNA226547 |
| DNA324301 | DNA227307 | DNA324335 | DNA324340 | DNA324341 | DNA324354 |
| DNA324406 | DNA324412 | DNA324417 | DNA324418 | DNA324437 | DNA324458 |
| DNA324472 | DNA324494 | DNA324502 | DNA324503 | DNA324504 | DNA324505 |
| DNA324521 | DNA324525 | DNA324541 | DNA324550 | DNA324551 | DNA324552 |
| DNA324554 | DNA324555 | DNA324556 | DNA324557 | DNA324558 | DNA324561 |
| DNA324566 | DNA324567 | DNA324575 | DNA324576 | DNA288259 | DNA324587 |
| DNA324595 | DNA324596 | DNA254147 | DNA324604 | DNA324605 | DNA324613 |
| DNA324624 | DNA324631 | DNA324632 | DNA324636 | DNA324645 | DNA324682 |
| DNA324690 | DNA324712 | DNA324715 | DNA324716 | DNA324720 | DNA324722 |
| DNA304680 | DNA324737 | DNA324785 | DNA324793 | DNA324796 | DNA324797 |
| DNA150772 | DNA324825 | DNA324828 | DNA324829 | DNA324830 | DNA324841 |
| DNA324844 | DNA324847 | DNA324856 | DNA324866 | DNA225631 | DNA193955 |
| DNA324904 | DNA324905 | DNA324906 | DNA227929 | DNA324910 | DNA324911 |
| DNA324912 | DNA324926 | DNA103588 | DNA324961 | DNA325006 | DNA325015 |
| DNA325026 | DNA325027 | DNA325079 | DNA325086 | DNA151010 | DNA325098 |
| DNA325105 | DNA325106 | DNA325115 | DNA325116 | DNA131588 | DNA325126 |
| DNA325127 | DNA272050 | DNA325129 | DNA325131 | DNA325156 | DNA325157 |
| DNA325179 | DNA325182 | DNA325184 | DNA325187 | DNA325202 | DNA325210 |
| DNA325231 | DNA325232 | DNA325233 | DNA325234 | DNA325235 | DNA325236 |
| DNA325250 | DNA325303 | DNA325326 | DNA227172 | DNA325335 | DNA103421 |
| DNA325347 | DNA226217 | DNA325349 | DNA325351 | DNA325360 | DNA325398 |
| DNA325414 | DNA325432 | DNA325472 | DNA325475 | DNA325535 | DNA325558 |
| DNA325570 | DNA325576 | DNA325601 | DNA225632 | DNA325618 | DNA325642 |
| DNA325644 | DNA325645 | DNA325655 | DNA270458 | DNA325667 | DNA325668 |
| DNA325680 | DNA325681 | DNA325723 | DNA325731 | DNA325749 | DNA325750 |
| DNA325752 | DNA325786 | DNA302016 | DNA325789 | DNA325801 | DNA325806 |
| DNA325811 | DNA325812 | DNA325814 | DNA325815 | DNA281436 | DNA325836 |
| DNA325841 | DNA325844 | DNA325853 | DNA325854 | DNA325906 | DNA325907 |
| DNA325908 | DNA325913 | DNA325927 | DNA325984 | DNA325985 | DNA325994 |
| DNA325998 | DNA326002 | DNA234442 | DNA287331 | DNA326041 | DNA326046 |
| DNA326054 | DNA326075 | DNA326099 | DNA326122 | DNA326124 | DNA326129 |
| DNA326136 | DNA326155 | DNA287355 | DNA326194 | DNA326201 | DNA326233 |
| DNA326234 | DNA326245 | DNA326254 | DNA97300 | DNA326291 | DNA326292 |
| DNA326302 | DNA326332 | DNA326340 | DNA97290 | DNA326370 | DNA326456 |
| DNA326457 | DNA326459 | DNA326481 | DNA326482 | DNA326529 | DNA326599 |
| DNA326608 | DNA326634 | DNA326645 | DNA326686 | DNA326687 | DNA326688 |
| DNA326692 | DNA103580 | DNA150784 | DNA270931 | DNA254548 | DNA326839 |
| DNA326884 | DNA326893 | DNA326921 | DNA326974 | DNA327005 | DNA327012 |
| DNA327023 | DNA327025 | DNA327039 | DNA273254 | DNA327067 | |

[6734] LIVER

| | | | | | |
|---|---|---|---|---|---|
| DNA323720 | DNA323733 | DNA287173 | DNA323758 | DNA323767 | DNA323778 |
| DNA323783 | DNA188748 | DNA323808 | DNA227213 | DNA323810 | DNA323817 |
| DNA323820 | DNA273060 | DNA323852 | DNA269708 | DNA323864 | DNA323865 |
| DNA323866 | DNA323867 | DNA323871 | DNA323894 | DNA323895 | DNA274759 |
| DNA323913 | DNA323917 | DNA323922 | DNA323927 | DNA323934 | DNA323936 |
| DNA323948 | DNA323960 | DNA226619 | DNA323964 | DNA323968 | DNA323971 |
| DNA323972 | DNA323973 | DNA323974 | DNA323983 | DNA323984 | DNA323989 |
| DNA324019 | DNA254346 | DNA324039 | DNA324042 | DNA82328 | DNA324048 |
| DNA324053 | DNA275195 | DNA324063 | DNA324069 | DNA324090 | DNA324091 |
| DNA324092 | DNA324095 | DNA271060 | DNA324111 | DNA324112 | DNA324118 |
| DNA324124 | DNA324125 | DNA227795 | DNA287167 | DNA227528 | DNA324134 |
| DNA324139 | DNA324141 | DNA324154 | DNA324155 | DNA324158 | DNA324174 |
| DNA324181 | DNA324195 | DNA324199 | DNA324200 | DNA324201 | DNA324203 |
| DNA324204 | DNA324205 | DNA271608 | DNA324208 | DNA324217 | DNA324229 |
| DNA324238 | DNA324245 | DNA324258 | DNA324283 | DNA252367 | DNA324293 |
| DNA226547 | DNA324312 | DNA324313 | DNA324320 | DNA324321 | DNA324326 |
| DNA324340 | DNA324341 | DNA324349 | DNA324351 | DNA324355 | DNA324370 |
| DNA324378 | DNA324386 | DNA324414 | DNA324417 | DNA324418 | DNA324437 |
| DNA324439 | DNA324464 | DNA324474 | DNA324476 | DNA324481 | DNA225919 |
| DNA324492 | DNA324495 | DNA324496 | DNA324501 | DNA324502 | DNA324503 |
| DNA324504 | DNA324505 | DNA225584 | DNA324521 | DNA324525 | DNA324541 |
| DNA324550 | DNA324551 | DNA324552 | DNA324554 | DNA324555 | DNA324556 |
| DNA324557 | DNA324558 | DNA324561 | DNA324569 | DNA324575 | DNA324576 |
| DNA324580 | DNA324581 | DNA324582 | DNA288259 | DNA324591 | DNA324596 |
| DNA324600 | DNA324606 | DNA324613 | DNA324618 | DNA103380 | DNA324632 |
| DNA324635 | DNA324636 | DNA324638 | DNA324648 | DNA324685 | DNA324687 |
| DNA324690 | DNA324695 | DNA324700 | DNA324702 | DNA324713 | DNA324717 |
| DNA324722 | DNA324724 | DNA324726 | DNA324727 | DNA304680 | DNA324732 |
| DNA324733 | DNA324736 | DNA324737 | DNA275630 | DNA324744 | DNA304716 |
| DNA324751 | DNA324753 | DNA324756 | DNA287319 | DNA324780 | DNA324781 |
| DNA324783 | DNA304699 | DNA324785 | DNA324790 | DNA324802 | DNA324824 |
| DNA324828 | DNA324829 | DNA324844 | DNA324866 | DNA324881 | DNA225631 |
| DNA274326 | DNA324902 | DNA324904 | DNA324905 | DNA324906 | DNA324907 |
| DNA324908 | DNA324915 | DNA324916 | DNA324917 | DNA324922 | DNA324927 |
| DNA324931 | DNA103588 | DNA324944 | DNA324950 | DNA324951 | DNA324961 |
| DNA304710 | DNA324962 | DNA324963 | DNA324968 | DNA324971 | DNA324974 |
| DNA324977 | DNA272090 | DNA324989 | DNA324991 | DNA324992 | DNA325009 |
| DNA325013 | DNA325018 | DNA325026 | DNA325027 | DNA325033 | DNA325036 |
| DNA325039 | DNA325078 | DNA325079 | DNA325080 | DNA325081 | DNA32509 |
| DNA325091 | DNA325092 | DNA325104 | DNA325105 | DNA325106 | DNA325113 |
| DNA325117 | DNA325118 | DNA325119 | DNA131588 | DNA325126 | DNA325135 |
| DNA325152 | DNA325153 | DNA325156 | DNA325157 | DNA325162 | DNA325177 |
| DNA325179 | DNA89242 | DNA325182 | DNA325184 | DNA325185 | DNA325188 |
| DNA325194 | DNA325231 | DNA325232 | DNA325233 | DNA325234 | DNA325235 |
| DNA325236 | DNA325250 | DNA325280 | DNA325281 | DNA325282 | DNA325287 |
| DNA325296 | DNA325326 | DNA325332 | DNA325334 | DNA325335 | DNA325339 |
| DNA325340 | DNA103506 | DNA325343 | DNA325344 | DNA325347 | DNA325352 |
| DNA325358 | DNA325360 | DNA325368 | DNA325388 | DNA255696 | DNA325403 |
| DNA325408 | DNA325409 | DNA325410 | DNA325411 | DNA325414 | DNA325418 |
| DNA97285 | DNA325456 | DNA226080 | DNA325471 | DNA325473 | DNA325475 |
| DNA325485 | DNA270721 | DNA325506 | DNA325524 | DNA325535 | DNA325536 |
| DNA325537 | DNA325564 | DNA325565 | DNA325570 | DNA325571 | DNA325590 |
| DNA325591 | DNA325596 | DNA325599 | DNA325601 | DNA225632 | DNA226771 |
| DNA325625 | DNA325633 | DNA325637 | DNA325642 | DNA325644 | DNA325645 |
| DNA270458 | DNA227092 | DNA325674 | DNA290294 | DNA325678 | DNA325680 |
| DNA325681 | DNA325686 | DNA325692 | DNA325693 | DNA325694 | DNA325722 |
| DNA325731 | DNA325732 | DNA325750 | DNA325752 | DNA325756 | DNA325758 |
| DNA325778 | DNA325779 | DNA325780 | DNA325786 | DNA302016 | DNA325789 |
| DNA325803 | DNA325804 | DNA325809 | DNA325811 | DNA325812 | DNA325814 |
| DNA325823 | DNA325837 | DNA325838 | DNA325842 | DNA325845 | DNA325849 |
| DNA325853 | DNA325854 | DNA325863 | DNA325868 | DNA325869 | DNA325871 |
| DNA325882 | DNA325887 | DNA325896 | DNA325906 | DNA325908 | DNA325912 |
| DNA325929 | DNA325931 | DNA325935 | DNA226324 | DNA325949 | DNA325971 |
| DNA325978 | DNA325979 | DNA325985 | DNA325999 | DNA326002 | DNA326003 |
| DNA326006 | DNA326017 | DNA287331 | DNA326069 | DNA326099 | DNA326101 |
| DNA326121 | DNA326122 | DNA326124 | DNA326127 | DNA326129 | DNA326136 |
| DNA326156 | DNA326164 | DNA287355 | DNA326193 | DNA326196 | DNA189703 |
| DNA326220 | DNA326233 | DNA326234 | DNA326239 | DNA326242 | DNA326246 |
| DNA326247 | DNA326254 | DNA326256 | DNA97300 | DNA326273 | DNA326278 |
| DNA254198 | DNA326289 | DNA326291 | DNA326292 | DNA326325 | DNA326330 |
| DNA326334 | DNA326339 | DNA326341 | DNA88378 | DNA326347 | DNA326352 |
| DNA326357 | DNA326370 | DNA326380 | DNA227055 | DNA326406 | DNA274755 |
| DNA326411 | DNA326416 | DNA326423 | DNA326426 | DNA326427 | DNA326430 |
| DNA326434 | DNA326437 | DNA326440 | DNA326449 | DNA326450 | DNA326451 |
| DNA326452 | DNA326453 | DNA326454 | DNA326457 | DNA326476 | DNA326481 |
| DNA326482 | DNA326484 | DNA326485 | DNA326489 | DNA326497 | DNA326498 |
| DNA326539 | DNA326548 | DNA326563 | DNA326579 | DNA326580 | DNA326586 |
| DNA326625 | DNA227249 | DNA326626 | DNA326633 | DNA326634 | DNA326646 |
| DNA326651 | DNA326671 | DNA326678 | DNA326680 | DNA326698 | DNA326701 |
| DNA326702 | DNA326703 | DNA326705 | DNA326706 | DNA103580 | DNA326713 |
| DNA88084 | DNA326727 | DNA290260 | DNA326736 | DNA326741 | DNA326742 |
| DNA326752 | DNA326756 | DNA326758 | DNA326762 | DNA254548 | DNA326769 |
| DNA304662 | DNA326772 | DNA326776 | DNA326777 | DNA227348 | DNA326819 |
| DNA194701 | DNA326826 | DNA326831 | DNA326832 | DNA326850 | DNA326851 |
| DNA269526 | DNA326867 | DNA326870 | DNA326871 | DNA269746 | DNA326885 |
| DNA326886 | DNA326905 | DNA326923 | DNA326924 | DNA326939 | DNA269830 |
| DNA326947 | DNA326958 | DNA188740 | DNA326964 | DNA326974 | DNA326977 |
| DNA326981 | DNA270954 | DNA326983 | DNA326987 | DNA326992 | DNA327003 |
| DNA327005 | DNA327010 | DNA327013 | DNA327014 | DNA327016 | DNA327023 |
| DNA327025 | DNA327027 | DNA327050 | DNA327052 | DNA327053 | DNA273254 |
| DNA327065 | DNA327067 | DNA327068 | DNA327069 | DNA327091 | DNA227656 |
| DNA327106 | DNA327114 | DNA327116 | DNA227013 | | |

[6735] BONE MARROW

| | | | | | |
|---|---|---|---|---|---|
| DNA323735 | DNA323762 | DNA323770 | DNA323771 | DNA323774 | DNA323775 |
| DNA323784 | DNA323804 | DNA272748 | DNA323880 | DNA323903 | DNA323904 |
| DNA323964 | DNA323982 | DNA324015 | DNA324023 | DNA324056 | DNA324057 |
| DNA324076 | DNA324086 | DNA324100 | DNA324139 | DNA324154 | DNA324173 |
| DNA324178 | DNA324200 | DNA324211 | DNA324230 | DNA324242 | DNA324248 |
| DNA324249 | DNA324250 | DNA324260 | DNA88100 | DNA324301 | DNA324364 |
| DNA324381 | DNA324382 | DNA324383 | DNA324420 | DNA324484 | DNA324495 |
| DNA324507 | DNA324551 | DNA324554 | DNA324575 | DNA324605 | DNA324637 |
| DNA324644 | DNA324690 | DNA304680 | DNA324746 | DNA324825 | DNA324848 |
| DNA324854 | DNA324856 | DNA324858 | DNA324905 | DNA324910 | DNA325011 |
| DNA325031 | DNA325086 | DNA151010 | DNA325127 | DNA272050 | DNA325133 |
| DNA325169 | DNA325184 | DNA325231 | DNA325234 | DNA325241 | DNA325242 |
| DNA325299 | DNA287642 | DNA325345 | DNA325351 | DNA325354 | DNA325356 |
| DNA325392 | DNA325399 | DNA325428 | DNA325461 | DNA272413 | DNA325576 |
| DNA325668 | DNA325726 | DNA325733 | DNA325811 | DNA325901 | DNA325953 |
| DNA151831 | DNA325998 | DNA234442 | DNA326035 | DNA326095 | DNA326138 |
| DNA326365 | DNA326373 | DNA326390 | DNA326391 | DNA326416 | DNA326417 |
| DNA326449 | DNA326450 | DNA326451 | DNA326942 | DNA327111 | |

[6736] TESTIS

| | | | | | |
|---|---|---|---|---|---|
| DNA287173 | DNA323761 | DNA323770 | DNA323771 | DNA323774 | DNA323775 |
| DNA226262 | DNA323778 | DNA323790 | DNA323804 | DNA323817 | DNA323820 |
| DNA323829 | DNA103214 | DNA304686 | DNA272748 | DNA323844 | DNA323845 |
| DNA323851 | DNA323856 | DNA323858 | DNA323859 | DNA323861 | DNA323864 |
| DNA323865 | DNA323866 | DNA323867 | DNA323869 | DNA323871 | DNA323872 |
| DNA323877 | DNA323880 | DNA323922 | DNA323943 | DNA323947 | DNA323956 |
| DNA323964 | DNA323967 | DNA323968 | DNA323973 | DNA323985 | DNA323993 |
| DNA323998 | DNA324004 | DNA324009 | DNA324015 | DNA324023 | DNA324048 |
| DNA324054 | DNA324058 | DNA324063 | DNA324090 | DNA324091 | DNA324092 |
| DNA324100 | DNA324103 | DNA324111 | DNA324112 | DNA324114 | DNA324117 |
| DNA324118 | DNA227795 | DNA150725 | DNA324147 | DNA324149 | DNA324154 |
| DNA324155 | DNA324164 | DNA324165 | DNA324170 | DNA324173 | DNA324178 |
| DNA324187 | DNA304805 | DNA324196 | DNA324199 | DNA324200 | DNA324201 |
| DNA299899 | DNA324204 | DNA271608 | DNA324207 | DNA324208 | DNA324210 |
| DNA324213 | DNA324214 | DNA324218 | DNA324219 | DNA324229 | DNA324230 |
| DNA324276 | DNA324281 | DNA324282 | DNA324284 | DNA324285 | DNA324291 |
| DNA324293 | DNA226547 | DNA324295 | DNA324301 | DNA324312 | DNA324313 |
| DNA324326 | DNA324357 | DNA324358 | DNA324373 | DNA324381 | DNA324382 |
| DNA324383 | DNA324384 | DNA324385 | DNA324390 | DNA324395 | DNA324398 |
| DNA324403 | DNA324404 | DNA324417 | DNA324418 | DNA324423 | DNA324433 |
| DNA324434 | DNA324436 | DNA324437 | DNA324438 | DNA324455 | DNA324468 |
| DNA324469 | DNA324472 | DNA324478 | DNA324479 | DNA324481 | DNA324483 |
| DNA324490 | DNA324491 | DNA324495 | DNA324496 | DNA324499 | DNA324500 |
| DNA324501 | DNA324502 | DNA324503 | DNA324504 | DNA324505 | DNA324507 |
| DNA324509 | DNA324511 | DNA324512 | DNA324514 | DNA324521 | DNA324522 |
| DNA324525 | DNA324531 | DNA324541 | DNA324549 | DNA324550 | DNA324551 |
| DNA324552 | DNA324554 | DNA324555 | DNA324556 | DNA324557 | DNA324558 |
| DNA324568 | DNA324574 | DNA324575 | DNA324576 | DNA324579 | DNA324583 |
| DNA324584 | DNA324585 | DNA324590 | DNA324591 | DNA324592 | DNA324595 |
| DNA324596 | DNA324597 | DNA324598 | DNA324599 | DNA324600 | DNA324601 |
| DNA324605 | DNA269816 | DNA324612 | DNA324613 | DNA324616 | DNA324622 |
| DNA324624 | DNA324628 | DNA324632 | DNA271931 | DNA324642 | DNA324645 |
| DNA324682 | DNA324683 | DNA324684 | DNA324685 | DNA324687 | DNA324690 |
| DNA324697 | DNA324717 | DNA324720 | DNA304680 | DNA324737 | DNA324742 |
| DNA275630 | DNA324746 | DNA324751 | DNA324785 | DNA324790 | DNA324800 |
| DNA324801 | DNA324803 | DNA150772 | DNA324811 | DNA324828 | DNA324829 |
| DNA324831 | DNA324840 | DNA324841 | DNA324843 | DNA324844 | DNA324845 |
| DNA324846 | DNA324855 | DNA324858 | DNA324866 | DNA324867 | DNA324882 |
| DNA324883 | DNA225631 | DNA324902 | DNA324904 | DNA324905 | DNA324906 |
| DNA324907 | DNA324908 | DNA324909 | DNA324910 | DNA324913 | DNA324914 |
| DNA324915 | DNA324916 | DNA324917 | DNA324926 | DNA324928 | DNA324941 |
| DNA324950 | DNA324951 | DNA324954 | DNA304710 | DNA324962 | DNA324963 |
| DNA324965 | DNA324966 | DNA324967 | DNA324968 | DNA324982 | DNA324989 |
| DNA325002 | DNA325003 | DNA325006 | DNA325007 | DNA226560 | DNA325010 |
| DNA325011 | DNA325025 | DNA325026 | DNA325027 | DNA325028 | DNA325034 |
| DNA325049 | DNA325078 | DNA325079 | DNA325080 | DNA325081 | DNA325086 |
| DNA325095 | DNA325096 | DNA151010 | DNA325097 | DNA325098 | DNA325107 |
| DNA325111 | DNA325116 | DNA325117 | DNA325118 | DNA325119 | DNA325123 |
| DNA325124 | DNA325125 | DNA131588 | DNA325127 | DNA325134 | DNA325141 |
| DNA325146 | DNA325152 | DNA325153 | DNA325154 | DNA325155 | DNA325156 |
| DNA325157 | DNA325158 | DNA325159 | DNA325164 | DNA325169 | DNA325179 |
| DNA325182 | DNA325183 | DNA325184 | DNA325196 | DNA325202 | DNA325206 |
| DNA325222 | DNA325229 | DNA325231 | DNA325232 | DNA325233 | DNA325234 |
| DNA325235 | DNA325236 | DNA325250 | DNA325281 | DNA325282 | DNA325289 |
| DNA325291 | DNA325297 | DNA325298 | DNA325301 | DNA287642 | DNA325326 |
| DNA325339 | DNA325340 | DNA103421 | DNA325345 | DNA325347 | DNA325349 |
| DNA325351 | DNA325357 | DNA325358 | DNA325360 | DNA325376 | DNA325387 |
| DNA325392 | DNA325395 | DNA269952 | DNA255078 | DNA325428 | DNA325430 |
| DNA325433 | DNA325434 | DNA325435 | DNA325436 | DNA325437 | DNA325438 |
| DNA97285 | DNA325439 | DNA325445 | DNA254186 | DNA325523 | DNA325534 |
| DNA325535 | DNA325541 | DNA325549 | DNA272413 | DNA325564 | DNA325565 |
| DNA325570 | DNA257965 | DNA325576 | DNA325589 | DNA325601 | DNA225632 |
| DNA325613 | DNA325615 | DNA325622 | DNA325625 | DNA325629 | DNA325630 |
| DNA325632 | DNA325633 | DNA325635 | DNA325642 | DNA325644 | DNA325645 |
| DNA325668 | DNA325672 | DNA325674 | DNA325680 | DNA325685 | DNA325697 |
| DNA325711 | DNA325720 | DNA325731 | DNA325732 | DNA325736 | DNA325748 |
| DNA325750 | DNA325752 | DNA325753 | DNA325754 | DNA325758 | DNA325762 |
| DNA325782 | DNA325786 | DNA302016 | DNA325789 | DNA325806 | DNA325809 |
| DNA325810 | DNA325811 | DNA325812 | DNA325814 | DNA325821 | DNA304669 |
| DNA325824 | DNA325825 | DNA325827 | DNA325829 | DNA325831 | DNA325837 |
| DNA325838 | DNA325843 | DNA325844 | DNA325848 | DNA325860 | DNA227321 |
| DNA325879 | DNA325882 | DNA325886 | DNA325887 | DNA325888 | DNA325897 |
| DNA325898 | DNA325901 | DNA325905 | DNA325906 | DNA325908 | DNA325913 |
| DNA325922 | DNA325933 | DNA325934 | DNA325935 | DNA325939 | DNA325940 |
| DNA325965 | DNA325969 | DNA325985 | DNA325991 | DNA325994 | DNA325998 |
| DNA326002 | DNA326003 | DNA326009 | DNA234442 | DNA326020 | DNA326021 |
| DNA326022 | DNA287331 | DNA326035 | DNA326041 | DNA326045 | DNA326046 |
| DNA326047 | DNA326070 | DNA326075 | DNA326099 | DNA326128 | DNA326129 |
| DNA326155 | DNA326156 | DNA274180 | DNA326187 | DNA326214 | DNA326228 |
| DNA326233 | DNA326234 | DNA326251 | DNA97300 | DNA304715 | DNA290292 |
| DNA326289 | DNA326291 | DNA326292 | DNA326311 | DNA326364 | DNA326373 |
| DNA326390 | DNA326391 | DNA326397 | DNA326400 | DNA326410 | DNA326426 |
| DNA287234 | DNA326449 | DNA326450 | DNA326451 | DNA326452 | DNA326453 |
| DNA326454 | DNA326457 | DNA326463 | DNA326471 | DNA326557 | DNA326559 |
| DNA326579 | DNA326580 | DNA326603 | DNA326633 | DNA326634 | DNA326642 |
| DNA326651 | DNA326686 | DNA326687 | DNA326688 | DNA326691 | DNA326692 |
| DNA326698 | DNA290260 | DNA304658 | DNA326762 | DNA326769 | DNA326790 |
| DNA326791 | DNA326792 | DNA326796 | DNA326798 | DNA326837 | DNA326854 |
| DNA326858 | DNA326884 | DNA326885 | DNA326886 | DNA326940 | DNA326941 |
| DNA269830 | DNA254240 | DNA326974 | DNA327005 | DNA327019 | DNA327020 |
| DNA327021 | DNA327025 | DNA327026 | DNA327027 | DNA327029 | DNA327039 |
| DNA327044 | DNA327060 | DNA327062 | DNA273254 | DNA327066 | DNA327067 |
| DNA327072 | DNA327077 | DNA327078 | DNA327079 | DNA327083 | DNA327084 |
| DNA327098 | DNA327100 | DNA327114 | | | |

[6737] CERVIX

| | | | | | |
|---|---|---|---|---|---|
| DNA324417 | DNA324418 | DNA324557 | DNA324828 | DNA324829 | DNA324904 |
| DNA324905 | DNA324906 | DNA325231 | DNA325234 | | |

[6738] NERVOUS

| | | | | | |
|---|---|---|---|---|---|
| DNA287173 | DNA323760 | DNA103253 | DNA323848 | DNA323864 | DNA323865 |
| DNA323866 | DNA323867 | DNA323877 | DNA323878 | DNA323882 | DNA323887 |
| DNA323925 | DNA323966 | DNA324107 | DNA227795 | DNA324135 | DNA227190 |
| DNA324155 | DNA271608 | DNA324219 | DNA324259 | DNA324320 | DNA324351 |
| DNA324364 | DNA270615 | DNA324504 | DNA324505 | DNA324551 | DNA324552 |
| DNA324554 | DNA324555 | DNA324556 | DNA324557 | DNA324558 | DNA324575 |
| DNA324756 | DNA324790 | DNA324828 | DNA324829 | DNA324904 | DNA324905 |
| DNA324906 | DNA324907 | DNA324908 | DNA324982 | DNA325079 | DNA325187 |
| DNA325231 | DNA325232 | DNA325233 | DNA325234 | DNA325235 | DNA325236 |
| DNA325416 | DNA325419 | DNA325432 | DNA325562 | DNA325602 | DNA325607 |
| DNA226028 | DNA325647 | DNA325704 | DNA325759 | DNA287331 | DNA326077 |
| DNA326196 | DNA326198 | DNA326215 | DNA326362 | DNA326459 | DNA326752 |
| DNA326846 | DNA226409 | DNA326956 | DNA326983 | DNA327058 | DNA327099 |

[6739] EYE

| | | | | | |
|---|---|---|---|---|---|
| DNA323721 | DNA287173 | DNA323747 | DNA323763 | DNA323769 | DNA226262 |
| DNA323778 | DNA323799 | DNA323807 | DNA227213 | DNA323817 | DNA323818 |
| DNA323820 | DNA323829 | DNA323835 | DNA323839 | DNA323856 | DNA323858 |
| DNA323859 | DNA323864 | DNA323865 | DNA323866 | DNA323869 | DNA323871 |
| DNA323872 | DNA323875 | DNA323887 | DNA323891 | DNA323892 | DNA323906 |
| DNA323914 | DNA323923 | DNA323925 | DNA323928 | DNA323932 | DNA323935 |
| DNA323936 | DNA323947 | DNA323964 | DNA323971 | DNA323972 | DNA323973 |
| DNA323974 | DNA323988 | DNA256905 | DNA324004 | DNA324009 | DNA324010 |
| DNA247474 | DNA324022 | DNA324023 | DNA324025 | DNA324028 | DNA324029 |
| DNA324037 | DNA324048 | DNA324049 | DNA103217 | DNA275195 | DNA324059 |
| DNA324060 | DNA324061 | DNA275049 | DNA324062 | DNA273800 | DNA324076 |
| DNA324083 | DNA324085 | DNA324087 | DNA324090 | DNA324091 | DNA324092 |
| DNA324096 | DNA324100 | DNA226428 | DNA275066 | DNA324104 | DNA324106 |
| DNA324108 | DNA324110 | DNA324111 | DNA324112 | DNA324127 | DNA227795 |
| DNA287167 | DNA324155 | DNA324157 | DNA324163 | DNA324164 | DNA324165 |
| DNA324167 | DNA275240 | DNA324170 | DNA324175 | DNA324185 | DNA324186 |
| DNA324193 | DNA324199 | DNA324200 | DNA324201 | DNA324203 | DNA324204 |
| DNA324207 | DNA324209 | DNA324210 | DNA324212 | DNA324213 | DNA324214 |
| DNA324217 | DNA324218 | DNA324219 | DNA324224 | DNA324230 | DNA324280 |
| DNA324281 | DNA324282 | DNA226547 | DNA324295 | DNA324306 | DNA324307 |
| DNA324312 | DNA324313 | DNA324320 | DNA324322 | DNA324329 | DNA324330 |
| DNA324331 | DNA273919 | DNA324332 | DNA324334 | DNA324338 | DNA324344 |
| DNA324345 | DNA324347 | DNA324358 | DNA324359 | DNA324365 | DNA324372 |
| DNA324374 | DNA324390 | DNA324417 | DNA324418 | DNA324423 | DNA324434 |
| DNA324436 | DNA324437 | DNA324448 | DNA324458 | DNA324461 | DNA324463 |
| DNA324470 | DNA324478 | DNA324479 | DNA324481 | DNA324482 | DNA324483 |
| DNA324491 | DNA324495 | DNA324496 | DNA324501 | DNA324504 | DNA324505 |
| DNA324510 | DNA324512 | DNA324519 | DNA324521 | DNA324525 | DNA324535 |
| DNA324541 | DNA324552 | DNA324555 | DNA324556 | DNA324557 | DNA324558 |
| DNA324575 | DNA324584 | DNA324589 | DNA324590 | DNA324591 | DNA324594 |
| DNA324595 | DNA324596 | DNA324597 | DNA324598 | DNA324599 | DNA324600 |
| DNA254147 | DNA324607 | DNA290231 | DNA324608 | DNA324609 | DNA324613 |
| DNA324623 | DNA324624 | DNA324625 | DNA324632 | DNA324645 | DNA324682 |
| DNA324687 | DNA324690 | DNA324697 | DNA324710 | DNA324711 | DNA324717 |
| DNA324718 | DNA324720 | DNA304680 | DNA324737 | DNA270613 | DNA324742 |
| DNA287246 | DNA324745 | DNA304716 | DNA324747 | DNA324751 | DNA324756 |
| DNA324766 | DNA304661 | DNA324777 | DNA324778 | DNA324779 | DNA324785 |
| DNA324788 | DNA324790 | DNA324811 | DNA324828 | DNA324829 | DNA324830 |
| DNA324839 | DNA324841 | DNA324844 | DNA324866 | DNA324902 | DNA324904 |
| DNA324906 | DNA324907 | DNA324908 | DNA324915 | DNA324916 | DNA324917 |
| DNA324942 | DNA103588 | DNA324948 | DNA324949 | DNA324950 | DNA324951 |
| DNA324965 | DNA324966 | DNA324967 | DNA324968 | DNA324982 | DNA324989 |
| DNA325002 | DNA325003 | DNA325005 | DNA325006 | DNA325013 | DNA325015 |
| DNA325024 | DNA325025 | DNA325026 | DNA325027 | DNA325034 | DNA325058 |
| DNA325066 | DNA325078 | DNA325079 | DNA325080 | DNA325081 | DNA325093 |
| DNA325098 | DNA325110 | DNA325111 | DNA325116 | DNA325117 | DNA325118 |
| DNA325119 | DNA325124 | DNA325127 | DNA325128 | DNA325130 | DNA325146 |
| DNA325152 | DNA325153 | DNA325155 | DNA325156 | DNA325157 | DNA325164 |
| DNA325172 | DNA325179 | DNA325182 | DNA325183 | DNA325184 | DNA325190 |
| DNA325191 | DNA325192 | DNA325193 | DNA325196 | DNA325198 | DNA325202 |
| DNA325206 | DNA271722 | DNA325207 | DNA325209 | DNA325222 | DNA325233 |
| DNA325235 | DNA325236 | DNA325247 | DNA325256 | DNA325283 | DNA325289 |
| DNA325293 | DNA325298 | DNA325300 | DNA325301 | DNA325311 | DNA325313 |
| DNA325317 | DNA325321 | DNA325323 | DNA325347 | DNA325351 | DNA325364 |
| DNA325370 | DNA325376 | DNA325378 | DNA325382 | DNA227509 | DNA325389 |
| DNA325390 | DNA325395 | DNA325427 | DNA325430 | DNA97285 | DNA325439 |
| DNA325442 | DNA325445 | DNA325451 | DNA325452 | DNA270134 | DNA325459 |
| DNA272728 | DNA325478 | DNA325479 | DNA325499 | DNA270721 | DNA325506 |
| DNA325523 | DNA325526 | DNA325534 | DNA325535 | DNA325540 | DNA325542 |
| DNA325543 | DNA271843 | DNA325559 | DNA325576 | DNA325577 | DNA325578 |
| DNA325584 | DNA325587 | DNA325593 | DNA325596 | DNA325598 | DNA325601 |
| DNA225632 | DNA325607 | DNA226028 | DNA325612 | DNA325614 | DNA325625 |
| DNA325627 | DNA325628 | DNA325632 | DNA325642 | DNA325647 | DNA325674 |
| DNA290294 | DNA325678 | DNA325680 | DNA325682 | DNA325683 | DNA325684 |
| DNA325685 | DNA25688 | DNA325690 | DNA325695 | DNA325713 | DNA325719 |
| DNA325720 | DNA325731 | DNA325733 | DNA325736 | DNA274361 | DNA325752 |
| DNA325757 | DNA325762 | DNA325769 | DNA325773 | DNA325775 | DNA325776 |
| DNA325782 | DNA325784 | DNA325786 | DNA302016 | DNA325789 | DNA325800 |
| DNA325810 | DNA325811 | DNA325812 | DNA325817 | DNA325818 | DNA304669 |
| DNA281436 | DNA325835 | DNA325837 | DNA325838 | DNA325843 | DNA325844 |
| DNA210180 | DNA325872 | DNA325882 | DNA325889 | DNA325891 | DNA325892 |
| DNA325899 | DNA325906 | DNA325908 | DNA325922 | DNA325924 | DNA325933 |
| DNA325935 | DNA325945 | DNA325964 | DNA325965 | DNA325975 | DNA325978 |
| DNA325979 | DNA325985 | DNA325988 | DNA326000 | DNA326002 | DNA326004 |
| DNA326008 | DNA234442 | DNA326013 | DNA326016 | DNA326020 | DNA326021 |
| DNA326022 | DNA326031 | DNA326033 | DNA255370 | DNA273014 | DNA326037 |
| DNA326047 | DNA326050 | DNA326058 | DNA326061 | DNA326072 | DNA326097 |
| DNA326099 | DNA326104 | DNA326105 | DNA326116 | DNA326121 | DNA326122 |
| DNA326124 | DNA326129 | DNA326133 | DNA326136 | DNA326156 | DNA326167 |
| DNA326175 | DNA326196 | DNA326197 | DNA326198 | DNA326214 | DNA326221 |
| DNA326222 | DNA326229 | DNA326243 | DNA326244 | DNA326251 | DNA326260 |
| DNA326264 | DNA326265 | DNA97300 | DNA297388 | DNA326288 | DNA290292 |
| DNA326289 | DNA326294 | DNA326296 | DNA326316 | DNA326322 | DNA326334 |
| DNA326339 | DNA326343 | DNA326344 | DNA227873 | DNA326348 | DNA326360 |
| DNA97290 | DNA227071 | DNA227764 | DNA326376 | DNA326381 | DNA326393 |
| DNA326394 | DNA326398 | DNA326402 | DNA326405 | DNA326406 | DNA326413 |
| DNA326418 | DNA326420 | DNA326427 | DNA326435 | DNA326436 | DNA326445 |
| DNA326447 | DNA274690 | DNA326449 | DNA326450 | DNA326451 | DNA326452 |
| DNA326453 | DNA326454 | DNA326455 | DNA326458 | DNA326459 | DNA326463 |
| DNA326466 | DNA326467 | DNA326473 | DNA326488 | DNA326520 | DNA326526 |
| DNA326527 | DNA326534 | DNA326559 | DNA326560 | DNA326574 | DNA326576 |
| DNA326579 | DNA326580 | DNA326615 | DNA326617 | DNA326633 | DNA326634 |
| DNA326642 | DNA326663 | DNA326664 | DNA272347 | DNA326669 | DNA326671 |
| DNA326691 | DNA326694 | DNA326697 | DNA326705 | DNA326706 | DNA256533 |
| DNA326717 | DNA326718 | DNA326719 | DNA326720 | DNA326749 | DNA326753 |
| DNA273346 | DNA326769 | DNA287270 | DNA326779 | DNA326780 | DNA326781 |
| DNA326787 | DNA326795 | DNA326796 | DNA326798 | DNA326819 | DNA326830 |
| DNA326858 | DNA254572 | DNA326892 | DNA326894 | DNA326904 | DNA326919 |
| DNA326931 | DNA326932 | DNA326935 | DNA326940 | DNA326941 | DNA269830 |
| DNA326946 | DNA326952 | DNA326956 | DNA326962 | DNA254240 | DNA326974 |
| DNA326983 | DNA327005 | DNA327006 | DNA327007 | DNA327017 | DNA327019 |
| DNA327021 | DNA327023 | DNA327025 | DNA327026 | DNA327027 | DNA327029 |
| DNA327046 | DNA327058 | DNA327060 | DNA327062 | DNA273254 | DNA327067 |
| DNA327070 | DNA37072 | DNA327077 | DNA327078 | DNA327079 | DNA227181 |
| DNA327099 | DNA327114 | DNA103558 | DNA327125 | | |

[6740] OVARY

| | | | | | |
|---|---|---|---|---|---|
| DNA287173 | DNA323865 | DNA323867 | DNA324048 | DNA324148 | DNA324295 |
| DNA324340 | DNA324341 | DNA324642 | DNA324694 | DNA324697 | DNA324737 |
| DNA324874 | DNA325601 | DNA225632 | DNA325720 | DNA325786 | DNA287331 |
| DNA326099 | DNA326657 | DNA327025 | | | |

[6741] ADIPOSE

| | | |
|---|---|---|
| DNA325952 | DNA325957 | DNA325958 |

[6742] WHOLE BLOOD

| | | | | | |
|---|---|---|---|---|---|
| DNA323718 | DNA323719 | DNA323752 | DNA323754 | DNA323788 | DNA83085 |
| DNA323886 | DNA323889 | DNA323890 | DNA323911 | DNA323957 | DNA323980 |
| DNA324002 | DNA324020 | DNA324021 | DNA324033 | DNA324040 | DNA324041 |
| DNA324052 | DNA324240 | DNA324296 | DNA225910 | DNA324317 | DNA324320 |
| DNA324515 | DNA324560 | DNA324562 | DNA324722 | DNA324742 | DNA324784 |
| DNA324861 | DNA324875 | DNA324884 | DNA324885 | DNA324887 | DNA324888 |
| DNA324923 | DNA325016 | DNA325017 | DNA325038 | DNA325055 | DNA325056 |
| DNA325057 | DNA325059 | DNA325060 | DNA325061 | DNA325063 | DNA325177 |
| DNA325255 | DNA88562 | DNA325335 | DNA325360 | DNA325401 | DNA325516 |
| DNA325609 | DNA325623 | DNA325631 | DNA325641 | DNA290294 | DNA325678 |
| DNA226014 | DNA325750 | DNA325758 | DNA325764 | DNA325803 | DNA281436 |
| DNA325829 | DNA226105 | DNA325912 | DNA326089 | DNA326090 | DNA326113 |
| DNA326115 | DNA326160 | DNA326240 | DNA326254 | DNA88378 | DNA88554 |
| DNA326371 | DNA326479 | DNA326655 | DNA326802 | DNA326834 | DNA88239 |
| DNA326906 | DNA326958 | DNA326977 | DNA327052 | DNA327116 | |

[6743] THYROID

| | | | | | |
|---|---|---|---|---|---|
| DNA323717 | DNA188748 | DNA323867 | DNA324154 | DNA324216 | DNA324295 |
| DNA324501 | DNA324503 | DNA324550 | DNA324551 | DNA324554 | DNA324565 |
| DNA324697 | DNA324873 | DNA324874 | DNA324905 | DNA325191 | DNA325192 |
| DNA325232 | DNA325234 | DNA325335 | DNA325503 | DNA325720 | DNA325845 |
| DNA326259 | DNA326275 | DNA326862 | DNA326863 | DNA304670 | DNA326864 |

[6744] PITUITARY GLAND

| | | | | | |
|---|---|---|---|---|---|
| DNA323717 | DNA323967 | DNA103593 | DNA324100 | DNA324293 | DNA324326 |
| DNA324610 | DNA324720 | DNA324801 | DNA324846 | DNA324874 | DNA325089 |
| DNA325523 | DNA325533 | DNA325589 | DNA325617 | DNA325967 | DNA325970 |
| DNA325680 | DNA325695 | DNA325700 | DNA325702 | DNA325711 | DNA325712 |
| DNA325724 | DNA325733 | DNA325736 | DNA325738 | DNA325752 | DNA325770 |
| DNA325773 | DNA325775 | DNA325776 | DNA325777 | DNA325786 | DNA325805 |
| DNA325810 | DNA325818 | DNA325837 | DNA325838 | DNA325890 | DNA325900 |
| DNA325906 | DNA325908 | DNA325909 | DNA325913 | DNA325920 | DNA269498 |
| DNA325922 | DNA325925 | DNA325935 | DNA325941 | DNA103509 | DNA325965 |
| DNA227559 | DNA325985 | DNA325994 | DNA326002 | DNA326003 | DNA326022 |
| DNA287331 | DNA326027 | DNA326036 | DNA326041 | DNA326046 | DNA326047 |
| DNA326056 | DNA326076 | DNA273839 | DNA326099 | DNA326107 | DNA326116 |
| DNA326118 | DNA326121 | DNA326122 | DNA326124 | DNA326128 | DNA326129 |
| DNA326133 | DNA326136 | DNA326142 | DNA326156 | DNA326168 | DNA326173 |
| DNA287355 | DNA326178 | DNA326196 | DNA326197 | DNA275408 | DNA326251 |
| DNA326254 | DNA97300 | DNA326272 | DNA326273 | DNA326278 | DNA326288 |
| DNA290292 | DNA326296 | DNA326311 | DNA326316 | DNA326324 | DNA326329 |
| DNA326343 | DNA88378 | DNA326354 | DNA326355 | DNA326358 | DNA326362 |
| DNA227071 | DNA326384 | DNA227055 | DNA326396 | DNA326397 | DNA326406 |
| DNA326408 | DNA326415 | DNA326416 | DNA326426 | DNA326449 | DNA326450 |
| DNA326451 | DNA326452 | DNA326453 | DNA326454 | DNA326457 | DNA326463 |
| DNA326475 | DNA326490 | DNA326499 | DNA326525 | DNA326539 | DNA326559 |
| DNA270621 | DNA326562 | DNA326579 | DNA326580 | DNA326595 | DNA326597 |
| DNA326599 | DNA326603 | DNA326651 | DNA272347 | DNA274139 | DNA326680 |
| DNA326691 | DNA326704 | DNA326709 | DNA304658 | DNA326742 | DNA326752 |
| DNA326760 | DNA273346 | DNA254548 | DNA326769 | DNA287270 | DNA326780 |
| DNA326781 | DNA326790 | DNA326796 | DNA326798 | DNA150548 | DNA326803 |
| DNA326819 | DNA326821 | DNA194701 | DNA326825 | DNA326872 | DNA326884 |
| DNA326886 | DNA254572 | DNA326901 | DNA226617 | DNA326921 | DNA326935 |
| DNA326941 | DNA326947 | DNA326949 | DNA326950 | DNA326952 | DNA326956 |
| DNA326963 | DNA326967 | DNA326974 | DNA326981 | DNA219225 | DNA326983 |
| DNA326984 | DNA326985 | DNA326995 | DNA327003 | DNA327023 | DNA327025 |
| DNA227943 | DNA327056 | DNA327057 | DNA327060 | DNA327062 | DNA273254 |
| DNA327068 | DNA327101 | DNA327107 | DNA327110 | DNA327114 | DNA327115 |
| DNA227013 | | | | | |

[6745] THYMUS

| | | | | | |
|---|---|---|---|---|---|
| DNA324063 | DNA324197 | DNA324641 | DNA324685 | DNA324926 | DNA325038 |
| DNA325195 | DNA325238 | DNA325405 | DNA325420 | DNA325421 | DNA325422 |
| DNA325506 | DNA325645 | DNA325809 | DNA325930 | DNA326089 | DNA326090 |
| DNA326243 | DNA326554 | DNA326563 | DNA326747 | | |

[6746] MUSCLE

| | | | | | |
|---|---|---|---|---|---|
| DNA323725 | DNA323732 | DNA287173 | DNA323736 | DNA323737 | DNA323740 |
| DNA171408 | DNA323746 | DNA323748 | DNA323749 | DNA323753 | DNA323765 |
| DNA323766 | DNA323767 | DNA323768 | DNA323778 | DNA323779 | DNA323780 |
| DNA323782 | DNA323784 | DNA323789 | DNA323792 | DNA323794 | DNA323798 |
| DNA323801 | DNA323802 | DNA323804 | DNA227213 | DNA323810 | DNA323813 |
| DNA323816 | DNA323817 | DNA274487 | DNA323820 | DNA323821 | DNA323826 |
| DNA323827 | DNA323829 | DNA323830 | DNA323833 | DNA103214 | DNA323837 |
| DNA323839 | DNA323852 | DNA323853 | DNA323854 | DNA323855 | DNA323858 |
| DNA323859 | DNA323860 | DNA323862 | DNA323863 | DNA323864 | DNA323865 |
| DNA323866 | DNA323867 | DNA323869 | DNA323870 | DNA323871 | DNA275139 |
| DNA323872 | DNA323874 | DNA323881 | DNA323882 | DNA323885 | DNA323887 |
| DNA227529 | DNA225809 | DNA323914 | DNA323925 | DNA323929 | DNA323930 |
| DNA323933 | DNA323934 | DNA323936 | DNA194600 | DNA323947 | DNA323949 |
| DNA323955 | DNA323964 | DNA323971 | DNA323972 | DNA323973 | DNA323974 |
| DNA323977 | DNA323978 | DNA323981 | DNA323987 | DNA323995 | DNA323997 |
| DNA290234 | DNA324001 | DNA256905 | DNA324004 | DNA324007 | DNA324014 |
| DNA324016 | DNA324039 | DNA324045 | DNA324048 | DNA324049 | DNA324054 |
| DNA275195 | DNA324058 | DNA324059 | DNA324060 | DNA324063 | DNA324064 |
| DNA273800 | DNA324090 | DNA324091 | DNA324092 | DNA324097 | DNA324098 |
| DNA324109 | DNA324111 | DNA324112 | DNA324120 | DNA324126 | DNA227795 |
| DNA324133 | DNA324135 | DNA324137 | DNA324141 | DNA324145 | DNA324154 |
| DNA324155 | DNA255531 | DNA275240 | DNA324168 | DNA324170 | DNA324182 |
| DNA324183 | DNA88051 | DNA324197 | DNA324199 | DNA324200 | DNA324201 |
| DNA324203 | DNA324204 | DNA324207 | DNA324210 | DNA324217 | DNA324230 |
| DNA324232 | DNA189697 | DNA324241 | DNA324243 | DNA324252 | DNA324255 |
| DNA324257 | DNA324260 | DNA324263 | DNA324267 | DNA324269 | DNA324270 |
| DNA324271 | DNA324278 | DNA324282 | DNA324287 | DNA324294 | DNA226547 |
| DNA324295 | DNA324297 | DNA324313 | DNA324318 | DNA324323 | DNA324324 |
| DNA324329 | DNA324330 | DNA324331 | DNA324338 | DNA324340 | DNA324341 |
| DNA324358 | DNA324371 | DNA324390 | DNA324398 | DNA324400 | DNA324414 |
| DNA324417 | DNA324418 | DNA324421 | DNA324423 | DNA324434 | DNA324437 |
| DNA324440 | DNA324454 | DNA324456 | DNA324461 | DNA324462 | DNA324469 |
| DNA324472 | DNA324478 | DNA324479 | DNA324483 | DNA324488 | DNA324493 |
| DNA324495 | DNA324496 | DNA324501 | DNA324502 | DNA324503 | DNA324504 |
| DNA324505 | DNA324510 | DNA324521 | DNA324523 | DNA324525 | DNA324538 |
| DNA324541 | DNA324550 | DNA324551 | DNA324552 | DNA324554 | DNA324556 |
| DNA324557 | DNA324558 | DNA324564 | DNA324575 | DNA324583 | DNA324584 |
| DNA288259 | DNA324590 | DNA324591 | DNA324592 | DNA324595 | DNA324596 |
| DNA324597 | DNA324598 | DNA324599 | DNA324600 | DNA324602 | DNA324604 |
| DNA324608 | DNA324613 | DNA324624 | DNA324626 | DNA324627 | DNA269809 |
| DNA324632 | DNA324633 | DNA324634 | DNA324636 | DNA324645 | DNA271626 |
| DNA324675 | DNA324678 | DNA324682 | DNA324685 | DNA324690 | DNA324696 |
| DNA324697 | DNA274206 | DNA324707 | DNA324708 | DNA324709 | DNA324710 |
| DNA324711 | DNA324715 | DNA324716 | DNA270675 | DNA324717 | DNA324720 |
| DNA324722 | DNA324723 | DNA304680 | DNA324737 | DNA324739 | DNA324744 |
| DNA304460 | DNA324751 | DNA324756 | DNA324763 | DNA324764 | DNA324769 |
| DNA324770 | DNA324780 | DNA324781 | DNA324783 | DNA304699 | DNA324784 |
| DNA324785 | DNA324790 | DNA324791 | DNA290264 | DNA324794 | DNA324811 |
| DNA324813 | DNA324815 | DNA324823 | DNA324827 | DNA324828 | DNA324829 |
| DNA103471 | DNA324834 | DNA324840 | DNA324841 | DNA324844 | DNA324846 |
| DNA324851 | DNA324852 | DNA324866 | DNA324880 | DNA324884 | DNA324893 |
| DNA225631 | DNA274326 | DNA324896 | DNA324897 | DNA324902 | DNA324904 |
| DNA324905 | DNA324906 | DNA324907 | DNA324908 | DNA324915 | DNA324916 |
| DNA324917 | DNA324921 | DNA324926 | DNA324932 | DNA324933 | DNA287189 |
| DNA103588 | DNA324950 | DNA324951 | DNA324952 | DNA324957 | DNA324958 |
| DNA324959 | DNA324965 | DNA324966 | DNA324967 | DNA324968 | DNA324972 |
| DNA324973 | DNA324977 | DNA324982 | DNA324983 | DNA324985 | DNA324989 |
| DNA324990 | DNA324991 | DNA324992 | DNA325002 | DNA325006 | DNA325013 |
| DNA325015 | DNA325021 | DNA325022 | DNA325023 | DNA325024 | DNA325026 |
| DNA325027 | DNA25034 | DNA325039 | DNA325045 | DNA226337 | DNA325062 |
| DNA325077 | DNA325078 | DNA325079 | DNA325080 | DNA325081 | DNA325094 |
| DNA325095 | DNA325100 | DNA325103 | DNA325109 | DNA226496 | DNA325111 |
| DNA325116 | DNA325117 | DNA325118 | DNA325119 | DNA325122 | DNA131588 |
| DNA325152 | DNA325153 | DNA325156 | DNA325157 | DNA325164 | DNA325168 |
| DNA325174 | DNA325178 | DNA325179 | DNA325182 | DNA325183 | DNA325184 |
| DNA287216 | DNA288247 | DNA325187 | DNA325190 | DNA325196 | DNA325200 |
| DNA325202 | DNA325205 | DNA325206 | DNA325210 | DNA325214 | DNA225630 |
| DNA325216 | DNA325222 | DNA325223 | DNA325227 | DNA325231 | DNA325232 |
| DNA325233 | DNA325234 | DNA325235 | DNA325236 | DNA325239 | DNA325245 |
| DNA325247 | DNA325250 | DNA325295 | DNA325296 | DNA325301 | DNA325303 |
| DNA325308 | DNA325326 | DNA325327 | DNA325344 | DNA304488 | DNA325346 |
| DNA325347 | DNA325358 | DNA325360 | DNA325362 | DNA325367 | DNA325371 |
| DNA325373 | DNA144601 | DNA325375 | DNA325380 | DNA325384 | DNA325389 |
| DNA325406 | DNA325407 | DNA325408 | DNA325409 | DNA325410 | DNA325411 |
| DNA325429 | DNA325440 | DNA325451 | DNA325452 | DNA325459 | DNA272728 |
| DNA325463 | DNA325469 | DNA325474 | DNA325478 | DNA325494 | DNA325498 |
| DNA270721 | DNA325515 | DNA325523 | DNA325531 | DNA325534 | DNA325535 |
| DNA325538 | DNA325552 | DNA325555 | DNA325560 | DNA325576 | DNA325577 |
| DNA325580 | DNA325581 | DNA297398 | DNA325582 | DNA325584 | DNA325585 |
| DNA325587 | DNA325588 | DNA325594 | DNA325597 | DNA254624 | DNA325601 |
| DNA225632 | DNA188396 | DNA226028 | DNA325618 | DNA325620 | DNA325625 |
| DNA325627 | DNA325633 | DNA325637 | DNA272379 | DNA325642 | DNA325644 |
| DNA325645 | DNA325646 | DNA325671 | DNA325674 | DNA325680 | DNA227094 |
| DNA325695 | DNA325703 | DNA137231 | DNA325704 | DNA325705 | DNA325706 |
| DNA325708 | DNA79101 | DNA325709 | DNA325710 | DNA325711 | DNA325712 |
| DNA325714 | DNA325715 | DNA325716 | DNA325718 | DNA325720 | DNA325724 |
| DNA325725 | DNA325731 | DNA325733 | DNA325734 | DNA325750 | DNA325752 |
| DNA325758 | DNA325762 | DNA325767 | DNA325768 | DNA325771 | DNA325773 |
| DNA325775 | DNA325776 | DNA325781 | DNA325784 | DNA325786 | DNA302016 |
| DNA325789 | DNA325790 | DNA325791 | DNA325795 | DNA325806 | DNA325808 |
| DNA325809 | DNA325810 | DNA325811 | DNA325812 | DNA325814 | DNA325815 |
| DNA325826 | DNA325830 | DNA325837 | DNA325838 | DNA325843 | DNA325844 |
| DNA325857 | DNA325867 | DNA325873 | DNA325874 | DNA225865 | DNA325879 |
| DNA325882 | DNA325889 | DNA325891 | DNA325906 | DNA325908 | DNA325910 |
| DNA325911 | DNA325912 | DNA325913 | DNA325925 | DNA325933 | DNA151893 |
| DNA325935 | DNA325937 | DNA103509 | DNA325954 | DNA325955 | DNA325965 |
| DNA325966 | DNA325985 | DNA325994 | DNA326002 | DNA255340 | DNA326012 |
| DNA326014 | DNA326018 | DNA326022 | DNA287331 | DNA326027 | DNA326036 |
| DNA326040 | DNA326041 | DNA326046 | DNA326047 | DNA326058 | DNA326059 |
| DNA326065 | DNA326067 | DNA326074 | DNA326075 | DNA326099 | DNA326104 |
| DNA326105 | DNA326121 | DNA326122 | DNA326123 | DNA326124 | DNA326126 |
| DNA326128 | DNA326129 | DNA326131 | DNA326133 | DNA326136 | DNA326137 |
| DNA326143 | DNA326147 | DNA326148 | DNA274002 | DNA326156 | DNA326157 |
| DNA194805 | DNA326180 | DNA326183 | DNA326186 | DNA326193 | DNA326195 |
| DNA326196 | DNA326197 | DNA326199 | DNA326216 | DNA326235 | DNA326236 |
| DNA326263 | DNA97300 | DNA297388 | DNA326278 | DNA326279 | DNA326288 |
| DNA326289 | DNA326292 | DNA326293 | DNA326294 | DNA227084 | DNA326296 |
| DNA326298 | DNA326299 | DNA326301 | DNA326304 | DNA326305 | DNA326306 |
| DNA326309 | DNA326310 | DNA326311 | DNA326316 | DNA326317 | DNA270979 |
| DNA326328 | DNA326333 | DNA326338 | DNA326343 | DNA326349 | DNA326351 |
| DNA326356 | DNA326362 | DNA270901 | DNA326374 | DNA326375 | DNA326378 |
| DNA326381 | DNA326397 | DNA326406 | DNA326411 | DNA129504 | DNA326416 |
| DNA326420 | DNA326423 | DNA326426 | DNA326427 | DNA326430 | DNA326443 |
| DNA326444 | DNA326449 | DNA326450 | DNA326451 | DNA326452 | DNA326453 |
| DNA326454 | DNA326457 | DNA326460 | DNA326463 | DNA326469 | DNA326487 |
| DNA326500 | DNA326501 | DNA326503 | DNA326504 | DNA326512 | DNA326533 |
| DNA326539 | DNA326548 | DNA326550 | DNA326556 | DNA326558 | DNA326566 |
| DNA326568 | DNA326573 | DNA326577 | DNA326578 | DNA326579 | DNA326586 |
| DNA326595 | DNA326596 | DNA326599 | DNA326603 | DNA269630 | DNA326607 |
| DNA326614 | DNA326621 | DNA326625 | DNA326629 | DNA326630 | DNA326633 |
| DNA326634 | DNA326648 | DNA326651 | DNA326652 | DNA273474 | DNA326671 |
| DNA326676 | DNA326680 | DNA326691 | DNA326693 | DNA326695 | DNA326698 |
| DNA32670 | DNA326703 | DNA326704 | DNA326705 | DNA326706 | DNA326707 |
| DNA326708 | DNA326709 | DNA257531 | DNA256533 | DNA326717 | DNA326718 |
| DNA326725 | DNA290260 | DNA326740 | DNA326745 | DNA326749 | DNA326752 |
| DNA326756 | DNA326758 | DNA273346 | DNA326764 | DNA297288 | DNA287270 |
| DNA326789 | DNA326790 | DNA326796 | DNA326800 | DNA326805 | DNA326808 |
| DNA326809 | DNA326810 | DNA326811 | DNA326818 | DNA326819 | DNA326821 |
| DNA194701 | DNA326829 | DNA326831 | DNA103525 | DNA326838 | DNA326841 |
| DNA88239 | DNA326845 | DNA326850 | DNA326851 | DNA269526 | DNA326868 |
| DNA326874 | DNA326875 | DNA326876 | DNA326879 | DNA326882 | DNA326884 |
| DNA326886 | DNA188732 | DNA254572 | DNA326890 | DNA151898 | DNA326894 |
| DNA326898 | DNA326901 | DNA326904 | DNA226409 | DNA326906 | DNA326909 |
| DNA326915 | DNA326921 | DNA326925 | DNA226561 | DNA326926 | DNA326927 |
| DNA326936 | DNA326937 | DNA326941 | DNA269830 | DNA326946 | DNA326952 |
| DNA326953 | DNA326954 | DNA326956 | DNA326958 | DNA188740 | DNA326960 |
| DNA254240 | DNA326974 | DNA326977 | DNA326979 | DNA326981 | DNA326982 |
| DNA326989 | DNA326990 | DNA237931 | DNA326998 | DNA327001 | DNA327003 |
| DNA327005 | DNA327008 | DNA327013 | DNA327023 | DNA327025 | DNA327029 |
| DNA327031 | DNA327033 | DNA327041 | DNA227943 | DNA327051 | DNA327058 |
| DNA327060 | DNA327067 | DNA327068 | DNA270496 | DNA327077 | DNA327078 |
| DNA327079 | DNA327086 | DNA327089 | DNA327093 | DNA327099 | DNA327102 |
| DNA327104 | DNA227013 | DNA327120 | DNA327122 | DNA327124 | DNA327125 |

[6747] ENDOCRINE

| | | | | | |
|---|---|---|---|---|---|
| DNA323772 | DNA323943 | DNA323976 | DNA254298 | DNA324100 | DNA227528 |
| DNA324139 | DNA324285 | DNA79129 | DNA324484 | DNA290585 | DNA324550 |
| DNA324642 | DNA324692 | DNA324910 | DNA324964 | DNA325350 | DNA325549 |
| DNA325615 | DNA325884 | DNA325916 | DNA325991 | DNA326003 | DNA188351 |
| DNA326328 | DNA326619 | DNA304658 | DNA326790 | DNA83170 | |

[6748] KIDNEY

| | | | | | |
|---|---|---|---|---|---|
| DNA287173 | DNA103253 | DNA323858 | DNA323859 | DNA323869 | DNA323871 |
| DNA323872 | DNA323927 | DNA323947 | DNA226619 | DNA323964 | DNA324042 |
| DNA324048 | DNA324063 | DNA324090 | DNA324092 | DNA324111 | DNA324112 |
| DNA324193 | DNA324210 | DNA324218 | DNA324294 | DNA226547 | DNA324338 |
| DNA324340 | DNA324341 | DNA324347 | DNA324398 | DNA324417 | DNA324418 |
| DNA324424 | DNA324426 | DNA324427 | DNA324434 | DNA324437 | DNA324472 |
| DNA324521 | DNA324525 | DNA324561 | DNA324595 | DNA324604 | DNA324613 |
| DNA83020 | DNA324639 | DNA324641 | DNA324645 | DNA324685 | DNA324715 |
| DNA324716 | DNA324717 | DNA324720 | DNA324722 | DNA324727 | DNA304680 |
| DNA324737 | DNA324751 | DNA304661 | DNA324790 | DNA324798 | DNA324830 |
| DNA324844 | DNA225631 | DNA274326 | DNA324922 | DNA324926 | DNA304710 |
| DNA324963 | DNA324989 | DNA324998 | DNA325026 | DNA325028 | DNA325104 |
| DNA325105 | DNA325106 | DNA325111 | DNA325126 | DNA325152 | DNA325153 |
| DNA325182 | DNA325184 | DNA325222 | DNA325296 | DNA325303 | DNA325326 |
| DNA325334 | DNA325347 | DNA325360 | DNA325384 | DNA325389 | DNA325414 |
| DNA325446 | DNA325475 | DNA325523 | DNA325535 | DNA325601 | DNA225632 |
| DNA325633 | DNA325642 | DNA325644 | DNA270458 | DNA325731 | DNA325750 |
| DNA325752 | DNA325758 | DNA325786 | DNA302016 | DNA325789 | DNA325804 |
| DNA325809 | DNA325810 | DNA325811 | DNA325812 | DNA281436 | DNA325935 |
| DNA325952 | DNA325985 | DNA326002 | DNA326003 | DNA326022 | DNA287331 |
| DNA326041 | DNA326046 | DNA326047 | DNA326099 | DNA326233 | DNA326234 |
| DNA326237 | DNA97300 | DNA326291 | DNA326292 | DNA326311 | DNA326370 |
| DNA326397 | DNA326422 | DNA326463 | DNA326469 | DNA326559 | DNA326586 |
| DNA326603 | DNA326633 | DNA326634 | DNA326692 | DNA326769 | DNA287270 |
| DNA326884 | DNA326885 | DNA326886 | DNA326952 | DNA326974 | DNA327023 |
| DNA327025 | DNA327029 | DNA327067 | DNA327085 | DNA327116 | |

[6749] LUNG

| | | | | | |
|---|---|---|---|---|---|
| DNA323717 | DNA323718 | DNA323719 | DNA287173 | DNA323740 | DNA226262 |
| DNA323778 | DNA323783 | DNA274745 | DNA323829 | DNA323832 | DNA323839 |
| DNA323841 | DNA323856 | DNA323858 | DNA323859 | DNA323862 | DNA323863 |
| DNA323864 | DNA323865 | DNA323866 | DNA323867 | DNA323871 | DNA323872 |
| DNA323878 | DNA323887 | DNA323892 | DNA227529 | DNA323902 | DNA290284 |
| DNA323910 | DNA304666 | DNA304720 | DNA323922 | DNA323925 | DNA323927 |
| DNA323936 | DNA226793 | DNA323944 | DNA323945 | DNA323947 | DNA323954 |
| DNA323959 | DNA323964 | DNA323965 | DNA323995 | DNA324005 | DNA324006 |
| DNA324020 | DNA324021 | DNA324033 | DNA324036 | DNA324039 | DNA324040 |
| DNA324041 | DNA324042 | DNA324044 | DNA324047 | DNA324048 | DNA324049 |
| DNA324052 | DNA324054 | DNA324060 | DNA324063 | DNA324067 | DNA324073 |
| DNA324090 | DNA324091 | DNA324092 | DNA324094 | DNA324101 | DNA324105 |
| DNA324109 | DNA324111 | DNA324112 | DNA227795 | DNA324134 | DNA324148 |
| DNA324155 | DNA324170 | DNA324182 | DNA324203 | DNA324204 | DNA324207 |
| DNA324210 | DNA324218 | DNA324232 | DNA324261 | DNA324265 | DNA324273 |
| DNA324293 | DNA324294 | DNA226547 | DNA324295 | DNA324320 | DNA324326 |
| DNA324338 | DNA324339 | DNA324340 | DNA324341 | DNA324358 | DNA324365 |
| DNA324380 | DNA324412 | DNA324414 | DNA324416 | DNA324417 | DNA324418 |
| DNA324434 | DNA324436 | DNA324437 | DNA324444 | DNA324453 | DNA324454 |
| DNA324472 | DNA324475 | DNA324483 | DNA324491 | DNA290585 | DNA324502 |
| DNA324504 | DNA324505 | DNA324510 | DNA324515 | DNA324521 | DNA324525 |
| DNA324541 | DNA324549 | DNA324552 | DNA324557 | DNA324558 | DNA324561 |
| DNA324564 | DNA324579 | DNA324584 | DNA324591 | DNA324592 | DNA324596 |
| DNA324597 | DNA324598 | DNA324599 | DNA324600 | DNA324604 | DNA324613 |
| DNA324633 | DNA324641 | DNA324643 | DNA324685 | DNA324697 | DNA324699 |
| DNA324700 | DNA324702 | DNA324703 | DNA324707 | DNA324714 | DNA324715 |
| DNA324716 | DNA324717 | DNA324720 | DNA304680 | DNA324736 | DNA324737 |
| DNA324745 | DNA324749 | DNA324751 | DNA324755 | DNA324756 | DNA227442 |
| DNA324771 | DNA324784 | DNA324785 | DNA324790 | DNA324796 | DNA324797 |
| DNA324803 | DNA290785 | DNA324814 | DNA324815 | DNA324816 | DNA324819 |
| DNA324828 | DNA324829 | DNA324841 | DNA324844 | DNA324846 | DNA271418 |
| DNA324870 | DNA324873 | DNA324874 | DNA324875 | DNA324884 | DNA324885 |
| DNA324887 | DNA324888 | DNA324889 | DNA274326 | DNA324896 | DNA324900 |
| DNA324904 | DNA324906 | DNA324907 | DNA324908 | DNA275334 | DNA324925 |
| DNA324926 | DNA273865 | DNA103588 | DNA324945 | DNA324946 | DNA324956 |
| DNA324961 | DNA304710 | DNA324962 | DNA324963 | DNA324965 | DNA324966 |
| DNA324967 | DNA324968 | DNA324982 | DNA324983 | DNA272090 | DNA324989 |
| DNA325002 | DNA325015 | DNA325016 | DNA325017 | DNA325024 | DNA325026 |
| DNA325027 | DNA325029 | DNA325033 | DNA325034 | DNA325039 | DNA325055 |
| DNA325056 | DNA325057 | DNA325078 | DNA325079 | DNA325080 | DNA325081 |
| DNA325100 | DNA325104 | DNA325105 | DNA325106 | DNA226496 | DNA325116 |
| DNA325117 | DNA325118 | DNA325119 | DNA325128 | DNA325141 | DNA325146 |
| DNA325152 | DNA325153 | DNA325156 | DNA325157 | DNA226345 | DNA325173 |
| DNA290319 | DNA325182 | DNA325183 | DNA325184 | DNA325190 | DNA325196 |
| DNA325209 | DNA325214 | DNA325217 | DNA325222 | DNA325233 | DNA325235 |
| DNA325236 | DNA325246 | DNA325247 | DNA325250 | DNA325278 | DNA325284 |
| DNA325285 | DNA325286 | DNA325303 | DNA325305 | DNA325326 | DNA325334 |
| DNA304459 | DNA325343 | DNA325344 | DNA325347 | DNA325353 | DNA325358 |
| DNA325360 | DNA325379 | DNA325384 | DNA325389 | DNA325401 | DNA325414 |
| DNA325418 | DNA325441 | DNA325451 | DNA325452 | DNA325456 | DNA325463 |
| DNA325475 | DNA325479 | DNA325483 | DNA325502 | DNA325506 | DNA325509 |
| DNA325510 | DNA325516 | DNA325522 | DNA325523 | DNA325527 | DNA325534 |
| DNA325535 | DNA325550 | DNA325569 | DNA325570 | DNA325584 | DNA325593 |
| DNA325595 | DNA151827 | DNA325601 | DNA225632 | DNA103514 | DNA325604 |
| DNA325618 | DNA325625 | DNA325633 | DNA325634 | DNA271344 | DNA325642 |
| DNA325644 | DNA325645 | DNA325658 | DNA325659 | DNA325660 | DNA325662 |
| DNA270458 | DNA227092 | DNA325674 | DNA325680 | DNA325686 | DNA325695 |
| DNA325704 | DNA325711 | DNA325712 | DNA325720 | DNA325731 | DNA325750 |
| DNA325752 | DNA325755 | DNA325757 | DNA325758 | DNA325773 | DNA325775 |
| DNA325776 | DNA325786 | DNA302016 | DNA325789 | DNA325806 | DNA325809 |
| DNA325810 | DNA325811 | DNA325812 | DNA325814 | DNA325818 | DNA325822 |
| DNA325837 | DNA325838 | DNA325843 | DNA325844 | DNA325864 | DNA325891 |
| DNA325894 | DNA325913 | DNA325920 | DNA269498 | DNA325923 | DNA325933 |
| DNA325935 | DNA325945 | DNA103509 | DNA325952 | DNA325953 | DNA325957 |
| DNA325958 | DNA325965 | DNA325985 | DNA325988 | DNA325994 | DNA326002 |
| DNA226646 | DNA326022 | DNA287331 | DNA326041 | DNA326046 | DNA326047 |
| DNA326099 | DNA326102 | DNA326116 | DNA326121 | DNA326122 | DNA326124 |
| DNA326128 | DNA326129 | DNA326133 | DNA289522 | DNA326136 | DNA326146 |
| DNA326155 | DNA326156 | DNA326168 | DNA326169 | DNA287355 | DNA326177 |
| DNA326186 | DNA326194 | DNA326214 | DNA326230 | DNA326233 | DNA326234 |
| DNA326256 | DNA326260 | DNA97300 | DNA326273 | DNA326278 | DNA326279 |
| DNA326287 | DNA326288 | DNA326289 | DNA326291 | DNA326292 | DNA326296 |
| DNA326297 | DNA326300 | DNA326309 | DNA326311 | DNA326330 | DNA272889 |
| DNA270975 | DNA326347 | DNA270901 | DNA326381 | DNA326384 | DNA326396 |
| DNA326404 | DNA129504 | DNA326414 | DNA326415 | DNA326416 | DNA326426 |
| DNA326427 | DNA326429 | DNA326430 | DNA326432 | DNA326433 | DNA326440 |
| DNA326441 | DNA326442 | DNA326446 | DNA326449 | DNA326450 | DNA326451 |
| DNA326452 | DNA326453 | DNA326454 | DNA271841 | DNA326457 | DNA326459 |
| DNA326463 | DNA326479 | DNA326481 | DNA326482 | DNA326484 | DNA326485 |
| DNA326487 | DNA326499 | DNA326512 | DNA287636 | DNA326516 | DNA326523 |
| DNA326559 | DNA326562 | DNA326573 | DNA326579 | DNA326581 | DNA326582 |
| DNA326583 | DNA326584 | DNA326585 | DNA274034 | DNA326596 | DNA326597 |
| DNA326603 | DNA326615 | DNA326625 | DNA326626 | DNA326633 | DNA326634 |
| DNA326642 | DNA326651 | DNA326657 | DNA326660 | DNA326661 | DNA274139 |
| DNA326676 | DNA326683 | DNA326684 | DNA326685 | DNA326687 | DNA326688 |
| DNA326690 | DNA326691 | DNA326692 | DNA326698 | DNA326702 | DNA103580 |
| DNA326726 | DNA326727 | DNA326731 | DNA290260 | DNA326736 | DNA326739 |
| DNA326741 | DNA326742 | DNA326756 | DNA326758 | DNA326761 | DNA273346 |
| DNA254548 | DNA326769 | DNA326773 | DNA287270 | DNA326781 | DNA326782 |
| DNA326787 | DNA326789 | DNA326798 | DNA326801 | DNA326808 | DNA326818 |
| DNA326819 | DNA273517 | DNA194701 | DNA103525 | DNA326844 | DNA326884 |
| DNA326885 | DNA326886 | DNA254572 | DNA326901 | DNA326902 | DNA326921 |
| DNA326937 | DNA269830 | DNA326952 | DNA326953 | DNA326972 | DNA326974 |
| DNA326981 | DNA326983 | DNA327005 | DNA327023 | DNA327025 | DNA327029 |
| DNA327033 | DNA327054 | DNA327060 | DNA327067 | DNA327068 | DNA327077 |
| DNA327078 | DNA327079 | DNA327085 | DNA327111 | DNA227013 | |

[6750] BREAST

| | | | | | |
|---|---|---|---|---|---|
| DNA323717 | DNA273712 | DNA226262 | DNA323778 | DNA323784 | DNA323804 |
| DNA323805 | DNA323817 | DNA323820 | DNA323829 | DNA323836 | DNA323845 |
| DNA323858 | DNA323859 | DNA323862 | DNA323863 | DNA323867 | DNA323868 |
| DNA323869 | DNA323870 | DNA323871 | DNA323872 | DNA323919 | DNA323922 |
| DNA323936 | DNA323943 | DNA323944 | DNA323947 | DNA323953 | DNA323964 |
| DNA323980 | DNA323990 | DNA323998 | DNA324004 | DNA324009 | DNA324013 |
| DNA324042 | DNA324047 | DNA324054 | DNA324063 | DNA324075 | DNA324090 |
| DNA324091 | DNA324092 | DNA324101 | DNA324103 | DNA324110 | DNA324111 |
| DNA324112 | DNA227795 | DNA324134 | DNA227190 | DNA324149 | DNA324154 |
| DNA324159 | DNA324170 | DNA324178 | DNA324189 | DNA324192 | DNA324193 |
| DNA324207 | DNA324210 | DNA324218 | DNA324224 | DNA324230 | DNA324236 |
| DNA324243 | DNA324276 | DNA324285 | DNA226547 | DNA324295 | DNA150976 |
| DNA324320 | DNA324338 | DNA324340 | DNA324341 | DNA324346 | DNA324347 |
| DNA324373 | DNA324390 | DNA324391 | DNA324394 | DNA324412 | DNA324417 |
| DNA324418 | DNA324423 | DNA324434 | DNA324437 | DNA324438 | DNA139747 |
| DNA325837 | DNA325838 | DNA325839 | DNA325843 | DNA325844 | DNA325848 |
| DNA325900 | DNA325906 | DNA325907 | DNA325908 | DNA325913 | DNA325922 |
| DNA325930 | DNA325933 | DNA325935 | DNA325966 | DNA227559 | DNA325985 |
| DNA325986 | DNA227206 | DNA325990 | DNA325991 | DNA219233 | DNA325994 |
| DNA325998 | DNA326000 | DNA326002 | DNA326022 | DNA326041 | DNA326046 |
| DNA326047 | DNA326075 | DNA326079 | DNA326099 | DNA326113 | DNA326115 |
| DNA97293 | DNA326122 | DNA326124 | DNA326128 | DNA326129 | DNA326136 |
| DNA326156 | DNA287355 | DNA326187 | DNA326233 | DNA326234 | DNA326251 |
| DNA326254 | DNA326260 | DNA97300 | DNA326273 | DNA326278 | DNA326280 |
| DNA326281 | DNA304715 | DNA326282 | DNA326286 | DNA290292 | DNA326289 |
| DNA326291 | DNA326292 | DNA66475 | DNA326324 | DNA326326 | DNA326327 |
| DNA326364 | DNA326378 | DNA326381 | DNA326396 | DNA326415 | DNA326449 |
| DNA326450 | DNA326451 | DNA326452 | DNA326453 | DNA326454 | DNA326457 |
| DNA326463 | DNA326469 | DNA326499 | DNA287636 | DNA326529 | DNA326541 |
| DNA270315 | DNA326546 | DNA326557 | DNA326559 | DNA326562 | DNA326579 |
| DNA326615 | DNA326620 | DNA227249 | DNA326633 | DNA326634 | DNA326635 |
| DNA326651 | DNA326657 | DNA272347 | DNA326669 | DNA326686 | DNA326687 |
| DNA326688 | DNA326698 | DNA326732 | DNA290260 | DNA326741 | DNA326742 |
| DNA83154 | DNA326756 | DNA326758 | DNA326759 | DNA326769 | DNA326777 |
| DNA287270 | DNA326792 | DNA326796 | DNA326798 | DNA326799 | DNA326816 |
| DNA194701 | DNA103525 | DNA326841 | DNA326862 | DNA326863 | DNA304670 |
| DNA326864 | DNA326866 | DNA326870 | DNA326885 | DNA326886 | DNA326903 |
| DNA326921 | DNA326952 | DNA326969 | DNA326971 | DNA326974 | DNA326981 |
| DNA327016 | DNA327023 | DNA327025 | DNA327029 | DNA273992 | DNA327060 |
| DNA327062 | DNA273254 | DNA327067 | DNA327068 | DNA327073 | DNA327085 |
| DNA327087 | DNA327090 | DNA327092 | DNA276159 | DNA327127 | |

[6751] STOMACH

| | | | | | |
|---|---|---|---|---|---|
| DNA287173 | DNA323805 | DNA323849 | DNA323864 | DNA323865 | DNA323866 |
| DNA323873 | DNA323884 | DNA323920 | DNA323925 | DNA323934 | DNA323990 |
| DNA324028 | DNA324029 | DNA324039 | DNA324048 | DNA324065 | DNA227545 |
| DNA227795 | DNA324155 | DNA324179 | DNA324180 | DNA324216 | DNA324243 |
| DNA324244 | DNA324294 | DNA324362 | DNA324364 | DNA324398 | DNA324417 |
| DNA324418 | DNA324471 | DNA324504 | DNA324541 | DNA324552 | DNA324555 |
| DNA324556 | DNA324558 | DNA324624 | DNA324630 | DNA304680 | DNA324756 |
| DNA324769 | DNA324790 | DNA324808 | DNA324850 | DNA225631 | DNA324906 |
| DNA324907 | DNA324908 | DNA324922 | DNA304710 | DNA324962 | DNA324963 |
| DNA324972 | DNA324973 | DNA324982 | DNA324997 | DNA325033 | DNA325074 |
| DNA325078 | DNA325079 | DNA325104 | DNA325105 | DNA325106 | DNA325148 |
| DNA325149 | DNA325156 | DNA325157 | DNA89242 | DNA325186 | DNA325191 |
| DNA325192 | DNA325202 | DNA325224 | DNA325233 | DNA325235 | DNA325236 |
| DNA325251 | DNA325262 | DNA325268 | DNA325306 | DNA325316 | DNA325318 |
| DNA325320 | DNA325368 | DNA325418 | DNA97285 | DNA325441 | DNA325442 |
| DNA325444 | DNA325446 | DNA325474 | DNA325480 | DNA325506 | DNA325534 |
| DNA325535 | DNA325570 | DNA325601 | DNA225632 | DNA325642 | DNA325644 |
| DNA325645 | DNA270458 | DNA227092 | DNA325773 | DNA325775 | DNA325776 |
| DNA325803 | DNA325804 | DNA274058 | DNA325843 | DNA325873 | DNA325941 |
| DNA325986 | DNA325993 | DNA326019 | DNA287331 | DNA326043 | DNA326133 |
| DNA326196 | DNA326284 | DNA326311 | DNA326333 | DNA326347 | DNA326397 |
| DNA326427 | DNA326517 | DNA326603 | DNA326641 | DNA326642 | DNA326698 |
| DNA326750 | DNA326791 | DNA326846 | DNA326859 | DNA326862 | DNA326863 |
| DNA304670 | DNA326864 | DNA326865 | DNA326918 | DNA326961 | DNA326977 |
| DNA326983 | DNA327040 | DNA327042 | DNA327055 | DNA273254 | DNA327099 |
| DNA327116 | DNA327127 | | | | |

[6752] BONE

| | | | | | |
|---|---|---|---|---|---|
| DNA323765 | DNA323817 | DNA323820 | DNA323829 | DNA323864 | DNA323867 |
| DNA323869 | DNA323871 | DNA323914 | DNA323947 | DNA323964 | DNA324004 |
| DNA324009 | DNA324090 | DNA324091 | DNA324092 | DNA324111 | DNA324112 |
| DNA324154 | DNA324155 | DNA324200 | DNA324201 | DNA324210 | DNA324230 |
| DNA324293 | DNA226547 | DNA324295 | DNA324326 | DNA324347 | DNA324390 |
| DNA324417 | DNA324418 | DNA324423 | DNA324437 | DNA324472 | DNA324483 |
| DNA324488 | DNA324501 | DNA324502 | DNA324503 | DNA324504 | DNA324505 |
| DNA324512 | DNA324521 | DNA324525 | DNA324541 | DNA324549 | DNA324550 |
| DNA324551 | DNA324554 | DNA324555 | DNA324556 | DNA324557 | DNA324558 |
| DNA324575 | DNA324576 | DNA324579 | DNA324595 | DNA324596 | DNA324604 |
| DNA324613 | DNA324624 | DNA324632 | DNA324641 | DNA324645 | DNA324682 |
| DNA324687 | DNA324697 | DNA324717 | DNA324720 | DNA324737 | DNA324756 |
| DNA304661 | DNA324785 | DNA324796 | DNA324797 | DNA150772 | DNA324828 |
| DNA324829 | DNA324844 | DNA324866 | DNA324902 | DNA324904 | DNA324905 |
| DNA324906 | DNA324926 | DNA324989 | DNA325015 | DNA325024 | DNA325026 |
| DNA325027 | DNA325034 | DNA325111 | DNA325116 | DNA131588 | DNA325156 |
| DNA325157 | DNA325164 | DNA325179 | DNA325182 | DNA325183 | DNA325184 |
| DNA325202 | DNA325206 | DNA325222 | DNA325229 | DNA325231 | DNA325232 |
| DNA325234 | DNA325236 | DNA325250 | DNA325301 | DNA325303 | DNA325326 |
| DNA325339 | DNA325340 | DNA325347 | DNA325358 | DNA325395 | DNA325430 |
| DNA325437 | DNA325451 | DNA325452 | DNA325523 | DNA325558 | DNA325570 |
| DNA325576 | DNA325601 | DNA225632 | DNA325633 | DNA325731 | DNA325733 |
| DNA325736 | DNA325762 | DNA325786 | DNA302016 | DNA325789 | DNA325806 |
| DNA325810 | DNA325811 | DNA325812 | DNA325843 | DNA325844 | DNA325906 |
| DNA325908 | DNA325913 | DNA325922 | DNA325935 | DNA325985 | DNA326002 |
| DNA326041 | DNA326046 | DNA326099 | DNA326233 | DNA326234 | DNA326251 |
| DNA97300 | DNA304715 | DNA326286 | DNA326289 | DNA326381 | DNA326457 |
| DNA326580 | DNA326633 | DNA326634 | DNA326635 | DNA326651 | DNA290260 |
| DNA326796 | DNA326884 | DNA326886 | DNA326974 | DNA326977 | DNA327005 |
| DNA327025 | DNA327060 | DNA327062 | DNA327067 | DNA327114 | |

### Example 2

### Use of TAT as a Hybridization Probe

[6753] The following method describes use of a nucleotide sequence encoding TAT as a hybridization probe for, i.e., diagnosis of the presence of a tumor in a mammal.

[6754] DNA comprising the coding sequence of full-length or mature TAT as disclosed herein can also be employed as a probe to screen for homologous DNAs (such as those encoding naturally-occurring variants of TAT) in human tissue cDNA libraries or human tissue genomic libraries.

[6755] Hybridization and washing of filters containing either library DNAs is performed under the following high stringency conditions. Hybridization of radiolabeled TAT-derived probe to the filters is performed in a solution of 50% formamide, 5×SSC, 0.1% SDS, 0.1% sodium pyrophosphate, 50 mM sodium phosphate, pH 6.8, 2× Denhardt's solution, and 10% dextran sulfate at 42° C. for 20 hours. Washing of the filters is performed in an aqueous solution of 0.1×SSC and 0.1% SDS at 42° C.

[6756] DNAs having a desired sequence identity with the DNA encoding full-length native sequence TAT can then be identified using standard techniques known in the art.

### Example 3

### Expression of TAT in E. coli

[6757] This example illustrates preparation of an unglycosylated form of TAT by recombinant expression in E. coli.

[6758] The DNA sequence encoding TAT is initially amplified using selected PCR primers. The primers should contain restriction enzyme sites which correspond to the restriction enzyme sites on the selected expression vector. A variety of expression vectors may be employed. An example of a suitable vector is pBR322 (derived from E. coli; see Bolivar et al., Gene, 2:95 (1977)) which contains genes for ampicillin and tetracycline resistance. The vector is digested with restriction enzyme and dephosphorylated. The PCR amplified sequences are then ligated into the vector. The vector will preferably include sequences which encode for an antibiotic resistance gene, a trp promoter, a polyhis leader (including the first six STII codons, polyhis sequence, and enterokinase cleavage site), the TAT coding region, lambda transcriptional terminator, and an argu gene.

[6759] The ligation mixture is then used to transform a selected E. coli strain using the methods described in Sambrook et al., sulra. Transformants are identified by their ability to grow on LB plates and antibiotic resistant colonies are then selected. Plasmid DNA can be isolated and confirmed by restriction analysis and DNA sequencing.

[6760] Selected clones can be grown overnight in liquid culture medium such as LB broth supplemented with antibiotics. The overnight culture may subsequently be used to inoculate a larger scale culture. The cells are then grown to a desired optical density, during which the expression promoter is turned on.

[6761] After culturing the cells for several more hours, the cells can be harvested by centrifugation. The cell pellet obtained by the centrifugation can be solubilized using various agents known in the art, and the solubilized TAT protein can then be purified using a metal chelating column under conditions that allow tight binding of the protein.

[6762] TAT may be expressed in E. coli in a poly-His tagged form, using the following procedure. The DNA encoding TAT is initially amplified using selected PCR primers. The primers will contain restriction enzyme sites which correspond to the restriction enzyme sites on the selected expression vector, and other useful sequences providing for efficient and reliable translation initiation, rapid purification on a metal chelation column, and proteolytic removal with enterokinase. The PCR-amplified, poly-His tagged sequences are then ligated into an expression vector, which is used to transform an E. coli host based on strain 52 (W3110 fuhA(tonA) Ion gale rpoHts(htpRts) clpP(lacIq). Transformants are first grown in LB containing 50 mg/ml carbenicillin at 30° C. with shaking until an O.D.600 of 3-5 is reached. Cultures are then diluted 50-100 fold into CRAP media (prepared by mixing 3.57 g (NH₄)₂SO₄, 0.71 g sodium citrate·2H₂O, 1.07 g KCl, 5.36 g Difco yeast extract, 5.36 g Sheffield hycase SF in 500 mL water, as well as 110 mM MPOS, pH 7.3, 0.55% (w/v) glucose and 7 mM MgSO₄) and grown for approximately 20-30 hours at 30° C. with shaking. Samples are removed to verify expression by SDS-PAGE analysis, and the bulk culture is centrifuged to pellet the cells. Cell pellets are frozen until purification and refolding.

[6763] E. coli paste from 0.5 to 1 L fermentations (6-10 g pellets) is resuspended in 10 volumes (w/v) in 7 M guanidine, 20 mM Tris, pH 8 buffer. Solid sodium sulfite and sodium tetrathionate is added to make final concentrations of 0.1M and 0.02 M, respectively, and the solution is stirred overnight at 4° C. This step results in a denatured protein with all cysteine residues blocked by sulfitolization. The solution is centrifuged at 40,000 rpm in a Beckman Ultracentifuge for 30 min. The supernatant is diluted with 3-5 volumes of metal chelate column buffer (6 M guanidine, 20 mM Tris, pH 7.4) and filtered through 0.22 micron filters to clarify. The clarified extract is loaded onto a 5 ml Qiagen Ni-NTA metal chelate column equilibrated in the metal chelate column buffer. The column is washed with additional buffer containing 50 mM imidazole (Calbiochem, Utrol grade), pH 7.4. The protein is eluted with buffer containing 250 mM imidazole. Fractions containing the desired protein are pooled and stored at 4° C. Protein concentration is estimated by its absorbance at 280 nm using the calculated extinction coefficient based on its amino acid sequence.

[6764] The proteins are refolded by diluting the sample slowly into freshly prepared refolding buffer consisting of: 20 mM Tris, pH 8.6, 0.3 M NaCl, 2.5 M urea, 5 mM cysteine, 20 mM glycine and 1 mM EDTA. Refolding volumes are chosen so that the final protein concentration is between 50 to 100 micrograms/ml. The refolding solution is stirred gently at 4° C. for 12-36 hours. The refolding reaction is quenched by the addition of TFA to a final concentration of 0.4% (pH of approximately 3). Before further purification of the protein, the solution is filtered through a 0.22 micron filter and acetonitrile is added to 2-10% final concentration. The refolded protein is chromatographed on a Poros R1/H reversed phase column using a mobile buffer of 0.1% TFA with elution with a gradient of acetonitrile from 10 to 80%. Aliquots of fractions with A280 absorbance are analyzed on SDS polyacrylamide gels and fractions containing homogeneous refolded protein are pooled. Generally, the properly refolded species of most proteins are eluted at the lowest concentrations of acetonitrile since those species are the most compact with their hydrophobic interiors shielded from interaction with the reversed phase resin. Aggregated species are usually eluted at higher acetonitrile concentrations. In addition to resolving misfolded forms of proteins from the desired form, the reversed phase step also removes endotoxin from the samples.

[6765] Fractions containing the desired folded TAT polypeptide are pooled and the acetonitrile removed using a gentle stream of nitrogen directed at the solution. Proteins are formulated into 20 mM Hepes, pH 6.8 with 0.14 M sodium chloride and 4% mannitol by dialysis or by gel filtration using G25 Superfine (Pharmacia) resins equilibrated in the formulation buffer and sterile filtered.

[6766] Certain of the TAT polypeptides disclosed herein have been successfully expressed and purified using this technique(s).

### Example 4

### Expression of TAT in Mammalian Cells

[6767] This example illustrates preparation of a potentially glycosylated form of TAT by recombinant expression in mammalian cells.

[6768] The vector, pRK5 (see EP 307,247, published Mar. 15, 1989), is employed as the expression vector. Optionally, the TAT DNA is ligated into pRK5 with selected restriction enzymes to allow insertion of the TAT DNA using ligation methods such as described in Sambrook et al., supra. The resulting vector is called pRK5-TAT.

[6769] In one embodiment, the selected host cells may be 293 cells. Human 293 cells (ATCC CCL 1573) are grown to confluence in tissue culture plates in medium such as DMEM supplemented with fetal calf serum and optionally, nutrient components and/or antibiotics. About 10 μg pRK5-TAT DNA is mixed with about 1 μg DNA encoding the VA RNA gene [Thimmappaya et al., Cell 31:543 (1982)] and dissolved in 500 μl of 1 mM Tris-HCl, 0.1 mM EDTA, 0.227 M CaCl₂. To this mixture is added, dropwise, 500 μl of 50 mM HEPES (pH 7.35), 280 mM NaCl, 1.5 mM NapO₄, and a precipitate is allowed to form for 10 minutes at 25° C. The precipitate is suspended and added to the 293 cells and allowed to settle for about four hours at 37° C. The culture medium is aspirated off and 2 ml of 20% glycerol in PBS is added for 30 seconds. The 293 cells are then washed with serum free medium, fresh medium is added and the cells are incubated for about 5 days.

[6770] Approximately 24 hours after the transfections, the culture medium is removed and replaced with culture medium (alone) or culture medium containing 200 μCi/ml ³⁵S-cysteine and 200 μCi/ml ³⁵S-methionine. After a 12 hour incubation, the conditioned medium is collected, concentrated on a spin filter, and loaded onto a 15% SDS gel. The processed gel may be dried and exposed to film for a selected period of time to reveal the presence of TAT polypeptide. The cultures containing transfected cells may undergo further incubation (in serum free medium) and the medium is tested in selected bioassays.

[6771] In an alternative technique, TAT may be introduced into 293 cells transiently using the dextran sulfate method described by Somparyrac et al., Proc. Natl. Acad. Sci. 12:7575 (1981). 293 cells are grown to maximal density in a spinner flask and 700 μg pRK5-TAT DNA is added. The cells are first concentrated from the spinner flask by centrifugation and washed with PBS. The DNA-dextran precipitate is incubated on the cell pellet for four hours. The cells are treated with 20% glycerol for 90 seconds, washed with tissue culture medium, and re-introduced into the spinner flask containing tissue culture medium, 5 μg/ml bovine insulin and 0.1 μg/ml bovine transferrin. After about four days, the conditioned media is centrifuged and filtered to remove cells and debris. The sample containing expressed TAT can then be concentrated and purified by any selected method, such as dialysis and/or column chromatography.

[6772] In another embodiment, TAT can be expressed in CHO cells. The pRK5-TAT can be transfected into CHO cells using known reagents such as CaPO₄ or DEAE-dextran. As described above, the cell cultures can be incubated, and the medium replaced with culture medium (alone) or medium containing a radiolabel such as ³⁵S-methionine. After determining the presence of TAT polypeptide, the culture medium may be replaced with serum free medium. Preferably, the cultures are incubated for about 6 days, and then the conditioned medium is harvested. The medium containing the expressed TAT can then be concentrated and purified by any selected method.

[6773] Epitope-tagged TAT may also be expressed in host CHO cells. The TAT may be subcloned out of the pRK5 vector. The subclone insert can undergo PCR to fuse in frame with a selected epitope tag such as a poly-his tag into a Baculovirus expression vector. The poly-his tagged TAT insert can then be subcloned into a SV40 driven vector containing a selection marker such as DHFR for selection of stable clones. Finally, the CHO cells can be transfected (as described above) with the SV40 driven vector. Labeling may be performed, as described above, to verify expression. The culture medium containing the expressed poly-His tagged TAT can then be concentrated and purified by any selected method, such as by Ni²⁺-chelate affinity chromatography.

[6774] TAT may also be expressed in CHO and/or COS cells by a transient expression procedure or in CHO cells by another stable expression procedure.

[6775] Stable expression in CHO cells is performed using the following procedure. The proteins are expressed as an IgG construct (immunoadhesin), in which the coding sequences for the soluble forms (e.g. extracellular domains) of the respective proteins are fused to an IgG1 constant region sequence containing the hinge, CH2 and CH2 domains and/or is a poly-His tagged form.

[6776] Following PCR amplification, the respective DNAs are subcloned in a CHO expression vector using standard techniques as described in Ausubel et al., Current Protocols of Molecular Biology, Unit 3.16, John Wiley and Sons (1997). CHO expression vectors are constructed to have compatible restriction sites 5′ and 3′ of the DNA of interest to allow the convenient shuttling of cDNA's. The vector used expression in CHO cells is as described in Lucas et al., Nucl. Acids Res. 24:9 (1774-1779 (1996), and uses the SV40 early promoter/enhancer to drive expression of the cDNA of interest and dihydrofolate reductase (DHFR). DHFR expression permits selection for stable maintenance of the plasmid following transfection.

[6777] Twelve micrograms of the desired plasmid DNA is introduced into approximately 10 million CHO cells using commercially available transfection reagents Superfect® (Quiagen), Dosper® or Fugene® (Boehringer Mannheim). The cells are grown as described in Lucas et al., supra. Approximately 3×10⁷ cells are frozen in an ampule for further growth and production as described below.

[6778] The ampules containing the plasmid DNA are thawed by placement into water bath and mixed by vortexing. The contents are pipetted into a centrifuge tube containing 10 mLs of media and centrifuged at 1000 rpm for 5 minutes. The supernatant is aspirated and the cells are resuspended in 10 mL of selective media (0.2 μm filtered PS20 with 5% 0.2 μm diafiltered fetal bovine serum). The cells are then aliquoted into a 100 mL spinner containing 90 mL of selective media. After 1-2 days, the cells are transferred into a 250 mL spinner filled with 150 mL selective growth medium and incubated at 37° C. After another 2-3 days, 250 mL, 500 mL and 2000 mL spinners are seeded with 3×10⁵ cells/mL. The cell media is exchanged with fresh media by centrifugation and resuspension in production medium. Although any suitable CHO media may be employed, a production medium described in U.S. Pat. No. 5,122,469, issued Jun. 16, 1992 may actually be used. A 3 L production spinner is seeded at 1.2×10⁶ cells/mL. On day 0, the cell number pH ie determined. On day 1, the spinner is sampled and sparging with filtered air is commenced. On day 2, the spinner is sampled, the temperature shifted to 33° C., and 30 mL of 500 g/L glucose and 0.6 mL of 10% antifoam (e.g., 35% polydimethylsiloxane emulsion, Dow Corning 365 Medical Grade Emulsion) taken. Throughout the production, the pH is adjusted as necessary to keep it at around 7.2. After 10 days, or until the viability dropped below 70%, the cell culture is harvested by centrifugation and filtering through a 0.22 μm filter. The filtrate was either stored at 4° C. or immediately loaded onto columns for purification.

[6779] For the poly-His tagged constructs, the proteins are purified using a Ni-NTA column (Qiagen). Before purification, imidazole is added to the conditioned media to a concentration of 5 mM. The conditioned media is pumped onto a 6 ml Ni-NTA column equilibrated in 20 mM Hepes, pH 7.4, buffer containing 0.3 M NaCl and 5 mM imidazole at a flow rate of 4-5 ml/min. at 4° C. After loading, the column is washed with additional equilibration buffer and the protein eluted with equilibration buffer containing 0.25 M imidazole. The highly purified protein is subsequently desalted into a storage buffer containing 10 mM Hepes, 0.14 M NaCl and 4% mannitol, pH 6.8, with a 25 ml G25 Superfine (Pharmacia) column and stored at −80° C.

[6780] Immunoadhesin (Fc-containing) constructs are purified from the conditioned media as follows. The conditioned medium is pumped onto a 5 ml Protein A column (Pharmacia) which had been equilibrated in 20 mM Na phosphate buffer, pH 6.8. After loading, the column is washed extensively with equilibration buffer before elution with 100 mM citric acid, pH 3.5. The eluted protein is immediately neutralized by collecting 1 ml fractions into tubes containing 275 μL of 1 M Tris buffer, pH 9. The highly purified protein is subsequently desalted into storage buffer as described above for the poly-His tagged proteins. The homogeneity is assessed by SDS polyacrylamide gels and by N-terminal amino acid sequencing by Edman degradation.

[6781] Certain of the TAT polypeptides disclosed herein have been successfully expressed and purified using this technique(s).

### Example 5

### Expression of TAT in Yeast

[6782] The following method describes recombinant expression of TAT in yeast.

[6783] First, yeast expression vectors are constructed for intracellular production or secretion of TAT from the ADH2/GAPDH promoter. DNA encoding TAT and the promoter is inserted into suitable restriction enzyme sites in the selected plasmid to direct intracellular expression of TAT. For secretion, DNA encoding TAT can be cloned into the selected plasmid, together with DNA encoding the ADH2/GAPDH promoter, a native TAT signal peptide or other mammalian signal peptide, or, for example, a yeast alpha-factor or invertase secretory signal/leader sequence, and linker sequences (if needed) for expression of TAT.

[6784] Yeast cells, such as yeast strain AB110, can then be transformed with the expression plasmids described above and cultured in selected fermentation media. The transformed yeast supernatants can be analyzed by precipitation with 10% trichloroacetic acid and separation by SDS-PAGE, followed by staining of the gels with Coomassie Blue stain.

[6785] Recombinant TAT can subsequently be isolated and purified by removing the yeast cells from the fermentation medium by centrifugation and then concentrating the medium using selected cartridge filters. The concentrate containing TAT may further be purified using selected column chromatography resins.

[6786] Certain of the TAT polypeptides disclosed herein have been successfully expressed and purified using this technique(s).

### Example 6

### Expression of TAT in Baculovirus-Infected Insect Cells

[6787] The following method describes recombinant expression of TAT in Baculovirus-infected insect cells.

[6788] The sequence coding for TAT is fused upstream of an epitope tag contained within a baculovirus expression vector. Such epitope tags include poly-his tags and immunoglobulin tags (like Fc regions of IgG). A variety of plasmids may be employed, including plasmids derived from commercially available plasmids such as pVL1393 (Novagen). Briefly, the sequence encoding TAT or the desired portion of the coding sequence of TAT such as the sequence encoding an extracellular domain of a transmembrane protein or the sequence encoding the mature protein if the protein is extracellular is amplified by PCR with primers complementary to the 5′ and 3′ regions. The 5′ primer may incorporate flanking (selected) restriction enzyme sites. The product is then digested with those selected restriction enzymes and subcloned into the expression vector.

[6789] Recombinant baculovirus is generated by co-transfecting the above plasmid and BaculoGold™ virus DNA (Pharmingen) into Spodoptera frugiperda (“Sf9”) cells (ATCC CRL 1711) using lipofectin (commercially available from GIBCO-BRL). After 4-5 days of incubation at 28° C., the released viruses are harvested and used for further amplifications. Viral infection and protein expression are performed as described by O'Reilley et al., Baculovirus expression vectors: A Laboratory Manual, Oxford: Oxford University Press (1994).

[6790] Expressed poly-his tagged TAT can then be purified, for example, by Ni²⁺-chelate affinity chromatography as follows. Extracts are prepared from recombinant virus-infected Sf9 cells as described by Rupert et al., Nature, 362:175-179 (1993). Briefly, Sf9 cells are washed, resuspended in sonication buffer (25 mL Hepes, pH 7.9; 12.5 mM MgCl₂; 0.1 mM EDTA; 10% glycerol; 0.1% NP-40; 0.4 M KCl), and sonicated twice for 20 seconds on ice. The sonicates are cleared by centrifugation, and the supernatant is diluted 50-fold in loading buffer (50 mM phosphate, 300 mM NaCl, 10% glycerol, pH 7.8) and filtered through a 0.45 μm filter. A Ni²⁺-NTA agarose column (commercially available from Qiagen) is prepared with a bed volume of 5 mL, washed with 25 mL of water and equilibrated with 25 mL of loading buffer. The filtered cell extract is loaded onto the column at 0.5 mL per minute. The column is washed to baseline A₂₈₀ with loading buffer, at which point fraction collection is started. Next, the column is washed with a secondary wash buffer (50 mM phosphate; 300 mM NaCl, 10% glycerol, pH 6.0), which elutes nonspecifically bound protein. After reaching A₂₈₀ baseline again, the column is developed with a 0 to 500 mM Imidazole gradient in the secondary wash buffer. One mL fractions are collected and analyzed by SDS-PAGE and silver staining or Western blot with Ni²⁺-NTA-conjugated to alkaline phosphatase (Qiagen). Fractions containing the eluted H₁₀-tagged TAT are pooled and dialyzed against loading buffer.

[6791] Alternatively, purification of the IgG tagged (or Fc tagged) TAT can be performed using known chromatography techniques, including for instance, Protein A or protein G column chromatography.

[6792] Certain of the TAT polypeptides disclosed herein have been successfully expressed and purified using this technique(s).

### Example 7

### Preparation of Antibodies that Bind TAT

[6793] This example illustrates preparation of monoclonal antibodies which can specifically bind TAT.

[6794] Techniques for producing the monoclonal antibodies are known in the art and are described, for instance, in Goding, supra. Immunogens that may be employed include purified TAT, fusion proteins containing TAT, and cells expressing recombinant TAT on the cell surface. Selection of the immunogen can be made by the skilled artisan without undue experimentation.

[6795] Mice, such as Balb/c, are immunized with the TAT immunogen emulsified in complete Freund's adjuvant and injected subcutaneously or intraperitoneally in an amount from 1-100 micrograms. Alternatively, the immunogen is emulsified in MPL-TDM adjuvant (Ribi Immunochemical Research, Hamilton, Mont.) and injected into the animal's hind foot pads. The immunized mice are then boosted 10 to 12 days later with additional immunogen emulsified in the selected adjuvant. Thereafter, for several weeks, the mice may also be boosted with additional immunization injections. Serum samples may be periodically obtained from the mice by retro-orbital bleeding for testing in ELISA assays to detect anti-TAT antibodies.

[6796] After a suitable antibody titer has been detected, the animals “positive” for antibodies can be injected with a final intravenous injection of TAT. Three to four days later, the mice are sacrificed and the spleen cells are harvested. The spleen cells are then fused (using 35% polyethylene glycol) to a selected murine myeloma cell line such as P3X63AgU.1, available from ATCC, No. CRL 1597. The fusions generate hybridoma cells which can then be plated in 96 well tissue culture plates containing HAT (hypoxanthine, aminopterin, and thymidine) medium to inhibit proliferation of non-fused cells, myeloma hybrids, and spleen cell hybrids.

[6797] The hybridoma cells will be screened in an ELISA for reactivity against TAT. Determination of “positive” hybridoma cells secreting the desired monoclonal antibodies against TAT is within the skill in the art.

[6798] The positive hybridoma cells can be injected intraperitoneally into syngeneic Balb/c mice to produce ascites containing the anti-TAT monoclonal antibodies. Alternatively, the hybridoma cells can be grown in tissue culture flasks or roller bottles. Purification of the monoclonal antibodies produced in the ascites can be accomplished using ammonium sulfate precipitation, followed by gel exclusion chromatography. Alternatively, affinity chromatography based upon binding of antibody to protein A or protein G can be employed.

### Example 8

### Purification of TAT Polypeptides Using Specific Antibodies

[6799] Native or recombinant TAT polypeptides may be purified by a variety of standard techniques in the art of protein purification. For example, pro-TAT polypeptide, mature TAT polypeptide, or pre-TAT polypeptide is purified by immunoaffinity chromatography using antibodies specific for the TAT polypeptide of interest. In general, an immunoaffinity column is constructed by covalently coupling the anti-TAT polypeptide antibody to an activated chromatographic resin.

[6800] Polyclonal immunoglobulins are prepared from immune sera either by precipitation with ammonium sulfate or by purification on immobilized Protein A (Pharmacia LKB Biotechnology, Piscataway, N.J.). Likewise, monoclonal antibodies are prepared from mouse ascites fluid by ammonium sulfate precipitation or chromatography on immobilized Protein A. Partially purified immunoglobulin is covalently attached to a chromatographic resin such as CnBr-activated SEPHAROSE™ (Pharmacia LKB Biotechnology). The antibody is coupled to the resin, the resin is blocked, and the derivative resin is washed according to the manufacturer's instructions.

[6801] Such an immunoaffinity column is utilized in the purification of TAT polypeptide by preparing a fraction from cells containing TAT polypeptide in a soluble form. This preparation is derived by solubilization of the whole cell or of a subcellular fraction obtained via differential centrifugation by the addition of detergent or by other methods well known in the art. Alternatively, soluble TAT polypeptide containing a signal sequence may be secreted in useful quantity into the medium in which the cells are grown.

[6802] A soluble TAT polypeptide-containing preparation is passed over the immunoaffinity column, and the column is washed under conditions that allow the preferential absorbance of TAT polypeptide (e.g., high ionic strength buffers in the presence of detergent). Then, the column is eluted under conditions that disrupt antibody/TAT polypeptide binding (e.g., a low pH buffer such as approximately pH 2-3, or a high concentration of a chaotrope such as urea or thiocyanate ion), and TAT polypeptide is collected.

### Example 9

### In Vitro Tumor Cell Killing Assay

[6803] Mammalian cells expressing the TAT polypeptide of interest may be obtained using standard expression vector and cloning techniques. Alternatively, many tumor cell lines expressing TAT polypeptides of interest are publicly available, for example, through the ATCC and can be routinely identified using standard ELISA or FACS analysis. Anti-TAT polypeptide monoclonal antibodies (and toxin conjugated derivatives thereof) may then be employed in assays to determine the ability of the antibody to kill TAT polypeptide expressing cells in vitro.

[6804] For example, cells expressing the TAT polypeptide of interest are obtained as described above and plated into 96 well dishes. In one analysis, the antibody/toxin conjugate (or naked antibody) is included throughout the cell incubation for a period of 4 days. In a second independent analysis, the cells are incubated for 1 hour with the antibody/toxin conjugate (or naked antibody) and then washed and incubated in the absence of antibody/toxin conjugate for a period of 4 days. Cell viability is then measured using the CellTiter-Glo Luminescent Cell Viability Assay from Promega (Cat# G7571). Untreated cells serve as a negative control.

### Example 10

### In Vivo Tumor Cell Killing Assay

[6805] To test the efficacy of conjugated or unconjugated anti-TAT polypeptide monoclonal antibodies, anti-TAT antibody is injected intraperitoneally into nude mice 24 hours prior to receiving tumor promoting cells subcutaneously in the flank. Antibody injections continue twice per week for the remainder of the study. Tumor volume is then measured twice per week.

[6806] The foregoing written specification is considered to be sufficient to enable one skilled in the art to practice the invention. The present invention is not to be limited in scope by the construct deposited, since the deposited embodiment is intended as a single illustration of certain aspects of the invention and any constructs that are functionally equivalent are within the scope of this invention. The deposit of material herein does not constitute an admission that the written description herein contained is inadequate to enable the practice of any aspect of the invention, including the best mode thereof, nor is it to be construed as limiting the scope of the claims to the specific illustrations that it represents. Indeed, various modifications of the invention in addition to those shown and described herein will become apparent to those skilled in the art from the foregoing description and fall within the scope of the appended claims.

1-14. (canceled)

15. An isolated antibody that binds to a polypeptide having at least 80% amino acid sequence identity to:
(a) the polypeptide shown in any one of FIGS. 1-6355 (SEQ ID NOS:1-6355);
(b) the polypeptide shown in any one of FIGS. 1-6355 (SEQ ID NOS:1-6355), lacking its associated signal peptide;
(c) an extracellular domain of the polypeptide shown in any one of FIGS. 1-6355 (SEQ ID NOS:1-6355), with its associated signal peptide;
(d) an extracellular domain of the polypeptide shown in any one of FIGS. 1-6355 (SEQ ID NOS:1-6355), lacking its associated signal peptide;
(e) a polypeptide encoded by the nucleotide sequence shown in any one of FIGS. 1-6355 (SEQ ID NOS:1-6355); or
(f) a polypeptide encoded by the full-length coding region of the nucleotide sequence shown in any one of FIGS. 1-6355 (SEQ ID NOS:1-6355).

16. An isolated antibody that binds to a polypeptide having:
(a) the amino acid sequence shown in any one of FIGS. 1-6355 (SEQ ID NOS:1-6355);
(b) the amino acid sequence shown in any one of FIGS. 1-6355 (SEQ ID NOS:1-6355), lacking its associated signal peptide sequence;
(c) an amino acid sequence of an extracellular domain of the polypeptide shown in any one of FIGS. 1-6355 (SEQ ID NOS:1-6355), with its associated signal peptide sequence;
(d) an amino acid sequence of an extracellular domain of the polypeptide shown in any one of FIGS. 1-6355 (SEQ ID NOS:1-6355), lacking its associated signal peptide sequence;
(e) an amino acid sequence encoded by the nucleotide sequence shown in any one of FIGS. 1-6355 (SEQ ID NOS:1-6355); or
(f) an amino acid sequence encoded by the full-length coding region of the nucleotide sequence shown in any one of FIGS. 1-6355 (SEQ ID NOS:1-6355).

17. The antibody of claim 15 or 16 which is a monoclonal antibody.

18. The antibody of claim 15 or 16 which is an antibody fragment.

19. The antibody of claim 15 or 16 which is a chimeric or a humanized antibody.

20. The antibody of claim 15 or 16 which is conjugated to a growth inhibitory agent.

21. The antibody of claim 15 or 16 which is conjugated to a cytotoxic agent.

22. The antibody of claim 21, wherein the cytotoxic agent is selected from the group consisting of toxins, antibiotics, radioactive isotopes and nucleolytic enzymes.

23. The antibody of claim 21, wherein the cytotoxic agent is a toxin.

24. The antibody of claim 23, wherein the toxin is selected from the group consisting of maytansinoid and calicheamicin.

25. The antibody of claim 23, wherein the toxin is a maytansinoid.

26. The antibody of claim 15 or 16 which is produced in bacteria.

27. The antibody of claim 15 or 16 which is produced in CHO cells.

28. The antibody of claim 15 or 16 which induces death of a cell to which it binds.

29. The antibody of claim 15 or 16 which is detectably labeled.

30-184. (canceled)

The application's sequence listing, which the Patent Office published only in electronic form, follows.

SEQUENCE LISTING (6355 sequences)

SEQ ID NO: 1 - DNA, 484 bp, Homo sapiens
atcacatgcctatcatatagtaaaacccagcccatggcccctaacaggggccctctcagccctcctaatgacctccggcctagccatgtgatttcacttccactccacaaccctcctcatactaggcctactaaccaacacactaaccatataccaatgatggcgcgatgtaacacgagaaagcacataccaaggccaccacacaccacctgtccagaaaggccttcgatacgggataatcctatttattacctcagaagtttttttcttcgcaggatttttctgagccttttaccactccagcctagctcccaccccccaactagggggacactggcccccaacaggcatcaccccgctaaatcccctagaagtcccactcctaaacacatccgtattactcgcatcaggggtatcaatcacctgagctcaccatagtctaatagtctattttaccctcctacaagcctcagagtacttcgag

SEQ ID NO: 2 - DNA, 841 bp, Homo sapiens
tctaatacctattgatctgtcactttctcccatcacgctcaggtgggaccattcagttgcaggaaaacaagcttaacacgcccactaattctacattatggtgagttctataattattttattatatattacagtgtaataatggaaataaagtgcctaataaatgcaaatgtgcttacatcttttggcccagctcctacctcccggcagcctctccaggcccagaactttctccagtcagcctctacagaccaagctcatgactcacaatggcctatttaggcccataccctatgtcacggcagcctccgcagatgaggctactgcctcacaacagcctccacaggcacagctccatcgttacaatggcctctttagacccagctcctgcctcccagccttctctccaggccctgaactttctcaagtcgacctcaccaggcccagctcatgcttctttgcagcctctccaggcccagctcctgcatcttggtggcccctccaggcccagcctctgcctcccgtcagcctctacagtcccaaagtctgcctcacagcagattcttcacgcccagcatctacctcacttggaccctccagacccagatggtgtctcactgtggcatcctcaggcgaagctcctgcctttcggcagcctctccaggcccagctcctcctgcctcccagtggcctctttcggcccagcccagctcatgcctcccggcggccttcccaagccccgcttttgactttcggtggcctctgcaggcctcgacaaggcccagcctcctgcctcccgaaggcctgcacaggcccagcctctgcctcacagcggactctc

SEQ ID NO: 3 - DNA, 502 bp, Homo sapiens
caagctcatgactcacaatggcctatttaggcccataccctacgtcacggcagcctccgcagatgagcctactgcctcacaacagcctccacaggcacagctccatcgttacaatggcctctttagacccagctcctgcctcccagccttctctccaggctctgaactttctcaggtctccctctgttgtccaaggctggagtgtagtagtgctatcgcagctgactgcagcctcaaccttccaggctgaagcgatcctcccacctcaacctcccacgtggctgagactacaggtgcttgccactatgcccaactaacatttggaattttcgtatacgtggattccagaggggtgacagcgaaacgtgggaccattcagttgcaggaaaacaagcttaacacgcccactaattctacattatgctcctacctcccggcagcctctccaggcccagaactttctccagtcagcctctacagaccaagctcatgactcacaatg

SEQ ID NO: 4 - DNA, 3309 bp, Homo sapiens
cgtcggcccccggccccccagcagcctccaaagccctgtgactcacagccctgcttccacggggggacctgccaggactgggcattgggcgggggcttcacctgcagctgcccggcaggcaggggaggcgccgtctgtgagaaggtgcttggcgcccctgtgccggccttcgagggccgctccttcctggccttccccactctccgcgcctaccacacgctgcgcctggcactggaattccgggcgctggagcctcaggggctgctgctgtacaatggcaacgcccggggcaaggacttcctggcattggcgctgctagatggccgcgtgcagctcaggtttgacacaggttcggggccggcggtgctgaccagtgccgtgccggtagagccgggccagtggcaccgcctggagctgtcccggcactggcgccggggcaccctctcggtggatggtgagacccctgttctgggcgagagtcccagtggcaccgacggcctcaacctggacacagacctctttgtgggcggcgtacccgaggaccaggctgccgtggcgctggagcggaccttcgtgggcgccggcctgagggggtgcatccgtttgctggacgtcaacaaccagcgcctggagcttggcattgggccgggggctgccacccgaggctctggcgtgggcaagtgcggggaccacccctgcctgcccaacccctgccatggcggggccccatgccagaacctggaggctggaaggttccattgccagtgcccgcccggccgcgtcggaccaacctgtgccgatgagaagagcccctgccagcccaacccctgccatggggcggcgccctgccgtgtgctgcccgagggtggtgctcagtgcgagtgccccctggggcgtgagggcaccttctgccagacagcctcggggcaggacggctctgggcccttcctggctgacttcaacggcttctcccacctggagctgagaggcctgcacacctttgcacgggacctgggggagaagatggcgctggaggtcgtgttcctggcacgaggccccagcggcctcctgctctacaacgggcagaagacggacggcaagggggacttcgtgtcgctggcactgcgggaccgccgcctggagttccgctacgacctgggcaagggggcagcggtcatcaggagcagggagccagtcaccctgggagcctggaccagggtctcactggagcgaaacggccgcaagggtgccctgcgtgtgggcgacggcccccgtgtgttgggggagtccccggttccgcacaccgtcctcaacctgaaggagccgctctacgtagggggcgctcccgacttcagcaagctggcccgtgctgctgccgtgtcctctggcttcgacggtgccatccagctggtctccctcggaggccgccagctgctgaccccggagcacgtgctgcggcaggtggacgtcacgtcctttgcaggtcacccctgcacccgggcctcaggccacccctgcctcaatggggcctcctgcgtcccgagggaggctgcctatgtgtgcctgtgtcccgggggattctcaggaccgcactgcgagaaggggctggtggagaagtcagcgggggacgtggataccttggcctttgacgggcggacctttgtcgagtacctcaacgctgtgaccgagagcgagaaggcactgcagagcaaccactttgaactgagcctgcgcactgaggccacgcaggggctggtgctctggagtggcaaggccacggagcgggcagactatgtggcactggccattgtggacgggcacctgcaactgagctacaacctgggctcccagcccgtggtgctgcgttccaccgtgcccgtcaacaccaaccgctggttgcgggtcgtggcacatagggagcagagggaaggttccctgcaggtgggcaatgaggcccctgtgaccggctcctccccgctgggcgccacgcagctggacactgatggagccctgtggcttgggggcctgccggagctgcccgtgggcccagcactgcccaaggcctacggcacaggctttgtgggctgcttgcgggacgtggtggtgggccggcacccgctgcacctgctggaggacgccgtcaccaagccagagctgcggccctgccccaccccatgagctggcaccagagccccgcgcccgctgtaattattttctatttttgtaaacttgttgctttttgatatgattttcttgcctgagtgttggccggagggactgctggcccggcctcccttccgtccaggcagccgtgctgcagacagacctagtgccgagggatggacaggcgaggtggcagcgtggagggctcggcgtggatggcagcctcaggacacacacccctgcctcaaggtgctgagcccccgccttgcactgcgcctgccccacggtgtccccgccgggaagcagccccggctcctgaatcaccctcgctccgtcaggcgggactcgtgtcccagagaggaaggggctgctgaggtctgatggggcccttcctccgggtgaccccacagggcctttccaagcccccatttgagctgctccttcctgtgtgtgctctgggccctgcctcggcctcctgcgccaatactgtgacttccaaacaatgttactgctgggcacagctctgcgttgctcccgtgctgcctgcgccagccccaggctgctgaggagcagaggccagaccagggccgatctgggtgtcctgaccctcagctggccctgcccagccaccctggacatgaccgtatccctctgccacaccccaggccctgcgaggggctatcgagaggagctcactgtgggatggggttgacctctgccgcctgcctgggtatctgggcctggccatggctgtgttcttcatgtgttgattttatttgacccctggagtggtgggtctcatctttcccatctcgcctgagagcggctgagggctgcctcactgcaaatcctccccacagcgtcagtgaaagtcgtccttgtctcagaatgaccaggggccagccagtgtctgaccaaggtcaaggggcaggtgcagaggtggcagggatggctccgaagccagaaatgccttaaactgcaacgtcccgtcccttccccacccccatcccatccccacccccagccccagcccagtcctcctaggagcaggacccgatgaagcgggcggcggtggggctgggtgccgtgttactaactctagtatgtttctgtgtcaatcgctgtgaaataaagtctgaaaacttt

SEQ ID NO: 5 - protein, 1913 aa, Homo sapiens
MLNSSLMRITLRNLEEVEFCVEDKPGTHFTPVPPTPPDACRGMLCGFGAVCEPNAEGPGRASCVCKKSPCPSVVAPVCGSDASTYSNECELQRAQCSQQRRIRLLSRGPCGSRDPCSNVTCSFGSTCARSADGLTASCLCPATCRGAPEGTVCGSDGADYPGECQLLRRACARQENVFKKFDGPCDPCQGALPDPSRSCRVNPRTRRPEMLLRPESCPARQAPVCGDDGVTYENDCVMGRSGAARGLLLQKVRSGQCQGRDQCPEPCRFNAVCLSRRGRPRCSCDRVTCDGAYRPVCAQDGRTYDSDCWRQQAECRQQRAIPSKHQGPCDQAPSPCLGVQCAFGATCAVKNGQAACECLQACSSLYDPVCGSDGVTYGSACELEATACTLGREIQVARKGPCDRCGQCRFGALCEAETGRCVCPSECVALAQPVCGSDGHTYPSECMLHVHACTHQISLHVASAGPCETCGDAVCAFGAVCSAGQCVCPRCEHPPPGPVCGSDGVTYGSACELREAACLQQTQIEEARAGPCEQAECGSGGSGSGEDGDCEQELCRQRGGIWDEDSEDGPCVCDFSCQSVPGSPVCGSDGVTYSTECELKKARCESQRGLYVAAQGACRGPTFAPLPPVAPLHCAQTPYGCCQDNITAARGVGLAGCPSACQCNPHGSYGGTCDPATGQCSCRPGVGGLRCDRCEPGFWNFRGIVTDGRSGCTPCSCDPQGAVRDDCEQMTGLCSCKPGVAGPKCGQCPDGRALGPAGCEADASAPATCAEMRCEFGARCVEESGSAHCVCPMLTCPEANATKVCGSDGVTYGNECQLKTIACRQGLQISIQSLGPCQEAVAPSTHPTSASVTVTTPGLLLSQALPAPPGALPLAPSSTAHSQTTPPPSSRPRTTASVPRTTVWPVLTVPPTAPSPAPSLVASAFGESGSTDGSSDEELSGDQEASGGGSGGLEPLEGSSVATPGPPVERASCYNSALGCCSDGKTPSLDAEGSNCPATKVFQGVLELEGVEGQELFYTPEMADPKSELFGETARSIESTLDDLFRNSDVKKDFRSVRLRDLGPGKSVRAIVDVHFDPTTAFRAPDVARALLRQIQVSRRRSLGVRRPLQEHVRFMDFDWFPAFITGATSGAIAAGATARATTASRLPSSAVTPRAPHPSHTSQPVAKTTAAPTTRRPPTTAPSRVPGRRPPAPQQPPKPCDSQPCFHGGTCQDWALGGGFTCSCPAGRGGAVCEKVLGAPVPAFEGRSFLAFPTLRAYHTLRLALEFRALEPQGLLLYNGNARGKDFLALALLDGRVQLRFDTGSGPAVLTSAVPVEPGQWHRLELSRHWRRGTLSVDGETPVLGESPSGTDGLNLDTDLFVGGVPEDQAAVALERTFVGAGLRGCIRLLDVNNQRLELGIGPGAATRGSGVGKCGDHPCLPNPCHGGAPCQNLEAGRFHCQCPPGRVGPTCADEKSPCQPNPCHGAAPCRVLPEGGAQCECPLGREGTFCQTASGQDGSGPFLADFNGFSHLELRGLHTFARDLGEKMALEVVFLARGPSGLLLYNGQKTDGKGDFVSLALRDRRLEFRYDLGKGAAVIRSREPVTLGAWTRVSLERNGRKGALRVGDGPRVLGESPVPHTVLNLKEPLYVGGAPDFSKLARAAAVSSGFDGAIQLVSLGGRQLLTPEHVLRQVDVTSFAGHPCTRASGHPCLNGASCVPREAAYVCLCPGGFSGPHCEKGLVEKSAGDVDTLAFDGRTFVEYLNAVTESEKALQSNHFELSLRTEATQGLVLWSGKATERADYVALAIVDGHLQLSYNLGSQPVVLRSTVPVNTNRWLRVVAHREQREGSLQVGNEAPVTGSSPLGATQLDTDGALWLGGLPELPVGPALPKAYGTGFVGCLRDVVVGRHPLHLLEDAVTKPELRPCPTP

SEQ ID NO: 6 - DNA, 2508 bp, Homo sapiens
acagagaccccgagttctacaagttcctgcaggagaatgaccagagcctgctaaacttcagcgactcggacagctctgaggaggaagaggggccgttccactccctgccagatgtgctggaggaagccagtgaggaggaggatggagcggaggaaggagaagatggggacagagtccccagagggctgaaggggaagaagaattctgttcctgtgaccgtcgccatggttgagagatggaagcaggcagcaaagcaacgcctcactccaaagctgttccatgaagtggtacaggcgttccgagcagctgtggccaccacccgaggggaccaggaaagtgctgaggccaacaaattccaggtcacggacagtgctgcattcaatgctctggttaccttctgcatcagagacctcattggctgtctccagaagctgctgtttggaaaggtggcaaaggatagcagcaggatgctgcagccgtccagcagcccgctctgggggaagcttcgtgtggacatcaaggcttacctgggctcggccatacagctggtgtcctgtctgtcggagacgacggtgttggcggccgtgctgcggcacatcagcgtgctggtgccctgcttcctgaccttccccaagcagtgccgcatgctgctcaagagaatggtgatcgtatggagcactggggaagagtctctgcgggtgctggctttcctggtcctcagcagagtctgccggcacaagaaggacactttccttggccccgtcctcaagcaaatgtacatcacgtatgtgaggaactgcaagttcacctcgcctggtgccctccccttcatcagtttcatgcagtggaccttgacggagctgctggccctggagccgggtgtggcctaccagcacgccttcctctacatccgccagctcgccatacacctgcgcaacgccatgaccactcgcaagaaggaaacataccagtctgtgtacaactggcagtatgtgcactgcctcttcctgtggtgccgggtcctgagcactgcgggccccagcgaagccctccagcccttggtctacccccttgcccaagtcatcattggctgtatcaagctcatccccactgcccgcttctacccgctgcgaatgcactgcatccgtgccctgacgctgctctcggggagctcgggggccttcatcccggtgctgcctttcatcctggagatgttccagcaggtcgacttcaacaggaagccagggcgcatgagctccaagcccatcaacttctccgtgatcctgaagctgtccaatgtcaacctgcaggagaaggcgtaccgggacggcctggtggagcagctgtacgacctcaccctggagtacctgcacagccaggcacactgcatcggcttcccggagctggtgctgcctgtggtcctgcagctgaagtcgttcctccgggagtgcaaggtggccaactactgccggcaggtgcagcagctgcttgggaaggttcaggagaactcggcatacatctgcagccgccgccagagggtttccttcggcgtctctgagcagcaggcagtggaagcctgggagaagctgacccgggaagaggggacacccctgaccttgtactacagccactggcgcaagctgcgtgaccgggagatccagctggagatcagtggcaaagagcggctggaagacctgaacttccctgagatcaaacgaaggaagatggctgacaggaaggatgaggacaggaagcaatttaaagacctctttgacctgaacagctctgaagaggacgacaccgagggattctcggagagagggatactgaggcccctgagcactcggcatggggtggaagacgatgaagaggacgaggaggagggcgaggaggacagcagcaactcggaggatggagacccagacgcagaggcggggctggcccctggggagctgcagcagctggcccaggggccggaggacgagctggaggatctgcagctctcagaggacgactgaggcagcccatctggggggcctgtaggggctgccgggctggtggccagtgtttccacctccctggcagtcaggcctagaggctggcgtctgtgcagttgggggaggcagtagacacgggacaggctttattatttatttttcagcatgaaagaccaaacgtatcgagagctgggctgggctgggctggtgtggctgctgaagccccacagctgtgggctgctgaagtcagctccgcgggggagctgaccctgacgtcagcagaccgagaccagtcccagttccagggggaggcctgcaggcccctggccccttccaccacctctgccctccgtctgcagacctcgtccatctgcaccaggctctgccttcactcccccaagtctttgaaaatttgttcctttcctttgaagtcacattttcttttaaaattttttgttttgcatccgaaaccgaaagaaataaagcggtgggaggcagggccattgtgttg

SEQ ID NO: 7 - protein, 749 aa, Homo sapiens [sequence omitted]

SEQ ID NO: 8 - DNA, 1853 bp, Homo sapiens
gtgtacgaaagagaaacccggagggcgccggggactgggccggggtctgcagggctcagctgagcccatgagctcccagagctaacccctgaacacccaggcgggcaaagggctgatgtcggtagtccccatcctggaggggcaggctctgcgcatctgctcctggcatggcgctgcggcacctcgccctcctggctggccttctcgtgggagtcgccagcaagtccatggagaacacggcccagctgcccgagtgctgtgtggatgtggtgggcgtcaacgccagctgcccaggcgcaagtctgtgtggtccaggctgttacaggcgctggaacgcggacgggagcgccagctgcgtccgctgtgggaacggaaccctcccagcctacaacggctccgagtgtagaagctttgctggcccgggtgcgccattccccatgaacagaagctcagggacccccgggcggccacatcctggggctccgcgcgtggccgcctccctcttcctgggcacgttcttcattagctccggcctcatcctctccgtagctgggttcttctacctcaagcgctccagtaaactccccagggcctgctacagaagaaacaaagctccggccctgcagcctggcgaagccgctgcaatgatccccccgccacagtcctcagtacggaagccgcgctacgtcaggcgggagcggcccctggacagggccacggatcccgctgccttcccgggggaggcccgtatcagcaatgtctgacctggaggccgagaccacgccacgcacttggcggcagggacccggaggccgaccccttggcgggaaccagcacaaagtgttggcatcgcccggcgcccgggacagtcctgggcacagcctcggctctgggtccctccgcctcccagcgacggacgccaaagggtcccgggccgcctgaggctcctccccaccacagccatctcgtttatcggaccaggagcaggcatccatgagacctcagagcttcagatcgaggccttggggggtccgggcccccccaggaaacacggtgaggccccagcgcctgcagccaaagctggcacgatctatggggcaggtgccgctctgcctagaaaagccaggggctctgctgccgtgccctccagagcccacagcgggcaggactcctccagcaccaccacacccagtggcccgagacccctctgagaacagtgaggctggtcctcgtgccgttccagccggtgcccggccagtggggaggacacagcctaggaaccagctgcctgagaccagggtgcctctgggctgtcctcccgcgtggcggagaccccaagcacgcagccacccatttccggagctgcaggatagagcttcctcttgatctctgtttttaagcagaaattcattgtgctgaaaagtcctccagagctctgtggccccgctcggatccgctggacccccatgcctggctgatccctgcccacgtggggcaggcccacatctaacccccacaagtcactgcctcactgcacctgccaaggctgccctggcgctgagtcctggggtccctcccggagttcctgggagaaaggcgccgtcgtggccgcctcccgcacgccaggcccgggctccaccgtgggtctcagacgccctgcggcaccggcaccgtctgctttagcatgggacccccatctgaggggtggcctggccttcggggtccccacgctcctttgcgaagtccactgtgggtgccatcatggtctccgggacctgggccagcgggaacgtgggggcactgggtgtgctgatataaagtcggcattactcaaaaaaaaaaaaaaaaaaaaa

SEQ ID NO: 9 - protein, 198 aa, Homo sapiens
MALRHLALLAGLLVGVASKSMENTAQLPECCVDVVGVNASCPGASLCGPGCYRRWNADGSASCVRCGNGTLPAYNGSECRSFAGPGAPFPMNRSSGTPGRPHPGAPRVAASLFLGTFFISSGLILSVAGFFYLKRSSKLPRACYRRNKAPALQPGEAAAMIPPPQSSVRKPRYVRRERPLDRATDPAAFPGEARISNV

SEQ ID NO: 10 - DNA, 2485 bp, Homo sapiens
aaaaaaaaaaaaaaaaccggctcgcggcgcgtggaggctgctcccagccgcgcgcgagtcagactcgggtgggggtcccggcggcggtagcggcggcggcggtgcgagcatgtcgtggctcttcggcattaacaagggccccaagggtgaaggcgcggggccgccgccgcctttgccgcccgcgcagcccggggccgagggcggcggggaccgcggcttgggagaccggccggcgcccaaggacaaatggagcaacttcgaccccaccggcctggagcgcgccgccaaggcggcgcgcgagctggagcactcgcgttatgccaaggacgccctgaatctggcacagatgcaggagcagacgctgcagttggagcaacagtccaagctcaaagagtatgaggccgccgtggagcagctcaagagcgagcagatccgggcgcaggctgaggagaggaggaagaccctgagcgaggagacccggcagcaccaggccagggcccagtatcaagacaagctggcccggcagcgctacgaggaccaactgaagcagcagcaacttctcaatgaggagaatttacggaagcaggaggagtccgtgcagaagcaggaagccatgcggcgagccaccgtggagcgggagatggagctgcggcacaagaatgagatgctgcgagtggaggccgaggcccgggcgcgcgccaaggccgagcgggagaatgcagacatcatccgcgagcagatccgcctgaaggcggccgagcaccgtcagaccgtcttggagtccatcaggacggctggcaccttgtttggggaaggattccgtgcctttgtgacagactgggacaaagtgacagccacggtggctgggctgacgctgctggctgttggggtctactcagccaagaatgccacgcttgtcgccggccgcttcatcgaggctcggctggggaagccgtccctagtgagggagacgtcccgcatcacggtgcttgaggcgctgcggcaccccatccaggtcagccggcggctcctcagtcgaccccaggacgcgctggagggtgttgtgctcagtcccagcctggaagcacgggtgcgcgacatcgccatagcaacaaggaacaccaagaagaaccgcagcctgtacaggaacatcctgatgtacgggccaccaggcaccgggaagacgctgtttgccaagaaactcgccctgcactcaggcatggactacgccatcatgacaggcggggacgtggcccccatggggcgggaaggcgtgaccgccatgcacaagctctttgactgggccaataccagccggcgcggcctcctgctctttgtggatgaagcggacgccttccttcggaagcgagccaccgagaagataagcgaggacctcagggccacactgaacgccttcctgtaccgcacgggccagcacagcaacaagttcatgctggtcctggccagcaaccaaccagagcagttcgactgggccatcaatgaccgcatcaatgagatggtccacttcgacctgccagggcaggaggaacgggagcgcctggtgagaatgtattttgacaagtatgttcttaagccggccacagaaggaaagcagcgcctgaagctggcccagtttgactacgggaggaagtgctcggaggtcgctcggctgacggagggcatgtcgggccgggagatcgctcagctggccgtgtcctggcaggccacggcgtatgcctccgaggacggggtcctgaccgaggccatgatggacacccgcgtgcaagatgctgtccagcagcaccagcagaagatgtgctggctgaaggcggaagggcctgggcgtggggacgagccttccccatcctgagtccacagggagatccacagctcacggagcctggccgcggacccctcccacccctgccttgccggcccctgcacatttaggatatgctcctgggtggggactgggctgtgcccagggcctctgtcccccaggatgtcttgtggtgcgggtcggccgttctgccccccagggcaccccctgttgtaggcactggctagggaggggcaggcctccttcctgcccctcgagacactcttgggagatgcattttccgtctggctcacagggggagggtgaggctttgcaccccagcccctgcccaggccactgtgagggtgggtgctggctgaccccccggggcagcaggagccaggcaggtgatgtctttgttctcggctcccacagcagagccaggtgagggggcgcctgccagggccagacccaggtggggcagcctgaaccctgcttccccctgtggccggcatgccccgatctttcacacactggtgaccctgagagaggagggaggagggaacctggcgggggtgtctgaggccgcactgtcagctggccggtccaagcctgtggctggagctggggtctgtttacctaataaagtcccacaggtgcctcatt

SEQ ID NO: 11 - protein, 586 aa, Homo sapiens
MSWLFGINKGPKGEGAGPPPPLPPAQPGAEGGGDRGLGDRPAPKDKWSNFDPTGLERAAKAARELEHSRYAKDALNLAQMQEQTLQLEQQSKLKEYEAAVEQLKSEQIRAQAEERRKTLSEETRQHQARAQYQDKLARQRYEDQLKQQQLLNEENLRKQEESVQKQEAMRRATVEREMELRHKNEMLRVEAEARARAKAERENADIIREQIRLKAAEHRQTVLESIRTAGTLFGEGFRAFVTDWDKVTATVAGLTLLAVGVYSAKNATLVAGRFIEARLGKPSLVRETSRITVLEALRHPIQVSRRLLSRPQDALEGVVLSPSLEARVRDIAIATRNTKKNRSLYRNILMYGPPGTGKTLFAKKLALHSGMDYAIMTGGDVAPMGREGVTAMHKLFDWANTSRRGLLLFVDEADAFLRKRATEKISEDLRATLNAFLYRTGQHSNKFMLVLASNQPEQFDWAINDRINEMVHFDLPGQEERERLVRMYFDKYVLKPATEGKQRLKLAQFDYGRKCSEVARLTEGMSGREIAQLAVSWQATAYASEDGVLTEAMMDTRVQDAVQQHQQKMCWLKAEGPGRGDEPSPS

SEQ ID NO: 12 - DNA, 2008 bp, Homo sapiens
atcagttctcgcccgtctgggcgtgggcgtggccggcgtggctgctcgggaccacccgaacccgcggccatggccccggccgccgccagccccccggaggtgatccgcgcggcgcagaaggacgagtactaccgcggtgggctgcggagcgcggcgggcggcgccctgcacagcctggcgggtgcgaggaagtggctggagtggaggaaggaggttgagctgctctcagatgtggcctactttggcctcaccacacttgcaggctaccagaccctgggggaggagtacgtcagcatcatccaggtggacccatcgcggatacatgtgccctcctcgctgcgccgtggcgtgctggtgacgctgcatgccgtcctgccctacctgctggacaaggccctgctccccctggagcaggagctgcaggctgaccccgacagtgggcgacccttgcaggggagcctggggccaggtgggcgtggctgctcaggggcgcggcgctggatgcgtcaccacacggccaccctgactgagcagcagaggagggcgctgctgcgggcggtcttcgtcctcagacagggcctcgcctgcctccagcggctacatgttgcctggttttacatccacggtgtcttctaccacctggccaagaggctcacggggatcacgtacctccgtgtccgcagcctgcccggagaggacctgagggcccgtgttagctacaggctgctgggggtcatctcactgctgcacctggtgctgtccatggggctgcagctgtacggtttcaggcagcggcagcgagccaggaaggagtggaggctgcaccgcggcctgtctcaccgcagggcctccttggaggagagagccgtttccagaaaccccctgtgcaccctgtgcctggaggagcgcaggcacccaacagccacgccctgcggccacctgttctgctgggagtgcatcaccgcgtggtgcagcagcaaggcggagtgtcccctctgccgggagaagttccctccccagaagctcatctaccttcggcactaccgctgagccggcgcccgggtgggcctggacacagatgacctctacgggagtctgaacgccaagatttagtctcaggattaaccttgcttgcacagaagttagaacactctcagttttttgtcatgtaagatactaacctagccaccctgggagagaacagaaagctgtccctggctgcgctttctcagccctgggaggggcgcctgaacccagaacatttccctaaccccaacctggtaggactcagccacttcttcaggaatttcacttatttggacgggattttaggtttccctcccttccccaaaccatacagttgagaagtaattcagaagtaggccagaagacactttattcgtttatattgtgagaaaacagccccatcaggcttgtgttaaggcaatggactgaatgagtgcgtgctgggtggggtggggcacggaggctggcgggttgcttcagccagtgcagtgagaacagcagccccacggccccatgggaggcggcgctgctctccccgagggcggctgggcagagcacatcccccaggacttgatgaccacacggggcagagagaaaccaaccaaggccagcacctccgtcggaagcatttggcacacacaccttcaatacacgtcaaggtcgcttccagttttagaaaacagaaatctgcatctcagcctgagacgcacagagaggtctcttcctgacccagacgcactcacgagccaggtcctgggggtatgggggctgccaggggcgcccgagccctctcctggggggcctgctgggcaggcgacctgctgacccacggtcactgctgtgttcagcccctcagctcggccccagcctatttcccgcctccatttgatgtttccaggttttcaaaactgcatttaacctgcgccagagagttcaccgtaggcatctttaataaactaactccagcaaaaaaaaaaaaaaa

SEQ ID NO: 13 - protein, 326 aa, Homo sapiens
MAPAAASPPEVIRAAQKDEYYRGGLRSAAGGALHSLAGARKWLEWRKEVELLSDVAYFGLTTLAGYQTLGEEYVSIIQVDPSRIHVPSSLRRGVLVTLHAVLPYLLDKALLPLEQELQADPDSGRPLQGSLGPGGRGCSGARRWMRHHTATLTEQQRRALLRAVFVLRQGLACLQRLHVAWFYIHGVFYHLAKRLTGITYLRVRSLPGEDLRARVSYRLLGVISLLHLVLSMGLQLYGFRQRQRARKEWRLHRGLSHRRASLEERAVSRNPLCTLCLEERRHPTATPCGHLFCWECITAWCSSKAECPLCREKFPPQKLIYLRHYR

SEQ ID NO: 14 - DNA, 3075 bp, Mus musculus
gggcggcgagtggggagcggggccgggagtggagcagccgccgcggcgggactggaccgagcctcgccggcgcgcacctgcccgcagcgcccgcggagcgcgcagcgcggcccgagcgcgacgacctgccgagcggcggccgaggcggcggtgtgggcgcgtcaggccgcgacgagggcgctgagacaaatttacatgtattggagaccagaccagaagcccttctgaattaagatctcacattcttgaaggtggcattgaagagcactaagatcggaagatgagtgagcttgaccagttacggcaggaggccgagcaacttaagaaccagattcgagacgccaggaaagcatgtgcagatgcaactctctctcagatcacaaacaacatcgacccagtgggaagaatccaaatgcgcacgaggaggacactgcgggggcacctggccaagatctacgccatgcactggggcacagactccaggcttctcgtcagtgcctcgcaggatggtaaacttatcatctgggacagctacaccaccaacaaggtccacgccatccctctgcgctcctcctgggtcatgacctgtgcatatgccccttctgggaactatgtggcctgcggtggcctggataacatttgctccatttacaatctgaaaactcgtgaggggaacgtgcgcgtgagtcgtgagctggcaggacacacaggttacctgtcctgctgccgattcctggatgacaatcagatcgtcaccagctctggagacaccacgtgtgccctgtgggacatcgagaccggccagcagacgaccacgtttaccggacacactggagatgtcatgagcctttctcttgctcctgacaccagactgttcgtctctggtgcttgtgatgcttcagccaaactctgggatgtgcgagaaggcatgtgccggcagaccttcactggccacgagtctgacatcaatgccatttgcttctttccaaatggcaatgcatttgccactggctcagacgacgccacctgcaggctgtttgaccttcgtgctgaccaggagctcatgacttactcccatgacaacatcatctgcgggatcacctctgtctccttctccaagagcgggcgcctcctccttgctgggtacgacgacttcaactgcaacgtctgggatgcactcaaagccgaccgggcaggtgtcttggctgggcatgacaaccgcgtcagctgcctgggcgtgactgacgatggcatggctgtggcgacagggtcctgggatagcttcctcaagatctggaactaacgccagtagcatgtggatgccatggagactggaagaccattccaacttggacgcgttaccatgagagcatatcctatccaaccgtactaacgtggacaccctacacctcccctcagaacttcaaaagggcaagatcttttttccttcacttattgctgaaaccaagagcacaattcccattgagagaaagatctctgtgctgtaaactaaaacaaattgtgcattccttccggggccatcgtctttgttttcttttttgtcttgaatgaattttaaaaggaaatatataataaaaatgttaaccagaaggtaaacttgagtgtaattgtcagacagacacacttttccaccagtgtatttgaattttagaccagtgaccctgttttgtggcattcatgcaaaacatgctgagggctttgttcatctggtcatcgtgtccaaatttcagtcatgtttgtagcaagattttggaagcattcatatttcctttttaaaatgtattcctttgtgttcaacagttaatcaaaaccagagagtctagggcagcctctctgatgttgtcaatgatgtaaattcagtccctggtttttaattttctgtctgatgtcacagatcattgttgcacacaaacgtggcatagaaaagaacatgttcagaagccatggggccaagcacatgcggggacggtctcaaatgcgtgatcagagaatccttcacctttgctgaaaagtgagctcagatccagcaccatgttcctcctgacccatcctgtctatcttctcagttgagtttttaatctcactttgggtttccttgtgaagttggagggaagtttataatagcctaacactaccccacccccaactaggaggaacctctgttttcaagagagatgcctgtcctgtgcttggatagtcagtcaattatttgtgtatgaaacaatgtacaaatcaatgttttgaaaataatgatctcagactttctaagttaaattttaaaaattttgattgtttgccatattgggtgggtttactcttagaatcgcatgctgtagaaatgctcaaaagtgcatatgggactcagtccttaggtgttctttttcttttaagaaataacctcttacagttgtaaccattgcggctctgtccacttctcgttgctgctctgtggcacatatcggaagcagtacagcgcgcggctctacacgcttgggtagcgggataagtcactgttttctttatttctttaaaaaaaaaaaagttctgttgcaaacgactgctgttggattctgagggtggggagggagagagagggagggagagggagtgaagagcctgccctcctatatggattcttcagggccctccacatctgaggtggctcattcccatcacacacagattgtcctggtgttcatttcaaggccagtgttcagcagcagcgtttggaaagcaggttctgtgggaccccccgccccgccccccgcactccttcatagcagcagtagtggcttctccatcctgttttctgcaacattctatacaaaactgtgctgtgaccttgcggtaggcctggatctggcaaagagaatacaaatgaaaccccttctttctctttccgtccaacaactctgtagagctctctgcacccttacccctttccaccttttgtatttaattttaaagtcagtgtactgcaaggaagctggatgcaagatagatactatattaaactgtactgttatttaagatgtaataaagcagtttgacatg

SEQ ID NO: 15 - DNA, 712 bp, Homo sapiens
atcaaaccaccccagcaaatgtctcggaaagaaaaagttcatcacagaaaagatgaaaagagaaaagaaaaatgtaggcatcatagccattcagcagaaggggggaagcatgctagagtgaaagaaagagagcacgaacgtcggaaacgacatcgagaagaacaggataaagctcgccgggaatgggaaagacagaagagaagggaaatggcaagggagcattccaggagagaaagggaccgcttggagcagttagaaaggaagcgggagcgggagcgcaagatgcgggagcagcagaaggagcagcagtcaagaagatgaccttcagcgagcacccctacaacaacctccgcaagcgcttcggggctctgctctcagaccagggcttcgacctcatgaacaagttcctgacctacttccccgggaggaggatcagcgctgaggacggcctcaagcatgagtatttccgcgagacccccctccccatcgacccctccatgttccccacgtggcccgccaagagcgagcagcagcgtgtgaagcggggcaccagcccgaggccccctgagggaggcctgggctacagccagctgggtgacgacgacctgaaggagacgggcttccaccttaccaccacgaaccagggggcctctgccgcgggccccggcttcagcctcaagttctgaaggtcagagtggaccccgtcatgggg

SEQ ID NO: 16 - protein, 167 aa, Homo sapiens
MGKTEEKGNGKGAFQERKGPLGAVRKEAGAGAQDAGAAEGAAVKKMTFSEHPYNNLRKRFGALLSDQGFDLMNKFLTYFPGRRISAEDGLKHEYFRETPLPIDPSMFPTWPAKSEQQRVKRGTSPRPPEGGLGYSQLGDDDLKETGFHLTTTNQGASAAGPGFSLKF

SEQ ID NO: 17 - DNA, 1059 bp, Homo sapiens
tcgcgcggaagccgcggtagggtgggaacccaagcgggagagccgcgggatttgcggccgccgccatgccgtcgtccccgctgcgggtggcggtggtgtgctcgagcaaccagaaccggagcatggaggcgcacaacatcctcagcaaacggggattcagcgtccgatcctttggaacagggactcacgtgaagcttccaggaccagctcccgacaagcccaatgtttatgatttcaaaaccacatatgaccagatgtacaatgatcttcttaggaaagacaaagaactctatacacagaatgggattttacatatgctggacagaaataagagaatcaagccccggccagaaagattccagaactgcaaagacctgtttgatctgatcctcacttgcgaagagagagtgtatgaccaggtggtggaagatctgaattccagagaacaggagacctgccagcccgtgcacgtggtcaatgtggacatccaggacaaccacgaggaggccaccctgggggcgtttctcatctgtgagctctgccagtgtatccagcacacggaagacatggagaacgagatcgacgagctgctgcaggagttcgaggagaagagtggccgcacctttctgcacaccgtctgcttctactgagcccagcgcccgcatggagccgcctctggagcttcctgttgttcatactttttccttcctgacatttgtttttacttacaggtgttctgctggtgacggtagcattacccaaataaactgtgcatatgaaatgggagaggagatgccaaaacgccagatgaaagcaatcaagtttcttcttttccacttttacttatgagcgggatattgattacaaagtttttcttctttaaccaaaaaggaaagacaacggtttgtgtgcacttcccgacatacctgtgtcttcgtgtgcctgccttccctccctcctccccaccgggccggactgtacagagccctgctgcggcgtgttaggaatgacctggaattgtcaataaacagatgctgctgtcaaaaaaaaaaaaaaaaa

SEQ ID NO: 18 - protein, 194 aa, Homo sapiens
MPSSPLRVAVVCSSNQNRSMEAHNILSKRGFSVRSFGTGTHVKLPGPAPDKPNVYDFKTTYDQMYNDLLRKDKELYTQNGILHMLDRNKRIKPRPERFQNCKDLFDLILTCEERVYDQVVEDLNSREQETCQPVHVVNVDIQDNHEEATLGAFLICELCQCIQHTEDMENEIDELLQEFEEKSGRTFLHTVCFY

SEQ ID NO: 19 - DNA, 2296 bp, Homo sapiens
cctggccaccggctcgcggcgcgtggaggctgctcccagccgcgcccgagtcagactcgggtgggggtcccggcggcggtagcggcggcggcggtgcgagcatgtcgtggctcttcggcgttaacaagggccccaagggtgaaggcgcggggccgccgccgcctttgccgcccgcgcagcccggggccgagggcggcggggaccgcggtttgggagaccggccggcgcccaaggacaaatggagcaacttcgaccccaccggcctggagcgcgccgccaaggcggcgcgcgagctggagcactcgcgttacgccaaggaggccctgaatctggcgcagatgcaggagcagacgctgcagttggagcaacagtccaagctcaaagagtatgaggccgccgtggagcagctcaagagcgagcagatccgggcgcaggctgaggagaggaggaagaccctgagcgaggagacccggcagcaccaggccagggcccagtatcaagacaagctggcccggcagcgctacgaggaccaactgaagcagcagcaacttctcaatgaggagaatttacggaagcaggaggagtccgtgcagaagcaggaagccatgcggcgagccaccgtggagcgggagatggagctgcggcacaagaatgagatgctgcgagtggagaccgaggcccgggcgcgcgccaaggccgagcgggagaatgcagacatcatccgcgagcagatccgcctgaaggcgtccgagcaccgtcagaccgtcttggagtccatcaggacggctggcaccttgtttggggaaggattccgtgcctttgtgacagaccgggacaaagtgacagccacggtggctgggctgacgctgctggctgtcggggtctactcagccaagaatgcgacagccgtcactggccgcttcatcgaggctcggctggggaagccgtccctagtgagggagacgtcccgcatcacggtgctggaggcgctgcggcaccccatccaggtcagccggcggctcctcagtcgaccccaggacgtgctggagggtgttgtgcttagtcccagcctggaagcacgggtgcgcgacatcgccatagcaaccaggaacaccaagaagaaccggggcctgtacaggcacatcctgctgtatgggccaccaggcaccgggaagacgctgtttgccaagaaactcgccctgcactcaggcatggactacgccatcatgacaggcggggacgtggcccccatggggcgggaaggcgtgaccgccatgcacaagctctttgactgggccaataccagccggcgcggcctcctgctcttcatggatgaagcagacgccttccttcggaagcgagccactgaggagataagcaaggacctcagagccacactgaacgccttcctgtaccacatgggccaacacagcaacaaattcatgctggtcctggccagcaatctgcctgagcagttcgactgtgccatcaacagccgcattgacgtgatggtccacttcgacctgccgcagcaggaggagcgggagcgcctggtgagactgcattttgacaactgtgttcttaagccggccacagaaggaaaacggcgcctgaagctggcccagtttgactacgggaggaagtgctcggaggtcgctcggctgacggagggcatgtcgggccgggagatcgctcagctggccgtgtcctggcaggccacggcatatgcctccaaggacggggtcctcactgaggccatgatggacgcctgtgtgcaagatgctgtccagcagtaccgacagaagatgcgctggctgaaggcggaggggcctgggcgcggggtcgagcaccccctatccggagtccaaggcgagaccctcacctcatggagcctggccacggacccctcctacccctgccttgccggcccctgcacatttaggatatgctcctggatggggactgggctgtgcccagggcctctgtcccccaggatgtcttgtggtggcggtcggccgttctgccccccagggcaccccctgttgtaggcactggctagggaggggcaggcctccttcctgcccctcgagacactcttgggagatgcattttccgtctggctcacagggggagggtgaggctttgtaccccagcccctgcccaggccactgtgagggtgggtgctggctgagcccctggggcagaaggagtggggcaggcggggtctttgttctcggctcccacagcagagccaggtgagggggggcctgccaggactagacagaagtggggcggc

SEQ ID NO: 20 - DNA, 1749 bp, Homo sapiens
atgaggctgcagagtgatgtgggggccagcggtgacttcatgaccacactgcgcccaggtgtaagagggcacgcttctgcccaggcatcgtccatggaagacacgcagtcggccactgcagcctcggtcctgggtgccctggggctgggtcactgggggccacaggccacactgagagaccacagtcctggcatgccatgcagctccctgtccccagaggccatgtcaaaggacgccctgaatctggcgcagatgcaggagcagacgctgcagttggagcaacagtccaagctcaaacaacttgtcaatgaggatttacggaagcaggaggagtccgtgcagaagcaccatcagaccttcttggagtccatcagggcggctggcaccttgtttggggaaggattccgtgcctttgtgacagaccgggacaaagtgacagccacggtggctgggctgacgctgctggctgtcggggtctactcagccaagaatgcgacagccgtcactggccgctacatcgaggctcggctggggaagccgtccctagtgagggagacgtcccgcatcacggtgcttgaggcgctgcggcaccccatccagcaggtcagccggcggctcctcagtcgaccccaggacgtgctggagggtgttgtgcttagtcccagcctggaagcacgggtgcgcgacatcgccataatgacaaggaacatcaagaagaaccggggcctgtacaggcacatcctgctgtacgggccaccaggcaccgggaagacgctgtttgccaagaaactcgccctgcactcaggcatggactacgccatcatgacaggcggggacgtggcccccatggggcgggaaggcgtgaccgccatgcacaagctctttgactgggccaataccagccggcgcggcctcctgctctttgtggatgaagcggacgccttccttcggaagcgagccactgagaagataagcgaggacctcagggccacactgaacgccttcctgtaccgcacgggccagcacagcaacaaattcatgctgatcctggccagctgccaccccgagcagttcgactgggccatcaatgcctgcatcgacgtgatggtccacttcgacctgccagggcaggaggagcgggcgcgcctgggattggagggagaggctcctcatgagacccccatgtcgggactagagggagaggctcctcatggtccactgctggcttctggcctggcctccctgcagctgccacacccggccctggagcctcgtggtgtggggcgcggctcttgcttcctgctgcacatgtgccttgaggctgtcaggctccctgttgctggcgggccccggtttctgagtccttctgtgcacctgacccaaatccctgctgtcgccagtgacgacaaaagctgctctgttccaaagagagcctggttctcccctgccgacccctccactgccgcctgctccatgctagaccagctttccgggcgtctgaagctggcccagtttgactacgggaggaagtgcttagagatcgctcggctgacagagggcatgtcatgccggaagatcgcacagctggccgtgtcctggcaggccacggcgtatgcctccaaggacggggtcctgaccgaggccatgatggacgcctgcgtgcaagactttgtccagcagcaccagcagatgatgcgctggctgaagggggagaggcctgggcccgaggacgagcaaccctcatcctga

SEQ ID NO: 21 - protein, 582 aa, Homo sapiens
MRLQSDVGASGDFMTTLRPGVRGHASAQASSMEDTQSATAASVLGALGLGHWGPQATLRDHSPGMPCSSLSPEAMSKDALNLAQMQEQTLQLEQQSKLKQLVNEDLRKQEESVQKHHQTFLESIRAAGTLFGEGFRAFVTDRDKVTATVAGLTLLAVGVYSAKNATAVTGRYIEARLGKPSLVRETSRITVLEALRHPIQQVSRRLLSRPQDVLEGVVLSPSLEARVRDIAIMTRNIKKNRGLYRHILLYGPPGTGKTLFAKKLALHSGMDYAIMTGGDVAPMGREGVTAMHKLFDWANTSRRGLLLFVDEADAFLRKRATEKISEDLRATLNAFLYRTGQHSNKFMLILASCHPEQFDWAINACIDVMVHFDLPGQEERARLGLEGEAPHETPMSGLEGEAPHGPLLASGLASLQLPHPALEPRGVGRGSCFLLHMCLEAVRLPVAGGPRFLSPSVHLTQIPAVASDDKSCSVPKRAWFSPADPSTAACSMLDQLSGRLKLAQFDYGRKCLEIARLTEGMSCRKIAQLAVSWQATAYASKDGVLTEAMMDACVQDFVQQHQQMMRWLKGERPGPEDEQPSS

SEQ ID NO: 22 - DNA, 794 bp, Homo sapiens
aagtgcccgagggcggccgcagaacggtcaatttgagccgcgtcgagctcccctgggacctgtggccgccgcccacagaccatgctcctggggcgcctgacttcccagctgttgagggccgttccttgggcaggcggccgcccgccttggcccgtctctggagtgctgggcagccgggtctgcgggcccctttacagcacatcgccggccggcccaggtagggcggcctctctccctcgcaagggggcccagctggagctggaggagatgctggtccccaggaagatgtccgtcagccccctggagagctggctcacggcccgctgcttcctgcccagactggataccgggaccgcagggactgtggctccaccgcaatcctaccagtgtccgcccagccagataggggaaggggccgagcagggggatgaaggcgtcgcggatgcgcctcaaattcagtgcaaaaacgtgctgaagatccgccggcggaagatgaaccaccacaagtaccggaagctggtgaagaagacgcggttcctgcggaggaaggtccaggagggacgcctgagacgcaagcagatcaagttcgagaaagacctgaggcgcatctggctgaaggcggggctaaaggaagcccccgaaggctggcagacccccaagatctacctgcggggcaaatgagtctggcgccgcccttcccgcccgttgctgctgtgatccgtagtaataaattctcagaggactcagcctttaaaaaaaaaaaaaaaaaaaaaaaaaaaaaaaaaaaaaaaaaa

SEQ ID NO: 23 - protein, 199 aa, Homo sapiens
MLLGRLTSQLLRAVPWAGGRPPWPVSGVLGSRVCGPLYSTSPAGPGRAASLPRKGAQLELEEMLVPRKMSVSPLESWLTARCFLPRLDTGTAGTVAPPQSYQCPPSQIGEGAEQGDEGVADAPQIQCKNVLKIRRRKMNHHKYRKLVKKTRFLRRKVQEGRLRRKQIKFEKDLRRIWLKAGLKEAPEGWQTPKIYLRGK

SEQ ID NO: 24 - DNA, 2979 bp, Homo sapiens
gcggtgcgggccgggcggggcgcaggcgggcgggcgggtagcgccccgcgtccgagccccgggccgggccctgagcgcgcgggctccgcgccgccgccgcgccatggcggagaccaagattatctaccacatggacgaggaggagacgccgtacctggtcaagctgcccgtggcccccgagcgcgtcacgctggccgacttcaagaacgtgctcagcaaccggcccgtgcacgcctacaaattcttctttaagtccatggaccaggacttcggggtggtgaaggaggagatctttgatgacaatgccaagcttccctgcttcaacggccgcgtggtctcctggctggtcctggctgagggtgctcactcggatgcggggtcccagggcacggacagccacacagacctgcccccgcctcttgagcggacaggcggcatcggggactcccggcccccctccttccacccaaatgtggccagcagccgtgacgggatggacaacgagacaggcacggagtccatggtcagtcaccggcgggagcgtgcccgacgccggaaccgcgaggaggccgcccggaccaatgggcacccaaggggagaccgacggcgggatgtggggctgcccccagacagcgcgtccaccgccctcagcagcgagcttgagtccagcagctttgtggactcggacgaggatggcagcacgagcaggctcagcagctccacggagcagagcacctcatccagactcatccggaagcacaaacgccggcggaggaagcagcgccttcggcaggcggaccgggcctcctccttcagcagcataaccgactccaccatgtccctcaacatcgtcactgtcacgctcaacatggaaagacatcactttctgggcatcagcatcgtggggcagagcaacgaccgtggagacggcggcatctacattggctccatcatgaagggcggggctgtggccgctgacggccgcatcgagcccggcgacatgttgctgcaggtgaatgacgtgaactttgagaacatgagcaatgacgatgccgtgcgggtgctgcgggagatcgtttcccagacggggcccatcagcctcactgtggccaagtgctgggacccaacgccccgaagctacttcaccgtcccacgggctgacccggtgcggcccatcgaccccgccgcctggctgtcccacacggcggcactgacaggagccctgccccgctacgagctggaagaggcgccgctgacggtgaagagtgacatgagcgccgtcgtccgggtcatgcagctgccagactcgggactggagatccgcgaccgcatgtggctcaagatcaccatcgccaatgccgtcatcggggcggacgtggtggactggctgtacacacacgtggagggcttcaaggagcggcgggaggcccggaagtacgccagcagcttgctgaagcacggcttcctgcggcacacggtcaacaagatcaccttctccgagcagtgctactacgtcttcggggatctctgcagcaatctcgccaccctgaacctcaacagtggctccagtgggacttcggatcaggacacgctggccccgctgccccacccggctgccccctggcctctgggtcagggctacccctaccagtacccgggacccccaccctgcttcccgcctgcctaccaggacccgggctttagctatggcagcggcagcaccgggagtcagcagagtgaagggagcaaaagcagtgggtccacccggagcagccgccgggccccgggccgtgagaaggagcgtcgggcggcgggagctgggggcagtggcagtgaatcggatcacacggcaccgagtggggtggggagcagctggcgagagcgtccggccggccagctcagccgtggcagcagcccacgcagtcaggcctcggctaccgccccggggctccccccgccccaccccacgaccaaggcctatacagtggtgggggggccacccgggggaccccctgtccgggagctggctgccgtccccccggaattgacaggcagccgccagtccttccagaaggctatggggaacccctgcgagttcttcgtggacatcatgtgactcgtggcgcatgccccagccctgcctgaggtggggagctggcggtcctgccgcatgcagagctcgcgtgggcttgccttcgtgggggccaggacgggaggcagggtggggggcaggctggaccaccaccatctgccctggcagcctggctgctccagctcctgacagcacctgtgtctgagcagccgtgttgggggcgctccctctctgcccctcagcgagagcctcggacctcccaaccccttgtgtctggtggggatccctcctgggatgaggaagaccccctcgggctctcggctgacccccacctcctgcacagctgtgcccaggcccccagggtggtccatgcggggcaaccccctgcggtgcacaggccccctgtctggagtagggatctaatttatttatttattgcctggccggtgactcgggggaggaggcgaccctgtcatctgtcccacctgctgctgccccttggagcagcctgcaccttctctcctcccatccggcaacagtctgaaagtacgtggaggacgggaccggaagacgagagagggctggacatcctgcccaccgtgtcccagccagggcagggagggaccatggcccgcagggtcaaggggccccgatgtgcacagctgccacagggagggaggtcttggggagatgggcagtcaggtggcccgtccttggtgagtgcacacactgcgcgcacacatcgcggccttcctggcttctctggcccccacgtgtctgtgctgtagatactgtatcaaagtcccagcgtttagatggttaacatagagctgcttctgtgtaaatgctgcttattttaaacactaaaaagcgtttaattttatggg

SEQ ID NO: 25 - protein, 670 aa, Homo sapiens
MAETKIIYHMDEEETPYLVKLPVAPERVTLADFKNVLSNRPVHAYKFFFKSMDQDFGVVKEEIFDDNAKLPCFNGRVVSWLVLAEGAHSDAGSQGTDSHTDLPPPLERTGGIGDSRPPSFHPNVASSRDGMDNETGTESMVSHRRERARRRNREEAARTNGHPRGDRRRDVGLPPDSASTALSSELESSSFVDSDEDGSTSRLSSSTEQSTSSRLIRKHKRRRRKQRLRQADRASSFSSITDSTMSLNIVTVTLNMERHHFLGISIVGQSNDRGDGGIYIGSIMKGGAVAADGRIEPGDMLLQVNDVNFENMSNDDAVRVLREIVSQTGPISLTVAKCWDPTPRSYFTVPRADPVRPIDPAAWLSHTAALTGALPRYELEEAPLTVKSDMSAVVRVMQLPDSGLEIRDRMWLKITIANAVIGADVVDWLYTHVEGFKERREARKYASSLLKHGFLRHTVNKITFSEQCYYVFGDLCSNLATLNLNSGSSGTSDQDTLAPLPHPAAPWPLGQGYPYQYPGPPPCFPPAYQDPGFSYGSGSTGSQQSEGSKSSGSTRSSRRAPGREKERRAAGAGGSGSESDHTAPSGVGSSWRERPAGQLSRGSSPRSQASATAPGLPPPHPTTKAYTVVGGPPGGPPVRELAAVPPELTGSRQSFQKAMGNPCEFFVDIM

SEQ ID NO: 26 - DNA, 1985 bp, Homo sapiens
gcaccgcccccgcccgcaagaaagatggcagtggcctgatccgggcccgttggcggcgtcactgacgcttcgctccggtcctcggatcccgagcgcggggaggcagaccgactgtgagctgcttgtccccatcctgcggccgtcctggggacacagagccctccgtggtgcccggggattggattggagccaggacctcacttcctcctctgcccctgcccctgcccctcccagcacctggcccacaccctgcagcccgccccatggtctggccctgggtggcgatggcgtccaggtggggtcccctcattggcctggctccgtgctgcctctggctcctgggggcagtccttctgatggacgcgtctgcacggcctgccaaccactcgtccactcgagagagagtagccaacagggaggagaatgagatcctgcccccagaccacctgaacggggtgaagctggagatggacgggcacctcaatcgcggcttccaccaggaggtcttcctaggcaaggacctgggtggctttgatgaggacgcggagccgcggcggagccggaggaagctgatggtcatcttttccaaggtggatgtgaacactgaccggaagatcagtgccaaggagatgcagcgctggatcatggagaagacggccgagcacttccaggaggccatggaggagagcaagacacacttccgcgccgtggaccctgacggggacggtcacgtgtcttgggacgagtataaggtgaagtttttggcgagtaaaggccatagcgagaaggaggttgccgacgccatcaggctcaacgaggaactcaaagtggacgaggaaacacaggaagtcctggagaacctgaaggaccgctggtaccaggcggacagcccccctgcagacctgctgctgacggaggaggagttcctgtcgttcctccaccccgagcacagccggggaatgctcaggttcatggtgaaggagatcgtccgggacctggaccaggacggtgacaagcagctctctgtgcccgagttcatctccctgcccgtgggcaccgtggagaaccagcagggccaggacattgacgacaactgggtgaaagacagaaaaaaggagtttgaggagctcattgactccaaccacgacggcatcgtgaccgccgaggagctggagagctacatggaccccatgaacgagtacaacgcgctgaacgaggccaagcagatgatcgccgtcgccgacgagaaccagaaccaccacctggagcccgaggaggtgctcaagtacagcgagttcttcacgggcagcaagctggtggactacgcgcgcagcgtgcacgaggagttttgagcgcccggccgcgccccgcgccgccccccacgcaccaccggggcggcctcgcgggtgactccgggctccgtggctgtcccggaccccacctcttccctgccgcccgccaccggccgaccgaccgcggctgccccagttgatgagcggcgtgtcccctctgcagcgcgcaccccggcggggctttggctgtgacgcggtcggggcgcggggctgggctgtggccccgcggcgccgcctcctccctggtccctcgaaatcgtggcatctcacttctgagaacgaaatctcgcttcagtcactctgccgaaggcgctgacggcatcgcggccggaacctctgggcccggcccctcccagggccgccgctccgtgggaaaaaacagctcctccatttccttgaaaactgaacgattattaaaaatagattaaacttcgctggaaatgagtagccaggaagttcaggggagggtgccgggtccttcccgggcctggcgtgtcggagccacccaggtcccgcagctgccgctgagaaaatgcaaatatttgttgtgacaagaatcacatacatttactttaaatatagttgccttttttggtcagcttcaaaaaaaaaaaaaaaaaaaaaaaaaaaaaa

SEQ ID NO: 27 - protein, 362 aa, Homo sapiens
MVWPWVAMASRWGPLIGLAPCCLWLLGAVLLMDASARPANHSSTRERVANREENEILPPDHLNGVKLEMDGHLNRGFHQEVFLGKDLGGFDEDAEPRRSRRKLMVIFSKVDVNTDRKISAKEMQRWIMEKTAEHFQEAMEESKTHFRAVDPDGDGHVSWDEYKVKFLASKGHSEKEVADAIRLNEELKVDEETQEVLENLKDRWYQADSPPADLLLTEEEFLSFLHPEHSRGMLRFMVKEIVRDLDQDGDKQLSVPEFISLPVGTVENQQGQDIDDNWVKDRKKEFEELIDSNHDGIVTAEELESYMDPMNEYNALNEAKQMIAVADENQNHHLEPEEVLKYSEFFTGSKLVDYARSVHEEF

SEQ ID NO: 28 - DNA, 960 bp, Homo sapiens
aaggggccaaaaggtccacctgatgaacctgttgcacgcgaaaagttcagaaccactgctgccaagatgctgacagaagccttgagaagcacctgctgcgggaaaagacgtgcaggcctcacaggtgcagtgcggtcttcagcgcgcttgaaagcacgaagttgttcggcagccaggttggcctctgcccaggaagttgctggttccacgtctgccaagacagcatgtctgacccgggccctgatcctagcacccgcccacccgtgtacttcctcatcccacaaagccacagacacgcgaacgtccaagaagttcaaatgtgacaaaggacatcttgtgaagtcagaattacagaagcttgtccctaagaatgacagcgcttctttgccaaaagtgacacctgagaccccttgtgaaaatgagtttgctgaaggcagtgccttgcttccaggcagcgaggctggcgtttctgtgcagcagggggctgcaagtcttcctctcggtggctgcagagttgtgagtgactctcgcttagcaaagactagagatggcctgtccgtgccaaaacacagtgccgggtccggagcagaagaatccaacagcagctccactgtgcagaagcagaatgagccagggctacagacagaggatgtgcagaagccaccacttcagatggacaacagcgtctttctagatgacgacagcaatcagccaatgcccgtgagccggttctttggaaacgttgagctcatgcaggccatagagaggtccgtgtgcagctgcctgacgagaactgcattccccagccccagcggcgtcagggagcacctcaccgtgtgttctcgcccagggcagtggagacaagccattgggagtgctctctccatggcctcttcctgccgccacctgcacatagaagctgagtggaccaaccaggagcaagctggggtccccgggtga

SEQ ID NO: 29 - DNA, 792 bp, Homo sapiens
agaggcgagaacgaccccgggaccgaccaaagcccgcgcgccgccgcatcccgcgtacagcacctacatcccgccaccgtcaccgccaccaccatgcccaagagaaaggctgaaggggatgctaaaggaggtaaagccaaggtgaaggacgaaccacagagaaggtctgcaaggttgtctgctaaacctgctcctccaaagccagagcccaagcctaaaaagacccctgcaaagaaggcagagaaggtacccaaagggaaaaagggaaaagctgatgcccaggaggagggattccctgactttgacacacatggccaccttggcacaaaagccttgtggtgtggaaaaacaaatttgtttttatgtcctcttctccctttccatctttcagcatagacttaactcctttaatcccaggcatctgttgggacctgacccctagtcattggttaccagtgtgtcaggcaatctggactttccagtgatgccactgagatggcacctgtcaaaagagcagtggttccatttctagattgtggatcttcagataaattctgccattttcatttcacttcctgaaagtcagagtcggcttgtgaaaagttgttaaacaacatgctaaatgtgaaatgtcaaccctcactctaaactttccctgttcagagcatgagatgaagacttctttgggttttatagcggctttctgatttttcgtagtccattgaagaagggagtttgaaagttgttgtatactgttaacaattgtctgcccatgtcctgcctgaaatacca

SEQ ID NO: 30 - protein, 92 aa, Homo sapiens
MPKRKAEGDAKGGKAKVKDEPQRRSARLSAKPAPPKPEPKPKKTPAKKAEKVPKGKKGKADVDTHGHLGTKALWCGKTNLFLCPLLPFHLSA

SEQ ID NO: 31 - DNA, 1812 bp, Homo sapiens
tagctaggcaggaagtcggcgcgggcggcgcggacagtatctgtgggtacccggagcacggagatctcgccggctttacgttcacctcggtgtctgcagcaccctccgcttcctctcctaggcgacgagacccagtggctagaagttcaccatgtctattctcaagatccatgccagggagatctttgactctcgcgggaatcccactgttgaggttgatctcttcacctcaaaaggtctcttcagagctgctgtgcccagtggtgcttcaactggtatctatgaggccctagagctccgggacaatgataagactcgctatatggggaagggtgtctcaaaggctgttgagcacatcaataaaactattgcgcctgccctggttagcaagaaactgaacgtcacagaacaagagaagattgacaaactgatgatcgagatggatggaacagaaaataaatctaagtttggtgcgaacgccattctgggggtgtcccttgccgtctgcaaagctggtgccgttgagaagggggtccccctgtaccgccacatcgctgacttggctggcaactctgaagtcatcctgccagtcccggcgttcaatgtcatcaatggcggttctcatgctggcaacaagctggccatgcaggagttcatgatcctcccagtcggtgcagcaaacttcagggaagccatgcgcattggagcagaggtttaccacaacctgaagaatgtcatcaaggagaaatatgggaaagatgccaccaatgtgggggatgaaggcgggtttgctcccaacatcctggagaataaagaaggcctggagctgctgaagactgctattgggaaagctggctacactgataaggtggtcatcggcatggacgtagcggcctccgagttcttcaggtctgggaagtatgacctggacttcaagtctcccgatgaccccagcaggtacatctcgcctgaccagctggctgacctgtacaagtccttcatcaaggactacccagtggtgtctatcgaagatccctttgaccaggatgactggggagcttggcagaagttcacagccagtgcaggaatccaggtagtgggggatgatctcacagtgaccaacccaaagaggatcgccaaggccgtgaacgagaagtcctgcaactgcctcctgctcaaagtcaaccagattggctccgtgaccgagtctcttcaggcgtgcaagctggcccaggccaatggttggggcgtcatggtgtctcatcgttcgggggagactgaagataccttcatcgctgacctggttgtggggctgtgcactgggcagatcaagactggtgccccttgccgatctgagcgcttggccaagtacaaccagctcctcagaattgaagaggagctgggcagcaaggctaagtttgccggcaggaacttcagaaaccccttggccaagtaagctgtgggcaggcaagcccttcggtcacctgttggctacacagacccctcccctcgtgtcagctcaggcagctcgaggcccccgaccaacacttgcaggggtccctgctagttagcgccccaccgccgtggagttcgtaccgcttccttagaacttctacagaagccaagctccctggagccctgttggcagctctagctttgcagtcgtgtaattggcccaagtcattgtttttctcgcctcactttccaccaagtgtctagagtcatgtgagcctcgtgtcatctccggggtggccacaggctagatccccggtggttttgtgctcaaaataaaaagcctcagtgacccatgag

SEQ ID NO: 32 - protein, 434 aa, Homo sapiens
MSILKIHAREIFDSRGNPTVEVDLFTSKGLFRAAVPSGASTGIYEALELRDNDKTRYMGKGVSKAVEHINKTIAPALVSKKLNVTEQEKIDKLMIEMDGTENKSKFGANAILGVSLAVCKAGAVEKGVPLYRHIADLAGNSEVILPVPAFNVINGGSHAGNKLAMQEFMILPVGAANFREAMRIGAEVYHNLKNVIKEKYGKDATNVGDEGGFAPNILENKEGLELLKTAIGKAGYTDKVVIGMDVAASEFFRSGKYDLDFKSPDDPSRYISPDQLADLYKSFIKDYPVVSIEDPFDQDDWGAWQKFTASAGIQVVGDDLTVTNPKRIAKAVNEKSCNCLLLKVNQIGSVTESLQACKLAQANGWGVMVSHRSGETEDTFIADLVVGLCTGQIKTGAPCRSERLAKYNQLLRIEEELGSKAKFAGRNFRNPLAK

SEQ ID NO: 33 - DNA, 3144 bp, Homo sapiens
tggtcccaaggcgcgtgctttgcagcagatgtgtgacctggcgttcccctgagtgctcggaaaatggccttgtctccggtcgttcccgttcaggagcagaattttcccactgtaaaaaaccgagcaagtctggataagtgaggctggctccatgtatccagaatcaacgacgggctccccggctcggctctcgctgcggcagacgggctcccccgggatgatctacagtactcggtatgggagtcccaaaagacagctccagttttacaggaacctgggcaagtctggcctgcgggtctcctgcctgggacttggaacatgggtgaccttcggaggccagatcaccgatgagatggcagagcagctcatgaccttggcctatgataatggcatcaacctcttcgatacagcagaagtctacgcagccggcaaggctgaagtggtactgggaaacatcattaagaagaaaggatggaggcggtccagcctcgtcatcaccaccaagatcttctggggcggaaaggcggagacggagcggggcctgtccaggaagcacataatcgaaggtctgaaagcttccctggagcgactgcagctggagtacgtggatgtggtgtttgccaaccgcccggaccccaacaccccgatggaagagaccgtccgcgccatgacccacgtcatcaaccaggggatggccatgtactggggcacgtcacgctggagctccatggagatcatggaggcctactccgtggcccggcagttcaacctgaccccgcccatctgcgagcaggctgagtaccacatgttccagcgtgagaaagtggaggtgcagctgccggagctgttccacaagataggagtgggcgccatgacctggtcccctctggcctgtggcattgtttctggcaagtacgacagtggcatcccaccctactcaagagcctccttgaagggctaccagtggctgaaggacaagatcctcagtgaggagggccggcgccagcaagccaagctgaaggagctgcaggccatcgccgagcgcctgggctgcaccctgccccagctggccatagcctggtgcctgaggaatgagggagtcagctccgtgctcctgggggcctccaatgcggaccagctcatggagaacattggggcaatacaggtccttccgaaactgtcatcttccattatccacgagattgatagtattttgggcaataaaccctacagcaaaaaggactacagatcctaagccgcccccgcccgcctgctcggacagtttccgttccctcctagtctctgttcgctcgcttaagctgttttgaagccaagtgaagagtgtggtttgcatccaagagaaaacaccacactgtgatgtcatcgggaaatgatctcccaagtcgctgccagacaccacccactgcttcgccggacaatgtcgaagtccagtctgtgccggggaaggcactggttaggaaggatgttcaaacggtcccacccaagcctgtcacctctgctcatcctccaagaccacccagctttctcccagccacagccaagattcccaaagtcaaggcccaaagatttccaaggttcccaaagtcaaggccaggccaaggcctggttgggtccttggggcgggcagggccagcctctcctctgctgagaatccccacttggtgtagggggagaggggaaaggggtctggcccatcgaggggccccttctgccagggccttggttgctggggcagggcctccccactgggggtcttcctccacctcccactttccaagggctccaggaatctggggcctgaccacagattcctctcccatccttttctgctccaacctgccccactgggtcccggcaggggccatgcctaccaagctcgagctggcccttgacccccacccacccccacccttgctggcaggggcagggaccccagggggattgactctgcagtttgggagccacaaaaagcgtagcggtgtgatttctagctcagcctcccaccgtcttcctcctacacaccaatgatgagcctcatgccagtgaggcccggagcgcttgggaggggtcccagtggggcaggcccctctgtctggccacccctctgtcctggccccggaaggccctgtggtcatgtgctcctagctgcacggtggctgctggccacaccacggcaagtggcagcaggggccggccctgtgcacaaggatgcactcctctcggcccctgtagactttctctaaagccgcccgccagcccaggccgctgctctgcaccgagctggtgggcttgggttttgtggagcgcatgcttggaccctttcagtaaggaagggtctttggggttttctgtgcccatgacttgggggctgcacccccacagcacccccacaatgtaggaaaagacctcagggaacctctccctggaaagacgggcagggctggttagcccctcccactgcctgacacctgggacaggctgggcagaggggagagagggcaggacaggccagagtgacgcccccgtgcagcttgggccggagggcaagggatgccagtaagtctgcaggtgcggggtgccacctacaggcccaggcctgtgtcccaagcagtacccaggctttgcagaccacgcggggcagggctccactgaagccacccccacccctcgccagctagctccatagggaagcctgtgtctcctgcccccagggcgcaccctcagtgcaggcacctctgttcccgctttgcccctggaggagccactattccagaaggctccaccctgccgtcctgcgggagcctgctgtccagtcctggccgggccaaggcctgggaaactgtgaaagtcagaaaggccagcggggagaggctggggcgaggggaggagggggatcagcttctgctattaccgaccccccttcatgctgcccctggcgcctagaacccttgcccctcctcatagaccaagtcccgggggtctccactcagtcctgctgcctgcttcaccagaagcagccctgtgagtgtggggtggggaagtcccttcccaacggaggtcccagcctatggccctgggcccaggtgggggtcgcctgcttccttcccggacagggtcctgcag

SEQ ID NO: 34 - DNA, 574 bp, Homo sapiens
cctttctaactccgctgccgccatggctcctgtgaaaaagcttgtggtgaaggggggcaaaaaaaagaagcaagttctgaagttcactcttgattgcacccaccctgtagaagatggaatcatggatgctgccaattttgagcagtttttgcaagaaaggatcaaagtgaacggaaaagctgggaaccttggtggaggggtggtgaccatcgaaaggagcaagagcaagatcaccgtgacatccgaggtgcctttctccaaaaggtatttgaaatatctcaccaaaaaatatttgaagaagaataatctacgtgactggttgcgcgtagttgctaacagcaaagagagttacgaattacgttacttccagattaaccaggacgaagaagaggaggaagacgaggattaaatttcatttatctggaaaattttgtatgagttcttgaataaaacttgggaaccaaaatggtggtttatccttgtatctctgcagtgtggattgaacagaaaattggaaatcatagtcaaagggcttcccttggttcgccactcatttatttgtaacttgacttct

SEQ ID NO: 35 - protein, 128 aa, Homo sapiens [sequence omitted]

SEQ ID NO: 36 - DNA, 6450 bp, Homo sapiens
cgcgctcgcggggggcggtggcgcccggcacagaggggttaagggggcggtgcagacgtctccccgcccatcccgcccctcgagagccgcggcgccccgccctatttatagcagcggtgcctagcgcgccgcgtctctccgcaggccccggccgcggcgtcctcgacaacctatcgaaggcgccatggagcgaccggcgcccctggccgtgcttcccttctcggaccccgcgcacgccctgagcctgctgcgcggcctgagccagctgcgcgccgagcgcaagttcctggacgtgaccctggaggcggcgggcgggcgcgacttcccggcgcaccgtgcggtgctggccgccgccagcccctacttccgcgccatgttcgcggggcagctgcgcgagagccgcgccgagcgggtgcgcctgcacggagtgcctcccgacatgctgcagctgctgctggacttcagctacacgggccgcgtggcggtaagcggcgacaacgctgagccgctgctgcgcgccgccgacctgctgcagttcccggccgtgaaggaggcgtgcggggccttcctgcagcagcagctcgacctggccaactgcctggacatgcaggacttcgctgaggccttcagctgctcgggactggcgagcgcggcgcagcggttcattctgcgccacgtgggcgagctgggcgccgagcagctggagcggctgccactggcgcgcctgctgcgctacctgcgggacgacgggctgtgtgtgcccaaggaggaggccgcctaccagctggcgctgcgctgggtccgcgctgacccgccgcgccgcgccgcgcactggccgcagctgctggaggccgtgcgcctgcccttcgtgcgccgcttctacctgttggcgcacgtcgaggccgagccgctggtggcgcgctgcccaccctgcctgcgcctgctgcgcgaggcgcgcgacttccaggcggcgcgctacgaccgccacgaccgcgggccctgtccccgaatgcgtcctcgcccgtccaccggtctcgccgagatcctcgtgctcgtgggcggctgcgaccaggactgtgacgagctggtcactgtcgactgctacaacccgcagacgggtcagtggcgctacctggccgagttcccagaccacctgggcggaggctacagcatcgtggcgctgggcaatgacatctacgtgacgggtgggtccgatggctcccggctctatgactgcgtgtggaggtacaactcaagcgtgaatgagtgggcggaggtggcgcccatgctgaaggcccgcgagtaccacagctcctctgtgctggacggactgctgtacgtggtggccgccgacagcaccgagcgctatgaccacaccactgactcctgggaggccctgcagcccatgacctaccccatggacaactgctccaccactgcgtgccgtggccggctctatgccatcggctccctggctggcaaggagaccatggtgatgcagtgctacgacccggacaccgacctgtggtcgctggtggactgcggccagctcccgccctggtccttcgcccccaagactgcgactctaaacggactcatgtactttgtcagggatgactccgctgaggtggacgtgtacaacccgacgaggaacgaatgggacaagatcccgtccatgaatcaggtaaattttcaggcgggccagcattggaagcacaggctggtcctgattttgcaacccaagtgtcatcgtgatgagtgtttgggatccacagccatgatggatgggtctcatctcaattaatagaaggctgctcttacccttattttgcacttaaggctcactgagacacagatgttaagtaataccctatgattacacagcttagtacacatttgagcagtgtttattgagtatctgctgtgagccagagagcagaaggaagtgagggagcaaggcatacagtcatctggggacacctgttccagagagggacagcaggtacagaggccctgcagcagggcaccctggcgtgttcttagatacaccagcagcccatgtggccggagcagagtcagcatgaggtctgtgacctaccttttttatttttgagacagggtcttgctctgtcacccaggctggagtgcagtggtacaatcatggctcactgcagcctccacctccttgactcgcagtcctcccaccgcaccttcctgaatagctgagactacaggcgtgtgccaccacacccagtaattttttttctcatatgtagatacaaaaggatattcttaaaatttttatagagacagggtcttgctgtgttacccaggctggtctcacactcctggcctcaagtgaccctcctgtctcagcctcccaaagtgctaggattataggcgtgaaccaccacgcccagctggttcctgaggaagtcagtgtgggaatactttttttttttttatacggagtctcgctctgtcacccaggctggagtgcagtggcacgatctcggctcactgcaagctccatctcccaggttcacgccattctcccgcctcaacctcccgagtagctgggactacaggtacccaccaccacgcccagctaattttgtttgtgtatttttagtagagacgggatttcactgtgttagccaggatggtctggatctcctgaccttgtgatctgcctggctcagcctcccaaagtgctgggattacaggcatgagccaccatgcccagcccactgtgggaatacttgtgttgagcacttgctgtgtgttctgaataggacaaccagggtccaccccttctctctgggcttgttgagaagaggggtgcccagcctgacagtgatgggacagggaggcttcagtgccatttggccatgtgagcagtgttagtctgaggtacacatcatattgcctacagccttctttcctgtgtgtctgttaacatttccaaacctacactccgtgacatccagcctcacagcttacatcacagcttaatgtcctggcatttaagagacccagcgttctgttttccccgcagtaagctgcacatagtcatagcgaatttgggaaagatggaaggaatcatccagcctcgcggttcagagcccagctctgccactgtcagccatgcaagcctcagttttcccatctgtaacatggggagaacagcactgctcagcccagagggccactgcagagattctgagagagaacgtaggaagcgctgctcggcacgacctgcacacggggaggcctggcgctgcagcgggcaccctcatcaccatagggaaggcccagctgcctccggggaggcccgttctcctaggcagggtgttggaaaggggttggcctctctgctgctttctgggagagccaaggccacccctctggggtactgacagggcatgccttgtctccagtggttccccaggtggggccctgccctaccctctcctctgacctccactcactcatccctttggcccacaggtacatgtggggggcagcctggccgtccttggggggaagctgtacgtctctgggggatacgacaatacatttgaactctcggacgtggtagaggcctatgacccagagactcgcgcgtggagcgtggtggggcggctcccagaacccaccttctggcatggcagtgtcagcatcttccgccagttcatgccccagaccttctcgggtgggcgtggcttcgagttggacagtggcagcgatgacatggacccaggccgaccccggccgccgcgggaccccgatgagctgcactagccccagtctggcccggcacgggcctcggtgcaggtaactggcacctctgcggggcagtgccccactcctttgtgcacaaggacacgttgggctcacaggaggagcacaggctcttgggtggcgaagccagcccaggatccattacctggaaggtttctgtaccttgagagcctgaatcagaggccgtcgggaacgccctccctgcagttgaggaagagccactttcctgccagcacatgtttctgggtcttggaggtcacccccaccccgcggatcacagctcacccacgcggcgcacacccctcctgccgttgtcatctgcacctacttgttcccaccttgggagaggacgatgacttgggagggacgcgtgaagggagaaggggtcctcccatgaggctgaggatggcctgaacctggagcagcggaccaggcagacgggctgaagtggggtcccaaattccatgtccagaggtgtggggagcctgcctccctagctcctggcccctgccaggggcttacatcaaaacacctcagagggctgccctccagaggctgcacccagaacagtgggacatgagcaggggtgtgggcttggagggtgaagaggatgtggtcctatcagatgctgggcctcctcagccatagccccctgctcctaccccctgactggctcttgcgtcctcacctctcaccctctccttcccgggaggccctgggaggtgatcattgacacccagccaagcagacagctgcgggtgcccaagcccttgctgggcctgcgcgtgaggagtcccactgcttctaaaggaagtcctgggcaggaggtggctttggtggttggttccaaagttgaaaatgcttgcagtttgaccttagaagaagtgggaagaagaaggagctctacagggtcagctttgtttgatttgtccagtctaagaagtcccattgccaaagctttctgcaggagggtgaatgccgcagcttggcagcccctgggtttctcttggaaatggtcagtttcccctcaaagtacccaaagtagccttggcttgagtttttgtccttgcctcctttttagagaagagggcatttagactgcattttcctggttaaagaaggttaaagcaaatgtttattgccttttctagtgaactaactcgtagagatgttctcagcaggaagacagtcttagcactgtcacttagcagattgcacttaagtcccttgtgctggccagatggcgtggctggttgccttaatatgtcccaggacccctgacagggctgcctggcctctccctcgtgctcctcaagagcccagtccatacactgtggatgtcattgctgtcgggttaggaagtcttgtcctagaacgccctggctggtatgaccacagttcatggcggctcttctcgcttgggtcatggtcatcttccagcacctgctgtgctgggaaggccgaggatgggggcccagcactgtccaggcctgctggggcctggctgggagtcctgtgggcagcatggaacatgcagctgggcttcctgtgaccaggcaccctctggcactgttgcttgccctgtgccctggaccttttcctgcccttctccttcctctgctcccttggggctaccccttggcccctcctggtctgtgcaaactccctcagggagcccccctgccctgtagctctcgcttaacttcctaggggctgctgagcccacccagaggttgttggagttcagcggggcagcttgtctcccttgtcagcaggggcgtaagggctgggtttggccatacaaggttggctacgccctcaatccctgaccgttccaggcactgagctgggcacccacggaaggacatgctgtccagactgtgatgactgccagcacagggcatctcgggcttggctggtctgcgaggccttgcccctgtggaactctgggttcctgttttctcagtcttttttgcggctttgctgtggttggcagctgccgtactccaggcttgtgtcggccactcagatgagggctgtggtgcgagccagtgcaggagagctgcgcttgggattgtgccctctcctgtgtctgtcctccggacctacccaggtctccaccatcaggaccctgtctttgggtttagaagaccaagtatggggaaaaccaggcaccagcctctgcagcaatgggtccctctagcctgtggacaccagctgggggatccagggtcaggccccctcctctccccagtttccctctgctgtgggttctgggctgtcatgtctccaccacttaaggatgtctttacactgacttcaggatagatgttgggatgcctgggcatggccacatgttacatgtacagaactttgtctacagcacaaattaagttatataaacacagtgactggtatttaatgctgatctactataaggtattctatatttatatgacttcagagacgcgtatgtaataaaggacgccctccctccagtgtccacatccagttcaccccagagggtcgggcaggttgacatatttatttttgtctattctgtaggcttccatgtccagaatcctgcttaaggttttagggtaccttcagtactttttgcaataaaagtatttcctatccatttgg

SEQ ID NO: 37 - protein, 539 aa, Homo sapiens
MERPAPLAVLPFSDPAHALSLLRGLSQLRAERKFLDVTLEAAGGRDFPAHRAVLAAASPYFRAMFAGQLRESRAERVRLHGVPPDMLQLLLDFSYTGRVAVSGDNAEPLLRAADLLQFPAVKEACGAFLQQQLDLANCLDMQDFAEAFSCSGLASAAQRFILRHVGELGAEQLERLPLARLLRYLRDDGLCVPKEEAAYQLALRWVRADPPRRAAHWPQLLEAVRLPFVRRFYLLAHVEAEPLVARCPPCLRLLREARDFQAARYDRHDRGPCPRMRPRPSTGLAEILVLVGGCDQDCDELVTVDCYNPQTGQWRYLAEFPDHLGGGYSIVALGNDIYVTGGSDGSRLYDCVWRYNSSVNEWAEVAPMLKAREYHSSSVLDGLLYVVAADSTERYDHTTDSWEALQPMTYPMDNCSTTACRGRLYAIGSLAGKETMVMQCYDPDTDLWSLVDCGQLPPWSFAPKTATLNGLMYFVRDDSAEVDVYNPTRNEWDKIPSMNQVNFQAGQHWKHRLVLILQPKCHRDECLGSTAMMDGSHLN

SEQ ID NO: 38 - DNA, 3901 bp, Homo sapiens
cccgcggccgagccggcgcgggcccccgcacctcccccgctcgcgcggcctcgagtccagaagacccgcctccacacaccggggccgccgccgcggagcctcatgggggttggagtccccaaggtttcctttgtgcgcagtattggcggggccttggactaccactcccacaaggcaccgcgcccgcctcccgcgccacgccccctcgccgctggcttccagtcgccacccagactacatttcccgacaggcctcccggctctcccgccctccctcccgagacacgagccgaactgggcgtcaggtcggggagccggtcgggttcccgctcaccgccgccgccgccgccccctgcagccactctcccgcctctaccgccgcgggagctgcatcgtccactccggtcggcggtggaaccgccagtccggggtcacagagcttgagaagcgacgcgctgagccccccatcacctccagcccgggcgacccctcccgggtccgccctcgccctgcgcagccgcccgagcccccagccccgggcggccccgctccagcatcccagctcctgcactctcgcagccgccgccgccccccgcccggaacatggactctgactcttgcgccgccgccttccacccggaggaatactcccccagttgcaagaggcgcaggaccgtggaagacttcaacaaattctgcacctttgtcttggcctatgctggctacatcccttatccgaaggaggaactccctttaaggagcagccccagccctgctaacagcactgctggtaccattgacagcgacggctgggacgcgggtttctcagacatcgcgtcctcagtgcccttgccagtctctgaccgctgctttagccacctgcagcctactctcttgcagcgagccaagcccagtaacttcctgctggacagaaagaaaacggacaagctgaagaagaagaagaagaggaagcgcagggacagtgatgcgcctgggaaagaggggtacagggggggcttgctgaagctggaagccgctgacccctacgtggagacccccacgagtcccaccttgcaggatatcccccaggctcccagcgacccctgctcgggctgggactccgatactccctcgagtggatcttgtgccactgtgtcacctgatcaggtcaaagaaataaaaactgaaggcaaacggactatcgtccggcagggaaagcaggtggtgttccgagatgaggacagcactggcaatgatgaggacatcatggtggactcagatgacgattcctgggacctcgtgacctgcttctgcatgaagccatttgccggccgccccatgatcgagtgtaatgagtgccacacctggattcacctgtcctgtgcgaaaatccggaaatccaatgttccagaagtgtttgtctgccaaaagtgccgggactccaagtttgacatccgccgttccaaccgctcgcggacgggctcccggaagctgttcctggactgactgctggctggcgaggaggctgcgagcgtggaatcggaagcgaccgcgggcttttttgcccttctcttagttgagcacagaaccctcagctctggtgcgggcagatccctgccatttaggtgcctaagcaaaaggacaggctgtccaaggtagaaactgtacatagccggtgaccgaatgcgacctttgccagccagagctgctgccagagctgcgttccctgcagtggaggtggactggacacccacgtgcagcgggtttggctcatttgaaaatgagggtccgtggtagctgtgcgttttgctatcattgctaagagattcccgctgattgggctcagtgccagctgttattctgcttccactgtgttggggagaggtgttcggtttccccagcctgttaatgaacagccatacgtgtaagctttttcttgagtgttaagtcttttaccaaaagtgtctgtacagcagccatccaagttgcccctacttagtggcttgccctctgcctgcctcagctgctgcctgaccggctgggggaggcactggcgggaggcctcgggctcccctggaagggcgctgggctggcgggtcagctggtggttcttaggtttccttctgtttgttaaaagggacaatgtggccacttctctgtggaaagggagttggttggggggttgagatggcccgtgttcataactcagtttcctgttttgcacgatgtaaaaaccctgtctttttgcacgatacagccaaaagtattggctgatttcttgctgagtgccctcttagttggtgtgtgaggtcttggtgggctcaggccagctgtttgcgagtgtgggaactcataggttctgtctttgtctcttcctttcacctcattctggtagcagcataaaggttaggcaatcactgggacccgcatggtgttcctccaaagaatagggtaaaggagagctgggagggagccctctccgttgggtgactcttgtgtgccctttagacaggctggcctgccggttccacagggtacagttaggacttgagtctttctttttctgttttgagttggtgagtgagtgatagggtaacatgggccttcaggatgaccccttggaactgtgccgagttccttaaatctcagctgggatcctggacctgggaggcccctgtgagggccagctctggaaaaacctgggagttgatgccggaggctgtggaagaactctgctcgagggcagggtgccctggaacactggtagttctggggctgggagggagaggggctccggctttctctgaaatgaacactgctcttcagcagttcaagtacttgttctcaaaacattttctaattgattggtaggttttcataagcattgtttctttaaggcatggaaagggaagaatgctcaagcaagtcatgtttgttttcagtgggatgggcccgcgttctcactgctgggggcttccccttcatgtggcacctttgtgccaggccaccaggcagactcttcccaccttctcccactgaagcaccaaggggcttgaaccgtaatttggctaatcagaggcattttttttgtcctagtatctttcacacttgtccaaccgtcttatttttttaaaagttctgttgcttgtattaacacgaaactagagagaaatagtttctgaagccagtttattgtgaagatccccaagggggaggttcggtagagaaaaatagtaagctggtttagaaactgacgagggcaaacagccaggacgcattggagaggaatttgccaaagatctaccctgagataacgcctgtccagtgtcttcaccacgtgaataaccagcgctccaaagtgtttttctgctttgaaaaaaaaaaattccacaagcttttaaaggtgcatttaagaatccatgtgactttagaatggaactgccggccctggcaactgtcacgtgtgctagaaggttcgatgcctctggaatgcatgtgatactcatctccattttgtttccttgattgcatttttgttcttttagcagatctgtccctgtgggtggtgtctaagaagtcggacaccttggtttttgtgttagattgagctgggcagctgcaatcagcttctttatatgcaaattaggcacgacccatctgtggttcctggttggtggctaatgaagtgaggggagggagggatgtcaccccaaaagtaggccctcccattggctttggccaggccagacacttcacatcgtttacatggttctgtgtaattttaaagtttatgtgtataaagcgaagctgtttctgtgaaactgtatattttgtaaataaatatattgctactttgaggttcatgattcaaggttcaggcgattgcgttctgtgctgaagga

SEQ ID NO: 39 - protein, 300 aa, Homo sapiens
MDSDSCAAAFHPEEYSPSCKRRRTVEDFNKFCTFVLAYAGYIPYPKEELPLRSSPSPANSTAGTIDSDGWDAGFSDIASSVPLPVSDRCFSHLQPTLLQRAKPSNFLLDRKKTDKLKKKKKRKRRDSDAPGKEGYRGGLLKLEAADPYVETPTSPTLQDIPQAPSDPCSGWDSDTPSSGSCATVSPDQVKEIKTEGKRTIVRQGKQVVFRDEDSTGNDEDIMVDSDDDSWDLVTCFCMKPFAGRPMIECNECHTWIHLSCAKIRKSNVPEVFVCQKCRDSKFDIRRSNRSRTGSRKLFLD

SEQ ID NO: 40 - DNA, 3308 bp, Homo sapiens
gacggctccgggccgccaggggccgctgtggcgcagccgggctggcccgcgctgtccctgacgcggatcactggcccctcttgagcacggccttgccggtttggcggggtgaaaggttgcgaagatggcgacggccttgagcgaggaggagctggacaatgaagactattactcgttgctgaacgtgcgcagggaggcctcttctgaagagctgaaagctgcctaccggaggctctgtatgctctaccatccagacaagcacagagacccagagctcaagtcacaggcggaacgactgtttaaccttgttcaccaggcttatgaagtgcttagtgacccccaaaccagggccatctatgatatatatgggaagagaggactggaaatggaaggatgggaggttgtggaaaggaggagaacccctgctgaaattcgagaggagtttgagcggctgcagagagagagagaagagaggagattgcagcagcgaaccaatcccaagggaacgatcagcgttggagtagatgccaccgacctttttgatcgctatgatgaggagtatgaagatgtgtccggcagtagctttccgcagattgaaattaataaaatgcacatatcccagtccattgaggcacccttgacagcgacagacacagccatcctctctggaagcctctcaacccagaatggaaatggaggaggttccattaactttgcgctcagacgagtaacttcggcaaagggatggggagagttggaatttggagctggagacctacaggggcctttgttcggtctcaagctgttccgtaatctcacaccaagatgctttgtgacaacaaactgtgctctgcagttttcatcccgtggaatccgacccggcctgaccactgtcctagctcggaacctagacaagaacaccgtgggctacctgcagtggcgatggggtatccagtcagccatgaacactagcatcgtccgagacactaaaaccagccacttcactgtggccctgcagctgggaatccctcactcctttgcactgatcagctatcagcacaaattccaagatgacgatcagactcgtgtgaaaggatccctcaaagcaggcttctttgggacggtggtggagtacggagctgagaggaagatctccaggcacagcgttttgggtgcagctgtcagcgttggagttccacagggtgtttctctcaaagtcaagctcaacagggccagtcagacatacttcttccctattcacttgacggaccagcttctgcccagcgccatgttctatgccaccgtggggcctctagtggtctactttgccatgcaccgtctgatcatcaaaccatacctcagggctcagaaagagaaggaattggagaagcagagggaaagcgccgccaccgatgtgctgcagaagaagcaagaggcggagtccgctgtccggctgatgcaggaatctgtccgaaggataattgaggcagaagagtccagaatgggcctcatcatcgtcaatgcctggtacgggaagtttgtcaatgacaagagcaggaagagcgagaaggtgaaggtgattgacgtgactgtgcccctgcagtgcctggtgaaggactcgaagctcatcctcacggaggcctccaaggctgggctgcctggcttttatgacccgtgtgtgggggaagagaagaacctgaaagtgctctatcagttccggggcgtcctgcatcaggtgatggtgctggacagtgaggccctccggataccaaagcagtcccacaggatcgatacagatggataaactgccaagaaccagatttttaaaaggccgcaaaaaatcttttcctgggagtctacaaatttggaaatgaaaaaacccagacatcagatgtttttattttatattattattatagaaggtggtaccattatcaattatgtgaagggacatgcagacaccccagcttttgagggtgctgggggtaggactgaggcagccccactgggaaccagactgcagcctggcccatggctgttttcccaaggatcagttcctggagggaagggctctggccctgactccgctgtgtcccgagcacacgtgctgaccgcagcccgccgccctgtagttcttggctgggtctggaggtgtctgtggagcaccctgccctcaccacaggagcgtgagccacttctgcagtccacgctgaacatgggaaacaacctgaaaagcaggcaggcctcccggtcagggagcctctgctgtgctggcttcccatgaccacctcctcttgctgaaatattactgcttgaatctggagcagattgcgggtttataaaactgctttttatctgagaacaaacgggtttggaaattagtcgtcttttttccccactcccagagctgctcaagtcattccaccggccccctcggcttgggacagggtagtgtaactcccgatcccagggcctagccctgacacaggtggcttcccgtatcccggtgggaaaacgccctgccaccagcgggcttgagctggcctgtgtccctccaccgcctgcaccacccacctccagagtgcagtgctgggcaagggcagctcaagaggacaggaccaggcgcttggcaagacatcagacacacccaacccaaaggcgtggaccccaggcccggcccgtggtacccagcaggtggcactgcagctccccgctcctgcaggtccagcgtcctcacaggaacaccagggcctgtgctccggagccttccttcagacccttcctccacgtgcccacttgggatgcagaatgcagcggagctaggaccccctccacggcctggacctcggctgcagtaaagttacgtgaggcctgtctctcggggcctggaagtggcagccatcagttgctcttgctgacccctcggagcaagcgccgcacaggtggtggctgagacagctggcgcggggggccccaagctgcgccggcctccagcccacccacagctgttgctgaagtcaggcctccctccccagcactggtatctgagtaacggctaagaacctccttcctctggttttgaaaagcagttcgggttgtccaattctgtaacattcatctccattttttaaaaaggtttctctgacggccccacggcccgagccgcggtgagcgtcgtgttgcatgagcctgggccccgggcttcccgtgcgcctctgccgcaggtgcttctgggcacccatcctctgcgtttcatttgcagtcgactgtacagaaggcactcaccacaataaacctttcctgaaagc

SEQ ID NO: 41 - DNA, 3099 bp, Homo sapiens
tgcgaggcagagtgctagcgggagcgcgagccagcaagaggcgcctgcgcgatgtccgggcccctgagcccgcggcgctgagccagccgggacggacatgcgcgggagggcgccgcggggcagccgccgctcctccgggggaatgaaagctactggttgattttaaagtgcctgggcctcacaggtttggagatgtcccagaataaggcacaatgtcaatagcaggagttgctgctcaggagatcagagtcccattaaaaactggatttctacataatggccgagccatggggaatatgaggaagacctactggagcagtcgcagtgagtttaaaaacaactttttaaatattgacccgataaccatggcctacagtctgaactcttctgctcaggagcgcctaataccacttgggcatgcttccaaatctgctccgatgaatggccactgctttgcagaaaatggtccatctcaaaagtccagcttgccccctcttcttattcccccaagtgaaaacttgggaccacatgaagaggatcaagttgtatgtggttttaagaaactcacagtgaatggggtttgtgcttccacccctccactgacacccataaaaaactccccttcccttttcccctgtgcccctctttgtgaacggggttctaggcctcttccaccgttgccaatctctgaagccctctctctggatgacacagactgtgaggtggaattcctaactagctcagatacagacttccttttagaagactctacactttctgatttcaaatatgatgttcctggcaggcgaagcttccgtgggtgtggacaaatcaactatgcatattttgataccccagctgtttctgcagcagatctcagctatgtgtctgaccaaaatggaggtgtcccagatccaaatcctcctccacctcagacccaccgaagattaagaaggtctcattcgggaccagctggctcctttaacaagccagccataaggatatccaactgttgtatacacagagcttctcctaactccgatgaagacaaacctgaggttccccccagagttcccatacctcctagaccagtaaagccagattatagaagatggtcagcagaagttacttcgagcacctatagtgatgaagacaggcctcccaaagtaccgccaagagaacctttgtcaccgagtaactcgcgcacaccgagtcccaaaagccttccgtcttacctcaatggggtcatgcccccgacacagagctttgcccctgatcccaagtatgtcagcagcaaagcactgcaaagacagaacagcgaaggatctgccagtaaggttccttgcattctgcccattattgaaaatgggaagaaggttagttcaacacattattacctactacctgaacgaccaccatacctggacaaatatgaaaaattttttagggaagcagaagaaacaaatggaggcgcccaaatccagccattacctgctgactgcggtatatcttcagccacagaaaagccagactcaaaaacaaaaatggatctgggtggccacgtgaagcgtaaacatttatcctatgtggtttctccttagaccttggggtcatggttcagcagaggttacataggagcaaatggttctcaattttccagtttgattgaagtgcagagaaaaatcccttagattgcaaaataaaatagttgaactctctgtcttcatgtggaaggtttagagcagttgtgagatgctgttatgctgagaaaccctgactttgttagtgttggaaaaaagtcttacaagtctataatttaaagatgtgatggtggggaggggaggatggggaagctttttatatatgcatacattacatacctatatataaacttgtggtataaccatagaccatagctgcaggttaaccaattagttactatcgtagagtaatatatattcagaataataaactcaagctggagaaatgagtcctgatagactgaaaattgagcaaatggaagaagatacagtattgtttagatcagaatcattaaaaaatatttttgtttagtaagtttgaagatttctggcttttaggccttttctattttgttccatttatttttgcaggcaatcttttccatggagggcagggtatccattctttaccatgggtgtacctgcttaggttaaaaatcataccaaggcctcatacttccaggtttcatgttgcgtcttgttgagggagggagagcaggttacttggcaaccatattgtcacctgtacctgtcacacatcttgaaaaataaaacgataatagaactagtgactaattttcccttacagttcctgcttggtcccacccactgaagtagctcatcgtagtgcgggccgtattagaagcagtggggtacgttagactcagatggaaaagtattctaggtgccagtgttaggatgtcagttttacaaaataatgaagcaattagctatgtgattgagagttattgtttggggatgtgtgttgtggttttgcttttttttttttagactgtattaataaacatacaacacaagctggccttgtgttgctggttcctattcagtatttcctggggattgtttgctttttaagtaaaacacttctgacccatagctcagtatgtctgaattccagaggtcacatcagcatctttctgctttgaaaactctcacagctgtggctgcttcacttagatgcagtgagacacatagttggtgttccgattttcacatccttccatgtatttatcttgaagagataagcacagaagagaaggtgctcactaacagaggtacattactgcaatgttctcttaacagttaaacaagctgtttacagtttaaactgctgaatattatttgagctatttaaagcttattatattttagtatgaactaaatgaaggttaaaacatgcttaagaaaaatgcactgatttctgcattatgtgtacagtattggacaaaggattttattcattttgttgcattattttgaatattgtcttttcattttaataaagttataatacttaaaaaaaaaaaaaaaaaaaaaa

SEQ ID NO: 42 - DNA, 842 bp, Homo sapiens
gaattcggcacgagataaaaatggcttccaaaagagctctggtcatcctggctaaaggagcagaggaaatggagacggtcatccctgtagatgtcatgaggcgagctgggattaaggtcaccgttgcaggcctggctggaaaagacccagtacagtgtagccgtgatgtggtcatttgtcctgatgccagccttgaagatgcaaaaaaagagggaccatatgatgtggtggttctaccaggaggtaatctgggcgcacagaatttatctgagtctgctgctgtgaaggagatactgaaggagcaggaaaaccggaagggcctgatagccgccatctgtgcaggtcctactgctctgttggctcatgaaataggttgtggaagtaaagttacaacacaccctcttgctaaagacaaaatgatgaatggaggtcattacacctactctgagaatcgtgtggaaaaagacggcctgattcttacaagccgggggcctgggaccagcttcgagtttgcgcttgcaattgttgaagccctgaatggcaaggaggtggcggctcaagtgaaggctccacttgttcttaaagactagagcagcgaactgcgacgatcacttagagaaacaggccgttaggaatccattctcactgtgttcgctctaaacaaaacagtggtaggttaatgtgttcagaagtcgctgtccttactacttttgcggaagtatggaagtcacaactacacagagatttctcagcctacaaattgtgtctatacatttctaagccttgtttgcagaataaacagggcatttagcaaactaaaaaaaaaaaaaaaaaaactcgag

SEQ ID NO: 43 - protein, 189 aa, Homo sapiens
MASKRALVILAKGAEEMETVIPVDVMRRAGIKVTVAGLAGKDPVQCSRDVVICPDASLEDAKKEGPYDVVVLPGGNLGAQNLSESAAVKEILKEQENRKGLIAAICAGPTALLAHEIGCGSKVTTHPLAKDKMMNGGHYTYSENRVEKDGLILTSRGPGTSFEFALAIVEALNGKEVAAQVKAPLVLKD

SEQ ID NO: 44 - DNA, 638 bp, Homo sapiens
ctctaaagcgccgcagctgccaaaatgtctacaggtccaactgctgccactggcagtaatcgaagacttcagcagacacaaaatcaagtagatgaggtggtggacataatgcgagttaacgtggacaaggttctggaaagagaccagaagctctctgagttagacgaccgtgcagacgcactgcaggcaggcgcttctcaatttgaaacgagcgcagccaagttgaagaggaaatattggtggaagaattgcaagatgtgggcaatcgggattactgttctggttatcttcatcatcatcatcatcgtgtgggttgtctcttcatgaagaaccagcggaactcaaaactgctgttcaagaaacctcttcaagacttttgacttagaacctgctatattatcaagcttacctactgttatctctaaaattttttttgtgttaatgtaaagttgaatttctaggaaacgtgcctttgttttttaatatgcactccaaattagaaggccggccccgtccacattttgcacagtgcctttacagatttacgtatgggctgatgaagaggccttcttaagttccagagtgctataatctagatgtaatgttgtcactaattaattgccattactcccctttag

SEQ ID NO: 45 - protein, 100 aa, Homo sapiens
MSTGPTAATGSNRRLQQTQNQVDEVVDIMRVNVDKVLERDQKLSELDDRADALQAGASQFETSAAKLKRKYWWKNCKMWAIGITVLVIFIIIIIVWVVSS

SEQ ID NO: 46 - DNA, 1913 bp, Homo sapiens
gctgcgggtctttccctcactcgtcctccgcgcgtcgccgctcttcggttctgctctgtccgccgccatggcccaagctgacatcgcgctgatcggattggccgtcatgggccagaacttaattctgaacatgaatgaccacggctttgtggtctgtgcttttaataggactgtctccaaagttgatgatttcttggccaatgaggcaaagggaaccaaagtggtgggtgcccagtccctgaaagagatggtctccaagctgaagaagccccggcggatcatcctcctggtgaaggctgggcaagctgtggatgatttcatcgagaaattggtaccattgttggatactggtgacatcatcattgacggaggaaattctgaatatagggacaccacaagacggtgccgagacctcaaggccaagggaattttatttgtggggagcggagtcagtggtggagaggaaggggcccggtatggcccatcgctcatgccaggagggaacaaagaagcgtggccccacatcaagaccatcttccaaggcattgctgcaaaagtgggaactggagaaccctgctgtgactgggtgggagatgagggagcaggccacttcgtgaagatggtgcacaacgggatagagtatggggacatgcagctgatctgtgaggcataccacctgatgaaagacgtgctgggcatggcgcaggacgagatggcccaggcctttgaggattggaataagacagagctagactcattcctgattgaaatcacagccaatattctcaagttccaagacaccgatggcaaacacctgctgccaaagatcagggacagcgcggggcagaagggcacagggaagtggaccgccatctccgccctggaatacggcgtacccgtcaccctcattggagaagctgtctttgctcggtgcttatcatctctgaaggatgagagaattcaagctagcaaaaagctgaagggtccccagaagttccagtttgatggtgataagaaatcattcctggaggacattcggaaggcactctacgcttccaagatcatctcttacgctcaaggctttatgctgctaaggcaggcagccaccgagtttggctggactctcaattatggtggcatcgccctgatgtggagagggggctgcatcattagaagtgtattcctaggaaagataaaggatgcatttgatcgaaacccggaacttcagaacctcctactggacgacttctttaagtcagctgttgaaaactgccaggactcctggcggcgggcagtcagcactggggtccaggctggcattcccatgccctgttttaccactgccctctccttctatgacgggtacagacatgagatgcttccagccagcctcatccaggctcagcgggattacttcggggctcacacctatgaactcttggccaaaccagggcagtttatccacaccaactggacaggccatggtggcaccgtgtcatcctcgtcatacaatgcctgatcatgctgctcctgtcaccctccacgattccacagaccaggacattccatgtgcctcatggcactgccacctggccctttgccctattttctgttcagttttttaaaagtgttgtaagagactcctgaggaagacacacagtttatttgtaaagtagctctgtgagagccaccatgccctctgcccttgcctcttgggactgaccaggagctgctcatgtgcgtgagagtgggaaccatctccttgcggcagtggcttccgcgtgccccgtgtgctggtgcggttcccatcacgcagacaggaagggtgtttgcgcactctgatcaactggaacctctgtatcatgcggctgaattccctttttcctttactcaataaaagctacatcagactg

SEQ ID NO: 47 - protein, 483 aa, Homo sapiens
MAQADIALIGLAVMGQNLILNMNDHGFVVCAFNRTVSKVDDFLANEAKGTKVVGAQSLKEMVSKLKKPRRIILLVKAGQAVDDFIEKLVPLLDTGDIIIDGGNSEYRDTTRRCRDLKAKGILFVGSGVSGGEEGARYGPSLMPGGNKEAWPHIKTIFQGIAAKVGTGEPCCDWVGDEGAGHFVKMVHNGIEYGDMQLICEAYHLMKDVLGMAQDEMAQAFEDWNKTELDSFLIEITANILKFQDTDGKHLLPKIRDSAGQKGTGKWTAISALEYGVPVTLIGEAVFARCLSSLKDERIQASKKLKGPQKFQFDGDKKSFLEDIRKALYASKIISYAQGFMLLRQAATEFGWTLNYGGIALMWRGGCIIRSVFLGKIKDAFDRNPELQNLLLDDFFKSAVENCQDSWRRAVSTGVQAGIPMPCFTTALSFYDGYRHEMLPASLIQAQRDYFGAHTYELLAKPGQFIHTNWTGHGGTVSSSSYNA

SEQ ID NO: 48 - DNA, 1633 bp, Homo sapiens
cgccgctccggcctcccgcgacttctcgaaggtgggcaggtcccaccttgtggaggatggaggtgaccggggacgccggggtaccagaatctggcgagatccggactctaaagccgtgtctgctgcgccgcaactacagccgcgaacagcacggcgtggccgcctcctgcctcgaagacctgaggagcaaggcctgtgacattctggccattgataagtccctgacaccagtcacccttgtcctggcagaggatggcaccatagtggatgatgacgattactttctgtgtctaccttccaatactaagtttgtggcattggctagtaatgagaaatgggcatacaacaattcagatggaggtacagcttggatttcccaagagtcctttgatgtagatgaaacagacagcggggcagggttgaagtggaagaatgtggccaggcagctgaaagaagatctgtccagcatcatcctcctatcagaggaggacctccagatgcttgttgacgctccctgctcagacctggctcaggaactacgtcagagttgtgccaccgtccagcggctgcagcacacactccaacaggtgcttgaccaaagagaggaagtgcgtcagtccaagcagctcctgcagctgtacctccaggctttggagaaagagggcagcctcttgtcaaagcaggaagagtccaaagctgcctttggtgaggaggtggatgcagtagacacgggtatcagcagagagacctcctcggacgttgcgctggcgagccacatccttactgcactgagggagaagcaggctccagagctgagcttatctagtcaggatttggagttggttaccaaggaagaccccaaagcactggctgttgccttgaactgggacataaagaagacggagactgttcaggaggcctgtgagcgggagctcgccctgcgcctgcagcagacgcagagcttgcattctctccggagcatctcagcaagcaaggcctcaccacctggtgacctgcagaatcctaagcgagccagacaggatcccacatagcagcagcgggaagtgtgccaaggaagctctgtggcgttgtgttattggtagacaccctcagcctcatcatttgactacctatgtactactctaccccctgccttagagcaccttccagagaagctattccaggtctcaacatacgccgttccaccaattttttttttagccccaccagcttcaggacttctgccaattttgaatgatatagctgcaccaacaatatcccgcctcctctaattacatatgatgttctctgttcaaaagtaattggcagtgattggccaggcgcagtggctcacgcctgtaatcccagcactgggaggccgaggggggcggatcgtgaagtcaggagatcgagaccatcctggctaacatggtgaaaccctgtctctactaaaaatacaaaaaaaattagccagccatggtggcgggcgcctgtaatcccagctacttgggaggctgaggcaggagaatggcatgaacctgggaggcagagcttgcagtgagctgagattgcgccactgcactccagcctgggcaacagagcgagactccgtctcaaaaaaaaaaaaaaaaaa

SEQ ID NO: 49 - protein, 331 aa, Homo sapiens
MEVTGDAGVPESGEIRTLKPCLLRRNYSREQHGVAASCLEDLRSKACDILAIDKSLTPVTLVLAEDGTIVDDDDYFLCLPSNTKFVALASNEKWAYNNSDGGTAWISQESFDVDETDSGAGLKWKNVARQLKEDLSSIILLSEEDLQMLVDAPCSDLAQELRQSCATVQRLQHTLQQVLDQREEVRQSKQLLQLYLQALEKEGSLLSKQEESKAAFGEEVDAVDTGISRETSSDVALASHILTALREKQAPELSLSSQDLELVTKEDPKALAVALNWDIKKTETVQEACERELALRLQQTQSLHSLRSISASKASPPGDLQNPKRARQDPT

SEQ ID NO: 50 - DNA, 1238 bp, Homo sapiens
cggcggagctggtcccgttgtgctgcggcgccgcgcggcctgcagtcccgggcccgcgccccgcgccgcccgcccgcccgccatggagcccggccccgacggccccgccgcctccggccccgccgccatccgcgagggctggttccgcgagacctgcagcctgtggcccggccaggccctgtcgctgcaggtggagcagctgctccaccaccggcgctcgcgctaccaggacatcctcgtcttccgcagtaagacctatggcaacgtgctggtgttggacggtgtcatccagtgcacggagagagacgagttctcctaccaggagatgatcgccaacctgcctctctgcagccaccccaacccgcgaaaggtgctgatcatcgggggcggagatggaggtgtcctgcgggaggtggtgaagcacccctccgtggagtccgtggtccagtgtgagatcgacgaggatgtcatccaagtctccaagaagttcctgccaggcatggccattggctactctagctcgaaggtgaccctacatgtgggtgacggttttgagttcatgaaacagaatcaggatgccttcgacgtgatcatcactgactcctcagaccccatgggccccgccgaaagtctcttcaaggagtcctattaccagctcatgaagacagccctcaaggaagatggtgtcctctgctgccagggcgagtgcgagtggctgcacctggacctcatcaaggagatgcggcagttctgccagtccctgttccccgtggtggcctatgcctactgcaccatccccacctaccccagcggccagatcggcttcatgctgtgcagcaagaacccgagcacgaacttccaggagccggtgcagccgctgacacagcagcaggtggcgcagatgcagctgaagtactacaactccgacgtgcaccgcgccgcctttgtgctgcccgagtttgcccgcaaggccctgaatgatgtgagctgagcccaggcgccaccactgatgccacccaggacctcggaccttggagcctgcggggtgcctcggcccctccagccccgggccggacctcctgctggctctcgcccaccaaccaagtgttacaagccccagaatgctgcccggcctgccctgctgggcggactgtctgtgtgtctgtctctctggcgttccacctccaagcctataccagctgtgtacagcgccatctctctgccttctgttgcccccg

SEQ ID NO: 51 - protein, 302 aa, Homo sapiens
MEPGPDGPAASGPAAIREGWFRETCSLWPGQALSLQVEQLLHHRRSRYQDILVFRSKTYGNVLVLDGVIQCTERDEFSYQEMIANLPLCSHPNPRKVLIIGGGDGGVLREVVKHPSVESVVQCEIDEDVIQVSKKFLPGMAIGYSSSKVTLHVGDGFEFMKQNQDAFDVIITDSSDPMGPAESLFKESYYQLMKTALKEDGVLCCQGECEWLHLDLIKEMRQFCQSLFPVVAYAYCTIPTYPSGQIGFMLCSKNPSTNFQEPVQPLTQQQVAQMQLKYYNSDVHRAAFVLPEFARKALNDVS

SEQ ID NO: 52 - DNA, 777 bp, Homo sapiens
aggcgcaggcgcaggcgaggggctgggtggcggttgagacagcggcggtactgggaggcgtaggtgagggtcgcgaggctgcccgagcttctgagcgagcgcggtgcttttgggaacgcgggacgggcgatctgcggcgccaggagctgggccgaggcgcggcggcgcggctgccggctgccctgtgaatgggaagttacgcgaagtccacccagcgtttctgaggcaatctgaaggcaaatcctgtttagacccaggcgaaggttcccggtgacccgggctctcaccagccaattgtcccttgccgtcctcctgagggtgcctggagcttaagcactgtgtgctcttggcctccacactggggatgccgctgactcccactgtccagggcttccagtggattctccgaggccctgatgtagaaacttccccattgggtgcaccaagagcagcctcacatggtgtgggctgacatcaagagctgccagatccaacaggaagatggccaatctttcctaagctgctcaccttacaagaaaacgaatcgtactgctaagaattcaaacttcagcagtcatggggagccttggaaggagcccgaatcactgatggaattggacagtgcatggagatggttcagcaggacaagggtaagtgcaggggcaagtccaggtcatactgagagacaacgagtggcgctgacagagacagacaaagataaaatcaaaagtttgtgcttcatcttcaaaaactcaaactaataacaaacttggcctt

SEQ ID NO: 53 - protein, 35 aa, Homo sapiens
MPLTPTVQGFQWILRGPDVETSPLGAPRAASHGVG

SEQ ID NO: 54 - DNA, 1713 bp, Homo sapiens
ctgcgcccgcgacggaggcgcgcttcaaagcgcaggcgcggggagggggtgggggaggagggaaagcggcgagtaagatggaagatgaggaggtcgctgagagctgggaagaggcggcagacagcggggaaatccaaatctcctcccaaagtgcccattgtgattcaggacgatagccttcccgcggggccccctccacagatccgcatcctcaagaggcccaccagcaacggtgtggtcagcagccccaactccaccagcaggcccacccttccagtcaagtccctagcacagcgagaggccgagtacgccgaggcccggaagcggatcctgggcagcgccagccccgaggaggagcaggagaaacccatcctcgacaggccaaccaggatctcccaacccgaagacagcaggcagcccaataatgtgatcagacagcctttgggtcctgatgggtctcaaggcttcaaacagcgcagataaatgcaggcaagaaaagatgccgccgttgctgccgtcaccgcctcctgggtcgtccgccacgggttgcactgccgtggcagacagctggacttgagcagagggaacgacctgacttacttgcactgtgatcccccttgctccgcccactgtgaccttgaaccccatgcactgtgacctccccccttctcccccttcccactgtgattggcacatcgacaagggctgtcccaagtcaatggaaagggaaagggtgggggttaggggaaggttggggggacccagcaaggactcagagagtcagacagtgccacttggccacttggggtaaagccagtgccagcaataacagtttatcatgctcattaatttgggatttcaaaacacaaatgaaaactcacacccacccacccccaagtgcatgtctccatcacttaaaaagtaagttccatttgaaaatatcctttcttttttttttcttcctatttttgtttgtttatacaaatatctgatttgcaagaaaaagtgcatgggaggggttttagtggtttaatgaatttttaattaagaaagggtagtttggtagtctacttaaaaatgtttctgggaaattcactagaaacattaaccaataggattttggtgagcttagcttctgtattcctactgccgcccagaaaaggggcagggctctgcagccgccaggacagacgagcaccccatgcctatacctccctccccgagctaagtcccagggcatctgggccttgcctggagactgggctagctctgtaggctcggagagcctggggagggtgccaaccccacctctagtattttgggagatagggaaagtgaaccgacttccccttcccatacccctcagggtggttccctaccagccaggcttactacttctagaagaaagcagagtgccagggagtgagattgcatccctgggcttagaagtgacggagagaagacttgtttagtattttgccatcagcacaaggaaaaccaggagagagtctgcctccaggactctgagccttctgcctcgtatgttcagaaggtggataggtcttcccactccagcatggcttgaactcttaggggtctgcagtgctccatctccattggtggccccagctcagtaactatacctggtacatttcctgtgtgcaatcagtaccttgaaggcagaacattctgaataaagttggaaaaagaaca

SEQ ID NO: 55 - DNA, 2779 bp, Homo sapiens
ccacctggcactgcccaccaccctgtagcagtgtgccagcaggagagtctgtcctttgcagagctgcccgccctgaagcccccgagcccagtgtgtctggaccttttccctgttgccccagaggagcttcgggctcctggcagccgctggtccctggggacccctgcccctctccaagggttgctatggccattatccccaggaggctcagatacagagatcaccagcggggggatgcggcccagcagggctggcagctggccacactgtcctggtgcccagcccccagctctggagggaccctggagtccccgacacacacagccacagcgccgggccagccacggctcggagaagaagtctgcctggcgcaagatgcgggtgtaccagcgtgaagaggtccccggctgccccgaggcccacgctgtcttcctagagcctggccaggtagtgcaagagcaggccctgagcacagaggagcccagggtggagttgtctgggtccacccgagtgagcctcgaaggtcctgagcggaggcgcttctcggcatcggagctgatgacccggctgcactcttctctgcgcctggggcggaattcagcagcccgggcactcatctctgggtcaggcaccggagcagcccgggaagggaaagcatctggaatggaggctcgaagtgtagagatgagcggggaccgggtgtcgcggccagcccctggtgactcacgagagggcgattggtccgagcccaggctagacacacaggaagagccgcctttggggtccaggagcaccaacgagcggcgccagtctcgattcctccttaactccgtcctctatcaggaatacagcgacgtggccagcgcccgcgaactgcggcggcagcagcgcgaggaggagggcccgggggacgaggccgagggcgcagaggaggggccggggccgccgcgggccaacctctcccccagcagctccttccgggcgcagcgctcggcgcgaggctccaccttctcgctgtggcaggatatccccgacgtacgcggcagcggcgtcctggccacgctgagcctgcgggactgcaagctgcaggaggccaagtttgagctgatcacctccgaggcctcctacatccacagcctgtcggtggctgtgggccacttcttaggctctgccgagctgagcgagtgtctgggggcgcaggacaagcagtggctgttttccaaactgcccgaggtcaagagcaccagcgagaggttcctgcaggacctggagcagcggctggaggcagatgtgctgcgcttcagcgtgtgcgacgtggtgctggaccactgcccggccttccgcagagtctacctgccctatgtcaccaaccaggcctaccaggagcgcacctaccagcgcctgctcctggagaaccccaggttccctggcatcctggctcgcctggaggagtctcctgtgtgccagcgtctgccccttacctccttccttatcctgcccttccagaggatcacccgcctcaagatgttggtggagaacatcctgaagcggacagcacagggctctgaagacgaagacatggccaccaaggccttcaatgcgctcaaggagctggtgcaggagtgcaatgctagtgtacagtccatgaagaggacagaggaactcatccacctgagcaagaagatccactttgagggcaagattttcccgctgatctctcaggcccgctggctggttcggcatggagagttggtagagctggcaccactgcctgcagcaccccctgccaagctgaagctgtccagcaaggcagtctacctccacctcttcaatgactgcttgctgctctctcggcggaaggagctagggaagtttgccgttttcgtccatgccaagatggctgagctgcaggtgcgggacctgagcctgaagctgcagggcatccccggccacgtgttcctcctccagctcctccacgggcagcacatgaagcaccagttcctgctgcgggcccggacggaaagtgagaagcagcgatggatctcagccttgtgcccctccagcccccaggaggacaaggaggtcatcagtgagggggaagattgcccccaggttcagtgtgttaggacatacaaggcactgcacccagatgagctgaccttggagaagactgacatcctgtcagtgaggacctggaccagtgacggctggctggaaggggtccgcctggcagatggtgagaaggggtgggtgccccaggcctatgtggaagagatcagcagcctcagcgcccgcctccgaaacctccgggagaataagcgagtcacaagtgccaccagcaaactgggggaggctcctgtgtgatgggcagccatggcctaggaccccacctccatgcctggctcctggatggtcctggaggggcctgcagtgtctccattccccaagctgctcctgctggcacttcgcttctgtggccttggcattgagggcacaggctggacacaggaatgggggcgcctccagagggtctctccgtcctcatgctcctcagtgtccacacttcaaggccaaggatagtttcttcctctgacatggggaccataacaggtgatcactgatacctggcaaagactggggccctctcctttctatgtcctcaatcctgcctgactcttggtccttctggcagggacctggctggggaacgttctggtgctgatggtgctgggacctatatgtatatttatatatatctggggtcttgtctaccacctcc

SEQ ID NO: 56 - protein, 802 aa, Homo sapiens
MDCGPPATLQPHLTGPPGTAHHPVAVCQQESLSFAELPALKPPSPVCLDLFPVAPEELRAPGSRWSLGTPAPLQGLLWPLSPGGSDTEITSGGMRPSRAGSWPHCPGAQPPALEGPWSPRHTQPQRRASHGSEKKSAWRKMRVYQREEVPGCPEAHAVFLEPGQVVQEQALSTEEPRVELSGSTRVSLEGPERRRFSASELMTRLHSSLRLGRNSAARALISGSGTGAAREGKASGMEARSVEMSGDRVSRPAPGDSREGDWSEPRLDTQEEPPLGSRSTNERRQSRFLLNSVLYQEYSDVASARELRRQQREEEGPGDEAEGAEEGPGPPRANLSPSSSFRAQRSARGSTFSLWQDIPDVRGSGVLATLSLRDCKLQEAKFELITSEASYIHSLSVAVGHFLGSAELSECLGAQDKQWLFSKLPEVKSTSERFLQDLEQRLEADVLRFSVCDVVLDHCPAFRRVYLPYVTNQAYQERTYQRLLLENPRFPGILARLEESPVCQRLPLTSFLILPFQRITRLKMLVENILKRTAQGSEDEDMATKAFNALKELVQECNASVQSMKRTEELIHLSKKIHFEGKIFPLISQARWLVRHGELVELAPLPAAPPAKLKLSSKAVYLHLFNDCLLLSRRKELGKFAVFVHAKMAELQVRDLSLKLQGIPGHVFLLQLLHGQHMKHQFLLRARTESEKQRWISALCPSSPQEDKEVISEGEDCPQVQCVRTYKALHPDELTLEKTDILSVRTWTSDGWLEGVRLADGEKGWVPQAYVEEISSLSARLRNLRENKRVTSATSKLGEAPV

SEQ ID NO: 57 - DNA, 3919 bp, Homo sapiens
gaagttgcgcgcaggccggcgggcgggagcggacaccgaggccggcgtgcaggcgtgcgggtgtgcgggagccgggctcggggggatcggaccgagagcgagaagcgcggcatggagctccaggcagcccgcgcctgcttcgccctgctgtggggctgtgcgctggccgcggccgcggcggcgcagggcaaggaagtggtactgctggactttgctgcagctggaggggagctcggctggctcacacacccgtatggcaaagggtgggacctgatgcagaacatcatgaatgacatgccgatctacatgtactccgtgtgcaacgtgatgtctggcgaccaggacaactggctccgcaccaactgggtgtaccgaggagaggctgagcgtatcttcattgagctcaagtttactgtacgtgactgcaacagcttccctggtggcgccagctcctgcaaggagactttcaacctctactatgccgagtcggacctggactacggcaccaacttccagaagcgcctgttcaccaagattgacaccattgcgcccgatgagatcaccgtcagcagcgacttcgaggcacgccacgtgaagctgaacgtggaggagcgctccgtggggccgctcacccgcaaaggcttctacctggccttccaggatatcggtgcctgtgtggcgctgctctccgtccgtgtctactacaagaagtgccccgagctgctgcagggcctggcccacttccctgagaccatcgccggctctgatgcaccttccctggccactgtggccggcacctgtgtggaccatgccgtggtgccaccggggggtgaagagccccgtatgcactgtgcagtggatggcgagtggctggtgcccattgggcagtgcctgtgccaggcaggctacgagaaggtggaggatgcctgccaggcctgctcgcctggattttttaagtttgaggcatctgagagcccctgcttggagtgccctgagcacacgctgccatcccctgagggtgccacctcctgcgagtgtgaggaaggcttcttccgggcacctcaggacccagcgtcgatgccttgcacacgacccccctccgccccacactacctcacagccgtgggcatgggtgccaaggtggagctgcgctggacgccccctcaggacagcgggggccgcgaggacattgtctacagcgtcacctgcgaacagtgctggcccgagtctggggaatgcgggccgtgtgaggccagtgtgcgctactcggagcctcctcacggactgacccgcaccagtgtgacagtgagcgacctggagccccacatgaactacaccttcaccgtggaggcccgcaatggcgtctcaggcctggtaaccagccgcagcttccgtactgccagtgtcagcatcaaccagacagagccccccaaggtgaggctggagggccgcagcaccacctcgcttagcgtctcctggagcatccccccgccgcagcagagccgagtgtggaagtacgaggtcacttaccgcaagaagggagactccaacagctacaatgtgcgccgcaccgagggtttctccgtgaccctggacgacctggccccagacaccacctacctggtccaggtgcaggcactgacgcaggagggccagggggccggcagcaaggtgcacgaattccagacgctgtccccggagggatctggcaacttggcggtgattggcggcgtggctgtcggtgtggtcctgcttctggtgctggcaggagttggcttctttatccaccgcaggaggaagaaccagcgtgcccgccagtccccggaggacgtttacttctccaagtcagaacaactgaagcccctgaagacatacgtggacccccacacatatgaggaccccaaccaggctgtgttgaagttcactaccgagatccatccatcctgtgtcactcggcagaaggtgatcggagcaggagagtttggggaggtgtacaagggcatgctgaagacatcctcggggaagaaggaggtgccggtggccatcaagacgctgaaagccggctacacagagaagcagcgagtggacttcctcggcgaggccggcatcatgggccagttcagccaccacaacatcatccgcctagagggcgtcatctccaaatacaagcccatgatgatcatcactgagtacatggagaatggggccctggacaagttccttcgggagaaggatggcgagttcagcgtgctgcagctggtgggcatgctgcggggcatcgcagctggcatgaagtacctggccaacatgaactatgtgcaccgtgacctggctgcccgcaacatcctcgtcaacagcaacctggtctgcaaggtgtctgactttggcctgtcccgcgtgctggaggacgaccccgaggccacctacaccaccagtggcggcaagatccccatccgctggaccgccccggaggccatttcctaccggaagttcacctctgccagcgacgtgtggagctttggcattgtcatgtgggaggtgatgacctatggcgagcggccctactgggagttgtccaaccacgaggtgatgaaagccatcaatgatggcttccggctccccacacccatggactgcccctccgccatctaccagctcatgatgcagtgctggcagcaggagcgtgcccgccgccccaagttcgctgacatcgtcagcatcctggacaagctcattcgtgcccctgactccctcaagaccctggctgactttgacccccgcgtgtctatccggctccccagcacgagcggctcggagggggtgcccttccgcacggtgtccgagtggctggagtccatcaagatgcagcagtatacggagcacttcatggcggccggctacactgccatcgagaaggtggtgcagatgaccaacgacgacatcaagaggattggggtgcggctgcccggccaccagaagcgcatcgcctacagcctgctgggactcaaggaccaggtgaacactgtggggatccccatctgagcctcgacagggcctggagccccatcggccaagaatacttgaagaaacagagtggcctccctgctgtgccatgctgggccactggggactttatttatttctagttctttcctccccctgcaacttccgctgaggggtctcggatgacaccctggcctgaactgaggagatgaccagggatgctgggctgggccctctttccctgcgagacgcacacagctgagcacttagcaggcaccgccacgtcccagcatccctggagcaggagccccgccacagccttcggacagacatatgggatattcccaagccgaccttccctccgccttctcccacatgaggccatctcaggagatggagggcttggcccagcgccaagtaaacagggtacctcaagccccatttcctcacactaagagggcagactgtgaacttgactgggtgagacccaaagcggtccctgtccctctagtgccttctttagaccctcgggccccatcctcatccctgactggccaaacccttgctttcctgggcctttgcaagatgcttggttgtgttgaggtttttaaatatatattttgtactttgtggagagaatgtgtgtgtgtggcagggggccccgccagggctggggacagagggtgtcaaacattcgtgagctggggactcagggaccggtgctgcaggagtgtcctgcccatgccccagtcggccccatctctcatccttttggataagtttctattctgtcagtgttaaagattttgttttgttggacatttttttcgaatcttaatttattattttttttatatttattgttagaaaatgacttatttctgctctggaataaagttgcagatgattcaaaccg

SEQ ID NO: 58 - DNA, 836 bp, Homo sapiens
ggtgggctgtaggaatgaggaggaacttagggagaaacagctagtggggaggtagggcctgggggagccgccccttgccccaagagaaggagccagaacccccggatctgcatgcaaggcctgctccatgcctcgctcacagcagcccatcccacagcccgccccggtggggcaggcaacatcaagaccctaggagacgcctatgagtttgcggtggacgtgagagacttctcacctgaagacatcattgtcaccacctccaacaaccacatcgaggtgcgggctgagaagctggcggctgacggcaccgtcatgaacaccttcgctcacaagtgccagctgccggaggacgtggacccgacgtcggtgacctcggctctgcgggaggacggcagcctcactatccgggcacggcgtcacccgcatacagaacacgtccagcagaccttccggacggagatcaaaatctgagtgcctctcccttccctttccctgtccccccgccccacgcctgccagcaaagcctcgctaaccccattacaacagctccaggacatctcagcccaggttctagcccccacgcaccccagaccccaggtggaccatcctcccaaactagggccctccactctatccagggcaggccagggactccctggcctgacacatgatgcccagatttcagatttggcctccgtcacttaatccagagtacaggggctggggtcagggaaggaagatctaaagaacccactgtgggtcaggggaatgggaccagcaggacatatgggcaagctctgcaggacagacaggcagacaaaccctctgatctatga

SEQ ID NO: 59 - DNA, 497 bp, Homo sapiens
gctcgtgttaaatctagaaccgtagccagacatgggactggaggacgagcaaaagatgcttaccgaatccggagatcctgaggaggaggaagaggaagaggaggaattagtggatcccctaacaacagtgagagagcaatgcgagcagttggagaaatgtgtaaaggcccgggagcggctagagctctatgatgagcatgtatcctctcgatcacatacagaagaggattgcacggaggagctctttgacttcttgcatgcaaaggaccattgcgtggcccacaaactctttaacaacttgaaataaatgtgtggacttaattcaccccagccttcatcatctgggcatcagaatatttccttatggtttcggatgtaccatttgtttcttatttgtgtaactgtaagttcacatgaacctcgtgggttttggcttaggctggtagcttctatgtaattcgcagtgattccatctaaataaaagttctgtgatctgc

SEQ ID NO: 60 - DNA, 979 bp, Homo sapiens
cttacagaactcccacggacacaccatgataaggacgctgctgctgtccactttggtggctggagccctcagttgtggggaccccacttacccaccttatgtgactagggtggttggcggtgaagaagcgaggcccaacagctggccctggcaggtctccctgcagtacagctccaatggcaagtggtaccacacctgcggagggtccctgatagccaacagctgggtcctgacggctgcccactgcatcagctcctccaggacctaccgcgtggggctgggccggcacaacctctacgttgcggagtccggctcgctggcagtcagtgtctctaagattgtggtgcacaaggactggaactccaaccaaatctccaaagggaacgacattgccctgctcaaactggctaaccccgtctccctcaccgacaagatccagctggcctgcctccctcctgccggcaccattctacccaacaactacccctgctacgtcacgggctggggaaggctgcagaccaacggggctgttcctgatgtcctgcagcagggccggttgctggttgtggactatgccacctgctccagctctgcctggtggggcagcagcgtgaaaaccagtatgatctgtgctgggggtgatggcgtgatctccagctgcaacggagactctggcgggccactgaactgtcaggcgtctgacggccggtggcaggtgcacggcatcgtcagcttcgggtctcgcctcggctgcaactactaccacaagccctccgtcttcacgcgggtctccaattacatcgactggatcaattcggtgattgcaaataactaaccaaaagaagtccctgggactgtttcagacttggaaaggtcacagaaggaaaataatataataaagtgacaactatgcaaaaaaaaaaaaaaaaaaaaaaaaaaaaaaaaaaataaaaaaaaaaaaaaaaaaaaaaaaaaaaaa

SEQ ID NO: 61 - protein, 269 aa, Homo sapiens
MIRTLLLSTLVAGALSCGDPTYPPYVTRVVGGEEARPNSWPWQVSLQYSSNGKWYHTCGGSLIANSWVLTAAHCISSSRTYRVGLGRHNLYVAESGSLAVSVSKIVVHKDWNSNQISKGNDIALLKLANPVSLTDKIQLACLPPAGTILPNNYPCYVTGWGRLQTNGAVPDVLQQGRLLVVDYATCSSSAWWGSSVKTSMICAGGDGVISSCNGDSGGPLNCQASDGRWQVHGIVSFGSRLGCNYYHKPSVFTRVSNYIDWINSVIANN

SEQ ID NO: 62 - DNA, 2277 bp, Homo sapiens
cggacgcgtgggcccggccaaggcgagtgccgcgcgggccaccatggccacggacgagctggccaccaagctgagccggcggctgcagatggagggcgagggcggcggcgagaccccggagcagcccgggctgaacggggcagcggcggcggcggcgggggcacccgacgaggcggccgaggcgctgggcagcgcggactgcgagctgagcgccaagctgctgcggcgcgcagacctcaaccagggcatcggcgagccccagtcgcccagccgccgcgtcttcaacccctacaccgagttcaaggagttctccaggaagcagatcaaggacatggagaagatgttcaagcagtatgatgccgggcgggacggcttcatcgacctgatggagctaaaactcatgatggagaaacttggggcccctcagacccacctgggcctgaaaaacatgatcaaggaggtggatgaggactttgacagcaagctgagcttccgggagttcctcctgatcttccgcaaggcggcggccggggagcttcaggaggacagcgggctgtgcgtgctggcccgcctctctgagatcgacgtctccagtgagggtgtcaagggggccaagagcttctttgaggccaaggtccaggccatcaacgtgtccagccgcttcgaggaggagatcaaggcagagcaggaggaaaggaagaagcaggcggaggagatgaagcagcggaaagcggccttcaaggagctgcagtccacctttaagtagcgggggctgcagccgaccgccctgctccggccccagtgtggtgggcgagggtggcgcatgggaggccgagcctgaatccttgcctgtgtctgacgggaccactactaaaaacctaaaaatatctgtgaatggagcaagttcaggggtcttatggaggtggcccggcccctccccgctcccttccactctgcacgaggccgccacaccggcgctggctccctgcccggcccggccctccctggcaatccctgggctctcttgcacccctaactgccccctgcctgctccggcactgccccaggcccagctcctggccctaggtccctcccagccccatgtgcctgccgcctgccctccacacatccctgtccccccaacccgggaacccctgccctcctccagcaggccgcaccgcccctggggccccctgccagccccttcccaggctgggagacagcagaagagatagaatcagggctgcccccacagagtgggacccaaggggctaattggaggcacgaggggacccctccccagggccttttcctcctctgcgtcttccatctactgaaatgggagagggggtggggagcttctgttctggtgaagggacccgggcaggcccccagcaccccatgctgacttggagaaccccagatctctggggcccagccaggcagggtgtgggggcagctgtgccaatctacctcacaggcccaccccctgccgggcatgccgtgggatcatgggcagggaaggctctgggggtcggagacaccgctgcttagcacccccagccagaacaccctgagggtctcggggctctggagagagtggggcgggaggaagaattggcaccttcctagggaaggagacgagcgcttcgccttgattctccgagaagcctccgagaagtgctttaagtgtgtttgcatgcgccaggcggtgggcagcgggggcctgtccagccctctcccgccatccttccccaagtgacgtccactgccttgtcaccagcgacctgcctgtcatgcccaccccctgaggaagcatggggaccctaacaccctggtgccctgcaccagacaggccgtggtcaggcccaggccaccggccgggttctgccacagcttcccacgtgcttgctgacatgcgtgtgcctgtgtgtggtgtctgttgctgtgtcgtgaaactgtgaccatcactcagtccaaacaagtgagtggccctcgaggccacagttatgcaactttcagtgtgtgtcataacgacgtcactgctttttaaactcgataactctttattttagtaaaatgcccaggagtcctggaagctacgcggacttgcagaggttttattttttggccttagaatctgcagaaattaggaggcaccgagcccagcgcagcagcctcggacccggattgcgtttgccttagcggatatgtttatacagatgaatataaaatgtttttttctttgggaaaaaaaaaaaaaaaaaaaaaaaaaaa

SEQ ID NO: 63 - protein, 240 aa, Homo sapiens
MATDELATKLSRRLQMEGEGGGETPEQPGLNGAAAAAAGAPDEAAEALGSADCELSAKLLRRADLNQGIGEPQSPSRRVFNPYTEFKEFSRKQIKDMEKMFKQYDAGRDGFIDLMELKLMMEKLGAPQTHLGLKNMIKEVDEDFDSKLSFREFLLIFRKAAAGELQEDSGLCVLARLSEIDVSSEGVKGAKSFFEAKVQAINVSSRFEEEIKAEQEERKKQAEEMKQRKAAFKELQSTFK

SEQ ID NO: 64 - DNA, 1130 bp, Homo sapiens
gcctcccacttggttgctcgtacgcggctagtgggtcctcagtggatgtaggctgggcgccgcgatgttcgacgggacaccggcggagagcgacctcggggttaaggggtggggctgacgtcaggagccaagatggcggcggtggtcgccctctccttgaggcgccggttgccggccacaacccttggcggagcctgcctgcaggcctcccgaggagcccagacagctgcagccacagctccccgtatcaagaaatttgccatctatcgatgggacccagacaaggctggagacaaacctcatatgcagacttatgaagttgaccttaataaatgtggccccatggtattggatgctttaatcaagattaagaatgaagttgactctactttgaccttccgaagatcatgcagagaaggcatctgtggctcttgtgcaatgaacatcaatggaggcaacactctagcttgcacccgaaggattgacaccaacctcaataaggtctcaaaaatctaccctcttccacacatgtatgtgataaaggatcttgttcccgatttgagcaacttctatgcacagtacaaatccattgagccttatttgaagaagaaggatgaatctcaggaaggcaagcagcagtatctgcagtccatagaagagcgtgagaaactggacgggctctacgagtgcattctctgtgcctgctgtagcaccagctgccccagctactggtggaacggagacaaatatctggggcctgcagttcttatgcaggcctatcgctggatgattgactccagagatgacttcacagaggagcgcctggccaagctgcaggacccattctctctataccgctgccacaccatcatgaactgcacaaggacctgtcctaagggtctgaatccagggaaagctattgcagagatcaagaaaatgatggcaacctataaggagaagaaagcttcagtttaactgtttccatgctaaacatgatttataaccagctcagagctgaacataatttatatctaatttgagttcctttaaagatcttggttttccatgaatacagcatgtataataaaaattttaagaaataaatgttattctactttattaacaaaaaa

SEQ ID NO: 65 - protein, 280 aa, Homo sapiens
MAAVVALSLRRRLPATTLGGACLQASRGAQTAAATAPRIKKFAIYRWDPDKAGDKPHMQTYEVDLNKCGPMVLDALIKIKNEVDSTLTFRRSCREGICGSCAMNINGGNTLACTRRIDTNLNKVSKIYPLPHMYVIKDLVPDLSNFYAQYKSIEPYLKKKDESQEGKQQYLQSIEEREKLDGLYECILCACCSTSCPSYWWNGDKYLGPAVLMQAYRWMIDSRDDFTEERLAKLQDPFSLYRCHTIMNCTRTCPKGLNPGKAIAEIKKMMATYKEKKASV

SEQ ID NO: 66 - DNA, 3186 bp, Homo sapiens
agtgttggggttggcggccacagctaagtccaacaccagcatgtcgctgcagagaatcgtgcgtgtgtccctggagcatcccaccagcgcggtgtgtgtggctggcgtggagaccctcgtggacatttatgggtcagtgcctgagggcacagaaatgtttgaggtctatgggacgcctggcgtggacatctacatctctcccaacatggagaggggccgggagcgtgcagacaccaggcggtggcgctttgacgcgactttggagatcatcgtggtcatgaactcccccagcaatgacctcaacgacagccatgttcagatttcctaccactccagccatgagcctctgcccctggcctatgcggtgctctacctcacctgtgttgacatctctctggattgcgacctgaactgtgagggaaggcaggacaggaactttgtagacaagcggcagtgggtctgggggcccagtgggtatggcggcatcttgctggtgaactgtgaccgtgatgatccgagctgtgatgtccaggacaattgtgaccagcacgtgcactgcctgcaagacctggaagacatgtctgtcatggtcctgcggacgcagggccctgcagccctctttgatgaccacaaacttgtcctccatacctccagctatgatgccaaacgggcacaggtcttccacatctgcggtcctgaggatgtgtgtgaggcctataggcatgtgctgggccaagataaggtgtcctatgaggtaccccgcttgcatggggatgaggagcgcttcttcgtggaaggcctgtccttccctgatgccggcttcacaggactcatctccttccatgtcactctgctggacgactccaacgaggatttctcggcatcccctatcttcactgacactgtggtgttccgagtggcaccctggatcatgacgcccagcactctgccacccctagaggtgtatgtgtgccgtgtgaggaacaacacgtgttttgtggatgcggtggcagagctggccaggaaggccggctgcaagctgaccatctgcccacaggccgagaaccgcaacgaccgctggatccaggatgagatggagctgggctacgttcaggcgccgcacaagaccctcccggtggtctttgactccccaaggaatggggaactgcaggatttcccttacaaaagaatcctgggtccagattttggttacgtgactcgggaaccacgcgacaggtctgtgagtggcctggactcctttgggaacctggaggtcagccctccagtggtggccaatgggaaagagtaccccctggggaggatcctcattgggggcaacctgcctgggtcaagtggccgcagggtcacccaggtggtgcgggacttcctccatgcccagaaggtgcagccccccgtggagctctttgtggactggttggccgtgggccatgtggatgagtttctgagctttgtccctgcccccgatgggaagggcttccggatgctcctggccagccctggggcctgcttcaagctcttccaggaaaagcagaagtgtggccacgggagggccctcctgttccagggggttgttgatgatgagcaggtcaagaccatctccatcaaccaggtgctctccaataaagacctcatcaactacaataagtttgtgcagagctgcatcgactggaaccgtgaggtgctgaagcgggagctgggcctggcagagtgtgacatcattgacatcccacagctcttcaagaccgagaggaaaaaagcaacggccttcttccctgacttggtgaacatgctggtgctggggaagcacctgggcatccccaagccctttgggcccatcatcaatggctgctgctgcctggaggagaaggtgcggtccctgctggagccgctgggcctccactgcaccttcattgatgacttcactccataccacatgctgcatggggaggtgcactgtggcaccaatgtgtgcagaaagcccttctctttcaagtggtggaacatggtgccctgagacagctcccacccaccatcctgtccccctggggcgggcattggcccaggtggtggagacagagacaggcccctgaacgataagcaccaagagaccccaaggctccagatggaacactgagggtgaccgtccctctcagaagccttttccctggaagtgtccatgcctcacctgcaacccatgtggttctcagacttgaatcttctcggccccccaaaaagaaggacctcatttcttatagcctctcctgtgattcaacacaacccatggagatgtccccttctcactctgaaatcatccatttggggacaaatccacattggggtctagaaacatccacgtatctcatcagccatcttgtcctgtgcatcctaacagaggaaggatccatgattctgctttggtccaattgcttcctctctgcagaggaacaaccctaaaaccagaccactccacgcaggacaggcaggagagattcttcctaaagcctcccccataaaaagggagctgtggatccacttagatcagggcggaaccatctttcacccggccaagctcctgcccagatgttgaccctcacccagcgtgagctgtcacatagtaggagcttctagatgcatgtggaagcaatgagagttgtcccttagccttataaactccccatgatctgacatgcagaaatccagccttgtccagaatcctcctggaatttcttggagacgaaagtatctgggggattgttgggtactagggagactgggtacaagggtgaaaagtagttcccataatacacatggttgactatggtgatccaccttgtgatggttaatattaggtgtctggagaaggttgcttcattggccctgggacttctctctgcaggaggagagaacgctgcctctcctctggattggtctcaggctctctgttggcctttggtcagcgtttccacatcctgctctgctgcaggagagggggctaaggggctggatccaccaaggcagctcacagcgggaaaactctgggaatgaaccactgaattcaggggatgggggtgggggggcggttctcgaggtgtgtgccagctacacgtgtgttctgtatgggtccagctgcgtttccatcactcgctaataaatcaacagaaacac

SEQ ID NO: 67 - DNA, 2263 bp, Homo sapiens
agccagagggacgagctagcccgacgatggcccaggggacattgatccgtgtgaccccagagcagcccacccatgccgtgtgtgtgctgggcaccttgactcagcttgacatctgcagctctgcccctgaggactgcacgtccttcagcatcaacgcctccccaggggtggtcgtggatattgcccacggccctccagccaagaagaaatccacaggttcctccacatggcccctggaccctggggtagaggtgaccctgacgatgaaagtggccagtggtagcacaggcgaccagaaggttcagatttcatactacggacccaagactccaccagtcaaagctctactctacctcaccggggtggaaatctccctgtgcgcagacatcacccgcaccggcaaagtgaagccaaccagagctgtgaaagatcagaggacctggacctggggcccttgtggacagggtgccatcctgctggtgaactgtgacagagacaatctcgaatcttctgccatggactgcgaggatgatgaagtgcttgacagcgaagacctgcaggacatgtcgctgatgaccctgagcacgaagacccccaaggacttcttcacaaaccatacactggtgctccacgtggccaggtctgagatggacaaagtgagggtgtttcaggccacacggggcaaactgtcctccaagtgcagcgtagtcttgggtcccaagtggccctctcactacctgatggtccccggtggaaagcacaacatggacttctacgtggaggccctcgctttcccggacaccgacttcccggggctcattaccctcaccatctccctgctggacacgttcaacctggagctccccgaggctgtggtgttccaagacagcgtggtcttccgcgtggcgccctggatcatgacccccaacacccagcccccgcaggaggtgtacgcgtgcagtatttttgaaaatgaggacttcctgaagtcagtgactactctggccatgaaagccaagtgcaagctgaccatctgccctgaggaggagaacatggatgaccagtggatgcaggatgaaatggagatcggctacatccaagccccacacaaaacgctgcccgtggtcttcgactctccaaggaacagaggcctgaaggagtttcccatcaaacgcgtgatgggtccagattttggctatgtaactcgagggccccaaacagggggtatcagtggactggactcctttgggaacctggaagtgagccccccagtcacagtcaggggcaaggaatacccgctgggcaggattctcttcggggacagctgttatcccagcaatgacagccggcagatgcaccaggccctgcaggacttcctcagtgcccagcaggtgcaggcccctgtgaagctctattctgactggctgtccgtgggccacgtggacgagttcctgagctttgtgccagcacccgacaggaagggcttccggctgctcctggccagccccaggtcctgctacaaactgttccaggagcagcagaatgagggccacggggaggccctgctgttcgaagggatcaagaaaaaaaaacagcagaaaataaagaacattctgtcaaacaagacattgagagaacataattcatttgtggagagatgcatcgactggaaccgcgagctgctgaagcgggagctgggcctggccgagagtgacatcattgacatcccgcagctcttcaagctcaaagagttctctaaggcggaagcttttttccccaacatggtgaacatgctggtgctagggaagcacctgggcatccccaagcccttcgggcccgtcatcaacggccgctgctgcctggaggagaaggtgtgttccctgctggagccactgggcctccagtgcaccttcatcaacgacttcttcacctaccacatcaggcatggggaggtgcactgcggcaccaacgtgcgcagaaagcccttctccttcaagtggtggaacatggtgccctgagcccatcttccctggcgtcctctccctcctggccagatgtcgctgggtcctctgcagtgtggcaagcaagagctcttgtgaatattgtggctccctgggggcggccagccctcccagcagtggcttgctttcttctcctgtgatgtcccagtttcccactctgaagatcccaacatggtcctagcactgcacactcagttctgctctaagaagctgcaataaagtttttttaagtcactttgtac

SEQ ID NO: 68 - DNA, 4025 bp, Homo sapiens
ggaagctcgtatttacattttaagtgtatctggtgagtgggctggagccctcgtctgggccggaaaaaaaaaagccctccgatccgtcttttagttgcttctcttccttttttctctccggtttctcatcactccaaccagccgcgaccatgcccaggaagaaggcggcggcggcggcctgggaggagccgagctcgggcaacggcactgcccgcgccgggcccaggaaacgcggcggcccggcgggcaggaagcgcgagcggcccgagcgctgcagtagcagcagcggcggcggcagcagcggcgacgaggacggcctggagctcgacggggcccccggcgggggcaagcgcgcggcgcggccggcgacagcaggcaaggcgggcggcgcggccgtggtcatcaccgaacccgagcacaccaaggagcgcgtcaaacttgaagggtcaaagtgcaaagggcagcttttgatttttggggcaaccaactgggacttgattggtcgaaaagaagtgcctaaacagcaagctgcttaccgcaatctcggtcagaatttgtgggggccccacagatatgggtgcctggcgggggtccgggtgcggacagtggtctcgggctcgtgtgctgcacacagcctcctcatcaccacggaagggaagctgtggagctggggtcgaaatgagaaggggcagctgggacatggtgacaccaagagagtagaagcccctagactcatcgagggtcttagccacgaagtgattgtgtctgcagcatgtgggcggaaccacaccttggccttgacggaaacgggctccgtgtttgcgtttggggaaaacaagatggggcagctgggccttggcaaccagacagacgctgttcccagccccgcgcagataatgtacaacggccagccaattaccaaaatggcctgtggggctgaattcagtatgataatggactgcaaaggaaacctctattcctttgggtgccctgaatatggtcagctgggacacaactcagatgggaagttcatcgcccgggcacagcggatagagtacgactgtgaactagttccccggcgagtggccatcttcattgagaagacgaaagatggacagattctgcctgtaccaaacgtggttgtacgagacgtggcctgtggcgctaaccacacgctggtcctggactcccagaagcgagtcttctcctggggctttggtggctatggccggctgggccacgcagagcagaaggatgagatggtcccccgcctggtgaagctgtttgacttccctgggcgtggggcttcccagatctatgctggttacacctgctcctttgctgtcagtgaagtgggtggtctgtttttctggggggccaccaacacctcccgtgaatctaccatgtacccaaaagcagtgcaggacctctgcggctggagaattcggagcctggcttgtgggaagagcagcatcattgtggccgccgatgagagcaccatcagctggggtccgtcaccgacctttggggaactgggctacggggaccacaagcccaagtcttccactgcagcccaggaggtaaagactctggatggcattttctcagagcaggtcgccatgggctactcacactccttggtgatagcaagagatgaaagtgagactgagaaagagaagatcaagaaactgccagaatacaacccccgaaccctctgatgctcccggagactcctccgactccacacctctcgcggcagctgtcatttccatgtgcactgggacgggaagtcaaacgaggaatttaaaaaagcaaaagttgaccgaaggtgcatttttgtttagactccctgaggttccgttttacacatgatccaacgttaactacctttttttctgtatgctttccaaagtccttttttttcccttaatgttgaattaaaatacttgctcatagttgatttaccattcctacaaaagaggcagaaactttgagcaatctaggttttttttttttttaagttttttctttcttcctttcctgaatacactccccaaaacacccctttccagttacaattagcatcgtgatccaagcagatgccacatggaagaggaatcgccatttactcagaaaaaatgtcccttacaggaaccggcagcagctaggcagtcaccggcccgcctccatccaaaatcacgctcgcgtgcttcggaagcatccgggtcactccttctccgctttttcttgcagatgggcctaggccggtgtcggttctgtttctccccttggctgcctgtacgcccacagccttctggctgcgacattatagaatcggccgtgtcccccctggtgggggattggggatctgtgtttagccatttatatctactttagctgttaaagaggtccaaatgaaaatcaggtgattgtggaaccatggggacttgggggtggggcagaggtgggaacatttgtatcagttgagtcagcttggtggctccctgtggagccagggctgagccttgtcacgcgcactcgccaattaagagatggaccagccagcagtcaagtgcattctccagtccttgcaagaaggatcagccctttctgtgccagcctcgatcgccttgtgctttggtctctttttctcccccccgcctggatcctgcctcgcgcgggccgtcctgttgctgagactcggggtaccgttctgctgacccagctccctttagtcacgtttgcttggctctggtaccaaatagttgggattaccgaagagtccccttccttgcgtgtcagcacggatgctgtgactgccacctgcgtcctcgtcaagtgcccgagctcgccgccgtgtgtgctgcgctgagtgagttatgaggtgcctttcccggaaccctcctctcgcctggacccaagagaggcgacagctgtggctggggctcttggtttccagagggtctggactggtttgggtgctttaaaatagatatttagttcagtggtgcttatgggggagatgggactagaacttaagtgtgagacttgggtggatgggaaagttaaatattggtctcttcaagttttttttttcttttgctttgttaccacttgtcactgtctccatgttaaaatgccaaaaatgatgtagttgttgttgcttttttccctattttccaccccagtcgctccttaccgtgactcctgcccttggagggcatgtagcagtgtctgtcctgccagtcccaaggccctgtgggaggagactggcctgcatctctctaagacttagtctgacgccacgcgcatctcttgttctgtgttcaatcagtagtccaggggagaagcttctgctacttcagagctttgctaaactaacctaatttgtccaaatcaccccaaaaccaccatctctgacgtaagcttccatgcgacagcctgatccgtttccctggacaggtctctttcctggaatgcagcccaggcacctgtgctcctggcacccttgaggtctcttctttgagccgtggtcaccgagagggttgaggacgcagcacccgaggtcccagcctttgcaggagcctccctgggcttagctggacttagatcttcggtggcctcatgtaaacgtggcagccagcctcttctagaaccctagcccagggactggagcaggaaagggaccttcaaagtgaagactgccttgtcccgcagctccttctggcttagattgaaacatgggcttcctaatgggttaaatcctttaaaacaaggagttgtgggggaagggtgtcgtgcactcctagagaaaggtacacagttgcccggttgggaatgtgcttggcgctgaccctgcgggcatctgactggtcttccagctcaggaaaaagaatttgaaagaggcttagcgtgaaggggaatcaaagaggaggttgtgatttggtcgaaggtgcctggtttagtgctgtaattgtcttattattttttttatatatatatttcttggagtaaacattttaaat

SEQ ID NO: 69 - DNA, 1077 bp, Homo sapiens
atgagtgatcagcagctggactgtgccttggacctaatgaggcgcctgcctccccagcaaatcgagaaaaacctcagcgacctgatcgacctggtccccagtctatgtgaggatctcctgtcttctgttgaccagccactgaaaattgccagagacaaggtggtgggaaaggattaccttttgtgtgactacaacagagatggggactcctataggtcaccatggagtaacaagtatgaccctcccttggaggatggggccatgccgtcagctcggctgagaaagctggaggtggaagccaacaatgcctttgaccagtatcgagacctgtattttgaaggtggcgtctcatctgtctacctctgggatctggatcatggctttgctggagtgatcctcataaagaaggctggagatggatcaaagaagatcaaaggctgctgggattccatccacgtggtagaagtgcaggagaaatccagcggtcgcaccgcccattacaagttgacctccacggtgatgctgtggctgcagaccaacaaatctggctctggcaccatgaacctcggaggcagccttaccagacagatggagaaggatgaaactgtgagtgactgctccccacacatagccaacatcgggcgcctggtagaggacatggaaaataaaatcagaagtacgctgaacgagatctactttggaaaaacaaaggatatcgtcaatgggctgaggtctgtgcagacttttgcagacaaatcaaaacaagaagctctgaagaatgacctggtggaggctttgaagagaaagcagcaatgctaaacctctgtttcatgctaaccagacacgccgtgcactcgttagattcctttcttagaaaactcgttttctgctcccttccctcgtcccttccctccccgacaggtcacataacagctgcatcattgaccgcacagcgccatctctccctgagaataaagccgatagccacctcctccggctccgagcctgcttctgccacacctcgctctcagtctctccacatttccatagagaccgtgtggtttttgttcacccggg

SEQ ID NO: 70 - protein, 272 aa, Homo sapiens
MSDQQLDCALDLMRRLPPQQIEKNLSDLIDLVPSLCEDLLSSVDQPLKIARDKVVGKDYLLCDYNRDGDSYRSPWSNKYDPPLEDGAMPSARLRKLEVEANNAFDQYRDLYFEGGVSSVYLWDLDHGFAGVILIKKAGDGSKKIKGCWDSIHVVEVQEKSSGRTAHYKLTSTVMLWLQTNKSGSGTMNLGGSLTRQMEKDETVSDCSPHIANIGRLVEDMENKIRSTLNEIYFGKTKDIVNGLRSVQTFADKSKQEALKNDLVEALKRKQQC

SEQ ID NO: 71 - DNA, 1331 bp, Homo sapiens
ccgcgtctcgcgtagtctcccgcgccgccgtccactgcgcgcttcgctctccgccgcccgaggcccgcgcgctcgccatgtcccggccaccgccaccgcgggtcgcctcggtgctgggcaccatggagatggggcgccgcatggacgcgcccgccagcgccgcggccgtgcgcgcctttctggagcgcggccacaccgaactggacacggccttcatgtacagcgacggccagtccgagaccatcctgggcggcctggggctcgggctgggcggtggcgactgcagagtgaaaattgccaccaaggccaacccttgggatggaaaatcactaaagcctgacagtgtccggtcccagctggagacgtcattgaagaggctgcagtgtccccaagtggacctcttctacctacacacacctgaccacggcaccccggtggaagagacgctgcatgcctgccagcggctgcaccaggagggcaagttcgtggagcttggcctctccaactatgctagctgggaagtggccgagatctgtaccctctgcaagagcaatggctggatcctgcccactgtgtaccagggcatgtacaacgccaccacccggcaggtggaaacggagctcttcccctgcctcaggcactttggactgaggttctatgcctacaaccctctggctgggggcctgctgactggcaagtacaagtatgaggacaaggacgggaaacagcctgtgggccgcttctttgggaatagctgggctgagacctacaggaatcgcttctggaaggagcaccacttcgaggccattgcgttggtggagaaggccctgcaggccgcatatggcgccagcgcccccagtgtgacctcggctgccctccggtggatgtaccaccactcacagctgcagggtgcccacggggacgcggtcatcctgggcatgtccagcctggagcagctggagcagaacttggcagcaacagaggaagggcccctggagccggctgtcgtggatgcctttaatcaagcctggcatttggttgctcacgaatgtcccaactacttccgctaggcccatcatggctcaggctgcccaaggcttttctgtcacctcttttgttctctcacactgaccagtcttggccttaagctgacttagaagggtttttctgaattgtctagatccatgcattatttttctagcttcctgccttgctccctattcactttacactgtgaaaggtggggggtgagtcccacttgagcgcttcctgttgaataaagcaggcacttgacctggctgtagcctaggtcttgagtgaaccccaaaaaa

SEQ ID NO: 72 - protein, 330 aa, Homo sapiens
MSRPPPPRVASVLGTMEMGRRMDAPASAAAVRAFLERGHTELDTAFMYSDGQSETILGGLGLGLGGGDCRVKIATKANPWDGKSLKPDSVRSQLETSLKRLQCPQVDLFYLHTPDHGTPVEETLHACQRLHQEGKFVELGLSNYASWEVAEICTLCKSNGWILPTVYQGMYNATTRQVETELFPCLRHFGLRFYAYNPLAGGLLTGKYKYEDKDGKQPVGRFFGNSWAETYRNRFWKEHHFEAIALVEKALQAAYGASAPSVTSAALRWMYHHSQLQGAHGDAVILGMSSLEQLEQNLAATEEGPLEPAVVDAFNQAWHLVAHECPNYFR

SEQ ID NO: 73 - DNA, 1185 bp, Homo sapiens
accgtcttccgccgcacgtggattcagcgcgatgcccaaatccaagcgcgacaagaaagtctccttaaccaaaactgccaagaaaggcttggaattgaaacaaaacctgatagaagagcttcggaaatgtgtggacacctacaagtaccttttcatcttctctgtggccaacatgaggaacagcaagctgaaggacatccggaacgcctggaagcacagccggatgttctttggcaaaaacaaggtgatgatggtggccttgggtcggagcccatctgatgaatacaaagacaacctgcaccaggtcagcaaaaggttgaggggtgaggtgggtctcctgttcaccaaccgcacaaaggaagaggtgaatgagtggttcacgaaatacacagaaatggactacgcccgagctggtaacaaagcagctttcactgtgagcctggatccagggcccctggagcagttcccccactccatggagccacagctcaggcagctgggcctgcccaccgccctcaagagaggtgtggtgactctgctgtctgactacgaggtgtgcaaggagggcgatgtgctgaccccagagcaggctcgcgtcctgaagctttttgggtatgagatggctgaattcaaggtgaccatcaaatacatgtgggattcacagtcgggaaggttccagcagatgggagacgacttgccagagagcgcatctgagtccacagaagagtcagactcagaagatgatgactgaaagggactcgggactgaaggtctcctggaagcttctgggtctcactggaccatcaggactgctgccgcccctctggagagagcagctttttatttgtctgtagacagggaacatgatgggcactgacctcctgtaaagaataaaactgtgggccgggcgcggtggctcacgcctggaatcccagcactttgggaagccgaggtgggcagatcataaggtcaggagattaagaccatcctggctaacacggtgaaaccccgtctctactaaaaatagaaaaaaaaactagttgggcatagtggcatgtgcctgtagtcccagctactcaggaggctgaggcaggagaatcacttgaacccgggaggtggaggttgccgtgagttgagattggaccactgctctccagcctgggcaacagagtaaaactctgtccc

SEQ ID NO: 74 - protein, 239 aa, Homo sapiens
MPKSKRDKKVSLTKTAKKGLELKQNLIEELRKCVDTYKYLFIFSVANMRNSKLKDIRNAWKHSRMFFGKNKVMMVALGRSPSDEYKDNLHQVSKRLRGEVGLLFTNRTKEEVNEWFTKYTEMDYARAGNKAAFTVSLDPGPLEQFPHSMEPQLRQLGLPTALKRGVVTLLSDYEVCKEGDVLTPEQARVLKLFGYEMAEFKVTIKYMWDSQSGRFQQMGDDLPESASESTEESDSEDDD

SEQ ID NO: 75 - DNA, 2436 bp, Homo sapiens
atcgctgggcgactgatttcgagtttccggtcaggttaggccgggggggtgcggtcctggtcggaaggaggtggagagtcgggggtcaccaggcctatccttggcgccacagtcggccaccggggctcgccgccgtcatggagagcggagggcggccctcgctgtgccagttcatcctcctgggcaccacctctgtggtcaccgccgccctgtactccgtgtaccggcagaaggcccgggtctcccaagagctcaagggagctaaaaaagttcatttgggtgaagatttaaagagtattctttcagaagctccaggaaaatgcgtgccttatgctgttatagaaggagctgtgcggtctgttaaagaaacgcttaacagccagtttgtggaaaactgcaagggggtaattcagcggctgacacttcaggagcacaagatggtgtggaatcgaaccacccacctttggaatgattgctcaaagatcattcatcagaggaccaacacagtgccctttgacctggtgccccacgaggatggcgtggatgtggctgtgcgagtgctgaagcccctggactcagtggatctgggtctagagactgtgtatgagaagttccacccctcgattcagtccttcaccgatgtcatcggccactacatcagcggtgagcggcccaaaggcatccaagagaccgaggagatgctgaaggtgggggccaccctcacaggggttggcgaactggtcctggacaacaactctgtccgcctgcagccgcccaaacaaggcatgcagtactatctaagcagccaggacttcgacagcctgctgcagaggcaggagtcgagcgtcaggctctggaaggtgctggcgctggtttttggctttgccacatgtgccaccctcttcttcattctccggaagcagtatctgcagcggcaggagcgcctgcgcctcaagcagatgcaggaggagttccaggagcatgaggcccagctgctgagccgagccaagcctgaggacagggagagtctgaagagcgcctgtgtagtgtgtctgagcagcttcaagtcctgcgtctttctggagtgtgggcacgtttgttcctgcaccgagtgctaccgcgccttgccagagcccaagaagtgccctatctgcagacaggcgatcacccgggtgatacccctgtacaacagctaatagtttggaagccgcacagcttgacctggaagcacccctgcccccttttcagggatttttatctcgaggcctttggaggagcagtggtgggggtagctgtcacctccaggtatgattgagggaggaattgggtagaaactctccagacccatgcctccaatggcaggatgctgcctttcccacctgagaggggaccctgtccatgtgcagcctcatcagagcctcaccctgggaggatgccgtggcgtctcctcccaggagccagatcagtgcgagtgtgactgaaaatgcctcatcacttaagcaccaaagccagtgatcagcagctcttctgttcctgtgtcttctgtttttttctggtgaatcgttgcttgctgtggacttggtggaggactcagaggggaggaaaggctgggccccgagtacaacggatgccttgggtgctgcctccgaagagactctgccgcagcttttcttctttttcctcatgccccgggaaacagtctttcttcagaattgtcaggctgggcaggtcaacttgtgttcctttcccctcacctgcttgcctccttaacgcctgcacgtgtgtgtagaggacaaaagaaagtgaagtcagcacatccgcttctgcccagatggtcggggccccgggcaacagattgaagagagatcatgtgaagggcagttggtcaggcaggcctcctggtttcgccactggccctgatttgaactcctgccacttgggagagctcggggtggtccctggttttccctcctggagaatgaggcgcagaggcctcgcctcctgaaggacgcagtgtggatgccactggcctagtgtcctggcctcacagcttccttgcaaggctgtcacaaggaaaagcagccggctggcaccctgagcatatgccctcttggggctccctcatccagcccgtcgcagctttgacatcttggtgtactcatgtcgcttctccttgtgttaccccctcccagtattaccatttgcccctcacctgcccttggtgagccttttagtgcaagacagatggggctgttttcccccacctctgagtagttggaggtcacatacacagctctttttttattgcccttttctgcctctgaatgttcatctctcgtcctcctttgtgcaggcgaggaaggggtgccctcaggggccgacactagtatgatgcagtgtccagtgtgaacagcagaaattaaacatgttgcaacc

SEQ ID NO: 76 - DNA, 3991 bp, Homo sapiens
gcggcagagctcggcggctgggactggaggacagcggtggcggaggcgactagcggcggcgggagcggcgccgagaggccgtgcgggacgcgggcgccaggaccggccgaacgcagaggttgattcttcaccacactgaaaccattaggaaaaatccttgtggttaacagcagaggcttcagagtgtaacctgtactcgggcctagaaattatttaaaatggcgactgatacgtctcaaggtgaactcgtccatcctaaggcactcccacttatagtaggagctcagctgatccacgcggacaagttaggtgagaaggtagaagatagcaccatgccgattcgtcgaactgtgaattctacccgggaaactcctcccaaaagcaagcttgctgaaggggaggaagaaaagccagaaccagacataagttcagaggaatctgtctccactgtagaagaacaagagaatgaaactccacctgctacttcgagtgaggcagagcagccaaagggggaacctgagaatgaagagaaggaagaaaataagtcttctgaggaaaccaaaaaggatgagaaagatcagtctaaagaaaaggagaagaaagtgaaaaaaacaattccttcctgggctaccctttctgccagccagctagccagggcccagaaacaaacaccgatggcttcttccccacgtcccaagatggatgcaatcttaactgaggccattaaggcatgcttccagaagagtggtgcatcagtggttgctattcgaaaatacatcatccataagtatccttctctggagctggagagaaggggttatctccttaaacaagcactgaaaagagaattaaatagaggagtcatcaaacaggttaaaggaaaaggtgcttctggaagttttgttgtggttcagaaatcaagaaaaacacctcagaaatccagaaacagaaagaataggagctctgcagtggatccagaaccacaagtaaaattggaggatgtcctcccactggcctttactcgcctttgtgaacctaaagaagcttcctacagtctcatcaggaaatatgtgtctcagtattatcctaagcttagagtggacatcaggcctcagctgttgaagaacgctctgcagagagcagtagagaggggccagttagaacagataactggcaaaggtgcttcggggacattccagctgaagaaatcaggggagaaacccctgcttggtggaagcctgatggaatatgcaatcttgtctgccattgctgccatgaatgagccgaagacctgctctaccactgctctgaagaagtatgtcctagagaatcacccaggaaccaattctaactatcaaatgcatttgctgaaaaaaaccctgcagaaatgcgaaaagaatgggtggatggaacagatctctgggaaagggttcagtggcaccttccagctctgttttccctattatcccagcccaggagttctgtttccgaagaaagagccagatgattctagagatgaggatgaagatgaagatgagtcatcagaagaagactctgaggatgaagagccgccacctaagagaaggttgcagaagaaaaccccagccaagtccccagggaaggccgcatctgtgaagcagagagggtccaaacctgcacctaaagtctcagctgcccagcgggggaaagctaggcccttgcctaagaaagcacctcctaaggccaaaacgcctgccaagaagaccagaccctcatccacagtcatcaagaaacctagtggtggctcctcaaagaagcctgcaaccagtgcaagaaaggaagtaaaattgccgggcaagggcaaatccaccatgaagaagtctttcagagtgaaaaagtaaattttataggaaaaaagggtatcatgatgaaattcaaaatcttattttctaaggtcagtgtgcatttgtttagttttgatgcttttcaaattacattattttcctcccctatgaacattgtggggagggactctaaataaaccagtttaggcatttgctagctttaggtgcttttattggtgcctgcccttttccttgttcattttaatttctgcaataatcctggactttcctaaactatgtaatgtatacttgtcctttttctctgcctcccccaaccccctgttgtttttatggtcagctttgccttttttttttcttccaattttatctaaacagttgcagagatttttatatttgtagaaagcatcaagaacggtatgccagtcaggtcctggaagtaaaatggaggcacaatatagcactgactgagttgtaaagcctcctgcctggagacttcagttatagctgtaataattaatcttatttataaaagccactccactaaccttttctctccaactgtaaacacagagacagctttgggaataagccaaaaacagggtgatctcattagattttgaagatatatgactcctttgggctacatttcatattgatcaatttctaggtatttttcactggcccaaagtattgcattcccttaacagcaagcacaagttctctatatcacttgttttttgttgttgttgttgttgtcgtcgttgttttgagacggagtcttgctcaggtgccccggagtgcagtggtgcaatctcagctcactgcaacctccacctcctgggttcaagcaattctcctgcttcagcctcccgagtagctgggattacaggtgtgtaccaccacgcctggcaatttttttgtatttttagtagagatggggtttcgccgtgttggtcaggctggtctcgaactcctgacctcaggtgatccgcctgcctcggcctcccaaagtgctgggattacaggagtgagccactgtgcctggcctatcccacttggtttttgactgaaggggaagtgtagaaatatattgatttgtgatttctggtgtcacctgtgttaccaaaaatcaaaacaaatcttttttattttttattattattattatttttgagacagagtctcgctctgtcgcccagtgtggagtgcagtggtgtgatcttggctcactgcaaactccgcctcccaggttcaagcgattctcccacctcagcctcctgagttgggtcctacaggcgcacacgaccacgcccagctaattttttgtatttttagtagagttggggtttcaccatgttagccaggatggtctcgatctcctgacctcgtgatccactcacctcagcctcccaaaatcctggggttacagatgtgagctaccactcacggcccaaatcttcttgatcatatgtttaaatatattttttaatatttggagcatgagttgtcacttcttgtttgccttttttataaggaaatgttggagagttacatcattgctaatgtagaaatgttaagtggaaaaatatacagtttggtaaaataaactagattctacatttatttgtgggtttttttcccctcctttctttccacagcacttttgatatcaagcaagtggcttcctttttgagatattaaaaaaaaaaagaaaaggaaaaaagtaaatgaagcccaactacctaaccctttcttatttgtatttgttttagtattgtgaagttgtgttaaatagtactagctagaaatacaaatttctggttatcatttctcttccctgtggcacttgacattttaattgtcttaaagtttttgaagtacatcttctggccccttgagtactgccagaggcaaaagatgtttgtttcttattcattccacttttgtctcctgggatcccttctgtagcctaaagtatggctgggaaatggacttgagaagattggcttgaattagatcataatcatgtgtgatcccatcatgaattcattggaatttgtgttgcatgtaaggcaatctttcctgttgtaaatcttccttttttaatgtacatatattttgaaaaatatgaataaacatgaaatttt

SEQ ID NO: 77 - DNA, 2054 bp, Homo sapiens
ggcgccgagtagccgggccgggccggagcgcgggcggcggcggaggcagctgcgcccgcgcctcctgccctcccaggccccgcgccccgcgcccgggccccggcgatggtgacacatgcggcggcggcgcgccagcggcaggaccatggttgagcgcgccagcaagttcgtgctggtggtggcgggcccggtgtgcttcatgctcatcttgtaccagtacgcgggcccaggactgagcctgggcgcgcccggcggcggcgcgccgcccgacgacctggacctgttccccacgcccgacccccactacgagaagaagcactacttcccggtccgcgagctggagcgctcgctgcgcttcgacatgaagggcgacgacgtgatcgtcttcctgcacatccagaagacgggcggcaccaccttcggccgccacctcgtgcagaacgtacgcctcgaggtgccgtgcgactgccggcccggccagaagaagtgcacctgctaccggcccaaccgccgcgagacttggctcttctcccgcttctccaccggctggagctgcgggctgcacgccgactggaccgagctcaccaactgcgtgcccggcgtgctggaccgccgcgactccgccgcgctgcgcacgcccaggaagttctactacatcaccctgctacgagaccccgtgtcccgctacctgagcgagtggcggcatgtgcagaggggtgccacgtggaagacgtcgttgcacatgtgtgatgggcgcacgcccacgcctgaggggctgccgccctgctacgagggcacggactggtcgggctgcacgctacaggagttcatggactgcccgtacaacctggccaacaaccgccaggtgcgcatgctggccgacctgagcctggtgggctgctacaacctgtccttcatccccgagggcaagcgggcccagctgctgctcgagagcgccaagaagaacctgcggggcatggccttcttcggcctgaccgagttccagcgcaagacgcagtacctgttcgagcggacgttcaacctcaagttcatccggcccttcatgcagtacaacagcacgcgggcgggcggcgtggaggtggatgaggacaccatccggcgcatcgaggagctcaacgacctggacatgcagctgtatgactacgccaaggacctcttccagcagcactaccagtacaagcggcagctggagcgcagggagcagcgcctgaggagccgcgaggagcgtctgctgcaccgggccaaggaggcgctgccgcgggaggacgccgacgagccgggccgcgtgcccaccgaggactacatgagccacatcattgagaagtggtagtggcggtggtggccacggggaggcctcttggggtgtgtgggggataaaacaggacagacgacaggtccacccaagactgtcaagggatgagcatcccaaacctgctccacagaggtagctgcgtcctgaaaaaaaacacagcagggacatagtggggctgggcagggatggggcttgagaaatcaacaggtgcagcccagtgggtcagaggaaagcgtgctcgaaggatgccatggtcagggcagagcctccagagcaggtgttgtgcctggagctgctctcctggcctccttggatttatcgcaaaaactgaaggtttgcgtgagagacgaggacagcggaaagtggacctgccaggccgggagtgtgtccctcaccaactatgcacacagcactcgctcttagctcctctgtccgggctactaggagtgagaccagcttctggcaactgccccagctccaggccatcccatagctcctcctcttctggctgcccccaatgccccgaggcctggggagcccccagctcacccatctgtagctccctcaaagtcagggcccaccccatctgaggcagagaagactcgagtccagcccccaggaagcctgctcccctctctggcccatggtcctgcttcatgctttgggtcaggaggccaaagctgatgttcaggccccacccactccctacagtcctcagacc

SEQ ID NO: 78 - DNA, 2590 bp, Homo sapiens
agaaactcccggtgtggcagctgagatggcccaggaaagaactatattaccttcaaaaagagaggtacatgcgatgtttgaggtggcatgaagctcagtggtgttatattggaatgagtgagtgaccatcctggagccttcctgaaagaggattggaacatcagttaacatctgaccactgccagcccaccccctcccacccacgtcgattgcatctctgggctccagggataaagcaggtcttggggtgcaccatgatttcaccattcttagtactggccattggcacctgccttactaactccttagtgccagagaaagagaaagaccccaagtactggcgagaccaagcgcaagagacactgaaatatgccctggagcttcagaagctcaacaccaacgtggctaagaatgtcatcatgttcctgggagatgggatgggtgtctccacagtgacggctgcccgcatcctcaagggtcagctccaccacaaccctggggaggagaccaggctggagatggacaagttccccttcgtggccctctccaagacgtacaacaccaatgcccaggtccctgacagtgccggcaccgccaccgcctacctgtgtggggtgaaggccaatgagggcaccgtgggggtaagcgcagccactgagcgttcccggtgcaacaccacccaggggaacgaggtcacctccatcctgcgctgggccaaggacgctgggaaatctgtgggcattgtgaccaccacgagagtgaaccatgccacccccagcgccgcctacgcccactcggctgaccgggactggtactcagacaacgagatgccccctgaggccttgagccagggctgtaaggacatcgcctaccagctcatgcataacatcagggacattgacgtgatcatggggggtggccggaaatacatgtaccccaagaataaaactgatgtggagtatgagagtgacgagaaagccaggggcacgaggctggacggcctggacctcgttgacacctggaagagcttcaaaccgagatacaagcactcccacttcatctggaaccgcacggaactcctgacccttgacccccacaatgtggactacctattgggtctcttcgagccaggggacatgcagtacgagctgaacaggaacaacgtgacggacccgtcactctccgagatggtggtggtggccatccagatcctgcggaagaaccccaaaggcttcttcttgctggtggaaggaggcagaattgaccacgggcaccatgaaggaaaagccaagcaggccctgcatgaggcggtggagatggaccgggccatcgggcaggcaggcagcttgacctcctcggaagacactctgaccgtggtcactgcggaccattcccacgtcttcacatttggtggatacaccccccgtggcaactctatctttggtctggcccccatgctgagtgacacagacaagaagcccttcactgccatcctgtatggcaatgggcctggctacaaggtggtgggcggtgaacgagagaatgtctccatggtggactatgctcacaacaactaccaggcgcagtctgctgtgcccctgcgccacgagacccacggcggggaggacgtggccgtcttctccaagggccccatggcgcacctgctgcacggcgtccacgagcagaactacgtcccccacgtgatggcgtatgcagcctgcatcggggccaacctcggccactgtgctcctgccagctcggcaggcagccttgctgcaggccccctgctgctcgcgctggccctctaccccctgagcgtcctgttctgagggcccagggcccgggcacccacaagcccgtgacagatgccaacttcccacacggcagcccccccctcaaggggcagggaggtgggggcctcctcagcctctgcaactgcaagaaaggggacccaagaaaccaaagtctgccgcccacctcgctcccctctggaatcttccccaagggccaaacccacttctggcctccagcctttgctccctccccgctgccctttggccaacagggtagatttctcttgggcaggcagagagtacagactgcagacattctcaaagcctcttatttttctagcgaacgtatttctccagacccagaggccctgaagcctccgtggaacattctggatctgaccctcccagtctcatctcctgaccctcccactcccatctccttacctctggaaccccccaggccctacaatgctcatgtccctgtccccaggcccagccctccttcaggggagttgaggtctttctcctcaggacaaggccttgctcactcactcactccaagaccaccagggtcccaggaagccggtgcctgggtggccatcctacccagcgtggcccaggccgggaagagccacctggcagggctcacactcctgggctctgaacacacacgccagctcctctctgaagcgactctcctgtttggaacggcaaaaaaaaatttttttttctctttttggtggtggttaaaagggaacacaaaacatttaaataaaactttccaaatatttccgagg

SEQ ID NO: 79 - DNA, 548 bp, Homo sapiens
gaaccgccatcttccagtaattcgccaaaatgacgaacacaaagggaaagaggagaggcacccaatagatgttctccaggccttttagaaaacatggagttgttcctttggccacgtatatgcgaatctataagaaaggtgatattgtagacatcaagggaatgggtactgttcaaaaaggaacgccccacaagtgttaccatggcaaaactggaagagtctacaatgttatccagtatgctgctagcattgttgtaaacaaacaagttaagggcaagattcttgccaagagaattaatgtgcgtattgagcacattaagcactctgagagccgagatagcttcctgaaacgcgtgaaggagaatgatcagaaaaagagagaagccaaagagaaaggtacctgggttcaactaaagcgccagcctgctccacccagcaaagcacactttgtgagaaccaatgggaaggagcctgagctgctggaacctattctctatgaattcacggcataataggtatttaaaaaaaaaaaaagacctctgggctgt

SEQ ID NO: 80 - protein, 160 aa, Homo sapiens
DRTQRERGEAPNRMFSRPFRKHGVVPLATYMRIYKKGDIVDIKGMGTVQKGTPHKCYHGKTGRVYNVIQYAASIVVNKQVKGKILAKRINVRIEHIKHSESRDSFLKRVKENDQKKREAKEKGTWVQLKRQPAPPSKAHFVRTNGKEPELLEPILYEFTA

SEQ ID NO: 81 - DNA, 2183 bp, Mus musculus
ggcagccgaggagaccccgcgcagtgctgccaacgccccggtggagaagctgaggtcatcatcagatttgaaatatttaaagtggatacaaaattatttcagcaatgcagacaattaagtgtgttgttgtgggcgatggtgctgttggtaaaacatgtctcctgatatcctacacaacaaacaaatttccatcggaatatgtaccgactgtttttgacaactatgcagtcacagttatgattggtggagaaccatatactcttggactttttgatactgcagggcaagaggattatgacagattacgaccgctgagttatccacaaacagatgtatttctagtctgtttttcagtggtctctccatcttcatttgaaaacgtgaaagaaaagtgggtgcctgagataactcaccactgtccaaagactcctttcttgcttgttgggactcaaattgatctcagagatgacccctctactattgagaaacttgccaagaacaaacagaagcctatcactccagagactgctgaaaagctggcccgtgacctgaaggctgtcaagtatgtggagtgttctgcacttacacagaaaggcctaaagaatgtatttgacgaagcaatattggctgccctggagcctccagaaccgaagaagagccgcaggtgtgtgctgctatgaacatctctccagagccctttctgcacagctggtgtcggcatcatactaaaagcaatgtttaaatcaaactaaagattaaaaattaaaattcgtttttgcaataatgacaaatgccctgcacctacccacatgcactcgtgtgagacaaggcccataggtatggccccccccttccccctcccagtactagttaattttgagtaattgtattgtcagaaaagtgattagtactatttttttttgttgtttcaaaaaaaaaatttttgtgtgtctgtttttttttttttttttttttgttgtttaaaaggaaggcatgcttgtggatgactctgtaacagactaattggaattgttgaagctgctccctggttccactctggagagtaatctgggacatcttagtgttttgttttgtttttttccctcctcttttttttgggggggagtgtgtgtggggtttgttttttagtcttgtttttttaattcattaaccagtggttagcccttaaggggaggaggacggattgattccacattccacttcctagatctagtttagaaaacatgttccccatctggtgctcttaggaaggagtatagtaaatgcctcatttaataacatactcctttttgaaagttgccttttctctccacccttgagtagatccagtatttgatgaaactcatgaaagtgggtggagcccatcttgcccctcctcttttctaggacgcactatatgtgactgtgactttcaaggacatttgtttgccatttgctgatttttttgggaagttaatttctaacttctttcactgataaatgaagaaaagtattgcacctttgaaatgcaccaaatgaattgagtttgtaattaaaaaaatttttttccctttcagtcattgtcttatatgcttagcatagatttgcagctcagtagtatatggtgttcctagaatgcagctgaagacctgttatgtagaggaaatacgaggggtggtgctagaagacagacatctgtggaatgattcacatcctctcaagttaggaggatggaggcctgcttcattaagaagctgggggtagggtgggggtggggagaacacttaacaacatggggaccagtcaggggaatccccttatttctgttttgcatatgaggaaccctagagcagccaggtgaggctctctagtttaataaaaatcatggaaagactcttaatgcagactcttcttaagtgttaatagggattttttcagcttattttggttgcagtttccaatttttaaaaatgttgaggtaatctttcccaccttcccaaacctaattcttgtagatgcattagtgttgaaccaatgctttctcatgtctcaattctttgtatatgcattcttttcagatgtattaaacaaacaaaaacccttcaaaaaaaaaaaaaaaaaaaaaaaaaaaaaaaaaaaaaaaaaaaaaaaaaaaaaaaaaaaaaaaaaaaaaaaaaaaaaaa

SEQ ID NO: 82 - protein, 191 aa, Mus musculus
MQTIKCVVVGDGAVGKTCLLISYTTNKFPSEYVPTVFDNYAVTVMIGGEPYTLGLFDTAGQEDYDRLRPLSYPQTDVFLVCFSVVSPSSFENVKEKWVPEITHHCPKTPFLLVGTQIDLRDDPSTIEKLAKNKQKPITPETAEKLARDLKAVKYVECSALTQKGLKNVFDEAILAALEPPEPKKSRRCVLL

SEQ ID NO: 83 - DNA, 2663 bp, Homo sapiens
cgcgcgcgccatttctagtcgttttcaaagcgcctcgcgctgattctcacgggcccggctgccggcccccgctctgccctgcataataaaatggctaatcaggtgaatggtaatgcggtacagttaaaagaagaggaagaaccaatggatacttccagtgtaactcacacagaacactacaagacactgatagaggcaggcctcccacagaaggtggcagaaagacttgatgaaatatttcagacaggattggtagcttatgtcgatcttgatgaaagagcaattgatgctctcagggaatttaatgaagaaggagctctgtctgtactacagcagttcaaggaaagtgacttatcacatgttcagaacaaaagtgcatttttatgtggagttatgaagacctacaggcagagagagaaacaggggagcaaggtgcaagagtccacaaagggacctgatgaagcgaagatcaaggccttgcttgagagaactggttatactctggatgtaaccacaggacagaggaagtatggtggtcctccaccagacagtgtgtactctggcgtgcaacctggaattggaacggaggtatttgtaggcaaaataccaagggatttatatgaggatgagttggtgcccctttttgagaaggccggacccatttgggatctacgtcttatgatggatccactgtccggtcagaatagagggtatgcatttatcaccttctgtggaaaggaagctgcacaggaagccgtgaaactgtgtgacagctatgaaattcgccctggtaaacaccttggagtgtgcatttctgtggcaaacaacagactttttgttggatccattccgaagaataagactaaagaaaacattttggaagaattcagtaaagtcacagagggtttggtggacgttattctctatcatcaacccgatgacaaaaagaagaatcgggggttctgcttccttgaatatgaggatcacaagtcagcagcacaagccagacgccggctgatgagtggaaaagtaaaagtgtggggaaatgtagttacagttgaatgggctgaccctgtggaagaaccagatccagaagtcatggctaaggtaaaagttttgtttgtgagaaacttggctactacggtgacagaagaaatattggaaaagtcattttctgaatttggaaaactcgaaagagtaaagaagttgaaagattatgcatttgttcattttgaagacagaggagcagctgttaaggctatggatgaaatgaatggcaaagaaatagaaggggaagaaattgaaatagtcttagccaagccaccagacaagaaaaggaaagagcgccaagctgctagacaggcctccagaagcactgcgtatgaagattattactaccaccctcctcctcgcatgccacctccaattagaggtcggggtcgtggtggggggagaggtggatatggctaccctccagattactacggctatgaagattactatgatgattactatggttatgattatcacgactatcgtggaggctatgaagatccctactacggctatgatgatggctatgcagtaagaggaagaggaggaggaaggggagggcgaggtgctccaccaccaccaagggggaggggagcaccacctccaagaggtagagctggctattcacagaggggggcacctttgggaccaccaagaggctctaggggtggcagagggggtcctgctcaacagcagagaggccgtggttcccgtggatctcggggcaatcgtgggggcaatgtaggaggcaagagaaaggcagatgggtacaaccagcctgattccaagcgtcgtcagaccaacaaccaacagaactggggttcccaacccatcgctcagcagccgcttcagcaaggtggtgactattctggtaactatggttacaataatgacaaccaggaattttatcaggatacttatgggcaacagtggaagtagacaagtaagggcttgaaaatgatactggcaagatacgattggctctagatctacattcttcaaaaaaaaaaattggcttaactgtttcatctttaagtagcattttgctgccatttgtattgggctgaagaaatcactattgtgtatatactcaagtctttttatttttcctcttttcataaatgctcttggacattattgggcttgcagagttcccttattctggggattacaatgcttttatcgtttcaggcttcattttagcttcaaaacaagctgggcacactgttaaatcatgattttgcagaacctttggttttggacagtttcatttttttggatttgggatagattacataggagtatggagtatgctgtaaataaaaatacaagctagtgctttgtcttagtagttttaagaaattaaagcaaacaaatttaagttttcttgtattgaaaataacctatgattgtatgttttgcattcctagaagtaggttaactgtgtttttaaattgttataacttcacacctttttgaaatctgccctacaaaatttgtttggcttaaacgtcaaaagccgtgacaatttgttctttgatgtgattgtatttccaatttcttgttcatgtaagatttcaataaaactaaaaaatctattcaaaacatta

SEQ ID NO: 84 - protein, 633 aa, Homo sapiens
MANQVNGNAVQLKEEEEPMDTSSVTHTEHYKTLIEAGLPQKVAERLDEIFQTGLVAYVDLDERAIDALREFNEEGALSVLQQFKESDLSHVQNKSAFLCGVMKTYRQREKQGSKVQESTKGPDEAKIKALLERTGYTLDVTTGQRKYGGPPPDSVYSGVQPGIGTEVFVGKIPRDLYEDELVPLFEKAGPIWDLRLMMDPLSGQNRGYAFITFCGKEAAQEAVKLCDSYEIRPGKHLGVCISVANNRLFVGSIPKNKTKENILEEFSKVTEGLVDVILYHQPDDKKKNRGFCFLEYEDHKSAAQARRRLMSGKVKVWGNVVTVEWADPVEEPDPEVMAKVKVLFVRNLATTVTEEILEKSFSEFGKLERVKKLKDYAFVHFEDRGAAVKAMDEMNGKEIEGEEIEIVLAKPPDKKRKERQAARQASRSTAYEDYYYHPPPRMPPPIRGRGRGGGRGGYGYPPDYYGYEDYYDDYYGYDYHDYRGGYEDPYYGYDDGYAVRGRGGGRGGRGAPPPPRGRGAPPPRGRAGYSQRGAPLGPPRGSRGGRGGPAQQQRGRGSRGSRGNRGGNVGGKRKADGYNQPDSKRRQTNNQQNWGSQPIAQQPLQQGGDYSGNYGYNNDNQEFYQDTYGQQWK

SEQ ID NO: 85 - DNA, 915 bp, Homo sapiens
cggactggcagggggcagggaagctcaaagatctggggtgctgccaggaaaaagcaaattctggaagttaatggttttgagtgatttttaaatccttgctggcggagaggcccgcctctccccggtatcagcgcttcctcattctttgaatccgcggctccgcggtcttcggcgtcagaccagccggaggaagcctgtttgcaatttaagcgggctgtgaacgcccagggccggcgggggcagggccgaggcgggccattttgaataaagaggcgtgccttccaggcaggctctataagtgaccgccgcggcgagcgtgcgcgcgttgcaggtcactgtagcgggacttcttttggttttctttctctttggggcacctctggactcactccccagcatgaaggcgctgagcccggtgcgcggctgctacgaggcggtgtgctgcctgtcggaacgcagtctggccatcgcccggggccgagggaagggcccggcagctgaggagccgctgagcttgctggacgacatgaaccactgctactcccgcctgcgggaactggtacccggagtcccgagaggcactcagcttagccaggtggaaatcctacagcgcgtcatcgactacattctcgacctgcaggtagtcctggccgagccagcccctggaccccctgatggcccccaccttcccatccagacagccgagctcactccggaacttgtcatctccaacgacaaaaggagcttttgccactgactcggccgtgtcctgacacctccaggtgagtatctcctctcttggagagggaggtttaaacggcaagtcctggagttggcagacgttttgaaaaattgccactcactcggtttagggaaactgaggccagagagggacaagtgacttgcccatggttg

SEQ ID NO: 86 - protein, 119 aa, Homo sapiens
MKALSPVRGCYEAVCCLSERSLAIARGRGKGPAAEEPLSLLDDMNHCYSRLRELVPGVPRGTQLSQVEILQRVIDYILDLQVVLAEPAPGPPDGPHLPIQTAELTPELVISNDKRSFCH

SEQ ID NO: 87 - DNA, 609 bp, Homo sapiens
ttctcttcctgctctccatcatggcgcaggatcaaggtgaaaaggagaaccccatgcgggaacttcgcatccgcaaactctgtctcaacatctgtgttggggagagtggagacagactgacgcgagcagccaaggtgttggagcagctcacagggcagacccctgtgttttccaaagctagatacactgtcagatcctttggcatccggagaaatgaaaagattgctgtccactgcacagttcgaggggccaaggcagaagaaatcttggagaagggtctaaaggtgcgggagtatgagttaagaaaaaacaacttctcagatactggaaactttggttttgggatccaggaacacatcgatctgggtatcaaatatgacccaagcattggtatctacggcctggacttctatgtggtgctgggtaggccaggtttcagcatcgcagacaagaagcgcaggacaggctgcattggggccaaacacagaatcagcaaagaggaggccatgcgctggttccagcagaagtatgatgggatcatccttcctggcaaataaattcccgtttctatccaaaagagcaataaaaagttttcagtgaaatgtgcaa

SEQ ID NO: 88 - protein, 178 aa, Homo sapiens [sequence omitted]

SEQ ID NO: 89 - DNA, 1648 bp, Homo sapiens
ggaagttccggcgggggcggccgagggggaagagtgtgtctgcgggagaaagaggagaatcgcccaagcggcctcggaagtcccagggagtggaggcccccgccgtggagccgtgtggtgtatgtgtggtaacaccatgtctgtgcccctgctcaccgatgctgccaccgtgtctggagctgagcgggaaacggccgcggttatttttttacatggacttggagacacagggcacagctgggctgacgccctctccaccatccggctccctcacgtcaagtacatctgtccccatgcgcctaggatccctgtgaccctcaacatgaagatggtgatgccctcctggtttgacctgatggggctgagtccagatgccccagaggacgaggctggcatcaagaaggcagcagagaacatcaaggccttgattgagcatgaaatgaagaacgggatccctgccaatcgaatcgtcctgggaggcttttcacagggcggggccctgtccctctacacggccctcacctgcccccaccctctggctggcatcgtggcgttgagctgctggctgcctctgcaccgggccttcccccaggcagctaatggcagtgccaaggacctggccatactccagtgccatggggagctggaccccatggtgcccgtacggtttggggccctgacggctgagaagctccggtctgttgtcacacctgccagggtccagttcaagacatacccgggtgtcatgcacagctcctgtcctcaggagatggcagctgtgaaggaatttcttgagaagctgctgcctcctgtctaactagtcgctggccccagtgcagtaccccagctcatgggggactcagcaagcaagcgtggcaccatcttggatctgagccggtcgagcccctgtccccacccttcctgacctgtccttttcccacaggcctctgggggcaggtggcaaggcctggccgggccttccttcctggccttagccacctggctctgtctgcagcaggggcaggctgctttcttatccatttccctggaggcgggcccccctggcagcagtattggaggggctacaggcagctggagaaaggggcccagccgctgacccactcactcaggacctcactcactagccccgctttgggccccctcctgtgacctcagggtttggcccatggggcccccccaggcccctgccccaactgattctgcccagataatcgtgtctcctgcctccactcagctgcttctcagtcatgaatgtggccatggccccggggtccccttgctgctgtgggctccctgtccctgggcaggagtgctggtgaggaggtggagccttttgaggggggccttccctcagctgtttccccacactggggggctgggccctgcctccccgttaccctccttccctgcaggcctggagcctgtagggctggactgaggttcaggtctccccccagctgtctcacccccactttgtccccactctagagcagggaggcagtgggggaggagttgtgtctcgtcttctgtctccatgtggtttttgggtgtttttcttgttgtgtcctggattccgataaaattaaagaaattgcttcctcaaaaaaaaaaaaaaaaaaaaaaaaaa

SEQ ID NO: 90 - protein, 231 aa, Homo sapiens
MCGNTMSVPLLTDAATVSGAERETAAVIFLHGLGDTGHSWADALSTIRLPHVKYICPHAPRIPVTLNMKMVMPSWFDLMGLSPDAPEDEAGIKKAAENIKALIEHEMKNGIPANRIVLGGFSQGGALSLYTALTCPHPLAGIVALSCWLPLHRAFPQAANGSAKDLAILQCHGELDPMVPVRFGALTAEKLRSVVTPARVQFKTYPGVMHSSCPQEMAAVKEFLEKLLPPV

SEQ ID NO: 91 - DNA, 2382 bp, Homo sapiens
agaaggagaaggtcgggttgtagaagctggggtggccggcagctcgctcatcggtgttcgtgggctttgtcggtccgtgcctcgtctctccctggaaagggagggaggcttcgacgtcgagagggagccgctgccgcgttagttccgagcttgaagtcactaggacttctctcaaacttgtgtgctgaggagactcagatgttggcctcagctcctaggctgaactcagcagatcggcccatgaaaacttctgtattgagacaaaggaagggatctgtcagaaagcaacacttgttatcttgggcttggcagcaaggaagaggacaggtagtggagatcctgcaatctgaaaagcagactgaaaggtgacaaagaagctgaagatgggtggtggagagaggtataacattccagcccctcaatctagaaatgttagtaagaaccaacaacagcttaacagacagaagaccaaggaacagaattcccagatgaagattgttcataagaaaaaagaaagaggacatggttataactcatcagcagctgcctggcaggccatgcaaaatggggggaagaacaaaaattttccaaataatcaaagttggaattctagcttatcaggtcccaggttactttttaaatctcaagctaatcagaactatgctggtgccaaatttagtgagccgccatcaccaagtgttcttcccaaaccaccaagccactgggtccctgtttcctttaatccttcagataaggaaataatgacatttcaacttaaaaccttacttaaagtacaggtataaaataagacaaatgtttaaatttagttatgttcacggatagttgtcaattggtctgaaacaaattcgctagggaatctatttgtgtagaactaattaatgtaaaaaaaacagaccatctcgtgttgtgtgcactgtgatataatggtagtatcagtgcaactttaatgattgtacttgatattaagtgttctcaactgagtaacttttaagtggaaaccaagtttagatttggggagtggtaaaggaatcagctttttctattgttaggggaagacagtaatttatcattcatggaccagtagattgttgaaagttggtgaatcggattataagcttctagctaacacaaggattcagaattaggtaaacatctgaaggtttagtatattagaaacacccaaaccagtaatatgctaacctgatgcactgctgaaagaaaatgtgaatttttcgtaataattgcattttagtgaattgtacagtgggtggaaagggcatttggagctcattagaatgagacatagtacaccccaatggccctgtttattaaatgtagtggattaagtgtctgtcaacaaatacaccaaaaccattttttatagaaacagtatttaatggtcactcaatagctttcaaaatacatttttgtattacagcactgcacaagctattctaatagtgctctcgcctcatcattcctgcaaagcttgctttggggagttggataatgtgaaaattttaagtacctaggggagaaagagccatgtaaatatctgtaataaacttgtagcatatgtaaagttttcttggcctttatcttacaaaaatggagtattttagtatgaatttgctgaatgtaagaccgtggactgttttttataatatggcctaattttaaaggtccaaaataacttgtttttaaagtttgcccttgtgctaaagtgccagtgtatgtatgttatacttgatttggttgtaaactatatttcaaagtaaaccctagtgtaataagttttataactaaaaaggtttaagctgctaaaactatttttaagagatgtgaaatgcagtatgggactatctttttttcctcctctaagcccaaagattaactagagtccctccaaccttatagattgttggctttcacaatcttataacctaggatacaggtagtttcgagtatggtgccagtgatgttttgtttttgtttggtcaaggggtaggtgcaacccaatggaccacttatgcaaaagatgtaaactcttgcataatacattgataacatgttttgccaactttaaatgcttaaacataagcgaaaccagtagcaagtatgtgggtcagcttaaaaattttgattgttaatgccctattttctaatttggcacctcttgatgcctaagcaggtaagcagatgcctaagctgtatttctccaaataaatcaagatgaagtactgcccaagttaaatattgatagcctaaagacaagtttatgtagtacttaatgtacatgatatgaatgtgaagcataaaattaaataaaatttttccccattaaaaaaaaaaaaaaaaaaa

SEQ ID NO: 92 - protein, 139 aa, Homo sapiens
MGGGERYNIPAPQSRNVSKNQQQLNRQKTKEQNSQMKIVHKKKERGHGYNSSAAAWQAMQNGGKNKNFPNNQSWNSSLSGPRLLFKSQANQNYAGAKFSEPPSPSVLPKPPSHWVPVSFNPSDKEIMTFQLKTLLKVQV

SEQ ID NO: 93 - DNA, 1842 bp, Mus musculus
gtctgaggctcggccgcctgagccgcggacggtttgctgagcccgttagtgcgcccggccgagacacgccgccgccatgtcccgctacctgcgtccccccaacacgtctctgttcgtcaggaacgtggccgacgacaccaggtctgaagacttgcggcgtgaatttggtcgttatggtcctatagttgatgtgtatgttccacttgatttctacactcgccgtccaagaggatttgcttatgttcaatttgaggatgttcgtgatgctgaagacgctttacataatttggacagaaagtggatttgtggacggcagattgaaatacagtttgcccagggggatcgaaagacaccaaatcagatgaaagccaaggaagggaggaatgtgtacagttcttcacgctatgatgattatgacagatacagacgttctagaagccgaagttatgaaaggaggagatcaagaagtcggtcttttgattacaactatagaagatcgtatagtcctagaaacagtagaccgactggaagaccacggcgtagcagaagccattccgacaatgatagaccaaactgcagctggaatacccagtacagttctgcttactacacttcaagaaagatctgaaagcggaaaaagaaccaaagaagggcagttcaagcgaccaaagggtgggtggaaggtgctgcagtatgaatactgtacgaatattttgactctggtctgaaaagataaaagaatgttatcgaaaactacatggaataattgaagtcccttcaagtttgaaagtaagcattttaggacaaataaaaggaaattcaactttgtacttgtggaaactaatccctaaatatgaataggtttatattgattcatgggtaacaggtccataataaattattggaaactaggatgtctgaatatcaaggaagacagccatagtctcttacagtgcctctgttggtctgtctcaaactgaattgggtgggaaaaggtatggtccaatataaaagttccatttttgccattattggcaaatcttgcctttgtttattttggtgccagtgttttctgcttaatcatttgctttgttggcatctgtgtttatttacttgtacaccacatgcagtttacatctgtcttaactactccttcccaggtaaattccaattatatttgacatccagctaagagggcccatctcttctcacctctttcctagtcagtatattcagcaaatatttattgagcccttactgtgggcaaatcattgtactggataattgagaaaaatagataattcccttattcagtaaatgtctactgagcacaatctagtgaatcattacagtatggcctcattgttttgtttgaggtgtgttattcataacaatattttacaccattcgtatcaatgtaattatagaacacaatatacgatcaaggataagtaattgtgtggttatctgccatttaaaagtatccagtatttgatcacattattataaataatgaaaaaatgatttaatctgtaataaactggtttattgtgcagtgactgtaatatactagagttataataaattgtttactctgcctcaccaaacacatgctaggatataacccccaaaataagtatttaactttgcattaggtataaaggagactgggtgctataattagattattttgaggcagacagagagctgttatcctaactgatttagtatgttctgtaattgagaaaatgttcaccaaattatactttttagtgatttacatgtacattttataggggacatgttctgtgtatagcgaataaataacttttatagtatcac

SEQ ID NO: 94 - protein, 183 aa, Mus musculus
MSRYLRPPNTSLFVRNVADDTRSEDLRREFGRYGPIVDVYVPLDFYTRRPRGFAYVQFEDVRDAEDALHNLDRKWICGRQIEIQFAQGDRKTPNQMKAKEGRNVYSSSRYDDYDRYRRSRSRSYERRRSRSRSFDYNYRRSYSPRNSRPTGRPRRSRSHSDNDRPNCSWNTQYSSAYYTSRKI

SEQ ID NO: 95 - DNA, 2924 bp, Homo sapiens
gtctgaggctcggccgcctgagccgcggacggtttgctgagcccgttagtgcgcccggccgagacacgccgccgccatgtcccgctacctgcgtccccccaacacgtctctgttcgtcaggaacgtggccgacgacaccaggtctgaagacttgcggcgtgaatttggtcgttatggtcctatagttgatgtgtatgttccacttgatttctacactcgccgtccaagaggatttgcttatgttcaatttgaggatgttcgtgatgctgaagacgctttacataatttggacagaaagtggatttgtggacggcagattgaaatacagtttgcccagggggatcgaaagacaccaaatcagatgaaagccaaggaagggaggaatgtgtacagttcttcacgctatgatgattatgacagatacagacgttctagaagccgaagttatgaaaggaggagatcaagaagtcggtcttttgattacaactatagaagatcgtatagtcctagaaacagtagaccgactggaagaccacggcgtagcagaagccattccgacaatgatagattcaaacaccgaaatcgatctttttcaagatctaaatccaattcaagatcacggtccaagtcccagcccaagaaagaaatgaaggctaaatcacgttctaggtctgcatctcacaccaaaactagaggcacctctaaaacagattccaaaacacattataagtctggctcaagatatgaaaaggaatcaaggaaaaaagaaccacctagatccaaatctcagtcaagatcacagtctaggtctaggtcaaaatctagatcaaggtcttggactagtcctaagtccagtggccactgatagtataaaccatggtcatttttaggcatgtatcattcatttactcatagtttggtttacttaaattatcaggaatacaatgttgcaatgatgcttaaaaaacacttgttagttttccctgtaccaggcaatggttataattaaaatgatatgctgttgagaagccactcttaagagtccagtttgtttaatgttatgggcagctaccaatttgtggtgtctctgtatatttttgtaaagattctcattttttatgcttgaagtatttggtgaaaagatgttggttgaccataatttgcaacattgtctcattaaaaataaactttcatattcatatttggtagaactgttaacctagaaatgtagcttgctaataagatagaatgatacaaaagtgaagtagtagccacagtacaacactgactgctcagacacatttaggttcagggtggacctttatgtcttgtcaagatgtctaggcccggctgggcgtggtggctcacacctgtaatcccagcactttgggaggccgaggcgggcggatcacgaggtcaggagttcgagaccagcctgaccaacacggtgaaaccccgtctctactaaaaatacaaaaattatccgggcatggtggcacatgcctgtaatctcagctactcaggaggctgaggcaagagaatcgcttgaacctgggaggtagaagttgcagtgagccaaaatcacgccactgcactccagcctgggcaacagagtgagactccgtctcaaaaaaaaaaaaaaaccggatgtctaggccaatgataattatttttgatgcagtgtggattagttcttttgttaaccccactgtcttggggaatgatgccagctgggaaattgagtttttgactgaaacatggagccttcactgctttttttctggttcctatgaagatttggaacatagaaaacacaaaaactcaccttaaaatttgagcaggtcgttgatggcaaaaataattttaaggaaaaaggaatattcttatgtagttattctaaagtttaaggagcgttgttgaccataatattgcttagttttcttactgctgttaagtaagtaaattgtttcaaagtaggttttgtgtgtgtgtgcctagtgtaaaagaactgaaattttgatgcttacagcacttggctcgtgcatttgtatcaaaatttgcctgcctctttatgagggaggcctgcttttcacacctcagtttatttaatacgaggcaagttgtaagacaacactcattctaggtgattctgtggtgccatgaaatttaaggtaatttggggaaaaggattagtcagttttaagcaagagtcacatcttttgagctttcgattatcagtgtagtacctgactaaaaatgaagtaatacccttaaaccatttataatttctagtatttctctgaaagatcgttttggggacaaaagtgacttgacatgtccaatttcatttcagaataaaaagctagcatctttaaaaatctcagattgcttgcttacagatacaagtacgaattatggacaaacgattccttttagaggattacttttttcaatttcggttttagtaatctaggctttgcctgtaaagaatacaacgatggattttaaatactgtttgtggaatgtgtttaaaggattgattctagaacctttgtatatttgatagtatttctaactttcatttctttactgtttgcagttaatgttcatgttctgctatgcaatcgtttatatgcacgtttctttaatttttttagattttcctggatgtatagtttaaacaacaaaaagtctatttaaaactgtagcagtagtttacagttctagcaaagaggaaagttgtggggttaaactttgtattttctttcttatagaggcttctaaaaaggtatttttatatgttctttttaacaaatattgtgtacaacctttaaaacatcaatgtttggatcaaaacaagacccagcttattttctgcttgctgtaaattaagcaaacatgctataataaaaacaaaatgaagg

SEQ ID NO: 96 - protein, 262 aa, Homo sapiens
MSRYLRPPNTSLFVRNVADDTRSEDLRREFGRYGPIVDVYVPLDFYTRRPRGFAYVQFEDVRDAEDALHNLDRKWICGRQIEIQFAQGDRKTPNQMKAKEGRNVYSSSRYDDYDRYRRSRSRSYERRRSRSRSFDYNYRRSYSPRNSRPTGRPRRSRSHSDNDRFKHRNRSFSRSKSNSRSRSKSQPKKEMKAKSRSRSASHTKTRGTSKTDSKTHYKSGSRYEKESRKKEPPRSKSQSRSQSRSRSKSRSRSWTSPKSSGH

SEQ ID NO: 97 - DNA, 689 bp, Homo sapiens
aggaacgagatggcggttctctggaggctgagtgccgtttgcggtgcccaaggaggccgagctggctccaaggctgcatctctccactggactagcgagagggttgtcagtgttttgctcccgggtctgcttccggctgcttatttgaatccttgctctgcgacggactattccctggctgcagccctcactcttcatggtcactggggccttggacaagttgttactgactatgttcatggggatgcctcgcagaaagctgccaaggcagggcttttggcattttcagctttaacctttgctgggctttgctatttcaactatcacgatgtgggcatctgcaaagctgttgccatgctgtggaagctctgacctttttgacttcctactttgaagaattgatgtatgcctctttgcctctgctttgtcatgccattaagctcacaataaggaagaaataacagataagtccattggtggacagccttcttctcttaatcacaagattattttcagaatttaactttgaggaaaaggtttgagaggaattatatttaagttgtgagactgagttctgtattctggtgagttaatggggttgcctcccagcttcttataagactcacagtataactaaacatgatatatcagcttttgccttttaatttctcaatctcttaaagagaatc

SEQ ID NO: 98 - DNA, 1296 bp, Homo sapiens
caggaacgagatggcggttccctggaggctgagtgccgtttgcggtgcccaaggaggccgagctctgttgctgcgaactccagtggtcagacctgctcatatctcagcatttcttcaggaccgacctatcccagaatggtgtggagtgcagcacatacacttgtcaccgagccaccattctggctccaaggctgcatctctccactggactagcgagagggttgtcagtgttttgctcccgggtctgcttccggctgcttatttgaatccttgctctgcgacggactattccctggctgcagccctcactcttcatggtcactggggccttggacaagttgttactgattatgttcatggggatgcctcgcagaaagctgccaaggcagggcttttggcattttcagctttaacctttgctgggctttgctatttcaactatcacgatgtgggcatctgcaaagctgttgccatgctgtggaagctctgacctttttgacttcctactttgaagaattgatgtatgcctctttgcctctgctttgtcatgccattaagctcacaataaggaagaaataacagataagcccattggtggacagccttcttctcttaatcacaagattattttcagaatttaatctttgaggaaaaggtttgagaggaattatatctaagttgtgagactgagttctgtattctggtgagttaatggggttgcctcccagcttcttataagactcacaatataactaaacatgatatatcagcttttgccttttaatttctcaatctcttaaagagaatccagctttattatgattagtacatgatcaaatttccatatttgccttgggaataatggacaaagggaaatactcttaattcatgaataaaaactttgcagaaaattagacagtgtttaattttcaaaaacttccctctctagtcagtagataccacctactgatggttacatatactagggaaattttaaaattaggaaatgctgctatctcatattataaatttctaaatcctaggaagaaacgcttggagtgcttctgaagatacagaagttccatttaagggcaagtttccccagagacatatcaaaatattatccattgtaaactgagatttaattctcaaatgtattctacttgttctaaaacaatctgtccacaaatataaaactataagtaataaattgttatttccgcacaatgggaatctctaatgtgaaaatgtattctatgaaaataatttttttaaataaaatgttgtataaaaaaa

SEQ ID NO: 99 - DNA, 1344 bp, Homo sapiens
agagagaaaggttgtgatggcggctatagctgcatccgaggtgctggtggacagcgcggaggaggggtccctcgctgcggcggcggagctggccgctcagaagcgcgaacagagactgcgcaaattccgggagctgcacctgatgcggaatgaagctcgtaaattaaatcaccaggaagttgtggaagaagataaaagactaaaattacctgcaaattgggaagccaaaaaagctcgtttggagtgggaactaaaggaagaggaaaagaaaaaggaatgtgcggcaagaggagaagactatgagaaagtgaagttgctggagatcagtgcagaagatgcagaaagatgggagaggaaaaagaagaggaaaaaccctgatctgggattttcagattatgctgctgcccagttacgccagtatcatcggttgaccaagcagatcaaacctgacatggaaacatatgagagactgagagaaaaacatggagaagagtttttcccaacatccaatagtcttcttcatggaacacatgtgccttccacagaggaaattgacaggatggtcatagatctggaaaaacagattgaaaaacgagacaaatatagccggagacgtccttataatgatgatgcagatatcgactacattaatgaaaggaatgccaaattcaacaagaaagctgaaagattctatgggaaatacacagctgaaattaaacagaatttggaaagaggaacagctgtctaatcccttcaagaactgtttatagaagcttgagaatggggtaaaaatttctgctagcaaaatcaagttctttttgaaattttatcagtaatccagaatttagtagtccatgccttctcactcagcatttagaaataaaaatgtggtttcttaaacgtatatcctttcatgtatatttccacatttttgtgcttggatataagatgtatttcttgtagtgaagttgttttgtaatctactttgtatacattctaattatattatttttctatgtattttaaatgtatatggctgtttaatctttgaagcattttgggcttaagattgccagcagcacacatcagatgcagtcattgttgctatcagtgtggaatttgatagagtctagactcgggccacttggagttgtgtactccaaagctaaggacagtgatgaggaagatggcagtggccaccggaggactggagcagtccctcctcatggcggcctgtgaccaaggtcggggaggagtggagctatccttccatgatctgatcatgtacagttccctttttaaaaagcaataaatgcttgggattagaatttctaaaaaaaaaaa

SEQ ID NO: 100 - protein, 243 aa, Homo sapiens
MAAIAASEVLVDSAEEGSLAAAAELAAQKREQRLRKFRELHLMRNEARKLNHQEVVEEDKRLKLPANWEAKKARLEWELKEEEKKKECAARGEDYEKVKLLEISAEDAERWERKKKRKNPDLGFSDYAAAQLRQYHRLTKQIKPDMETYERLREKHGEEFFPTSNSLLHGTHVPSTEEIDRMVIDLEKQIEKRDKYSRRRPYNDDADIDYINERNAKFNKKAERFYGKYTAEIKQNLERGTAV

SEQ ID NO: 101 - DNA, 4090 bp, Homo sapiens
ggcggcccactctgctctgtcagcttcggagctcctccaccctggctgccgaaagccccttcccgccatctaatgatacactctgcatacgcttctgttgagaatttgtggctagacattcctgtgggaccgggaatccaaattcttggtagctagaggaaaaaaaaataaaacaacagccaaccaagtgaatcccaacccaaccccctgaagggctgaaaattctcgccttcttcagagcggggcatggcatcgaacagcatcttcgactccttcccgacctactcgccgaccttcatccgcgacccaagcaccagccgccgcttcacacctccctccccggccttcccctgcggcggcggcggcggcaagatgggcgagaacagcggcgcgctgagcgcgcaggcggccgtggggcccggagggcgcgcccggcccgaggtgcgctcgatggtggacgtgctggcggaccacgcaggcgagctcgtgcgcaccgacagccccaacttcctctgctccgtgctgccctcgcactggcgctgcaacaagacgctgcccgtcgccttcaaggtggtggcattgggggacgtgccggatggtacggtggtgactgtgatggcaggcaatgacgagaactactccgctgagctgcgcaatgcctcggccgtcatgaagaaccaggtggccaggttcaacgaccttcgcttcgtgggccgcagtgggcgagggaagagtttcaccctgaccatcactgtgttcaccaaccccacccaagtggcgacctaccaccgagccatcaaggtgaccgtggacggaccccgggagcccagacggcaccggcagaagctggaggaccagaccaagccgttccctgaccgctttggggacctggaacggctgcgcatgcgggtgacaccgagcacacccagcccccgaggctcactcagcaccacaagccacttcagcagccagccccagaccccaatccaaggcacctcggaactgaacccattctccgacccccgccagtttgaccgctccttccccacgctgccaaccctcacggagagccgcttcccagaccccaggatgcattatcccggggccatgtcagctgccttcccctacagcgccacgccctcgggcacgagcatcagcagcctcagcgtggcgggcatgccggccaccagccgcttccaccatacctacctcccgccaccctacccgggggccccgcagaaccagagcgggcccttccaggccaacccgtccccctaccacctctactacgggacatcctctggctcctaccagttctccatggtggccggcagcagcagtgggggcgaccgctcacctacccgcatgctggcctcttgcaccagcagcgctgcctctgtcgccgccggcaacctcatgaaccccagcctgggcggccagagtgatggcgtggaggccgacggcagccacagcaactcacccacggccctgagcacgccaggccgcatggatgaggccgtgtggcggccctactgaccgccctggtggactcctcccgctggaggcggggaccctaacaaccttcaagaccagtgatgggccggctccgaggctccgggcgggaatgggacctgcgctccagggtggtctcggtcccagggtggtcccagctggtgggagcctctggctgcatctgtgcagccacatccttgtacagaggcataggttaccacccccaccccggcccgggatactgcccccggcccagatcctggccgtctcatcccatacttctgtggggaatcagcctcctgccacccccccggaaggacctcactgtctccagctatgcccagtgctgcatgggacccatgtctcctgggacagaggccatctctcttccagagagaggcagcattggcccacaggataagcctcaggccctgggaaacctcccgacccctgcaccttcgttggagcccctgcatcccctgggtccagccccctctgcatttacacagatttgagtcagaactggaaagtgtcccccacccccaccaccctcgagcggggttcccctcattgtacagatggggcaggacccagcacgctgctggcagagatggtttgagaacacatccaagccagtccccccagcccagcttcccctccgttcctaactgttggctttcccccagccgcacgggtcccaggccccagagaagatgagtctatggcatcaggttcttaaacccaggaaagcacctacagaccggctcctccatgcactttaccagctcaacgcatccactctctgttctcttggcagggcgggggaggggggataggaggtcccctttcccctaggtggtctcataattccatttgtggagagaacaggagggccagatagataggtcctagcagaaggcattgaggtgagggatcattttgggtcagacatcaatgtccctgtcccccctgggtccagccaagctgtgccccatcccccaagcctcctgggaggatccagccaaatcttgcgactcctggcacacacctgtctgtaacctgttttgtgctctgaaagcaaatagtcctgagcaaaaaaaaaaaaaaaacaaaaaaacaaaaaaaaaacaaaacagtttttaaaactgattttagaaaaagaagcttaatctaacgttttcaaacacaaggtctcttacaggtatagttccgtgattatgatagctctgtgattataagcaacatccccgccccctctcccccccgcggacccccagctgcctcctgagggtgtggggttattagggtctcaatactttctcaaggggctacactccccatcaggcagcatcccaccagcctgcaccacaggctcccctgggaggacgagggaaacgctgatgagacgctgggcatctctcctctgtggctctaggacatctgtccaggaggctgggcggaggtgggcaggatgtgagaggtggggagtactggctgtgcgtggcaggacagaagcactgtaaagggctctccagccgcagctcagctgcactgcgttccgaggtgaagtcttgcccctgaattttgcaaaatgggaaagtgggcgcttgcccaagggccaggctgcatggattctcacatcagagttctctggccctagaaaggcttagaaaaggcgtaagggaactcataaaggctagcagcatgcggtattttaactttctgcctcggcctctgtggatgcagaaatctgccctacaaaatgctcttcattggttgtctctgtgagagcactgtccccacccaacctgtcacaacggccagaaccatacaccagagacacactggcaggttaggcagtccttctggtgatcctattccattccctcctgctgcggtttctcttggcctgtcctcactggaaaaacagtctccatctcctcaaaatagttgctgactccctgcacccaaggggcctctccatgccttcttaggaagcagctatgaatccattgtccttgtagtttcttccctcctgttctctggttatagctggtcccaggtcagcgtgggaggcacctttgggttcccagtgcccagcactttgtagtctcatcccagattactaacccttcctgatcctggagaggcagggatagtaaataaattgctcttcctaccccatcccccatcccctgacaaaaagtgacggcagccgtactgagtctgtaaggcccaaagtgggtacagacagcctgggctggtaaaagtaggtccttatttacaaggctgcgttaaagttgtactaggcaaacacactgatgtaggaagcacgaggaaaggaagacgttttgatatagtgttactgtgagcctgtcagtagtgggtaccaatcttttgtgacatattgtcatgctgaggtgtgacacctgctgcactcatctgatgtaaaaccatcccagagctggcgagaggatggagctgggtggaaactgctttgcactatcgtttgcttggtgtttgtttttaacgcacaacttgcttgtacagtaaactgtcttctgtactatttaactgt

SEQ ID NO: 102 - DNA, 1292 bp, Homo sapiens
caggaacgagatggcggttctctggaggctgagtgccgtttgcggtgcccaaggaggccgagctctgttgctgcgaactccagtggtcagacctgctcatatctcagcatttcttcaggaccgacctatcccagaatggtgtggagtgcagcacatacacttgtcaccgagccaccattctggctccaaggctgcatctctccactggactagcgagagggttgtcagtgttttgctcccgggtctgcttccggctgcttatttgaatccttgctctgcgacggactattccctggctgcagccctcactcttcatggtcactggggccttggacaagttgttactgactatgttcatggggatgcctcgcagaaagctgccaaggcagggcttttggcattttcagctttaacctttgctgggctttgctatttcaactatcacgatgtgggcatctgcaaagctgttgccatgctgtggaagctctgacctttttgacttcctactttgaagaattgatgtatgcctctttgcctctgctttgtcatgccattaagctcacaataaggaagaaataacagataagtccattggtggacagccttcttctcttaatcacaagattattttcagaatttaactttgaggaaaaggtttgagaggaattatatttaagttgtgagactgagttctgtattctggtgagttaatggggttgcctcccagcttcttataagactcacagtataactaaacatgatatatcagcttttgccttttaatttctcaatctcttaaagagaatccagctttagtatgattagcatatgatcaaacttccatatttgccttgggaataatggactaagggaaatactcttaattcatgaataaaaactttgcagaaaattagacagtgtttaattttcaaaaacttccctctctagtcggtagataccacctaccgatggttacatatactagggaaattttaaaattaggaaatgctgatatctcatattataaatttctaaatcctaggaagaaacgcttggagtgcttctgaagatacagaagttccatttaagggcaagtttccccatagacgtatcaaaatattacccattgtaaactgagatttaattctcaaatgtattctacttgttctaaaacaatctgtccacaaatataaaactataagtaataaattgttattttcgcacaatgggaatctctaatgtgaaaatgtattctgtgaaaataaatttttaaataaaatgttgtataataa

SEQ ID NO: 103 - DNA, 689 bp, Homo sapiens; identical to SEQ ID NO: 97

SEQ ID NO: 104 - protein, 132 aa, Homo sapiens [sequence omitted]

SEQ ID NO: 105 - DNA, 1436 bp, Homo sapiens
agtgtggtcaggcggctcggactgagcaggactttccttatcccagttgattgtgcagaatacactgcctatcgcttgtcttctattcaccatggcttcttctgatatccaggtgaaagaactggagaagcgtgcctcaggccaggcttttgagctgattctcagccctcggtcaaaagaatctgttccagaattccccctttcccctccaaagaagaaggatctttccctggaggaaattcagaagaaattagaagctgcagaagaaagacgcaagtcccatgaagctgaggtcttgaagcagctggctgagaaacgagagcacgagaaagaagtgcttcagaaggcaatagaagagaacaacaacttcagtaaaatggcagaagagaaactgacccacaaaatggaagctaataaagagaaccgagaggcacaaatggctgccaaactggaacgtttgcgagagaaggataagcacattgaagaagtgcggaagaacaaagaatccaaagaccctgctgacgagactgaagctgactaatttgttctgagaactgactttctccccatccccttcctaaatatccaaagactgtactggccagtgtcattttattttttccctcctgacaaatattttagaagctaatgtaggactgtataggtagatccagatccagactgtaagatgttgttttaggggctaaaggggagaaactgaaagtgttttactctttttctaaagtgttggtctttctaatgtagctatttttcttgttgcatcttttctacttcagtacacttggtgtactgggttaatggctagtactgtattggctctgtgaaaacatatttgtgaaaagagtatgtagtggcttcttttgaactgttagatgctgaatatctgttcacttttcaatcccaattctgtcccaatcttaccagatgctactggacttgaatggttaataaaactgcacagtgctgttggtggcagtgacttcttttgagttaggttaataaatcaagccatagagcccctcctggttgatacttgttccagatggggcctttggggctggtagaaatacccaacgcacaaatgaccgcacgttctctgccccgtttcttgccccagtgtggtttgcattgtctccttccacaatgactgctttgtttggatgcctcagcccaggtcagctgttactttctttcagatgtttatttgcaaacaaccattttttgttctgtgtcccttttaaaaggcagattaaaagcacaagcgtgtttctagagaacagttgagagagaatctcaagattctacttggtggtttgcttgctctacgttacaggtggggcatgtcctcatcctttcctgccataaaagctatgacacgagaatcagaatattaataaaactttatgtactgctgt

SEQ ID NO: 106 - protein, 149 aa, Homo sapiens
MASSDIQVKELEKRASGQAFELILSPRSKESVPEFPLSPPKKKDLSLEEIQKKLEAAEERRKSHEAEVLKQLAEKREHEKEVLQKAIEENNNFSKMAEEKLTHKMEANKENREAQMAAKLERLREKDKHIEEVRKNKESKDPADETEAD

SEQ ID NO: 107 - DNA, 3510 bp, Homo sapiens
gtgcaacggccgttagaggagctgagggagggaaccaccgctcaccgcagacgtagtggctgcagtcagtcttcccgagtgagggatttcgccgcccgctttcaggcccgtttggcttaaataactgtgattgatggccatgcaggagaaatatccaactgaggggatctctcacgtcacttcaccgagttccgatgtgattcagaagggcagttccctggggactgaatggcagaccccagttatctcggagccctttcggagccgcttcagccgctgttcaagtgtagccgacagtggggacacagccattggtacatcatgctcagatattgcggaggatttttgcagctcaagtggcagtcctcctttccagcccatcaaaagccacgtaaccattccaacagcccatgtgatgccttctactttagggacctctcctgccaagccaaattctacacctgttggaccctcttcctctaaactccctttgtcagggttggctgaaagtgtgggaatgacaagaaatggagacctcggtgcaatgaaacattctccaggcctatctagagatctcatgtatttctctggtgctactggagaaaatggaattgagcagtcctggtttccagcagtgggccatgaaagacaagaagaggcgaggaagtttgatattcctagcatggaatctaccctcaatcagtcggcaatgatggagacactttattcagatcctcaccaccgagtccgcttccacaacccaagaaccagcacaagtaaggagttgtacagagtgttgcctgaggccaagaaggcaccgggcagcggggcagtgtttgagcggaatggaccacattctaatagcagtggggtcctccctttgggactccagcctgctcccgggcactccagccagcctctgccctctcaggtgtggcagccgagtcctgacacttggcatccccgagagcaatcttgtgaactcagcacttgtcggcagcagctggaattgattcgtttacagatggagcaaatgcagcttcagaatggagccatctgccaccatcctgctgcttttggtccttcactgcccatcttagagccagcacagtggatcagcatcttgaacagtaatgaacaccttctgaaggaaaaagagcttctcattgacaagcagaggaaacacatctctcagctggagcagaaagtgcgagagagcgaactgcaagtccacagtgccctcttgggccgccctgccccctttggtgatgtctgcttgctgaggctacaggaattgcagcgagaaaacactttcttacgtgcacagtttgcacagaagacagaagccttgagcagagaaaagattgaccttgaaaagaaactctctgcttctgaagttgaagtccagctcatcagagagtcgctcaaagtggcgttgcagaagcattctgaggaagtgaagaaacaggaagaaagggtcaaaggtcgtgataaacatatcaataatttgaaaaagaaatgccagaaggaatcagagcagaaccgggagaagcagcagcgtattgagaccttggagcgctacctggctgacctgcccacactggaagaccatcagaagcagagccagcagcttaaggattctgagttgaagagcacagagctgcaggagaaagtgactgagctggagagtttgctggaggagacccaggcaatctgcagagagaaggagattcaactggaaagcctgaggcagagagaagcagaattctcctccgctggacatagcctgcaagataaacagtctgtggaggagaccagtggagaaggtccagaagtggaaatggagtcctggcagaagcgatacgattcgctccaaaagattgtggagaagcagcagcagaagatggatcagttgcgctcacaagtacagagcctagagcaggaagtggctcaagaagaaggaacaagccaggccctgagagaggaggcccagcgaagggattcagccctgcagcagctgcgcacagccgtgaaggagctttcagtgcaaaaccaggacttgattgagaagaatctgacactccaggaacacctgcgccaggcccaaccagggtctccaccttcaccagacacggcccagctggcacttgagctgcaccaggagttggccagttgccttcaagatctgcaggctgtctgtagcattgtgacccagagggcccagggccatgaccccaatctctccctgctcctgggcattcactcacagcacccagagactcagctagatttgcagaagccagatgtgatcaagaggaaactagaagaggttcaacagctgcgtcgtgacattgaggacttaaggaccaccatgtcagacagatatgcccaggacatgggagaaaactgtgtcacacagtgaggaattctgggggattcccccagggaggagctgggctgctgagagcctagtccagcaggtttctgccctgacattctcttgtctgctattcccagagaggtctcagaggggaggggagagcctgcatctgggggccaagggctgattagggaactgtgtcctacccacactggcatgttggattacgtttgtcctgttaattcactctcgacggtgagttactaattaacttttggcaggtacaacagataagtcctcacaaactgttcccagccctaggctgacatgagagacgaacaggctgtccacctttcttctccatccaatgggatggatccatgttcattcccacttcacaccttggtcctgctgattagagagctcatcagaggggcctggaaaggctgagcaagtaccagtgacaatggccatttaagaattctcaggccccatgtgccagccttcttgggaactgagctggctttctgggttttctcatgcctggtcttactgcttcttcctcagggctcttgttctcccagaagcctcagggtaatgtgttggttagcacgtaactactaggattggggccctagggattatagccaggactctaatctgcctaccatgccatttaacaagagatcccactctccagctgccttgtgtccctagggtcctggccatgtgtttagtgtgctaaactttctcctttgttctcaggccttccaggtagtccccttcctggacttaagagtgcaaactcttctctgtggttctagccttgggcagaattatatcccagagaccacagagcaactgtcaagctgcttaccccctcacccagggctacagcctgtgcccagccctctaatttgtgcctctcttgtgttgggggtggtgggggttattcctttccctttcctgctctggcctccttgaaagttcagagtacccagtacaagtcagccaccatgctgacgggtatttttcctcataaagtttataaccagttatttatatgaatctttgttatgtccatttgtttgtattgcgtattttgattataaaataaagtatcttaacag

SEQ ID NO: 108 - protein, 762 aa, Homo sapiens
MAMQEKYPTEGISHVTSPSSDVIQKGSSLGTEWQTPVISEPFRSRFSRCSSVADSGDTAIGTSCSDIAEDFCSSSGSPPFQPIKSHVTIPTAHVMPSTLGTSPAKPNSTPVGPSSSKLPLSGLAESVGMTRNGDLGAMKHSPGLSRDLMYFSGATGENGIEQSWFPAVGHERQEEARKFDIPSMESTLNQSAMMETLYSDPHHRVRFHNPRTSTSKELYRVLPEAKKAPGSGAVFERNGPHSNSSGVLPLGLQPAPGHSSQPLPSQVWQPSPDTWHPREQSCELSTCRQQLELIRLQMEQMQLQNGAICHHPAAFGPSLPILEPAQWISILNSNEHLLKEKELLIDKQRKHISQLEQKVRESELQVHSALLGRPAPFGDVCLLRLQELQRENTFLRAQFAQKTEALSREKIDLEKKLSASEVEVQLIRESLKVALQKHSEEVKKQEERVKGRDKHINNLKKKCQKESEQNREKQQRIETLERYLADLPTLEDHQKQSQQLKDSELKSTELQEKVTELESLLEETQAICREKEIQLESLRQREAEFSSAGHSLQDKQSVEETSGEGPEVEMESWQKRYDSLQKIVEKQQQKMDQLRSQVQSLEQEVAQEEGTSQALREEAQRRDSALQQLRTAVKELSVQNQDLIEKNLTLQEHLRQAQPGSPPSPDTAQLALELHQELASCLQDLQAVCSIVTQRAQGHDPNLSLLLGIHSQHPETQLDLQKPDVIKRKLEEVQQLRRDIEDLRTTMSDRYAQDMGENCVTQ

SEQ ID NO: 109 - DNA, 3483 bp, Homo sapiens
gtagcagcttcttctccgaaccaaccctttgccttcggacttctccggggccagcagccgcccgaccaggggcccggggccacgggctcagccgacgaccatgggctccgtgtccaaccagcagtttgcaggtggctgcgccaaggcggcagaagaggcgcccgaggaggcgccggaggacgcggcccgggcggcggacgagcctcagctgctgcacggtgcgggcatctgtaagtggttcaacgtgcgcatggggttcggcttcctgtccatgaccgcccgcgccggggtcgcgctcgaccccccagtggatgtctttgtgcaccagagtaagctgcacatggaagggttccggagcttgaaggagggtgaggcagtggagttcacctttaagaagtcagccaagggtctggaatccatccgtgtcaccggacctggtggagtattctgtattgggagtgagaggcggccaaaaggaaagagcatgcagaagcgcagatcaaaaggagacaggtgctacaactgtggaggtctagatcatcatgccaaggaatgcaagctgccaccccagcccaagaagtgccacttctgccagagcatcagccatatggtagcctcatgtccgctgaaggcccagcagggccctagtgcacagggaaagccaacctactttcgagaggaagaagaagaaatccacagccctaccctgctcccggaggcacagaattgagccacaatgggtgggggctattcttttgctatcaggaagttttgaggagcaggcagagtggagaaagtgggaatagggtgcattggggctagttggcactgccatgtatctcaggcttgggttcacaccatcaccctttcttccctctaggtggggggaaagggtgagtcaaaggaactccaaccatgctctgtccaaatgcaagtgagggttctgggggcaaccaggaggggggaatcaccctacaacctgcatactttgagtctccatccccagaatttccagcttttgaaagtggcctggatagggaagttgttttccttttaaagaaggatatataataattcccatgccagagtgaaatgattaagtataagaccagattcatggagccaagccactacattctgtggaaggagatctctcaggagtaagcattgtttttttttcacatcttgtatcctcatacccacttttgggatagggtgctggcagctgtcccaagcaatgggtaatgatgatggcaaaaagggtgtttgggggaacagctgcagacctgctgctctatgctcacccccgccccattctgggccaatgtgattttatttatttgctcccttggatactgcaccttgggtcccactttctccaggatgccaactgcactagctgtgtgcgaatgacgtatcttgtgcattttaactttttttccttaatataaatattctggttttgtatttttgtatattttaatctaaggccctcatttcctgcactgtgttctcaggtacatgagcaatctcagggatagccagcagcagctccaggtctgcgcagcaggaattactttttgttgtttttgccaccgtggagagcaactatttggagtgcacagcctattgaactacctcatttttgccaataagagctggcttttctgccatagtgtcctcttgaaaccccctctgccttgaaaatgttttatgggagactaggttttaactgggtggccccatgacttgattgccttctactggaagattgggaattagtctaaacaggaaatggtggtacacagaggctaggagaggctgggcccggtgaaaaggccagagagcaagccaagattaggtgagggttgtctaatcctatggcacaggacgtgctttacatctccagatctgttcttcaccagattaggttaggcctaccatgtgccacagggtgtgtgtgtgtttgtaaaactagagttgctaaggataagtttaaagaccaatacccctgtacttaatcctgtgctgtcgagggatggatatatgaagtaaggtgagatccttaacctttcaaaattttcgggttccagggagacacacaagcgagggttttgtggtgcctggagcctgtgtcctgccctgctacagtagtgattaatagtgtcatggtagctaaaggagaaaaagggggtttcgtttacacgctgtgagatcaccgcaaacctaccttactgtgttgaaacgggacaaatgcaatagaacgcattgggtggtgtgtgtctgatcctgggttcttgtctcccctaaatgctgccccccaagttactgtatttgtctgggctttgtaggacttcactacgttgattgctaggtggcctagtttgtgtaaatataatgtattggtctttctccgtgttctttgggggttttgtttacaaacttctttttgtattgagagaaaaatagccaaagcatctttgacagaaggttctgcaccaggcaaaaagatctgaaacattagtttggggggccctcttcttaaagtggggatcttgaaccatcctttcttttgtattccccttcccctattacctattagaccagatcttctgtcctaaaaacttgtcttctaccctgccctcttttctgttcacccccaaaagaaaacttacacacccacacacatacacatttcatgcttggagtgtctccacaactcttaaatgatgtatgcaaaaatactgaagctaggaaaaccctccatcccttgttcccaacctcctaagtcaagaccattaccatttctttctttcttttttttttttttttaaaatggagtctcactgtgtcacccaggcagaggttgcagtgagctgagatcgcaccactgcactccagcctggttacagagcaagactctgtctcaaacaaaacaaaacaaaacaaaaacacactactgtattttggatggatcaaacctccttaattttaatttctaatcctaaagtaaagagatgcaattgggggccttccatgtagaaagtggggtcaggaggccaagaaagggaatatgaatgtatatccaagtcactcaggaacttttatgcaggtgctagaaactttatgtcaaagtggccacaagattgtttaataggagacgaacgaatgtaactccatgtttactgctaaaaaccaaagctttgtgtaaaatcttgaatttatggggcgggagggtaggaaagcctgtacctgtctgtttttttcctgatccttttccctcattcctgaactgcaggagactgagcccctttgggctttggtgaccccatcactggggtgtgtttatttgatggttgattttgctgtactgggtacttcctttcccattttctaatcattttttaacacaagctgactcttcccttcccttctcctttccctgggaaaatacaatgaataaataaagacttattggtacgc

SEQ ID NO: 110 - DNA, 1198 bp, Homo sapiens
gagcagtgtgaagaagaggcgagaacgacccccggaccgaccaaagcccgcgcgccgctgcatcccgcgtccagcacctacgtcccgctgccgtcgccgccgccaccatgcccaagagaaaggctgaaggggatgctaagggagataaagcaaaggtgaaggacgaaccacagagaagatccgcgaggttgtctgctaaacctgctcctccaaagccagagcccaagcctaaaaaggcccctgcaaagaagggagagaaggtacccaaagggaaaaagggaaaagctgatgctggcaaggaggggaataaccctgcagaaaatggagatgccaaaacagaccaggcacagaaagctgaaggtgctggagatgccaagtgaagtgtgtgcatttttgataactgtgtacttctggtgactgtacagtttgaaatactattttttatcaagttttataaaaatgcagaattttgttttactttttttttttttttaaaagctatgttgttagcacacagaacacttcattgttgtttttgggggaaggggcatatgtcactaatagaatgtctccaaagctggattgatgtggagaaaacacctttcccttctagttttgagagacttcctcttggctcccaggaggagggattccctgactttgacacacatggccaccttggcacaaaagccttgtggtatagaaaaacaaatttgtttttatgtcctcttctccctttccatctttcagcatagacttaactcccttaagcccagacatctgttgagacctgacccctagtcattggttaccagtgtgtcaggcaatctggactttccagtgatgccactgagatggcacctgtcaaaagagcagtggttccatttctagattgtggatcttcagataaattctgccattttcatttcacttcctgaaagtcagggtcggcttgtgaaaagttgttaaacaacatgctaaatgtgaaatgtcaaccctcactctaaactttccctgttcagagcatcagatgaagacttcattgggttttatagtggctttctgatttttggtagtccattgaagaagggagtttgaaagttgttgtatactgttaacgattgtctgcccatgtcctgcctgaaataccatgattgtttatggaaagtatctttaataaagctggatacagtttggc

SEQ ID NO: 111 - protein, 90 aa, Homo sapiens
MPKRKAEGDAKGDKAKVKDEPQRRSARLSAKPAPPKPEPKPKKAPAKKGEKVPKGKKGKADAGKEGNNPAENGDAKTDQAQKAEGAGDAK

SEQ ID NO: 112 - DNA, 7592 bp, Homo sapiens
  unsure 326: unknown base
  unsure 327: unknown base
  unsure 328: unknown base
  unsure 329: unknown base
  unsure 330: unknown base
  unsure 331: unknown base
  unsure 332: unknown base
  unsure 333: unknown base
  unsure 334: unknown base
  unsure 335: unknown base
  unsure 336: unknown base
  unsure 337: unknown base
  unsure 338: unknown base
  unsure 339: unknown base
  unsure 340: unknown base
  unsure 341: unknown base
  unsure 342: unknown base
  unsure 343: unknown base
  unsure 344: unknown base
  unsure 345: unknown base
  unsure 346: unknown base
  unsure 347: unknown base
  unsure 348: unknown base
  unsure 349: unknown base
  unsure 350: unknown base
  unsure 351: unknown base
  unsure 352: unknown base
  unsure 353: unknown base
  unsure 354: unknown base
  unsure 355: unknown base
  unsure 356: unknown base
  unsure 357: unknown base
  unsure 358: unknown base
  unsure 359: unknown base
  unsure 360: unknown base
  unsure 361: unknown base
  unsure 362: unknown base
  unsure 363: unknown base
  unsure 364: unknown base
  unsure 365: unknown base
  unsure 366: unknown base
  unsure 367: unknown base
  unsure 368: unknown base
  unsure 369: unknown base
  unsure 370: unknown base
  unsure 371: unknown base
  unsure 372: unknown base
  unsure 373: unknown base
  unsure 374: unknown base
  unsure 375: unknown base
  unsure 376: unknown base
  unsure 377: unknown base
  unsure 378: unknown base
  unsure 379: unknown base
  unsure 380: unknown base
  unsure 381: unknown base
  unsure 382: unknown base
  unsure 383: unknown base
  unsure 384: unknown base
  unsure 385: unknown base
  unsure 386: unknown base
  unsure 387: unknown base
  unsure 388: unknown base
  unsure 389: unknown base
  unsure 390: unknown base
  unsure 391: unknown base
  unsure 392: unknown base
  unsure 393: unknown base
  unsure 394: unknown base
  unsure 395: unknown base
  unsure 396: unknown base
  unsure 397: unknown base
  unsure 398: unknown base
  unsure 399: unknown base
  unsure 400: unknown base
  unsure 401: unknown base
  unsure 402: unknown base
  unsure 403: unknown base
  unsure 404: unknown base
  unsure 405: unknown base
  unsure 406: unknown base
  unsure 407: unknown base
  unsure 408: unknown base
  unsure 409: unknown base
  unsure 410: unknown base
  unsure 411: unknown base
  unsure 412: unknown base
  unsure 413: unknown base
  unsure 414: unknown base
  unsure 415: unknown base
  unsure 416: unknown base
  unsure 417: unknown base
  unsure 418: unknown base
  unsure 419: unknown base
  unsure 420: unknown base
  unsure 421: unknown base
  unsure 422: unknown base
  unsure 423: unknown base
  unsure 424: unknown base
  unsure 425: unknown base
gaaagcggagagtcacagcggggccaggccctggggagcggagcctccaccgcccccctcattcccaggcaagggcttggggggaatgagccgggagagccgggtcccgagcctacagagccgggagcagctgagccgccggcgcctcggccgccgccgccgcctcctcctcctccgccgccgccagcccggagcctgagccggcggggcgggggggagaggagcgagcgcagcgcagcagcggagccccgcgaggcccgcccgggcgggtggggagggcagcccgggggactgggccccggggcggggtgggagggggggagaannnnnnnnnnnnnnnnnnnnnnnnnnnnnnnnnnnnnnnnnnnnnnnnnnnnnnnnnnnnnnnnnnnnnnnnnnnnnnnnnnnnnnnnnnnnnnnnnnnntcgaggcggcggctgcggcagcggccgagcgcggtggaaatgaaggcagccgccgggcaggaaagcgagggccccgccgtggggccgccgcatccgctgggaaaggagctgctggacggggccgagagcaatgggggtggcggcggcggcggagccggcagcggcggcgggcccggcgcggagccggacctgaagaactcgaacgggaacgcgggccctaggcccgccctgaacaataacctcacggagccgcccggcggcggcggtggcggcagcagcgatggggtgggggcgcctcctcactcagccgcggccgccttgccgcccccagcctacggcttcgggcaaccctacggccggagcccgtctgccgtcgccgccgccgcggccgccgtcttccaccaacaacatggcggacaacaaagccctggcctggcagcgctgcagagcggcggcggcgggggcctggagccctacgcggggccccagcagaactctcacgaccacggcttccccaaccaccagtacaactcctactaccccaaccgcagcgcctaccccccgcccgccccggcctacgcgctgagctccccgagaggtggcactccgggctccggcgcggcggcggctgccggctccaagccgcctccctcctccagcgcctccgcctcctcgtcgtcttcgtccttcgctcagcagcgcttcggggccatggggggaggcggcccctccgcggccggcgggggaactccccagcccaccgccacccccaccctcaaccaactgctcacgtcgcccagctcggcccggggctaccagggctaccccgggggcgactacagtggcgggccccaggacgggggcgccggcaagggcccggcggacatggcctcgcagtgttggggggctgcggcggcggcagctgcggcggcggccgcctcgggaggggcccaacaaaggagccaccacgcgcccatgagccccgggagcagcggcggcggggggcagccgctcgcccggacccctcagccatccagtccaatggatcagatgggcaagatgagacctcagccatatggcgggactaacccatactcgcagcaacagggacctccgtcaggaccgcagcaaggacatgggtacccagggcagccatacgggtcccagaccccgcagcggtacccgatgaccatgcagggccgggcgcagagtgccatgggcggcctctcttatacacagcagattcctccttatggacaacaaggccccagcgggtatggtcaacagggccagactccatattacaaccagcaaagtcctcaccctcagcagcagcagccaccctactcccagcaaccaccgtcccagacccctcatgcccaaccttcgtatcagcagcagccacagtctcaaccaccacagctccagtcctctcagcctccatactcccagcagccatcccagcctccacatcagcagtccccggctccatacccctcccagcagtcgacgacacagcagcacccccagagccagcccccctactcacagccacaggctcagtctccttaccagcagcagcaacctcagcagccagcaccctcgacgctctcccagcaggctgcgtatcctcagccccagtctcagcagtcccagcaaactgcctattcccagcagcgcttccctccaccgcaggagctatctcaagattcatttgggtctcaggcatcctcagccccctcaatgacctccagtaagggagggcaagaagatatgaacctgagccttcagtcaagaccctccagcttgcctgatctatctggttcaatagatgacctccccatggggacagaaggagctctgagtcctggagtgagcacatcagggatttccagcagccaaggagagcagagtaatccagctcagtctcctttctctcctcatacctcccctcacctgcctggcatccgaggcccttccccgtcccctgttggctctcccgccagtgttgctcagtctcgctcaggaccactctcgcctgctgcagtgccaggcaaccagatgccacctcggccacccagtggccagtcggacagcatcatgcatccttccatgaaccaatcaagcattgcccaagatcgaggttatatgcagaggaacccccagatgccccagtacagttccccccagcccggctcagccttatctccgcgtcagccttccggaggacagatacacacaggcatgggctcctaccagcagaactccatggggagctatggtccccaggggggtcagtatggcccacaaggtggctaccccaggcagccaaactataatgccttgcccaatgccaactaccccagtgcaggcatggctggaggcataaaccccatgggtgccggaggtcaaatgcatggacagcctggcatcccaccttatggcacactccctccagggaggatgagtcacgcctccatgggcaaccggccttatggccctaacatggccaatatgccacctcaggttgggtcagggatgtgtcccccaccagggggcatgaaccggaaaacccaagaaactgctgtcgccatgcatgttgctgccaactctatccaaaacaggccgccaggctaccccaatatgaatcaagggggcatgatgggaactggacctccttatggacaagggattaatagtatggctggcatgatcaaccctcagggacccccatattccatgggtggaaccatggccaacaattctgcagggatggcagccagcccagagatgatgggccttggggatgtaaagttaactccagccaccaaaatgaacaacaaggcagatgggacacccaagacagaatccaaatccaagaaatccagttcttctactacaaccaatgagaagatcaccaagttgtatgagctgggtggtgagcctgagaggaagatgtgggtggaccgttatctggccttcactgaggagaaggccatgggcatgacaaatctgcctgctgtgggtaggaaacctctggacctctatcgcctctatgtgtctgtgaaggagattggtggattgactcaggtcaacaagaacaaaaaatggcgggaacttgcaaccaacctcaatgtgggcacatcaagcagtgctgccagctccttgaaaaagcagtatatccagtgtctctatgcctttgaatgcaagattgaacggggagaagaccctcccccagacatctttgcagctgctgattccaagaagtcccagcccaagatccagcctccctctcctgcgggatcaggatctatgcaggggccccagactccccagtcaaccagcagttccatggcagaaggaggagacttaaagccaccaactccagcatccacaccacacagtcagatccccccattgccaggcatgagcaggagcaattcagttgggatccaggatgcctttaatgatggaagtgactccacattccagaagcggaattccatgactccaaaccctgggtatcagcccagtatgaatacctctgacatgatggggcgcatgtcctatgagccaaataaggatccttatggcagcatgaggaaagctccagggagtgatcccttcatgtcctcagggcagggccccaacggcgggatgggtgacccctacagtcgtgctgccggccctgggctaggaaatgtggcgatgggaccacgacagcactatccctatggaggtccttatgacagagtgaggacggagcctggaatagggcctgagggaaacatgagcactggggccccacagccgaatctcatgccttccaacccagactcggggatgtattctcctagccgctaccccccgcagcagcagcagcagcagcagcaacgacatgattcctatggcaatcagttctccacccaaggcaccccttctggcagccccttccccagccagcagactacaatgtatcaacagcaacagcagaattacaagcggccaatggatggcacatatggccctcctgccaagcggcacgaaggggagatgtacagcgtgccatacagcactgggcaggggcagcctcagcagcagcagttgcccccagcccagccccagcctgccagccagcaacaagctgcccagccttcccctcagcaagatgtatacaaccagtatggcaatgcctatcctgccactgccacagctgctactgagcgccgaccagcaggcggcccccagaaccaatttccattccagtttggccgagaccgtgtctctgcaccccctggcaccaatgcccagcaaaacatgccaccacaaatgatgggcggccccatacaggcatcagctgaggttgctcagcaaggcaccatgtggcaggggcgtaatgacatgacctataattatgccaacaggcagagcacgggctctgccccccagggccccgcctatcatggcgtgaaccgaacagatgaaatgctgcacacagatcagagggccaaccacgaaggctcgtggccttcccatggcacacgccagcccccatatggtccctctgcccctgtgccccccatgacaaggccccctccatctaactaccagcccccaccaagcatgcagaatcacattcctcaggtatccagccctgctcccctgccccggccaatggagaaccgcacctctcctagcaagtctccattcctgcactctgggatgaaaatgcagaaggcaggtcccccagtacctgcctcgcacatagcacctgcccctgtgcagccccccatgattcggcgggatatcaccttcccacctggctctgttgaagccacacagcctgtgttgaagcagaggaggcggctcacaatgaaagacattggaaccccggaggcatggcgggtaatgatgtccctcaagtctggtctcctggcagagagcacatgggcattagataccatcaacatcctgctgtatgatgacaacagcatcatgaccttcaacctcagtcagctcccagggttgctagagctccttgtagaatatttccgacgatgcctgattgagatctttggcattttaaaggagtatgaggtgggtgacccaggacagagaacgctactggatcctgggaggttcagcaaggtgtctagtccagctcccatggagggtggggaagaagaagaagaacttctaggtcctaaactagaagaggaagaagaagaggaagtagttgaaaatgatgaggagatagccttttcaggcaaggacaagccagcttcagagaatagtgaggagaagctgatcagtaagtttgacaagcttccagtaaagatcgtacagaagaatgatccatttgtggtggactgctcagataagcttgggcgtgtgcaggagtttgacagtggcctgctgcactggcggattggtgggggggacaccactgagcatatccagacccacttcgagagcaagacagagctgctgccttcccggcctcacgcaccctgcccaccagcccctcggaagcatgtgacaacagcagagggtacaccagggacaacagaccaggaggggcccccacctgatggacctccagaaaaacggatcacagccactatggatgacatgttgtctactcggtctagcaccttgaccgaggatggagctaagagttcagaggccatcaaggagagcagcaagtttccatttggcattagcccagcacagagccaccggaacatcaagatcctagaggacgaaccccacagtaaggatgagaccccactgtgtacccttctggactggcaggattctcttgccaagcgctgcgtctgtgtgtccaataccattcgaagcctgtcatttgtgccaggcaatgactttgagatgtccaaacacccagggctgctgctcatcctgggcaagctgatcctgctgcaccacaagcacccagaacggaagcaggcaccactaacttatgaaaaggaggaggaacaggaccaaggggtgagctgcaacaaagtggagtggtggtgggactgcttggagatgctccgggaaaacaccttggttacactcgccaacatctcggggcagttggacctatctccataccccgagagcatttgcctgcctgtcctggacggactcctacactgggcagtttgcccttcagctgaagcccaggaccccttttccaccctgggccccaatgccgtcctttccccgcagagactggtcttggaaaccctcagcaaactcagcatccaggacaacaatgtggacctgattctggccacaccccccttcagccgcctggagaagttgtatagcactatggtgcgcttcctcagtgaccgaaagaacccggtgtgccgggagatggctgtggtactgctggccaacctggctcagggggacagcctggcagctcgtgccattgcagtgcagaagggcagtatcggcaacctcctgggcttcctagaggacagccttgccgccacacagttccagcagagccaggccagcctcctccacatgcagaacccaccctttgagccaactagtgtggacatgatgcggcgggctgcccgcgcgctgcttgccttggccaaggtggacgagaaccactcagagtttactctgtacgaatcacggctgttggacatctcggtatcaccgttgatgaactcattggtttcacaagtcatttgtgatgtactgtttttgattggccagtcatgacagccgtgggacacctcccccccccgtgtgtgtgtgcgtgtgtggagaacttagaaactgactgttgccctttatttatgcaaaaccacctcagaatccagtttaccctgtgctgtccagcttctcccttgggaaaaagtctctcctgtttctctctcctccttccacctcccctccctccatcacctcacgcctttctgttccttgtcctcaccttactcccctcaggaccctaccccaccctctttgaaaagacaaagctctgcctacatagaagactttttttattttaaccaaagttactgttgtttacagtgagtttggggaaaaaaaataaaataaaaatggctttcccagtccttgcatcaacgggatgccacatttcataactgtttttaatggtaaaaaaaaaaaaaa

SEQ ID NO: 113 - DNA, 1818 bp, Homo sapiens
caacaatgtggacctgattctggccacaccccccttcagccgcctggagaagttgtatagcactatggtgcgcttcctcagtgaccgaaagaacccggtgtgccgggagatggctgtggtactgctggccaacctggctcagggggacagcctggcagctcgtgccattgcagtgcagaagggcagtatcggcaacctcctgggcttcctagaggacagccttgccgccacacagttccagcagagccaggccagcctcctccacatgcagaacccaccctttgagccaactagtgtggacatgatgcggcgggctgcccgcgcgctgcttgccttggccaaggtggacgagaaccactcagagtttactctgtacgaatcacggctgttggacatctcggtatcaccgttgatgaactcattggtttcacaagtcatttgtgatgtactgtttttgattggccagtcatgacagccgtgggacacctcccccccccgtgtgtgtgtgcgtgtgtggagaacttagaaactgactgttgccctttatttatgcaaaaccacctcagaatccagtttaccctgtgctgtccagcttctcccttgggaaaaagtctctcctgtttctctctcctccttccacctcccctccctccatcacctcacgcctttctgttccttgtcctcaccttactcccctcaggaccctaccccaccctctttgaaaagacaaagctctgcctacatagaagactttttttattttaaccaaagttactgttgtttacagtgagtttggggaaaaaaaataaaataaaaatggctttcccagtccttgcatcaacgggatgccacatttcataactgtttttaatggtaaaaaaaaaaaaaaaaaatacaaaaaaaaattctgaaggacaaaaaaggtgactgctgaactgtgtgtggtttattgttgtacattcacaatcttgcaggagccaagaagttcgcagttgtgaacagaccctgttcactggagaggcctgtgcagtagagtgtagaccctttcatgtactgtactgtacacctgatactgtaaacatactgtaataataatgtctcacatggaaacagaaaacgctgggtcagcagcaagctgtagtttttaaaaatgtttttagttaaacgttgaggagaaaaaaaaaaaaggcttttcccccaaagtatcatgtgtgaacctacaacaccctgacctctttctctcctccttgattgtatgaataaccctgagatcacctcttagaactggttttaacctttagctgcagcggctacgctgccacgtgtgtatatatatgacgttgtacattgcacatacccttggatccccacagtttggtcctcctcccagctacccctttatagtatgacgagttaacaagttggtgacctgcacaaagcgagacacagctatttaatctcttgccagatatcgcccctcttggtgcgatgctgtacaggtctctgtaaaaagtccttgctgtctcagcagccaatcaacttatagtttatttttttctgggtttttgttttgttttgttttctttctaatcgaggtgtgaaaaagttctaggttcagttgaagttctgatgaagaaacacaattgagattttttcagtgataaaatctgcatatttgtatttcaacaatgtagctaaaacttgatgtaaattcctcctttttttccttttttggcttaatgaatatcatttattcagtatgaaatctttatactatatgttccacgtgttaagaataaatgtacattaaatcttggt

SEQ ID NO: 114 - DNA, 1200 bp, Homo sapiens
attggtcccaggcagcagttagcccgccgcccgcctgtgtgtccccagagccatggagagagccagtctgatccagaaggccaagctggcagagcaggccgaacgctatgaggacatggcagccttcatgaaaggcgccgtggagaagggcgaggagctctcctgcgaagagcgaaacctgctctcagtagcctataagaacgtggtgggcggccagagggctgcctggagggtgctgtccagtattgagcagaaaagcaacgaggagggctcggaggagaaggggcccgaggtgcgtgagtaccgggtcttctacctgaagatgaagggtgactactaccgctacctggccgaggtggccaccggtgacgacaagaagcgcatcattgactcagcccggtcagcctaccaggaggccatggacatcagcaagaaggagatgccgcccaccaaccccatccgcctgggcctggccctgaacttttccgtcttccactacgagatcgccaacagccccgaggaggccatctctctggccaagaccactttcgacgaggccatggctgatctgcacaccctcagcgaggactcctacaaagacagcaccctcatcatgcagctgctgcgagacaacctgacactgtggacggccgacaacgccggggaagaggggggcgaggctccccaggagccccagagctgagtgttgcccgccaccgccccgccctgccccctccagtcccccaccctgccgagaggactagtatggggtgggaggccccacccttctcccctaggcgctgttcttgctccaaagggctccgtggagagggactggcagagctgaggccacctggggctggggatcccactcttcttgcagctgttgagcgcacctaaccactggtcatgcccccacccctgctctccgcacccgcttcctcccgaccccaggaccaggctacttctcccctcctcttgcctccctcctgcccctgctgcctctgatcgtaggaattgaggagtgtcccgccttgtggctgagaactggacagtggcaggggctggagatgggtgtgtgtgtgtgtgtgtgtgtgtgtgtgtgtgtgcgcgcgcgccagtgcaagaccgagattgagggaaagcatgtctgctgggtgtgaccatgtttcctctcaataaagttcccctgtgacactc

SEQ ID NO: 115 - protein, 248 aa, Homo sapiens [sequence omitted]

SEQ ID NO: 116 - DNA, 1429 bp, Homo sapiens
ccggaagtcgagttagtctagttagtatcggcctgttatctccttttgcgcgacacggtctcagctgttccgcctgaggcgagtgacgctggccgccaacgaggtatacgtactgggaccctcgccctcagtctcgtctccggcgcggctacctgccccgttttccctgtgagttgacctgctccgggccgcgggccgccaatggcaggggccgctccgaccacggccttcgggcaggcggtgaccggcccgccgggctcagggaagaccacgtactgcctgggcatgagtgagttcctgcgcgcgctgggccggcgcgtggcggtggtgaacctggacccggccaacgaggggctgccgtacgagtgtgccgtggacgtgggcgagctggtggggctgggcgacgtgatggacgcgctgcgcctggggcccaacggcggcctgctctactgcatggagtacctggaagccaacctggactggctgcgtgccaagctcgaccccctccgcggccactacttcctcttcgactgcccaggccaggtggagctctgcacgcatcacggcgccttgcgcagcatcttctcccaaatggcgcagtgggacctcaggctgactgccgtccacctcgtggattctcactactgcacagaccctgccaagttcatttcagtactgtgtacctccctggccaccatgctgcacgtggaactgccccacatcaacctcctttccaagatggacctcattgagcattatgggaagctggccttcaacctggactactacacagaggttctggacctctcctacctgcttgaccacctggcttctgaccctttcttccgccactaccgccagctcaatgagaagctagtgcagctcatcgaagactatagccttgtctcctttatccctctcaacatccaggacaaggagagcatccagcgagtcctgcaggctgtggataaagccaatggatactgtttcagagcccaagagcagcgaagcttggaagccatgatgtctgccgcaatgggagccgacttccatttctcttccacactgggcatccaggagaagtacctggcaccctcgaaccagtcagtggagcaggaagccatgcagctgtagcaacaaggtggaccctggagagcaggatgcataatccagcactggggaaagtggaggctcctgatgcaggctgcagacccaagagcaagtcctcccagccagagctggcgggctggcaaggggatattcagctctgcaaaggacttctggccaaaaagccagacatggtgccaagcagaacaccccccatactgtcagtggtgtccgtgagctctgggccctgccaccagaaagtcgagcactggtcctagtcaggctgtgatgaaatgtgctacaatacaagagtttattttct

SEQ ID NO: 117 - protein, 310 aa, Homo sapiens
MAGAAPTTAFGQAVTGPPGSGKTTYCLGMSEFLRALGRRVAVVNLDPANEGLPYECAVDVGELVGLGDVMDALRLGPNGGLLYCMEYLEANLDWLRAKLDPLRGHYFLFDCPGQVELCTHHGALRSIFSQMAQWDLRLTAVHLVDSHYCTDPAKFISVLCTSLATMLHVELPHINLLSKMDLIEHYGKLAFNLDYYTEVLDLSYLLDHLASDPFFRHYRQLNEKLVQLIEDYSLVSFIPLNIQDKESIQRVLQAVDKANGYCFRAQEQRSLEAMMSAAMGADFHFSSTLGIQEKYLAPSNQSVEQEAMQL

SEQ ID NO: 118 - DNA, 1333 bp, Homo sapiens
tagagtcgttgggcccggcgcgacccgcaggagcgtagagagcgcgggactagagtgcagagctccgggacgtggatcggagccggcgcgatgggcggagagcaggaggaggagcggttcgacggcatgttgctggccatggctcagcagcacgagggcggcgtgcaggagcttgtgaacaccttcttcagcttccttcgacgcaaaacagactttttcattggaggagaagaagggatggcagagaagcttatcacacagactttcagccaccacaatcagctggcacagaagacccggcgggagaagagagcccggcaggaggccgagcggcgggagaaggcggagcgggcggccagactggccaaggaagccaagtcagagacctcagggccccagatcaaggagctaactgatgaagaggcagagaggctgcagctagagattgaccagaaaaaggatgcagagaatcatgaggcccagctcaagaacggcagccttgactccccagggaagcaggatactgaggaagatgaggaggaagatgagaaggacaaaggaaaactgaagcccaacctaggcaacggggcagacctgcccaattaccgctggacccagaccctgtcggagctggacctggcggtccctttctgtgtgaacttccggctgaaagggaaggacatggtggtggacatccagcggcggcacctccgggtggggctcaaggggcagccagcgatcattgatggggagctctacaatgaagtgaaggtggaggagagctcgtggctcattgaggacggcaaggtggtgactgtgcatctggagaagatcaataagatggagtggtggagccgcttggtgtccagtgaccctgagatcaacaccaagaagattaaccctgagaattccaagctgtcagacctggacagtgagactcgcagcatggtggaaaagatgatgtatgaccagcgacagaagtccatggggctgccaacttcagacgaacagaagaaacaggagattctgaagaagttcatggatcaacatccggagatggatttttccaaggctaaattcaactagcccctgttttttcctccctgaactcttggggctgagctgcaaccacccaactttctttcccactcttctctgggacttgtgggcctcagggcttggggcaggcatgggactggcccaggcacacaggtcccggggcatcaggagaaaggctgggtcttgggaccttgtcctccccagttggcctactgttacacattaaaacgatttgcccagctaaaaaaaaaaaaaaaaaaaaaaaaaaaaaaaa

SEQ ID NO: 119 - protein, 331 aa, Homo sapiens
MGGEQEEERFDGMLLAMAQQHEGGVQELVNTFFSFLRRKTDFFIGGEEGMAEKLITQTFSHHNQLAQKTRREKRARQEAERREKAERAARLAKEAKSETSGPQIKELTDEEAERLQLEIDQKKDAENHEAQLKNGSLDSPGKQDTEEDEEEDEKDKGKLKPNLGNGADLPNYRWTQTLSELDLAVPFCVNFRLKGKDMVVDIQRRHLRVGLKGQPAIIDGELYNEVKVEESSWLIEDGKVVTVHLEKINKMEWWSRLVSSDPEINTKKINPENSKLSDLDSETRSMVEKMMYDQRQKSMGLPTSDEQKKQEILKKFMDQHPEMDFSKAKFN

SEQ ID NO: 120 - DNA, 1206 bp, Homo sapiens
cctggtatgattccatcctgagcggctgttctcttgagcagcgttcatttatctccgtctgccttctgtcccacctaagtgtgtgccgccacccaatagaagattcgatggacatggacatgagccccctgaggccccagaactatcttttcggttgtgaactaaaggctgacaaagatgatcactttaaggtggataatgatgaaaatgagcaccagttatctttaagaacggtcagtttaggggctggtacaaaggatgaattgcacattgttgaagcagaggcaatgaattacaaaggcagtccaattaaagtaacactggcaactttgaaaatgtctgcacagccaacagtttcccttgggggctttgaaataacaccaccagtggtcttaagatttaagtgtggttcagggccagtgcatattagtggacagcacttagtagctgtggaggaagatgcagagtcagaagatgaagaggaggaggatgtgaaactcttaagtatatctggaaagcggtctgcccctggaggtggtagcaaggttccacagaaaaaagtaaaacttgctgttgatgaagatgatgatgatgatgatgatgatgatgatgatgattttgatgatgaggaagctgaagaaaaagtgccagtgaagaaaggacaagaatccttcaaaacacaggaaaaaactcctaaaacaccaaaaggatctagttctgtagaagacattaaagcaaaaatgcaagcaagtatagaaaaagggggttctcttcccaaagtggaagccgagttcatcaattttgtgaagaattgcttctggatgactgaccaagaggctattcaagatctctggcagtggaggaagtctccttaagaaaatagtttcaacaatttgttaaaaattttccatcatatttcatttctgtaacagttgatatctggctgtcctttttataatgcagagtgagaactttccctaccgtgtttgataaatgttgtccaggttccattgccaagaatgtgttgtccaaaatgcctgtttagtttttaaagatggaactcaccctttgcttggttttaaatatgtatggaatgttatgataggacatagtagtagcggtggtcagacatggaaattgtgggaagacaaaaatatgcctgtgaaataaaactcaatattttaataaagtaaaaaaaaaaaaaaa

SEQ ID NO: 121 - protein, 255 aa, Homo sapiens
MDMDMSPLRPQNYLFGCELKADKDDHFKVDNDENEHQLSLRTVSLGAGTKDELHIVEAEAMNYKGSPIKVTLATLKMSAQPTVSLGGFEITPPVVLRFKCGSGPVHISGQHLVAVEEDAESEDEEEEDVKLLSISGKRSAPGGGSKVPQKKVKLAVDEDDDDDDDDDDDDFDDEEAEEKVPVKKGQESFKTQEKTPKTPKGSSSVEDIKAKMQASIEKGGSLPKVEAEFINFVKNCFWMTDQEAIQDLWQWRKSP

SEQ ID NO: 122 - DNA, 1898 bp, Homo sapiens
agctgctggctgggctgcctgttgagtcagccttcttccctcacggctcttctcccggtccctgaaactcggctgccaggggagctggagccacctgcgaaggtgtcctcccatactggacccctacaggaagctccgtgtgcccagctggggcacagccccagctgatgccccagaggggccacccatcgcaagaggggctttgggctctgccctccctccccatggcgcatgggccaaagcctgagactgaaggactgttggacctcagcttcctgacagaggaggagcaggaggccattgctggcgtcctccaacgagatgcccgcctgcgccagctggaggaggggcgggtcagcaagctccgggcctcagtggcagaccctgggcagctgaagatcctgacaggggactggttccaggaagcacgctcccagcggcaccacaatgcccacttcggctctgaccttgtccgagcgtctatgcgcaggaagaagagcaccaggggagaccaggctccaggccacgacagggaggctgaggctgctgtgaaagagaaggaagaggggccagagcccaggctcaccattgatgaggcccctcaggagaggctcagggagactgaggcttcagatcctgaggaggcgtcccaggcccaggaagatcctggccaaggagaccaacaggtctgtgccgaggaggctgacccggagctggagcccgcgtcggggggagagcaggagccgcggccccagcaagcccagaccaaggccgcgtcccagatcctggagaatggggaggaggccccggggcccgacccctctctcgaccgcatgctcagcagcagctcctcggtgtccagccttaactcctccacgctgagcggcagccagatgagcctgtcaggcgacgcggaggcggtgcaggtccgcggctccgtgcacttcgcgctgcactacgagccgggcgccgccgagctgcgcgtgcacgtgatccagtgccagggcctggccgccgcccggcgccgccgctcggacccctacgtcaaaagctacctcctcccggataagcagagcaagcgcaagacggcggtgaagaaacggaatctgaatccggttttcaacgagactctccggtactccgtcccgcaggccgagcttcagggccgcgtgctgagcctgtctgtgtggcaccgcgaaagcctgggtcgcaacatctttctgggcgaagttgaagtgcccctggacacgtgggactggggctctgagcccacctggctccccctgcagccccgggtcccaccctctcccgacgaccttccgagccgcgggttactcgccctgtccctcaagtacgtccccgccggctccgagggcgcaggactgcccccgagcggggagctgcacttctgggtgaaggaggctcgggacctcctgccgctgcgggcaggatccctggacacttacgtacaatgcttcgtgctgcctgatgacagccaggccagccgccagcgtacaagggttgtgcgacgcagcctcagccctgtgttcaatcacaccatggtgtacgatggctttgggcctgctgacctgcgccaggcttgtgccgagctctccctctgggaccatggggccctggccaaccgccagctggggggcacacgcctcagcctgggcaccggcagcagctatgggctgcaggtgccctggatggattccacacctgaggagaagcagctgtggcaagccctcctggagcagccgtgcgaatgggtggatggccttctacccctcagaaccaacctggcccccaggacgtagccccaccaagcctctctctctggacccccatctcagggcctgcccttggctaaagtcaataaagtctattctaagagc

SEQ ID NO: 123 - protein, 550 aa, Homo sapiens
MPQRGHPSQEGLWALPSLPMAHGPKPETEGLLDLSFLTEEEQEAIAGVLQRDARLRQLEEGRVSKLRASVADPGQLKILTGDWFQEARSQRHHNAHFGSDLVRASMRRKKSTRGDQAPGHDREAEAAVKEKEEGPEPRLTIDEAPQERLRETEASDPEEASQAQEDPGQGDQQVCAEEADPELEPASGGEQEPRPQQAQTKAASQILENGEEAPGPDPSLDRMLSSSSSVSSLNSSTLSGSQMSLSGDAEAVQVRGSVHFALHYEPGAAELRVHVIQCQGLAAARRRRSDPYVKSYLLPDKQSKRKTAVKKRNLNPVFNETLRYSVPQAELQGRVLSLSVWHRESLGRNIFLGEVEVPLDTWDWGSEPTWLPLQPRVPPSPDDLPSRGLLALSLKYVPAGSEGAGLPPSGELHFWVKEARDLLPLRAGSLDTYVQCFVLPDDSQASRQRTRVVRRSLSPVFNHTMVYDGFGPADLRQACAELSLWDHGALANRQLGGTRLSLGTGSSYGLQVPWMDSTPEEKQLWQALLEQPCEWVDGLLPLRTNLAPRT

SEQ ID NO: 124 - DNA, 1497 bp, Homo sapiens
atgccgttagtaacgaggaacatcgagccaaggcacctgtgccgtcagacgttgcctagcgttagaagcgagctggaatgcgtgaccaacatcaccctggcaaatgtcatccgacagctgggcagcctgagtaaatatgcagaggacatttttggagagctctttactcaggcaaatacctttgcctctcgggtaagctcccttgctgagagggtcgaccgactacaggttaaagtcactcagctggatcccaaggaagaagaagtgtcactgcaaggaatcaacacccgaaaagccttcagaagttccaccattcaagaccagaagctttttgacagaaactctctcccagtgcctgtcttagaaacatacaatacctgtgatactcctccccctctcaacaatcttaccccttacagggacgatggaaaagaggcactcaaattctacacagacccttcatacttctttgatctttggaaggagaagatgctgcaggacaccaaggatatcatgaaagagaagagaaagcacaggaaagaaaagaaagataatccaaatcgagggaatgtaaacccacgtaaaatcaagacacgtaaggaagagtgggagaaaatgaagatggggcaagaatttgtggagtccaaagaaaagctggggacttctgggtatccacccactttggtgtaccagaatggcagcattggctgtgttgaaaacgtggatgcaagtagctatccgccaccaccacagtcagactctgcttcttcaccttctccttccttctccgaggacaacttgcctcctccaccagcagaattcagttacccagtggacaaccaaagaggatctggtttggctggacccaaaagatccagtgtggtcagcccaagccatccaccaccagctcctcctctaggctctccaccaggccctaaacccgggtttgctccaccacctgcccctccgccacctccgcctccaatgataggcatcccacctccaccaccgcctgtaggatttgggtctccagggacgcctccaccaccctcacccccatctttcccacctcaccctgattttgctgcccctccacctcctcctccaccaccagcagctgactacccaactctgccaccacctcccttgtcccagccaacaggaggagcacctcctcctccccctcctcctcctcctccggggccccctcctccccctttcactggtgcagatggccagcctgctataccaccaccgctttctgataccaccaagcccaagtcctccttgcctgccgtgagcgatgcccgtagcgacctgctttcagccatccgtcaaggttttcagctgcgcagggttgaggagcagcgggaacaagagaagcgggatgttgtgggcaatgacgtggccaccatcttgtctcgtcgcattgctgttgagtacagtgactcagaagatgactcctctgaatttgatgaggacgactggtccgattaa

SEQ ID NO: 125 - protein, 498 aa, Homo sapiens
MPLVTRNIEPRHLCRQTLPSVRSELECVTNITLANVIRQLGSLSKYAEDIFGELFTQANTFASRVSSLAERVDRLQVKVTQLDPKEEEVSLQGINTRKAFRSSTIQDQKLFDRNSLPVPVLETYNTCDTPPPLNNLTPYRDDGKEALKFYTDPSYFFDLWKEKMLQDTKDIMKEKRKHRKEKKDNPNRGNVNPRKIKTRKEEWEKMKMGQEFVESKEKLGTSGYPPTLVYQNGSIGCVENVDASSYPPPPQSDSASSPSPSFSEDNLPPPPAEFSYPVDNQRGSGLAGPKRSSVVSPSHPPPAPPLGSPPGPKPGFAPPPAPPPPPPPMIGIPPPPPPVGFGSPGTPPPPSPPSFPPHPDFAAPPPPPPPPAADYPTLPPPPLSQPTGGAPPPPPPPPPPGPPPPPFTGADGQPAIPPPLSDTTKPKSSLPAVSDARSDLLSAIRQGFQLRRVEEQREQEKRDVVGNDVATILSRRIAVEYSDSEDDSSEFDEDDWSD

SEQ ID NO: 126 - DNA, 2370 bp, Homo sapiens
gcagcaccccagttctccccgcacgccggcactcgcggctgctggagccccggctggctcaccccggggccgggcagaattgggctccaggtctctgacccctcccaaggatcatgccgcagccccactgacccaggagtaggggcctaagggcagggaacctggaatgggctgtgtgttctgcaagaaattggagccggtggccacggccaaggaggatgctggcctggaaggggacttcagaagctacggggcagcagaccactatgggcctgaccccactaaggcccggcctgcatcctcatttgcccacatccccaactacagcaacttctcctctcaggccatcaaccctggcttccttgatagtggcaccatcaggggtgtgtcagggattggggtgaccctgttcattgccctgtatgactatgaggctcgaactgaggatgacctcaccttcaccaagggcgagaagttccacatcctgaacaatactgaaggtgactggtgggaggctcggtctctcagctccggaaaaactggctgcattcccagcaactacgtggcccctgttgactcaatccaagctgaagagtggtactttggaaagattgggagaaaggatgcagagaggcagctgctttcaccaggcaacccccagggggcctttctcattcgggaaagcgagaccaccaaaggtgcctactccctgtccatccgggactgggatcagaccagaggcgatcatgtgaagcattacaagatccgcaaactggacatgggcggctactacatcaccacacgggttcagttcaactcggtgcaggagctggtgcagcactacatggaggtgaatgacgggctgtgcaacctgctcatcgcgccctgcaccatcatgaagccgcagacgctgggcctggccaaggacgcctgggagatcagccgcagctccatcacgctggagcgccggctgggcaccggctgcttcggggatgtgtggctgggcacgtggaacggcagcactaaggtggcggtgaagacgctgaagccgggcaccatgtccccgaaggccttcctggaggaggcgcaggtcatgaagctgctgcggcacgacaagctggtgcagctgtacgccgtggtgtcggaggagcccatctacatcgtgaccgagttcatgtgtcacggcagcttgctggattttctcaagaacccagagggccaggatttgaggctgccccaattggtggacatggcagcccaggtagctgagggcatggcctacatggaacgcatgaactacattcaccgcgacctgagggcagccaacatcctggttggggagcggctggcgtgcaagatcgcagactttggcttggcgcgtctcatcaaggacgatgagtacaacccctgccaaggttccaagttccccatcaagtggacagccccagaagctgccctctttggcagattcaccatcaagtcagacgtgtggtcctttgggatcctgctcactgagctcatcaccaagggccgaatcccctacccaggcatgaataaacgggaagtgttggaacaggtggagcagggctaccacatgccgtgccctccaggctgcccagcatccctgtacgaggccatggaacagacctggcgtctggacccggaggagaggcctaccttcgagtacctgcagtccttcctggaggactacttcacctccgctgaaccacagtaccagcccggggatcagacatagcctgtccgggcatcaaccctctctggcggtggccaccagtccttgccaatccccagagctgttcttccaaagcccccaggctggcttagaaccccatagagtcctagcatcaccgaggacgtggctgctctgacaccacctagggcaacctacttgttttacagatggggcaaaaggaggcccagagctgatctctcatccgctctggccccaagcactatttcttccttttccacttaggcccctacatgcctgtagcctttctcactccatccccacccaaagtgctcagaccttgtctagttatttataaaactgtatgtacctccctcacttctctcctatcactgctttcctactctccttttatctcactctagtccaggtgccaagaatttcccttctaccctctattctcttgtgtctgtaagttacaaagtcaggaaaagtcttggctggacccctttcctgctgggtggatgcagtggtccaggactggggtctgggcccaggtttgagggagaaggttgcagagcacttcccacctctctgaatagtgtgtatgtgttggtttattgattctgtaaataagtaaaatgacaatatgaatcctc

SEQ ID NO: 127 - DNA, 1750 bp, Homo sapiens
ggcacgaggcttcgtaaagatggccgcggaggcttttggagccaactgggagcgcagtacgcgttttctggagcatgggcagaggagacaggaacaagcgtagcatccgtgagcaccgattggctgaagcgagcaccccgggagctgactggctccgccattcgcgggaaggcgtttgtggtgccagagaaaagtagccagagcggcgcagtggcggccgcgttctgtggttttccgctattcccccagacccgcaccttctcggcctctttgcggagaatcgtgaccaagatgtggaacagtggattcgaaagctatggcagctcctcatacgggggagccggcggctacacgcagtccccggggggctttggatcgcccgcaccttctcaagccgaaaagaaatcaagagcccgagcccagcacattgtgccctgtactatatctcagctgctttctgccactttggttgatgaagtgttcagaattgggaatgttgagatttcacaggtcactattgtggggatcatcagacatgcagagaaggctccaaccaacattgtttacaaaatagatgacatgacagctgcacccatggacgttcgccagtgggttgacacagatgacaccagcagtgaaaacactgtggttcctccagaaacatatgtgaaagtggcaggccacctgagatcttttcagaacaaaaagagcctggtagcctttaagatcatgcccctggaggatatgaatgagttcaccacacatattctggaagtgatcaatgcacacatggtactaagcaaagccaacagccagccctcagcagggagagcacctatcagcaatccaggaatgagtgaagcagggaactttggtgggaatagcttcatgccagcaaatggcctcactgtggcccaaaaccaggtgttgaatttgattaaggcttgtccaagacctgaagggttgaactttcaggatctcaagaaccagctgaaacacatgtctgtatcctcaatcaagcaagctgtggattttctgagcaatgaggggcacatctattctactgtggatgatgaccattttaaatccacagatgcagaataactggatctaactgggtacctgagatattttacagctggacctagtttcacaatctgttgtctccagctctgcatatgtctggccagggggcttctaggaagtaggtttcatctatcaaatgtctcctctgacttccttttgaaacttactgctcttctgttttattttgttttgtttgaagctcagagggagatgggcaattgacagggatgcaatccagggtgggatttcttgaggaagttacaaataagcttgttacaacatcaagatagatggaattggaaggatgctaccaggagagtacttacatagtgctcaggagtttctcttcttaaaatgtttactgctgaaagatgagcaggaccagggcgttataggcagagccctagccgagaaacctgctggcctctgcctgttttcatttcccactttggttgtgtggcattactttcagaattgcactttcctgcttgtcatgactttttgacacacttgccatgacgtgtgtttctgtgaacatgaagttctgcggtagtgcctccaggggcagaggaaaagaagaagtgttactgcgttttgtacaaaataaatacagtcatatgtttaataaaacagttctattgtaaaaaaaaaaaaaaaaaaaaaa

SEQ ID NO: 128 - protein, 270 aa, Homo sapiens
MWNSGFESYGSSSYGGAGGYTQSPGGFGSPAPSQAEKKSRARAQHIVPCTISQLLSATLVDEVFRIGNVEISQVTIVGIIRHAEKAPTNIVYKIDDMTAAPMDVRQWVDTDDTSSENTVVPPETYVKVAGHLRSFQNKKSLVAFKIMPLEDMNEFTTHILEVINAHMVLSKANSQPSAGRAPISNPGMSEAGNFGGNSFMPANGLTVAQNQVLNLIKACPRPEGLNFQDLKNQLKHMSVSSIKQAVDFLSNEGHIYSTVDDDHFKSTDAE

SEQ ID NO: 129 - DNA, 608 bp, Homo sapiens
ggagggagacgcagaggcggacaagatggcggcggcagctgtacagggcgagagaagcggtggtagcggaggctgtagtggggctggtggtgcttccaactgcgggacagggagtggccgtagcggcttgttggataagtggaagatagatgataagcctgtaaaaattgacaagtgggatggatcagctgtgaaaaactctttggatgattctgccaaaaaggagaagagcatctttctcgtggcccacaggaaagatcctacaggaatggatcctgatgatatttggcagctgtcctccagtcttaaagggtttgatgacaaatacaccttgaagctgaccttcatcagtgggagaacaaagcagcagcgggaagccgagttcacaaagtccattgctaagttttttgaccacagtgggacactggtcatggatgcatatgagcctgaaatatccaggctccatgacagtcttgccatagaaagaaaaataaagtagccaattctaaaagtagccctctttctcctggatcttgctgaattagtggcttggggggtgggggagataaaaagaacttaaaatgggtaaagtaagaaatgttaaaaag

SEQ ID NO: 130 - DNA, 561 bp, Homo sapiens
ctgggccggggaaatggcggcttcaggagagagcgggacttcaggcggcggaggcagcaccgaggaagcatttatgaccttctacagtgaggtgaaacaaatagagaagagagactcggttctaacttcgaaaaatcagattgaaagactgacccgtcctggttcctcttacttcaatttgaacccatttgaggttcttcagatagatcctgaagttacagatgaagaaataaaaaagaggtttcggcagttatccatcttggtgcatcctgacaaaaatcaagatgatgctgacagagcacaaaaggcttttgaagctgtggacaaagcttacaagttgctactggatcaggagcaaaagaagagggccctggatgtaattcaggcaggaaaagaatacgtggaacacactgtgaaagagcgaaaaaaacaattaaagaaggaaggaaaacctacaattgtagaggaggatgatcctgagctggaaacgacaaagggaagaagagattgaagctcaagaaaaagccaaacgggaaagagagtggcagaaaaactttgagg

SEQ ID NO: 131 - DNA, 3327 bp, Homo sapiens
tccagcaccaaagcggccgttctcggattccggagcgttctggagccccgagagacgccccggggttctagaagctccccggcggcgcccagtcccggcttcattcgggcgtccctccgaaacccactcgggtgcacgggtcgtcggcgagccgcgaccgggtcctggcgcgcaccatgatcgtggcggactccgagtgccgcgcagagctcaaggactacctgcggttcgccccgggcggcgtcggcgactcgggccccggagaggagcagagggagagccgggctcggcgaggccctcgagggcccagcgccttcatccccgtggaggaggtccttcgggagggggctgagagcctcgagcagcacctggggctggaggcactgatgtcctctgggcgagtagacaacctggcagtggtgatgggcctgcaccctgactactttaccagcttctggcgcctgcactacctgctgctgcacacggatggtcccttggccagctcctggcgccactacattgccatcatggctgccgcccgccatcagtgttcttacctggtaggctcccacatggccgagtttctgcagactggtggtgaccctgagtggctgctgggcctccaccgggcccccgagaagctgcgcaaactcagcgagatcaacaagttgctggcgcatcggccatggctcatcaccaaggaacacatccaggccttgctgaagaccggcgagcacacttggtccctggccgagctcattcaggctctggtcctgctcacccactgccactcgctctcctccttcgtgtttggctgtggcatcctccctgagggggatgcagatggcagccctgccccccaggcacctacaccccctagtgaacagagcagccccccaagcagggacccgttgaacaactctgggggctttgagtctgcccgcgacgtggaggcgctgatggagcgcatgcagcagctgcaggagagcctgctgcgggatgaggggacgtcccaggaggagatggagagccgctttgagctggagaagtcagagagcctgctggtgaccccctcagctgacatcctggagccctctccacacccagacatgctgtgctttgtggaagaccctactttcggatatgaggacttcactcggagaggggctcaggcaccccctaccttccgggcccaggattatacctgggaagaccatggctactcgctgatccagcggctttaccctgagggtgggcagctgctggatgagaagttccaggcagcctatagcctcacctacaataccatcgccatgcacagtggtgtggacacctccgtgctccgcagggccatctggaactatatccactgcgtctttggcatcagatatgatgactatgattatggggaggtgaaccagctcctggagcggaacctcaaggtctatatcaagacagtggcctgctacccagagaagaccacccgaagaatgtacaacctcttctggaggcacttccgccactcagagaaggtccacgtgaacttgctgctcctggaggcgcgcatgcaagccgctctgctgtacgccctccgtgccatcacccgctacatgacctgactcctgagcaggacctgggcccggttcagctccccacaaggacttctctgtctggagacagccccagacccttttgtgtcccatgcccaccctccccacgctgcagtgggcttgtgtgtgatgtgcagtcccgaagccacaccctcccttttcctcactggaatggacagttcattgcactgactctgggatctcagccctgctcctgggagctggaagagcacttggagatcctaagggaccacacccttcctccttcccctgcccacagaggcagagggcacaggaaagaagccgggccaagctcggaattaatgtgccacaagtgttgtggccttcctgaactgggaagtccctggctggcccccgggggagaggggcaaatgcctccgggactgacactccaggcagctttgccttctctcccctgtcatttccagatttcattacctcctacttgccattcacccatcaatgtgaaagtcagggtcacagctggtctgtgtgtccagttccctaaaagcctgttctgttgggcagcctgaggctgttgcccgaatcctagttcagttttttgacttcctttgccctttttcccttttctccatgcttaatggtgtgaggcgtcaggagagaggccaagtacataaaaaaaaaaaaaagcagattatctctagagagtttgagcctttgctggtcacattgccttctgaagaggagggagtattagattataaatcctctttattttggtcctttatgcttgaggttccaacctggagccacagtgtgtgagaggaggaggagagggagaattctgttctcccagagctgcacctgcctcgcagaggccagcaccccactctcctgcctccagtggccctgccgcagatgtctcccaaaaagttgagcctttctagatggcttaggtggcaccatggctcagcaggaggggcgggaggcaccagggttcttgtttggaccctgcccctgggccatggccaggtgaccatggctacattgccaaacctctgactgccacagctgcagactgagagggtgggtctgagtccccacaatgtctgaagctgcccctgggattctcaggccaacctgccaacagcaagcggattttcttgcaagatcagggaccccatttctgcagccagtgtctcctgggtgccttctgaggactcccacccccatcccagtatctcatctgtcccctctcctggggcttaagtgggttgcttccaggcagaagcagccaaggaccgattccaggcactttctgtagcaaatgactgtgaattacgacttctcttgcccttcttctagcagtctgtgcctcctctctgaccagtttggagggcactgaagaaaggcaagggccgtgctgctgctgggcggggcaggagaggagcctggccagtgtgccacattaaatacccgtgcaggcgcggagaagcaaccggcacccccttccggcctgaaagccctccctgcaagaaggtgtgcaggagagaagaggccccggcatggggatctgggttctagagggcatgtgatgactgtaaatgttcactgggtgggtagggagtggtatccagtgttcaagtgcagaaatctttggctttgctaccagttccatatgatgagaaataaacgttcgctgaggttttgtttcataaaaaaaaaaaaaaaaaaa

SEQ ID NO: 132 - protein, 480 aa, Homo sapiens
MIVADSECRAELKDYLRFAPGGVGDSGPGEEQRESRARRGPRGPSAFIPVEEVLREGAESLEQHLGLEALMSSGRVDNLAVVMGLHPDYFTSFWRLHYLLLHTDGPLASSWRHYIAIMAAARHQCSYLVGSHMAEFLQTGGDPEWLLGLHRAPEKLRKLSEINKLLAHRPWLITKEHIQALLKTGEHTWSLAELIQALVLLTHCHSLSSFVFGCGILPEGDADGSPAPQAPTPPSEQSSPPSRDPLNNSGGFESARDVEALMERMQQLQESLLRDEGTSQEEMESRFELEKSESLLVTPSADILEPSPHPDMLCFVEDPTFGYEDFTRRGAQAPPTFRAQDYTWEDHGYSLIQRLYPEGGQLLDEKFQAAYSLTYNTIAMHSGVDTSVLRRAIWNYIHCVFGIRYDDYDYGEVNQLLERNLKVYIKTVACYPEKTTRRMYNLFWRHFRHSEKVHVNLLLLEARMQAALLYALRAITRYMT

SEQ ID NO: 133 - DNA, 1810 bp, Homo sapiens
gagacgtcggcttccgaccggaagtgagaagaggaggaagttggctggttgcaccgatctgggggcttcccgggctcgggtaaccggagtgctggtatctaatcgtcgctcaaaagctcctaggtatatcccgtgccttacctgactgggggctctgagtccagttgtgttgtcttcaacttagacaccatggaggcacctccagtcaccatgatgcctgtcactgggggcaccattaacatgatggagtacctgttgcagggaagtgttttagatcacagtttggaaagcctcatccaccgccttcgtggtttgtgtgacaacatggaacctgagactttccttgaccatgagatggtattcctccttaagggccagcaagccagcccatttgttctcagggcccgacgctctatggacagggcaggggcaccctggcatctgcgctacctgggacagccagaaatgggagacaagaaccgccatgccctggtgcgaaactgcgtggacattgccacatctgagaacctcaccgacttcttgatggaaatgggcttccgcatggaccatgagtttgttgctaagggacatttgttccgtaagggcatcatgaagattatggtgtacaagattttccgcatcctggtgccagggaacacagacagcactgaggccttgtcactctcctatctcgtggaattaagtgtggtagcacccgctgggcaggacatggtctctgatgacatgaagaacttcgcagaacagctaaaacctctggttcacctagagaaaatagaccccaagaggctcatgtgactaagaggatctgtccacatttggggcctatccttacttgtttgaaaaaatatgtttgctttttttggtttttgttttgttttgtttttgagacagagtctcgctttgtttcccaggctggagtgcagtggcacgatctcggctcactgcaacctctgcctcctgggttcaagcaattctcccacctcagcctcctgagtagctgggattacaggcacatgccaccatgctcagctaatttttgtatttttagtagaaatggggattcaccatgttggtcaggctattctcgaactcctgacctcgtgatccacccaccttggcctcccaaagtgctgggattacaggcatgagccaccacgcctggccaaaaaaatatgttttaaatgtcccatttcaccattgccaggcaggcattcttccttcagggagaggatggtgagaattaattggttctttgcactgttctcctcatgtggcgatttcactttcatgacagcctttctatattaaaggctcaggatgtcacggagaatctatctaatcccactgtattaagaggggaaaccgggccaagcgcagtggctcacacctctaatcccagcactttgggaggctgaggtaggtggatcacccaaggtcaggagtttgagaccagcctggccaaatggtgaaaccccatctctacgaaaaatacaaaatttagccgggcatggtagcaggcgcttgtaatcccagctacttgggaggctgaggctggagaatcgcttgaacccaggaggtgaaggttgcagtgaccagagatgacgccattgcactccagcctgggtgagaagagcgaaactccgtctcaaaaaaaaataaaaatgaagaggggaaaccagaataaattatcttttggaaaggacaatttcttgtttggccatttgtgtataaggttggtaacattagaggctgtgagcttgtgttacatggtaataaagccaatgaagag

SEQ ID NO: 134 - DNA, 2924 bp, Homo sapiens
ggccggcctctcccttcccggggttcttcgcgccgggccccttccgcgtgggtgagtgaatgtgagagtcagcgctcgcgccgcgcgcgccgcccgcctccgctgttcggcgctctgctttaggcggtggggggcgggcgcgcgcgtaaaagcatagagacgggcattgagctcttgggctagagcgtcgccgagtcggagccggagcctgagccgcgcgctgtgtctccgctgcgtccgccgaggcccccgagtgtcagggacaaaagcctccgcctgctcccgcagacggggctcatctgccgccgccgccgcgctgaggagagttcgccgccgtcgccgcccgtgaggatctgagagccatgtcggccagcagcctcttggagcagagaccaaaaggtcaaggaaacaaagtacaaaatggatctgtacatcaaaaggatggattaaacgatgatgattttgaaccttacttgagtccacaggcaaggcccaataatgcatatactgccatgtcagattcctacttacccagttactacagtccctccattggcttctcctattctttgggtgaagctgcttggtctacggggggtgacacagccatgccctacttaacttcttatggacagctgagcaacggagagccccacttcctaccagatgcaatgtttgggcaaccaggagccctaggtagcactccatttcttggtcagcatggttttaatttctttcccagtgggattgacttctcagcatggggaaataacagttctcagggacagtctactcagagctctggatatagtagcaattatgcttatgcacctagctccttaggtggagccatgattgatggacagtcagcttttgccaatgagaccctcaataaggctcctggcatgaatactatagaccaagggatggcagcactgaagttgggtagcacagaagttgcaagcaatgttccaaaagttgtaggttctgctgttggtagcgggtccattactagtaacatcgtggcttccaatagtttgcctccagccaccattgctcctccaaaaccagcatcttgggctgatattgctagcaagcctgcaaaacagcaacctaaactgaagaccaagaatggcattgcagggtcaagtcttccgccacccccgataaagcataacatggatattggaacttgggataacaagggtcccgttgcaaaagccccctcacaggctttggttcagaatataggtcagccaacccaggggtctcctcagcctgtaggtcagcaggctaacaatagcccaccagtggctcaggcatcagtagggcaacagacacagccattgcctccacctccaccacagcctgcccagctttcagtccagcaacaggcagctcagccaacccgctgggtagcacctcggaaccgtggcagtgggttcggtcataatggggtggatggtaatggagtaggacagtctcaggctggttctggatctactccttcagaaccccacccagtgttggagaagcttcggtccattaataactataaccccaaagattttgactggaatctgaaacatggccgggttttcatcattaagagctactctgaggacgatattcaccgttccattaagtataatatttggtgcagcacagagcatggtaacaagagactggatgctgcttatcgttccatgaacgggaaaggccccgtttacttacttttcagtgtcaacggcagtggacacttctgtggcgtggcagaaatgaaatctgctgtggactacaacacatgtgcaggtgtgtggtcccaggacaaatggaagggtcgttttgatgtcaggtggatttttgtgaaggacgttcccaatagccaactgcgacacattcgcctagagaacaacgagaataaaccagtgaccaactctagggacactcaggaagtgcctctggaaaaggctaagcaggtgttgaaaattatagccagctacaagcacaccacttccatttttgatgacttctcacactatgagaaacgccaagaggaagaagaaagtgttaaaaaggaacgtcaaggtcgtgggaaataaaaggcagttctacacagactgcagcaacggttgcatctgcatatcctaagaggaaaaaatgaccttcaagagaattaggacttttttcttaatttcactgacttcagagacgattgcagacttgcagtttaagtattggaatttcacaaaagacataggacttaactggaaaatgaaaaaaaaaagaaaaagaaaaaactaaacaaaaaatccctctaggtagtttaggtgaaaaatgtcccttttattttggctttggttgtgatttcagagcataatgctatgtttttttgtctttttactatgtttttcggatttttaagtccgtaagtgcatacagttttctctaatttttaaaccctttcctcctcccattttgacatttgcacttggagaacacttgagttgtgaaggttttgggcatccaccccagaaagtgggaatttgattttatccttccgaactggaagaacatttttatgaagaatttttgtctaggagaatataacagtgttacccaaggttgtgtctttaagggtggttcattttctctgaccttttgttactcaaagtaaagtactaggagtcctaagaaatgttctgttcttgtacattatactgattaagtcaggattaatttgatttcaaagctgagaacagtggtaaaaactcgtttacagaaatgcattttggaagagaaaaatactgtaaaacgtgtcgtgaatgtttcttcagtttcttgttcagccaatgaggaaagggcattgcctttctttttaccattaatcacttctcaataaacgtgagatcctgttgagcatc

SEQ ID NO: 135 - DNA, 2180 bp, Homo sapiens
gtacgtcgccggggttcggctgcgtccgtcccgccgcccgcccgttgccgccgccgccgctgccgccgtgctctcgctttgcccgccgccgcctaaggggggctggggccggggccagccatcactgccgttgccgggatgccgcgggtgtacatcggccgcctgagctaccaggcccgggagcgcgatgtggagcgcttctttaagggctacgggaagatcctggaggtggatctgaagaacggatatggttttgtggagtttgatgatctgcgtgatgcagatgatgctgtttatgaactgaatggcaaagacctttgtggtgagcgagtaattgttgagcatgcccgcggcccacggcgagatggcagttacggttctggacgcagtggatatggttatagaagaagtggccgagataaatatggccctcctactcgcacagagtacagacttattgtggagaatttgtcaagtcggtgcagctggcaagacctaaaggattatatgcgtcaggcaggagaagtgacttatgcagatgctcacaagggacgcaaaaatgaaggggtgattgaatttgtatcttattctgatatgaaaagagctttggaaaagttggatggaactgaagtcaatgggagaaaaatcagattagttgaagacaagccaggttccagacgacgccggtcctactccagaagccggagtcattcaaggtctcgctctcgaagcagacattcccgtaagagcagaagccgaagtggcagcagcaaaagcagtcattctaagagtagatctcggtccaggtcgggctcccgctcccggagcaagagccggagccggagccagagtcggagccggagcaagaaagagaaaagcaggagccccagcaaggaaaagagccgcagccgcagccatagcgctggcaagagccgcagcaagagcaaagaccaagctgaagagaagatccaaaacaatgacaatgtcgggaaacccaagagccggagtcctagcaggcataaaagtaagagcaaaagtcggagcaggagtcaggagaggagagtggaggaggagaagcgagggagtgtgagcaggggcaggagccaggagaagagcctccgccagagtcggagccggagcaggagcaaagggggcagcaggagccggagcaggagccgcagcaagagcaaggacaagaggaagggcaggaagagaagcagagaggagagccgcagtcgcagtcgcagccgcagcaagagtgagaggagcagaaagcgaggcagcaagcgagacagcaaggcgggcagcagcaagaagaagaagaaggaagacactgaccgctcccagtccagatctccatcccgctccgtgtcaaaggagcgggaacatgccaagtctgaatccagccagagggaaggtcgaggagagagtgagaatgctggcaccaatcaggagacccggtccaggtcgagatccaattccaaatcgaaaccaaaccttccatcagaatcacgctccagatcaaagtcagcttcaaaaacccgatctcggtccaagtctagatccaggtctgcttccagatcgccctcccgatctagatctaggtcccactcaaggtcctaactggctatggccacagctggaactacccgagaagtcttttgtacatgtttggtagccgtagcacaagtgattggagtagaacatgtcactgctgtacatttttaactcccctaatggtgtgtctataattgttaaatctaagtgcttcctctcagtaaagcctcctggcaccaggccttcctgctcgactgaaaaaaattttctctttgaaaatccccttttactcatggcccacagtagaatatccaaaacgccttggctttcaggcctggcctttcctacagggagctcagtaacctggacggctctaaggctggaatgaccacataggtaggtatggtgagttcaaccatttttgctcttgaattgatgcccttcgatgtatgccatttagtgaaagtgctaagtcttaagtttcctaccactttggtttcatatttttggacttaacaaagttgtgaatagcacagtcgaggaaaattgatacctgcagtaacccataggaaataaactgtagagttccatattctggtattgtgattatattgttttatatt

SEQ ID NO: 136 - DNA, 1498 bp, Homo sapiens
agggttctctccccttgccaccatgagcgagtcatttgactgtgcaaaatgcaacgagtccctgtatggacgcaagtacatccagacagacagcggcccctactgtgtgccctgctatgacaatacctttgccaacacctgtgctgagtgccagcagcttatcgggcatgactcgagggagctgttctatgaagaccgccatttccacgagggctgcttccgctgctgccgctgccagcgctcactagccgatgaacccttcacctgccaggacagtgagctgctctgcaatgactgctactgcagtgcgttttcctcgcagtgctccgcttgtggggagactgtcatgcctgggtcccggaagctggaatatggaggccagacatggcatgagcactgcttcctgtgcagtggctgtgaacagccactgggctcccgttcttttgtgcccgacaagggtgctcactactgcgtgccctgctatgagaacaagtttgctcctcgctgcgcccgctgcagcaagacgctgacacagggtggagtgacataccgtgatcagccgtggcatcgagaatgtctggtctgtaccggatgccagacgcccctggcagggcagcagttcacctcccgggatgaagatccctactgtgtggcctgttttggagaactctttgcacctaagtgcagcagctgcaagcgccccatcgtaggactcggtggaggcaagtatgtgtcctttgaagaccgacactggcaccacaactgcttctcctgcgcccgctgctctacctccctggtgggccagggcttcgtaccggatggagaccaagtgctctgccagggctgtagccaggcagggccctaagccagggctcctggacccaggctttcccataccacgggcccaggactgtggctccttttctaaaccacctctgggactcagctccccccgccaaaaaaaatgggtctccttctgggctccaggattgtctccccactccagcatccccaaactggtactccctgacccagggccccaaacctgggctcttacagagcctccatgagtcaagccccctccccacacctggactccagaattcaccctctcccctgcagtctgggttcccagactgagtcctctccccaaatcagggctctagacccgagccctccaaacctggactctgggacttaggcccccttaaatctagacttctctttataggtttcaggtctcctatgggtgcctgggaagtccttgaaagtggactgttctcaggcttgacctgccccaccccatccccgcggttgaggctgtgggggcagcagatcaggagcccactgataaggggccctagggtacagggtgctgcccagcaggtcgccaccgagtgtcttctcattttatttcagctccattttgcccatagatgggcagaggggtgagattggctcatcccccttccagattctgcaataaagcggtgtgagg

SEQ ID NO: 137 - DNA, 1493 bp, Homo sapiens
ctacagatactgccgtgtgagagtacctgaggggctcctgaaagacctactgccaggaccagtgaccctggtgatggaacgctcggaggagctcaacaaggacctaaacccttttacgcctcttgtaggcattcggattcctgatcatgcttttatgcaagacttggctcagatgtttgagggtccgcttgctctcactagtgccaacctcagctcccaggccagttctctgaatgtcgaggagttccaggatctctggcctcagttgtccttggttattgatgggggacaaattggggatggccagagccccgagtgtcgccttggctcaactgtggttgatttgtctgtgcccggaaagtttggcatcattcgtccaggctgtgccctggaaagtactacagccatcctccaacagaagtacggactgctcccctcacatgcgtcctacctgtgaaactctgggaagcaggaaggcccaagacctggtgctggatactatgtgtctgtccactgacgactgtcaaggcctcatttgcagaggccaccggagctagggcactagcctgacttttaaggcagtgtgtctttctgagcactgtagaccaagcccttggagctgctggtttagccttgcacctggggaaaggatgtatttatttgtattttcatatatcagccaaaagctgaatggaaaagttaagaacattcctaggtggccttattctaataagtttcttctgtctgttttgtttttcaattgaaaagtaattaaataacagatttagaatctagtgagagcctcctctctggtgggtggtggcatttaaggttcaaaccagccagaagtgctggtgctgtttaaaaagtctcaggtggctgcgtgtggtggctcatgcctgtaatcccaacattctgggaggcccaggcgggagaactgcttgagcccaggagttcagaatcagcctgggcaacatagcaatactccgtctcataaaaattaataaataaaaagtctcaggtgaccaaaggctcctgaagctagaaccaggtttggataaagattgaagagccacaggccactcttccctctgagccattgggcctagtggtgtcatgtattgtaattgctcgcagggagagcagtctttttggtgtaatagtgggatgtctgcttagttggcaggggttcagtccaaatggaagaatattgggaaataaacctccactatcctttatagccagggacttttttcttatttattcataaaataaattatagttaattatacccataacacctttatttaaatccagtgttctccgcagccttttgtctatttatatgtgtaccaagtgttaaacataattattattgggcatttgaactttgtttttctttaaagaaatgctgctattaaacatatttgtaaatggaaaaaaaaaaaaaaaaaaaaaaaaaaaaaaaaaaaaaaaaaaaaaaaaaaaaaaaa

SEQ ID NO: 138 - protein, 127 aa, Homo sapiens
MERSEELNKDLNPFTPLVGIRIPDHAFMQDLAQMFEGPLALTSANLSSQASSLNVEEFQDLWPQLSLVIDGGQIGDGQSPECRLGSTVVDLSVPGKFGIIRPGCALESTTAILQQKYGLLPSHASYL

SEQ ID NO: 139 - DNA, 6394 bp, Homo sapiens
aggcccagcgctggcgcagtgagaacttcgagagacccgtggacctggagggctctggggatgatgactcctttcccgatgatgaactggatgacctctactcggggtcgggctcgggctgtaagtacccccctccctacctctgcctgggggcagtgaccagtctgtatccagcctcaactctgagaagcccacggggggcttgcttcagtgaggcagggggcattcactgcctgggtcaggcaagttcttcttgctctggatccccagaacaagaagggcagaacatccttctggggatagaacaagacctgggaggacctcagggcccagaatgtccaggtctccagggtcccacgtctgcatctttgtgtgtgctatgtggctttctctgcagaccttgcttggttccggtggtcccgtcaggtgcaataagctgtggccaatggtggggttagggcagtgatgacacagggcaggtgcttcaagtggtgcctgggatggccccgccctggggaaggggagccaggtcagctgggtctagcagaatctcgggagagaagggcaccgcgaaccccactctgccatgtagcaactgtgtgcccctcggtgctccccctccctgaatccctgtattttcacctgtggatggtgagaaatacgacttcttctcagtgcctctaggagggtttgggataggaagctggggtctggcacagaggaggagctctcaaaatggtagcaaaaagaaggcagctgagactgggcccagtgagggcacgggctggcatctgaggagatggtacggggtctgcacgccacagagctggctccccacagccctcgcctctggtctcccctccttagccaagtcctttgagcctctttcaaattaatctttgtaaaacccgtttatattgggtcacatctctattcgcaaagttccctggctcccctccctcctgcctggttccgagcccaggagctggctgtggcttctccctcccccatcccctactccccatctcatttcctcccaagttccttcactgtcccggctttgcgtcagccagattgctcaagcagttcccctgcctcaagggcttcttttcccttttaccctccgcctctgcctctgggggaagcccttagtgtaccacccctgccttgagcttgtggtaggggtgcctttggggtctgactcttcccagaatgccactcctgtgttcccctgcaagccccagcaagttttgcagccagtagcgcctcagttgctgctgcctggattcaacctcatagaaactgtaggctgggtgggcaggaatagtcaaggaaggcttcccgggagaggcggcccccagaatttttgacttggcagagagaagttggggaacatcagcaactgaccacctttagctgggctgtgccttcctcctttctctcatcttttctgggaaaattgggtaaagagagggggttgggagacctaatcttgatggccattgcttacctgggatcctcatgcccctcacaaccacccagctccctagctctctccctctcccccaccccctcagacttcgagcaggagtcgggcattgagacagccatgcgcttcagcccagatgtagccctggcggtgtccaccacacctgcggtgctgcccaccacgaacatccagcctgtgggcacaccatttgaagagctcccctctgagcgccccaccctggagccagccaccagccccctggtggtgacagaagtcccggaagagcccagccagagagccaccaccgtctccactaccatggctaccactgctgccacaagcacaggggacccgactgtggccacagtgcctgccacagtggccaccgccacccccagcacccctgcagcacccccttttacggccaccactgctgttataaggaccactggcgtacggaggcttctgcctctcccactgaccacagtggctacggcacgggccactacccccgaggcgccctccccgcccaccacggcggctgtcttggacaccgaggccccaacacccaggctggtcagcacagctacctcccggccaagagcccttcccaggccggccaccacccaggagcctgacatccctgagaggagcaccctgcccctggggaccactgcccctggacccacagaggtggctcagaccccaactccagagaccttcctgaccacaatccgggatgagccagaggttccggtgagtggggggcccagtggagacttcgagctgccagaagaagagaccacacaaccagacacagccaatgaggtggtagctgtgggaggggctgcggccaaggcatcatctccacctgggacactgcccaagggtgcccgcccgggccctggcctcctggacaatgccatcgactcgggcagctcagctgctcagctgcctcagaagagtatcctggagcggaaggaggtgctcgtagctgtgattgtgggcggggtggtgggcgccctctttgctgccttcttggtcacactgctcatctatcgtatgaagaaaaaggatgagggcagctacacgctggaggaacccaagcaggcgagcgtcacataccagaagcctgacaagcaggaggagttctatgcctagtggagccacagtgcctccctgcagcctcaacaccaccctgctgtccagtccccagcctggccccaccagcccaagcctgggactgggcctggaacctggccccagttcttctctgccctctctcccaaggtctgcccaggctgccagcctcacacagatcttccccgaggaagaggggctgctgccatctgccccagactgtgcccttacgagctcatctcttgttcccctcatccctgccaccagtctggggcttcaggacctcatgtcagatggatgggaggaagaaagctcctgattggctggtggtggaagaaagggtggggcttgagatgagcctgagccctgacttggcacccacagtgctcactgagatctcctttttggggcagagaggcactcaggctggtttccaggacaaacatttggtaaacacagcccttgaaatcatctagacactgcaacctcttgctcgtatcccagggcctctctctagctgggtgagagggtgtcccttgtcaccagcctgttttgtcctggtctctctggggttgttgaatctctcctcttgcctgccaagtacacatgtacccagacttcatttctttctgcatcttcccccaagaaacagcttcctgagggtgctggggcagccactggtgaggaggggctgctctgatgtccctcctatgaggggactctgcacagacaccattgcccacactatcaccatattttcactcagtcacacacaagacaaaagcatgcaatgacaaaaccatacgcaatcctgaccgcccagccaatcaagacatatcacagaacacacgcgtccttccaagaatgtttatcctcatgcatcacttacacacccccagacacgtactgcaatgcaagtcactagtcatggtcacatgacagtgacagtgtggcctcctcctaccccaaatacacccacactctggcaccacacacattgtctccagctttcaggcttactggggagggtggaatcgagccagaacaatcagcccatattgggtccccctaagttgccccgtcatactcagtcccatgccatggtgcccacaccaaccatgcagccgccaaccccagccagtgtcagacacaatcccatgtggatgcacagtctcactccacatgacctgctctcaatgctggagggaaacaggcaggcccttgcctttctcggaaaaagtgtggggccacagcccttttagggcattgcatgcaggtgggcctggcttcacccctacctgcttcctccccaccgcagctggcagagggggaggtttggggccagacccccactagctgggagcctgggggctcctctaaggctgaggaaggaaatttggccccaggttgttggggggtcttgggtctcccaggacggaaggcccagggcagggagggggcatgtggttgggctcctttatctccctgtgtccccttcctgctttgagctagggggctgactctgcctcccaggacacaagtctccaaagtgcctgtgagggcgggccctccgcaccctctgccctctgcctggcaggccaacctcagcccacctgcccagaggccctccctgtggacaccccctcacctatttggccaaacaattctggctgcagcttcaggggccatggctggaagcagcccctgcagatccctcaggccccgaggtcagggtttgagggatgagaccaggtgatagtgggggaggggttacttcctttgttacctagcaagtagggctatttccatcggtattttaaatgtggggtcacagatcttttggggagggtgtgcttggcagggggcctcttggagccaaagggatgtggtgtgagttgcgattggctggcactcacacccccacccctcacccacatcccagattcaagtcaggaaggcaggttttatttcagggcccttttcaagatgccctggcagcagatttctgcaggatgaggggtagcggtgtgtaggcagtgagggggaggttccaggggctgtcccacagcctgtcttttccaggctgggctccatcttccagtcccaaaaccctccttcacagggcccagaggcttgtgaggaagccaggtggacccagccttagaagagtgggcatggggggcccctgatatctggagggggcgggttggcctcagtcatctttggagcagaagggctgggtcctggggccacagaccacaaggctcagcctccctaccctgctccctggggtgctgctgtcttggagagcacagctctggtgagacggcctgggcaggccgaggctgagaaaccagggaggatagaggagaaaagggcttgggcccccagccccagaagatgctggaccccaggtgggagacccaacagtgggtgcagtttctcagtagggctggagccaatggtgggggtggccccggcaggcctggctcctcacatcccaggggttggcttctgatttggggcttgggctccaggcactggcttctcttctctgtgtccttagcatttgagagaagaggccaggggccttgttcatggatccctggacccaaggcagatgtccaggctttatcctcctgaggatgaggagtctgaccagcccaaatctgccctggccggcctgaccggggcaaggcagtccaagagagttcagtgaggaccagctaggctctcccaggtgcaatgtgggtgcagggccctcatgtccccctacccctgcctgtgatggagtgttctgaggggctttggcatttgctggaagcacagggagttccaaatgagagggagcttctgtggcttgagagcctctggggccttggctgccagagcacgaggcaggccaggacctggagagcccagaccctgtctccaggaggccaggaggccagatgggggccttgcctgaaagactggtccccttgatcgctggaggcatgtgggtggcaaccagggctgggcagggcttagggtgtgtgggccaaacccccctggggttggcaaagccgcctgtcaggcctcctggtgggggcccctggacacagggagcagaccctctgcctcatggggtaggagtggctgcctcctgtgttctctggatttcttctcccaacaactacaaccctggacttgcctccccaggcctcttgcctgtaaatagaagcccgcaaactgtacagatttacagaggcatcgagactgggccctgggagttgccatctgagagccgatggccccagcatcccccaggtgcctgcctggcaccacagtgaccctggcctcagcgtggcaaatgcatgtaaatatttttcgtaggcagcgtggctccagagagccccctgaagacagtgtccctccctcctgtgagtcctttctcctgtacagaacctgcctggggtgggtgggggtctgccattccctcccccaggccttccctgccccttctctcccctgtaacctgtttattaaccatacctgtcctgagttcatggccaaaaccttaaataagaaaaacaaaagaaaaagacagtggaaaaaagagaccaaggcgcctgccccactgcgggtactctcctgttccagccttgtgaaggaactggttttgtttttgtttttttttttttttttttttttttgtttgtttgtttttttaacacttcctgtgctgtgcccatttataagaggaaataaaattaagctgaaatg

SEQ ID NO: 140 - DNA, 443 bp, Homo sapiens
agccatgcctttcttggacatccagaaaaggttcggccttaacatagatcgatggttgacaatccagagtggtgaacagccctacaagatggctggtcgatgccatgcttttgaaaaagaatggatagaatgtgcacatggaatcggttatactcgggcagagaaagagtgcaagatagaatatgatgatttcgtagagtgtttgcttcggcagaaaacgatgagacgtgcaggtaccatcaggaagcagcgggataagctgataaaggaaggaaagtacacccctccacctcaccacattggcaagggggagcctcggccctgaacagagcagctgctgatgtctggaggctgattttcctgttctctgttctccactggaaaggttgtttacgacaaacctccttgtcaaagtgtgtaaaaataaaggattgctccatcct

SEQ ID NO: 141 - DNA, 2064 bp, Homo sapiens
gctgagcgggctttggacaccatgaactttgatgtgattaagggaaagccaatccgcatcatgtggtctcagagggatccctctttgagaaaatctggtgtgggaaacgtcttcatcaagaacctggacaaatctatagataacaaggcactttatgatactttttctgcttttggaaacatactgtcctgcaaggtggtgtgtgatgagaacggctctaagggttatgcctttgtccacttcgagacccaagaggctgccgacaaggccatcgagaagatgaatggcatgctcctcaatgaccgcaaagtatttgtgggcagattcaagtctcgcaaagagcgggaagctgagcttggagccaaagccaaggaattcaccaatgtttatatcaaaaactttggggaagaggtggatgatgagagtctgaaagagctattcagtcagtttggtaagaccctaagtgtcaaggtgatgagagatcccaatgggaaatccaaaggctttggctttgtgagttacgaaaaacacgaggatgccaataaggctgtggaagagatgaatggaaaagaaataagtggtaaaatcatatttgtaggccgtgcacaaaagaaagtagaacggcaggcagagttaaaacggaaatttgaacagttgaaacaggagagaattagtcgatatcagggggtgaatctctacattaagaacttggatgacactattgatgatgagaaattaaggaaagaattttctccttttggatcaattaccagtgctaaggtaatgctggaggatggaagaagcaaagggtttggcttcgtctgcttctcatctcctgaagaagcaaccaaagcagtcactgagatgaatggacgcattgtgggctccaagccactatatgttgccctggcccagaggaaggaagagagaaaggctcacctgaccaaccagtatatgcaacgagtggctggaatgagagcacttcctgccaatgccatcttaaatcagttccagcctgcagcgggtggctactttgtgccagcagtcccacaggctcagggaaggcctccatattatacacctaaccagttagcacagatgaggcctaatccacgctggcagcaaggtgggagacctcaaggcttccaaggaatgccaagtgctatacgccagtctgggcctcgtccaactcttcgccatctggctccaactggtaatgctccggcctctcgtggcctccctactaccactcagagagtcgggtctgagtgcccggaccgcttggctatggactttggtggggctggtgccgcccagcaagggctgactgacagctgccagtctggaggcgttcccacagctgtgcagaacttagcgccacgcgctgctgttgctgctgctgctccccgggctgttgccccctacaaatacgcctccagtgtccgcagccctcatcctgccatacagcctctgcaggcaccccagcctgcggtccatgtgcaggggcaggagccactgactgcctccatgctggctgcagcacccccccaggaacagaagcagatgctgggagaacgcttgttcccactcatccaaacaatgcattcaaatctggctgggaagatcacgggaatgctgctggagatagacaactctgagctgctgcacatgttagagtcccccgagtctctccgctccaaggtggatgaagctgtagcagttctacaggctcatcatgccaagaaagaagctgcccagaaggattcaaaagccaaataaccccttatggaattcaactcaaggtttgaagacttcctagcttgtcctatggacctcaacaccaaggattacaaattgcaaatttaataggtcattttgtatcaaaaggtcaattatgaagcacctagaatttttcaattatacgaatatgttctttgggttctgctgtggcccagacagtgttaactttttttttattgtgggttttgattttttcccccagaaattggttttatttgatgtacccaagtcttacgtttcccaataaagaaaaaaaatctccat

SEQ ID NO: 142 - DNA, 3416 bp, Homo sapiens
accaggcagcctgcgttcgccatgaagcgacccaaggagccgagcggctccgacggggagtccgacggacccatcgacgtgggccaagagggccagctgagccagatggccaggccgctgtccacccccagctcttcgcagatgcaagccaggaagaaacgcagagggatcatagagaaacggcgtcgagaccgcatcaacagtagcctttctgaattgcgacgcttggtccccactgcctttgagaaacagggctcttccaagctggagaaagccgaggtcttgcagatgacggtggatcacttgaaaatgctccatgccactggtgggacaggattctttgatgcccgagccctggcagttgacttccggagcattggttttcgggagtgcctcactgaggtcatcaggtacctgggggtccttgaagggcccagcagccgtgcagaccccgtccggattcgccttctctcccacctcaacagctacgcagccgagatggagccttcgcccacgcccactggccctttggccttccctgcctggccctggtctttcttccatagctgtccagggctgccagccctgagcaaccagctcgccatcctgggaagagtgcccagccctgtcctccccggtgtctcctctcctgcttaccccatcccagccctccgaaccgctccccttcgcagagccacaggcatcatcctgccagcccggaggaatgtgctgcccagtcgaggggcatcttccacccggagggcccgccccctagagaggccagcgacccctgtgcctgtcgcccccagcagcagggctgccaggagcagccacatcgctcccctcctgcagtcttcctccccaacaccccctggtcctacagggtcggctgcttacgtggctgttcccacccccaactcatcctccccagggccagctgggaggccagcgggagccatgctctaccactcctgggtctctgaaatcactgaaatcggggctttctgagctgccccttcaccaccccgccccaaggaataaggaaggttcttttaccaggagcccaaaaaagggcactgccttttctgctttgcttcgtggactggctcatatgtgaaggcacgttctccagccatcagaggccccctcctcctccaacccatctctccttctcactgttatcccagcttatccacccagctctcctggagctgttctggtctcagaggcttggttccatttctcacctgaacagatgagtcctgggagagaccctcagagatccgcccagacccctctcctgccctctgcacaccagcagcaggcatgaaccttgggtctgggaaaaagctttaacctgcagggcaccaggacccaaggcaggctgttccttggggcggtcagaccccagtcaggagcaatgactgactggctgcagccttcccacgccaagaggctggaacatagtgtctgcctcgcttcctggagatagtaactgagcaggggctacaaagaggtctcctgggaaccctgtctgccccttcccacctgtccttgggccacaccatcacactgaaccacaggacagaccctttctccaccacagccaaggcctggagactgggggcccagcagagcctgctcccaccctcctcccagcagcagacacccaccctctcactgactaacaggtccctgcacacagctggcctggtaaacccagctgggaggtttctaggcagcagcaaaactctgtgacagggtgtcctcacaccaggccttggacagctctcccagacaggagccagggttgagcaatggagagcccagcccccacgtcttacagtcgccatcctccaggcgtgtggtccctccccattgggtgcacagtgcagaggggccgtggccccatgtgatggtgcgcagagaggaacctcttgggattcagcaccagacgtctgtgctgcctggtttgcatccggctcacagagcccagactgctggaacagccaaggactgtcaggctggacaaaaataactgcaaggaggggcaagagaaaggatgattcgaggcaccttggcccttcaaggtcatgcagtgggtcgagcgcctgagatcctgttcaccaggactccacagagctggctctgctcagaagccatttcattccccggctccaccctaggccactttttctaacagaggaaacaaatggtccagcagtcgttcccagcagaacagcggagcctggactgacacccagtgggaccagtgttgccacaccagttgataaaatgcagaaacccttctgtactcgttggtaaatatctactcccccaagtgactccaggtgccccccaccgcctggcacttcccccaggactcctacgatctggttactgcctggccgatccaaggctgtggagtcccagagccagcagttcactggtgctcattccacactggttagatacttcagttgtcacccctgggaagattctcccacctcctccctttgatggaaccaccctccccagaggctgcattgaggagactccacagactgaaaagtgagtttgcagaaaccttggggaaaagggccctttcaaagaagtggataagagggaggagatcattgagtgacccagaaagctcttttgaaaagacagactcctcaaggagagataaagaggaaagcacctctttcattttttagtgtgagctaattccatcagactgctgtcctcctggacccatctgagatgtgcagtagcaaggagaggggggatcattttagagagtgggtcattggcagggagtgctccggagggaggcagaggggagactgtggtagaaggaagacagaactcacacatgctcccaggattggggacagggacagaggaggtaacagaaggcaaaggccagtttccccgttatcatgaaggggcccactcaggacaggaacaaggacaactcctcctcctcctcctcctctcctgctgctcctgggataccaggtcagtgatgtagtcttgcagtttggcaacttcctagcctgagaatccctagtggggctgtgggaaacacatttccacgttgcaagcatgcaactccaaagaatctgtgatgccactgaaatgagatgggaatgatccagctctttcagcatcttggttgaacttgctttcattgtccctgggatattgtggaaggaaaggtgactgtgtgatctgattctgtggtcaaggacttgcatcttgtgtttctatccccaagccttcctggtgtctccaactcctaccccattgcatgggttgttgcggacatccaataaagatttttttagtgcttctggaaaaaaaaaaaaaaaaaaaaaaaaaaaaaaaaaaaaaaaaaaaaaaaaaaaaaaacc

SEQ ID NO: 143 - protein, 328 aa, Homo sapiens
MKRPKEPSGSDGESDGPIDVGQEGQLSQMARPLSTPSSSQMQARKKRRGIIEKRRRDRINSSLSELRRLVPTAFEKQGSSKLEKAEVLQMTVDHLKMLHATGGTGFFDARALAVDFRSIGFRECLTEVIRYLGVLEGPSSRADPVRIRLLSHLNSYAAEMEPSPTPTGPLAFPAWPWSFFHSCPGLPALSNQLAILGRVPSPVLPGVSSPAYPIPALRTAPLRRATGIILPARRNVLPSRGASSTRRARPLERPATPVPVAPSSRAARSSHIAPLLQSSSPTPPGPTGSAAYVAVPTPNSSSPGPAGRPAGAMLYHSWVSEITEIGAF

SEQ ID NO: 144 - DNA, 1951 bp, Homo sapiens
gatcctaaattgcagcaaggctacaatgctatgggattctcccagggaggccaatttctgagggcagtggctcagagatgcccttcacctcccatgatcaatctgatctcggttgggggacaacatcaaggtgtttttggactccctcgatgcccaggagagagctctcacatctgtgacttcatccgaaaaacactgaatgctggggcgtactccaaagttgttcaggaacgcctcgtgcaagccgaatactggcatgaccccataaaggaggatgtgtatcgcaaccacagcatcttcttggcagatataaatcaggagcggggtatcaatgagtcctacaagaaaaacctgatggccctgaagaagtttgtgatggtgaaattcctcaatgattccattgtggaccctgtagattcggagtggtttggattttacagaagtggccaagccaaggaaaccattcccttacaggagacctccctgtacacacaggaccgcctggggctaaaggaaatggacaatgcaggacagctagtgtttctggctacagaaggggaccatcttcagttgtctgaagaatggttttatgcccacatcataccattccttggatgaaacccgtatagttcacaatagagctcagggagcccctaactcttccaaaccacatgggagacagtttccttcatgcccaagcctgagctcagatccagcttgcaactaatccttctatcatctaacatgccctacttggaaagatctaagatctgaatcttatcctttgccatcttctgttaccatatggtgttgaatgcaagtttaattaccatggagattgttttacaaacttttgatgtggtcaagttcagttttagaaaagggagtctgttccagatcagtgccagaactgtgcccaggcccaaaggagacaactaactaaagtagtgagatagattctaagggcaaacatttttccaagtcttgccatatttcaagcaaagaggtgcccaggcctgaggtactcacataaatgctttgttttgctggtgatttaaccagtgcttggaaaaatcttgcttggctatttctgcatcatttcttaaggctgccttcctctctcagtacgttgccctctgtgctatcatcttatcatcaattattagacaaatcccactggcctacagtcttgcttctgcagcacccactttgtctcctcaggtagtgatgaattagttgctgtcacaaaaggagggaagtagcacccaaattaagttgcttaagagaggaaatgtacatcttgtataacttagggagcgaagaaaatgtaggcgcgaaagtgaaaagtgaggcagctagttcttcctattccattctcgaccaacctgccctttcttaatatgactagtggtcttgatgctagagtcaacttactctgttgctggctttagcagagaataggaggaaccatatgaaaaagatcaggctttctgacttccatccccaaaacacatttaccagcatactccaaactgtttctgatgtgttccatgagaaaaggattgtttgctcaaaaagcttggaaaatactacacactccctttctccttctggagatcaacccacattagagtgtctaaggactcctgagaattcctgttacagtaaacaaaactaacgtaatctaccatttcctacactatttgagcatggaaatcatagtccccactctgtgaaaacttaacgctttttggaagacatttctgtagcatgtcagtttggagaaatgatgagctacgccttgatgaaagaaccgtgttggtgctgctaagtttagccattatggtttttcctttctctctcttaagccttattcttcaactaaaagatgaggattaagagcaagaagttgggggggatgtgaaaataattttatgaggttgtctaaaat

SEQ ID NO: 145 - DNA, 2701 bp, Homo sapiens
gggtcgcgcggagattgctgggcggttcttgccggaagcggagagcggctgatcgcagtccggaggtgaggcggaactctgaggcagatatcctccctttcctcctcggctgctgctcttactttgacaagccaggctaacattgaaggtggtccattatggctgacatgcaaaatctggtagaaagattggagagggcagtgggccgcctggaggcagtatctcatacctctgacatgcaccgtgggtatgcagacagtccttcaaaagcaggagcagctccatatgtgcaggcatttgactcgctgcttgctggtcctgtggcagagtacttgaagatcagtaaagagattgggggagacgtgcagaaacatgcggagatggtccacacaggtttgaagttggagcgagctctgttggttacagcttctcagtgtcaacagccagcagaaaataagctttccgatttgttggcacccatctcagagcagatcaaagaagtgataacctttcgggagaagaaccgaggcagcaagttgtttaatcacctgtcagctgtcagcgaaagtatccaggccctgggctgggtggctatggctcccaagcctggcccttatgtgaaagaaatgaatgatgccgccatgttttatacaaaccgagtcctcaaagagtacaaagatgtggataagaagcatgtagactgggtcaaagcttatttaagtatatggacagagctgcaggcttacattaaggagttccataccaccggactggcctggagcaaaacggggcctgtggcaaaagaactgagcggactgccatctggaccctctgccggatcaggtcctcctccccctccaccatgcccccctcctcccccagtctctaccagttcatgctcatatgagtctgcttcccgctcagcactgttcgcgcagattaatcagggggagagcattacacatgccctgaaacatgtatctgatgacatgaagactcacaagaaccctgccctgaaggctcagagtggtccagtacgcagtggccccaaaccattctctgcacctaaaccccaaaccagcccatcccccaaacgagccacaaagaaggagccagctgtacttgaactggagggcaagaagtggagagtggaaaatcaggaaaatgtttccaacctggtgattgaggacacagagctgaaacaggtggcttacatatacaagtgtgtcaacacgacattgcaaatcaagggcaaaattaactccattacagtagataactgtaagaaacttggcctggtattcgatgacgtggtgggcattgtggagataatcaacagtaaggatgtcaaagttcaggtaatgggtaaagtgccaaccatatccatcaacaaaacagatggctgccatgcttacctgagcaagaattccctggattgtgaaatagtcagtgccaaatcttccgagatgaatgtcctcattcctacagaaggcggtgactttaatgaattcccagttcctgagcagttcaagaccctatggaacgggcagaagttggtcaccacagtgacagaaattgctggataagcgaagtgccactgggttctttgccctcccttcacaccatgggataaatctgtatcaagacggttcttttctagatttcctctacctttttgctcttaaaactgcttctctgctctgagaagcacagctacctgccttcactgaaatatacctcaggctgaaatttggggtgggatagcaggtcagttgatcttctgcaggaaggtgcagcttttccatatcagctcaaccacgccgccagtccattcttaaggaactgccgactaggactgatgatgcattttagctttgagcttttgggggttattctaccaacaaacagtccattggaaagaaaacagtccctggaattaacagatcagaatgttcacactggttaatctttttttaacaatgagcatgaaggtagcagaagctggtgtgtttccagatggttcttctaaccaaactaatttttcactgttgacaagcgaggcaagggttgcactggaccaaaggctgaggcttggccatctagcattccatacaaaattgtttcctataagcattccttttattctctattctatcctgggtctgcctcaaccgtgagataggagagtctctggtactagctgctgtagcagtgcccttcatccagggcagttaatggagtcttggaccctttctttctctgggatccctgcccagcaccttcctatagagatgactttaaaaggaaaaaaaaaaaaaaaaaaacccacatgatttcaaggagtctggcattcctgaatccttcttccctgccaggtgcctgtcacctgtcttcactgcctccttttccctgtcatgctcatcagcttatggcttctgtctaagcacctgaacagaggactgaaacctccactgcaggctggttttaggtcttgaattatgtaagaatcttgcacagcactgctaatgtaaatttcagttgtttttccctctaggacaaacacttaccaaaatatgcaacttttttttggtgggaagagagattgtcctgtgatttctacccatttcctgaggcctgtggaaataaacctttatgtacttaaagttatacagaaaatagaataaagttaataccaaacttg

SEQ ID NO: 146 - DNA, 2685 bp, Homo sapiens
ggcttcggtcgctaccgctcccgctctgccacccccgccaaccgccgctcgggcctccgtcgctgccgcgtcgctttctcgctccttggatcgcacatcctcccagatgcagcgccgggacgaccccgccgcgcgcatgagccggtcttcgggccgtagcggctccatggacccctccggtgcccacccctcggtgcgtcagacgccgtctcggcagccgccgctgcctcaccggtcccggggaggcggagggggatcccgcgggggcgcccgggcctcgcccgccacgcagccgccaccgctgctgccgccctcggccacgggtcccgacgcgacagtgggcgggccagcgccgaccccgctgctgcccccctcggccacagcctcggtcaagatggagccagagaacaagtacctgcccgaactcatggccgagaaggactcgctcgacccgtccttcactcacgccatgcagctgctgacggcagaaattgagaagattcagaaaggagactcaaaaaaggatgatgaggagaattacttggatttattttctcataagaacatgaaactgaaagagcgagtgctgatacctgtcaagcagtatcccaagttcaattttgtggggaagattcttggaccacaagggaatacaatcaaaagactgcaggaagagactggtgcaaagatctctgtattgggaaagggctcaatgagagacaaagccaaggaggaagagctgcgcaaaggtggagaccccaaatatgcccacttgaatatggatctgcatgtcttcattgaagtctttggacccccatgtgaggcttatgctcttatggcccatgccatggaggaagtcaagaaatttctagtaccggatatgatggatgatatctgtcaggagcaatttctagagctgtcctacttgaatggagtacctgaaccctctcgtggacgtggggtgccagtgagaggccggggagctgcacctcctccaccacctgttcccaggggccgtggtgttggaccacctcggggggctttggtacgtggtacaccagtaaggggagccatcaccagaggtgccactgtgactcgaggcgtgccacccccacctactgtgaggggtgctccagcaccaagagcacggacagcgggcatccagaggatacctttgcctccacctcctgcaccagaaacatatgaagaatatggatatgatgatacatacgcagaacaaagttacgaaggctacgaaggctattacagccagagtcaaggggactcagaatattatgactatggacatggggaggttcaagattcttatgaagcttatggccaggacgactggaatgggaccaggccgtcgctgaaggcccctcctgctaggccagtgaagggagcatacagagagcacccatatggacgttattaaaaacaaacatgaggggaaaatatcagttatgagcaaagttgttactgatttcttgtatctcccaggattcctgttgctttacccacaacagacaagtaattgtctaagtgtttttcttcgtggtccccttcttctccccaccttattccattcttaactctgcattctggcttctgtatgtagtattttaaaatgagttaaaatagatttaggaatattgaattaattttttaagtgtgtagatgcttttttctttgttgtttaaatataaacagaagtgtaccttttataataaaaaaaagaagttgagtaaaaaaaaaaaacacacaaacctgttagtttcaaaaatgacattgcttgcttaaaggttctgaagtaaaggcttgttaagtttctcttagttttgatttgaggcatcccgtaaagttgtagttgcagaatcccaaactaggctacatttcaaaattcagggctgtttaagatttaaaatcacaaacattaacggcagtaggcaccaccatgtaaaagtgagctcagacgtctctaaaaaatgtttcctttataaaagcacatggcggttgaatcttaaggttaaattttaatatgaaagatcctcatgaattaaatagttgatgcaatttttaacgttaattgatataaaaaaaaaaacaacaaaattaggcttgtaaaactgactttttcattacgtgggttttgaaatctagccccagacatactgtgttgagagatacttagagggagggagtaggttttgaagaggttgatggtggtggggagggaaggcctcctgaattgagtttgatgcagagctttttagccatgaagaatctttcagtcatagtactaataattaaattttcagtatttaaaaagacaaagtattttgtccatttgagattctgcactccatgaaaagttcacttggacgctggggccaaaagctgttgattttcttaagttgacggttgtcaatatatcgaactgttcccaagttagtcaagtatgtctcaacactagcatgatataaaaagggacactgcagctgaatgaaaaaggaatcaaaatccactttgtacataagttaaagtcctaattggatttgtaccgtcctcccattttgttctcggaagattaaatgctacatgtgtaagtctgcctaaataggtagcttaaacttatgtcaaaatgtctgcagcagtttgtcaataaagtttagtcctttttta

SEQ ID NO: 147 - protein, 443 aa, Homo sapiens
MQRRDDPAARMSRSSGRSGSMDPSGAHPSVRQTPSRQPPLPHRSRGGGGGSRGGARASPATQPPPLLPPSATGPDATVGGPAPTPLLPPSATASVKMEPENKYLPELMAEKDSLDPSFTHAMQLLTAEIEKIQKGDSKKDDEENYLDLFSHKNMKLKERVLIPVKQYPKFNFVGKILGPQGNTIKRLQEETGAKISVLGKGSMRDKAKEEELRKGGDPKYAHLNMDLHVFIEVFGPPCEAYALMAHAMEEVKKFLVPDMMDDICQEQFLELSYLNGVPEPSRGRGVPVRGRGAAPPPPPVPRGRGVGPPRGALVRGTPVRGAITRGATVTRGVPPPPTVRGAPAPRARTAGIQRIPLPPPPAPETYEEYGYDDTYAEQSYEGYEGYYSQSQGDSEYYDYGHGEVQDSYEAYGQDDWNGTRPSLKAPPARPVKGAYREHPYGRY

SEQ ID NO: 148 - DNA, 1402 bp, Homo sapiens
ctcgcgtcacagccgggatgaagccgatcctactgcagggccatgagcggtccattacgcagattaagtataaccgcgaaggagacctcctctttactgtggccaaggaccctatcgtcaatgtatggtactctgtgaatggtgagaggctgggcacctacatgggccataccggagctgtgtggtgtgtggacgctgactgggacaccaagcatgtcctcactggctcagctgacaacagctgtcgtctctgggactgtgaaacaggaaagcagctggcccttctcaagaccaattcggctgtccggacctgcggttttgactttgggggcaacatcatcatgttctccacggacaagcagatgggctaccagtgctttgtgagcttttttgacctgcgggatccgagccagattgacaacaatgagccctacatgaagatcccttgcaatgactctaaaatcaccagtgctgtttggggacccctgggggagtgcatcatcgctggccatgagagtggagagctcaaccagtatagtgccaagtctggagaggtgttggtgaatgttaaggagcactcccggcagatcaacgacatccagttatccagggacatgaccatgtttgtgaccgcgtccaaggacaacacagccaagctttttgactccacaactcttgaacatcagaagactttccggacagaacgtcctgtcaactcagctgccctctcccccaactatgaccatgtggtcctgggcggtggtcaggaagccatggatgtaaccacaacctccaccaggattggcaagtttgaggccaggttcttccatttggcctttgaagaagagtttggaagagtcaagggtcactttggacctatcaacagtgttgccttccatcctgatggcaagagctacagcagcggcggcgaagatggttacgtccgtatccattacttcgacccacagtactttgaatttgagtttgaggcttaagaagctggatctcctgccgggcgtggttggctcatgcctgtaatcccaccactttttttttaaggcaggcggatcacctgaggtcaggagtttaagaccagcctgaccaacatggagaaacctcgtctctactaaaaatacaaaaattagccaggcatggtggcacacgcctatagtcccagctactcaggaggctgaggcaggagaatcacttgaacccaggaggcagaggttgcagtgagctgagatcacgtcattgcactccatcctgagccacaagagcaaaactccgtctcaaaaaaaaaaaagaagaaggtggatctccaaccaggccagagaagattctcacagaaggttttgaactctaagaaataaattggtttggtaataaatggcttctggtcaga

SEQ ID NO: 149 - protein, 325 aa, Homo sapiens
MKPILLQGHERSITQIKYNREGDLLFTVAKDPIVNVWYSVNGERLGTYMGHTGAVWCVDADWDTKHVLTGSADNSCRLWDCETGKQLALLKTNSAVRTCGFDFGGNIIMFSTDKQMGYQCFVSFFDLRDPSQIDNNEPYMKIPCNDSKITSAVWGPLGECIIAGHESGELNQYSAKSGEVLVNVKEHSRQINDIQLSRDMTMFVTASKDNTAKLFDSTTLEHQKTFRTERPVNSAALSPNYDHVVLGGGQEAMDVTTTSTRIGKFEARFFHLAFEEEFGRVKGHFGPINSVAFHPDGKSYSSGGEDGYVRIHYFDPQYFEFEFEA

SEQ ID NO: 150 - DNA, 2091 bp, Homo sapiens
gagcggagccgcgggcgggagggcggacggaccgactgacggtagggacgggaggcgagcaagatggcgcagacgcagggcacccggaggaaagtctgttactactacgacggggatgttggaaattactattatggacaaggccacccaatgaagcctcaccgaatccgcatgactcataatttgctgctcaactatggtctctaccgaaaaatggaaatctatcgccctcacaaagccaatgctgaggagatgaccaagtaccacagcgatgactacattaaattcttgcgctccatccgtccagataacatgtcggagtacagcaagcagatgcagagattcaacgttggtgaggactgtccagtattcgatggcctgtttgagttctgtcagttgtctactggtggttctgtggcaagtgctgtgaaacttaataagcagcagacggacatcgctgtgaattgggctgggggcctgcaccatgcaaagaagtccgaggcatctggcttctgttacgtcaatgatatcgtcttggccatcctggaactgctaaagtatcaccagagggtgctgtacattgacattgatattcaccatggtgacggcgtggaagaggccttctacaccacggaccgggtcatgactgtgtcctttcataagtatggagagtacttcccaggaactggggacctacgggatatcggggctggcaaaggcaagtattatgctgttaactacccgctccgagacgggattgatgacgagtcctatgaggccattttcaagccggtcatgtccaaagtaatggagatgttccagcctagtgcggtggtcttacagtgtggctcagactccctatctggggatcggttaggttgcttcaatctaactatcaaaggacacgccaagtgtgtggaatttgtcaagagctttaacctgcctatgctgatgctgggaggcggtggttacaccattcgtaacgttgcccggtgctggacatatgagacagctgtggccctggatacggagatccctaatgagcttccatacaatgactactttgaatactttggaccagatttcaagctccacatcagtccttccaatatgactaaccagaacacgaatgagtacctggagaagatcaaacagcgactgtttgagaaccttagaatgctgccgcacgcacctggggtccaaatgcaggcgattcctgaggacgccatccctgaggagagtggcgatgaggacgaagacgaccctgacaagcgcatctcgatctgctcctctgacaaacgaattgcctgtgaggaagagttctccgattctgaagaggagggagaggggggccgcaagaactcttccaacttcaaaaaagccaagagagtcaaaacagaggatgaaaaagagaaagacccagaggagaagaaagaagtcaccgaagaggagaaaaccaaggaggagaagccagaagccaaaggggtcaaggaggaggtcaagttggcctgaatggacctctccagctctggcttcctgctgagtccctcacgtttcttccccaacccctcagattttatattttctatttctctgtgtatttatataaaaatttattaaatataaatatccccagggacagaaaccaaggccccgagctcagggcagctgtgctgggtgagctcttccaggagccaccttgccacccattcttcccgttcttaactttgaaccataaagggtgccaggtctgggtgaaagggatacttttatgcaaccataagacaaactcctgaaatgccaagtgcctgcttagtagctttggaaaggtgcccttattgaacattctagaaggggtggctgggtcttcaaggatctcctgtttttttcaggctcctaaagtaacatcagccatttttagattggttctgttttcgtaccttcccactggcctcaagtgagccaagaaacactgcctgccctctgtctgtcttctcctaattctgcaggtggaggttgctagtctagtttcctttttgagatactattttcatttttgtgagcctctttgtaataaaatggtacatttct

SEQ ID NO: 151 - protein, 482 aa, Homo sapiens
MAQTQGTRRKVCYYYDGDVGNYYYGQGHPMKPHRIRMTHNLLLNYGLYRKMEIYRPHKANAEEMTKYHSDDYIKFLRSIRPDNMSEYSKQMQRFNVGEDCPVFDGLFEFCQLSTGGSVASAVKLNKQQTDIAVNWAGGLHHAKKSEASGFCYVNDIVLAILELLKYHQRVLYIDIDIHHGDGVEEAFYTTDRVMTVSFHKYGEYFPGTGDLRDIGAGKGKYYAVNYPLRDGIDDESYEAIFKPVMSKVMEMFQPSAVVLQCGSDSLSGDRLGCFNLTIKGHAKCVEFVKSFNLPMLMLGGGGYTIRNVARCWTYETAVALDTEIPNELPYNDYFEYFGPDFKLHISPSNMTNQNTNEYLEKIKQRLFENLRMLPHAPGVQMQAIPEDAIPEESGDEDEDDPDKRISICSSDKRIACEEEFSDSEEEGEGGRKNSSNFKKAKRVKTEDEKEKDPEEKKEVTEEEKTKEEKPEAKGVKEEVKLA

SEQ ID NO: 152 - DNA, 1571 bp, Homo sapiens
ggcacgagggcgcggagcggagcggcggcgggcgcagctagcgggtcggccgcggagcggaggtgcagctcggcttcccccggcacccctccccctcgggcgccagccccacccctccgccggccgggccgaccccgccgtactatcccctgcggcgcgagcccggggcggctccaagcgccccccagcagacccccatcatgggcagccagagctccaaggctccccggggcgacgtgaccgccgaggaggcagcaggcgcttcccccgcgaaggccaacggccaggagaatggccacgtgaaaagcaatggagacttatcccccaagggtgaaggggagtcgccccctgtgaacggaacagatgaggcagccggggccactggcgatgccatcgagccagcaccccctagccagggtgctgaggccaagggggaggtcccccccaaggagacccccaagaagaagaagaaattctctttcaagaagcctttcaaattgagcggcctgtccttcaagagaaatcggaaggagggtgggggtgattcttctgcctcctcacccacagaggaagagcaggagcagggggagatcggtgcctgcagcgacgagggcactgctcaggaagggaaggccgcagccacccctgagagccaggaaccccaggccaagggggcagaggctagtgcagcctcagaagaagaggcagggccccaggctacagagccatccactccctcggggccggagagtggccctacaccagccagcgctgagcagaatgagtagctaggtaggggcaggtgggtgatctctaagctgcaaaaactgtgctgtccttgtgaggtcactgcctggacctggtgccctggctgccttcctgtgcccagaaaggaaggggctattgcctcctcccagccacgttccctttcctcctctccctcctgtggattctcccatcagccatctggttctcctcttaaggccagttgaagatggtcccttacagcttcccaagttaggttagtgatgtgaaatgctcctgtccctggccctacctccttccctgtccccacccctgcataaggcagttgttggttttcttccccaattcttttccaagtaggttttgtttaccctactccccaaatccctgagccagaagtggggtgcttatactcccaaaccttgagtgtccagccttcccctgttgtttttagtctcttgtgctgtgcctagtggcacctgggctggggaggacactgccccgtctaggtttttataaatgtcttactcaagttcaaacctccagcctgtgaatcaactgtgtctcttttttgacttggtaagcaagtattaggctttggggtggggggaggtctgtaatgtgaaacaacttcttgtctttttttctcccactgttgtaaataacttttaatggccaaaccccagatttgtacttttttttttttctaactgctaaaaccattctcttccacctggttttactgtaacatttggaaaaggaataaatgtcgtccctttttaaaaaaaaaaaaaaaaaaaaaaaaa

SEQ ID NO: 153 - protein, 195 aa, Homo sapiens
MGSQSSKAPRGDVTAEEAAGASPAKANGQENGHVKSNGDLSPKGEGESPPVNGTDEAAGATGDAIEPAPPSQGAEAKGEVPPKETPKKKKKFSFKKPFKLSGLSFKRNRKEGGGDSSASSPTEEEQEQGEIGACSDEGTAQEGKAAATPESQEPQAKGAEASAASEEEAGPQATEPSTPSGPESGPTPASAEQNE

SEQ ID NO: 154 - DNA, 1353 bp, Homo sapiens
gctcccattggctgatgttggcgcgaaggtgcgcgagtcagccctcgcgctgggggcgcaggaaacaatagaggccgcgcgcacagagcgagctcttgcagcctccccgcccctcccgcaacgctcgaccccaggattcccccggctcgcctgcccgccatggccgacaaggaagcagccttcgacgacgcagtggaagaacgagtgatcaacgaggaatacaaaatatggaaaaagaacaccccttttctttatgatttggtgatgacccatgctctggagtggcccagcctaactgcccagtggcttccagatgtaaccagaatttggaggttttggttcagttagtggaaaaattgaaatagaaatcaagatcaaccatgaaggagaagtaaacagggcccgttatatgccccagaacccttgtatcatcgcaacaaagactccttccagtgatgttcttgtttttgactatacaaaacatccttctaaaccagatccttctggagagtgcaacccagacttgcgtctccgtggacatcagaaggaaggctatgggctttcttggaacccaaatctcagtgggcacttacttagtgcttcagatgaccataccatctgcctgtgggacatcagtgccgttccaaaggagggaaaagtggtagatgcgaagaccatctttacagggcatacggcagtagtagaagatgtttcctggcatctactccatgagtctctgtttgggtcagttgctgatgatcagaaacttatgatttgggatactcgttcaaacaatacttccaaaccaagccactcagttgatgctcacactgctgaagtgaactgcctttctttcaatccttatagtgagttcattcttgccacaggatcagctgacaagactgttgccttgtgggatctgagaaatctgaaacttaagttgcattcctttgagtcacataaggatgaaatattccaggttcagtggtcacctcacaatgagactattttagcttccagtggtactgatcgcagactgaatgtctgggatttaagtaaaattggagaggaacaatccccagaagatgcagaagacgggccaccagagttgttgtttattcatggtggtcatactgccaagatatctgatttctcctggaatcccaatgaaccttgggtgatttgttctgtatcagaagacaatatcatgcaagtgtggcaaatggagttagtccttgaccactagtttgatgccatctccattttgggtgacctgtttcaccagcaggcctgttactctccatgactaactgtgtaagtgcttaaaatggaataaattgcttttctacataa

SEQ ID NO: 155 - DNA, 5294 bp, Homo sapiens
ggctcgcatccccatagtgctgggttacagtgaaggtacgccccgcgctctgctctggagaggcagggtgggatagggaacgtctcgagtggcgcccgcagtcatggtggtgttcgttggccgccgcctcccggcgctcctagggctgtttaagaagaagggctctgccaaggctgagaatgacaaacatctaagtgtagggcctggccaggggccagggtctgcagtggatgagcaccaggacaacgtcttctttcccagtgggcgacccccccacctggaagagctgcacactcaggcccaggaggggctccgctccctacaacaccaagagaaacagaaactgaacaagggtggctgggaccatggagacacccagagtatccagtcctcccggacggggccggatgaagacaacatctccttctgcagtcagaccacatcctacgtggctgagagctccacagcagaggacgcgctctccatccgctcggagatgatccagcgcaaaggctccaccttccgaccccatgactcatttcccaaatctggaaagtcagggcggcgtcggcgggagcggcggagcactgtgctgggactcccgcagcatgtgcagaaggagcttggcctgaggaatgagcgtgaggcaccaggcacgccccgggctcctggtgcacgggatgccgtacgcatccccacagtggacggccgcccccgaggcacctcagggatgggggcccgggtgtccctgcaggcgctggaggcggaggcggaggctggcgctgagacagaggccatgctgcagcgccacattgaccgtgtctaccgggatgacacctttgttggccggtccacgggtacccgggccccaccattgacccggcccatgtccctagcagtgcctggattgacaggaggggcagggcctgcagagcccctgagcccggccatgtccatctccccccaggccacctacctgtcgaagttgattccacatgctgtgctgccgcctacagtggacgtggtggccctaggccgctgcagcctgcgcacactaagccgctgcagcctgcactcggccagcccagcctcagtccgctcgctggggcgcttctcctccgtctccagcccacagccccgcagccgccacccatcctcctccagtgacacctggagccactctcaatcctccgacaccattgtgtctgacggttccaccctctcctctaagggtggctctgagggccagccggagagctctacggctagcaatagcgtggtaccccctccccagggaggcagtgggaggggctctcccagtgggggcagcactgctgaggcctcagacacactcagcattcggagcagtgggcagttgtctggccggagtgtgtccctgcgtaagctgaagcggcctccaccccctccccgccggacccactccctccatcagcggggcttagcagtgcctgatgggccattagggttgccccctaagcctgagcgtaagcagcagccccagctgcctcggccacccaccactggtggctcagaaggggcgggggcagcaccctgtccacccaacccagccaacagctgggtacctggcttgtctccgggtggttcccggcgccccccacggtccccagaacggacactttcgccctccagtggatactcgagccaaagtggtactcccaccctccctcccaagggcctggcaggtccccctgcttccccaggcaaggcccagccccctaaaccagagcgtgtcacgtctcttcgctcccctggggcctccgtctcctcttccctcacgtctttatgttcctcctcctctgacccagccccctcagaccgctctgggccacagatattgacccccctgggtgacaggtttgtcatacctcctcaccccaaggtgcctgcccccttctccccacctccctccaagcccaggagccctaacccagctgcccctgctctagccgcccctgctgtggttcctgggcctgtttctaccactgacgccagtcctcagtcccctcccactccccagacaaccttgactccactgcaggagtctcctgtcatctccaaagaccagtcacccccaccttccccacccccatcttatcatccacccccaccacccactaagaagccagaggtggttgtggaggcaccatctgcctcagagactgctgaggagcccctccaagatcccaactggccccctcccccaccccctgcccctgaggagcaggacctgtccatggctgacttccccccaccagaggaggcttttttctctgtggccagccctgagcctgcaggcccttcaggctccccagagcttgtcagctccccggctgcttcgtcctcctcagctactgctttgcagattcagcccccgggtagcccagaccctcctccagctccgccagccccagctcctgctagttccgccccagggcatgtggccaagctccctcagaaggaaccggtgggctgtagcaagggtggtgggcctcccagggaggacgtaggtgcgcccctggtcacgccctcgctcctgcagatggtgcggctgcgctccgtgggtgctccaggaggggctcccaccccagcactggggccatcggccccccagaaaccactgcgaagggccctgtcagggcgggccagcccagtgcctgccccctcctcagggctccatgctgcggtccgactcaaggcctgcagcctggccgccagtgaaggcctctcaagtgctcagcccaacggaccgcctgaggcagagccacggcctccccagtcccctgcctcaacggccagtttcatcttctccaagggctctaggaagctgcagctggagcggcccgtgtcccctgagacccaggctgacctccagcggaatctggtggcagaactccggagcatctcagagcagcggccaccccaggccccaaagaagtcacctaaggctcccccacctgtggcccgcaagccgtctgtgggagtccccccacccgcctcccccagttaccctcgagctgagccccttactgctcctcccaccaatgggctccctcacacccaggacaggactaagagggagctggcggagaatggaggtgtcctgcagctggtgggcccagaggagaagatgggcctcccgggctcagactcacagaaagagctggcctgaccaccaggcacctcactggcactgctgacccatcccagaaacacaatctcagggacccgagcagctccaaggacgagaggatacagcagacacaacctaatagagagggcgcctgcagccttaacctccacggccttcgatacttatgcaagcctggtgttgctcctgtcctcagagtcatcctgcgctcatgccttttcccgaatgggttcacctctggcagttgccgcttcagtcttggccttagcctcatcttgaagtgggtagctggcgggagagggtggctgcgccccctgctggccctgaggctgcagagttgggagcaggacacctcacctgagtttcattttttttcatgtccaaaccatgcacatactatagtccagaatcaaagcacttttgaaaagtggctgcatggccatcctccagggcccaggaagttgcattccaagggcctgtttacatggcagcagaatccatccccggcagtcagcccatagcttgggaccagtctgtgccctcctgcccagtccagtttactcctcttggttcctgaaggtggccaagtcattgtgttcccacaggcttctctaggctgggggcaggtgtggggctgtggaattccaaagcacaaaaggtgcagaggggattggccttcctgtgcctcaactcaccaaccaccctcctgccttccagttctgccaggtgctccatgctggggacaagtaggagactgccagggcccaaagaaatgggtgagcagtagagtcatctcggggcacttggcagtgtcaagcacctgccccttgcctccttgaccacactggggtgggtgggcccccagcacttcagaggcaggagcctttgggctgagcaagcactgaggaggtggatggaagggagcatctggagggggggagcttccttgagcagtgggcccaggcctggccctccacacttcattctctgacctttctctctcctcatttcggtgcatgtcctttctgcagctgcctttcagcacaggtggttccactgggggcagctaacgctgagtgacaaggatgggaagccacaggtgcattttactcaagtcttctctagtcaatgaggggcacccagtgcttctagggcaggctgggtggtggtcccctaggtatcagcctctcttactgtactctccgggaatgttaacctttctattttcagcctgtgccacctgtctaggcaagctggcttccccattggcccctgtgggtccacagcagcgtggctgccccccagggccaccgcttctttcttgatcctctttccttaacagtgacttgggcttgagtctggcaaggaaccttgcttttagcttcaccaccaaggagagaggttgacatgacctccccgccccctcaccaaggctgggaacagaggggatgtggtgagagccaggttcctctggccctctccagggtgttttccactagtcactactgtcttctccttgtagctaatcaatcaatattcttcccttgcctgtgggcagtggagagtgctgctgggtgtacgctgcacctgcccactgagttggggaaagaggataatcagtgagcactgttctgctcagagctcctgatctaccccaccccctaggatccaggactgggtcaaagctgcatgaaaccaggccctggcagcaacctgggaatggctggaggtgggagagaacctgacttctctttccctctccctcctccaacattactggaactctatcctgttaggatcttctgagcttgtttccctgctgggtgggacagaggacaaaggagaagggagggtctagaagaggcagcccttctttgtcctctggggtaaatgagcttgacctagagtaaatggagagaccaaaagcctctgatttttaatttccataaaatgttagaagtatatatatacatatatatatttctttaaatttttgagtctttgatatgtctaaaaatccattccctctgccctgaagcctgagtgagacacatgaagaaaactgtgtttcatttaaagatgttaattaaatgattgaaacttg

SEQ ID NO: 156 - protein, 1035 aa, Homo sapiens
MVVFVGRRLPALLGLFKKKGSAKAENDKHLSVGPGQGPGSAVDEHQDNVFFPSGRPPHLEELHTQAQEGLRSLQHQEKQKLNKGGWDHGDTQSIQSSRTGPDEDNISFCSQTTSYVAESSTAEDALSIRSEMIQRKGSTFRPHDSFPKSGKSGRRRRERRSTVLGLPQHVQKELGLRNEREAPGTPRAPGARDAVRIPTVDGRPRGTSGMGARVSLQALEAEAEAGAETEAMLQRHIDRVYRDDTFVGRSTGTRAPPLTRPMSLAVPGLTGGAGPAEPLSPAMSISPQATYLSKLIPHAVLPPTVDVVALGRCSLRTLSRCSLHSASPASVRSLGRFSSVSSPQPRSRHPSSSSDTWSHSQSSDTIVSDGSTLSSKGGSEGQPESSTASNSVVPPPQGGSGRGSPSGGSTAEASDTLSIRSSGQLSGRSVSLRKLKRPPPPPRRTHSLHQRGLAVPDGPLGLPPKPERKQQPQLPRPPTTGGSEGAGAAPCPPNPANSWVPGLSPGGSRRPPRSPERTLSPSSGYSSQSGTPTLPPKGLAGPPASPGKAQPPKPERVTSLRSPGASVSSSLTSLCSSSSDPAPSDRSGPQILTPLGDRFVIPPHPKVPAPFSPPPSKPRSPNPAAPALAAPAVVPGPVSTTDASPQSPPTPQTTLTPLQESPVISKDQSPPPSPPPSYHPPPPPTKKPEVVVEAPSASETAEEPLQDPNWPPPPPPAPEEQDLSMADFPPPEEAFFSVASPEPAGPSGSPELVSSPAASSSSATALQIQPPGSPDPPPAPPAPAPASSAPGHVAKLPQKEPVGCSKGGGPPREDVGAPLVTPSLLQMVRLRSVGAPGGAPTPALGPSAPQKPLRRALSGRASPVPAPSSGLHAAVRLKACSLAASEGLSSAQPNGPPEAEPRPPQSPASTASFIFSKGSRKLQLERPVSPETQADLQRNLVAELRSISEQRPPQAPKKSPKAPPPVARKPSVGVPPPASPSYPRAEPLTAPPTNGLPHTQDRTKRELAENGGVLQLVGPEEKMGLPGSDSQKELA

SEQ ID NO: 157 - DNA, 1683 bp, Homo sapiens
atgggggacgctcccagccctgaagagaaactgcaccttatcacccggaacctgcaggaggttctgggggaagagaagctgaaggagatactgaaggagcgggaacttaaaatttactggggaacggcaaccacgggcaaaccacatgtggcttactttgtgcccatgtcaaagattgcagacttcttaaaggcagggtgtgaggtaacaattctgtttgcggacctccacgcatacctggataacatgaaagccccatgggaacttctagaactccgagtcagttactatgagaatgtgatcaaagcaatgctggagagcattggtgtgcccttggagaagctcaagttcatcaaaggcactgattaccagctcagcaaagagtacacactagatgtgtacagactctcctccgtggtcacacagcacgattccaagaaggctggagctgaggtggtaaagcaggtggagcaccctttgctgagtggcctcttataccccggactgcaggctttggatgaagagtatttaaaagtagatgcccaatttggaggcattgatcagagaaagattttcacctttgcagagaagtacctccctgcacttggctattcaaaacgggtccatctgatgaatcctatggttccaggattaacaggcagcaaaatgagctcttcagaagaggagtccaagattgatctccttgatcggaaggaggatgtgaagaaaaaactgaagaaggccttctgtgagccaggaaatgtggagaacaatggggttctgtccttcatcaagcatgtcctttttccccttaagtccgagtttgtgatcctacgagatgagaaatggggtggaaacaaaacctacacagcttacgtggacctggaaaaggactttgctgctgaggttgtacatcctggagacctgaagaattctgttgaagtcgcactgaacaagttgctggatccaatccgggaaaagtttaatacccctgccctgaaaaaactggccagcgctgcctacccagatccctcaaagcagaagccaatggccaaaggccctgccaagaattcagaaccagaggaggtcatcccatcccggctggatatccgtgtggggaaaatcatcactgtggagaagcacccagatgcagacagcctgtatgtagagaagattgacgtgggggaagctgaaccacggactgtggtgagcggcctggtacagttcgtgcccaaggaggaactgcaggacaggctggtagtggtgctgtgcaacctgaaaccccagaagatgagaggagtcgagtcccaaggcatgcttctgtgtgcttctatagaagggataaaccgccaggttgaacctctggaccctccggcaggctctgctcctggtgagcacgtgtttgtgaagggctatgaaaagggccaaccagatgaggagctcaagcccaagaagaaagtcttcgagaagttgcaggctgacttcaaaatttctgaggagtgcatcgcacagtggaagcaaaccaacttcatgaccaagctgggctccatttcctgtaaatcgctgaaaggggggaacattagctagccagcccagcatcttccccccttcttccaccactgagtcatctgctgtctcttcagtctgctccatccatcacccatttacccatctctcaggaca

SEQ ID NO: 158 - protein, 528 aa, Homo sapiens
MGDAPSPEEKLHLITRNLQEVLGEEKLKEILKERELKIYWGTATTGKPHVAYFVPMSKIADFLKAGCEVTILFADLHAYLDNMKAPWELLELRVSYYENVIKAMLESIGVPLEKLKFIKGTDYQLSKEYTLDVYRLSSVVTQHDSKKAGAEVVKQVEHPLLSGLLYPGLQALDEEYLKVDAQFGGIDQRKIFTFAEKYLPALGYSKRVHLMNPMVPGLTGSKMSSSEEESKIDLLDRKEDVKKKLKKAFCEPGNVENNGVLSFIKHVLFPLKSEFVILRDEKWGGNKTYTAYVDLEKDFAAEVVHPGDLKNSVEVALNKLLDPIREKFNTPALKKLASAAYPDPSKQKPMAKGPAKNSEPEEVIPSRLDIRVGKIITVEKHPDADSLYVEKIDVGEAEPRTVVSGLVQFVPKEELQDRLVVVLCNLKPQKMRGVESQGMLLCASIEGINRQVEPLDPPAGSAPGEHVFVKGYEKGQPDEELKPKKKVFEKLQADFKISEECIAQWKQTNFMTKLGSISCKSLKGGNIS

SEQ ID NO: 159 - DNA, 1285 bp, Homo sapiens
gcgcgagcaagatggccaccaccaagcgcgtcttgtacgtgggtggactggcagaggaagtggacgacaaagttcttcatgctgcgttcattccttttggagacatcacagatattcagattcctctggattatgaaacagaaaagcaccgaggatttgcttttgttgaatttgagttggcagaggatgctgcagcagctatcgacaacatgaatgaatctgagctttttggacgtacaattcgtgtcaatttggccaaaccaatgagaattaaggaaggctcttccaggccagtttggtcagatgatgactggttgaagaagttttctgggaagacgcttgaagagaataaagaggaagaagggtcagagcctcccaaagcagagacccaggagggagagcccattgctaaaaaggcccgctcaaatcctcaggtgtacatggacatcaagattgggaacaagccggctggccgcatccagatgctcctgcgttctgatgtcgtgcccatgacagcagagaatttccgctgcctgtgcactcatgaaaagggctttggctttaagggaagcagcttccaccgcatcatcccccagttcatgtgccagggcggtgatttcacaaaccacaatggcactgggggcaagtccatctatgggaagaagttcgatgatgaaaactttatcctcaagcatacgggaccaggtctactatccatggccaactctggcccaaacaccaatggctctcagttcttcctgacatgtgacaagacagactggctggatggcaagcatgtggtgtttggagaggtcaccgaaggcctagatgtcttgcggcaaattgaggcccagggcagcaaggacgggaagccaaagcagaaggtgatcatcgccgactgtggggagtacgtgtgaggcggcactctctctgcttccccctccgctcttgaccctgcatatccaggaaggaactgccagcctcagaggaggcagcaccgagggtgcctgtttgaagcaagcagcatttgggatatgtgcccttcctcagggtctgcttggagcagctcctctgcaggcacagcctggactattcccaggcacagctgtgggcccaggagccagctcaggtgctcccctccaccatgggcaggctgtgcaaaaaagccactggcttttctcagcatttgctgctgggcctctcctgggactaccagtgtggctcttacgtgttttctttgctaaaataaaccctagttcttatattaaaaaaaaaaaaaaaaaaa

SEQ ID NO: 160 - protein, 301 aa, Homo sapiens
MATTKRVLYVGGLAEEVDDKVLHAAFIPFGDITDIQIPLDYETEKHRGFAFVEFELAEDAAAAIDNMNESELFGRTIRVNLAKPMRIKEGSSRPVWSDDDWLKKFSGKTLEENKEEEGSEPPKAETQEGEPIAKKARSNPQVYMDIKIGNKPAGRIQMLLRSDVVPMTAENFRCLCTHEKGFGFKGSSFHRIIPQFMCQGGDFTNHNGTGGKSIYGKKFDDENFILKHTGPGLLSMANSGPNTNGSQFFLTCDKTDWLDGKHVVFGEVTEGLDVLRQIEAQGSKDGKPKQKVIIADCGEYV

SEQ ID NO: 161 - DNA, 2799 bp, Homo sapiens
tcaaagcacctgcagccccaatttgtgatccagcagcagccacagccacaacagcagcagccgccgccccagcagtcacggcctgtgctccaagctgagccccacccccagctcgcctcagtctctccaagcgtggccctccagcccagctcagaggcccatgccatgccactaggcccggttacacccgccctgccactccagtgtcccactgccaacctgcacaagcctggcggcagtcagcagtgtcaccctcccacacctgatactgggcctcagaatggacatcccgagggcgtgccccacacccctcaacgcaggttccagcacacttcagctgtcatcttacaactgcagcctgcttcaccagtgccccagcagtgtgtccctgatgactggaaagaagtggcaccaggggagaaaagtgtgcctgagacgcggtctggcccatcaccacatcagcaggctattgtcactgccatgcctggtggcctgcctgtacccacgagccctaacatccagccgtccccagctcacgagacagggcagggcattgttcatgcactgaccgacctcagcagccccggcatgacctcagggaacggaaactctgcctccagcatcgccggcactgccccccagaatggtgagaataaaccaccacaggccattgtgaaaccccaaatcctgacgcatgttatcgaagggtttgtgatccaggagggggcggagcctttcccggtgggacgctcgtccctgctggtggggaatctcaagaagaagtatgcacaggggttcctgcctgagaaacttccacagcaggatcacaccaccaccactgactcggagatggaggagccctatctgcaagaatccaaagaggagggtgctcccctcaaactcaagtgtgagctctgtggccgggtggactttgcctataagttcaagcgttccaagcgcttctgttccatggcttgtgcaaagaggtacaacgtgggatgcaccaaacgggtgggacttttccactcagaccggagcaagctgcagaaggcaggagctgcgacccacaaccgccgtcgggccagcaaagccagtctgccaccacttaccaaggataccaagaagcagccaacaggcactgtgcccctttcggttactgctgctttgcagctaacacacagccaggaagactccagccgttgctcagataactcaagctatgaggaacccttgtcacccatctcagccagctcatctacttcccgccggcgacaaggccagcgggacctggagctccccgacatgcatatgcgggacctggtgggcatgggacaccacttcctgccaagtgagcccaccaagtggaatgtagaagacgtctacgaattcatccgctctctgccaggctgccaggagatagcagaggaattccgtgcccaggaaatcgacgggcaagccctgctgctgctcaaggaggaccacctgatgagcgccatgaacatcaagctggggcccgccctgaagatctacgcccgcatcagcatgctcaaggactcctagggctggtggcagccaggattctggcccagggcgcctcctcccgactgagcagagccagacagacattcctgaggggcccagaaatggggccggttggagggcaggggctctccctaggggcatagctggtgaggaggtctgggcacctcctccatggctctcaggggcctttcatttctgtgggaggggcagagaggtaggtggcacagaagatggggctttatgcttgtaaatattgatagcactggcttcctccaaagtcccaatactctagccccgctctcttcccctctttctgtcccccattttccagggggtatatggtcagggctccccaacctgagttgggttacttcaagggcagccagcaggcctggatggaggcctagaaagcccttgccttccttcctcccacttctttctccaggcctggttaactcttccgttgtcagcttctcccccttcagcctgtttctgcagcagccagggttctcccccctacaccctctgcaggtggagagagagaagctgggcccagccgggccgtgcctgctggcacagacgccttaacgctgtgtgtatgactgtgtgactgtgtgggagcctggactgacagataggccaagggctactctctggcatctccaggtgttttgtagcaaacagccacttagtgctttgtcctggactccactcagcctcaggatggggaatagccaagaatggcagcctcagcgcagaggcaaggtcagaaagagacggcgcttcagagtttcctttccagacacccctccccgcactgtgaagttcccctgaccgccctcctggttcacaaagagcattaagaaagctgcggtggtctgagcaacatagcccaaagggctgagcctcctggcctgcctgcccgcccaccctgggagtcccagtggtgaggctcagagaactgctaaggggaaagaacagctggagtttctgttgatgtgaagaaggcagctcttggcctcccactcccacacttctttgcctataaatcttcctagcagcaatttgagctacctgaggaggaggcagggcagaaagggcgagggcctgcctctgacctgccgtgtcctttgcaggaaggaggtaggcacctttctgagcttattctattccccacccacacccccaggcagggttggaaatgaaggacttttttaacctttgttttgttttttaaaaataaatctgtaaaatctg

SEQ ID NO: 162 - protein, 464 aa, Homo sapiens
MPLGPVTPALPLQCPTANLHKPGGSQQCHPPTPDTGPQNGHPEGVPHTPQRRFQHTSAVILQLQPASPVPQQCVPDDWKEVAPGEKSVPETRSGPSPHQQAIVTAMPGGLPVPTSPNIQPSPAHETGQGIVHALTDLSSPGMTSGNGNSASSIAGTAPQNGENKPPQAIVKPQILTHVIEGFVIQEGAEPFPVGRSSLLVGNLKKKYAQGFLPEKLPQQDHTTTTDSEMEEPYLQESKEEGAPLKLKCELCGRVDFAYKFKRSKRFCSMACAKRYNVGCTKRVGLFHSDRSKLQKAGAATHNRRRASKASLPPLTKDTKKQPTGTVPLSVTAALQLTHSQEDSSRCSDNSSYEEPLSPISASSSTSRRRQGQRDLELPDMHMRDLVGMGHHFLPSEPTKWNVEDVYEFIRSLPGCQEIAEEFRAQEIDGQALLLLKEDHLMSAMNIKLGPALKIYARISMLKDS

SEQ ID NO: 163 - DNA, 981 bp, Homo sapiens
agacaaggcaaatttaagtaggctcatggcttttccagttgggttggaaagttcctctccgatgactgttatattctcaaagaaatatgaggagaggggcagggcatggtggctcacatccgtaatcctagcaaatcatagtggcctacagccaacgccttcttcgctcactggccaactggaaacttcagtccccccatgcctcccgcctctcacccaggggccaataggaatgatcagaggttcgcaacttagtgtcatcaagcatagtaattgcaattggctattggagctgtcgatcgtggagtaggcggggccgtgccagctggcctatataagacgaggacaaaggcggcgcgccgcctgtgtcatccgccattttgtgagaagcaaggtggcctccacgtttcctgagcgtcttcttcgcttttgcctcgaccgccccttgaccacagacatgtctcgggatcggttccggagtcgtggcggtggcggtggtggcttccacaggcgtggaggaggcggcggccgcggcggcctccacgacttccgttctccgccgcccggcatgggcctcaatcagaatcgcggccaggcccgactccgaccccgccgcctgcagtcacctcggcccctcccggggcgccgccacccaccccgccaagcagcggggtccctaccacacctcctcaggccggaggcccgccgcctccgcccgcggcagtcccgggcccgggtccagggcctaagcagggcccaggtccgggtggtcccaaaggcggcaaaatgcctggcgggccgaagccaggtggcggcccgggcctaagtacgcctggcggccaccccaagccgccgcatcgaggcggcggggagccccgcgggggccgccagcaccacccgccctaccaccagcagcatcaccaggggcccccgcccggcgggcccggcggccgcagcgaggagaagatctcggactcggag

SEQ ID NO: 164 - protein, 94 aa, Homo sapiens
MAFPVGLESSSPMTVIFSKKYEERGRAWWLTSVILANHSGLQPTPSSLTGQLETSVPPCLPPLTQGPIGMIRGSQLSVIKHSNCNWLLELSIVE

SEQ ID NO: 165 - DNA, 1691 bp, Homo sapiens
ggcgagcagtctgcgcgcggatggccgcagcggcgatggcggcagcggcaggtggaggggctggcgcggcccgctccctctcgcgcttccgaggctgcctggctggtgcgctgctcggggactgcgtgggctccttctacgaggcccacgacaccgtcgacctgacgtcagtcctgcgtcatgtccagagtctggagccggaccccggcacgcccgggagtgagcggacagaagccttgtactacacagatgacacagccatggccagggccctggtgcagtccctgctagccaaggaggcctttgacgaggtggacatggctcacagatttgctcaggagtacaagaaagaccctgacaggggctatggtgctggagtagtcactgtcttcaagaagctcctgaaccccaaatgtcgcgatgtctttgagcctgcccgggcccagtttaacgggaaaggctcctatggcaatggaggtgccatgcgggtggctggcatctccctggcctatagcagtgtccaggatgtgcagaagtttgcccggctctcggcccagctgacacacgcctcctccctgggttacaatggcgccatcctgcaggccctggctgtgcacctggccttgcagggcgagtcttccagcgagcactttctcaagcaactcctgggccacatggaggatctggagggtgatgcccagtccgtcttggatgccagggagttgggcatggaggagcgtccatactccagccgcctgaagaagattggagagcttctagaccaggcatcggtgaccagggaggaagtggtgtctgagctagggaatggcattgctgcctttgagtcggtacccaccgccatctactgcttcctacgctgcatggagccagaccctgagatcccttctgccttcaatagcctccaaaggactctcatttattccatctcacttggtggggacacagacaccattgccaccatggctggggccattgctggtgcctactatgggatggatcaggtgccagagagctggcagcaaagctgtgaaggctacgaggagacagacatcctggcccaaagcctgcaccgtgtcttccagaagagttgatgagggctacagctgttggggctctgccaggtcccctgggaccaactacagctccaatcagaaaccctgcgcttccttgagtgtggcttcccacttttcctgcattgtggagctgactgagtacaccggtgaggctggggtctctgcaggggaggtcactggaacagcgagcaagggactggtgcctcgctggtgctgggtctctggtttgctgcagagccgtaggacactcctggctcctcagtaggacagacagacgcaggcgggtttattttggaggggtacttgtggcattttcctgtattgtcttggacatgggatgtggggaggtggaaatgatgagcagtagcatcatttctccctgttgggttttagccagtttgccagcaagcgcatcctagcagggtccccgagcagcaggttgtgtggatgaagggacaggcacttgcatccagctgatctaggtcacacctggctcttggctgccatgtggcttattaacagcttccagtggaagtcgcaataaacagtttttggtaaatctcaaaaaaaaaaaaaaaaaaaaaaaaaaaaaaaaaa

SEQ ID NO: 166 - protein, 363 aa, Homo sapiens
MAAAAMAAAAGGGAGAARSLSRFRGCLAGALLGDCVGSFYEAHDTVDLTSVLRHVQSLEPDPGTPGSERTEALYYTDDTAMARALVQSLLAKEAFDEVDMAHRFAQEYKKDPDRGYGAGVVTVFKKLLNPKCRDVFEPARAQFNGKGSYGNGGAMRVAGISLAYSSVQDVQKFARLSAQLTHASSLGYNGAILQALAVHLALQGESSSEHFLKQLLGHMEDLEGDAQSVLDARELGMEERPYSSRLKKIGELLDQASVTREEVVSELGNGIAAFESVPTAIYCFLRCMEPDPEIPSAFNSLQRTLIYSISLGGDTDTIATMAGAIAGAYYGMDQVPESWQQSCEGYEETDILAQSLHRVFQKS

SEQ ID NO: 167 - DNA, 1217 bp, Homo sapiens
ccgtggctaggcgagtggggcggggcggccggcaccatgtcgaggcaggcgaaccgtggcaccgagagcaagaaaatgagctctgagctcttcaccctgacctatggtgccctggtcacccagctatgtaaggactatgaaaatgatgaagatgtgaataaacagctggacaaaatgggctttaacattggagtccggctgattgaagatttcttggctcggtcaaatgttgggaggtgccatgactttcgggaaactgcggatgtcattgccaaggtggcgttcaagatgtacttgggcatcactccaagcattactaattggagcccagctggtgatgaattctccctcattttggaaaataaccccttggtggactttgtggaacttcctgataaccactcatcccttatttattccaatctcttgtgtggggtgttgcggggagctttggagatggtccagatggctgtggaggccaagtttgtccaggacaccctgaaaggagacggtgtgacagaaatccggatgagattcatcaggcggattgaggacaatcttccagctggagaggaataaccatccctacaactcgaggatagccatcaggagcactgttggaatcagcaggcctctgtgctccctctgccctccagaactcagtgactcttgaacatggatgttatatattcttataacctgtttccattctccattcaaataaagagcagactgcgatatagtccatttaccccatgtgtgcacattcaggagcgacagtctctgcccccattcccttgagaggggctggatgtaatcacctttggttggactagaaagagctcaaaccattttacattcctgtttgaattttccaaagcaaaactcactttgaccccattaagaggcaagcctggcacatctatccctgggcctttagaaagccatttgcctcaaatggctatagggttgtggggtggagggaggaagggctgggagggagtggggaggaattgctagctgtagtgtgacacattgtagtgtttgccaggaaaggagccagtcatgccggaaacactgacttctgggaagccacccaggtctcattcctccctgctgttggaggcaacatctcctctttttacagagggtacatccttttttcttacaaattcttcaataaagacacattcttgagtgaaatccctaaaaaaaaa

SEQ ID NO: 168 - protein, 180 aa, Homo sapiens
MSRQANRGTESKKMSSELFTLTYGALVTQLCKDYENDEDVNKQLDKMGFNIGVRLIEDFLARSNVGRCHDFRETADVIAKVAFKMYLGITPSITNWSPAGDEFSLILENNPLVDFVELPDNHSSLIYSNLLCGVLRGALEMVQMAVEAKFVQDTLKGDGVTEIRMRFIRRIEDNLPAGEE

SEQ ID NO: 169 - DNA, 4914 bp, Homo sapiens
acttactattggaggcagtgggcagcgcaggacaggcccagggccgccgaccctggcaatgactgtcaccagctggagggaagagctgagaatgaagcggagagcatcagacagaggagctggggaaacgtcggccagggccaaggctctaggaagtgggatttctggaaataatgcaaagagagctggaccattcatccttggtccccgtctgggcaactcaccggtgccaagcatagtgcagtgtttggcgaggaaagatggcacggatgacttctatcagctgaagatcctgaccctggaggagaggggggaccaaggcatagagagccaggaagagcggcagggcaagatgctgctgcacaccgagtactcactgctgtctctcctgcacacgcaggatggcgtggtgcaccaccacggcctcttccaggaccgcacctgtgaaatcgttgaggacacagaatccagccggatggttaagaagatgaagaagcgcatctgcctcgtcctggactgcctctgtgctcatgacttcagcgataagaccgctgacctcatcaacctgcagcactacgtcatcaaggagaagaggctcagcgagagggagactgtggtaatcttctacgacgtggtccgcgtggtggaggccctgcaccagaaaaatatcgtgcacagagacctgaagctggggaacatggtgctcaacaagaggacacatcggataaccatcaccaacttctgcctcgggaagcatctggtgagcgagggggacctgctgaaggaccagagagggagccctgcctacatcagtcccgacgtgctcagcggccggccgtaccgtggcaagcccagtgacatgtgggccctgggcgtggtgctcttcaccatgctgtatggccagttccccttctacgacagcatcccgcaggagctcttccgcaagatcaaggctgccgagtataccattcctgaggatggacgggtttctgagaacaccgtgtgtctcatccggaagctgctggtccttgacccccagcagcgcctggccgccgccgacgtcctggaggccctcagtgccatcattgcatcatggcagtccctgtcatctctgagtgggcctttgcaagtggttcctgacattgatgaccaaatgagcaatgcggatagctcccaggaggtgagttggggagggcagatgggccattacccagccccaagggacaggcttctgggggcaggcagggcaagggcagaggtggcagctacccgcaggccacagagtttccttggtcttcttccccagccttggggtgggaaagggagacttcagtcctcagcctgagctgcctggggcctgccttgggcttggtgtagctggagatctttggccagagagacctgtgagacagccgagctggagccagtgcccaagtggcccaggccagccctctcagcttcctcctgctgcccaagtcacatttctctgccccctgactcagagttctctctcacccttcctgcttttcatttttcagatgattcatttctccctatttctttcctccccattccctgcactggagaaagtgttgggcctagggtgggggcagagacttgggcaccaggcagcagagggcaggtgatcttagggtgccccctggagggcagggcttggccgagcaacagcattgctgggccctggatattggaaggaccttccctccctggcccaccttggagctccacagtgagcagtgtgcaggtaggaccaggaggggccgtgcctgggagagcctcccagagcctcctggcccccgaggaaagagagttccaatccctacccacctccagcttccaccctttagctgtttggctaaaatcatcatcactagcccgcagtgagtgcctaccccgagggcacctcattcagccctcactgcgggcctgcgtggcctgtgttcttagccccatgttacagaagaggaaacagggttagagaggactttcccaaagccacacagcttagaagtagtggagctaagccttgaacccaagtctcatccggaagccctgctgtctcctgtggtgactggcacggggacaccacttcagcttctgttaccatctgcctagaccatcccagggagctcagcatggggccctgcgtatgtggctcctccaggtgctgcgcccccagcccagggcttgctcgtacctcttgacgtgcattagccgcctcagggctcagagaacctttgcgaggggccagacagctaaggcttctgaggtaaagtgacctctcacgcagccagtgagttaggaagcatgagtctgcgtcagtcccgggtccgcagggcggcctgcaaggggagttgaggttggctggagggggtcagggacccaccctcagcgccactcccacccccggccttgaggcctgagggtgtggtgcctggaagggtgactgcaggagccaggctgccagcactcttgcctgccctcctgtctgctgcgctgccttcatctgggtttatctttgtctccttcccaccctccccgcctcaaaggcgaaggtgacggaggagtgctcccagtacgagtttgagaactacatgcgtcagcagctgctgctggccgaggagaagagctccatccatgacgcccggagctgggtacccaagcggcagttcggcagcgcaccaccggtgcgacggctgggccacgacgcacagcccatgacctccttggacacggccatcctggcgcagcgctacctgcggaaataacagcctcagccggggccaccagcactgctgccacttcttccagccccagccaaaggcgtggctgtcagggctgggccctgtagtgctggactctcccgggccacaatagggacagggcagggacagggacagcccaggtcacacgtggggtcagcagaggtaccacgaagctaccttttgggatgattgctcgattgtttggtttttaaatctgagaagcctagataactaatctgcttttaatcacgatgttttaatctacctctgtctctttaaccatgctgtctctggactgagcaagagggaggagggagcctgctcaccccactccagggccttccccagcggccaccaactgacctggggcgctgctccccacagtccaaataagctgaaagtgcagctcgctgcaggccccagagcgagcttcccctcctccctgctctcccaggcccctgccacagcctctttccgtccctctctttctgatccaggcccctcagtccaagctttggaaaaccttcacctcatcttaaaccgaactcaaatatatttatttttttaccataccaacttctctcccatctctaggtggctcagtccatggccactccctgcccccagcctggctggacagcaaggaatccacagcccacacgtgagctccctcctcacccccaggcagggaagcccctcctgccagtccctgtcccctttcagcccaccagtccctctctgctgccggtgatgggaggcctttctagacctggctctttctctcccgtctcagtggcttctctgaggtgctgtacacgcgcgttaacctgttcccttctctatccttccccgtggtactgagctcacgtggactcccagtgcgaaggggcccatgggttgggctgcaggcctggccgtgagcgggggctgcctgcacgctcccctagcctactcttgtgtttaggggatggtgggaacatatcccagtgcccttgcctcataatagatgtggtgactctcccggtagaccctagcaagggtcctccatggtggtgagggactcaggagaattgtagggattgggggaccctgcctgcctggcttgagaacagccctgctgcccttttgagccgagattttgaagtggatgcccgtcttgccagaaatgctgttctcaccagaatgccccctccccttgcccttactggacttggccctgcctgatgccaagcaaagacccttccccagaggcctaccccccatatgtcctcagagaggctgagtgtcccctccaggcagtcatgggccctgaggcccctcctgcctggccctgctccccagtggggaggtgactgtgtttcccagagtgtgagccgctctcctccccctaaaaagctgactcactgtgagtgaccttgggcaagttcccaaacctccttgtgcctcagtttccccatctggaaaaaatggggccacctcttgccagcagtagcagggctgcccacgcccctttctccccatgccccatccagcacttgggcgactcatgcctctgcctcagtgggcctgtgggagcctactggagcccagcacttactccccctgagcagcgagcctgcgtctgtctcagctgtccagcgctgagggccagggtcttgtgctgtggggctgggggatgccctcttttctatatttatttcatagaaagtctcctgcgggagcggaaatgcagtccggcctagggctcccagcccttgactgtcctcctgtgagggcctgaagctgggccagggcccgtcgcagcggagccccctctcagcagcccaccgggtccctccaggctgctgcccgtgcgtggtctttctcctccttttcaaagcaatagccgccgggtctgcaaagccctgtcagacagactgggcccttccaaggtcaagccatgtgtctgatgacattcctggtgaagcaaaggagaggaggatgggtcagccctcactgggtgtcacacactgagagaagtcctattgtaaagaaacggaaaaagtcacaaaaaagtttgtataaagacatatttttgtactacatggggactcttcctgcatgtcagcaataaaacttcctgatctgg

SEQ ID NO: 170 - protein, 417 aa, Homo sapiens
MKRRASDRGAGETSARAKALGSGISGNNAKRAGPFILGPRLGNSPVPSIVQCLARKDGTDDFYQLKILTLEERGDQGIESQEERQGKMLLHTEYSLLSLLHTQDGVVHHHGLFQDRTCEIVEDTESSRMVKKMKKRICLVLDCLCAHDFSDKTADLINLQHYVIKEKRLSERETVVIFYDVVRVVEALHQKNIVHRDLKLGNMVLNKRTHRITITNFCLGKHLVSEGDLLKDQRGSPAYISPDVLSGRPYRGKPSDMWALGVVLFTMLYGQFPFYDSIPQELFRKIKAAEYTIPEDGRVSENTVCLIRKLLVLDPQQRLAAADVLEALSAIIASWQSLSSLSGPLQVVPDIDDQMSNADSSQEVSWGGQMGHYPAPRDRLLGAGRARAEVAATRRPQSFLGLLPQPWGGKGRLQSSA

SEQ ID NO: 171 - DNA, 1373 bp, Homo sapiens
attgggacgctgcggcctggccttcaggccactggctaccgaaccccggggctcttcaccagtccagctcgtttccagcaccatgtcggtgcggacgctaccgctgctcttcttgaacttgggcggggagatgctttacatcctcgaccaacggctgcgggcccagaacatcccgggagacaaggcccgcaaagttctgaatgacatcatctccaccatgttcaatagaaagtttatggaggaattattcaagcctcaagagctctactccaagaaggccctgaggactgtctatgagcgcctggctcatgcctccattatgaaactgaaccaggccagcatggataagctctatgacctgatgaccatggctttcaaatatcaagtattgctgtgtccccgacccaaggatgtgctgctggtcactttcaatcacttggataccatcaagggattcatccgagactccccaaccatcctgcagcaagtggacgagactttgcggcagctgacagaaatatatggtggtctctctgcaggggagttccagctgatccggcagacactcctcatcttcttccaagacctgcacatccgagtatccatgtttctaaaggacaaagttcagaataataacggtcgctttgtgttgccggtgtccgggcctgttccttggggaactgaagttccaggactcatcagaatgttcaacaacaaaggtgaagaagtgaagaggatagaattcaagcatggtggaaactatgtccctgcacccaaagaaggttcttttgaactttatggagaccgagtcctgaaactgggaactaacatgtacagcgtgaatcagcctgtggaaactcatgtgtctggatcatcaaagaacttagcctcatggacccaggaaagcattgctccaaaccctcttgctaaagaagagctgaatttcttggccaggctgatgggagggatggagattaagaaacccagtggccctgagcccagattccggttgaatctctttaccaccgatgaagaagaggaacaagcagcgctaaccaggccagaagagttatcctatgaagttatcaacatacaagccacccagtctcttttcagcaatctggccaccattcaggggggcctgactgggtgacagatgaatgggaaggttctgacctgttttgagtccggctcccaccttgctgtcacatatcagaatgtcactgctctgagtgtgtcccagggccttggaggtgggccgtgaggtgccgagaagcagccgcagcctcctccctccacctatcccagagcgatgctggtgatttcaaacgtatctgtcctatcagtaaataaacaagatgcagatctctggt

SEQ ID NO: 172 - protein, 356 aa, Homo sapiens
MSVRTLPLLFLNLGGEMLYILDQRLRAQNIPGDKARKVLNDIISTMFNRKFMEELFKPQELYSKKALRTVYERLAHASIMKLNQASMDKLYDLMTMAFKYQVLLCPRPKDVLLVTFNHLDTIKGFIRDSPTILQQVDETLRQLTEIYGGLSAGEFQLIRQTLLIFFQDLHIRVSMFLKDKVQNNNGRFVLPVSGPVPWGTEVPGLIRMFNNKGEEVKRIEFKHGGNYVPAPKEGSFELYGDRVLKLGTNMYSVNQPVETHVSGSSKNLASWTQESIAPNPLAKEELNFLARLMGGMEIKKPSGPEPGFRLNLFTTDEEEEQAALTRPEELSYEVINIQATQSLFSNLATIQGGLTG

SEQ ID NO: 173 - DNA, 2943 bp, Homo sapiens
gaagctggactgcagctggtttcaggaacttctcttgacgagaagagagaccaaggaggccaagcaggggctgggccagaggtgccaacatggggaaactgaggctcggctcggaaaggtgaagtaacttgtccaagatcacaaagctggtgaacatcaagttggtgctatggcaaggctgggaaactgcagcctgacttgggctgccctgatcatcctgctgctccccggaagtctggaggagtgcgggcacatcagtgtctcagcccccatcgtccacctgggggatcccatcacagcctcctgcatcatcaagcagaactgcagccatctggacccggagccacagattctgtggagactgggagcagagcttcagcccgggggcaggcagcagcgtctgtctgatgggacccaggaatctatcatcaccctgccccacctcaaccacactcaggcctttctctcctgctgcctgaactggggcaacagcctgcagatcctggaccaggttgagctgcgcgcaggctaccctccagccataccccacaacctctcctgcctcatgaacctcacaaccagcagcctcatctgccagtgggagccaggacctgagacccacctacccaccagcttcactctgaagagtttcaagagccggggcaactgtcagacccaaggggactccatcctggactgcgtgcccaaggacgggcagagccactgctgcatcccacgcaaacacctgctgttgtaccagaatatgggcatctgggtgcaggcagagaatgcgctggggaccagcatgtccccacaactgtgtcttgatcccatggatgttgtgaaactggagccccccatgctgcggaccatggaccccagccctgaagcggcccctccccaggcaggctgcctacagctgtgctgggagccatggcagccaggcctgcacataaatcagaagtgtgagctgcgccacaagccgcagcgtggagaagccagctgggcactggtgggccccctccccttggaggcccttcagtatgagctctgcgggctcctcccagccacggcctacaccctgcagatacgctgcatccgctggcccctgcctggccactggagcgactggagccccagcctggagctgagaactaccgaacgggcccccactgtcagactggacacatggtggcggcagaggcagctggaccccaggacagtgcagctgttctggaagccagtgcccctggaggaagacagcggacggatccaaggttatgtggtttcttggagaccctcaggccaggctggggccatcctgcccctctgcaacaccacagagctcagctgcaccttccacctgccttcagaagcccaggaggtggcccttgtggcctataactcagccgggacctctcgccccaccccggtggtcttctcagaaagcagaggcccagctctgaccagactccatgccatggcccgagaccctcacagcctctgggtaggctgggagccccccaatccatggcctcagggctatgtgattgagtggggcctgggcccccccagcgcgagcaatagcaacaagacctggaggatggaacagaatgggagagccacggggtttctgctgaaggagaacatcaggccctttcagctctatgagatcatcgtgactcccttgtaccaggacaccatgggaccctcccagcatgtctatgcctactctcaagaaatggctccctcccatgccccagagctgcatctaaagcacattggcaagacctgggcacagctggagtgggtgcctgagccccctgagctggggaagagcccccttacccactacaccatcttctggaccaacgctcagaaccagtccttctccgccatcctgaatgcctcctcccgtggctttgtcctccatggcctggagcccgccagtctgtatcacatccacctcatggctgccagccaggctggggccaccaacagtacagtcctcaccctgatgaccttgaccccagaggggtcggagctacacatcatcctgggcctgttcggcctcctgctgttgctcacctgcctctgtggaactgcctggctctgttgcagccccaacaggaagaatcccctctggccaagtgtcccagacccagctcacagcagcctgggctcctgggtgcccacaatcatggaggaggatgccttccagctgcccggccttggcacgccacccatcaccaagctcacagtgctggaggaggatgaaaagaagccggtgccctgggagtcccataacagctcagagacctgtggcctccccactctggtccagacctatgtgctccagggggacccaagagcagtttccacccagccccaatcccagtctggcaccagcgatcaggtcctttatgggcagctgctgggcagccccacaagcccagggccagggcactatctccgctgtgactccactcagcccctcttggcgggcctcacccccagccccaagtcctatgagaacctctggttccaggccagccccttggggaccctggtaaccccagccccaagccaggaggacgactgtgtctttgggccactgctcaacttccccctcctgcaggggatccgggtccatgggatggaggcgctggggagcttctagggcttcctggggttcccttcttgggcctgcctcttaaaggcctgagctagctggagaagaggggagggtccataagcccatgactaaaaactaccccagcccaggctctcaccatctccagtcaccagcatctccctctcctcccaatctccataggctgggcctcccaggcgatctgcatactttaaggaccagatcatgctccatccagccccacccaatggccttttgtgcttgtttcctataacttcagtattgtaaac

SEQ ID NO: 174 - protein, 836 aa, Homo sapiens
MARLGNCSLTWAALIILLLPGSLEECGHISVSAPIVHLGDPITASCIIKQNCSHLDPEPQILWRLGAELQPGGRQQRLSDGTQESIITLPHLNHTQAFLSCCLNWGNSLQILDQVELRAGYPPAIPHNLSCLMNLTTSSLICQWEPGPETHLPTSFTLKSFKSRGNCQTQGDSILDCVPKDGQSHCCIPRKHLLLYQNMGIWVQAENALGTSMSPQLCLDPMDVVKLEPPMLRTMDPSPEAAPPQAGCLQLCWEPWQPGLHINQKCELRHKPQRGEASWALVGPLPLEALQYELCGLLPATAYTLQIRCIRWPLPGHWSDWSPSLELRTTERAPTVRLDTWWRQRQLDPRTVQLFWKPVPLEEDSGRIQGYVVSWRPSGQAGAILPLCNTTELSCTFHLPSEAQEVALVAYNSAGTSRPTPVVFSESRGPALTRLHAMARDPHSLWVGWEPPNPWPQGYVIEWGLGPPSASNSNKTWRMEQNGRATGFLLKENIRPFQLYEIIVTPLYQDTMGPSQHVYAYSQEMAPSHAPELHLKHIGKTWAQLEWVPEPPELGKSPLTHYTIFWTNAQNQSFSAILNASSRGFVLHGLEPASLYHIHLMAASQAGATNSTVLTLMTLTPEGSELHIILGLFGLLLLLTCLCGTAWLCCSPNRKNPLWPSVPDPAHSSLGSWVPTIMEEDAFQLPGLGTPPITKLTVLEEDEKKPVPWESHNSSETCGLPTLVQTYVLQGDPRAVSTQPQSQSGTSDQVLYGQLLGSPTSPGPGHYLRCDSTQPLLAGLTPSPKSYENLWFQASPLGTLVTPAPSQEDDCVFGPLLNFPLLQGIRVHGMEALGSF

SEQ ID NO: 175 - DNA, 2701 bp, Homo sapiens
gggtcgcgcggagattgctgggcggttcttgccggaagcggagagcggctgatcgcagtccggaggtgaggcggaactctgaggcagatatcctccctttcctcctcggctgctgctcttactttgacaagccaggctaacattgaaggtggtccattatggctgacatgcaaaatctggtagaaagattggagagggcagtgggccgcctggaggcagtatctcatacctctgacatgcaccgtgggtatgcagacagtccttcaaaagcaggagcagctccatatgtgcaggcatttgactcgctgcttgctggtcctgtggcagagtacttgaagatcagtaaagagattgggggagacgtgcagaaacatgcggagatggtccacacaggtttgaagttggagcgagctctgttggttacagcttctcagtgtcaacagccagcagaaaataagctttccgatttgttggcacccatctcagagcagatcaaagaagtgataacctttcgggagaagaaccgaggcagcaagttgtttaatcacctgtcagctgtcagcgaaagtatccaggccctgggctgggtggctatggctcccaagcctggcccttatgtgaaagaaatgaatgatgccgccatgttttatacaaaccgagtcctcaaagagtacaaagatgtggataagaagcatgtagactgggtcaaagcttatttaagtatatggacagagctgcaggcttacattaaggagttccataccaccggactggcctggagcaaaacggggcctgtggcaaaagaactgagcggactgccatctggaccctctgccggatcatgtcctcctccccctccaccatgcccccctcctcccccagtctctaccatttcatgctcatatgagtctgcttcccgctcatcactgttcgcgcagattaatcagggggagagcattacacatgccctgaaacatgtatctgatgacatgaagactcacaagaaccctgccctgaaggctcagagtggtccagtacgcagtggccccaaaccattctctgcacctaaaccccaaaccagcccatcccccaaacgagccacaaagaaggagccagctgtacttgaactggagggcaagaagtggagagtggaaaatcaggaaaatgtttccaacctggtgattgaggacacagagctgaaacaggtggcttacatatacaagtgtgtcaacacgacattgcaaatcaagggcaaaattaactccattacagtagataactgtaagaaacttggcctggtattcgatgacgtggtgggcattgtggagataatcaacagtaaggatgtcaaagttcaggtaatgggtaaagtgccaaccatatccatcaacaaaacagatggctgccatgcttacctgagcaagaattccctggattgtgaaatagtcagtgccaaatcttccgagatgaatgtcctcattcctacagaaggcggtgactttaatgaattcccagttcctgagcagttcaagaccctatggaacgggcagaagttggtcaccacagtgacagaaattgctggataagcgaagtgccactgggttctttgccctcccttcacaccatgggataaatctgtatcaagacggttcttttctagatttcctctacctttttgctcttaaaactgcttctctgctctgagaagcacagctacctgccttcactgaaatatacctcaggctgaaatttggggtgggatagcaggtcagttgatcttctgcaggaaggtgcagcttttccatatcagctcaaccacgccgccagtccattcttaaggaactgccgactaggactgatgatgcattttagctttgagcttttgggggttattctaccaacaaacagtccattggaaagaaaacagtccctggaattaacagatcagaatgttcacactggttaatctttttttaacaatgagcatgaaggtagcagaagctggtgtgtttccagatggttcttctaaccaaactaatttttcactgttgacaagcgaggcaagggttgcactggaccaaaggctgaggcttggccatctagcattccatacaaaattgtttcctataagcattccttttattctctattctatcctgggtctgcctcaaccgtgagataggagagtctctggtactagctgctgtagcagtgcccttcatccagggcagttaatggagtcttggaccctttctttctctgggatccctgcccagcaccttcctatagagatgactttaaaaggaaaaaaaaaaaaaaaaaaacccacatgatttcaaggagtctggcattcctgaatccttcttccctgccaggtgcctgtcacctgtcttcactgcctccttttccctgtcatgctcatcagcttatggcttctgtctaagcacctgaacagaggactgaaacctccactgcaggctggttttaggtcttgaattatgtaagaatcttgcacagcactgctaatgtaaatttcagttgtttttccctctaggacaaacacttaccaaaatatgcaacttttttttggtgggaagagagattgtcctgtgatttctacccatttcctgaggcctgtggaaataaacctttatgtacttaaagttatacagaaaatagaataaagttaataccaaacttg

SEQ ID NO: 176 - DNA, 2292 bp, Homo sapiens
ccggagtctcgcgcccgcggtcatgtgacacagcgaagatggcgtcgcccggctgcctgtggctcttggctgtggctctcctgccatggacctgcgcttctcgggcgctgcagcatctggacccgccggcgccgctgccgttggtgatctggcatgggatgggagacagctgttgcaatcccttaagcatgggtgctattaaaaaaatggtggagaagaaaatacctggaatttacgtcttatctttagagattgggaagaccctgatggaggacgtggagaacagcttcttcttgaatgtcaattcccaagtaacaacagtgtgtcaggcacttgctaaggatcctaaattgcagcaaggctacaatgctatgggattctcccagggaggccaatttctgagggcagtggctcagagatgcccttcacctcccatgatcaatctgatctcggttgggggacaacatcaaggtgtttttggactccctcgatgcccaggagagagctctcacatctgtgacttcatccgaaaaacactgaatgctggggcgtactccaaagttgttcaggaacgcctcgtgcaagccgaatactggcatgaccccataaaggaggatgtgtatcgcaaccacagcatcttcttggcagatataaatcaggagcggggtatcaatgagtcctacaagaaaaacctgatggccctgaagaagtttgtgatggtgaaattcctcaatgattccattgtggaccctgtagattcggagtggtttggattttacagaagtggccaagccaaggaaaccattcccttacaggagacctccctgtacacacaggaccgcctggggctaaaggaaatggacaatgcaggacagctagtgtttctggctacagaaggggaccatcttcagttgtctgaagaatggttttatgcccacatcataccattccttggatgaaacccgtatagttcacaatagagctcagggagcccctaactcttccaaaccacatgggagacagtttccttcatgcccaagcctgagctcagatccagcttgcaactaatccttctatcatctaacatgccctacttggaaagatctaagatctgaatcttatcctttgccatcttctgttaccatatggtgttgaatgcaagtttaattaccatggagattgttttacaaacttttgatgtggtcaagttcagttttagaaaagggagtctgttccagatcagtgccagaactgtgcccaggcccaaaggagacaactaactaaagtagtgagatagattctaagggcaaacatttttccaagtcttgccatatttcaagcaaagaggtgcccaggcctgaggtactcacataaatgctttgttttgctggtgatttaaccagtgcttggaaaaatcttgcttggctatttctgcatcatttcttaaggctgccttcctctctcagtacgttgccctctgtgctatcatcttatcatcaattattagacaaatcccactggcctacagtcttgcttctgcagcacccactttgtctcctcaggtagtgatgaattagttgctgtcacaaaaggagggaagtagcacccaaattaagttgcttaagagaggaaatgtacatcttgtataacttagggagcgaagaaaatgtaggcgcgaaagtgaaaagtgaggcagctagttcttcctattccattctcgaccaacctgccctttcttaatatgactagtggtcttgatgctagagtcaacttactctgttgctggctttagcagagaataggaggaaccatatgaaaaagatcaggctttctgacttccatccccaaaacacatttaccagcatactccaaactgtttctgatgtgttccatgagaaaaggattgtttgctcaaaaagcttggaaaatactacacactccctttctccttctggagatcaacccacattagagtgtctaaggactcctgagaattcctgttacagtaaacaaaactaacgtaatctaccatttcctacactatttgagcatggaaatcatagtccccactctgtgaaaacttaacgctttttggaagacatttctgtagcatgtcagtttggagaaatgatgagctacgccttgatgaaagaaccgtgttggtgctgctaagtttagccattatggtttttcctttctctctcttaagccttattcttcaactaaaagatgaggattaagagcaagaagttgggggggatgtgaaaataattttatgaggttgtctaaaat

SEQ ID NO: 177 - protein, 306 aa, Homo sapiens
MASPGCLWLLAVALLPWTCASRALQHLDPPAPLPLVIWHGMGDSCCNPLSMGAIKKMVEKKIPGIYVLSLEIGKTLMEDVENSFFLNVNSQVTTVCQALAKDPKLQQGYNAMGFSQGGQFLRAVAQRCPSPPMINLISVGGQHQGVFGLPRCPGESSHICDFIRKTLNAGAYSKVVQERLVQAEYWHDPIKEDVYRNHSIFLADINQERGINESYKKNLMALKKFVMVKFLNDSIVDPVDSEWFGFYRSGQAKETIPLQETSLYTQDRLGLKEMDNAGQLVFLATEGDHLQLSEEWFYAHIIPFLG

SEQ ID NO: 178 - DNA, 474 bp, Homo sapiens
ccttacggccagaaacgccaccttccagtaattcgccaaaatgacaaacacaaagggaaagaggagaggcacccgatacatgttctctaggccttttagaaaacatggagttgttcctttggccatgtatatgcgaatctataagaaaggtgatattgtagacatcaagggaatgggtactgttcaaaaaggaatgtcccacaagtgttaccatggcaaaactggaagagtctacaatgttccccagcatgctgttggcattgttgtaaacaaacaagttaagggcaagattcttgccaagagaattaatgtgtgtattgagcacattaagcactctaaaagccgagatagcttcctgaaacgtgtgaaggaaaatgatcctccacccagagaagcacagtgtgtgagaaccaatgggaaggagcctgagctgctggaaactattccctatgaattcatggcataataggtgtt

SEQ ID NO: 179 - protein, 141 aa, Homo sapiens
MTNTKGKRRGTRYMFSRPFRKHGVVPLAMYMRIYKKGDIVDIKGMGTVQKGMSHKCYHGKTGRVYNVPQHAVGIVVNKQVKGKILAKRINVCIEHIKHSKSRDSFLKRVKENDPPPREAQCVRTNGKEPELLETIPYEFMA

SEQ ID NO: 180 - DNA, 7239 bp, Homo sapiens
cggacgcgtgggctgctgcggagccggcagcgcaggcgggcggagcggagctgcccccgtggtggcgggcgatgcccccgtgagcctccctcgccgcccctccccgccccgcgtgcctatccactcggagtccgcgccagcctggggccgggccgcgcctactgccgggttcgcggggcggggtcccggggcagcacctgccccgccttgcggagccgcctcggcctgtggaggccccctccctgtctggaccccggccccacctccggacccttttatcacatcgcctcctctgggagcctgccctgattgccttcacctcatttcttgaaaattggtgttttggcagaagtcaattgaagccttgtgcaaatgccctaggggtgtgctgttgggaggcagccccctgtgatgcggaacaccaggctcagattcatcagttcgagctgcctgaggccctgccaccccggggaccatgtttaacggggagccaggtcctgcctcatctggggcctccaggaatgtggtgcggagctccagcattggcggtgaaatctgcggatcccagcaagccgggggcggggctgggaccaccaccgccaagaagcggcggagcagcctgggtgccaagatggtggccatcgtgggcctgactcagtggagcaagagcacactccagcttccgcagcctgaaggggccaccaagaagctgcgcagcaacatccgccggagcacggagacaggcatcgcggtggagatgcggagccgggtcacacgccagggcagccgggagtccaccgatgggagcaccaacagcaacagctccgacggcacgttcatcttccccactacccggctaggggctgaaagccagttcagcgatttcctggatgggctgggaccagctcagattgtggggcgacagacactggcaacaccacccatgggagatgtgcacattgccatcatggaccggagtggccagctggaggtggaagtgattgaagctcggggcctgacccccaaaccaggctccaaatccctcccagccacctatatcaaggtttacctgctggagaatggggcctgcttggccaagaagaagacaaagatgaccaagaagacctgtgatcccctgtaccagcaggctctgctctttgacgagggaccccagggcaaggtgctgcaggtgatcgtctggggagactatggccgcatggaccacaagtgcttcatgggcatggcccagatcatgctggacgagctggacctcagcgccgcggtcaccggctggtacaaactcttccccacctcctcagtggcagactccacactcggatccctcaccaggcgcctgtcccagtcttccctggagagtgccaccagcccctcatgctcttaaggatgtcaggaagaggccaggatggtggtgtggggaggggtgcctgctggccccatgtcctcccctgtacatagtcttcgtgtctttctggaccccttgtcctgctgcatgcctgttggctactgggctcatcccagctggcagtggagactgtagtgtgtgcgtgtgtgcgtgcgtgtgtgtgtgtgtgtacgtgaccacgttctatctgttcatttgtctgggtatagtcactcctggtgatgatatgggctgaaatgtctccacgtctctttgtgtcttgttgaaaagaaacccaaaggagtgttgtgtggacatgactcaccctgaggagtctccagggatggaggtggggcatgcggccactggtcggtgctgcctggtcctggcctggggcagagcctgtgtgttcttcacctgtgcctgctcctggtggtctctgctttgttttctgtcttgtcttttgttccactcttgactctcccggctctgccactgttttctgagaaatgtagcatccgctgcagctggccacactgagggccctctgggaaccccaccccactggagccgctccggcagctcttcctgccactgaatgcgttctgcagcatgtagcatgcccacctagctccctggccagggccctggggaggcagagggtacccaggggactgagggcttagaaatgactttctctatgaggctggaacctcctccttcttccagtgaagcacgaggtcttggttccagggttcctggccaggtgcccccttagcatttgttcttcatctcctgtctcttcaagcctccccactccaccgtgccgaaggagctctgccagtgggcctgggcaggcagccacagagggcatgttatctgctaaagcaaacagtcctcctgaggccctgagggtggccctgaccccctcagggctcattcctggtgggcatgactcggtaaggaggttctgtgggtagggctgtttgctggaataaggagggctgaggctgagttgttccccgccactgttgaggatcccatctgacatttggggattcactgcatgaagttgttcatttggggctccagtttttgtgcatttccagaccagggtccctgtctgggagctcagacttagctgggctccagcagcctggctccggactctcgtctgccaccatcaccagctctgtctaagcaatacttacccctccgggcttccctgctttcctgtgccccactgctgccctctgcagagccatctgctccaggcacccacctgcctctgcttgctttctcacccatgtctggttggagcttctcacagccactcaaaccctgacttgatttgacaactgggccctgttggtggagaccagtgcctgaactggaccctgtgaaatctgtcccgtgggaatcctgaagtctgactcaggaatgcccagacctgtccctgtccctcctcagctctagggtgaaaggcgagaggttgcacaggacatggacagagcagcccttgggtttgtatctggtaggggagaaagcagcaggacagtggaggtgtgtggaaggcactctttccacctctctccaggcattatccccaggtgctgaaatggctgtggccccagcacctgaggcaggggtacgctacctggggtagcagtagaaaggtcttggggtctgaatgacttggggcctccattcataaccaaagttgtaggggcatggaggcagtggcgccttatggataggtcatctcagcccaaagggcctccttggctggcatggttctgtgttacgttgaagccagagtcttataacacctcccaagaaagataggggaagaagccagaaccccacctggcctgcccacaggacaagaagtgggtaagggcaggaaggaaatgaacggagttagctcccaggctcctatctctgcctgagcctctattcttatattatcagagaaagggaccattgggtgcatagagatggggaggaggccactgggctgaattttctctttaggcggaaatgctctccccaggcccattgcgttcgtcaagttcttggaaatggacaaagggctctgtcctcctcgaccctagtgggggatcaagaaggaaactccgttgcaaaagggtattttaatctcctgtttatgatatattcacctctagagcagtcactgtcagggtgttgcgaaaatactctacacctttgggatgatagggttgttagtgacccacaggacagtatagatgtttgtggatgtagcactgagtggtgatacccagaccagcagtcaccccaggaagtgggggctacccataccctcattcctctggtggggagctgcctgcagagaggcctgccactgggggttccaggccgtggtgacccttgcctctggggaagggttagcacaggggaggttctagctggaggaggggtctgatgtgctggtaacttgggctgacctacctacagtccctggctgccaaaactgctcagcagttgggccactccactattccacctctctaaaagaaggtaatttcctccccaaattgaccttggggaattattcttttaaccctttgcaccaaataagttactcatccccacctggattttaccccatgagggtaaagttgtgtgaggctgacacgtctgtgtgatgcagtgtggctgcacttaagggtctgtttctcagcatcatggatgcaggggcttgtctgaaaagccactctggacctagcctgtcccagaagaggagaatgcacaagtgtaactcctggttgtttgctggggtgggggagcatctgctgtttgaggacggggggtggggaaggaaggaacatgatccctccagaagtctcccaccctggggccaactcactgccatgttcagtgtcccggctccaaatgcccccttgcccagatgaaaccctgcagtggttacaggaatggagctctttgtcattccacctcctctggtcaggcgaggttcactgtgcatatggcagagacaggagtggccctgcagtgatgttgggttgtgggcagggacagtgatggatgactcagagcgtctgtctttgtatttctgctctgttcattctgtcccactttcttcatagactccttttccctgcaatgggtttttggtatgaaaaaggctccagtaaatggagccaagtcttggtttgacaaggggaacttgatccttcagggaagaatcatctccaaaatgactccccatctggtttcttctaccacccaattctactaggaaaggagcacttaggaggctcttgggatgcagcaagtcccaggcaatgccagcatttcatgggggctgaggcagaacccaggagctccaagaaaggccacccatagagctcatcctctgtggaatcactgccggttagaacactgaggtcaagccagtcctcccatggtcatgccacccaccagggaagcatgcctgatctcttctttactgccagccttgaggagagcagaagcctccatttttaaagacaataaagacctccaagggtacttctttggaaatgaaatgtagcacaatcttagcctacgttaccaggagccctgacatgcaaccagggtccctcttccatgccctgctgcccaggagttgctgagctcctcttcccctggggttccagccctcctaatacctcatattccccatcttcctcagcccagaaagcaatggggctttagtgatgctcctcttttgtgtctctctggttgcctctagcactgtgcaaactctgcaagaaattgctgcctttgcttgatgttgtagatgagttgccctccacctggctggagagatggcacatcattcagggccagaaggttgtccagcagtgtttctgcagtggctgcagggagatggaaaagaagagccctgcttccctgcctcctcctacctttctcttccactcctcagagttttcttctccagtatcctgacatgtaaagagattctttaaaatgctgcttcttctactggactgtctttcactgagtagtcagggaggagatgaaaatgtggacacatccccccgccttctccctcaaccttttcactcacgtcagaagaggttggggcaaaacaaaacaagcatgattgaagagcaggggaagcccacacaatcaggtgagccctgatgggggctggactggcctggtctggctgggaaaggattcttttaaaagcgtgcctgagcatctcagagcaatgtcagtgatgccaaagagagcaacttggcctccttgggcaccaactctgatggctgagttgcacaaacgtggctcagatgttggcatgcccgatggtgggaccttgttctctgataaagggcttaatctttccatgtagcaaagcaactttccctccctcccctccccccgaaccctgagcttgggcttgtgtgggcccagcatggctgtgcctgtgagggaagccacatcagtgagagaaagttgcattctctcaggggcctagattggcttggggcaggtgcttgttgaaaagcatgagtgtttctgctttgggaaacccttccagggctctggttggaaacttggccagtaaggacagggccttgggcctcccaaggagttcacaatgatgccaggaagggtccctgagcctgggttccagtcagcttggctaacagaatggggcttgggaattccaggggcaactgagcatccaccccattagccagtgatctggacagggacagctggctacagggaatcaaaggctgttctgtacagttttaccagaaactgtgaccttgggtaaggctcctcacttttctgggcctcaacttcctcatctgcaaaatcagagcattagctgctctccccatgattccctcccagttttaattaaaagtctctgatctggagcacatgagggttgcgagcctggtgcacctggttcctgtctccgtgggctggtttccttcagcccctgatgcccaggctgggtgcaggctctcatctggtccatgcccagatgctgcctcagacaagaactctgggaatcctaacagactctgctttcctctcttcgtggtttgtcctccctcttttattcttgtgtaatgatgagacataattaagggtcatctacaatggacaattttcaaggtgctgatgtgatgtcacaacctccgctacatcctgagtaagtcagtgtccccaacagcagatgaggctgggtctttcctcatttctgcttctgggatgacatcagtgggagagttgaagatctgagaattctaaaggaaatgttctctgatgggaggagagagggaacttatttcccttcaaagtagtttgcttcttaagaccactcctccctccagaatgtctttaaccagacatcatttcagaaggtggggcagctgcttccttaggaagagtgggcctgatagctcaaccaactcctttagcatgtaaactcacagaaggcaagaacccctttttttagactttccaaatgcatcctgcaaagagagagatagctgatagggactgacaagcacactgtttagataagaagcaattacccttttatatctgtgctctatacattttctatgtgcagcatctttcctaacttgttgtggttcccgggtggcaggtgcacagctgggagggactgccggctgtttcgtacaacattcttgccaattcccttgaggagaaaattcttcacatggcttctgcatgtacagtatttgggcagcaaaacatgattaaagtcagtttgaaaatgg

SEQ ID NO: 181 - protein, 308 aa, Homo sapiens
MFNGEPGPASSGASRNVVRSSSIGGEICGSQQAGGGAGTTTAKKRRSSLGAKMVAIVGLTQWSKSTLQLPQPEGATKKLRSNIRRSTETGIAVEMRSRVTRQGSRESTDGSTNSNSSDGTFIFPTTRLGAESQFSDFLDGLGPAQIVGRQTLATPPMGDVHIAIMDRSGQLEVEVIEARGLTPKPGSKSLPATYIKVYLLENGACLAKKKTKMTKKTCDPLYQQALLFDEGPQGKVLQVIVWGDYGRMDHKCFMGMAQIMLDELDLSAAVTGWYKLFPTSSVADSTLGSLTRRLSQSSLESATSPSCS

SEQ ID NO: 182 - DNA, 3274 bp, Homo sapiens
aagctgctgacatcctggatctagggttgtaaagaagattacatgagctaatggatgtgaaaacatcttaaaaactctcaaatacttttcaactttggaggattattatgattttcattctgttcagcggctatactcagactttactctaaaagtcaaatcttctgacattctttgaagtgaagcattctatgaatgtgagctgaagaaatgaatgaaatgaaataatgcagcatctagtgctttttgcatggcccaaaggggctctgtgctgctccactacagaggaaacttcaagaaatgctggtttgctacagtgttttagcttgtgagattctctgggaccttccctgctccatcatggggtcacctctaggtcattttacctgggacaaatacctaaaagaaacatgttcagtcccagcgcctgtccattgcttcaagcagtcctacacacctccaagcaacgagttcaagatcagtatgaaattggaagcacaggaccccaggaacaccacatccacctgtattgccacagtagttggactgacaggtgcccgccttcgcctgcgccttgatgggagcgacaacaaaaatgacttctggcggctggttgactcagctgaaatccagcctattgggaactgtgaaaagaatgggggtatgctacagccacctcttggatttcggctgaatgcgtcttcttggcccatgttccttttgaagacgctaaatggagcagagatggctcccatcaggattttccacaaggagccaccatcgccttcccacaacttcttcaaaatgggaatgaagctagaagctgtggacaggaagaaccctcatttcatttgcccagccactattggggaggttcggggctcagaggtgcttgtcacttttgatgggtggcgaggggcctttgactactggtgccgcttcgactcccgagacatcttccctgtgggctggtgttccttgactggagacaacctgcagcctcctggcaccaaagttgtgattccaaagaatccctatcctgcctccgatgtgaatactgagaagcccagcatccacagcagcaccaaaactgtcttggaacatcaaccagggcagagggggcgtaaaccaggaaagaagcggggccggacacccaagaccctaatttcccatcccatctctgccccatccaagacagctgaacctttgaaattcccaaagaagagaggtcccaaacctggcagcaagaggaaacctcggactttgctgaacccaccacctgcctcaccaacaaccagcactcctgaaccggataccagcactgtaccccaggatgctgccaccatccccagctcagccatgcaggccccaacagtttgtatctacttgaacaagaatggcagcacaggcccccacttagataagaagaaggtccagcaactccctgaccattttggaccagcccgtgcctctgtggtgttgcagcaggctgtccaggcctgtatcgactgtgcttatcaccagaaaaccgtcttcagcttcctcaagcaaggccatggtggtgaggttatctcagccgtgtttgaccgggaacagcataccctcaacctcccagcagtcaacagcatcacctacgtcctccgcttcctggagaaactctgccacaaccttcgtagtgacaatctgtttggcaaccagccctttacacagactcacttgtcactcactgccatagagtacagccacagccacgacaggtacctaccaggtgaaacctttgtcctggggaatagtctggcccgctccttggaaccacactcagactcaatggactctgcctcaaatcccaccaaccttgtcagcacctcccaaaggcaccggcccttgctttcatcctgtggcctcccaccaagcactgcctcagctgtgcgcaggctatgctccaggggagtgttaaaaggatcaaatgaaagaagggatatggaatcattttggaaactaaatcgttccccagggtcggaccgatacctggagagccgcgatgcctctcgactgagtggccgggacccctcctcatggacagtcgaggatgtgatgcagtttgtccgggaagctgatcctcagcttggaccccacgctgacctgtttcgcaaacacgagatcgatggcaaggccctgctgctgctgcgcagtgacatgatgatgaagtacatgggcctgaagctggggcctgcactcaagctctcctaccacattgaccggctgaagcagggcaagttctgaaccaggagaggcagcctagacaaccaagtggcagcaggtgggggcattcttctaggaatgaggggcatcagcccaccccaggcacctcagtggggttccgggccacctcaggactccaagaggctgtgtggagccaccactcctagccacagctgccatgataagtccttccatgaaggactgaggagggagagtgggggtccagggctggtgctgctcttccctcagctctgccggggctctaaggtccctctatttatttctcaaccctggctggcctctcaccaggagtttaggctgaatgccttccacgtgatggaggaaaaggccaactctgtcctggtcttgctgtggcaccccatcgccccacagctcgtaccttctcaccagattcccctgaatccaaactcgtggtgcaaacctctaccttttttacaaaaagatcttattgttaatttattgtttctggcacttgggcaaaccctgtagttaatactcctcccacactagacactgggtttcaggaggagggagactgccctgctttggtcccagagaggccctctgcagataggcgtggcccctcttcagaggacactaccctagggcactttctctttgaggtggagagacccataaagccttgaccacatcactccatatggggaggagaaggatccctgtcaccttctcctctcttcacggggcccttttgcagccctaggcctcatctgtgggaagggagtccctggcttatactgcccccaccacagctccttgccctggccagaactgctgtcgaagaaaatcaggccggaaggccaagaaggcgctaagggggatgggagggcaggttttccaggctggagtcggttccacccactcgcctgtccacaggcttccttgtaagcaagtcagcagcacagctactcacgctgccatctggacttattttatgtcaatctgtttataaataaaaaccaatatagat

SEQ ID NO: 183 - DNA, 1430 bp, Homo sapiens
gctgcagatggcggaaatggatccggtagccgagttcccccagcctcccggtgctgcgcgctgggctgaggttatggctcgcttcgcggccaggctgggcgcgcagggccggcgggtggtgttggttacgtcaggcggcaccaaggtcccactggaagcgcggccggtgcgcttcctggacaacttcagcagcgggcggcgcggtgcaacctcggccgaggccttcctagccgccggctacggggtcctgttcttgtatcgcgctcgctctgccttcccctatgcccaccgcttcccaccccagacttggctgtccgctctgcggccttcgggcccagccctttcgggcttgctgagcctggaggccgaggagaatgcacttccgggttttgctgaggctctgaggagctaccaggaggctgcggctgcaggcaccttcctggcagtagagttcaccactttggcggactatttgcatctgttgcaggctgcggcccaggcactcaatccgctaggcccttctgcgatgttttacctggctgcggctgtgtcagatttctatgttcctgtctctgaaatgcctgaacacaagatccagtcatctgggggcccactgcagataacaatgaagatggtgccaaaactgctttctcctttggttaaagattgggctcccaaagcatttataatttcctttaagttggagactgaccccgccattgtaattaatcgagctcggaaggctttggaaatttatcagcatcaagtggtggtggctaatatccttgagtcacgacagtcctttgtgtttattgtaaccaaagactcggaaaccaagttattgctatcaaggaagaaatagaaaaaggcgtagagatagaagagaagatagtggataatcttcagtctcgacacacagcttttataggtgacagaaactgaagtaaaaagcccttataggattaaaaattgttcagggctcttagagatggtgaaaactacaaaaaaaaccatggctttcatatggacagagaaaatgaaagaaagggaaaaggcagtggtgtgtaggcaaatatggtttggcattcgtcttttaatgacacctgatatgatgtcattttgattttgaaattgaacactagaactgttaatcacctttaaaaagaagagcttattgggaattatatattccttaaaatatacatgggggcctgaatgtcagccatctttatactatagaaaaaggattatggatgcatgaatggtcatgctttggagatcaaatattggttgaatgcctatgtatgtcaggccctgtgctgagccatgaggattaaaaagatgaataaacatatcttgtttaggaaatggatgtataaaaaaatcaagtgcaataaagtgtgtgtccaaaagctgacacaatggaaagg

SEQ ID NO: 184 - protein, 284 aa, Homo sapiens
MAEMDPVAEFPQPPGAARWAEVMARFAARLGAQGRRVVLVTSGGTKVPLEARPVRFLDNFSSGRRGATSAEAFLAAGYGVLFLYRARSAFPYAHRFPPQTWLSALRPSGPALSGLLSLEAEENALPGFAEALRSYQEAAAAGTFLAVEFTTLADYLHLLQAAAQALNPLGPSAMFYLAAAVSDFYVPVSEMPEHKIQSSGGPLQITMKMVPKLLSPLVKDWAPKAFIISFKLETDPAIVINRARKALEIYQHQVVVANILESRQSFVFIVTKDSETKLLLSRKK

SEQ ID NO: 185 - DNA, 1363 bp, Homo sapiens
cgggagcggagagcggaccccagagagccctgagcagccccaccgccgccgccggcctagttaccatcacaccccgggaggagccgcagctgccgcagccggccccagtcaccatcaccgcaaccatgagcagcgaggccgagacccagcagccgcccgccgccccccccgccgcccccgccctcagcgccgccgacaccaagcccggcactacgggcagcggcgcagggagcggtggcccgggcggcctcacatcggcggcgcctgccggcggggacaagaaggtcatcgcaacgaaggttttgggaacagtaaaatggttcaatgtaaggaacggatatggtttcatcaacaggaatgacaccaaggaagatgtatttgtacaccagactgccataaagaagaataaccccaggaagtaccttcgcagtgtaggagatggagagactgtggagtttgatgttgttgaaggagaaaagggtgcggaggcagcaaatgttacaggtcctggtggtgttccagttcaaggcagtaaatatgcagcagaccgtaaccattatagacgctatccacgtcgtaggggtcctccacgcaattaccagcaaaattaccagaatagtgagagtggggaaaagaacgagggatcggagagtgctcccgaaggccaggcccaacaacgccggccctaccgcaggcgaaggttcccaccttactacatgcggagaccctatgggcgtcgaccacagtattccaaccctcctgtgcagggagaagtgatggagggtgctgacaaccagggtgcaggagaacaaggtagaccagtgaggcagaatatgtatcggggatatagaccacgattccgcaggggccctcctcgccaaagacagcctagagaggacggcaatgaagaagataaagaaaatcaaggagatgagacccaaggtcagcagccacctcaacgtcggtaccgccgcaacttcaattaccgacgcagacgcccagaaaaccctaaaccacaagatggcaaagagacaaaagcagccgatccaccagctgagaattcgtccgctcccgaggctgagcagggcggggctgagtaaatgccggcttaccatctctaccatcatccggtttagtcatccaacaagaagaaatatgaaattccagcaataagaaatgaacaaaagattggagctgaagacctaaagtgcttgctttttgcccgttgaccagataaatagaactatctgcattatctatgcagcatggggtttttattatttttacctaaagacgtctctttttggtaataacaaacgtgttttttaaaaaagcctggtttttctcaatacgcctttaaagg

SEQ ID NO: 186 - protein, 324 aa, Homo sapiens
MSSEAETQQPPAAPPAAPALSAADTKPGTTGSGAGSGGPGGLTSAAPAGGDKKVIATKVLGTVKWFNVRNGYGFINRNDTKEDVFVHQTAIKKNNPRKYLRSVGDGETVEFDVVEGEKGAEAANVTGPGGVPVQGSKYAADRNHYRRYPRRRGPPRNYQQNYQNSESGEKNEGSESAPEGQAQQRRPYRRRRFPPYYMRRPYGRRPQYSNPPVQGEVMEGADNQGAGEQGRPVRQNMYRGYRPRFRRGPPRQRQPREDGNEEDKENQGDETQGQQPPQRRYRRNFNYRRRRPENPKPQDGKETKAADPPAENSSAPEAEQGGAE

SEQ ID NO: 187 - DNA, 2990 bp, Homo sapiens
ggcgggtggctggcggttccgttaggtctgagggagcgatggcggtacgcgcgttgaagctgctgaccacactgctggctgtcgtggccgctgcctcccaagccgaggtcgagtccgaggcaggatggggcatggtgacgcctgatctgctcttcgccgaggggaccgcagcctacgcgcgcggggactggcccggggtggtcctgagcatggaacgggcgctgcgctcccgggcagccctccgcgcccttcgcctgcgctgccgcacccagtgtgccgccgacttcccgtgggagctggaccccgactggtcccccagcccggcccaggcctcgggcgccgccgccctgcgcgacctgagcttcttcgggggccttctgcgtcgcgctgcctgcctgcgccgctgcctcgggccgccggccgcccactcgctcagcgaagagatggagctggagttccgcaagcggagcccctacaactacctgcaggtcgcctacttcaagatcaacaagttggagaaagctgttgctgcagcacacaccttcttcgtgggcaatcctgagcacatggaaatgcagcagaacctagactattaccaaaccatgtctggagtgaaggaggccgacttcaaggatcttgagactcaaccccatatgcaagaatttcgactgggagtgcgactctactcagaggaacagccacaggaagctgtgccccacctagaggcggcgctgcaagaatactttgtggcctatgaggagtgccgtgccctctgcgaagggccctatgactacgatggctacaactaccttgagtacaacgctgacctcttccaggccatcacagatcattacatccaggtcctcaactgtaagcagaactgtgtcacggagcttgcttcccacccaagtcgagagaagccctttgaagacttcctcccatcgcattataattatctgcagtttgcctactataacattgggaattatacacaggctgttgaatgtgccaagacctatcttctcttcttccccaatgacgaggtgatgaaccaaaatttggcctattatgcagctatgcttggagaagaacacaccagatccatcggcccccgtgagagtgccaaggagtaccgacagcgaagcctactggaaaaagaactgcttttcttcgcttatgatgtttttggaattccctttgtggatccggattcatggactccagaagaagtgattcccaagagattgcaagagaaacagaagtcagaacgggaaacagccgtacgcatctcccaggagattgggaaccttatgaaggaaatcgagacccttgtggaagagaagaccaaggagtcactggatgtgagcagactgacccgggaaggtggccccctgctgtatgaaggcatcagtctcaccatgaactccaaactcctgaatggttcccagcgggtggtgatggacggcgtaatctctgaccacgagtgtcaggagctgcagagactgaccaatgtggcagcaacctcaggagatggctaccggggtcagacctccccacatactcccaatgaaaagttctatggtgtcactgtcttcaaagccctcaagctggggcaagaaggcaaagttcctctgcagagtgcccacctgtactacaacgtgacggagaaggtgcggcgcatcatggagtcctacttccgcctggatacgcccctctacttttcctactctcatctggtgtgccgcactgccatcgaagaggtccaggcagagaggaaggatgatagtcatccagtccacgtggacaactgcatcctgaatgccgagaccctcgtgtgtgtcaaagagcccccagcctacaccttccgcgactacagcgccatcctttacctaaatggggacttcgatggcggaaacttttatttcactgaactggatgccaagaccgtgacggcagaggtgcagcctcagtgtggaagagccgtgggattctcttcaggcactgaaaacccacatggagtgaaggctgtcaccagggggcagcgctgtgccatcgccctgtggttcaccctggaccctcgacacagcgagcgggtgagagcagctcgagcgggtgagagcagctggtgctgtggtgacccgttcccagagcgcccttggtttgcctttctcttccccaaatcccattgccagtggctgagacacgaaaggagcacttgggacaccagctccaacgccctgtcattatggtcacattgccttgtcctccctgggcctgctgtgaacgggatccaggtggggaaagaggtcaagacagggagcgatgctgagttcttggttccctccttgggccccacttcagctgtccttttccagagagtaggacctgctgggaaggagatgagcctggggccattaaggaaccttccttgtcccctgggaagtagcagctgagagatagcgagtgtctggagcggaggcctctctgaatgggcaggggtttgtccttgcaggacagggtgcaggcagatgacctggtgaagatgctcttcagcccagaagagatggacctctcccaggagcagcccctggatgcccagcagggtccccccgaacctgcacaagagtctctctcaggcagtgaatcgaagcccaaggatgagctatgacagcgtccaggtcagacggatgggtgactagacccatggagaggaactcttctgcactctgagctggccagcccctcggggctgcagagcagtgagcctacatctgccactcagccgaggggaccctgctcacagccttctacatggtgctactgctcttggagtggacatgaccagacaccgcaccccctggatctggctgagggctcaggacacaggcccagccacccccaggggcctccacaggccgctgcatgacagcgatacagtacttaagtgtctgtgtagacaaccaaagaataaatgattcatggtttttttt

SEQ ID NO: 188 - DNA, 2856 bp, Homo sapiens
tagtcgcgggtccccgagtgagcacgccagggagcaggagaccaaacgacgggggtcggagtcagagtcgcagtgggagtccccggaccggagcacgagcctgagcgggagagcgccgctcgcacgcccgtcgccacccgcgtacccggcgcagccagagccaccagcgcagcgctgccatggagcccagcagcaagaagctgacgggtcgcctcatgctggctgtgggaggagcagtgcttggctccctgcagtttggctacaacactggagtcatcaatgccccccagaaggtgatcgaggagttctacaaccagacatgggtccaccgctatggggagagcatcctgcccaccacgctcaccacgctctggtccctctcagtggccatcttttctgttgggggcatgattggctccttctctgtgggccttttcgttaaccgctttggccggcggaattcaatgctgatgatgaacctgctggccttcgtgtccgccgtgctcatgggcttctcgaaactgggcaagtcctttgagatgctgatcctgggccgcttcatcatcggtgtgtactgcggcctgaccacaggcttcgtgcccatgtatgtgggtgaagtgtcacccacagcctttcgtggggccctgggcaccctgcaccagctgggcatcgtcgtcggcatcctcatcgcccaggtgttcggcctggactccatcatgggcaacaaggacctgtggcccctgctgctgagcatcatcttcatcccggccctgctgcagtgcatcgtgctgcccttctgccccgagagtccccgcttcctgctcatcaaccgcaacgaggagaaccgggccaagagtgtgctaaagaagctgcgcgggacagctgacgtgacccatgacctgcaggagatgaaggaagagagtcggcagatgatgcgggagaagaaggtcaccatcctggagctgttccgctcccccgcctaccgccagcccatcctcatcgctgtggtgctgcagctgtcccagcagctgtctggcatcaacgctgtcttctattactccacgagcatcttcgagaaggcgggggtgcagcagcctgtgtatgccaccattggctccggtatcgtcaacacggccttcactgtcgtgtcgctgtttgtggtggagcgagcaggccggcggaccctgcacctcataggcctcgctggcatggcgggttgtgccatactcatgaccatcgcgctagcactgctggagcagctaccctggatgtcctatctgagcatcgtggccatctttggctttgtggccttctttgaagtgggtcctggccccatcccatggttcatcgtggctgaactcttcagccagggtccacgtccagctgccattgccgttgcaggcttctccaactggacctcaaatttcattgtgggcatgtgcttccagtatgtggagcaactgtgtggtccctacgtcttcatcatcttcactgtgctcctggttctgttcttcatcttcacctacttcaaagttcctgagactaaaggccggaccttcgatgagatcgcttccggcttccggcaggggggagccagccaaagtgataagacacccgaggagctgttccatcccctgggggctgattcccaagtgtgagtcgccccagatcaccagcccggcctgctcccagcagccctaaggatctctcaggagcacaggcagctggatgagacttccaaacctgacagatgtcagccgagccgggcctggggctcctttctccagccagcaatgatgtccagaagaatattcaggacttaacggctccaggattttaacaaaagcaagactgttgctcaaatctattcagacaagcaacaggttttataatttttttattactgattttgttatttttatatcagcctgagtctcctgtgcccacatcccaggcttcaccctgaatggttccatgcctgagggtggagactaagccctgtcgagacacttgccttcttcacccagctaatctgtagggctggacctatgtcctaaggacacactaatcgaactatgaactacaaagcttctatcccaggaggtggctatggccacccgttctgctggcctggatctccccactctaggggtcaggctccattaggatttgccccttcccatctcttcctacccaaccactcaaattaatctttctttacctgagaccagttgggagcactggagtgcagggaggagaggggaagggccagtctgggctgccgggttctagtctcctttgcactgagggccacactattaccatgagaagagggcctgtgggagcctgcaaactcactgctcaagaagacatggagactcctgccctgttgtgtatagatgcaagatatttatatatatttttggttgtcaatattaaatacagacactaagttatagtatatctggacaagccaacttgtaaatacaccacctcactcctgttacttacctaaacagatataaatggctggtttttagaaacatggttttgaaatgcttgtggattgagggtaggaggtttggatgggagtgagacagaagtaagtggggttgcaaccactgcaacggcttagacttcgactcaggatccagtcccttacacgtacctctcatcagtgtcctcttgctcaaaaatctgtttgatccctgttacccagagaatatatacattctttatcttgacattcaaggcatttctatcacatatttgatagttggtgttcaaaaaaacactagttttgtgccagccgtgatgctcaggcttgaaatcgcattattttgaatgtgaagggaa

SEQ ID NO: 189 - protein, 492 aa, Homo sapiens
MEPSSKKLTGRLMLAVGGAVLGSLQFGYNTGVINAPQKVIEEFYNQTWVHRYGESILPTTLTTLWSLSVAIFSVGGMIGSFSVGLFVNRFGRRNSMLMMNLLAFVSAVLMGFSKLGKSFEMLILGRFIIGVYCGLTTGFVPMYVGEVSPTAFRGALGTLHQLGIVVGILIAQVFGLDSIMGNKDLWPLLLSIIFIPALLQCIVLPFCPESPRFLLINRNEENRAKSVLKKLRGTADVTHDLQEMKEESRQMMREKKVTILELFRSPAYRQPILIAVVLQLSQQLSGINAVFYYSTSIFEKAGVQQPVYATIGSGIVNTAFTVVSLFVVERAGRRTLHLIGLAGMAGCAILMTIALALLEQLPWMSYLSIVAIFGFVAFFEVGPGPIPWFIVAELFSQGPRPAAIAVAGFSNWTSNFIVGMCFQYVEQLCGPYVFIIFTVLLVLFFIFTYFKVPETKGRTFDEIASGFRQGGASQSDKTPEELFHPLGADSQV

SEQ ID NO: 190 - DNA, 3256 bp, Homo sapiens
cacgtcgttcacggccttcttcggcccctctagcacgacattgaggcctggcttcagaagccctcgggaaaacgcatcctgcaactctctgtctgtgacaagggattcatcggattccgactccgaatccgagagcgggggagtgtccatctcgccgcacgcacgtcccacacagctactgctcaacttttgattgggacttccgcttccggcggcaaaccatacttccggtttgtcgttgctataggaaccgctacggcgtttgaaagtgtccgggttgcttaggatccctacaggtagcgcctctggatacatgcgtggtctgctgacccagagagaaacgaaagcagaactgtttggcgggagatcatgtcagccgtggtagctcagacgctgcatgtttttggtcttcgatcccacgtggccaacaatatcttctacttcgatgaacagatcattatatttccttcaggaaatcactgtgtgaagtacaatgtggatcagaaatggcaaaaattcattccaggctcagagaagagtcagggcatgttggccttgtccatcagtcccaatcggcggtacctcgctatctctgagactgtgcaagaaaaacctgccatcaccatttatgaattgtcatccatcccttgccggaagcgcaaagttcttaataattttgacttccaagttcagaaatttattagcatggctttttctccagactccaaatacctattggctcagacgtcacctccagagtcaaatcttgtctactggctgtgggaaaaacagaaagtaatggccattgttagaatcgacactcagaacaaccctgtctaccaggtgagcttcagtccacaggataacactcaggtgtgtgtcactggaaatgggatgtttaagcttctccgttttgctgagggaaccctgaagcaaaccagctttcagaggggagaaccccaaaactatctagcccacacctgggtggctgatgacaagattgtcgttggcactgacacaggcaaactcttcctctttgaatctggagatcagcgttgggagaccagcataatggtcaaggaacctaccgatggctcaaagagcctggatgtcattcaggaatcagagagcctgattgaatttccaccagtcagttctccactcccttcctatgaacagatggtggcggccagtagccatagccagatgtccatgccccaggtgtttgccattgcagcctattcaaagggatttgcctgttctgctgggccagggagagttctgctgtttgagaagatggaagaaaaggatttttaccgtgagagcagagaaatcaggattcctgtggacccgcagagcaatgatccaagtcagtctgacaaacaggacgttctctgcctgtgcttcagcccctcagaggaaactctggttgccagcaccagtaagaaccaactctacagcatcaccatgtccctgacagagatcagcaagggagcctgctcactttgagtatttgatgtatccattgcactcagcacccatcaccggtctagctacctgcatccgcaaaccccttatagccacctgttctctggatcgatccatccgcctttggaattatgaaacaaacaccctggaactatttaaggaataccaagaagaggcatattccatcagccttcatccatctggacacttcattgtagtagggtttgctgacaaactacgcctcatgaatctactcattgatgatatacgttctttcaaagaatactctgttagaggatgcggagagtgttcctttagcaatggaggtcacctgtttgctgcagtcaatggaaatgtgattcacgtttacaccaccacgagcctagagaacatctcaagcctgaaaggacacacagggaagattcgctcaattgtgtggaatgcagatgatagcaaactgatttctggtggcacagatggtgctgtgtatgaatggaatctgtccacaggaaagagagagacagaatgcgtgctcaagtcttgcagctacaactgtgttactgtctcccccgatgccaaaattatctttgctgttggatcagaccacaccctcaaggagattgcagattccttgccttcgagagatatcggcgtttgatgtcacctacaccgccattgtcatctcgcattctggacgcatgatgtttgtgggcacctcggtgggaaccattcgtgccatgaagtaccctctgcctctgcagaaggaattcaatgagtaccaggcccatgccggtcctatcaccaaggtgagcagggccctctccccaggaacccagtcccacacctgcctgctacgtgccttgttcatcccttcaacctcccaatgtcttttctctctccttcttctctcttatttattcatccatcattcattgaatcaccatctattgactatgaatatactctttgtttaaactacttccaggaatttagcctaggaaatcatcagagatacacctaaaaatgtatgtacaacgttttcaccataatattatgcataataaggggccgtttggtggatgccgtagctgccgtgagtgtgggctgcacttgaccacagctgcctcctcctccagagaatgccccagactgaaaggagccatagccctgaagattggcccctacctctccctgagggtacaaaaggccaccccaggggcaataccatgagtacacatttgtaaattgtccttccattcacccttctcataaagtagtatctatgttcaacagtcaaaatgtggaagcaaccaagcatccatcgacagacgaatgcataagcaaaagatggtatatctatacaatggaacaataccctgcctaaaaaggaagggaattctgcaatgtgctaccacatggatgaaccttgaggatgttatgctaaattaaataaggccaaccacaaaaagataagtacagtgtgattccacttttaggagatacttggagcagtcagaatcacaaagacagagtggtggttggcaggggctgcaggaagggggaatgaggaatgattgtttcataggtatagagttttggttttacaagacaaaaggattatgggggtagttggtggcaatggctgcacaacattacaaatgtatttaataacatgaactgtacacttgaaaatggttaagatagcaaattttacagaatatgtattttacgacaattttaaaaatgaaataaaaaagaattatcttgc

SEQ ID NO: 191 - protein, 522 aa, Homo sapiens
MSAVVAQTLHVFGLRSHVANNIFYFDEQIIIFPSGNHCVKYNVDQKWQKFIPGSEKSQGMLALSISPNRRYLAISETVQEKPAITIYELSSIPCRKRKVLNNFDFQVQKFISMAFSPDSKYLLAQTSPPESNLVYWLWEKQKVMAIVRIDTQNNPVYQVSFSPQDNTQVCVTGNGMFKLLRFAEGTLKQTSFQRGEPQNYLAHTWVADDKIVVGTDTGKLFLFESGDQRWETSIMVKEPTNGSKSLDVIQESESLIEFPPVSSPLPSYEQMVAASSHSQMSMPQVFAIAAYSKGFACSAGPGRVLLFEKMEEKDFYRESREIRIPVDPQSNDPSQSDKQDVLCLCFSPSEETLVASTSKNQLYSITMSLTEISKGEPAHFEYLMYPLHSAPITGLATCIRKPLIATCSLDRSIRLWNYETNTLELFKEYQEEAYSISLHPSGHFIVVGFADKLRLMNLLIDDIRSFKEYSVRGCGECSFSNGGHLFAAVNGNVIHVYTTTSLENISSLKGHTGKSLNCVECR

SEQ ID NO: 192 - DNA, 1325 bp, Homo sapiens
gcgattcggtggcacgtggagccacggcgtgggagtagggggctgaaggcaggcagcagcggccagggccgccctctgctagccgcttgggtctcgggataccccgtttcttcctgtaggtgtgggacgtgcgtgcggcgagatggacactcccccgctctcggattcggagtcggaatccgatgaatcccttgtcacagacagagagttgcaggatgcgttttcccgagggcttctgaagccaggcctcaatgtcgtgctagaggggccgaagaaggccgtgaacgacgtgaatggcctgaagcaatgtttggcagaattcaagcgggatctggaatgggttgaaaggctcgatgtgacactgggtccggtaccggagatcggtggatctgaggcgccagcacctcagaacaaggaccagaaagctgttgatccagaagacgacttccagcgagagatgagtttctatcgccaagcccaggccgcagtgcttgcagtcttaccccgcctccatcagctcaaagtccctacgaagcgacccactgattattttgcggaaatggccaaatctgatctgcaggtgcagaagattcgacagaagctgcagactaaacaggctgccatggagaggtctgaaaaagctaagcaactgcgagcacttaggaaatacgggaagaaggtgcaaacggaggttcttcagaagaggcagcaggagaaagcccatatgatgaatgctattaagaaatatcagaaaggcttctctgataaactggatttccttgagggagatcagaaacctctggcacagcgcaagaaggcaggagccaaaggccagcagatgaggaaggggcccagtgctaaacgacggtataaaaaccagaagtttggttttggtggaaagaagaaaggctcaaagtggaacactcgggagagctatgatgatgtatctagcttccgggccaagacagctcatggcagaggcctcaagaggcctggcaagaaagggtcaaataagagacctggaaaacgaacaagagagaagatgaagaacagaacacactaaatagcatctttgaatacaaagaaccaagaaaaaggaatgaagactcgcaatttcacgacacactttgatcccttctgttggtgtcatgttgtaaacatttctttcaataaactaaagaaaaattattaaaggaacacatacctttggttaaatagtctagactaaaagattgagaagttactttccattgctatctattgataatttagacattgagttcaaattgccttcattttatgataaataatgatttaactgaaaa

SEQ ID NO: 193 - protein, 306 aa, Homo sapiens
MDTPPLSDSESESDESLVTDRELQDAFSRGLLKPGLNVVLEGPKKAVNDVNGLKQCLAEFKRDLEWVERLDVTLGPVPEIGGSEAPAPQNKDQKAVDPEDDFQREMSFYRQAQAAVLAVLPRLHQLKVPTKRPTDYFAEMAKSDLQVQKIRQKLQTKQAAMERSEKAKQLRALRKYGKKVQTEVLQKRQQEKAHMMNAIKKYQKGFSDKLDFLEGDQKPLAQRKKAGAKGQQMRKGPSAKRRYKNQKFGFGGKKKGSKWNTRESYDDVSSFRAKTAHGRGLKRPGKKGSNKRPGKRTREKMKNRTH

SEQ ID NO: 194 - DNA, 1686 bp, Homo sapiens
ccacgcgtccgggcgtaagccaggcgtgttaaagccggtcggaactgctccggagggcacgggctccgtaggcaccaactgcaaggacccctccccctgcgggcgctcccatggcacagttcgcgttcgagagtgacctgcactcgctgcttcagctggatgcacccatccccaatgcaccccctgcgcgctggcagcgcaaagccaaggaagccgcaggcccggccccctcacccatgcgggccgccaaccgatcccacagcgccggcaggactccgggccgaactcctggcaaatccagttccaaggttcagaccactcctagcaaacctggcggtgaccgctatatcccccatcgcagtgctgcccagatggaggtggccagcttcctcctgagcaaggagaaccagtctgaaaacagccagacgcccaccaagaaggaacatcagaaagcctgggctttgaacctgaacggttttgatgtagaggaagccaagatccttcggctcagtggaaaaccacaaaatgcgccagagggttatcagaacagactgaaagtactctacagccaaaaggccactcctggctccagccggaagacctgccgttacattccttccctgccagaccgtatcctggatgcgcctgaaatccgaaatgactattacctgaaccttgtggattggagttctgggaatgtactggccgtggcactggacaacagtgtgtacctgtggagtgcaagctctggtgacatcctgcagcttttgcaaatggagcagcctggggaatatatatcctctgtggcctggatcaaagagggcaactacttggctgtgggcaccagcagtgctgaggtgcagctatgggatgtgcagcagcagaaacggcttcgaaatatgaccagtcactctgcccgagtgggctccctaagctggaacagctatatcctgtccagtggttcacgttctggccacatccaccaccatgatgttcgggtagcagaacaccatgtggccacactgagtggccacagccaggaagtgtgtgggctgcgctgggccccagatggacgacatttggccagtggtggtaatgataacttggtcaatgtgtggcctagtgctcctggagagggtggctgggttcctctgcagacattcacccagcatcaaggggctgtcaaggccgtagcatggtgtccctggcagtccaatgtcctggcaacaggagggggcaccagtgatcgacacattcgcatctggaatgtgtgctctggggcctgtctgagtgccgtggatgcccattcccaggtgtgctccatcctctggtctccccattacaaggagctcatctcaggccatggctttgcacagaaccagctagttatttggaagtacccaaccatggccaaggtggctgaactcaaaggtcacacatcccgggtcctgagtctgaccatgagcccagatggggccacagtggcatccgcagcagcagatgagaccctgaggctatggcgctgttttgagttggaccctgcgcggcggcgggagcgggagaaggccagtgcagccaaaagcagcctcatccaccaaggcatccgctgaagaccaacccatcacctcagttgttttttatttttctaataaagtcatgtctcccttcatgtttttttttttaaaa

SEQ ID NO: 195 - protein, 499 aa, Homo sapiens
MAQFAFESDLHSLLQLDAPIPNAPPARWQRKAKEAAGPAPSPMRAANRSHSAGRTPGRTPGKSSSKVQTTPSKPGGDRYIPHRSAAQMEVASFLLSKENQSENSQTPTKKEHQKAWALNLNGFDVEEAKILRLSGKPQNAPEGYQNRLKVLYSQKATPGSSRKTCRYIPSLPDRILDAPEIRNDYYLNLVDWSSGNVLAVALDNSVYLWSASSGDILQLLQMEQPGEYISSVAWIKEGNYLAVGTSSAEVQLWDVQQQKRLRNMTSHSARVGSLSWNSYILSSGSRSGHIHHHDVRVAEHHVATLSGHSQEVCGLRWAPDGRHLASGGNDNLVNVWPSAPGEGGWVPLQTFTQHQGAVKAVAWCPWQSNVLATGGGTSDRHIRIWNVCSGACLSAVDAHSQVCSILWSPHYKELISGHGFAQNQLVIWKYPTMAKVAELKGHTSRVLSLTMSPDGATVASAAADETLRLWRCFELDPARRREREKASAAKSSLIHQGIR

SEQ ID NO: 196 - DNA, 1950 bp, Homo sapiens
ggcacgagggaaccgtccgcagccgccggagccgggagccctgcccaagtcggagcggcgtcccctgctgagccccgagcgccgggccagcagccggatgcccgggcccactgggcgggccagtggccgcctgcgggatgagcagactgctgggggggacgctggagcgcgtctgcaaggctgtgctccttctctgcctgctgcacttcctcgtggccgtcatcctctactttgacgtctacgcccagcacctggccttcttcagccgcttcagtgcccgaggccctgcccatgccctccacccagctgctagcagcagcagcagcagcagcaactgctcccggcccaacgccaccgcctctagctccgggctccctgaggtccccagtgccctgcccggtcccacggctcccacgctgccaccctgtcctgactcgccacctggtcttgcgggtgcacagggagaacccaggcgtgctcatgggcggccgatacacaccgcccgactgcaccccagcccagacggtggcggtcatcatcccctttagacaccgggaacaccacctgcgctactggctccactatctacaccccatcttgaggcggcagcggctgcgctacggcgtctatgtcatcaaccagcatggtgaggacaccttcaaccgggccaagctgcttaacgtgggcttcctagaggcgctgaaggaggatgccgcctatgactgcttcatcttcagcgatgtggacctggtccccatggatgaccgcaacctataccgctgcggcgaccaaccccgccactttgccattgccatggacaagtttggcttccggcttccctatgctggctactttggaggtgtgtcaggcctgagtaaggctcagtttctgagaatcaatggcttccccaatgagtactggggctggggtggcgaggatgatgacatcttcaaccggatctccctgactgggatgaagatctcacgcccagacatccgaattggccgctaccgcatgatcaagcacgaccgcgacaagcataacgaacctaaccctcagaggtttaccaagattcaaaacacgaagctgaccatgaagcgggacggcattgggtcagtgcggtaccaggtcttggaggtgtctcggcaaccactcttcaccaatatcacagtggacattgggcggcctccgtcgtggccccctcggggctgacactaatggacagaggctctcggtgccgaagattgcctgccagaggactgaccacagcctggctggcagctgctctgtggaggacctccaggactgagactgggctctgttttccaagggtcttcactaggccccctagctacacctggaagtttcagaacccactttggggggcctcctgcctgggcaggctcttcaagtgtggccctctttggagtcaaccctccttcccgaccccctccccctagcccagccccagtcactgtcagggtcgggccagcccctgcactgcctcgcagagtggcctgggctaggtcactccacctctctgtgcctcagtttcccccccttgagtcccctagggcctggaagggtgggaggtatgtctagggggcagtgtctcttccagggggaattctcagctcttgggaacccccttgctcccaggggaggggaaacctttttcattcaacattgtagggggcaagctttggtgcgccccctgctgaggagcagccccaggaggggaccagaggggatgctgtgtcgctgcctgggatcttggggttggcctttgcatgggaggcaggtggggcttggatcagtaagtctggttcccgcctccctgtctgagagaggaggcaggagccccagggccggcttgtgtttgtacattgcacagaaacttgtgtgggtgctttagtaaaaaacgtgaatggaaaaaaaaaaaaaaaaaaa

SEQ ID NO: 197 - protein, 136 aa, Homo sapiens
MSRLLGGTLERVCKAVLLLCLLHFLVAVILYFDVYAQHLAFFSRFSARGPAHALHPAASSSSSSSNCSRPNATASSSGLPEVPSALPGPTAPTLPPCPDSPPGLAGAQGEPRRAHGRPIHTARLHPSPDGGGHHPL

SEQ ID NO: 198 - DNA, 479 bp, Homo sapiens
cccagtgccctgcccggtcccacggctcccacgctgccaccctgtcctgactcgccacctggtcttgtgggcagactgctgatcgagttcacctcacccatgcccctggagcgggtgcagagggcctggaagggtgggaggtatgtctagggggcagtgtctcttccagggggaattctcagctcttgggaacccccttgctcccaggggaggggaaacctttttcattcaacattgtagggggcaagctttggtgcgccccctgctgaggagcagccccaggaggggaccagaggggatgctgtgtcgctgcctgggatcttggggttggcctttgcatgggaggcaggtggggcttggatcagtaagtctggttcccgcctccctgtctgagagaggaggcaggagccccagggccggcttgtgtttgtacattgcacagaaacttgtgtgggtgctttagtaaaaaacgtgaatgg

SEQ ID NO: 199 - DNA, 1890 bp, Homo sapiens
gccagcagccggatgcccgggcccactgggcgggccagtggccgcctgcgggatgagcagactgctgggggggacgctggagcgcgtctgcaaggctgtgctccttctctgcctgctgcacttcctcgtggccgtcatcctctactttgacgtctacgcccagcacctggccttcttcagccgcttcagtgcccgaggccctgcccatgccctccacccagctgctagcagcagcagcagcagcagcaactgctcccggcccaacgccaccgcctctagctccgggctccctgaggtccccagtgccctgcccggtcccacggctcccacgctgccaccctgtcctgactcgccacctggtcttgtgggcagactgctgatcgagttcacctcacccatgcccctggagcgggtgcagagggagaacccaggcgtgctcatgggcggccgatacacaccgcccgactgcaccccagcccagacggtggcggtcatcatcccctttagacaccgggaacaccacctgcgctactggctccactatctacaccccatcttgaggcggcagcggctgcgctacggcgtctatgtcatcaaccagcatggtgaggacaccttcaaccgggccaagctgcttaacgtgggcttcctagaggcgctgaaggaggatgccgcctatgactgcttcatcttcagcgatgtggacctggtccccatggatgaccgcaacctataccgctgcggcgaccaaccccgccactttgccattgccatggacaagtttggcttccggcttccctatgctggctactttggaggtgtgtcaggcctgagtaaggctcagtttctgagaatcaatggcttccccaatgagtactggggctggggtggcgaggatgatgacatcttcaaccggatctccctgactgggatgaagatctcacgcccagacatccgaatcggccgctaccgcatgatcaagcacgaccgcgacaagcataacgaacctaaccctcagaggtttaccaagattcaaaacacgaagctgaccatgaagcgggacggcattgggtcagtgcggtaccaggtcttggaggtgtctcggcaaccactcttcaccaatatcacagtggacattgggcggcctccgtcgtggccccctcggggctgacactaatggacagaggctctcggtgccgaagattgcctgccagaggactgaccacagcctggctggcagctgctctgtggaggacctccaggactgagactgggctctgttttccaagggtcttcactaggccccctagctacacctggaagtttcagaacccactttggggggcctcctgcctgggcaggctcttcaagtgtggccctctttggagtcaaccctccttcccgaccccctccccctagcccagccccagtcactgtcagggtcgggccagcccctgcactgcctcgcagagtggcctgggctaggtcactccacctctctgtgcctcagtttcccccccttgagtcccctagggcctggaagggtgggaggtatgtctagggggcagtgtctcttccagggggaattctcagctcttgggaacccccttgctcccaggggaggggaaacctttttcattcaacattgtagggggcaagctttggtgcgccccctgctgaggagcagccccaggaggggaccagaggggatgctgtgtcgctgcctgggatcttggggttggcctttgcatgggaggcaggtggggcttggatcagtaagtctggttcccgcctccctgtctgagagaggaggcaggagccccagggccggcttgtgtttgtacattgcacagaaacttgtgtgggtgctttagtaaaaaacgtgaatgg

SEQ ID NO: 200 - protein, 372 aa, Homo sapiens
MSRLLGGTLERVCKAVLLLCLLHFLVAVILYFDVYAQHLAFFSRFSARGPAHALHPAASSSSSSSNCSRPNATASSSGLPEVPSALPGPTAPTLPPCPDSPPGLVGRLLIEFTSPMPLERVQRENPGVLMGGRYTPPDCTPAQTVAVIIPFRHREHHLRYWLHYLHPILRRQRLRYGVYVINQHGEDTFNRAKLLNVGFLEALKEDAAYDCFIFSDVDLVPMDDRNLYRCGDQPRHFAIAMDKFGFRLPYAGYFGGVSGLSKAQFLRINGFPNEYWGWGGEDDDIFNRISLTGMKISRPDIRIGRYRMIKHDRDKHNEPNPQRFTKIQNTKLTMKRDGIGSVRYQVLEVSRQPLFTNITVDIGRPPSWPPRG

SEQ ID NO: 201 - DNA, 2476 bp, Homo sapiens
gcggagaaacagtagttaggatggctgaaggggatactcaccggctgaaggccgactgtgattccccctacccccacaaggcgattttgaccccctgagggctgctctagaggactcaggccccgaagctgtcccagggaggtccccgctgcatcccaccacccaagctgtgcctcatggagtcgatgtttagcagccctgccgaggcggcgctgcagcgagagaccggggtgccaggactgcttactcctcttccggacctggacggagtgtacgagctggagcgagtcgctggatttgtccgcgacctggggtgtgaacgagttgccttgcagttccctgaccagctattgggagatgctgtggctgtggctgcacgactggaggagacgacagggtcaaagatgttcattctgggtgacacagcctacggcagctgctgcgtggatgtgctgggtgctgagcaagctggagctcaggctctcatacattttggccctgcctgcttaagccctccagcccgcccactgcccgttgccttcgtgcttcgtcaacgttctgtggccttggagctctgtgtcaaggcctttgaggcccagaacccagaccccaaagcgcctgtggtgctgctgagtgagccggcctgtgcccatgccctggaggctttggctactctcctgcgcccacggtacctggacctgctagtctccagcccagcttttccccaaccagtgggttccctgagtccagagcctatgcccctagagcgttttgggcgccgcttcccccttgccccagggaggcgtctagaagagtatggtgccttctatgtagggggctctaaggccagccctgacccagaccttgacccagacctgagtcggctgctcttggggtgggcaccaggtcaacccttctcctcctgctgtccagatacagggaagactcaggatgagggtgcccgggctggacggctaagggcacgaagacgatatctggtagagagggccagagatgcccgcgtggtagggctgctggcaggcacactgggtgtagcccaacaccgtgaggcactggcccacttgcggaacctgactcaggctgctggcaagcgtagctatgtgttggccctggggcggcccacccctgccaagcttgccaacttccctgaggtggatgtctttgtgctattagcctgtcctctgggtgctctagccccccagctttctggtagcttcttccagcctatactggcaccatgtgagctggaagctgcctgcaaccctgcctggccacctccaggcctggctccccacctcacacattatgcggacttattgcctggctctcccttccacgtggctctcccaccacctgagtcagagctgtgggaaaccccagacgtgtcactcattactggagatctccgacccccacctgcctggaagtcatcaaatgatcatggaagcttggctctgaccccacggccccagctggagctggctgagagcagtcctgcagcctcattccttagttcccggagctggcaagggctggagccccgcctgggtcagacgccagtgacagaagctgtgagtggaagacgagggattgccatcgcctatgaggatgagggaagcggctgataccatgtggggctggagacatagatggacttatgaatggctgctaggacctttagtgctccctgcaccaacctcccatccccctgccaagatccttgaaggaccctggaaggagggagagcaggcagcccttcacaggataggatccgtctctgtcctgtcctggcactggcacaagctcagcccatgcccagtaatgcgtgttgtttggctgatggaataaagggcttagggacttccctgaggcctctggacccatctgtcttcctgagggcagcccaggacctttggccaatcccagttcccaggctgcagttgagggtctgtccttgtcaaaaggcaggtgctagacagtctagaccagggtttctcaaactcgtacttgacatttggggccagataattctttgttgtggggctgtctggtgtatggtagggtgctcagcagcatccctggcctctgcccactagacatcagaagcactcccccagttgtgacaaccaaaaatatctccagaccttggcaaatgttatctgtgggggaaaattgccctcaattgagaaccactggtctagctagacctgcactgtccagtacagtagccactaaatacatgtggctaaacttaaatttaagttaattaagattaaaagctcagtttctcagtcacattagtcattcaagtgttcagacagccacatgaggggacagtgcagctacaggatatgccatcatggcagaaagttctgttggttggacagcgttggtctatactgactcttatttctcagggagatcacagcaacctaaataaaccagataccttttc

SEQ ID NO: 202 - DNA, 4417 bp, Homo sapiens
gccttcgcctgctggaaaagcagtaggatcggccagtggcgacagcaggagctgagcctaagccctggcggggctttgggctgtagattcctgtctgactaaagggacctcaaaaaggagggaaaatggcttctgagtctgaaactctgaatcccagtgctaggataatgaccttttatccaactatggaagagttccgaaacttcagtagatacattgcctacattgaatcccaaggagctcatcgggcagggctagccaaggttgttcctccaaaagagtggaagccacgagcatcctatgatgacattgatgatttggtcattcctgcccccattcaacagctggtgacggggcagtctggcctctttactcagtacaacatacagaagaaagccatgactgttcgagagttccgcaagatagccaatagcgataagtactgtaccccacgctatagtgagtttgaagagctcgagcggaaatactggaaaaatcttacattcaatcctccaatctatggtgcagatgtgaatggtaccctctatgaaaagcatgttgatgagtggaatattggccggctgagaacaatcctggacttggtggaaaaggagagtgggatcaccattgagggtgtgaacaccccatacctgtactttggcatgtggaagacatcctttgcttggcacactgaagacatggacctctacagcatcaactacctgcactttggagaaccaaagtcctggtactctgttccacctgagcatggaaagcggttggaacgcctcgccaaaggctttttcccaggaagtgctcaaagctgtgaggcatttctccgccacaagatgaccctgatttccccgttaatgctgaagaaatatggaattccctttgacaaggtgactcaagaggctggagagtttatgatcactttcccttatggttaccatgccggctttaaccatggttttaactgtgcggagtctaccaattttgctacccgtcggtggattgagtacggcaagcaagctgtgctgtgctcctgtagaaaggacatggtgaagatctccatggatgtgtttgtgagaaagttccagccagaaaggtacaaactttggaaagctgggaaggacaacacagttattgaccatactctgcccacgccagaagcagctgagtttcttaaggagagtgaactgcctccaagagctggcaacgaggaggagtgcccagaggaggacatggaaggggtggaggatggagaggaaggagacctgaagacaagcctggccaagcaccgaatagggacaaagaggcaccgagtttgtcttgaaataccacaggaggtgagtcagagtgagctcttccccaaggaggatctgagttctgagcagtatgagatgacggagtgcccggcagccctcgcccctgtgaggcccacccatagctctgtgcggcaagttgaggatggtcttaccttcccagattattctgactccactgaagtcaaatttgaagagcttaaaaatgtcaaactagaagaggaggatgaggaggaagaacaagaagcagctgccttggatctttctgtgaatcctgcgtctgtagggggacgccttgtcttctcaggctccaaaaagaaatcatcttctagcctgggctctggctcttcacgggattctatctcttctgattcagaaactagtgagcctctctcctgccgagcccaagggcaaacgggagttctcactgtgcacagttatgccaaaggggatggcagggtcactgtgggagagccatgcacgaggaagaaaggaagcgccgctagaagtttcagtgagcgggagctggcagaggttgcagatgaatacatgttttccctagaagagaataagaagtccaagggacgccgtcagcctttaagcaagctcccccgccatcacccacttgtgctgcaggagtgtgtcagtgatgatgagacatctgaacagctgacccctgaggaagaggctgaggagacagaggcctgggccaagcctctgagccaactgtggcagaaccgacctccaaactttgaggctgagaaggaattcaatgagaccatggcccaacaggcccctcactgcgctgtctgtatgatcttccagacttatcatcaggttgaatttggaggctttaatcagaactgtggaaatgcttcagatttagccccccagaagcagaggaccaagccattgattccagaaatgtgcttcacttcgactggctgcagcacggacatcaacctttctactccttatcttgaggaggatggcaccagcatactcgtttcctgcaagaagtgcagcgtccgggtccatgccagttgctatggggtcccccctgcaaaggcttctgaagactggatgtgttctcggtgttcagccaatgccctagaggaggactgctgtttatgctcattacgaggaggggccctgcagagagcaaatgatgacaggtgggtccacgtttcatgtgctgtggcaattctggaagcaaggtttgtcaacattgcagaaagaagtccggtggatgtgagcaaaatccccctgccccgcttcaaactgaaatgtatcttctgtaagaagcggaggaaaagaactgctggctgctgtgtgcagtgttctcacggccgctgcccaactgccttccatgtgagctgcgcccaggctgccggtgtgatgatgcagcctgacgactggccttttgtggtcttcattacctgctttcggcacaagattcctaatttggagcgtgccaagggggccttgcaaagcatcactgcaggccagaaagtcattagcaagcataagaacgggcgcttctaccagtgtgaagtggtcaggctcaccaccgagaccttctatgaagtcaactttgatgatggctccttcagcgacaatctttatcctgaggacatagtgagccaggactgtctccagtttggtcctcctgctgaaggggaagtggtccaagtgagatggacagacggccaagtctatggagccaagtttgtggcctcccaccctatccaaatgtaccaggtggagtttgaggatggctcacaacttgtggttaagagagatgatgtatacacactggatgaagagcttcccaagagagtcaaatctagactgtcagtagcctcagacatgcgcttcaatgagattttcacagagaaagaggttaagcaagaaaagaaacggcaacgagttatcaactcaagataccgggaagattatattgagcctgcactataccgggccatcatggagtaggtgcttccagggtccaagggattctcagccatccaggcaagagcactctgggttccacagcacagcagacatggaacgctgaagtctctgaaagtgaagttgtaaaaagaaaaggaatgaaataaccgacccatcatcttctcacccaccctcattgcattccgctgtagtgaaaggacgagccatttctgggcacgtggcagcagtcgctgatctcccagctgaggggctgagcactggaatgctgtggctgcactggccccagtccatagaggggtcaactatgctggctggactggctgccttgttcctggcctaggacttagcttcataactatcacctgcaccgactaggctgaggtgctggtacttgccccaacccctacttttgtatttatatgtgtgtgtgtgtgtgcgtgcgtgcgtgcgtgcgtgtatgtttggtctggaccagcttctgccagcccctggcctttactttcttccttgcctatgcagggcaaacaaaatgtgaaattctgccctcagctgagctgagtaagggctcctgggggttggctggagatgggtgtggcatctgtccaggcctggaaccgtctcaagacagtgctggcaaagctgcagtattgagatgctaaggagctgatgccacctctttgtcttcccctaaaggagaacatggggataacatgggtgtgtgcccacaacactctaggtgcagagcccctgtggcaaagtattacagggtgtgggtggggattaccctgaatcggggattttaatgatggaagcaggcagagcctggtgggtgattctgtcaacagaaaattgcaatcatgcaggggctgggagggttaggatgaaaaaactggggccattggaggcccactgtaggtgggagggagctgattttggggtggggggtgggactagagggcaatactgaaggggttaaacaggtttttgctcctcaagaatttgtttgcctgggcccaggattggagggcttcacaccaataccctgtgtatacaagaatcagatttataatacttccccttttttgttacgtatgaacactataaaccaaattattttg

SEQ ID NO: 203 - protein, 1064 aa, Homo sapiens
MASESETLNPSARIMTFYPTMEEFRNFSRYIAYIESQGAHRAGLAKVVPPKEWKPRASYDDIDDLVIPAPIQQLVTGQSGLFTQYNIQKKAMTVREFRKIANSDKYCTPRYSEFEELERKYWKNLTFNPPIYGADVNGTLYEKHVDEWNIGRLRTILDLVEKESGITIEGVNTPYLYFGMWKTSFAWHTEDMDLYSINYLHFGEPKSWYSVPPEHGKRLERLAKGFFPGSAQSCEAFLRHKMTLISPLMLKKYGIPFDKVTQEAGEFMITFPYGYHAGFNHGFNCAESTNFATRRWIEYGKQAVLCSCRKDMVKISMDVFVRKFQPERYKLWKAGKDNTVIDHTLPTPEAAEFLKESELPPRAGNEEECPEEDMEGVEDGEEGDLKTSLAKHRIGTKRHRVCLEIPQEVSQSELFPKEDLSSEQYEMTECPAALAPVRPTHSSVRQVEDGLTFPDYSDSTEVKFEELKNVKLEEEDEEEEQEAAALDLSVNPASVGGRLVFSGSKKKSSSSLGSGSSRDSISSDSETSEPLSCRAQGQTGVLTVHSYAKGDGRVTVGEPCTRKKGSAARSFSERELAEVADEYMFSLEENKKSKGRRQPLSKLPRHHPLVLQECVSDDETSEQLTPEEEAEETEAWAKPLSQLWQNRPPNFEAEKEFNETMAQQAPHCAVCMIFQTYHQVEFGGFNQNCGNASDLAPQKQRTKPLIPEMCFTSTGCSTDINLSTPYLEEDGTSILVSCKKCSVRVHASCYGVPPAKASEDWMCSRCSANALEEDCCLCSLRGGALQRANDDRWVHVSCAVAILEARFVNIAERSPVDVSKIPLPRFKLKCIFCKKRRKRTAGCCVQCSHGRCPTAFHVSCAQAAGVMMQPDDWPFVVFITCFRHKIPNLERAKGALQSITAGQKVISKHKNGRFYQCEVVRLTTETFYEVNFDDGSFSDNLYPEDIVSQDCLQFGPPAEGEVVQVRWTDGQVYGAKFVASHPIQMYQVEFEDGSQLVVKRDDVYTLDEELPKRVKSRLSVASDMRFNEIFTEKEVKQEKKRQRVINSRYREDYIEPALYRAIME

SEQ ID NO: 204 - DNA, 1293 bp, Homo sapiens
agttacagacagctgaccatggaagcgaatgggttgggacctcagggttttccggagctgaagaatgacacattcctgcgagcagcctggggagaggaaacagactacactcccgtttggtgcatgcgccaggcaggccgttacttaccagagtttagggaaacccgggctgcccaggactttttcagcacgtgtcgctctcctgaggcctgctgtgaactgactctgcagccactgcgtcgcttccctctggatgctgccatcattttctccgacatccttgttgtaccccaggcactgggcatggaggtgaccatggtacctggcaaaggacccagcttcccagagccattaagagaagagcaggacctagaacgcctacgggatccagaagtggtagcctctgagctaggctatgtgttccaagccatcacccttacccgacaacgactggctggacgtgtgccgctgattggctttgctggtgccccatggaccctgatgacatacatggttgagggtggtggctcaagcaccatggctcaggccaagcgctggctctatcagagacctcaggctagtcaccagctgcttcgcatcctcactgatgctctggtcccatatctggtaggacaagtggtggctggtgcccaggcattgcagctgtttgagtcccatgcagggcatcttggcccacagctcttcaacaagtttgcactgccttacatccgtgatgtggccaagcaagtgaaggccaggttgcgggaggcaggcctggcaccagtgcccatgatcatctttgctaaggatgggcattttgccctggaggagctggcccaagctggctatgaggtggttgggcttgactggacagtggccccaaagaaagcccgggagtgtgtggggaagacggtgacattgcagggcaacctggacccctgtgccttgtatgcatctgaggaggagatcgggcagttggtgaagcagatgctggatgactttggaccacatcgctacattgccaacctgggccatgggctttatcctgacatggacccagaacatgtgggcgcctttgtggatgctgtgcataaacactcacgtctgcttcgacagaactgagtgtatacctttaccctcaagtaccactaacacagatgattgatcgtttccaggacaataaaagtttcggagttgaactattgtgtagttttgtttgtgaaagattgtgcccatatcctcagttcttcttagcctctgctccttccctgggaaccctctctatatcctctt

SEQ ID NO: 205 - protein, 367 aa, Homo sapiens
MEANGLGPQGFPELKNDTFLRAAWGEETDYTPVWCMRQAGRYLPEFRETRAAQDFFSTCRSPEACCELTLQPLRRFPLDAAIIFSDILVVPQALGMEVTMVPGKGPSFPEPLREEQDLERLRDPEVVASELGYVFQAITLTRQRLAGRVPLIGFAGAPWTLMTYMVEGGGSSTMAQAKRWLYQRPQASHQLLRILTDALVPYLVGQVVAGAQALQLFESHAGHLGPQLFNKFALPYIRDVAKQVKARLREAGLAPVPMIIFAKDGHFALEELAQAGYEVVGLDWTVAPKKARECVGKTVTLQGNLDPCALYASEEEIGQLVKQMLDDFGPHRYIANLGHGLYPDMDPEHVGAFVDAVHKHSRLLRQN

SEQ ID NO: 206 - DNA, 1764 bp, Homo sapiens
agctttgcgcagtggcagtatcgtagccaatgaggtttatccgaggcgcgattattgctaattgaaaacttttcccaataccccgccatgacgacttgaaatatagtcggcattggcaatttttgacagtctctacggagactgcatgtgctggtgaagctcctggaagtgatggaaggaatggacaaggagacgtttgagttcaagtttgggaaggaactaacattcaccactgtactgagtgaccaacaggtggtggagctgatccctgggggtgcaggcatcgtcgtgggatatggggaccgttctcgtttcatccaactggtccagaaggcacggctagaggagagcaaggagcaggtggcagctatgcaggcaggtctgctgaaggtggtaccacaggctgtgctggacttgctgacctggcaagagttggagaagaaagtgtgtggggatccagaggtcactgtggatgctctgcgcaagctcacccggtttgaggacttcgagccatctgactcgcgggtgcagtatttctgggaggcactgaacaacttcaccaacgaggaccggagccgcttcctgcgctttgtcacgggccgcagtcgcctgccagcacggatctacatctacccagacaagctgggctacgagaccacagacgcgctgcccgagtcttccacttgctccagcaccctcttcctgccacactatgccagtgccaaggtatgcgaggagaagctccgctatgcggcctacaactgcgtggccatcgacactgacatgagcccttgggaggagtgaggcgtgccgccggctgtgggaccagcaagactgcacgtgtccctcttggccttgcccagggcgaagacaccttccctgccctggtttggctgacgtgctcagcaaaaccccatgtgccctgctcctgtgtgcagttggggtaggggcagctggcatggtcaggtaacactagtggcccagccccgcagacccacaagccctacccgtgctggggcttgcttcccgaggtatttcacctcttaagagggaatcttccacaagcccagcacaagctgccaggcctgagctacttgaagggggccatctaggtccccaacccatggactttgcctccattttcagctccgccttttttctcctattttctctctggctttcttcagccatgactcacaactaaaaacataaaacactggaggttagtggaggcccctccccaagcagggagcctgggatgggcagggagtgatagccaaactccttggtcacctgctccaagaaggaagcagtagctgagcacctgccctcacatactgctcttttcccctctccctccacaccagagatgtggtgagctctgttcttctaccaacccagtctcaacacacaaagtgccaccaccttccctgactcagaacccacatccactcaatgtgaactctactaccacgacctccccatattcctcacttctccatcacctccagcctgactccctgtctgccctttcacccccaagattttgcacaggttaaggccagttatggcctttttgaaatctgtaatagctcccctttccccaactctaaagcctagaccttaaacctgttcctagagctatgcacacccctgccccagtttaccgttcctccctcagggcctccgtgacactccatgaaaagaagttcttgcataccggaaagttgaataaatggatgaattcaaaaaaaaaaaaaaaaa

SEQ ID NO: 207 - protein, 210 aa, Homo sapiens
MEGMDKETFEFKFGKELTFTTVLSDQQVVELIPGGAGIVVGYGDRSRFIQLVQKARLEESKEQVAAMQAGLLKVVPQAVLDLLTWQELEKKVCGDPEVTVDALRKLTRFEDFEPSDSRVQYFWEALNNFTNEDRSRFLRFVTGRSRLPARIYIYPDKLGYETTDALPESSTCSSTLFLPHYASAKVCEEKLRYAAYNCVAIDTDMSPWEE

SEQ ID NO: 208 - DNA, 435 bp, Homo sapiens
cacaatggtgcgcatgaatgccctggcagatgctctcaagagcatcaacaatgccgaaaagagaggcaaacgccaggtgcttcttaggccatgctccaaagtcatcgtccagtttctcactgtgatgatgaagcatggttacattggcgaatttgaaatcactgatgatcacagagctgggaaaattgttgtgaacctcacaggcaggctaaacaagtgtggagcgatcagccccagatttgatgtgcaactcaaagatctggaaaaatggcagaataatctgcttccatcccgccagtttgatttcattgtactgacaacctcagctggcatcatggaccatgaagcaagacgaaaacacacaggagggaaaatccagggattctttttctagggatgtaatacatatatttacaaataaaatgcctcaaggac

SEQ ID NO: 209 - protein, 129 aa, Homo sapiens [sequence omitted]

SEQ ID NO: 210 - DNA, 705 bp, Rattus norvegicus
ctctttccagccagcgccgagcgatgggcatctctcgggacaactggcacaagcgccgcaaaaccgggggcaagagaaagccctaccacaagaagcggaagtatgagttggggcgcccagctgccaacaccaagattggcccccgccgcatccacacagtccgtgtgcggggaggtaacaagaaataccgtgccctgaggttggacgtggggaatttctcctggggctcagagtgttgtactcgtaaaacaaggatcatcgatgttgtctacaatgcatctaataacgagctggttcgtaccaagaccctggtgaagaattgcatcgtgctcatcgacagcacaccgtaccgacagtggtacgagtcccactatgcgctgcccctgggccgcaagaagggagccaagctgactcctgaggaagaagagattttaaacaaaaaacgatctaaaaaaattcagaagaaatatgatgaaaggaaaaagaatgccaaaatcagcagtctcctggaggagcagttccagcagggcaagcttcttgcgtgcatcgcttcaaggccgggacagtgtggccgagcagatggctatgtgctagagggcaaagagttggagttctatcttaggaaaatcaaggcccgcaaaggcaaataaatccttgttttgtcttcacccatgtaataaaggtgtttattgttttgttcccaca

SEQ ID NO: 211 - protein, 208 aa, Rattus norvegicus [sequence omitted]

SEQ ID NO: 212 - DNA, 2857 bp, Homo sapiens
acgcttgcgcgcgggatttaaactgcggcggtttacgcggcgttaagacttcgtagggttagcgaaattgaggtttcttggtattgcgcgtttctcttccttgctgactctccgaatggccatggactcgtcgcttcaggcccgcctgtttcccggtctcgctatcaagatccaacgcagtaatggtttaattcacagtgccaatgtaaggactgtgaacttggagaaatcctgtgtttcagtggaatgggcagaaggaggtgccacaaagggcaaagagattgattttgatgatgtggctgcaataaacccagaactcttacagcttcttcccttacatccgaaggacaatctgcccttgcaggaaaatgtaacaatccagaaacaaaaacggagatccgtcaactccaaaattcctgctccaaaagaaagtcttcgaagccgctccactcgcatgtccactgtctcagagcttcgcatcacggctcaggagaatgacatggaggtggagctgcctgcagctgcaaactcccgcaagcagttttcagttcctcctgcccccactaggccttcctgccctgcagtggctgaaataccattgaggatggtcagcgaggagatggaagagcaagtccattccatccgaggcagctcttctgcaaaccctgtgaactcagttcggaggaaatcatgtcttgtgaaggaagtggaaaaaatgaagaacaagcgagaagagaagaaggcccagaactctgaaatgagaatgaagagagctcaggagtatgacagtagttttccaaactgggaatttgcccgaatgattaaagaatttcgggctactttggaatgtcatccacttactatgactgatcctatcgaagagcacagaatatgtgtctgtgttaggaaacgcccactgaataagcaagaattggccaagaaagaaattgatgtgatttccattcctagcaagtgtctcctcttggtacatgaacccaagttgaaagtggacttaacaaagtatctggagaaccaagcattctgctttgactttgcatttgatgaaacagcttcgaatgaagttgtctacaggttcacagcaaggccactggtacagacaatctttgaaggtggaaaagcaacttgttttgcatatggccagacaggaagtggcaagacacatactatgggcggagacctctctgggaaagcccagaatgcatccaaagggatctatgccatggcctcccgggacgtcttcctcctgaagaatcaaccctgctaccggaagttgggcctggaagtctatgtgacattcttcgagatctacaatgggaagctgtttgacctgctcaacaagaaggccaagctgcgcgtgctggaggacggcaagcaacaggtgcaagtggtggggctgcaggagcatctggttaactctgctgatgatgtcatcaagatgatcgacatgggcagcgcctgcagaacctctgggcagacatttgccaactccaattcctcccgctcccacgcgtgcttccaaattattcttcgagctaaagggagaatgcatggcaagttctctttggtagatctggcagggaatgagcgaggcgcggacacttccagtgctgaccggcagacccgcatggagggcgcagaaatcaacaagagtctcttagccctgaaggagtgcatcagggccctgggacagaacaaggctcacaccccgttccgtgagagcaagctgacacaggtgctgagggactccttcattggggagaactctaggacttgcagattgccacgatctcaccaggcataagctcctgtgaatatactttaaacaccctgagatatgcagacagggtcaaggagctgagcccccacagtgggcccagtggagagcagttgattcaaatggaaacagaagagatggaagcctgctctaacggggcgctgattccaggcaatttatccaaggaagaggaggaactgtcttcccagatgtccagctttaacgaagccatgactcagatcagggagctggaggagaaggctatggaagagctcaaggagatcatacagcaaggaccagactggcttgagctctctgagatgaccgagcagccagactatgacctggagacctttgtgaacaaagcggaatctgctctggcccagcaagccaagcatttctcagccctgcgagatgtcatcaaggccttgcgcctggccatgcagctggaagagcaggctagcagacaaataagcagcaagaaacggccccagtgacgactgcaaataaaaatctgtttggtttgacacccagcctcttccctggccctccccagagaactttgggtacctggtgggtctaggcagggtctgagctgggacaggttctggtaaatgccaagtatgggggcatctgggcccagggcagctggggagggggtcagagtgacatgggacactccttttctgttcctcagttgtcgccctcacgagaggaaggagctcttagttacccttttgtgttgcccttctttccatcaaggggaatgttctcagcatagagctttctccgcagcatcctgcctgcgtggactggctgctaatggagagctccctggggttgtcctggctctggggagagagacggagcctttagtacagctatctgctggctctaaaccttctacgcctttgggccgagcactgaatgtcttgtactttaaaaaaatgtttctgagacctctttctactttactgtctccctagagatcctagaggatccctactgttttctgttttatgtgtttatacattgtatgtaacaataaagagaaaaaataaa

SEQ ID NO: 213 - DNA, 5735 bp, Homo sapiens
taggcaggcggctgagccggcggcgggtggcctgcccaacgtgtgctgggtgggagaaggcgaggcgtcagcgatgctgtctcttccgtgaggagcgcagaggaggtcgcggcgccggaggccccagaaggctcgaaggcgccgcgggctggggtcggtggcttagggagcccgtccggccatggtggccgcgggtggtggttggcgcggctgcgctgcggcccggggcagtgcggagccgggacagtcgcggcgctgacgcccgcgggccccagctgcagatatgaagcggagccgctgccgcgaccgaccgcagccgccgccgcccgaccgccgggaggatggagttcagcgggcagcggagctgtctcagtctttgccgccgcgccggcgagcgccgcccgggaggcagcggctggaggagcggacgggccccgcggggcccgagggcaaggagcaggatgtagtaactggagttagtcccctgctcttcaggaaactcagtaatcctgacatattttcatccactggaaaagttaaacttcagcgacaactgagtcaggatgattgtaagttatggagaggaaacctggccagctctctatcgggtaagcagctgctccctttgtccagcagtgtacatagcagtgtgggacaggtgacttggcagtcgtcaggagaagcatcaaacctggttcgaatgagaaaccagtcccttggacagtctgcaccttctcttactgctggcctgaaggagttgagccttccaagaagaggcagcttttgtcggacaagtaaccgcaagagcttgattgtgacctctagcacatcacctacactaccacggccacactcaccactccatggccacacaggtaacagtcctttggacagcccccggaatttctctccaaatgcacctgctcacttttcttttgttcctgcccgtaggactgatgggcggcgctggtctttggcctctttgccctcttcaggatatggaactaacactcctagctccactgtctcatcatcatgctcctcacaggaaaagctgcatcagttgcctttccagcctacagctgatgagctgcactttttgacgaagcatttcagcacagagagcgtaccagatgaggaaggacggcagtccccagccatgcggcctcgctcccggagcctcagtcccggacgatccccagtatcctttgacagtgaaataataatgatgaatcatgtttacaaagaaagattcccaaaggccaccgcacaaatggaagagcgactagcagagtttatttcctccaacactccagacagcgtgctgcccttggcagatggagccctgagctttattcatcatcaggtgattgagatggcccgagactgcctggataaatctcggagtggcctcattacatcacaatacttctacgaacttcaagataatttggagaaacttttacaagatgctcatgagcgctcagagagctcagaagtggcttttgtgatgcagctggtgaaaaagctgatgattatcattgcccgcccagcacgtctcctggaatgcctggagtttgaccctgaagagttctaccaccttttagaagcagctgagggccacgccaaagagggacaagggattaaatgtgacattccccgctacatcgttagccagctgggcctcacccgggatcccctagaagaaatggcccagttgagcagctgtgacagtcctgacactccagagacagatgattctattgagggccatggggcatctctgccatctaaaaagacaccctctgaagaggacttcgagaccattaagctcatcagcaatggcgcctatggggctgtatttctggtgcggcacaagtccacccggcagcgctttgccatgaagaagatcaacaagcagaacctgatcctacggaaccagatccagcaggccttcgtggagcgtgacatactgactttcgctgagaacccctttgtggtcagcatgttctgctcctttgataccaagcgccacttgtgcatggtgatggagtacgttgaagggggagactgtgccactctgctgaagaatattggggccctgcctgtggacatggtgcgtctatactttgcggaaactgtgctggccctggagtacttacacaactatggcatcgtgcaccgtgacctcaagcctgacaacctcctaattacatccatggggcacatcaagctcacggactttggactgtccaaaattggcctcatgagtctgacaacgaacttgtatgagggtcatattgaaaaggatgcccgggaattcctggacaagcaggtatgcgggaccccagaatacattgcgcctgaggtgatcctgcgccagggctatgggaagccagtggactggtgggccatgggcattatcctgtatgagttcctggtgggctgcgtccctttttttggagatactccggaggagctctttgggcaggtgatcagtgatgagattgtgtggcctgagggtgatgaggcactgcccccagacgcccaggacctcacctccaaactgctccaccagaaccctctggagagacttggcacaggcagtgcctatgaggtgaagcagcacccattctttactggtctggactggacaggacttctccgccagaaggctgaatttattcctcagttggagtcagaggatgatactagctattttgacacccgctcagagcgataccaccacatggactcggaggatgaggaagaagtgagtgaggatggctgccttgagatccgccagttctcttcctgctctccaaggttcaacaaggtgtacagcagcatggagcggctctcactgctcgaggagcgccggacaccacccccgaccaagcgcagcctgagtgaggagaaggaggaccattcagatggcctggcagggctcaaaggccgagaccggagctgggtgattggctcccctgagatattacggaagcggctgtcggtgtctgagtcatcccacacagagagtgactcaagccctccaatgacagtgcgacgccgctgctcaggcctcctggatgcgcctcggttcccggagggccctgaggaggccagcagcaccctcaggaggcaaccacaggagggtatatgggtcctgacacccccatctggagagggggtatctgggcctgtcactgaacactcaggggagcagcggccaaagctggatgaggaagctgttggccggagcagtggttccagtccagctatggagacccgaggccgtgggacctcacagctggctgagggagccacagccaaggccatcagtgacctggctgtgcgtagggcccgccaccggctgctctctggggactcaacagagaagcgcactgctcgccctgtcaacaaagtgatcaagtccgcctcagccacagccctctcactcctcattccttcggaacaccacacctgctccccgttggccagccccatgtccccacattctcagtcgtccaacccatcatcccgggactcttctccaagcagggacttcttgccagcccttggcagcatgaggcctcccatcatcatccaccgagctggcaagaagtatggcttcaccctgcgggccattcgcgtctacatgggtgactccgatgtctacaccgtgcaccatatggtgtggcacgtggaggatggaggtccggccagtgaggcagggcttcgtcaaggtgacctcatcacccatgtcaatggggaacctgtgcatggcctggtgcacacggaggtggtagagctgatcctgaagagtggaaacaaggtggccatttcaacaactcccctggagaacacatccattaaagtggggccagctcggaagggcagctacaaggccaagatggcccgaaggagcaagaggagccgcggcaaggatgggcaagaaagcagaaaaaggagctccctgttccgcaagatcaccaagcaagcatccctgctccacaccagccgcagcctttcttcccttaaccgctccttgtcatcaggggagagtgggccaggctctcccacacacagccacagcctttccccccgatctcccactcaaggctaccgggtgacccccgatgctgtgcattcagtgggagggaattcatcacagagcagctcccccagctccagcgtgcccagttccccagccggctctgggcacacacggcccagctccctccacggtctggcacccaagctccaacgccagtaccgctctccacggcgcaagtcagcaggcagcatcccactgtcaccactggcccacaccccttctcccccacccccaacagcttcacctcagcggtccccatcgcccctgtctggccatgtagcccaggcctttcccacaaagcttcacttgtcacctcccctgggcaggcaactctcacggcccaagagtgcggagccaccccgttcaccactactcaagagggtgcagtcggctgagaaactggcagcagcacttgccgcctctgagaagaagctagccacttctcgcaagcacagccttgacctgccccactctgaactaaagaaggaactgccgcccagggaagtgagccctctggaggtagttggagccaggagtgtgctgtctggcaagggggccctgccagggaagggggtgctgcagcctgctccctcacgggccctaggcaccctccggcaggaccgagccgaacgacgggagtcgctgcagaagcaagaagccattcgtgaggtggactcctcagaggacgacaccgaggaagggcctgagaacagccagggtgcacaggagctgagcttggcacctcacccagaagtgagccagagtgtggcccctaaaggagcaggagagagtggggaagaggatcctttcccgtccagagaccctaggagcctgggcccaatggtcccaagcctattgacagggatcacactggggcctcccagaatggaaagtcccagtggtccccacaggaggctcgggagcccacaagccattgaggaggctgccagctcctcctcagcaggccccaacctaggtcagtctggagccacagaccccatccctcctgaaggttgctggaaggcccagcacctccacacccaggcactaacagcactttctcccagcacttcgggactcacccccaccagcagttgctctcctcccagctccacctctgggaagctgagcatgtggtcctggaaatcccttattgagggcccagacagggcatccccaagcagaaaggcaaccatggcaggtgggctagccaacctccaggatttggaaaacacaactccagcccagcctaagaacctgtctcccagggagcaggggaagacacagccacctagtgcccccagactggcccatccatcttatgaggatcccagccagggctggctatgggagtctgagtgtgcacaagcagtgaaagaggatccagccctgagcatcacccaagtgcctgatgcctcaggtgacagaaggcaggacgttccatgccgaggctgccccctcacccagaagtctgagcccagcctcaggaggggccaagaaccagggggccatcaaaagcatcgggatttggcattggttccagatgagcttttaaagcaaacatagcagttgtttgccatttcttgcactcagacctgtgtaatatatgctcctggaaacc

SEQ ID NO: 214 - DNA, 542 bp, Homo sapiens
gcaagatggtgggtgaaaaagttgagaagccagatgctaaagagaagaaacccaaagccaagaaggctgatgttggtggcaaggtgaaaaagggtaacctcaaggctaaaaagcccaagaagggaaagccccattgcagccgcaaccctgtccttgtcagaggaattggcaggtattgccgatctgccatgtattccagaaaggccatgtacaagaggaagtactcagccgctaaatctaaggttgaaaagaaaaagaaggagaaggttcttgcaactgttacaaaaccagttggttgtgacaagaatggcggtgcccgggtggttaaacttcgcaaaatgcctagatattatcctactgaagatgtgcctcgaaagctgttgagccatggcaaaaaatccttcagtcagcacgtgaggccataggggcaagaaggtggttttcctgaagcagctggctagtggtttgttacttgtgactggacctctggtcctcaatcgaattcctctacgaagaacataccagaaatttgtcattgccac

SEQ ID NO: 215 - protein, 139 aa, Homo sapiens
MVGEKVEKPDAKEKKPKAKKADVGGKVKKGNLKAKKPKKGKPHCSRNPVLVRGIGRYCRSAMYSRKAMYKRKYSAAKSKVEKKKKEKVLATVTKPVGCDKNGGARVVKLRKMPRYYPTEDVPRKLLSHGKKSFSQHVRP

SEQ ID NO: 216 - DNA, 3222 bp, Homo sapiens
aatctgccattttctgtccctgagtgagtctctggcgtcccaaattgcctgtttttctcgcaggctctattccgttcgctggttcgccacctcaggggaacgatggccatggagtccacagccactgccgccgtcgccgcggagctggtttctgccgacaaaattgaagatgttcctgctccttctacatctgcagataaagtggagagtctggatgtggatagtgaagctaagaaactattgggtttaggacagaaacatctggtgatgggggatattccagcagctgtcaatgcattccaggaagcagctagtcttttaggtaagaagtatggagagacagctaatgagtgtggagaagccttctttttctatgggaaatcacttctggagttggcaagaatggagaatggtgtgttgggaaacgccttggaaggtgtgcatgtggaagaggaagaaggagaaaaaacagaagatgaatctctggtagaaaataatgataacatagatgaggaagcaagggaagagttgagagaacaggtttatgacgccatgggagaaaaagaagaagccaaaaaaacagaagacaagtctttggcaaagcctgaaactgataaagaacaggacagtgaaatggagaagggtggaagagaagatatggatataagtaaatctgcagaggagccacaggaaaaagttgacttgactctagattggttaactgaaacctctgaagaggcaaaaggaggagcagcaccagaaggaccgaatgaagctgaggtcacttctgggaagccagaacaggaagtaccagatgctgaggaagaaaaatcagtttctggaactgatgtccaagaagagtgcagagaaaaaggaggtcaggagaagcagggagaggtaattgtgagcatagaggagaagccaaaagaagtttcagaagagcagcctgtggtgactctagaaaagcagggcactgcagtggaggtagaagcagagtctttagacccgacagtcaagccagtggatgtgggtggggacgagccagaggagaaggtagttacctctgaaaacgaggcaggaaaggcggttcttgaacaactggtaggtcaagaagtaccacctgctgaagagtcaccagaggtgacaacagaggctgcagaggcctcagctgtagaggctggatcagaagtctctgaaaagcctgggcaggaggctccagttctccctaaggatggtgcagtcaatggaccgtcagttgtaggagatcagactcctattgaaccacagacttctatagaaagactgacagaaacaaaagatggctcaggactagaggagaaggtcagggcaaagctggttcctagtcaggaggagactaagctgtctgtagaagagtctgaggcagctggagatggggttgataccaaggtagcccagggagctactgagaaatcacctgaagacaaagttcagatagctgctaatgaagagacacaagagagagaagaacagatgaaagagggtgaagaaactgaaggctcagaagaggatgataaagaaaatgataagaccgaagaaatgccaaatgattcagtccttgaaaacaagtctcttcaagaaaatgaggaggaggagattgggaacctagagcttgcctgggatatgctggatttagcaaagatcatttttaaaaggcaagaaacaaaagaagcacagctttatgctgcccaggcacatcttaaactcggagaagttagtgttgaatctgaaaactatgtgcaagctgtggaggagttccagtcctgccttaacctgcaggaacagtacctggaagcccacgaccgtctccttgcagagacccactaccagctgggcttggcttatgggtacaactctcagtatgatgaggcagtggcacagttcagcaaatctattgaagtcattgagaacagaatggctgtactaaacgagcaggtgaaggaggctgaaggatcgtctgctgaatacaagaaagaaattgaggaactaaaggaactgctacccgaaattagagagaagatagaagatgcaaaggagtctcagcgtagtgggaatgtagctgaactggctctgaaagctactctggtggagagttctacttcaggtttcactcctggtggaggaggctcttcagtctccatgattgccagtagaaagccaacagacggtgcttcctcatcaaattgtgtgactgatatttcccaccttgtcagaaagaagaggaaaccagaggaagagagtccccggaaagatgatgcaaagaaagccaaacaagagccggaggtgaacggaggcagtggggatgctgtccccagtggaaatgaagtttcggaaaacatggaggaggaggctgagaatcaggctgaaagccgggcagcagtggaggggacagtggaggctggagctacagttgaaagcactgcatgttaagagggggcacagccctcctcccaagggaaagtgtttttgtatataatgtattttttcacttttggaggattctttttgtataacttcaataaagattgtaagcaaaggttgaggctttgatggtttttttcttaattattggctgaatctgccttggagcactgctggttttatatattagccaaaggttttgttctggccttctgtactgatctgtgttcctgatcctaattcctatctgtctaacgtggaggtgatcaagtgtggctgtaggcctttgttttccaatggtgctatattctgttttcaaacacttcactgaacccagctgtcttgcaaactttcagtggtgctgtccctggatgggggctacaaaaacaagaattggtgaagatcttgctcttcagtgctgaaaatggatgatggactttggctgtgagccaggcctaggatggttcttgtcctatatccacctagtcttcacctggggctataattctgtcctggaaaaagaactctgaaaacctgggtcaggggaatgattcctaaggaaaacggtctgcatttgagctctggtttgaaagtagccaaggggactgatggtggacactccagatgtggttggaagcatatgtggggaggctggctggttgagttttgttattttctgtatagaaaggttgagatatatcaacacttggaattgttacccatctgcagaattgacttctcaaataaagatgctaaaaatct

SEQ ID NO: 217 - protein, 788 aa, Homo sapiens
MAMESTATAAVAAELVSADKIEDVPAPSTSADKVESLDVDSEAKKLLGLGQKHLVMGDIPAAVNAFQEAASLLGKKYGETANECGEAFFFYGKSLLELARMENGVLGNALEGVHVEEEEGEKTEDESLVENNDNIDEEAREELREQVYDAMGEKEEAKKTEDKSLAKPETDKEQDSEMEKGGREDMDISKSAEEPQEKVDLTLDWLTETSEEAKGGAAPEGPNEAEVTSGKPEQEVPDAEEEKSVSGTDVQEECREKGGQEKQGEVIVSIEEKPKEVSEEQPVVTLEKQGTAVEVEAESLDPTVKPVDVGGDEPEEKVVTSENEAGKAVLEQLVGQEVPPAEESPEVTTEAAEASAVEAGSEVSEKPGQEAPVLPKDGAVNGPSVVGDQTPIEPQTSIERLTETKDGSGLEEKVRAKLVPSQEETKLSVEESEAAGDGVDTKVAQGATEKSPEDKVQIAANEETQEREEQMKEGEETEGSEEDDKENDKTEEMPNDSVLENKSLQENEEEEIGNLELAWDMLDLAKIIFKRQETKEAQLYAAQAHLKLGEVSVESENYVQAVEEFQSCLNLQEQYLEAHDRLLAETHYQLGLAYGYNSQYDEAVAQFSKSIEVIENRMAVLNEQVKEAEGSSAEYKKEIEELKELLPEIREKIEDAKESQRSGNVAELALKATLVESSTSGFTPGGGGSSVSMIASRKPTDGASSSNCVTDISHLVRKKRKPEEESPRKDDAKKAKQEPEVNGGSGDAVPSGNEVSENMEEEAENQAESRAAVEGTVEAGATVESTAC

SEQ ID NO: 218 - DNA, 1132 bp, Homo sapiens
agccagaaatgtgaagtgctagctgaaggatgagcagcagctagccaggcaaagggggcaatggcggcttcctgtgttctactgcacactgggcagaagatgcctctgattggtctgggtacctggaagagtgagcctggtcaggtaaaagcagctgttaagtatgcccttagcgtaggctaccgccacattgattgtgctgctatctacggcaatgagcctgagattggggaggccctgaaggaggacgtgggaccaggcaaggcggtgcctcgggaggagctgtttgtgacatccaagctgtggaacaccaagcaccaccccgaggatgtggagcctgccctccggaagactctggctgacctccagctggagtatctggacctgtacctgatgcactggccttatgcctttgagcggggagacaaccccttccccaagaatgctgatgggactatatgctacgactccacccactacaaggagacttggaaggctctggaggcactggtggctaaggggctggtgcaggcgctgggcctgtccaacttcaacagtcggcagattgatgacatactcagtgtggcctccgtgcgtccagctgtcttgcaggtggaatgccacccatacttggctcaaaatgagctaattgcccactgccaagcacgtggcttggaggtaactgcttatagccctttgggctcctctgatcgtgcatggcgtgatcctgatgagcctgtcctgctggaggaaccagtagtcctggcattggctgaaaagtatggccgatctccagctcagatcttgctcaggtggcaggtccagcggaaagtgatctgcatccccaaaagtatcactccttctcgaatccttcagaacatcaaggtgtttgacttcacctttagcccagaagagatgaagcagctaaatgccctgaacaaaaattggagatatattgtgcctatgcttacggtggatgggaagagagtcccaagggatgcagggcatcctctgtacccctttaatgacccgtactgagaccacagcttcttggcctcccttccagctctgcagctaatgaggtcctgccacaacggaaagagggagttaataaagccattggagcatccat

SEQ ID NO: 219 - protein, 325 aa, Homo sapiens
MAASCVLLHTGQKMPLIGLGTWKSEPGQVKAAVKYALSVGYRHIDCAAIYGNEPEIGEALKEDVGPGKAVPREELFVTSKLWNTKHHPEDVEPALRKTLADLQLEYLDLYLMHWPYAFERGDNPFPKNADGTICYDSTHYKETWKALEALVAKGLVQALGLSNFNSRQIDDILSVASVRPAVLQVECHPYLAQNELIAHCQARGLEVTAYSPLGSSDRAWRDPDEPVLLEEPVVLALAEKYGRSPAQILLRWQVQRKVICIPKSITPSRILQNIKVFDFTFSPEEMKQLNALNKNWRYIVPMLTVDGKRVPRDAGHPLYPFNDPY

SEQ ID NO: 220 - DNA, 937 bp, Homo sapiens
gttcttgcctggtgtcggtggttagtttctgcgacttgtgttgggactgctgataggaagatgtcttcaggaaatgctaaaattgggcaccctgcccccaacttcaaagccacagctgttatgccagatggtcagtttaaagatatcagcctgtctgactacaaaggaaaatatgttgtgttcttcttttaccctcttgacttcacctttgtgtgccccacggagatcattgctttcagtgatagggcagaagaatttaagaaactcaactgccaagtgattggtgcttctgtggattctcacttctgtcatctagcatgggtcaatacacctaagaaacaaggaggactgggacccatgaacattcctttggtatcagacccgaagcgcaccattgctcaggattatggggtcttaaaggctgatgaaggcatctcgttcaggggcctttttatcattgatgataagggtattcttcggcagatcactgtaaatgacctccctgttggccgctctgtggatgagactttgagactagttcaggccttccagttcactgacaaacatggggaagtgtgcccagctggctggaaacctggcagtgataccatcaagcctgatgtccaaaagagcaaagaatatttctccaagcagaagtgagcgctgggctgttttagtgccaggctgcggtgggcagccatgagaacaaaacctcttctgtattttttttttccattagtaaaacacaagacttcagattcagccgaattgtggtgtcttacaaggcaggcctttcctacagggggtggagagaccagcctttcttcctttggtaggaatggcctgagttggcgttgtgggcaggctactggtttgtatgatgtattagtagagcaacccattaatcttttgtagtttgtattaaacttgaactgag

SEQ ID NO: 221 - protein, 199 aa, Homo sapiens
MSSGNAKIGHPAPNFKATAVMPDGQFKDISLSDYKGKYVVFFFYPLDFTFVCPTEIIAFSDRAEEFKKLNCQVIGASVDSHFCHLAWVNTPKKQGGLGPMNIPLVSDPKRTIAQDYGVLKADEGISFRGLFIIDDKGILRQITVNDLPVGRSVDETLRLVQAFQFTDKHGEVCPAGWKPGSDTIKPDVQKSKEYFSKQK

SEQ ID NO: 222 - DNA, 1646 bp, Homo sapiens
gctcggctcactgagacccggtggtccagacgctgctcctggctggggtggcgctgcagggagaaccgcgagctctcaggggtcggcgggtgacttctttccggaagaaagcgaggaacgcgctctgcggggtgagccggactccccaactccggacgatcagcccaggactgagagccccgaagtccccaaccacaagtaagcggccccagaaggacaagtctaggtcgccgtccagagcgccatggccgcgcccgcccttcgtttgtgccacatcgccttccacgtgcccgccgggcagcccctagcccggaacctgcagcgcctcttcggcttccagcccctggcttcgcgggaggtggacggctggcggcagctagccctgcgcagcggcgacgcggtctttttggtgaacgagggcgcagggtctggagagccgctgtacggcctggatccgcgtcacgccgtgcccagcgccacaaacctgtgcttcgacgtggcggacgccggcgctgcaacccgggagctggcagcgctgggctgcagcgtgcctgtccctcccgttcgcgtgcgggacgcgcagggtgccgccacttacgccgtggtcagctcgcctgccggcatcctcagcctgaccttgctggagcgcgctggctaccgcggacccttcctacccggcttcaggcccgtgtcctctgcgcctggccccgggtgggtcagccgcgtggaccacctgaccttggcctgcacccccggcagctcccccacacttttgcgctggttccacgactgcctgggcttttgccacttgccgctgagcccaggtgaggatcccgagctgggcctcgaaatgacagcagggtttgggcttgggggactgaggcttacagccctgcaggcccagccgggcagcattgtccccactcttgttctggctgagtcccttccgggggcgacgacacgacaggaccaggtggagcagttcctggcccggcacaaggggccaggcctgcagcacgtggggctgtatacgcctaacattgtggaggccactgagggggtggcaactgctggaggccagttcctggctccccctggggcatactaccagcagccaggaaaggagaggcagatccgagctgcagggcacgagcctcatctgcttgctcgacaggggatcctgctagatggtgataaaggcaagtttctgcttcaggtcttcaccaagtccctttttactgaggacactttcttcctggagctgattcagaggcagggggccactggctttggtcagggcaacatcagagctctgtggcagtccgtacaggagcaatctgccaggagccaggaagcctaaggatgcccagggctgggtgcagccagctgtcctgcagctctggggagaccagcacagaactgaggaacatctgcaggaggcccaactagtgaaaggctttgcctccggggggcaggtgtgacttccatttcatcagtgcctgccagaagctgtgtctctcattgggctccaaagaggtgggattttttaaaactaaaacatttcttatatacagtctataataaatatgtaagatacaaagaacaataaaagaattacacactaggaaaaaaaaaaaaaaaaaaaa

SEQ ID NO: 223 - protein, 371 aa, Homo sapiens
MAAPALRLCHIAFHVPAGQPLARNLQRLFGFQPLASREVDGWRQLALRSGDAVFLVNEGAGSGEPLYGLDPRHAVPSATNLCFDVADAGAATRELAALGCSVPVPPVRVRDAQGAATYAVVSSPAGILSLTLLERAGYRGPFLPGFRPVSSAPGPGWVSRVDHLTLACTPGSSPTLLRWFHDCLGFCHLPLSPGEDPELGLEMTAGFGLGGLRLTALQAQPGSIVPTLVLAESLPGATTRQDQVEQFLARHKGPGLQHVGLYTPNIVEATEGVATAGGQFLAPPGAYYQQPGKERQIRAAGHEPHLLARQGILLDGDKGKFLLQVFTKSLFTEDTFFLELIQRQGATGFGQGNIRALWQSVQEQSARSQEA

SEQ ID NO: 224 - DNA, 601 bp, Homo sapiens
gaccacgatgagtgtgccgcacttccggccagatcgccggatttccgctgagtgacccttacaagtccttcttgatcctgaactgggttaggtgccgctgttgctgctcgtgttgaatctagaaccgtagccagacatgggactggaggacgagcaaaagatgcttaccgaatccggagatcctgaggaggaggaagaggaagaggaggaattagtggatcccctaacaacagtgagagagcaatgcgagcagttggagaaatgtgtaaaggcccgggagcggctagagctctgtgatgagcgtgtatcctctcgatcacatacagaagaggattgcacggaggagctctttgacttcttgcatgcgagggaccattgcgtggcccacaaactctttaacaacttgaaataaatgtgtggacttaattcaccccagtcttcatcatctgggcatcagaatatttccttatggttttggatgtaccatttgtttcttatttgtgtaactgtaagttcacatgaacctcatgggtttggcttaggctggtagcttctatgtaattcgcaatgattccatctaaataaaagttctatgatctgc

SEQ ID NO: 225 - protein, 91 aa, Homo sapiens
MGLEDEQKMLTESGDPEEEEEEEEELVDPLTTVREQCEQLEKCVKARERLELCDERVSSRSHTEEDCTEELFDFLHARDHCVAHKLFNNLK

SEQ ID NO: 226 - DNA, 1750 bp, Homo sapiens
cgcgcctgaggaggaggaggaggcgggggcggccatggctgctgtggtggtggcggctgcgggtggcgcgggaccggcggtcctgcaggtggccggtctctaccggggcctgtgcgcggtgcgcagccgcgccctgggcctggggctcgtgtcacccgcgcagctgcgcgtcttcccagtgcgccccggctcgggccggcccgaggggggcgccgacagcagcggggtcggggccgaggccgagctccaggccaaccctttctacgaccgctaccgcgacaagatccagctgctgcgcaggtcagacccagctgcttttgagtcccgcctggagaaacgcagtgaatttcggaagcagccagtggggcattccaggcaaggtgattttatcaaatgtgtggaacagaagacagatgccttggggaaacagtctgtgaacagaggattcactaaggacaagactctcagttcaatctttaacattgagatggtaaaagaaaaaactgcagaagaaataaaacagatttggcagcaatattttgcagcaaaagatacagtctacgcagttattcctgcagaaaagtttgatttgatctggaaccgggctcagtcctgtccaacatttctatgtgctctgccaagaagggaaggttatgagttttttgtaggacaatggacaggtactgaactccacttcactgcacttataaatattcagacccgaggggaagctgcagccagccagctgattttatatcactatcctgaacttaaggaagaaaagggcatagtgctgatgactgcagaaatggattccacatttctgaatgttgctgaggcacagtgcatcgccaaccaagttcagctcttctacgctactgatcggaaagagacctacgggttagtggagacctttaacctcagaccaaatgagttcaaatatatgtctgtcatcgctgaattggagcaaagcggacttggagcagaactgaaatgtgcccagaaccaaaataagacttagaactgtacaggttggcccttcacctagttgactcagccctcgatagtctagagcccaccccctcctcaggaactcaagagctcagcatttataatgagcagttggtaatgagttgccctatgtgcttgtcgcaagcagtcacagagatgagccctattacttgatattcaggaacaaaggtacctgaacattctgataattatctcagcatacttgaggtttccttttttaagtgttcgaggttataacaagagacagccaaggacctacaagacagttgacttgattttgcacagtgtaacagcgcagttgcattctggccactttgaccttatagctcccaaatgatgagtttgtcatctttatgaactcatgacaggataataagcttgaagacctgctgtagttagatatgggctttaatccttcccaggcaccagtcagctgaacaaaagcataagccaaacatcctgtttaaactgtagaataaccagatattcccatcaggttaaagacttcatctagatgatgccccccagagatgcctttagtgtaagtagctggcttggggtatcagcaaatttcaggtatagttagataaacaggtacagggcctgcatactattaaaccatagtttgtggcacccgcttttctaactccacctgttagaagctatgtgtttgaaggaatgaatcagtgcagtataaataaaattcttttgtaaggag

SEQ ID NO: 227 - protein, 328 aa, Homo sapiens
MAAVVVAAAGGAGPAVLQVAGLYRGLCAVRSRALGLGLVSPAQLRVFPVRPGSGRPEGGADSSGVGAEAELQANPFYDRYRDKIQLLRRSDPAAFESRLEKRSEFRKQPVGHSRQGDFIKCVEQKTDALGKQSVNRGFTKDKTLSSIFNIEMVKEKTAEEIKQIWQQYFAAKDTVYAVIPAEKFDLIWNRAQSCPTFLCALPRREGYEFFVGQWTGTELHFTALINIQTRGEAAASQLILYHYPELKEEKGIVLMTAEMDSTFLNVAEAQCIANQVQLFYATDRKETYGLVETFNLRPNEFKYMSVIAELEQSGLGAELKCAQNQNKT

SEQ ID NO: 228 - DNA, 2436 bp, Homo sapiens
acctgccctcatcctggcccgcgactgtaagaccggacccacatccagaccaatcttcctgtccggctgctgcgacgcggtccgcaggttgcaggcgggcggccggggcgcctgaaggttaccgagtgcatgacggcctcagttcccgcgctgccccgcccgctggcccgccgacctccccgccgctcgcccgccagcccctcgggcccggcggcggcggcggcggtggcggcgacggtcgcaggaggtgccgtctgcctcccaggtgcgcgcttcgctcccggagccgcggaactcggtcgcgccatggcgtccaacatggaccgggagatgatcctggcggattttcaggcatgtactggcattgaaaacattgacgaagctattacattgcttgaacaaaataattgggacttagtggcagctatcaatggtgtaataccacaggaaaatggcattctacaaagtgaatatggaggtgagaccataccaggacctgcatttaatccagcaagtcatccagcttcagctcctacttcctcttcttcttcagcgtttcgacctgtaatgccatccaggcagattgtagaaaggcaacctcggatgctggacttcagggttgaatacagagacagaaatgttgatgtggtacttgaagacacctgtactgttggagagattaaacagattctagaaaatgaacttcagatacctgtgtccaaaatgctgttaaaaggctggaagacgggagatgtggaagacagtacggtcctaaaatctctacacttgccaaaaaacaacagtctttatgtccttacaccagatttgccaccaccttcatcatctagtcatgctggtgccctgcaggagtcattaaatcaaaacttcatgctgatcatcacccaccgagaagtccagcgggagtacaacctgaacttctcaggaagcagtactattcaagaggtaaagagaaatgtgtatgaccttacaagtatccccgttcgccaccaattatgggagggctggccaacttctgctacagacgactcaatgtgtcttgctgaatcagggctctcttatccctgccatcgacttacagtgggaagaagatcttcacctgcacagacccgggaacagtcggaagaacaaatcaccgatgttcatatggttagtgatagcgatggagatgactttgaagatgctacagaatttggggtggatgatggagaagtatttggcatggcgtcatctgccttgagaaaatctccaatgatgccagaaaacgcagaaaatgaaggagatgccttattacaatttacagcagagttttcttcaagatatggtgattgccatcctgtattttttattggctcattagaagctgcttttcaagaggccttctatgtgaaagcccgagatagaaagcttcttgctatctacctccaccatgatgaaagtgtgttaaccaacgtgttctgctcacaaatgctttgtgctgaatccattgtttcttatctgagtcaaaattttataacctgggcttgggatctgacaaaggactccaacagagcaagatttctcactatgtgcaatagacactttggcagtgttgtggcacaaaccattcggactcaaaaaacggatcagtttccgcttttcctgattattatgggaaagcgatcatctaatgaagtgttgaatgtgatacaagggaacacaacagtagatgagttaatgatgagactcatggctgcaatggagatcttcacagcccaacaacaggaagatataaaggacgaggatgaacgtgaagccagagaaaatgtgaagagagagcaagatgaggcctatcgcctttcacttgaggctgacagagcaaagagggaagctcacgagagagagatggcagaacagtttcgtttggagcagattcgcaaagaacaagaagaggaacgtgaggccatccggctgtccttagagcaagccctgcctcctgagccaaaggaagaaaatgctgagcctgtgagcaaactgcggatccggacccccagtggcgagttcttggagcggcgtttcctggccagcaacaagctccagattgtctttgattttgtagcttccaaaggatttccatgggatgagtacaagttactgagcacctttcctaggagagacgtaactcaactggacccaaataaatcattattggaggtaaagttgttccctcaagaaacccttttccttgaagcaaaagagtaaacacggcccagcggtggaaccagccattccttgacaagccagcagcctgcgtcaggagaagggctcctcgccaacccacccacacgctcgtctcactcaattcaatgtcacacttctgcctcttgcaaaattgctggaaaaagtaataataaatatagctacttaaaaaaaaaaaaa

SEQ ID NO: 229 - DNA, 2104 bp, Homo sapiens
ctctgccgagcctccttaaaactctgccgttaaaatgggggcgggtttttcaactcaaaaagcgctcaatttttttcttttcaaaaaaagctgatgaggtcggaaaaaagggagaagaaaccggcaccctctctgagaggcaacagaagcagcaattgtttcagcgaaaaaagcagcaagggagggagtgaaggaaaaaagcaaaaaagggggcgacacgcaagtgcctgtaggggtgaaaggagcagggaccggcgatctagggggggatcagctacaaaagaaactgtcactgggagcggtgcggccaaggaggaagcagtgctgccaggctctgctccagggcacagctggctggcggctgccctgtccgcagcaaaggggcacaggccggggaccgcgagaggtggcaaagtggcaccgggcgccgaggctgctgagcgctcgccgagacggcgaccggactggctgccccggaactgcggcgactctccctactcagaacttggcctacgtttcccaggactctccccatctccagaggcccccacaaaaccgggaaaggaaggaaaggacagcggcggcagcagctcaatgagtgcctacagcagaaagcctgaacgagctcggtcgtaggcgggaagttcccgggggggctgcccagtgcagccgcaatgctgccgcgagctgccccagcagtccgggctccgtagacgctttccgcatcactctccttcctcgggctgccgggagtcccgggacctggcggggccggcatgacgggcttctcgggggcccgccgcacgcccggcagcctccggagacgcgcgccgagcccggctcccacggcctctgaggctcggcggggctgcggctgcctggcgggcgggctccggagctttcctgagcggcattagcccacggcttggcccggacgcgaccaaaggctcttctggagaagcccagagcactgggcaatcgttacgacctgtaacttgagggccaccgaactgctactcccgttcgcctttggcgatcatcttttaaccctccggagcacgtcagcatccagccaccgcggcgctctcccagcagcggaggacccaggactatcccttcggcgagacggatggaaaccgagccccctggaggacctgcccctgcagttctgcctcacacggctcaagtcaccaccgtgaacaagggaccctaaagaatggccgagccttgggggaacgagttggcgtccgcagctgccaggggggacctagagcaacttactagtttgttgcaaaataatgtaaacgtcaatgcacaaaatggatttggaaggactgcgctgcaggttatgaaacttggaaatcccgagattgccaggagactgctacttagaggtgctaatcccgatttgaaagaccgaactggtttcgctgtcattcatgatgcggccagagcaggtttcctggacactttacagactttgctggagtttcaagctgatgttaacatcgaggataatgaagggaacctgcccttgcacttggctgccaaagaaggccacctccgggtggtggagttcctggtgaagcacacggccagcaatgtggggcatcggaaccataagggggacaccgcctgtgatttggccaggctctatgggaggaatgaggttgttagcctgatgcaggcaaacggggctgggggagccacaaatcttcaataaacgtggggagggctcccccacgttgcctctactttatcaattaactgagtagctctcctgacttttaatgtcatttgttaaaatacagttctgtcatatgttaagcagctaaattttctgaaactgcataagtgaaaatcttacaacaggcttatgaatatatttaagcaacatctttttaacctgcaaaatctgttctaacatgtaattgcagataactttgactttcttctgaatattttatctttccttggcttttcccttgcttccccttttgccaatctcaacacccaagttgaagactttgtttttaaaatggtttgtcctgatgcttttgtctaattaaaacactttcaaaacaggaaaaaaaaaaaaaaaaaa

SEQ ID NO: 230 - protein, 168 aa, Homo sapiens
MAEPWGNELASAAARGDLEQLTSLLQNNVNVNAQNGFGRTALQVMKLGNPEIARRLLLRGANPDLKDRTGFAVIHDAARAGFLDTLQTLLEFQADVNIEDNEGNLPLHLAAKEGHLRVVEFLVKHTASNVGHRNHKGDTACDLARLYGRNEVVSLMQANGAGGATNLQ

SEQ ID NO: 231 - DNA, 921 bp, Homo sapiens
aaaacaccaaatggtggatgacaccagtgcagcgggggggggcccggaggccctgggatggggaactgcggtggcttccgcggaggtttcggcagtggcatccggggccggggtcgcagccgtagacggggccggggccgaggccgcggagctcgcggaggcaaggccgaggataaggagtggatgcccgtcaccaagctgggctgcttggtgaaggacatgaagatcaagtccctggaggagatctatctcttctccctgcccattaaggaatcagagatcattgactttttcctgggggcctctctcaaggatgaggttttgaagattatgccagtgcagacgcagacccgtgctggccagcgcaccaggttcaaggcgtttgttgctatcggggactacaatggccacgtcggtctgggtgttaagtgctccaaggaggtggccaccgccatccatggggccatcatcctggccaagctctccattgtccccgtgcgcagaggctactgggggaacaagattggcaagccccacaccgtcccttgcaaggtgacaggccgctgcggctctgcactggtgcacctcatccctgtacccaggggcactggcattgtctccgcacctgtgcccaagaagctgctcatgatggctggtatcgatgactgctgcacctcagcctggggctgcactgccaccctgggcaacttcgccaaggccacctttgatgccatttctaagacctacagctacctgacccccgacctctggaaggagactgtatttaccaagtctcccgatcaggaattcactgaccacctcatcaaggcccacgccagagtctccgtgcagcggacccaggctccagctgtggctacaacatagggtttttagacaaggaaaataaagcgaattaagcgt

SEQ ID NO: 232 - protein, 275 aa, Homo sapiens
MGNCGGFRGGFGSGIRGRGRSRRRGRGRGRGARGGKAEDKEWMPVTKLGCLVKDMKIKSLEEIYLFSLPIKESEIIDFFLGASLKDEVLKIMPVQTQTRAGQRTRFKAFVAIGDYNGHVGLGVKCSKEVATAIHGAIILAKLSIVPVRRGYWGNKIGKPHTVPCKVTGRCGSALVHLIPVPRGTGIVSAPVPKKLLMMAGIDDCCTSAWGCTATLGNFAKATFDAISKTYSYLTPDLWKETVFTKSPDQEFTDHLIKAHARVSVQRTQAPAVATT

SEQ ID NO: 233 - DNA, 711 bp, Homo sapiens
atgtctaagtcagaatctcttaaagagcccgaacagctgcagaaactcctcactggagggttgagcattgaagcaaccaatgagagcctgaggagccattttgagcaatggggaacgctcacggactgtgtggtcctgagagatccaaacactaagtgctccaggggctttgggtttgtcacatatgccactgtggaggaggtggatgcagccacaaatgcaaggccacacaaggtggatggaagagttgtggaaacaaagagagctgtctcaagagaagattcccaaagaccaggtgctcacttaactgtgaaaaagtttggaaaaatggaagtgattgaaatcatgactgaccatggcagtggcaagaaaagggactttgcctttgtaacctttgatgaccatgactccgtggataagactgtcattcagaaataccatattgtgaatggccacaactgtgaagttaggaaagccctgtcaaagcaagagatggctagtgcttcatccagccaaagaggtcgaacaggctccttgatgcctaaagcccaatgtctggcattcgagccctccatgacaggttcccagctttcctgcaaggccatgctcctcacggcctatgactgcctcctgttctgcgcctgtcaggtcttccacctcacccctcttctcagcctatccaagcccattcagtcttcaggcgagctctag

SEQ ID NO: 234 - protein, 236 aa, Homo sapiens
MSKSESLKEPEQLQKLLTGGLSIEATNESLRSHFEQWGTLTDCVVLRDPNTKCSRGFGFVTYATVEEVDAATNARPHKVDGRVVETKRAVSREDSQRPGAHLTVKKFGKMEVIEIMTDHGSGKKRDFAFVTFDDHDSVDKTVIQKYHIVNGHNCEVRKALSKQEMASASSSQRGRTGSLMPKAQCLAFEPSMTGSQLSCKAMLLTAYDCLLFCACQVFHLTPLLSLSKPIQSSGEL

SEQ ID NO: 235 - DNA, 2572 bp, Homo sapiens
cggtcccgcactggtgcagccatgtcctcttccccgtgggagcctgcgaccctgcgccgggtgttcgtggtgggggttggcatgaccaagtttgtgaagcctggagctgagaattcaagagactaccctgacttggcagaagaagcaggcaagaaggctttagctgatgcacagatcccttattcagcagtggaccaggcatgtgttggctatgtttttggtgactctacctgtgggcagagggctatctatcacagtttgggaatgactggaattcctataatcaatgtcaacaataactgtgctactggttctactgctttgtttatggcccgccagctgattcagggtggtgtggcagaatgtgtcttggctcttgggtttgagaagatgagtaagggaagccttggaataaaattttcagatagaaccattcccactgataagcatgttgacctcctgatcaataagtatggattgtctgctcacccagttgctcctcagatgtttgggtatgctggaaaagaacatatggaaaaatatggaacaaaaattgaacactttgcaaaaattggatggaaaaatcataaacattcagttaataacccgtattcccagttccaagatgaatacagtttagatgaagtgatggcatctaaagaagtttttgattttttgactatcttacaatgttgtcccacttcagatggtgctgcagcagcaattttggccagtgaagcatttgtacagaagtatggcctgcaatccaaagctgtggaaattttggcacaagaaatgatgactgatttgccaagctcgtttgaagaaaaaagcattattaaaatggttggctttgatatgagtaaagaagctgcaagaaaatgctatgagaaatctggcctgacaccaaatgatattgacgtaatagaacttcacgattgcttttctaccaacgaactcctgacttatgaagcactcggactctgtccagaaggacaaggtgcaacgctggttgatagaggagataatacatatggaggaaagtgggtcataaatcctagtggtggactgatttcaaagggacacccactaggcgctacaggtcttgctcagtgtgcagaactctgctggcagctgagaggggaagccggaaagaggcaagttcctggtgcaaaggtggctctgcagcataatttaggcattggaggagctgtggttgtaacactctacaagatgggttttccggaagccgccagttcttttagaactcatcaaattgaagctgttccaaccagctctgcaagtgatggatttaaggcaaatcttgtttttaaggagattgagaagaaacttgaagaggaaggggaacagtttgtgaagaaaatcggtggtatttttgccttcaaggtgaaagatggccctgggggtaaagaggccacctgggtggtggatgtgaagaatggcaaaggatcagtgcttcctaactcagataagaaggctgactgcacaatcacaatggctgactcagacttcctggctttaatgactggtaaaatgaatcctcagtcggccttctttcaaggcaaattgaaaatcactggcaacatgggtctcgctatgaagttacaaaatcttcagcttcagccaggcaacgctaagctctgaagaactccctttggctacttttgaaaatcaagatgagatatatagatatatatccatacattttattgtcagaatttagactgaaactacacattggcaaatagcgtggataggatttgtttcttaatgggtgtgaccaatcctgtttttcctatgctctgggtgaatagagcctgatggtatactactgctttgcggaattgcatacaactgtgcattacaaagttaatatggtaattatggtctggggtaaaattgagtttcagaataaaattaggaacagtaaaatccaaagaactatgtaaacaaaaaagcttttgttttgcttacaaagtatatttaaggattattctgctgaagattcagtttaagagttttccttgggagaactaagtaagaaacacaatgccaacagctggccagtaattagtgttgtgcacttcatgtcattaatcaatttctcaatagttcttaaaattagtgagattaaaaatctaaaaattttgcatttcatgctatcagaaacagtattttcttcccaaatcaaaataaaagaaatatgatcagagcttgaacacaggcttatttttaaaataaaaatatttttaacatgggtttccttattgaaaaatcagtgtattagtcataaaacaccatcattaagaataattgaacaataaagtttgctttcagatgcagttttcaaattataatctcatttcaatttataacgttctcagtcctttgttataattttcctttttcatgtaagtttaattatctgcatttatcttttttcctagtttttctaatactaatgttatttcttaaaattcagtgagatataggataaaataatgctttgagaagaatgtttaatagaaaattaaaataactttttctggca

SEQ ID NO: 236 - protein, 547 aa, Homo sapiens
MSSSPWEPATLRRVFVVGVGMTKFVKPGAENSRDYPDLAEEAGKKALADAQIPYSAVDQACVGYVFGDSTCGQRAIYHSLGMTGIPIINVNNNCATGSTALFMARQLIQGGVAECVLALGFEKMSKGSLGIKFSDRTIPTDKHVDLLINKYGLSAHPVAPQMFGYAGKEHMEKYGTKIEHFAKIGWKNHKHSVNNPYSQFQDEYSLDEVMASKEVFDFLTILQCCPTSDGAAAAILASEAFVQKYGLQSKAVEILAQEMMTDLPSSFEEKSIIKMVGFDMSKEAARKCYEKSGLTPNDIDVIELHDCFSTNELLTYEALGLCPEGQGATLVDRGDNTYGGKWVINPSGGLISKGHPLGATGLAQCAELCWQLRGEAGKRQVPGAKVALQHNLGIGGAVVVTLYKMGFPEAASSFRTHQIEAVPTSSASDGFKANLVFKEIEKKLEEEGEQFVKKIGGIFAFKVKDGPGGKEATWVVDVKNGKGSVLPNSDKKADCTITMADSDFLALMTGKMNPQSAFFQGKLKITGNMGLAMKLQNLQLQPGNAKL

SEQ ID NO: 237 - DNA, 1460 bp, Homo sapiens
ggccctgcgcgcggcaacatggcggggtccaggtggaggtcttgaggctatcagatcggtatggcattggcgtccgggcccgcaaggcgggcgctagctggctccgggcagctcggccttgggggcttcggggccccgagacgcggggcgtatgagtggggcgtgcgctccacgcggaagtcggagcctcctcccctggatagggtgtacgagatccctggactggagcccatcacctttgcggggaagatgcacttcgtgccctggctggcgcggccgatctttccgccctgggaccgcggctacaaggacccaaggttctaccgctcgccccctcttcacgagcatccgctgtacaaagaccaggcctgctatatctttcaccaccgttgccgccttctcgagggtgtaaagcaggccctctggctcaccaagaccaagttaatagaaggccttcccgagaaagtgcttagccttgttgatgatccaaggaaccacatagagaaccaagacgagtgcgttctgaatgtgatctctcacgcccgtctctggcagaccactgaggaaatccccaagagagagacctactgcccggtcatcgtggacaacctaatacagctgtgtaaatctcagattctcaagcatccttctctggccaggaggatctgtgtccaaaactccacgttttctgctacctggaaccgagagtctcttctccttcaagtccgtggttctggtggagcccgactgagcactaaggatcctctgcccaccatcgcctccagagaggagattgaagctactaagaatcatgttctagagaccttctaccccatatcacccatcatcgatcttcatgaatgcaatatttatgatgtgaaaaatgacacaggattccaggaaggctatccttacccctatccccataccctgtacttactggacaaagccaatttacgaccacaccgccttcaaccagatcagctgcgggccaagatgatcctgtttgcttttggcagtgccctggctcaggcccggctcctctatgggaatgatgccaaggtcttggagcagcccgtggtggtgcagagcgtgggcacggatggacgtgtcttccatttcctagtgtttcaactgaataccacagacctggactgtaacgagggtgtcaagaatttggcctgggtggactcagaccagctcctctatcagcatttttggtgtctcccagtgatcaaaaagagagtggttgtggaacctgttgggccagttggtttcaagccagagacattcagaaagtttttagctctatatttgcatggtgctgcgtgagcggaggacccctctgaatcctgaaacccctcttgcctctcttccacggaagagggcctgggccccgtggagcctcagtgcccgtttggcctgctgctctcgctgacaataaagagcccttgcgttgc

SEQ ID NO: 238 - protein, 423 aa, Homo sapiens [sequence omitted]

SEQ ID NO: 239 - DNA, 1561 bp, Homo sapiens
ccgcggccggggctgacgctttgacagctggaaagagcgcggagccagcgcctgggggggagggaggggagcgcggcgaggagagcgccagcgagcgagagagcgagcgagcgccggggagggggccgggagcgaggggcagctcgggagagccggagcggtagcggcggcggcggcggcggcggcgaggctcggcgccctcttccctgcaaaccatgtttgccaaaggcaaaggctcggcggtgccctcggatgggcaggctcgggaaaagttagctttatacgtctacgaatatttactgcacgtaggagcacagaaatctgcacagaccttcttatcggagattcgatgggaaaaaaacatcacgttgggagaaccgcctgggtttttgcactcgtggtggtgtgtattttgggacctttactgtgcagctcctgaaaggagagacacttgtgaacattcaagtgaagcaaaagcctttcatgattatagtgcagcagctgccccgagccccgtgcttggcaacattccccccaacgatgggatgccgggaggccccatcccgccaggtttctttcagggtcctccggggtcacagccctcgccgcacgcacagcctccacctcacaatcctagcagcatgatgggaccccacagtcagcctccgggaggagttcctgggacacagccattgctgcccaattctatggatcccacacgacaacaaggccaccccaacatgggaggatcaatgcagagaatgaaccctccccgaggcatggggcccatgggtcccggcccacagaattacggcagcggcatgagaccaccacccaactccctcggccccgccatgcccgggattaacatgggcccgggagctggcagaccctggcccaatcctaacagtgctaactcaattccatactcctcctcatcacctggtacctatgtgggaccccctggtggtggcggtcctccaggaacacccattatgcccagtcccgcagattcaacaaattccagtgacaacatctacacaatgattaatccagtgccgcctggaggcagccggtccaacttcccgatgggtcccggctcggacggtccgatgggcggcatgggtggcatggagccacaccacatgaatggatcattagggtcaggcgacatagacggacttccaaaaaattctcctaacaacataagtggcattagcaatcctccaggcacccctcgagatgacggcgagctaggagggaacttcctccactcctttcagaacgacaattattctccaagcatgacgatgagtgtgtgatccccccttctccgagacgctgagagagcaggcattgcaggcgggaagatgccagaaattatgcaagaagtgaggtgtcattatccaggagctggtggggagggcatctccctgctcccctcaaccccctcccaccccatccacgccccctacctttcccaattttagtttcatgcaataaaaaggccaaactttttattccataaaacaaaaaaaaaaaaaaaaaaaaaaaaaaaaaa

SEQ ID NO: 240 - protein, 368 aa, Homo sapiens
MFAKGKGSAVPSDGQAREKLALYVYEYLLHVGAQKSAQTFLSEIRWEKNITLGEPPGFLHSWWCVFWDLYCAAPERRDTCEHSSEAKAFHDYSAAAAPSPVLGNIPPNDGMPGGPIPPGFFQGPPGSQPSPHAQPPPHNPSSMMGPHSQPPGGVPGTQPLLPNSMDPTRQQGHPNMGGSMQRMNPPRGMGPMGPGPQNYGSGMRPPPNSLGPAMPGINMGPGAGRPWPNPNSANSIPYSSSSPGTYVGPPGGGGPPGTPIMPSPADSTNSSDNIYTMINPVPPGGSRSNFPMGPGSDGPMGGMGGMEPHHMNGSLGSGDIDGLPKNSPNNISGISNPPGTPRDDGELGGNFLHSFQNDNYSPSMTMSV

SEQ ID NO: 241 - DNA, 1364 bp, Homo sapiens
atgtacgcctttgtgcggttcctggaggacaacgtctgctacgcgctgcccgtgtcgtgcgtgcgcgacttcagcccccgctcgcggctggattttgacaaccagaaggtgtacgccgtgtaccggggcccggaggaattgggcgccgggcccgagagccccccgcgcgccccccgcgactggggcgcgctgttgctccacaaggcccagatcctggcgctggcagaagacaaatctgaccttgaaaacagtgtgatgcagaagaaaataaaaatccccaagctttctcttaatcatgtagaagaagatggagaggttaaagattatggggaagaagatttacagcttagacacatcaaggattgtctggggaaatattgatctgcagtccaagaaaatcccagctgcccttgcctgaactgattctcgttgtcctacacagagacctgaggggcggaagccgagcgaagtggcgcacaagagcatcgaggcagtggtggctcggctagagaagcagaacggcctgagcctgggccatagcacgtgtccggaagaggtcttcgtggaggcctcgccaggcacagaggacatggacagtctagaagatgctgtggtgccccgggctctgtatgaggagctgctgcgcaactaccagcagcaacaggaagagatgcgccacctccagcaggagctggagcggactcggaggcagctggtacaacaggccaagaagctcaaggagtacggggcacttgtgtctgaaatgaaggagctccgtgaccttaaccggaggctccaggacgtgctgctcctgaggcttggcagcggtcccgccattgatctggaaaaagtaaagtcagaatgtctcgagcccgagccggagttacggagcactttcagtgaggaagcaaatacgtcgtcctattaccccgctcctgcgcctgtcatggacaagtatatcctagacaatggcaaggtccatctgggaagcgggatttgggttgatgaggagaaatggcaccagctacaagtaacccaaggagattccaagtacacgaagaacttggcagttatgatttggggaacagatgttctgaaaaacagaagcgtcacaggcgtcgccacaaaaaaaaagaaagatgcagtccctaaaccacccctctcgcctcgcaaactaagcatcgtcagagagtgtttgtatgacagaatagcacaagaaactgtggatgaaactgaaattgcacagagactctccaaagtcaacaagtacatctgtgaaaaaatcatggatatcaataaatcctgtaaaaatgaagaacgaagggaagcaaaatacaatttgcaataaactttggatttttcat

SEQ ID NO: 242 - protein, 252 aa, Homo sapiens
MDSLEDAVVPRALYEELLRNYQQQQEEMRHLQQELERTRRQLVQQAKKLKEYGALVSEMKELRDLNRRLQDVLLLRLGSGPAIDLEKVKSECLEPEPELRSTFSEEANTSSYYPAPAPVMDKYILDNGKVHLGSGIWVDEEKWHQLQVTQGDSKYTKNLAVMIWGTDVLKNRSVTGVATKKKKDAVPKPPLSPRKLSIVRECLYDRIAQETVDETEIAQRLSKVNKYICEKIMDINKSCKNEERREAKYNLQ

SEQ ID NO: 243 - DNA, 346 bp, Homo sapiens
cctttcgttgcctgatcgccgccatcatgggtcgtatgcgtgctcctgagaagggcctgtcccagtcggctttaccctatcgacgcagcttccccacttggttgaagttgacatctgacgacgtgaaggagcagatttacaaactggccaagaagggccttactccttcacagatcggtgtaatcgtgagagaatcacatggtgttgcacaagtacgttttgtgacaggcaatctctaccatttaattaagaaagcagttgctgttcaaagcatcttgagaggaacagaaaggataaggatgctaaattccatctgattctgatagagagccagattcaccgtttg

SEQ ID NO: 244 - DNA, 534 bp, Homo sapiens
cgccgccatcatgggtcgtatgcgtgctcctgagaagggcctgtcccagtcggctttaccctatcgacgcagcttccccacttggttgaagttgacatctgacgacgtgaaggagcagatttacaaactggccaagaagggccttactccttcacagatcggtgtaatcgtgagagaatcacatggtgttgcacaagtacgttttgtgacaggcaataaaattttaagaattcttaagtctaagggacttgctcctgatcttcctgaagatctctaccatttaattaagaaagcagttgctgttcaaagcatcttgagaggaacagaaaggataaggatgctaaattccatctgattctgatagagagccagattcaccgtttggctcaatattataagaccaagcgagtcctccctcccagttggaaatatgaatcatctacagcctctgccctggtcgcataaatttgtctgtgtactcaagcaataaaatgattgtttaactaaaataaaacaaaaacaaaaacaaaaaaa

SEQ ID NO: 245 - DNA, 2204 bp, Homo sapiens
agaagatgcttcaaattcaacccgagaaggatatcattgtagagtttatcaaaaatggagatttcaagtatgtccgcatgctgggggcactttacatgaggctgacaggcactgcaattgattgctacaagtacttggaacctttgtacaatgactatcgaaaaatcaagagccagaaccgaaatggggagtttgaattgatgcatgttgatgagtttattgatgaactattgcacagtgagagagtctgtgatatcattctgccccgactacagaaacgctatgtattagaggaagctgagcaactggagcctcgagttagtgctctggaagaggacatggatgatgtggagtccagtgaagaggaagaagaggaggatgagaagttggaaagagtgccatcacctgatcaccgccggagaagctaccgagacttggacaagccccgtcgctctcccacactgcgctacaggaggagtaggagccggtctcccagaaggcggagtcgatctcccaaaaggagaagcccctcccctcgccgagaaaggcatcggagcaagagtccaagacgtcaccgcagcaggtcccgagatcggcggcacagatcccgttccaagtccccaggtcatcaccgtagtcacagacacaggagccactcaaagtctcccgaaaggtctaagaagagccacaagaagagccggagagggaatgagtaatggactcagtttggttttagtccacatggcctcctgtggatataaggatatctgtatgtggaaggattaagatctcccccaggcagctataagaatattttagtttttttcttatcaagtttctcaacctttatttttaatgaaggaggtgctgagttttgtatctttttaatcataatcaacatcagtttttgacccaactaaccttgactgtattcaaacttatgagagtataaaggatctggaggttggggatatgactgacaaggaaaggctgtggccacctgatgaccctttccctttttattaaaccggacacacctgtttcccatttcgctgtagtttagtttttggtttgttgtggttggaactgctttgagaatcctgggatttgtgctgctgctgttattcaaagatcaaaggagtaaaacatagttgctcctaacttttttccagcagcagcaagtggtaataaacatgaaaactggtttgtagcagttttgaaagaatagaatgcattcaaatgtaaggctgcttctggatcattaaagccagtttcatcaaacagttcaacagagagcagcacttaataccctttatacagcccattttttcatagtttcatttgttcttgcccacaagcttgaaatccaggttaaggtatccagcctttatcatataagcattgacattatccaggcctagtcagtagcagtagggtaacgggattgaaaaagatttgatggagaggaaagtatctaatattagtcatggttttgacctaaattgctagacagtcgtgccattcacaaagtcagaaaatacagcaggaagagacagcttttagaggggcagagaattagaggatggtggtagtaatgaaaaagatgcattcagtttaacaagtttaatttgagacagctatggtatagctaaaaacaaaagcccataaagttggagatagggaccagagtttaacatagcgatctaggccagaattgacaatgtttaagtaatggtggaatctgtcaataagacttcccagagtgttaatatatatcagaaatgcacacaacagaaccataggcaacaccaacacaggaagaaatagaagtcacctattgaaaactggaatggcccattcagaaagacaggagaattaggagagagtgagtgaaagaagccaagggtcaagaatgcagaagcaaaggaaggactaaaaagcctccacggacatcgataatcaagagattattaagatctttgctagaagagttcctttacctgtacttaactcccttaaaaagagaaaagtgatggaatgacttctgcaactgtagtcccagcaggaactgtgaagaccagctgccctgcaggatccagtttttcttgggaggttgtatctggtcataaggtaaacattctatatattctatgcctgctctagaattgaaagacttcagcagtattaaagcattttttaatctt

SEQ ID NO: 246 - protein, 236 aa, Homo sapiens
MLQIQPEKDIIVEFIKNGDFKYVRMLGALYMRLTGTAIDCYKYLEPLYNDYRKIKSQNRNGEFELMHVDEFIDELLHSERVCDIILPRLQKRYVLEEAEQLEPRVSALEEDMDDVESSEEEEEEDEKLERVPSPDHRRRSYRDLDKPRRSPTLRYRRSRSRSPRRRSRSPKRRSPSPRRERHRSKSPRRHRSRSRDRRHRSRSKSPGHHRSHRHRSHSKSPERSKKSHKKSRRGNE

SEQ ID NO: 247 - DNA, 2911 bp, Homo sapiens
gttcgggccagatggcgtccatcatggaagggccgctgagcaaatggactaacgtgatgaagggctggcagtaccgttggttcgtgctggactacaatgcaggactgctctcctactacacgtccaaggacaaaatgatgagaggctctcgcagaggatgtgttagactcagaggagctgtgattggtatagacgatgaggacgacagcaccttcacaataactgttgatcagaaaaccttccatttccaggcccgtgatgctgatgagcgagagaagtggatccatgccttagaagaaacaattcttcgacatactctccagcttcaaggtttggattcaggatttgttcctagtgtccaagattttgataagaaacttacagaagctgatgcttacctacaaatcttgattgaacaattaaagctttttgatgacaagcttcaaaactgcaaagaagatgaacagagaaagaaaattgaaactctcaaagagacaacaaatagcatggtagaatcaattaaacactgcattgtgttgctgcagattgccaaagaccagagtaatgcggagaagcacgcagatggaatgataagtactattaatcccgtagatgcaatatatcaacctagtcctttggaacctgtgatcagcacaatgccttcccagactgtgttacctccagaacctgttcagttgtgtaagtcagagcagcgtccatcttccctaccagttggacctgtgttggctaccttgggacatcatcagactcctacaccaaatagtacaggcagtggccattcaccaccgagtagcagtctcacttctccaagccacgtgaacttgtctccaaatacagtcccagagttctcttactccagcagtgaagatgaattttatgatgctgatgaattccatcaaagtggctcatccccaaagcgcttaatagattcttctggatctgcctcagtcctgacacacagcagctcgggaaatagtctaaaacgcccagataccacagaatcacttaattcttccttgtccaatggaacaagtgatgctgacctgtttgattcacatgatgacagagatgatgatgcggaggcagggtctgtggaggagcacaagagcgttatcatgcatctcttgtcgcaggttagacttggaatggatcttactaaggtagttcttccaacgtttattcttgaaagaagatctcttttagaaatgtatgcagacttttttgcacatccggacctgtttgtgagcattagtgaccagaaggatcccaaggatcgaatggttcaggttgtgaaatggtacctctcagcctttcatgcgggaaggaaaggatcagttgccaaaaagccatacaatcccattttgggcgagatttttcagtgtcattggacattaccaaatgatactgaagagaacacagaactagtttcagaaggaccagttccctgggtttccaaaaacagtgtaacatttgtggctgagcaggtttcccatcatccacccatttcagccttttatgctgagtgttttaacaagaagatacaattcaatgctcatatctggaccaaatcaaaattccttgggatgtcaattggggtgcacaacatagggcagggctgtgtctcatgtctagactatgatgaacattacattctcacattccccaatggctatggaaggtctatcctcacagtgccctgggtggaattaggaggagaatgcaatattaattgttccaaaacaggctatagtgcaaatatcatcttccacactaaacccttctatgggggcaagaagcacagaattactgccgagattttttctccaaatgacaagaagtctttttgctcaattgaaggggaatggaatggtgtgatgtatgcaaaatatgcaacaggggaaaatacagtctttgtagataccaagaagttgcctataatcaagaagaaagtgaggaagttggaagatcagaacgagtatgaatcccgcagcctttggaaggatgtcactttcaacttaaaaatcagagacattgatgcagcaactgaagcaaagcacaggcttgaagaaagacaaagagcagaagcccgagaaaggaaggagaaggaaattcagtgggagacaaggttatttcatgaagatggagaatgctgggtttatgatgaaccattactgaaacgtcttggtgctgccaagcattaggttggaagatgcaaagtttatacctgatgatcagggcagtaggcataattcagcaacaaacaatcttcctttgggagaaacctgttcattccaatcttctaattacagtggttcctatctcagggatactggactttctgacgcagatgaacaattaaggggaaaagcttcccttttccctctgtggcagttacgattttgacttcagtcctgagaaaaacttcaggttttgaaaatcagatgatgtcttctccttttccaaacaccacacgttgaaagcatttataaatccaagtctgaaactctgcgctctagtactgctgttaagatacacaacttgtttcttagttcatataatctcgggatacacacacacacacacatatatatacacacacatacgtatacacacacatacatatatataaatatacctgatgccagatttttttcataaatattctgcctactgtaaatatgggttcctctgagttgttttagaaaattagcgcaatgtattaaaatcaagtgttaggaaatttcatggtcttacctacaataacttttattttggaattgaactattattaaattgtatctaatcctggattacagtttaattaattattcttagtgcttaaggcttcataaagtaatttttccaaccttttttttaaaaaaaaaaaaaa

SEQ ID NO: 248 - protein, 736 aa, Homo sapiens
MASIMEGPLSKWTNVMKGWQYRWFVLDYNAGLLSYYTSKDKMMRGSRRGCVRLRGAVIGIDDEDDSTFTITVDQKTFHFQARDADEREKWIHALEETILRHTLQLQGLDSGFVPSVQDFDKKLTEADAYLQILIEQLKLFDDKLQNCKEDEQRKKIETLKETTNSMVESIKHCIVLLQIAKDQSNAEKHADGMISTINPVDAIYQPSPLEPVISTMPSQTVLPPEPVQLCKSEQRPSSLPVGPVLATLGHHQTPTPNSTGSGHSPPSSSLTSPSHVNLSPNTVPEFSYSSSEDEFYDADEFHQSGSSPKRLIDSSGSASVLTHSSSGNSLKRPDTTESLNSSLSNGTSDADLFDSHDDRDDDAEAGSVEEHKSVIMHLLSQVRLGMDLTKVVLPTFILERRSLLEMYADFFAHPDLFVSISDQKDPKDRMVQVVKWYLSAFHAGRKGSVAKKPYNPILGEIFQCHWTLPNDTEENTELVSEGPVPWVSKNSVTFVAEQVSHHPPISAFYAECFNKKIQFNAHIWTKSKFLGMSIGVHNIGQGCVSCLDYDEHYILTFPNGYGRSILTVPWVELGGECNINCSKTGYSANIIFHTKPFYGGKKHRITAEIFSPNDKKSFCSIEGEWNGVMYAKYATGENTVFVDTKKLPIIKKKVRKLEDQNEYESRSLWKDVTFNLKIRDIDAATEAKHRLEERQRAEARERKEKEIQWETRLFHEDGECWVYDEPLLKRLGAAKH

SEQ ID NO: 249 - DNA, 4248 bp, Homo sapiens
cccgggctgtgggctacaggcgcagagcgggccaggcgcggagctggcggcagtgacaggaggcgcgaacccgcagcgcttaccgcgcggcgccgcaccatggagcccgccgtgtcgctggccgtgtgcgcgctgctcttcctgctgtgggtgcgcctgaaggggctggagttcgtgctcatccaccagcgctgggtgttcgtgtgcctcttcctcctgccgctctcgcttatcttcgatatctactactacgtgcgcgcctgggtggtgttcaagctcagcagcgctccgcgcctgcacgagcagcgcgtgcgggacatccagaagcaggtgcgggaatggaaggagcagggtagcaagaccttcatgtgcacggggcgccctggctggctcactgtctcactacgtgtcgggaagtacaagaagacacacaaaaacatcatgatcaacctgatggacattctggaagtggacaccaagaaacagattgtccgtgtggagcccttggtgaccatgggccaggtgactgccctgctgacctccattggctggactctccccgtgttgcctgagcttgatgacctcacagtggggggcttgatcatgggcacaggcatcgagtcatcatcccacaagtacggcctgttccaacacatctgcactgcttacgagctggtcctggctgatggcagctttgtgcgatgcactccgtccgaaaactcagacctgttctatgccgtaccctggtcctgtgggacgctgggtttcctggtggccgctgagatccgcatcatccctgccaagaagtacgtcaagctgcgtttcgagccagtgcggggcctggaggctatctgtgccaagttcacccacgagtcccagcggcaggagaaccacttcgtggaagggctgctctactccctggatgaggctgtcattatgacaggggtcatgacagatgaggcagagcccagcaagctgaatagcattggcaattactacaagccgtggttctttaagcatgtggagaactatctgaagacaaaccgagagggcctggagtacattcccttgagacactactaccaccgccacacgcgcagcatcttctgggagctccaggacattatcccctttggcaacaaccccatcttccgctacctctttggctggatggtgcctcccaagatctccctcctgaagctgacccagggtgagaccctgcgcaagctgtacgagcagcaccacgtggtgcaggacatgctggtgcccatgaagtgcctgcagcaggccctgcacaccttccaaaacgacatccacgtctaccccatctggctgtgtccgttcatcctgcccagccagccaggcctagtgcaccccaaaggaaatgaggcagagctctacatcgacattggagcatatggggagccgcgtgtgaaacactttgaagccaggtcctgcatgaggcagctggagaagtttgtccgcagcgtgcatggcttccagatgctgtatgccgactgctacatgaaccgggaggagttctgggagatgtttgatggctccttgtaccacaagctgcgagagaagctgggttgccaggacgccttccccgaggtgtacgacaagatctgcaaggccgccaggcactgagctggagcccgcctggagagacagacacgtgtgagtggtcaggcatcttcccttcactcaagcttggctgctttcctagatccacactttcaaagagaaacccctccagaactcccaccctgacagcccaacaccaccttcctcctggcttccagggggcagcccagtggaatggaaagaatgtgggatttggagtcagacaagcctgagtccagttccccgtttagaactcattagctgtgtgactctgggtgagtcccttaacccctctgagcccgggtctcttcattagttgaaagggatagtaatacctacttgcaggttgttgtcatctgagttgagcactggtcacattgaaggtgctgggtaagtggtagctcttgttgcttcccgttcagcgtcacatctgcagtggagcctgaaaaggctccacattaggtcacctgtgcacagccatggctggaatgatgaaggggatacgctggagttgccctgccatcgcctccatcagccagacgaggtcctcacaggagaaggacagctcttccccaccctgggatctcaggagggcagccacggagtggggaggccccagatgcgctgtgccaaagccaggtccgaggccaaagttctccctgccatccttggtgccgtcctgccccttcctccttcatgcctgggcctgcaggcccaccccagccaccactgagtccactcggagtgccctgtgttcctggagaaggcattccagggttgaatcttgtcccagcctcagcctgggacacctaggtggagagagtggtctccgctctgaattggatccaggggacctgggctcattcttcttggctcaccaaccctgcaggcctcatctttcccaaaacccactttgtcttggtgggagtgggtccgcgctgctctgcagcaggggctggggagtggacagcatcaggtgggaaagtggagtccaccctcatgtttctgtaggattctcaccgtggggctggaagaaaagagcatcgacttgatttctccaaccactcatccctctttttctttcttccaccactccccaccccagctgtagttaatttcagtgccttacaaatcctaagctcagagaaagttccatttccgttccagagggaagggaacctccctaggtccttccctggcttgttataacgcaaagcttggttgtttatgcaactctatcttaagaactgcccagcctcagctgaaaacccgaatctgagaaggaattgcgtcatgtaagggaagctggaattaagggagctgagccagtcatggttgtggcgtgtgagtcaggagacctaggtttcagcccctctctactgtcagcgagctgtgcaacgtgggcaagtcattgtcctctgagctgcagtttcctcatctgtcacatcgctacagacaagacctccctggaacccttctgattgtcttagacactgtggttgcaaaacccacggaaagcctcatttgtgtggaaagtcagaggaaaaatgatccagtggacacttggggattatctgtcattcaagatccttccttcaaccccaaggtcagctcccatctcatttccagaaaggctcatacctggcttgcagggaagcatctgtcttgtcattccaggtgccagaatcctctcagagtcattgaagggtgttcacccatcccacccaaggcttggcacactgccagtgtcttagcagggtcttgtgagggctgggggcatccaggcactcagaaggcaaaggaaccaccctacccatttggcctctggagggggcagaagaaagaaataaacctcatcctatattttacaaagcatgtgaattctggcattagctctcataggagacccatgtgcttccttgctcagtgcaaaactgatgattctacttgctgtagatgaatggttaacacgagctagttaaacagtgccattgttttgccagtgaagcctccaaccctaagccactgggacggtggccagagatgccagcagcctctgtcgcccttagtcatataaccaaaatccagaccttatccacaacccggggcttggaaaggaaggtattttggaatcacaccctccggttatgttgctccagtaaaatcttgcctggaaagaggcagtcttcttagcatggtgagctgagttcatggcttttttttgtagccagtcctgtccctggccatccatgtgatggttttggatggagttaaacttgatgccagtgggcagtgcatgtggaaagtatcagagtaaggctctcccctccagagccctgagtttcttggctgcatgaaggttttctttagaatcagaattgtagccagtttctttggccagaaggatgaatacttggatattactgaaagggaggggtggagatgggtgtggcagtgtatggtgtgtgatttttattttcttctttggtcatgggggccaaggagaaaggcatgaatcttccctgtcaggctcttacagccacaggcactgtgtctactgtctggaagacatgtccccatggctgtggggccgctgcttctgtttaaataaaagtggcctgg

SEQ ID NO: 250 - DNA, 3321 bp, Homo sapiens
gacatcatgggctatttttaggggttgactggtagcagataagtgttgagctcgggctggataagggctcagagttgcactgagtgtggctgaagcagcgaggcgggagtggaggtgcgcggagtcaggcagacagacagacacagccagccagccaggtcggcagtatagtccgaactgcaaatcttattttcttttcaccttctctctaactgcccagagctagcgcctgtggctcccgggctggtgtttcgggagtgtccagagagcctggtctccagccgcccccgggaggagagccctgctgcccaggcgctgttgacagcggcggaaagcagcggtacccacgcgcccgccgggggaagtcggcgagcggctgcagcagcaaagaactttcccggctgggaggaccggagacaagtggcagagtcccggagccaacttttgcaagcctttcctgcgtcttaggcttctccacggcggtaaagaccagaaggcggcggagagccacgcaagagaagaaggacgtgcgctcagcttcgctcgcaccggttgttgaacttgggcgagcgcgagccgcggctgccgggcgccccctccccctagcagcggaggaggggacaagtcgtcggagtccgggcggccaagacccgccgccggccggccactgcagggtccgcactgatccgctccgcggggagagccgctgctctgggaagtgagttcgcctgcggactccgaggaaccgctgcgcacgaagagcgctcagtgagtgaccgcgacttttcaaagccgggtagcgcgcgcgagtcgacaagtaagagtgcgggaggcatcttaattaaccctgcgctccctggagcgagctggtgaggagggcgcagcggggacgacagccagcgggtgcgtgcgctcttagagaaactttccctgtcaaaggctccggggggcgcgggtgtcccccgcttgccacagccctgttgcggccccgaaacttgtgcgcgcagcccaaactaacctcacgtgaagtgacggactgttctatgactgcaaagatggaaacgaccttctatgacgatgccctcaacgcctcgttcctcccgtccgagagcggaccttatggctacagtaaccccaagatcctgaaacagagcatgaccctgaacctggccgacccagtggggagcctgaagccgcacctccgcgccaagaactcggacctcctcacctcgcccgacgtggggctgctcaagctggcgtcgcccgagctggagcgcctgataatccagtccagcaacgggcacatcaccaccacgccgacccccacccagttcctgtgccccaagaacgtgacagatgagcaggagggcttcgccgagggcttcgtgcgcgccctggccgaactgcacagccagaacacgctgcccagcgtcacgtcggcggcgcagccggtcaacggggcaggcatggtggctcccgcggtagcctcggtggcagggggcagcggcagcggcggcttcagcgccagcctgcacagcgagccgccggtctacgcaaacctcagcaacttcaacccaggcgcgctgagcagcggcggcggggcgccctcctacggcgcggccggcctggcctttcccgcgcaaccccagcagcagcagcagccgccgcaccacctgccccagcagatgcccgtgcagcacccgcggctgcaggccctgaaggaggagcctcagacagtgcccgagatgcccggcgagacaccgcccctgtcccccatcgacatggagtcccaggagcggatcaaggcggagaggaagcgcatgaggaaccgcatcgctgcctccaagtgccgaaaaaggaagctggagagaatcgcccggctggaggaaaaagtgaaaaccttgaaagctcagaactcggagctggcgtccacggccaacatgctcagggaacaggtggcacagcttaaacagaaagtcatgaaccacgttaacagtgggtgccaactcatgctaacgcagcagttgcaaacattttgaagagagaccgtcgggggctgaggggcaacgaagaaaaaaaataacacagagagacagacttgagaacttgacaagttgcgacggagagaaaaaagaagtgtccgagaactaaagccaagggtatccaagttggactgggttgcgtcctgacggcgcccccagtgtgcacgagtgggaaggacttggcgcgccctcccttggcgtggagccagggagcggccgcctgcgggctgccccgctttgcggacgggctgtccccgcgcgaacggaacgttggacttttcgttaacattgaccaagaactgcatggacctaacattcgatctcattcagtattaaaggggggagggggagggggttacaaactgcaatagagactgtagattgcttctgtagtactccttaagaacacaaagcggggggagggttggggaggggcggcaggagggaggtttgtgagagcgaggctgagcctacagatgaactctttctggcctgccttcgttaactgtgtatgtacatatatatattttttaatttgatgaaagctgattactgtcaataaacagcttcatgcctttgtaagttatttcttgtttgtttgtttgggtatcctgcccagtgttgtttgtaaataagagatttggagcactctgagtttaccatttgtaataaagtatataatttttttatgttttgtttctgaaaattccagaaaggatatttaagaaaatacaataaactattggaaagtactcccctaacctcttttctgcatcatctgtagatactagctatctaggtggagttgaaagagttaagaatgtcgattaaaatcactctcagtgcttcttactattaagcagtaaaaactgttctctattagactttagaaataaatgtacctgatgtacctgatgctatggtcaggttatactcctcctcccccagctatctatatggaattgcttaccaaaggatagtgcgatgtttcaggaggctggaggaaggggggttgcagtggagagggacagcccactgagaagtcaaacatttcaaagtttggattgtatcaagtggcatgtgctgtgaccatttataatgttagtagaaattttacaataggtgcttattctcaaagcaggaattggtggcagattttacaaaagatgtatccttccaatttggaatcttctctttgacaattcctagataaaaagatggcctttgcttatgaatatttataacagcattcttgtcacaataaatgtattcaaatacc

SEQ ID NO: 251 - DNA, 7790 bp, Homo sapiens
gttaacaaaaggattaatgggttgcttaaattagtgagcttcatcagttttatttttaattccttgagataatgaattttaaaagcaataaatacaatgctgtagtttttgacttcttttctaaatatttacatggatttacatgaaagaactaaagagatagtatttgtggaaccaatttaaactcttacatgcctttcaggatttgggaatgtattaacacctgctgctttgtatccagtctaagggagcctatttgtttgttatcacattgacttcctttgatgtcttttagtgttaccctcactcagacccaaggattatgtcttttggggctcccatcatcctgagctagagacacgtgacaggggtacactctcctacaaaaccagccagttactcagtaaagtggacgatagaagaaaaagagctgtttgaacaagggctggctaaatttggccgaagatggaccaaaatttcaaagctaattggaagccgcactgttttacaagtgaagagttatgcaagacagtattttaaaaataaggtcaaatgcggtctggataaagaaacaccaaatcagaagaccggccataatcttcaagttaaaaatgaagataaagggacaaaggcatggacaccatcatgtttaaggggacgtgctgatcccaacttgaatgctgtaaaaattgaaaagttatctgatgatgaagaagtagacatcacagatgaggtggacgagttgtcttctcaaacaccccagaagaattctagcagtgatctcttgttagactttcctaatagtaaaatgcatgaaaccaatcaaggagaattcattacttctgacagccaggaagctctcttttctaagtcttccaggggctgtcttcaaaatgaaaagcaagatgaaacactttcaagctcagaaattacactgtggactgagaaacagagcaatggtgacaaaaaatcaattgaattaaatgaccagaaatttaatgaattgattaaaaactgcaacaagcatgatggaaggggaataatagttgatgccaggcagttgccttctccagagccttgtgaaattcagaaaaatttgaatgataatgaaatgctttttcattcttgccaaatggtagaggaaagccatgaggaagaagagcttaagccaccagaacaggaaatagaaatagatagaaatatcattcaagaagaagaaaaacaagcaattcctgagttttttgaggggcgccaagctaaaacaccagaacgctatttgaaaattagaaattatattttggatcaatgggagatatgcaaaccaaaatacttaaataagacctcagtacgtcctggcctgaagaactgtggagatgttaattgtattggacggattcatacatacctcgaattgataggagcaatcaattttggatgtgaacaggctgtgtataataggccacaaacagttgacaaagtacgaatcagagacagaaaagatgcagtagaagcataccaacttgcccagcgtctgcagtctatgcgtacaaggagacgtagggtccgagacccatggggaaactggtgtgatgcaaaggacttagaaggacaaacgtttgagcatctctctgctgaggagttggcaaaaagaagagaagaggaaaaaggcagacctgttaaatctttaaaagtgccaagaccaacaaaaagctcgtttgatcccttccaactgataccttgtaatttttttagtgaagaaaagcaggagccatttcaggtgaaagtggcttcagaagcacttttaataatggatttgcatgctcatgtttctatggcagaagtgattggtctgttaggaggaagatactcagaagttgataaagtagttgaagtctgtgcagcagaaccatgtaacagtctgagtacaggactacagtgtgagatggatcctgtatcacaaacacaggcctcagaaaccttggctgttagaggcttcagtgttattggatggtatcattctcatcctgcttttgatcctaatccttccttacgagatattgacacacaagctaaataccagagttacttctccagaggaggtgcaaagttcattgggatgattgttagtccctataatcgaaataatcccttaccatattctcagattacctgcctggttataagtgaggaaattagcccagatggctcttatcgcttaccttacaaatttgaagtacagcagatgttagaagaacctcagtggggattagtatttgaaaagacaagatggataatagaaaaatacaggctctcccatagcagcgtccccatggataaaatctttcgccgggattctgacctgacttgtttgcagaaacttttggagtgtatgaggaagactctgagcaaagtgaccaattgctttatggctgaagaattcttgactgaaatagaaaatttgttcctttccaattataaaagcaaccaagagaatggagtaaccgaagagaactgtacaaaggaattgttaatgtgattattttaaagttaagacattttaatcttgacacagtagatcttactttcaaagttataaacttgaagtgattgtagttaacattggcacagctttggtattttttctctatttcacaaaatccaaactttgccacataaatcatgtgaaaaggaagagatacaaatttgttttcatatagtgattatcagagtgttctgcaaaccagggtccaccacggtgttctagtcctttactgagcaatgctgtaggctgtgaaactaagcaacctggtcggctttactgttgtgttcagcttgggatttggactatgtctctaagtcatttcttccctgaactagtcatttatgttccattgtggtatctcctatttcatttaaaagcacttccattctttccatatattctgctgagatttgtttatggctataaatgagatatggatgggtggtcactgagataattaatatggtttagaactactgattaataaatctaacaggagaccaggagaggcatgacaagaaaatcttaaaaacaggaaaaacccaaaggagagaactaaattaccagtttctaatcatagatactatcttccatttcattgtatagcagtagtatcataagatatgccattttctcagctatctgaaaatttttaaccaattttacacacataaaataattagcttcaattgtgagtccacttacattagtaggtgtgataaaacctcatttaactggaacataggtaatcataactcaaactttttttctactgcctactactaggagaaagaggcaaatgataataaagctggaataaatcagagatttaatttttaaaacaagcctttcaggacatgttacatattcagcccagtttcatatgctttctgaatctataatggaggtcagtgaacttttttaatgtaaagggccagtttgtaaataattttggcttttcaggccacatatgatgtctatgagacattcttctttgtgtgtgtgtgtgtgtgtgtgtgtgtgtgtgtgtgttttacagccctttaaaatgataaaaaccattgttaactcacaggcctcataaaacataggctgttggctattattctccaacccttgatctagagaattttaaacattagaattttgttttacatttgttaagctttacgtcatcttcaaatgacaccaaaactcagaattatgatctgcatttaagccaattttaaaataaaataagcagtcaatgctgcctcatttattgaaattcagtagattttagtttatttcttagtagtcagagaattgatttatagctattcaccaaacattcttactaacgtttccttatatctaaatcagattgattctatattttgctttgtttgtaatcaatagccaatgaagaataaggagtattggaagaagcagtgagtcagctttaggtgacctggttcttgtctcaactttgtgatttggggagatacagtttactttccctgagccttaattcttgtgtaactgaagtctaacttaacttcttaatgtccttccagaactaaaattttattgttcattctaatcgttggactactcttgtgaagtttatattttgagttaatacagtttccaaattaacatacatttaaaaaaaaaagggtagtatttttccatttctctgtgtgcacttaggataaacagtgaagtatagcttataaaacaattagtttgagggctgagagtgtaagaggaactataccaaaagtcaggaaacctgagctcttaccctaactctgttaccaactttgctgtgtgaccttaatcaaaacacataacctggaccccatgctcctcaccagtaaatcaagggcctgaattttatggcttagtattcccttccaagctccgaagttgcgtgattctgtgaaaggcagtgattgattcctttgtactcatcttccttttgacctgtttcctcatgatatattggggaacaaatactaaaaagtgttttatactagctttcttgattgacatttccctataatactgatgaatttgggtgatggaaagtaatggaaattgttaaaagttctgctctcaaatctgagtctccttgccctgtgtgccaatgtttaaccatatttgctaatctaagccatattgcgaggatctcaaggatgatacttgtcaagagtttggggccttgagagcacagttttcaaaataatacttagtattttctgactatagagtacatttgtcttgtaaagtatattttaaaatacagagaagtgtgaagtacaaatatctcagtgctactatttaaaaaaacacaattagtatataaatccttccccatttttttgacagtataattttagtatgttaaacttggttacttctttctctcttcctccatcattttccctgcttcctttttcttttgtcatattcttaaaacaattttgcaaccacaggtacccacattgctggcactaccagccttgggctactaccgaggataatggagccagggccttgtagaagcacagaggaagtctagaactgagggggcctatgatacaggaagttcaggaggcagagtctcaaaggaacacctgcctttaataatgtttacagaagtggagaaaggactaaaggacttaaagacatgcaggtgtcttcatcctgattctgtctttgttattgcacaatgactataaaataatgacctaatttttttttttttctggcttggctaatggaaatcgacactagcgcttccccagtattagacttaatctaattccaaagtaacattcaagaaaagaaaaaccagtggaacaggatcagtaagctcagactctccatctccattattttagccttgaccattcttctctaatccttttaaattatcttcagtttccagttcaagttacattgcttcagttacagtttgtttgaccctgtattcagagctgcattatgattcttgtgggccctagatagttttgccatcttagaccccttcttccatacaaaattaaaagtgatattttacaattgtatctgtatgaaatgaatgtattaatattttagattaaaacattttgtttagaagttcagttttttcttatgaggctaaaaaaaattaaaacatttttgtgggcttctaaaaaactgtgggccttaggtactgtgcctaatggataagttggcattgcctgtattctgaagggcatcattggaaaaatagcagtcattattctgtccccttctcccaccaccacagtccttggagaagcctttgccactccatccaggagcactgcagtttccacggttatagatctatagacttgaacttacttccttcccaacctaacgaaaactcacaaggattacttgggaccattcatcctcaaaaaagataggaggcagtggtttgttttagtcttcagatatttttgttttggtcagtccctaatctgtagttttgaaactcgtgccacacttgaaagggaaacatcctactacctttctttcctctccatttcccacaaaccctttccttcatcatcactccctgcattcttacttctcagcatataaatacaagacccttctttctattatttgttgaaagctaggcctgtaaaatagagatggacagaccatgcatgtttccatgaagctatttaatgctgctcccagtcttctgtccataccattccttccctgcccctaggagtggggttgaggtctgtgacatgcagactgtaagcacagtcagaacctctgcagctctcaacccaacagaggagactgtggcttcaacatgccaacctgagcaggtctcctctgcattaccttcctcccatttctcttcctgggtcctgatgaggtgagctggaggaaccaatagtcaggatgccctggaattgatgttgctctgttttgtgctcacaaaacagccatgtaacacatgagcacctgagttgaagccatccagtcgcaagtcagcagacagcagttgatggaattctcagtagaaattcagtaagggtgcccaaattttattttttttttcacctatactctaccaatatatggtatttaggaaaacttcttttatccaagcacaaagaaaagcacacacatttttataatcatctgcttcatcagggtaaataaataatttaacaaatttgatcagcatctctagtttaccagtactttaatattagttttcttacaaattaatgtattttgcaatatttccagaaaatcactgtgggagaataatgtaatatactttaggatatatttcctgaccttttcttaaatggcttcatgtgctattcccccaaattctgctttctctattttcttttttatttaacctataattatactttctagtatattctgagtctatcttctaagccaccttacatttttcctggaacaagggagggaataaatagttgcctccactaaatcaggaaaaaataaaaatatcccaggggagctgtgattatgccaagagctctaaacagaagtttgagaaggtaaaaattaagttgtagtatctgagttgtttttattttcttcctttggtgtttatgaaggtattcataagaactttaatttcaggggaaaaaaatgcctgatttgctatttttgacatttcctcgtctcttaagaagtcagttaaatatgttttcatagtttatattcctgtttcatagattactgtgaaacatgtatttaaacctatgaattataaaatagtatttagattctagcgtgagttaaatagattagtcatatatcttttagatttgtggatttgacatgtaaattatgtgttgtgtataagtaagttagttactaaacatatggcatggttattgataaacttgttgctatttttttccaaatgctatcagtgtttgtggacttttaaaaattagtttgaattttggaatgttctgtgataaaatgtaatttcaactattttgtacatttaaatatgccatgttgtatatgtctgtatttaaaaatgttgtaaatacctgcattttaagaattatgaaagattttcctcaaaaatgacagaactctccatacttaattgtgacacattataagatatctgattttaagcttttggattttgttctaaaaattaagtttaaacatgctgaaaattccataaaaataaaattttgaaaataaa

SEQ ID NO: 252 - protein, 575 aa, Homo sapiens
MHETNQGEFITSDSQEALFSKSSRGCLQNEKQDETLSSSEITLWTEKQSNGDKKSIELNDQKFNELIKNCNKHDGRGIIVDARQLPSPEPCEIQKNLNDNEMLFHSCQMVEESHEEEELKPPEQEIEIDRNIIQEEEKQAIPEFFEGRQAKTPERYLKIRNYILDQWEICKPKYLNKTSVRPGLKNCGDVNCIGRIHTYLELIGAINFGCEQAVYNRPQTVDKVRIRDRKDAVEAYQLAQRLQSMRTRRRRVRDPWGNWCDAKDLEGQTFEHLSAEELAKRREEEKGRPVKSLKVPRPTKSSFDPFQLIPCNFFSEEKQEPFQVKVASEALLIMDLHAHVSMAEVIGLLGGRYSEVDKVVEVCAAEPCNSLSTGLQCEMDPVSQTQASETLAVRGFSVIGWYHSHPAFDPNPSLRDIDTQAKYQSYFSRGGAKFIGMIVSPYNRNNPLPYSQITCLVISEEISPDGSYRLPYKFEVQQMLEEPQWGLVFEKTRWIIEKYRLSHSSVPMDKIFRRDSDLTCLQKLLECMRKTLSKVTNCFMAEEFLTEIENLFLSNYKSNQENGVTEENCTKELLM

SEQ ID NO: 253 - DNA, 439 bp, Homo sapiens
ctctctctggtccgtgcctccaagatgacaaagaaaagaaggaacaatggtcgtgccaaaaagggccgcggccacgtgcagcctattcgctgcactaactgtgcccgatgcgtgcccaaggacaaggccattaagacattcgtcattcgaaacatagtgaaggccgcagcagtcagggacatttctgaagcgagcgtcttcgatgcctatgtgcttcccaagctgtatgtgaagctacattactgtgtgagttgtgcaattcacagcaaagtagtcaggaatcgatctcgtgaagcccgcaaggaccgaacacccccatcccgatttagacctgcgggtgctgccccacgtcccccaccaaagcccatgtaaggagctgagttcttaaagactgaagacaggctattctctggagaaaaataaaatggaaattgtactt

SEQ ID NO: 254 - DNA, 3705 bp, Homo sapiens
atggcacaaccgggcaaatgctctgaaaaacggataaataaaatgctggtcacagatgagaacatcagtctagcagagcttgcgaaggcagcagggaggagaaaacctctgagctgtgttttgcccagtgtccacagagggttaggaggacccaatgaaggaatgaccctgaaatgtgaacagggcgaagaactaggccccagctccctgcagagaagatacatcaaagccccacatgaggatttttatagctccacattggacaagcttcctcttcctgagatagagcctacagggaagggacagatttggggcaaggagaggagtctgaaagagatggggtacgccgtagtgaaagctggagtgagagccttcgtattcgaaggcggggactcgggcgctgttggcagctggcgacgcggggcgaagccgcggctggcggcgcctggccagtcccgcatccgccgcgtgcacccggaggttgcgtgcgctccgaagccggggtgtgcgcctagctgccccggccccgtgcaccgcgggccgcctcgcgcaggacttccgcagctcgccaagcctggggtctgcgacagaaaaggagcggggctgctcgggctgcccaaagggtcatggttattaaggaagaaaacacagaatgggcccttgtatggactctattaccaagtgccattggacacgcaggcagtgtactgggagacagtcgtggtgtgctcagaggtattgccacggcctgaagttcctctcttggccgcagctgcccccactctgctgcaatcttctggggagggcttcacctgccactgcctcctgcatgccagcatcgcctgctgcagactgcagagctggggtgccaaagaccagtcctctcagggggatgaagagaaagaccctccgaagagccacccttattctgtggagaccccatatggctttcatttagacctggacttcctcaagtatgtggatgacatcgagaagggaaacactatcaaaagaattcctatccacagaagggccaagcaggccaaatttagcactctgccccgaaacttcagccttcctgacagtggggctcgcccccctgcagccccgcccctccaaaactggtctcccgtggtgccaagggaggcatcacttgggacacaggagcaaaaccagtcaccaccgcttggtaatgccccccaggcctcaacaagcaggagtgaggtgagctaccacaggaaggctctgttggcagaggccaccagacagttggaagctgctgagccagaggatgccgagctcacttttgggagtggacggccccagctcttgagagcatccagcatgcctgccacgctgctgcacagcagggcttctgaggagccaggcctgagcctggggccccctgcccctcctgccctccctccccttcagggtgaaggcagtgtctgtgatggcacctttgaacctgcagaaggattggcaggtttccacagctccagcccacgagcatcaactcggattccagagctggtccaggagggagctgagcctccagagggtgtggtgaaggttccaaatcacctccctctcccaggccctcctttctcattccagaatgtgcttgtagttctagaggacaaggaagatgaacacaatgccagagaagcagaggtgttgttcacccctggctcccctacgccaagcccgccacctctgccatcacccatccctgagaatgagctcctcctggaagaaatcgagctcaacatcagcgagattccacccccgccacctgtagaggtggacatgagaagcattggcatcagggtaactgaggaaagcctgggccttgccagggtggatccaggcagcatctccagcctgaaacagcaggtctcggccctggagggagagttgtctggaagaaccgaggaactggcacaggtcagaactgctctccagcagcaggaagaggaaatcaaagctagggagcaaagaattcgagagctggagttcactgtagcccaactggaaggacagtttcaccaagagaacgccaaagacactcagggccagacggacgtgatggtgaacactgaccctgtccatggactcttgaccagggagtcgtgtgataagggcattgaagtcaaccttctaggcagcatggagtctgaaagctgggggcaccgaggagaggagaatggcctcctatgggggccagatggtcataaacaagggaatcagagcccagcagaacgtgtgcttctgccccagctgtcactgccacagggacccgagcaggtccttacctcctctgtacatagcttcctctccactgaactcaggattgaagaagcaggcactgaacaggaaggaggccctcagggaggaaccaggggagcaggaggctttctgtggggcagcgacagaaagactcccccagcagggagggaggagaccagttccaatctcccagggaaggagcacccgggaaggccaccaagctcgccaacggatgccactattgggcagtatgtgaagaagatccaggagctcctgcaggagcagtggaactgcctggagcatgggtacccggagctggccagcgccatcaagcagccagcctccaagctcagcagcatccagagccagctgctgagctccctcaacctgctgctgtcggcctactcggcccaggctcacccacccaaggagccaccggcctcctcctcctccccgccagtggagatctccccatcgaccagccttaaatccataatgaaaaagaaagactatggcttccgtgcaggaggtaatgggaccaaaaagaaccttcagtttgttggggttaacggtgggtatgagaccacctcaagtgaggagaccagcggtgaggacagcaccccagaggacttgtctgacagcgaggcagagaagaagtgtgacggcccagatcacaagcatgtcaaagatgcccatctcacctgcgaggctgggcagggcatccctgagggcacctgccatgctgcccaggaaagtgggcctggggaagaagtcccccactccaaggccgagagccggaagtcgtctagccccgccgtggtggcctcctacctccacgaggtccagcctcactccccacacttcctgaaactgcttgtcaacttggccgatcacaacgggaacacggcccttcactacagcgtgtcccactccaacttctccatcgtgaagctgctgctggagacaggcgtctgcaatgtggaccatcagaacaaagctggctacactgccgtaatgatcactcccttggcttccgcagagaccaatgaagacatggctgttgtctggaagctcttaagagaaggaaatgtgaacattcaagctactcagggaggccagactgcgctgatgctgggagtcagccacgacagggaggacatggttcaagcgctgcttagctgccaggcagatgtcaatctgcaggaccacgatggatcctcggccctcatggtggcctgtcaccatggcaacgtggacctggtgcggctgctcctggcacacccagcctgcgacagcagcctgactgacaaggctggccgcacagctttgtccatcgctctgaagtcacccacccatatggaaattgctgggcttctgagagcccacgcggagcagggcaggtccctggggctgtag

SEQ ID NO: 255 - protein, 108 aa, Homo sapiens
MASVQEVMGPKRTFSLLGLTVGMRPPQVRRPAVRTAPQRTCLTARQRRSVTAQITSMSKMPISPARLGRASLRAPAMLPRKVGLGKKSPTPRPRDINPQKNFLMHAGH

SEQ ID NO: 256 - DNA, 5072 bp, Homo sapiens
gcggcggccgcggagtatcctggagctgcagacagtgcgggcctgcgcccagtcccggctgtcctcgccgcgacccctcctcagccctgggcgcgcgcacgctggggccccgcggggctggccgcctagcgagcctgccggtcgaccccagccagcgcagcgacggggcgctgcctggcccaggcgcacacggaagtgcgcttctctgaagtagctttggaaagtagagaagaaaatccagtttgcttcttggagaacactggacagctgaataaatgcagtatctaaatataaaagaggactgcaatgccatggctttctgtgctaaaatgaggagctccaagaagactgaggtgaacctggaggcccctgagccaggggtggaagtgatcttctatctgtcggacagggagcccctccggctgggcagtggagagtacacagcagaggaactgtgcatcagggctgcacaggcatgccgtatctctcctctttgtcacaacctctttgccctgtatgacgagaacaccaagctctggtatgctccaaatcgcaccatcaccgttgatgacaagatgtccctccggctccactaccggatgaggttctatttcaccaattggcatggaaccaacgacaatgagcagtcagtgtggcgtcattctccaaagaagcagaaaaatggctacgagaaaaaaaagattccagatgcaacccctctccttgatgccagctcactggagtatctgtttgctcagggacagtatgatttggtgaaatgcctggctcctattcgagaccccaagaccgagcaggatggacatgatattgagaacgagtgtctagggatggctgtcctggccatctcacactatgccatgatgaagaagatgcagttgccagaactgcccaaggacatcagctacaagcgatatattccagaaacattgaataagtccatcagacagaggaaccttctcaccaggatgcggataaataatgttttcaaggatttcctaaaggaatttaacaacaagaccatttgtgacagcagcgtgtccacgcatgacctgaaggtgaaatacttggctaccttggaaactttgacaaaacattacggtgctgaaatatttgagacttccatgttactgatttcatcagaaaatgagatgaattggtttcattcgaatgacggtggaaacgttctctactacgaagtgatggtgactgggaatcttggaatccagtggaggcataaaccaaatgttgtttctgttgaaaaggaaaaaaataaactgaagcggaaaaaactggaaaataaacacaagaaggatgaggagaaaaacaagatccgggaagagtggaacaatttttcttacttccctgaaatcactcacattgtaataaaggagtctgtggtcagcattaacaagcaggacaacaagaaaatggaactgaagctctcttcccacgaggaggccttgtcctttgtgtccctggtagatggctacttccggctcacagcagatgcccatcattacctctgcaccgacgtggcccccccgttgatcgtccacaacatacagaatggctgtcatggtccaatctgtacagaatacgccatcaataaattgcggcaagaaggaagcgaggaggggatgtacgtgctgaggtggagctgcaccgactttgacaacatcctcatgaccgtcacctgctttgagaagtctgagcaggtgcagggtgcccagaagcagttcaagaactttcagatcgaggtgcagaagggccgctacagtctgcacggttcggaccgcagcttccccagcttgggagacctcatgagccacctcaagaagcagatcctgcgcacggataacatcagcttcatgctaaaacgctgctgccagcccaagccccgagaaatctccaacctgctggtggctactaagaaagcccaggagtggcagcccgtctaccccatgagccagctgagtttcgatcggatcctcaagaaggatctggtgcagggcgagcaccttgggagaggcacgagaacacacatctattctgggaccctgatggattacaaggatgacgaaggaacttctgaagagaagaagataaaagtgatcctcaaagtcttagaccccagccacagggatatttccctggccttcttcgaggcagccagcatgatgagacaggtctcccacaaacacatcgtgtacctctatggcgtctgtgtccgcgacgtggagaatatcatggtggaagagtttgtggaagggggtcctctggatctcttcatgcaccggaaaagcgatgtccttaccacaccatggaaattcaaagttgccaaacagctggccagtgccctgagctacttggaggataaagacctggtccatggaaatgtgtgtactaaaaacctcctcctggcccgtgagggcatcgacagtgagtgtggcccattcatcaagctcagtgaccccggcatccccattacggtgctgtctaggcaagaatgcattgaacgaatcccatggattgctcctgagtgtgttgaggactccaagaacctgagtgtggctgctgacaagtggagctttggaaccacgctctgggaaatctgctacaatggcgagatccccttgaaagacaagacgctgattgagaaagagagattctatgaaagccggtgcaggccagtgacaccatcatgtaaggagctggctgacctcatgacccgctgcatgaactatgaccccaatcagaggcctttcttccgagccatcatgagagacattaataagcttgaagagcagaatccagatattgtttcagaaaaaaaaccagcaactgaagtggaccccacacattttgaaaagcgcttcctaaagaggatccgtgacttgggagagggccactttgggaaggttgagctctgcaggtatgaccccgaaggggacaatacaggggagcaggtggctgttaaatctctgaagcctgagagtggaggtaaccacatagctgatctgaaaaaggaaatcgagatcttaaggaacctctatcatgagaacattgtgaagtacaaaggaatctgcacagaagacggaggaaatggtattaagctcatcatggaatttctgccttcgggaagccttaaggaatatcttccaaagaataagaacaaaataaacctcaaacagcagctaaaatatgccgttcagatttgtaaggggatggactatttgggttctcggcaatacgttcaccgggacttggcagcaagaaatgtccttgttgagagtgaacaccaagtgaaaattggagacttcggtttaaccaaagcaattgaaaccgataaggagtattacaccgtcaaggatgaccgggacagccctgtgttttggtatgctccagaatgtttaatgcaatctaaattttatattgcctctgacgtctggtcttttggagtcactctgcatgagctgctgacttactgtgattcagattctagtcccatggctttgttcctgaaaatgataggcccaacccatggccagatgacagtcacaagacttgtgaatacgttaaaagaaggaaaacgcctgccgtgcccacctaactgtccagatgaggtttatcaacttatgaggaaatgctgggaattccaaccatccaatcggacaagctttcagaaccttattgaaggatttgaagcacttttaaaataagaagcatgaataacatttaaattccacagattatcaagtccttctcctgcaacaaatgcccaagtcattttttaaaaatttctaatgaaagaagtttgtgttctgtccaaaaagtcactgaactcatacttcagtacatatacatgtataaggcacactgtagtgcttaatatgtgtaaggacttcctctttaaatttggtaccagtaacttagtgacacataatgacaaccaaaatatttgaaagcacttaagcactcctccttgtggaaagaatataccaccatttcatctggctagttcaccatcacaactgcattaccaaaaggggatttttgaaaacgaggagttgaccaaaataatatctgaagatgattgcttttccctgctgccagctgatctgaaatgttttgctggcacattaatcatagataaagaaagattgatggacttagccctcaaatttcagtatctatacagtactagaccatgcattcttaaaatattagataccaggtagtatatattgtttctgtacaaaaatgactgtattctctcaccagtaggacttaaactttgtttctccagtggcttagctcctgttcctttgggtgatcactagcacccatttttgagaaagctggttctacatggggggatagctgtggaatagataatttgctgcatgttaattctcaagaactaagcctgtgccagtgctttcctaagcagtatacctttaatcagaactcattcccagaacctggatgctattacacatgcttttaagaaacgtcaatgtatatccttttataactctaccactttggggcaagctattccagcactggttttgaatgctgtatgcaaccagtctgaataccacatacgctgcactgttcttagagggtttccatacttaccaccgatctacaagggttgatccctgtttttaccatcaatcatcaccctgtggtgcaacacttgaaagacccggctagaggcactatggacttcaggatccactagacagttttcagtttgcttggaggtagctgggtaatcaaaaatgtttagtcattgattcaatgtgaacgattacggtctttatgaccaagagtctgaaaatctttttgttatgctgtttagtattcgtttgatattgttacttttcacctgttgagcccaaattcaggattggttcagtggcagcaatgaagttgccatttaaatttgttcatagcctacatcaccaaggtctctgtgtcaaacctgtggccactctatatgcactttgtttactctttatacaaataaatatactaaagacttt

SEQ ID NO: 257 - DNA, 666 bp, Homo sapiens
ctcttcataagccggcgctcggcgagttctcccaggagaaggccatgttcagttcgagcgccaagatcgtgaaacccaacggcgagaagccggaggagttcgagtccggcatctcccaggctcttctggagctggagatgaactcagaactcaaggctcagctcagagagctgaatattacggcagccaaggaaattgaagttggtggtggtcggaaagctatcataatacttgttcccgttactcaactgaaatctttccagaaaatccaaatccggctagtaagtgaattggagaaaaagttcagtgggaagcatgtcgtctttatcgctcagaggagaattctgcctaagccaactcgaaaaagctgtacaaaaaataagcaaaagcgtcccaggagcagcactgtgacagctgtgcacgatgccatccttgaggacttggtcttcccaagtgaaattgtgggcaagaaaatccgcgtcaaactagatggcagccggctcataaaggttcatttggacaaagcacaacagaacaatgtggaacacaaggttgaaactttttctggtgtctataagaagctcatgggcaaggatgttaattgtgaattcccagagtttcaatagtaaacaaaaatgactaaataaaaatatatatattcatagt

SEQ ID NO: 258 - protein, 194 aa, Homo sapiens
MFSSSAKIVKPNGEKPEEFESGISQALLELEMNSELKAQLRELNITAAKEIEVGGGRKAIIILVPVTQLKSFQKIQIRLVSELEKKFSGKHVVFIAQRRILPKPTRKSCTKNKQKRPRSSTVTAVHDAILEDLVFPSEIVGKKIRVKLDGSRLIKVHLDKAQQNNVEHKVETFSGVYKKLMGKDVNCEFPEFQS

SEQ ID NO: 259 - DNA, 581 bp, Homo sapiens
ggagaaggccatgttcagttcgagcgccaagatcgtgaaacccaacggcgagaagccggaggagttcgagtccggcatctcccaggaaattgaagttggtggtggtcggaaagctatcataatacttgttcccgttactcaactgaaatctttccagaaaatccaaatccggctagtaagtgaattggagaaaaagttcagtgggaagcatgtcgtctttatcgctcagaggagaattctgcctaagccaactcgaaaaagctgtacaaaaaataagcaaaagcgtcccaggagcagcactgtgacagctgtgcacgatgccatccttgaggacttggtcttcccaagtgaaattgtgggcaagaaaatccgcgtcaaactagatggcagccggctcataaaggttcatttggacaaagcacaacagaacaatgtggaacacaaggttgaaactttttctggtgtctataagaagctcatgggcaaggatgttaattgtgaattcccagagtttcaatagtaaacaaaaatgactaaataaaaatatatatattcatagtaaaaaaaaaaaaaaaaatctc

SEQ ID NO: 260 - DNA, 2201 bp, Homo sapiens
gggggtgggaagagctgaagcaggcgctcttggctcggcgcggcccgctgcaatccgtggaggaacgcgccgccgagccaccatcatgcctgggcacttacaggaaggcttcggctgcgtggtcaccaaccgattcgaccagttatttgacgacgaatcggaccccttcgaggtgctgaaggcagcagagaacaagaaaaaagaagccggcgggggcggcgttgggggccctggggccaagagcgcagctcaggccgcggcccagaccaactccaacgcggcaggcaaacagctgcgcaaggagtcccagaaagaccgcaagaacccgctgccccccagcgttggcgtggttgacaagaaagaggagacgcagccgcccgtggcgcttaagaaagaaggaataagacgagttggaagaagacctgatcaacaacttcagggtgaagggaaaataattgatagaagaccagaaaggcgaccacctcgtgaacgaagattcgaaaagccacttgaagaaaagggtgaaggaggcgaattttcagttgatagaccgattattgaccgacctattcgaggtcgtggtggtcttggaagaggtcgagggggccgtggacgtggaatgggccgaggagatggatttgattctcgtggcaaacgtgaatttgataggcatagtggaagtgatagatctggcctgaagcacgaggacaaacgtggaggtagcggatctcacaactggggaactgtcaaagacgaattaactgacttggatcaatcaaatgtgactgaggaaacacctgaaggtgaagaacatcatccagtggcagacactgaaaataaggagaatgaagttgaagaggtaaaagaggagggtccaaaagagatgactttggatgagtggaaggctattcaaaataaggaccgggcaaaagtagaatttaatatccgaaaaccaaatgaaggtgctgatgggcagtggaagaagggatttgttcttcataaatcaaagagtgaagaggctcatgctgaagattcggttatggaccatcatttccggaagccagcaaatgatataacgtctcagctggagatcaattttggagaccttggccgcccaggacgtggcggcaggggaggacgaggtggacgtgggcgtggtgggcgcccaaaccgtggcagcaggaccgacaagtcaagtgcttctgctcctgatgtggatgacccagaggcattcccagctctggcttaactggatgccataagacaaccctggttcctttgtgaacccttctgttcaaagcttttgcatgcttaaggattccaaacgactaagaaattaaaaaaaaaaagactgtcattcataccattcacacctaaagactgaattttatctgttttaaaaatgaacttctcccgctacacagaagtaacaaatatggtagtcagttttgtatttagaaatgtattggtagcagggatgttttcataattttcagagattatgcattcttcatgaatacttttgtattgctgcttgcaaatatgcatttccaaacttgaaatataggtgtgaacagtgtgtaccagtttaaagctttcacttcatttgtgttttttaattaaggacttagaagttcccccaattacaaactggttttaaatattggacatactggttttaatacctgctttgcatattcacacatggtcaactgggacatgttaaactttgatttgtcaaattttatgctgtgtggaatactaactatatgtattttaacttagttttaatattttcattttgggggaaaaatcttttttcacttctcatgatagctgttatatatatatgctaaatctttatatacagaaatatcagtacttgaacaaattcaaagcacatttggtttattaacccttgctccttgcatggctcattaggttcaaattataactaatttacattttcagctatatttactttttaaatgcttgagtttcccattttaaaatctaaactagacatcttaattggtgaaagttgtttaaactacttattgttggtaggcacatcgtgtcaagtgaagtagttttataggtatgggttttttctcccccttcaccagggtgggtggaataagttgatttggccaatgtgtaatatttaaactgttctgtaaaataaaaaaaaaaaaaaaaaa

SEQ ID NO: 261 - protein, 387 aa, Homo sapiens
MPGHLQEGFGCVVTNRFDQLFDDESDPFEVLKAAENKKKEAGGGGVGGPGAKSAAQAAAQTNSNAAGKQLRKESQKDRKNPLPPSVGVVDKKEETQPPVALKKEGIRRVGRRPDQQLQGEGKIIDRRPERRPPRERRFEKPLEEKGEGGEFSVDRPIIDRPIRGRGGLGRGRGGRGRGMGRGDGFDSRGKREFDRHSGSDRSGLKHEDKRGGSGSHNWGTVKDELTDLDQSNVTEETPEGEEHHPVADTENKENEVEEVKEEGPKEMTLDEWKAIQNKDRAKVEFNIRKPNEGADGQWKKGFVLHKSKSEEAHAEDSVMDHHFRKPANDITSQLEINFGDLGRPGRGGRGGRGGRGRGGRPNRGSRTDKSSASAPDVDDPEAFPALA

SEQ ID NO: 262 - DNA, 2847 bp, Homo sapiens
acctttaagcgtcacgggtggggctgcagcttctggacctaggactttgaacatgtcgcgcctgaagcggatagcggggcaggatctccgcgctggtttcaaagcaggtggaagagactgcggtacctcggtaccccaagggctgttgaaggcagcgaggaagagcggccagttaaacctgtcgggtagaaacctcagtgaagtgccgcagtgtgtctggagaataaatgtggatatccctgaggaagctaatcagaatctttcgtttggtgctactgaaagatggtgggagcagacagatttgaccaaactaataatatcaaacaataaacttcagtcacttacagatgacctgcgactcttgcctgcactgactgttcttgatatacatgataatcagttgacatcccttccttctgctataagagagctagaaaatcttcagaaacttaatgtcagccataataaactgaaaatactccctgaagaaattacaaacctaagaaacctgaagtgcctgtatctccagcataatgaattaacctgcatatcagagggatttgaacaactttccaatttagaagatttagatctttcaaacaatcatcttacaactgttcctgctagtttttcttctctgtccagtctggtgcgactcaatctttctagtaatgaactgaagagtttgccagcagaaataaatagaatgaaaaggttgaagcatttggattgtaattcaaatctcttggaaactatacctcctgaattggctggcatggaatcactagaattgctttatttgcggaggaataaattacgttttctaccagaatttccttcttgtagtctattgaaggaattgcacgtaggtgaaaaccagattgaaatgttagaggcagaacatcttaaacatctgaattcaattcttgtgctagacctgagggataacaagttaaaatctgttccagatgaaattatactactacggtccttggaaaggcttgacctaagcaacaatgatattagtagtcttccctattcattggggaaccttcatttgaaatttttggcattagaaggaaatcctttgagaacaattcgaagagaaattataagtaaaggaacacaagaagtcctaaaatatctacgaagcaagatcaaagatgatggacctagccaaagtgagtctgctactgagactgccatgacactaccaagtgaatccagagtcaatatacatgccatcattacattaaaaatattagactatagtgataaacaagcaactttgattcctgatgaggtgtttgatgcagtaaaaagcaacatcgtcacttctattaacttcagtaagaatcaactatgtgaaattccaaaaaggatggtagaactgaaggaaatggtttctgatgtcgatctcagttttaataaactttcctttatatccttggagttatgtgtgcttcagaaattgacttttttagatctcaggaacaattttttaaattctttgccagaagaaatggaatcactggtaagactgcaaacgatcaatctttcctttaataggtttaaaatgctacctgaagttctatatcgtatcttcacacttgaaacaattctgattagtaataatcaggttggatctgtggaccctcagaaaatgaagatgatggaaaatctgaccacgttggaccttcaaaataatgacctcttacaaattccaccagagctcggtaattgtgtaaacttaagaacattactattggatggaaatccattccgagttcctcgagcagccatattaatgaaaggaacagctgctatacttgaatatttgagagaccgaattcctacttaacatggagttgctttataacccttgtcatgtattattaaccctggttaattctaaggaggatgtaacatttgttttagtatcatcttaaaaggtgattattgtaattgatcttgtagtttcccagtatcacctacccgttggtataattagcctgggccatattcactgccagtaaatatttttacatttttatttaagatttttgtaaggtgttgtgtacatttgtaatggtgataaccacaatgtgttcatacatttgttctaaatgttttgcttatgatttatcctgctaactttcattttcttatagcaagcagttttttcaaaaatgaatttttatttaatgtggttcagtattataataacaaagcatttttgtagaactggttttttttctcatttatttttgtattccatacaatgtgaccaattgacttgaatatgactagccagtttctatgtttttgttagatataaaattaaatcgaattttgttgaatactgttctttggcatttaaaaaataagaccttcttatcttgggccacatgtcaaaagaaaaaggaaacaaaaatatattaaaaataagacttttcattacccatgataggacttttgtgatatggctaatctcagtacacatttcaacttaaaacctttttatttacagcaccataattttaaaatttacttgcaatcttggtaagactaaacttgcagtgtttttctaaaagggaatttgataggtaaacttgatttaataaaaattaaatatcatttttgtttacaccaaaattatcagaagtaggttgattagtcattataacacttaccatatgattctattaagaagtcaattcagtagcatgtatatcaatttatatagataggtagatagcttttggatgattgaggcatgcttatattatgaaaaaaattgctaataaagataaatactacatgttcagaataaaagttacatttttc

SEQ ID NO: 263 - protein, 602 aa, Homo sapiens
MSRLKRIAGQDLRAGFKAGGRDCGTSVPQGLLKAARKSGQLNLSGRNLSEVPQCVWRINVDIPEEANQNLSFGATERWWEQTDLTKLIISNNKLQSLTDDLRLLPALTVLDIHDNQLTSLPSAIRELENLQKLNVSHNKLKILPEEITNLRNLKCLYLQHNELTCISEGFEQLSNLEDLDLSNNHLTTVPASFSSLSSLVRLNLSSNELKSLPAEINRMKRLKHLDCNSNLLETIPPELAGMESLELLYLRRNKLRFLPEFPSCSLLKELHVGENQIEMLEAEHLKHLNSILVLDLRDNKLKSVPDEIILLRSLERLDLSNNDISSLPYSLGNLHLKFLALEGNPLRTIRREIISKGTQEVLKYLRSKIKDDGPSQSESATETAMTLPSESRVNIHAIITLKILDYSDKQATLIPDEVFDAVKSNIVTSINFSKNQLCEIPKRMVELKEMVSDVDLSFNKLSFISLELCVLQKLTFLDLRNNFLNSLPEEMESLVRLQTINLSFNRFKMLPEVLYRIFTLETILISNNQVGSVDPQKMKMMENLTTLDLQNNDLLQIPPELGNCVNLRTLLLDGNPFRVPRAAILMKGTAAILEYLRDRIPT

SEQ ID NO: 264 - DNA, 636 bp, Homo sapiens
gctctttccctaagcagcctgaggtaatctgtgaaaatggttcgctactcacttgacccggagaaccccacgaaatcactcgtgaaactgctcaggccatcaagggtatgcatatacaaaaagccacgaagtatctgaaagatgtcactttacagaaacagtgtgtaccattccgacgttacaatggtggagttggcaggtgtgcgcaggccaagcagtggggctggacacaaggtcggtggcccaaaaagagtgctgaatttttgctgcacatgcttaaaaacacagagagtaatgctgaacttaagggtttagatgtagattctctggtcattgagcatatccaagtgaacaaagcacctaagatgcgccgccggacctacagagctcatggtcggattaacccatacatgagctctccctgccacattgagatgatccttacggaaaaggaacagattgttcctaaaccagaagaggaggttgcccagaagaaaaagatatcccagaagaaactgaagaaacaaaaacttatggcacgggagtaaattcagcattaaaataaatgtaattaaaaggaaaaataaaaaataaaaataaataaataaataaataaaaaaaaaaaaaaaaaaaaag

SEQ ID NO: 265 - DNA, 622 bp, Homo sapiens
gctctttccctaagcagcctgaggtaatctgtgaaaatggttcgctactcacttgacccggagaaccccacgaaatcatgcaaatcaagaggttccaatcttcgtgttcactttaagaacactcgtgaaactgctcaggccatcaagggtatgcatatacaaaaagccacgaagtatctgaaagatgtcactttacagaaacagtgtgtaccattccgacgttacaatggtggagttggcaggtgtgcgcaggccaagcagtggggctggacacaaggtcggtggcccaaaaagagtgctgaatttttgctgcacatgcttaaaaacacagagagtaatgctgaacttaagggtttagatgtagattctctggtcattgagcatatccaagtgaacaaagcacctaagatgcgccgccggacctacagagctcatggtcggattaacccatacatgagctctccctgccacattgagatgatccttacggaaaaggaacagattgttcctaaaccagaagaggaggttgcccagaagaaaaagatatcccagaagaaactgaagaaacaaaaacttatggcacgggagtaaattcagcattaaaataaatgtaattaaaagg

SEQ ID NO: 266 - protein, 111 aa, Homo sapiens
MVRYSLDPENPTKSCKSRGSNLRVHFKNTRETAQAIKGMYIQKGTKYLKDVTLQKQCIPFRHYNGGVGRCAQAKQWGWTQGRWPKKSAEFLLHVLKNTESNAELKGRFSGH

SEQ ID NO: 267 - DNA, 1318 bp, Homo sapiens
cgggaaggattgaatacgagacgctgtctgcttgctgccttaagacagctagctgaattgctgattaacttttaaaatacccagcttggtttatttttcttagaatctgttgctaagactggggacgctgttttcttttacaaagggaaatctaagttaatttcaaggcattcgaaatggggaaagactattattgcattttgggaattgagaaaggagcttcagatgaagatattaaaaaggcttaccgaaaacaagccctcaaatttcatccggacaagaacaaatctcctcaggcagaggaaaaatttaaagaggtcgcagaagcttatgaagtattgagtgatcctaaaaagagagaaatatatgatcagtttggggaggaagggttgaaaggaggagcaggaggtactgatggacaaggaggtaccttccggtacacctttcatggcgatcctcatgctacatttgctgcatttttcggagggtccaacccctttgaaattttctttggaagacgaatgggtggtggtagagattctgaagaaatggaaatagatggtgatccttttagtgcctttggtttcagcatgaatggatatccaagagacaggaattctgtggggccatcccgcctcaaacaagatcctccagttattcatgaacttagagtatcacttgaagagatatatagtggttgtaccaaacggatgaagatttctcgaaaaaggctaaacgctgatggaaggagttacagatctgaggacaaaattcttaccattgagattaaaaaagggtggaaagaaggcaccaaaattacttttccaagagaaggagatgaaacaccaaatagtattccagcagacattgtttttatcattaaagacaaagatcatccaaaatttaaaagggatggatcaaatataatttatactgctaaaattagtttacgagaggcattgtgtggctgctcaattaatgtaccaacactggatggaagaaacatacctatgtcagtaaatgatattgtgaaacccggaatgaggagaagaattattggatatgggctgccatttccaaaaaatcctgaccaacgtggtgaccttctaatagaatttgaggtgtccttcccagatactatatcttcttcatccaaagaagtacttaggaaacatcttcctgcctcatagaatgaagaactttgttacacatattttgataaggcactgaaaatataaaaggactggtagtttactgatgtagatgtgaattctgtataaagatgtgtaaattgttttgagggttcattaaattgcat

SEQ ID NO: 268 - protein, 337 aa, Homo sapiens
MGKDYYCILGIEKGASDEDIKKAYRKQALKFHPDKNKSPQAEEKFKEVAEAYEVLSDPKKREIYDQFGEEGLKGGAGGTDGQGGTFRYTFHGDPHATFAAFFGGSNPFEIFFGRRMGGGRDSEEMEIDGDPFSAFGFSMNGYPRDRNSVGPSRLKQDPPVIHELRVSLEEIYSGCTKRMKISRKRLNADGRSYRSEDKILTIEIKKGWKEGTKITFPREGDETPNSIPADIVFIIKDKDHPKFKRDGSNIIYTAKISLREALCGCSINVPTLDGRNIPMSVNDIVKPGMRRRIIGYGLPFPKNPDQRGDLLIEFEVSFPDTISSSSKEVLRKHLPAS

SEQ ID NO: 269 - DNA, 1887 bp, Homo sapiens
gcgcacggcctgtccgctgcacaccagcttgttggcgtcttcgtcgccgcgctcgccccgggctactcctgcgcgccacaatgagctcccgcatcgccagggcgctcgccttagtcgtcacccttctccacttgaccaggctggcgctctccacctgccccgctgcctgccactgccccctggaggcgcccaagtgcgcgccgggagtcgggctggtccgggacggctgcggctgctgtaaggtctgcgccaagcagctcaacgaggactgcagcaaaacgcagccctgcgaccacaccaaggggctggaatgcaacttcggcgccagctccaccgctctgaaggggatctgcagagctcagtcagagggcagaccctgtgaatataactccagaatctaccaaaacggggaaagtttccagcccaactgtaaacatcagtgcacatgtattgatggcgccgtgggctgcattcctctgtgtccccaagaactatctctccccaacttgggctgtcccaaccctcggctggtcaaagttaccgggcagtgctgcgaggagtgggtctgtgacgaggatagtatcaaggaccccatggaggaccaggacggcctccttggtaaggagctgggattcgatgcctccgaggtggagttgacgagaaacaatgaattgattgcagttggaaaaggcagctcactgaagcggatccctgtttttggaatggagcctcgcatccgatacaaccctttacaaggccagaaatgtattgttcaaacaacttcatggtcccagtgctcaaagacctgtggaactggtatctccacacgagttaccaatgacaaccctgagtgccgccttgtgaaagaaacccggatttgtgaggtgcggccttgtggacagccagtgtacagcagcctgaaaaagggcaagaaatgcagcaagaccaagaaatcccccgaaccagtcaggtttacttacgctggatgtttgagtgtgaagaaataccggcccaagtactgcggttcctgcgtggacggccgatgctgcacgccccagctgaccaggactgtgaagatgcggttccgctgcgaagatggggagacattttccaagaacgtcatgatgatccagtcctgcaaatgcaactacaactgcccgcatgccaatgaagcagcgtttcccttctacaggctgttcaatgacattcacaaatttagggactaaatgctacctgggtttccagggcacacctagacaaacaagggagaagagtgtcagaatcagaatcatggagaaaatgggcgggggtggtgtgggtgatgggactcattgtagaaaggaagccttgctcattcttgaggagcattaaggtatttcgaaactgccaagggtgctggtgcggatggacactaatgcagccacgattggagaatactttgcttcatagtattggagcacatgttactgcttcattttggagcttgtggagttgatgactttctgttttctgtttgtaaattatttgctaagcatattttctctaggcttttttccttttggggttctacagtcgtaaaagagataataagattagttggacagtttaaagcttttattcgtcctttgacaaaagtaaatgggagggcattccatcccttcctgaagggggacactccatgagtgtctgtgagaggcagctatctgcactctaaactgcaaacagaaatcaggtgttttaagactgaatgttttatttatcaaaatgtagcttttggggagggaggggaaatgtaatactggaataatttgtaaatgattttaattttatattcagtgaaaagattttatttatggaattaaccatttaataaagaaatatttacct

SEQ ID NO: 270 - protein, 381 aa, Homo sapiens
MSSRIARALALVVTLLHLTRLALSTCPAACHCPLEAPKCAPGVGLVRDGCGCCKVCAKQLNEDCSKTQPCDHTKGLECNFGASSTALKGICRAQSEGRPCEYNSRIYQNGESFQPNCKHQCTCIDGAVGCIPLCPQELSLPNLGCPNPRLVKVTGQCCEEWVCDEDSIKDPMEDQDGLLGKELGFDASEVELTRNNELIAVGKGSSLKRIPVFGMEPRIRYNPLQGQKCIVQTTSWSQCSKTCGTGISTRVTNDNPECRLVKETRICEVRPCGQPVYSSLKKGKKCSKTKKSPEPVRFTYAGCLSVKKYRPKYCGSCVDGRCCTPQLTRTVKMRFRCEDGETFSKNVMMIQSCKCNYNCPHANEAAFPFYRLFNDIHKFRD

SEQ ID NO: 271 - DNA, 2126 bp, Homo sapiens
gctctgtcagtaacacatgtgtaagagccgcggagggagcgagcgagccggctagaggccagcgccgccgccgccgccgcctccgagccgggcagcaacagccccggcagcggcgcaggctccagcgcgccgggcccggccggccgcagcccccgacgcctgggtgcgcctgcctgccggcctccgcaccgtccgccgccgctcccggggctgttgtgtctgcgactgctcccggccggaggtgcagggagctcagccgagccgccgctgccatcccggagcgagcaagcgagcgagcgcgcgggagggaggaaggcggcggcggaggaggaggaggagcgggaggagcgcgggcgggggcgggggccgccgggcgggggaatatacaaagtgaagccacattgccaaacttgcagcagcgattgcagcagttgctgccgctgcgccgcgcctgaagccgcgccgcgcgggccgagggctcctgcagctgctcgcgcgcagtcggaggcggagaaggacgaagactgagactgacacttctgctcccggccgcccggcacttacgcgggggccccccaacccgccccagagcaacgcgatttaaaaaaaaaaaaaaagccgcccttagccccctcctctcctttcctgcttctgcgagaactccctccctccctccagctccgccagcccaggcgccccttccctggaagccgagcggcttcgctcgcatttcaccgccgccgcctctcgcaatattgcaatataggggaaaagcagaccatggtgaatccgggcagcagctcgcagccgcccccggtgacggccggctccctctcctggaagcggtgcgcaggctgcgggggcaagattgcggaccgctttctgctctatgccatggacagctattggcacagccggtgcctcaagtgctcctgctgccaggcgcagctgggcgacatcggcacgtcctgttacaccaaaagtggcatgatcctttgcagaaatgactacattaggttatttggaaatagcggtgcttgcagcgcttgcggacagtcgattcctgcgagtgaactcgtcatgagggcgcaaggcaatgtgtatcatcttaagtgttttacatgctctacctgccggaatcgcctggtcccgggagatcggtttcactacatcaatggcagtttattttgtgaacatgatagacctacagctctcatcaatggccatttgaattcacttcagagcaatccactactgccagaccagaaggtctgctaaaaggtcagagtaatgcagaatgcgtgccttcatctcagatttgttcatcacaggtggatcccatgtgtcttcagtagacaagtcacctttgtagctagcaccagtgccagctccatgccattgcaccttctttagtcttgattgcccttcccgcatttattggtgtattaaaatgactgaatatgaacattaaggactccatgaacctgggctaatgggagactgtagagaaaatgaaaaaagatccaccagaggacatcttggggagggggagggagctgggggggagggaaatgactaatgaagctaattaaaagaagcattcaaatctgctttctaccctcattaacaattagcagggcactggccagagtttgtaccctgtgttttaccttaacaacattctatttgctctttgtatatttaagtgttgtaaggaaacgtgtttcaatcaaaactgaccatgagataaaggaaagagatgtggcttttgtgatattctatcacaaacacttattgtatctctgtaaaatacaatgtatgtatgcatgtaagtgtttttgtcctaatgttgctactcccatggcaaagaaaaaaaaaagaatgaaaaaaagaaaaaaaatttggaaaaaaaaatcaggctcatagcagctactgtgtagaaaattccccctacttctaatttgctgaatgaagaaaaaaaaaaatcttttatttgtgatattttcagagacatttgctctagtatggtgtatttaaataataaaaacttaaaagaaaaaataaaaaaaaaaaaaaaaaaaaaaaaaaaaaaaaaaaaaaaaaaaaaaaaaaaaaaaaaaaaaaaa

SEQ ID NO: 272 - protein, 165 aa, Homo sapiens
MVNPGSSSQPPPVTAGSLSWKRCAGCGGKIADRFLLYAMDSYWHSRCLKCSCCQAQLGDIGTSCYTKSGMILCRNDYIRLFGNSGACSACGQSIPASELVMRAQGNVYHLKCFTCSTCRNRLVPGDRFHYINGSLFCEHDRPTALINGHLNSLQSNPLLPDQKVC

SEQ ID NO: 273 - DNA, 1519 bp, Homo sapiens
agcgatggcggctgggccgagtgggtgtctggtgccggcgtttgggctacggttgttgttggcgactgtgcttcaagcggtgtctgcttttggggcagagttttcatcggaggcatgcagagagttaggcttttctagcaacttgctttgcagctcttgtgatcttctcggacagttcaacctgcttcagctggatcctgattgcagaggatgctgtcaggaggaagcacaatttgaaaccaaaaagctgtatgcaggagctattcttgaagtttgtggatgaaaattgggaaggttccctcaagtccaagcttttgttaggagtgataaacccaaactgttcagaggactgcaaatcaagtatgtccgtggttcagaccctgtattaaagcttttggacgacaatgggaacattgctgaagaactgagcattctcaaatggaacacagacagtgtagaagaattcctgagtgaaaagttggaacgcatataaatcttgcttaaattttgtcctatccttttgttaccttatcaaatgaaatattacagcacctagaaaataatttagttttgcttgcttccattgatcagtcttttacttgaggcattaaatatctaattaaatcgtgaaatggcagtatagtccatgatatctaaggagttggcaagcttaacaaaacccattttttataaatgtccatcctcctgcatttgttgataccactaacaaaatgctttgtaacagacttgcggttaattatgcaaatgatagtttgtgataattggtccagttttacgaacaacagatttctaaattagagaggttaacaagacagatgattactatgcctcatgtgctgtgtgctctttgaaaggaatgacagcagactacaaagcaaataagatatactgagcctcaacagattgcctgctcctcagagtctctcctatttttgtattacccagctttctttttaatacaaatgttatttatagtttacaatgaatgcactgcataaaaactttgtagcttcattattgtaaaacatattcaagatcctacagtaagagtgaaacattcacaaagatttgcgttaatgaagactacacagaaaacctttctagggatttgtgtggatcagatacatacttggcaaatttttgagttttacattcttacagaaaagtccatttaaaagtgatcatttgtaagaccaaaatataaataaaaagtttcaaaaatctatctgaatttggaattcttctggtttgttctttcatgtttaaaaatgatgtttttcaatgcatttttttcatgtaagccctttttttagccaaaatgtaaaaatggctgtaatatttaaaacttataacatcttattgttggtaatagtgctttatatttgtctgattttatttttcaaagttttttcatttatgaacacattttcattggtatattatttaaggaatatctcttgatatagaatttttatattaaaaatgatttttctttggc

SEQ ID NO: 274 - protein, 162 aa, Homo sapiens
MAAGPSGCLVPAFGLRLLLATVLQAVSAFGAEFSSEACRELGFSSNLLCSSCDLLGQFNLLQLDPDCRGCCQEEAQFETKKLYAGAILEVCGENWEGSLKSKLLLGVINPNCSEDCKSSMSVVQTLYLKLLDDNGNIAEELSILKWNTDSVEEFLSEKLERI

SEQ ID NO: 275 - DNA, 610 bp, Homo sapiens
gctctttccctaagcagcctgaagtaatctgtgaaaatggttcgctattcacttgacccggagaaccccatgaaatcacactcgtgaaactgctcaggccatcaagggtatgcatatacgaaaagccacgaagtatcttaaagatgtcactttacagaaacagtgcataccattccgacgttacaatggtggagttggcaagtgtgcgcaggccaagcagtggggctggacacaaggtcggtggcccaaaaagagtgctgaatttttgctgcacatgtttaaaaacgcagagggtaatactgaacttaagggtttagatgtagattctctggtcattgagtatatccaagtgaacaaagcacctaagatgctccgccggacctacagagctcatggtcggattaactcatacatgagctctccctggcacattgagatgatccttactgaaaaggaacagattgttcctaaaccagaaaaggaggttgcccagaagaaaaagatatcccagaagaaactgaagaaacaaaaacttatggcccggaagtaaattcagcattaaaataaatgtaattaaaaggaaaaaaaaaaaaaaaaaaaaaaaaaaaag

SEQ ID NO: 276 - DNA, 622 bp, Homo sapiens
gctctttccctaagcagcctgaagtaatctgtgaaaatggttcgctattcacttgacccggagaaccccatgaaatcatgcaaatcaagaggttccaatcttcgtgttcactttaaggacactcgtgaaactgctcaggccatcaagggtatgcatatacgaaaagccacgaagtatcttaaagatgtcactttacagaaacagtgcataccattccgacgttacaatggtggagttggcaagtgtgcgcaggccaagcagtggggctggacacaaggtcggtggcccaaaaagagtgctgaatttttgctgcacatgtttaaaaacgcagagggtaatactgaacttaagggtttagatgtagattctctggtcattgagtatatccaagtgaacaaagcacctaagatgctccgccggacctacagagctcatggtcggattaactcatacatgagctctccctggcacattgagatgatccttactgaaaaggaacagattgttcctaaaccagaaaaggaggttgcccagaagaaaaagatatcccagaagaaactgaagaaacaaaaacttatggcccggaagtaaattcagcattaaaataaatgtaattaaaagg

SEQ ID NO: 277 - DNA, 1541 bp, Homo sapiens
ctttttcacaacgggtttgctgccagaacacaggtgtcgtgaaaactacccctaaaagccaaaatgggaaaagaaaagactcatatcaacattgtcgtcattggacacgtagattcgggcaagtccaccacttctggccatctgatctacaaatgcggtggcatcgacaaaagaacaattgaaaaattgcagaaagaggctgctgagatgggaaagggctccttcaagtatgcctgagtcttggataaactgaaagctgagcgtgaacgtggtatcaccattgatatctccttgtggaaatttgagaccagcaagtactatgtgactatcattgatgccccaggacacagagacttcatcaaaaacatgattacagggacatctcaggctggttgtgctgtcctaattgttgctgctggtgttggtgaatttgaagctggtatctccaagaatgggcagacccgagagcatgcccttctggcatatacactgggtgtgaaacaactaattgttgatgttaacaaaatggattccactgagccaccctacagccagaagagatatgaggaaattgttaaggaaatcagcacttacattaagaaaattggctacaaccccaacacagtagcatttgtgccaatttctggttagaatggtgacaacatgctggagccaagtgctaacatgccttggttcaagggatggaaagtcacccataaggatggcaatgccagtggaaccatgctgcttgaggctctggactgcatcctaccaccaactcgtccaactgacaagcccttgcgcctgcctctccaggatgtctacaaaattggtggtattggtactgttcttgttggccgagtggagactggtattctcaaacctggtatggtggtcacctttgctccagtcagcgttacaacagaagtaaaatctgtcgaaatgcaccatgaagctttgaatgaagctcttcctggggacaatatgggcttcaatgtcaagaatgtgtctgtcaaggatgttcatcgtggcaacgttgctggtgacagcaaaaatgacccaccaatggaagcagctggcaagcccatgtgtgttgagagcttctcagactatccacctttgggtcgctttactgttcatgatatgagacagacacttgcggtgggtgtcatcaaagcagtggacaagaaggctgctggagctggcaaggtcaccaagtctgcccagaaagctcagaaggctaaatgaatattatccctaatacctgccaccccactcttaatcagtggtggaagaacggtctcagaactgtttgtttcaattggccatttaagtttagtagtaaaagactggttaatgataataatgcaacataaaaccttcagaaggaaaggagaatgttttgtggaccactttggttttctttttcgcatgcagcagttttaagttattagtttttaaaatcagtactttttaaatggaaacaacttgaccaaaaatttgtcacagaattttgagacccattaaaaaagtttaatgag

SEQ ID NO: 278 - protein, 194 aa, Homo sapiens
MLEPSANMPWFKGWKVTHKDGNASGTMLLEALDCILPPTRPTDKPLRLPLQDVYKIGGIGTVLVGRVETGILKPGMVVTFAPVSVTTEVKSVEMHHEALNEALPGDNMGFNVKNVSVKDVHRGNVAGDSKNDPPMEAAGKPMCVESFSDYPPLGRFTVHDMRQTLAVGVIKAVDKKAAGAGKVTKSAQKAQKAK

SEQ ID NO: 279 - DNA, 960 bp, Homo sapiens
cacaggtgtcgtgaaaactacccctaaaagccaaaatgggaaaagaaaagactcatatcaacattgtcgtcattggacacgtagattcgggcaagtccaccacttctggccatctgatctacaaatgcggtggcatcgacaaaagaacaattgaaaaattgcagaaagaggctgctgagatgggaaagggctccttcaagtatgcctgagtcttggataaactgaaagctgagcgtgaacgtggtatcaccattgatatctccttgtggaaatttgagaccagcaagtactatgtgactatcattgatgcccttctggcatatacactgggtgtgaaacaactaattgttgatgttaacaaaatggattccactgagccaccctacagccagaagagatatgaggaaattgttaaggaaatcagcacttacattaagggtgacaacatgctggagccaagtgctaacatgccttggttcaagggatggaaagtcacccataaggatggcaatgccagtggaaccatgctgcttgaggctctggactgcatcctaccaccaactcgtccaactgacaagccggccaaataagctctggctatgcacctgtattggattgccacacagctcacattgcatgcaagtttgctgagctgaaggaaaagattgatcgccgttctggtaaaaagctggaagatggccctaaattcttgaagtctggtgatgctgccattgctgatatggttcctggcaagcccatgtgtgttgagagcttctcagactatccacctttgggtcgctttactgttcatgatatgagacagacacttgcggtgggtgtcatcaaagcagtggacaagaaggctgctggagctggcaaggtcaccaagtctgcccagaaagctcagaaggctaaatgaatattatccctaatacctgccaccccactcttaatcagtgg

SEQ ID NO: 280 - DNA, 717 bp, Homo sapiens
gccaaaatgggaaaagaaaagactcatatcaacattgtcgtcattggacacgtagattcgggcaagtccaccacttctggccatctgatctacaaatgcggtggcatcgacaaaagaacaattgaaaaattgcagaaagaggctgctgagatgggaaagggctccttcaagtatgcctgagtcttggataaactgaaagctgagcgtgaacgtggtatcaccattgatatctccttgtggaaatttgagaccagcaagtactatgtgactatcattgatgccccaggacacagagacttcatcaaaaacatgattacagggacatctcaggctggttgtgctgtcctaattgttgctgctggtgttggtgaatttgaagctggtatctccaagaatgggcagacccgagagcatgcccttctggcatatacactgggtgtgaaacaactaattgttgatgttaacaaaatggattccactgagccaccctacagccagaagagatatgaggaaattgttaaggaaatcagcacttacattaagaaaattggctacaaccccaacacagtagcatttgtgccaaattcttgaagtctggtgatgctgccattgctgatatggttcctggcaagcccatgtgtgttgagagcttctcagactatccacctttgggtcgctttactgttcatgatatgagacagacacttgcggtgggtg

SEQ ID NO: 281 - DNA, 709 bp, Homo sapiens
gtggagactggtattctcaaacctggtatggtggtcacctttgctccagtcagcgttacaacagaagtaaaatctgtcgaaatgcaccatgaagctttgaatgaagctcttcctggggacaatatgggcttcaatgtcaagaatgtgtctgtcaaggatgttcatcgtggcaacgttgctggtgacagcaaaaatgacccaccaatggaagcagctggcttcactgctcaggtgattatcctgaaccatccgggccaaataagctctggctatgcacctgtattggattgccacacagctcacattgcatgcaagtttgctgagctgaaggaaaagattgatcgccgttctggtaaaaagctggaagatggccctaaattcttgaagtctggtgatgctgccattgctgatatggttcctggcaagcccatgtgtgttgagagcttctcagactatccacctttgggtcgctttactgttcatgatatgagacagacacttgcggtgggtgtcatcaaagcagtggacaagaaggctgctggagctggcaaggtcaccaagtctgcccagaaagctcagaaggctaaatgaatattatccctaatacctgccaccccactcttaatcagtggtggaagaacggtctcagaactgtttgtttcaattggccatttaagtttagtagtaaattttgtggaccactttggtt

SEQ ID NO: 282 - DNA, 3567 bp, Homo sapiens
gttactcaaagactacctactgcgtggtgctccaagtgaaattcgtgaagaattagaaaagcagctttattcttgtattgctctcaaagtcacagcaaatcaaatggaaatggaacattctttgatactaaataacctaaaaacattattgtggaagaaaatttcctacactaatgactcttagttcatttggacataattaccattttaagaaacctgccacttttaaagaacaattttgagcattaaaaaaaaatggcttcaaattccggccagttacacaaaactccttccccccaggcctgagaagccatcagtatgtgatcactgaagtaatggcaggtgtaggatcaacaggtccccaagatgtcattcctgcccttttagaagccctgttacatctccgaagtacattcattgtgtaactattttgactgactttaaaaaccaatgctgtgaaaagcttcattccataaacatcaacagtgagtgatttgtagatttaccttagccaaaataccaatgctggaagcattgtgtttgcattgaagctgctgttcaacaagaaaatttataaatttactaatgtcttagcatggtaaagtttgcacattaacagaaattaagactgcaaagcaggttaaacttgcttctttataaaacagatgttgggttaatagcatggtttactgtattaaagacttatacacccatttttaacctcattcagacatcaagttatgtgtagcttcacaatggttcaagtggcttacttcaagaaatcttatacttgacagtacaccaattttattgactaaaaatggatgaactttcctaaagattcaaagggcccatcttagtatcacgcagctgactgagcccttcaaaactgacatcttaaggcccaatcaagatccacatatcctgattttgaactatgtgaaagtgggactgtaagtgcaagactaaaataaattatagcagactttttagtaataactttccattttcaaacagtatatcctgtgggccaaagggctatttcttaaagaggcatgtaaatgtatttatttatctaatgtttttttccccatgtaaacttgatatacaaggtttagtatttgctcctctttcatattattttcacacgtatactcagatttggcatgtacctttcaacatctccataaaattaaacaccttttggagaaaagaaccactattttctgctcaaaggtttcgcctacctaaagtggaacatgttaaaaatctatgtgaccatcactggacagctttctctcaaaactttccttcaacgccatggattagcaccagttttgtttactttaaggtacttttcccattcatcatctggttataataaatggatggaagaaatatttcccactgatggttggtctgttgcttgccaaatttttagggagagctgttcatcatacaacataagggataatgactcctgtcaggtaaaacagaagcccaagaaataacaactttttttcttaaaaagttagttacacttgttttcttggagaaaaaaacctgtcaactcctttgcttttccaaaatatttcagggtatttcctataaggttcataagaataagagcttaacacagaaatagttgctgttcataagtttattatctatatctgaaaaaatcatagaaaattgctgggtttagctctcagcagcccgctcctgagctctgaggaagcttgccttcttttgagctacccgatccttcttctgagcaagggacattttgggacggttccacctacaaaagataggaatatatattttttaaactataactgaagagaatagaatatttaatttaaaattttaataaaatttaattttgatagagaatatttaagactttgcaatcagaaggttaaataatccaagttcaaatacatttacttatgtatgatcttaagctaactttcccaaaccccaacttctgtgatgtcctactaccatagggccaaaagtcaaatagaagacatgttagattcagtaataccacttctaggtatttgcccaaatgttttgaaatcagtttgtccaagagagtggcactcccatgttcattgcagcactatatattaatagcaacagataaatggataaaggaaatgtggtatacatatacataatggattattacccagtctttaaaaatgatggaaattctgtcatttgcaacatgaatgaagtggagaatattgtgctcagtgaaataagccaggcacaaaaagacaaatacttcatattcatatagaatctaaaacaatggaactcacagaagcagagagcagaatggtggttacagaggctggtgggtgcaaagaatgggcagatgatagtcaagtataaaatctccaacaggaggagtatgattttgtttttagttctattgcacagcatgatgaatatagaatatcgtacatttcacaattaagagaataaatttcaaatgttgttgccacaaagtgttaagtatttgaggtgaatatgttaaatacattgatttaattactatacattgtatttgtgggccatcacatcactttatgcttacatgttcattaagtattactttctattccatttaaagatcaaaacatgaaagatcaacaaaaagcaacttgtcagccaataaaaaaatgcagtaaccagtacttagactgtactaggatagaaagaaccacctcagtagtgtctgaggctaacacatttccatcaccacagttacttttgcaaacctggttcccttcgcttctgccacatcacgcagagctagtgatcgagtttgcacaattacaccaacagtctgccccacgtgggaaccattcccaacctgttttcttgaaaagacaaaaaaaaagacgacatacctcttctttttaacttctttcttgggcttcttttcatagactggattctctcgtatagcagcatgagctttcttatacatctcctccatctgaaacaaaggaaagcaaacagtacttggtttcatttcatgtgccctactatattaatgcaaccataacttatcttgtccttctaagccagattctcaaaaggaactaaactaaatcaatgttggtaaacactttaacttctaaatgtaactcaccttttcctaacaaattcccaattttcaccttatgcaatgtgaattatcactacagaactccatcttactcaagaaaaaaatcaggccaggtgtggtggttcatgcctgtaatctcaagcactttgggagtctgaagtgggaggatcacttcagcccaggagtttgagaccagctaaggcaacacagtgagacctgtctccataaaaaaactaattagccaggtggcaattattaatggtggcatgcacctgtagtcccagctacaggactacacgtgagtccaggaggtcaaggctgcagtggcacaatcacagctcactggaccccagcctagatgacagaatgagacctcatctctaccaaaaattaaaaaaaaaaaaaaaaaattagcaggg

SEQ ID NO: 283 - protein, 100 aa, Homo sapiens [sequence omitted]

SEQ ID NO: 284 - DNA, 1033 bp, Homo sapiens
cctagcgccgctgggcctgcaggtctctgtcgagcagcggacgccggtctctgttccgcaggatggggtttgttaaagttgttaagaataaggcctactttaagagataccaagtgaaatttagaagacgacgagagggtaaaactgattattatgctcggaaacgcttggtgatacaagataaaaataaatacaacacacccaaatacaggatgatagttcgtgtgacaaacagagatatcatttgtcagattgcttatgcccgtatagagggggatatgatagtctgcgcagcgtatgcacacgaactgccaaaatatggtgtgaaggttggcctgacaaattatgctgcagcatattgtactggcctgctgctggcccgcaggcttctcaataggtttggcatggacaagatctatgaaggccaagtggaggtgactggtgatgaatacaatgtggaaagcattgatggtcagccaggtgccttcacctgctatttggatgcaggccttgccagaactaccactggcaataaagtttttggtgccctgaagggagctgtggatggaggcttgtctatccctcacagtaccaaacgattccctggttatgattctgaaagcaaggaatttaatgcagaagtacatcggaagcacatcatgggccagaatgttgcagattacatgcgctacttaatggaagaagatgaagatgcttacaagaaacagttctctcaatacataaagaacagcgtaactccagacatgatggaggagatgtataagaaagctcatgctgctatacgagagaatccagtctatgaaaagaagcccaagaaagaagttaaaaagaagaggtggaaccgtcccaaaatgtcccttgctcagaagaaggatcgggtagctcaaaagaaggcaagcttcctcagagctcaggagcgggctgctgagagctaaacccagcaattttctatgattttttcagatatagataataaacttatgaacagcaactaaaaaaaaaaaaaaaaaaa

SEQ ID NO: 285 - protein, 297 aa, Homo sapiens [sequence omitted]

SEQ ID NO: 286 - DNA, 318 bp, Homo sapiens
atggtaaatgttaagacaaatcttgggagaaacatttatcaattccaatacctctctccaccccaatactgtatgctcttggaagaagatgaagatgcttacaagaaacagttctctcaatacataaagaacagtgtaactccagacatgatggaggagatgtataagaaagctcatgctgctgtaccagagaatccggtctatgaaaagaagcccaagaaagaagttaaaaagaagaggtggaaccgttccaaaatgtcccttgctcagaagaaggattgggtagctcaaaagaaggcaagcttcctcagagcttag

SEQ ID NO: 287 - protein, 105 aa, Homo sapiens
MVNVKTNLGRNIYQFQYLSPPQYCMLLEEDEDAYKKQFSQYIKNSVTPDMMEEMYKKAHAAVPENPVYEKKPKKEVKKKRWNRSKMSLAQKKDWVAQKKASFLRA

SEQ ID NO: 288 - DNA, 1539 bp, Homo sapiens
gctgactccagtgtcccgagaggcgccgcttcttccgctttctcgtcaggctcctgcaaccccaggcatgaaccaaggtttctgaactactgggcgggagccaacgtctcttctttctcccgctctggcggaggctttgtcgctgcgggctgggccccagggtgtcccccatggcggggccgcgggtggaggtcgatggcagcatcatggaagggggcggccagatcctgagagtctctacggccttgagctgtctcctaggcctccccttgcgggtgcagaagatccgagccggccggagcacgccaggcctgaggcctcaacatttatctggactggaaatgattcgagatttgtgtgatgggcaactggagggggcagaaattggctcaacagaaataacctttacaccagagaagatcaaaggtggaatccacacagcagataccaagacagcagggagtgtgtgcctcttgatgcaggtctcaatgccgtgtgttctctttgctgcttctccatcagaacttcatttgaaaggtggaactaatgctgaaatggcaccacagatcgattatacagtgatggtcttcaagccaattgttgaaaaatttggtttcatatttaattgtgacattaaaacaaggggatattacccaaaagggggtggtgaagtgattgttcgaatgtcaccagttaaacaattgaaccctataaatttaactgagcgtggctgtgtgactaagatatatggaagagctttcgttgctggtgttttgccatttaaagtagcaaaagatatggcagcggcagcagttagatgcatcagaaaggagatccgggatttgtatgttaacatccagcctgttcaagaacctaaagaccaagcatttggcaatggaaatggaataataattattgctgagacctccactggctgtttgtttgctggatcatcgcttggtaaacgaggtgtaaatgcagacaaagttggaattgaagctgccgaaatgctattagcaaatcttagacatggtggtactgtggatgagtatctgcaagaccagctgattgttttcatggcattagccaatggagtttccagaataaaaacaggaccagttacactccatacgcaaaccgcgatacattttgctgaacaaatagcaaaggctaaatttattgtgaagaaatcagaagatgaagaagacgccgctaaagatacttatattattgaatgccaaggaattgggatgacaaatccaaatctatagagtatttgcctcttaaatgatacctcattgatatattgcactatttcataaatactataaaataatgactaggaagtaacttattaaaggctatgacttaaatttgaagatgaagtacagtgttctaggtttgctgagaaggcttcattaaattaatctcactttgaatatctcctgagagatggacaatgaaatatcagttggtggatatgtgtgatagctgatttcaatattgaagtattgaaataaaatattctttacacctgag

SEQ ID NO: 289 - protein, 366 aa, Homo sapiens
MAGPRVEVDGSIMEGGGQILRVSTALSCLLGLPLRVQKIRAGRSTPGLRPQHLSGLEMIRDLCDGQLEGAEIGSTEITFTPEKIKGGIHTADTKTAGSVCLLMQVSMPCVLFAASPSELHLKGGTNAEMAPQIDYTVMVFKPIVEKFGFIFNCDIKTRGYYPKGGGEVIVRMSPVKQLNPINLTERGCVTKIYGRAFVAGVLPFKVAKDMAAAAVRCIRKEIRDLYVNIQPVQEPKDQAFGNGNGIIIIAETSTGCLFAGSSLGKRGVNADKVGIEAAEMLLANLRHGGTVDEYLQDQLIVFMALANGVSRIKTGPVTLHTQTAIHFAEQIAKAKFIVKKSEDEEDAAKDTYIIECQGIGMTNPNL

SEQ ID NO: 290 - DNA, 1030 bp, Homo sapiens
gcttttccttgctacctgcagaggggtccatacggcgttgttctggattcccgtcgtaacttaaagggaaactttcacaatgtccggagcccttgatgtcctgcaaatgaaggaggatgtccttaagttccttgcagcaggaacccacttaggtggcaccaatcttgacttccagatggaacagtacatctataaaaggaaaagtgatggcatctatatcataaatctgaagaggacctgggagaagcttctgctggcaggtcgtgctattgttgccattgaaaaccctgctgatgtcagtgttatatcctccaggaatactggccagagggctgtgctgaaatttgctgctgccactggagccactccaattgctggccgcttcactcctggaaccttcactaaccggatccaggcagccttccgggagccacggcttgttgtggttactgaccccagggctgaccaccagcctctcacagaggcatcttatgttaacctacctaccattgcgctgtgtaacacagattctcctctgtgctatgtggacattgccatcccatgcaacaacaagggaactcactcagtgggtttgatgtggtggatgctggctcgggaagttctgcgcatgtgtggcaccatttcccgtgaacacccatgggaggtcatgcctgatctgtacttcgacagagatcctgaagagattgaaaaagaagagcaggctgctgctgagaaggcagtgaccaaggaggaatttcagggtgaatggactgctccagctcctgagttcactgctactcagcctgaggttgcagactggtctgaaggtgtacaggtgccctctgtgcctattcagcaattccctactgaagactggagcgctcagcctgccacggaagactggtctgcagctcccactgctcaggccactgaatgggtaggagcaaccactgactggtcttaagctgttcttgcataggctcttaagcagcatggaaaaatggttgatggaaaataaacatcagtttct

SEQ ID NO: 291 - protein, 294 aa, Homo sapiens
MSGALDVLQMKEDVLKFLAAGTHLGGTNLDFQMEQYIYKRKSDGIYIINLKRTWEKLLLAGRAIVAIENPADVSVISSRNTGQRAVLKFAAATGATPIAGRFTPGTFTNRIQAAFREPRLVVVTDPRADHQPLTEASYVNLPTIALCNTDSPLCYVDIAIPCNNKGTHSVGLMWWMLAREVLRMCGTISREHPWEVMPDLYFDRDPEEIEKEEQAAAEKAVTKEEFQGEWTAPAPEFTATQPEVADWSEGVQVPSVPIQQFPTEDWSAQPATEDWSAAPTAQATEWVGATTDWS

SEQ ID NO: 292 - DNA, 2336 bp, Homo sapiens
ggcacgaggaagaatcaggagcttaggatgtattaacaccaactcattaatatactaaccggacaatgttctacaaacaattctacattgtaaaggactggattggcacaaaataaaataattttattttattcagcttataatatgactcgatggaggaaaatttgataagcatgagagaagaccattcttttcatgttcgttacagaatggaagcttcttgcctagagctggccttggaaggggaacgtctatgtaaatcaggagactgccgcgctggcgtgtcattctttgaagctgcagttcaagttggaactgaagacctaaaaacacttagcgctatttacagccagttgggcaatgcttatttctatttgcatgattatgccaaagcattagaatatcaccatcatgatttaacccttgcaaggactattggagaccagctgggggaagcgaaagctagtggtaatctgggaaacaccttaaaagttcttgggaattttgacgaagccatagtttgttgtcagcgacacctagatatttccagagagcttaatgacaaggtgggagaagcaagagcactttacaatcttgggaatgtgtatcatgccaaagggaaaagttttggttgccctggtccccaggatgtaggagaatttccagaagaagtgagagatgctctgcaggcagccgtggatttttatgaggaaaacctatcattagtgactgctttgggtgaccgagcggcacaaggacgtgcctttggaaatcttggaaacacacattacctccttggcaacttcagggatgcagttatagctcatgagcagcgtctccttattgcaaaagaatttggagataaagcagctgaaagaagagcatatagcaaccttggaaatgcatatatatttcttggtgaatttgaaactgcctcggaatactacaagaagacactactgttggcccgacagcttaaagaccgagctgtagaagcacagtcttgttacagtcttggaaatacatatactttacttcaagactatgaaaaggccattgattatcatctgaagcacttagcaattgctcaagagctgaatgatagaattggtgaaggaagagcatgttggagcttaggaaatgcatacacagcactaggaaatcatgatcaagcaatgcattttgctgaaaagcacttggaaatttcaagagaggttggggataaaagtggtgaactaacagcacgacttaatctctcagaccttcaaatggttcttggtctgagctacagcacaaataactccataatgtctgaaaatactgaaattgatagcagtttgaatggtgtactccccaagttgggacgccggcatagtatggaaaatatggaacttatgaagttaacaccagaaaaggtacagaactggaacagtgaaattcttgctaagcaaaaacctcttattgccaaaccttctgcaaagctactctttgtcaacagactgaaggggaaaaaatacaaaacgaattcctccactaaagttctccaagatgccagtaattctattgaccaccgaattccaaattctcagaggaaaatcagtgcagatactattggagatgaagggttctttgacttattaagccgatttcaaagcaataggatggatgatcagagatgttgcttacaagaaaagaactgccatacagcttcaacaacaacttcttccactccccctaaaatgatgctaaaaacatcatctgttcctgtggtatcccccaacacggatgagtttttagatcttcttgccagctcacagagtcgccgtctggatgaccagagggctagtttcagtaatttgccagggcttcgtctaacacaaaacagccagtcggtacttagccacctgatgactaatgacaacaaagaggctgatgaagatttctttgacatccttgtaaaatgtcaaggatccagattagatgatcaaagatgtgctccaccacctgctaccacaaagggtccgacagtaccagatgaagactttttcagccttattttacggtcccagggaaagagaatggatgaacagagagttcttttacaaagagatcaaaacagagacactgactttgggctaaaggactttttgcaaaataatgctttgttggagtttaaaaattcagggaaaaaatcggcagaccattagttactatggatttattttttttcctttcaaacacggtaaggaaacaatctattacttttttccttaaaaggagaatttatagcactgtaatacagcttaaaatatttttagaatgatgtaaatagttaa

SEQ ID NO: 293 - protein, 677 aa, Homo sapiens
MREDHSFHVRYRMEASCLELALEGERLCKSGDCRAGVSFFEAAVQVGTEDLKTLSAIYSQLGNAYFYLHDYAKALEYHHHDLTLARTIGDQLGEAKASGNLGNTLKVLGNFDEAIVCCQRHLDISRELNDKVGEARALYNLGNVYHAKGKSFGCPGPQDVGEFPEEVRDALQAAVDFYEENLSLVTALGDRAAQGRAFGNLGNTHYLLGNFRDAVIAHEQRLLIAKEFGDKAAERRAYSNLGNAYIFLGEFETASEYYKKTLLLARQLKDRAVEAQSCYSLGNTYTLLQDYEKAIDYHLKHLAIAQELNDRIGEGRACWSLGNAYTALGNHDQAMHFAEKHLEISREVGDKSGELTARLNLSDLQMVLGLSYSTNNSIMSENTEIDSSLNGVLPKLGRRHSMENMELMKLTPEKVQNWNSEILAKQKPLIAKPSAKLLFVNRLKGKKYKTNSSTKVLQDASNSIDHRIPNSQRKISADTIGDEGFFDLLSRFQSNRMDDQRCCLQEKNCHTASTTTSSTPPKMMLKTSSVPVVSPNTDEFLDLLASSQSRRLDDQRASFSNLPGLRLTQNSQSVLSHLMTNDNKEADEDFFDILVKCQGSRLDDQRCAPPPATTKGPTVPDEDFFSLILRSQGKRMDEQRVLLQRDQNRDTDFGLKDFLQNNALLEFKNSGKKSADH

SEQ ID NO: 294 - DNA, 535 bp, Homo sapiens
aagcagcctgaggtaatctgtgaaaatggttcgctattcacttgacccggagaaccccacgaaatcatgcaaatcaagaggttccaatcttcgtgttcactttaagaacactcgtgaaactgctcaggccatcaagggtatgcatatacgaaaagccacgaagtatctgaaagatgtcactttacagaaacagtgtgtaccattccgacgttacaatggtggagttggcaggtgtgcgcaggccctgcacatgcttaaaaacacagagagtaatgctgaacttaagggtttagatgtagattctctggtcattgagcatatccaagtgaacaaagcacctaagatgcgccgccggacctacagagctcatggtcggattaacccatacatgagctctccctgccacattgagatgatccttacggaaaaggaacagattgttcctaaaccagaagaggaggttgcccagaagaaaaggatatcccagaagaaactgaagaaacaaaaacttatggcacgggagtaaattcagcat

SEQ ID NO: 295 - DNA, 2238 bp, Homo sapiens
gcaggctctgcctgtggccactagcagagaagctgctgtccttccaccaccagcaccggaccacctgctccaagaccagcctcctggggggaccaggcacccggccttcactggcacccagggagccgtcctcagcagcgtcaacatgtcaaggcccagcagcagagccatttacttgcaccggaaggagtactcccagaacctcacctcagagcccaccctcctgcagcacagggtggagcacttgatgacatgcaagcaggggagtcagagagtccaggggcccgaggatgccttgcagaagctgttcgagatggatgcacagggccgggtgtggagccaagacttgatcctgcaggtcagggacggctggctgcagctgctggacattgagaccaaggaggagctggactcttaccgcctagacagcatccaggccatgaatgtggcgctcaacacatgttcctacaactccatcctgtccatcaccgtgcaggagccgggcctgccaggcactagcactctgctcttccagtgccaggaagtgggggcagagcgactgaagaccagcctgcagaaggctctggaggaagagctggagcaaagacctcgacttggaggccttcagccaggccaggacagatggagggggcctgctatggaaaggccgctccctatggagcaggcacgctatctggagccggggatccctccagaacagccccaccagaggaccctagagcacagcctcccaccatccccaaggcccctgccacgccacaccagtgcccgagaaccaagtgcctttactctgcctcctccaaggcggtcctcttcccccgaggacccagagagggacgaggaagtgctgaaccatgtcctaagggacattgagctgttcatgggaaagctggagaaggcccaggcaaagaccagcaggaagaagaaatttgggaaaaaaaacaaggaccagggaggtctcacccaggcacagtacattgactgcttccagaagatcaagcacagcttcaacctcctgggaaggctggccacctggctgaaggagacaagtgcccctgagctcgtacacatcctcttcaagtccctgaacttcatcctggccaggtgccctgaggctggcctagcagcccaagtgatctcacccctcctcacccctaaagctatcaacctgctacagtcctgtctaagcccacctgagagtaacctttggatggggttgggcccagcctggaccactagccgggccgactggacaggcgatgagcccctgccctaccaacccacattctcagatgactggcaacttccagagccctccagccaagcacccttaggataccaggaccctgtttcccttcggcggggaagtcataggttagggagcacctcacactttcctcaggagaagacacacaaccatgaccctcagcctggggaccccaactccaggccctccagccccaaacctgcccagccagccctgaaaatgcaagtcttgtacgagtttgaagctaggaacccacgggaactgactgtggtccagggagagaagctggaggttctggaccacagcaagcggtggtggctggtgaagaatgaggcgggacggagcggctacattccaagcaacatcctggagcccctacagccggggacccctgggacccagggccagtcaccctctcgggttccaatgcttcgacttagctcgaggcctgaagaggtcacagactggctgcaggcagagaacttctccactgccacggtgaggacacttgggtccctgacggggagccagctacttcgcataagacctggggagctacagatgctatgtccacaggaggccccacgaatcctgtcccggctggaggctgtcagaaggatgctggggataagcccttaggcaccagcttagacacctccaagaaccaggccccgctgatgcaagatggcagatctgatacccattagagccccgagaattcctcttctggatcccagtttgcagcaaaccccacaccccagctcacacagcaaaaacaatggacaggcccagaggctgaagcaaacagtgtcccttctggctgtgttggagcctccccagtaaccacctatttattttacctctttcccaaacctggagcatttatgcctaggcttgtcaagaatctgttcagtccctctccttctcaataaaagcatcttcaagcttgt

SEQ ID NO: 296 - DNA, 1707 bp, Homo sapiens
gggagaaagcctgttgcgtggaagataaggcggcgcgggaagtggacacagggtgggctggagctcagatctaactggactctcgctcctgctggctggacatggaggatttggaggaagatgtaaggtttattgtggatgagaccttggactttggggggctgtcaccatctgacagccgtgaggaggaagacataacagtgttggtgactccagagaaaccacttcgacggggcctctcccaccgaagtgacccaaatgcagtggcacctgccccccagggtgtgaggctcagcctaggccccctcagtccagagaagctggaggagatcctcgatgaggccaaccggctggccgctcagctggagcagtgtgccctgcaggatcgggagagcgcaggcgagggcctggggcctcgccgagtgaagcccagtcctcggcgggagacctttgtgctgaaggatagtcctgtccgagacctgctgcccactgtgaactctttgacgcggagcaccccctccccaagcagcctgacgcctcgactccggagtaatgataggaaggggtcagtcagggctctccgggctacatctggaaagaggccctccaacatgaagagggagtcacccacttgcaatctgttccctgcatccaaaagcccagcatcttctcctcttacccgatcgactcccccagtccgggggagagccgggcccagtgggagagcagcagccagcccacccacccccatcagatccgtcctggccccacagccttctaccagcaactctcaacgcctgccccggccgcagggagcagctgctaaatcttccagtcaactgcccattccctcggccatccccaggcctgccagccgaatgccactcaccagccggagtgtgccacctggcagaggtgccctacctccggattctctgtcaactcgaaaagggcttccaagaccaagcactgcaggacacagagtgcgggaaagtggacacaaggttcctgtttcccagcgactaaatcttcctgtcatgggtgccactcgcagcaatctgcagccccccaggaaagtggcagtcccaggacctaccaggtaaagagatcaggacagcaagcaagacttcagtagcaaaccactacagtcagtacctggactcgcctctacccagcagaccctgactccagcagattctggcccagggacaggaggaagagatgccaccagggctggtctcccaggagtagagaccatgggaaatggggtggattaggattgagctggagaagacttaaactctctgggttgaaagaagattaggggaaaagaggtcaccttccagcagtgaaatgaacaaatagaagatgagaagtacaggcaagtggtttgtctttatccacccccactgttgtggtcagccccagagaattttatcttcttccttggcattggttcactggacatttccacgtgagcggcctccgtagctaacctccctgccctctgaggagccatcttcctgaatcgcattctctactggactctggcctgcttggagaggtggcagcaggcacctggtcttcagaaattgtttcctgtgaattctgtgactcctaataggccagtttgtgataagcttactctatgagtcttcatttttctaaaataaagtgaatgtatttttaaaaaaaaaaaaaaaaaaa

SEQ ID NO: 297 - protein, 333 aa, Homo sapiens
MEDLEEDVRFIVDETLDFGGLSPSDSREEEDITVLVTPEKPLRRGLSHRSDPNAVAPAPQGVRLSLGPLSPEKLEEILDEANRLAAQLEQCALQDRESAGEGLGPRRVKPSPRRETFVLKDSPVRDLLPTVNSLTRSTPSPSSLTPRLRSNDRKGSVRALRATSGKRPSNMKRESPTCNLFPASKSPASSPLTRSTPPVRGRAGPSGRAAASPPTPIRSVLAPQPSTSNSQRLPRPQGAAAKSSSQLPIPSAIPRPASRMPLTSRSVPPGRGALPPDSLSTRKGLPRPSTAGHRVRESGHKVPVSQRLNLPVMGATRSNLQPPRKVAVPGPTR

SEQ ID NO: 298 - DNA, 1942 bp, Homo sapiens
gcagtgcggcggtcacaggctgagtgctgcggcgcgatccttgcttccctgagcgttggcccgggaggaaagaagatggtgctggatctggatttgtttcgggtggataaaggaggggacccagccctcatccgagagacgcaggagaagcgcttcaaggacccgggactagtggaccagctggtgaaggcagacagcgagtggcgacgatgtagatttcgggcagacaacttgaacaagctgaagaacctatgcagcaagacaatcggagagaaaatgaagaaaaaagagccagtgggagatgatgagtctgtcccagagaatgtgctgagtttcgatgaccttactgcagacgctttagctaacctgaaagtctcacaaatcaaaaaagtccgactcctcattgatgaagccatcctgaagtgtgacgcggagcggataaagttggaagcagagcggtttgagaacctccgagagattgggaaccttctgcacccttctgtacccatcagtaacgatgaggatgtggacaacaaagtagagaggatttggggtgattgtacagtcaggaagaagtactctcatgtggacctggtggtgatggtagatggctttgaaggcgaaaagggggccgtggtggctgggagtcgagggtacttcttgaagggggtcctggtgttcctggaacaggctctcatccagtatgcccttcgcaccttgggaagtcggggctacattcccatttataccccctttttcatgaggaaggaggtcatgcaggaggtggcacagctcagccagtttgatgaagaactttataaggtgattggcaaaggcagtgaaaagtctgatgacaactcctatgatgagaagtacctgattgccacctcagagcagcccattgctgccctgcaccgggatgagtggctccggccggaggacctgcccatcaagtatgctggcctgtctacctgcttccgtcaggaggtgggctcccatggccgtgacacccgtggcatcttccgagtccatcagtttgagaagattgaacagtttgtgtactcatcaccccatgacaacaagtcatgggagatgtttgaagagatgattaccaccgcagaggagttctaccagtccctggggattccttaccacattgtgaatattgtctcaggttctttgaatcatgctgccagtaagaagcttgacctggaggcctggtttccgggctcaggagccttccgtgagttggtctcctgttctaattgcacggattaccaggctcgccggcttcgaatccgatatgggcaaaccaagaagatgatggacaaggtggagtttgtccatatgctcaatgctaccatgtgcgccactacccgtaccatctgcgccatcctggagaactaccagacagagaagggcatcactgtgcctgagaaattgaaggagttcatgccgccaggactgcaagaactgatcccctttgtgaagcctgcgcccattgagcaggagccatcaaagaagcagaagaagcaacatgagggcagcaaaaagaaagcagcagcaagagacgtcaccctagaaaacaggctgcagaacatggaggtcaccgatgcttgaacattcctgcctccctatttgccaggctttcatttctgtctgctgagatctcagagcctgcccaacagcagggaagccaagcacccattcatccccctgcccccatctgactgcgtagctgagaggggaacagtgccatgtaccacacagatgttcctgtctcctcgcatgggcatagggacccatcattgatgactgatgaaaccatgtaataaagcatctctggggagggcttaggactcttcctcagtcttcttccccgggcttgaaccccgaaaaaaaaaaaaaaaaaaaaaaaaaaaaaaaaaaaaaaaaaaaaaaa

SEQ ID NO: 299 - protein, 514 aa, Homo sapiens
MVLDLDLFRVDKGGDPALIRETQEKRFKDPGLVDQLVKADSEWRRCRFRADNLNKLKNLCSKTIGEKMKKKEPVGDDESVPENVLSFDDLTADALANLKVSQIKKVRLLIDEAILKCDAERIKLEAERFENLREIGNLLHPSVPISNDEDVDNKVERIWGDCTVRKKYSHVDLVVMVDGFEGEKGAVVAGSRGYFLKGVLVFLEQALIQYALRTLGSRGYIPIYTPFFMRKEVMQEVAQLSQFDEELYKVIGKGSEKSDDNSYDEKYLIATSEQPIAALHRDEWLRPEDLPIKYAGLSTCFRQEVGSHGRDTRGIFRVHQFEKIEQFVYSSPHDNKSWEMFEEMITTAEEFYQSLGIPYHIVNIVSGSLNHAASKKLDLEAWFPGSGAFRELVSCSNCTDYQARRLRIRYGQTKKMMDKVEFVHMLNATMCATTRTICAILENYQTEKGITVPEKLKEFMPPGLQELIPFVKPAPIEQEPSKKQKKQHEGSKKKAAARDVTLENRLQNMEVTDA

SEQ ID NO: 300 - DNA, 2677 bp, Homo sapiens
cagagtgccctttctccccgcctcttccccctcccgggagctgccagtacttgacgtggcgtcaccgccctctaccctcgctttgcgtgcgtgtttgcgtacagcggaggtggcggcgcgggcaggtcggagctcggagctgctgcttctggttctcttgtggccaccgtcgctgtccggctgccttgggctgccgaacagacaaggcgtgggccacagcacctcagaagccgacgcagctcgacgcaggggccggcaggagggtgggcgatcgcgtgtcggagggcgccgcgcgggcaggcgggcgggcgccagagggggaaagaggcgggggcggcgggtcagccgctggccgggccggcgggggaatgtcgatgcctgacgcgatgccgctgcccggggtcggggaggagctgaagcaggccaaggagatcgaggacgccgagaagtactccttcatggccaccgtcaccaaggcgcccaagaagcaaatccagtttgctgatgacatgcaggagttcaccaaattccccaccaaaactggccgaagatctttgtctcgctcgatctcacagtcctccactgacagctacagttcagctgcatcctacacagatagctctgatgatgaggtttctccccgagagaagcagcaaaccaactccaagggcagcagcaatttctgtgtgaagaacatcaagcaggcagaatttggacgccgggagattgagattgcagagcaagacatgtctgctctgatttcactcaggaaacgtgctcagggggagaagcccttggctggtgctaaaatagtgggctgtacacacatcacagcccagacagcggtgttgattgagacactctgtgccctgggggctcagtgccgctggtctgcttgtaacatctactcaactcagaatgaagtagctgcagcactggctgaggctggagttgcagtgttcgcttggaagggcgagtcagaagatgacttctggtggtgtattgaccgctgtgtgaacatggatgggtggcaggccaacatgatcctggatgatgggggagacttaacccactgggtttataagaagtatccaaacgtgtttaagaagatccgaggcattgtggaagagagcgtgactggtgttcacaggctgtatcagctctccaaagctgggaagctctgtgttccggccatgaacgtcaatgattctgttaccaaacagaagtttgataacttgtactgctgccgagaatccattttggatggcctgaagaggaccacagatgtgatgtttggtgggaaacaagtggtggtgtgtggctatggtgaggtaggcaagggctgctgtgctgctctcaaagctcttggagcaattgtctacattaccgaaatcgaccccatctgtgctctgcaggcctgcatggatgggttcagggtggtaaagctaaatgaagtcatccggcaagtcgatgtcgtaataacttgcacaggaaataagaatgtagtgacacgggagcacttggatcgcatgaaaaacagttgtatcgtatgcaatatgggccactccaacacagaaatcgatgtgaccagcctccgcactccggagctgacgtgggagcgagtacgttctcaggtggaccatgtcatctggccagatggcaaacgagttgtcctcctggcagagggtcgtctactcaatttgagctgctccacagttcccacctttgttctgtccatcacagccacaacacaggctttggcactgatagaactctataatgcacccgaggggcgatacaagcaggatgtgtacttgcttcctaagaaaatggatgaatacgttgccagcttgcatctgccatcatttgatgcccaccttacagagctgacagatgaccaagcaaaatatctgggactcaacaaaaatgggccattcaaacctaattattacagatactaatggaccatactaccaaggaccagtccacctgaaccacacactctaaagaaatattttttaagataacttttattttcttcttactcctttcctcttgatttttttcctataatttcattcttgttttttcatctcattatccaagttctgcagaccacacaggaacttgcttcatggctctttagatgaaatagaagttcagggtccctcactctagtcactaaagaaggattttactcccccagcccagaaaggtgattcttctctttaccatttctggggactttagtcttaattaggtaccttattaacaggaaatgctaaggtaccttctctgtggaacaatctgcaatgtctaaatcgccttaaaagagcccatttcttagctgctgaaatcagtgctctttcacttcttcagagaagcagggatggtacctacccggcaggtaggttagatgtgggtggtgcatgttaatttcccttagaagttccaagccctgtttcctgcgtaaaggtggtatgtccagttcagagatgtgtataatgagcatggcttgttaagatcaggaggcccacttggatttatagtatagcccttcctccactcccaccagacttgctcatttttcgagtttttaactagactacactctatttgagtttaattttgtcctctaggatttatttctgttgtccaaaaaaaaaaaaaaaaaaaa

SEQ ID NO: 301 - protein, 530 aa, Homo sapiens
MSMPDAMPLPGVGEELKQAKEIEDAEKYSFMATVTKAPKKQIQFADDMQEFTKFPTKTGRRSLSRSISQSSTDSYSSAASYTDSSDDEVSPREKQQTNSKGSSNFCVKNIKQAEFGRREIEIAEQDMSALISLRKRAQGEKPLAGAKIVGCTHITAQTAVLIETLCALGAQCRWSACNIYSTQNEVAAALAEAGVAVFAWKGESEDDFWWCIDRCVNMDGWQANMILDDGGDLTHWVYKKYPNVFKKIRGIVEESVTGVHRLYQLSKAGKLCVPAMNVNDSVTKQKFDNLYCCRESILDGLKRTTDVMFGGKQVVVCGYGEVGKGCCAALKALGAIVYITEIDPICALQACMDGFRVVKLNEVIRQVDVVITCTGNKNVVTREHLDRMKNSCIVCNMGHSNTEIDVTSLRTPELTWERVRSQVDHVIWPDGKRVVLLAEGRLLNLSCSTVPTFVLSITATTQALALIELYNAPEGRYKQDVYLLPKKMDEYVASLHLPSFDAHLTELTDDQAKYLGLNKNGPFKPNYYRY

SEQ ID NO: 302 - DNA, 4076 bp, Homo sapiens
gcttatggcggcgctggagagggggcgctgagctgttgggtatgaagtgtaacagaacagactttaccacctgaaactgctgcttcaagttcagatcaggcaaggaacaaacctcgtaacaactaacaagaccaaagaagagtacacttaagttgaagacacaacacttgatctgaaacaagaagtttgtgcctactcaacagctttgaaagagcacttcccaacgctgctagtagtctttgttttcttcagtgctgtactgtgagattgcccggtacagcagcagttgtattctttattagcttggtagatcattttctctcgctcttttttttaatactagcaactttcatcctttgaaacgtgtgctgaaaaagaagaatcagcaaatactactgaaagtgcaatatttgagtatcactgcgagatgagctttgatccaaaccttctccacaacaatggacataatgggtaccctaatggtacttcagcagcactgcgtgaaactggggttattgaaaaactgttaacctcttacggatttattcagtgttcagaacgtcaagctagacttttcttccactgttcacagtataatggcaacctgcaagacttaaaagtaggagatgatgttgaatttgaagtatcatcggaccgacggactgggaaacccattgctgttaaactggtgaagataaaacaagaaatcctccctgaagaacgaatgaatggacaagttgtgtgcgctgttcctcacaacttagagagtaaatctccagctgccccgggtcagagtccaacagggagtgtatgctacgaacgtaatggggaagtgttttatctgacttacacccctgaagatgtcgaagggaacgttcagctggaaactggagataaaataaactttgtaattgataacaataaacatactggtgctgtaagtgctcgcaacattatgctgttgaaaaagaaacaagcccgctgtcagggagtagtttgtgccatgaaggaggcatttggctttattgaaagaggtgatgttgtaaaagagatattctttcactatagtgaatttaagggtgacttagaaaccttacagcctggcgatgatgtggaattcacaatcaaggacagaaatggtaaagaagttgcaacagatgtcagactattgcctcaaggaacagtcatttttgaagatatcagcattgaacattttgaaggaactgtaaccaaagttatcccaaaagtacccagtaaaaaccagaatgacccattgccaggacgcatcaaagttgactttgtgatccctaaagaacttccctttggagacaaagatacgaaatccaaggtgaccctgctggaaggtgaccatgttaggtttaatatttcaacagaccgacgtgacaaattagagcgagcaaccaatatagaagttctgtcaaatacatttcagttcactaatgaagcccgagaaatgggtgtgattgctgccatgagagatggttttggtttcatcaagtgtgtggatcgtgatgttcgtatgttcttccacttcagtgaaattctggatgggaaccagctccatattgcagatgaagtagagtttactgtggttcctgatatgctctctgctcaaagaaatcatgctattaggattaaaaaacttcccaagggcacggtttcatttcattcccattcagatcaccgttttctgggcacggtagaaaaagaagccactttttccaatcctaaaaccactagcccaaataaaggcaaagagaaggaggctgaggatggcattattgcttatgatgactgtggggtgaaactgactattgcttttcaagccaaggatgtggaaggatctacttctcctcaaataggagataaggttgaatttagtattagtgacaaacagaggcctggacagcaggttgcaacttgtgtgcgacttttaggtcgtaattctaactccaagaggctcttgggttatgtggcaactctgaaggataattttggatttattgaaacagccaatcatgataaggaaatctttttccattacagtgagttctctggtgatgttgatagcctggaactgggggacatggtcgagtatagcttgtccaaaggcaaaggcaacaaagtcagtgcagaaaaagtgaacaaaacacactcagtgaatggcattactgaggaagctgatcccaccatttactctggcaaagtaattcgccccctgaggagtgttgatccaacacagactgagtaccaaggaatgattgagattgtggaggagggcgatatgaaaggtgaggtctatccatttggcatcgttgggatggccaacaaaggggattgcctgcagaaaggggagagcgtcaagttccaattgtgtgtcctgggccaaaatgcacaaactatggcttacaacatcacacccctgcgcagggccacagtggaatgtgtgaaagatcagtttggcttcattaactatgaagtaggagatagcaagaagctctttttccatgtgaaagaagttcaggatggcattgagctacaggcaggagatgaggtggagttctcagtgattcttaatcagcgcactggcaagtgcagcgcctgtaatgtttggcgagtctgtgagggccccaaggctgttgcagctcctcgacctgatcggttggtcaatcgcttgaagaatatcactctggatgatgccagtgctcctcgcctaatggttcttcgtcagccaaggggaccagataactcaatggggtttggtgcagaaagaaagatccgtcaagctggtgtcattgactaaccacatccacaaagcacaccattaatccactatgatcaagttggggggaatctggtgaagggttctgaatatctccctcttcatccctcccgaaatctggaatacttattctattgagctattacaccagttttaacaccttcctcgtgttatgtttaaaaaaataaataaatttaagaaaaccattttaaataatgcacagttgcagcctggaaaaacttaaggtggcgccttatagtatcaattttaggagctttatttggtgcatttaacgcaactggtaattgcagaatccactttgcctgtgtaagtgaaaaatatagactgttatcttgttggccctatgaaattctgcacttttcattatatactctaccttcattaattacttctggcaagatgttctgccttagcactcagttgcattcttttcctttttcttcctgttcattatgctttaattctgaggaccatatgagggtagaatatattatcttttaaaaattacaaaaatttgtataggcaaaccatttcttaaagttgatggccaaattttaaaatgttatttttcatatcatttataatcttgtcacaatccacttaaagaagtttggttatatttcagtgaaaattttcttccagagtaggttttttttcgtgggttggggggtaactttactacaattagtaagtatggtgcagaatttcatgcaaatgaggagtgccagcagtgtgataatttaaacatatttaaacaaaaacaaaaaaaatgaatgcacaaacttgctgctgcttagatcactgcagcttctaggacccggtttcttttactgatttaaaaacaaaacaaaaaaaaataaaaaagttgtgcctgaaatgaatcttgtttttttttataagtagccgcctggttactgtgtcctgtaaaatacagacacttgacccttggtgtagcttctgttcaactttatatcacgggaatggatgggtctgatttcttggccctcttcttgaattggccatatacagggtccctggccagtggactgaaggctttgtctaagatgacaagggtcagctcaggggatgtgggggagggcggttttatcttcccccttgtcgtttgaggttttgatctctgggtaaagaggccgtttatctttgtaaacacgaaacatttttgctttctccagttttctgttaatggcgaaagaatggaagcgaataaagttttactgatttttgagacact

SEQ ID NO: 303 - protein, 798 aa, Homo sapiens
MSFDPNLLHNNGHNGYPNGTSAALRETGVIEKLLTSYGFIQCSERQARLFFHCSQYNGNLQDLKVGDDVEFEVSSDRRTGKPIAVKLVKIKQEILPEERMNGQVVCAVPHNLESKSPAAPGQSPTGSVCYERNGEVFYLTYTPEDVEGNVQLETGDKINFVIDNNKHTGAVSARNIMLLKKKQARCQGVVCAMKEAFGFIERGDVVKEIFFHYSEFKGDLETLQPGDDVEFTIKDRNGKEVATDVRLLPQGTVIFEDISIEHFEGTVTKVIPKVPSKNQNDPLPGRIKVDFVIPKELPFGDKDTKSKVTLLEGDHVRFNISTDRRDKLERATNIEVLSNTFQFTNEAREMGVIAAMRDGFGFIKCVDRDVRMFFHFSEILDGNQLHIADEVEFTVVPDMLSAQRNHAIRIKKLPKGTVSFHSHSDHRFLGTVEKEATFSNPKTTSPNKGKEKEAEDGIIAYDDCGVKLTIAFQAKDVEGSTSPQIGDKVEFSISDKQRPGQQVATCVRLLGRNSNSKRLLGYVATLKDNFGFIETANHDKEIFFHYSEFSGDVDSLELGDMVEYSLSKGKGNKVSAEKVNKTHSVNGITEEADPTIYSGKVIRPLRSVDPTQTEYQGMIEIVEEGDMKGEVYPFGIVGMANKGDCLQKGESVKFQLCVLGQNAQTMAYNITPLRRATVECVKDQFGFINYEVGDSKKLFFHVKEVQDGIELQAGDEVEFSVILNQRTGKCSACNVWRVCEGPKAVAAPRPDRLVNRLKNITLDDASAPRLMVLRQPRGPDNSMGFGAERKIRQAGVID

SEQ ID NO: 304 - DNA, 489 bp, Homo sapiens
gctgaagatgggagccactctcaaaatcatgctggataacacctacatgaaaaagtgtgacgagaacatcctgtggctggactacaagaacatctgcaaggtgatggaagtgggcagcaagatctacgtggatgatgggcttatttctctccaggtaaagcagaaaggtgctgacttcctggtgacggaggtggaaactggtggttcctcgggcagcaagaagggtgtgaaccttcctggggctgctgtggacttgcctgctgtgtcagaggacatccaggacctgaattttggggtcgagcaggatgtcgatatggtgtttgcgtcgttcatccgcaaggcatctgatgtccatgaagttagggaggccctgggagagaagggaaagaaaacactccaccctccaccttccattttcccccactactgcagcacctccgggcctgttgctatagagcctacctgtatatcaataaacaacagctgaag

SEQ ID NO: 305 - protein, 159 aa, Homo sapiens
MGATLKIMLDNTYMKKCDENILWLDYKNICKVMEVGSKIYVDDGLISLQVKQKGADFLVTEVETGGSSGSKKGVNLPGAAVDLPAVSEDIQDLNFGVEQDVDMVFASFIRKASDVHEVREALGEKGKKTLHPPPSIFPHYCSTSGPVAIEPTCISINNS

SEQ ID NO: 306 - DNA, 1418 bp, Homo sapiens
agaagaagctggccaaggatatgggagcaaccaccatggaccagaagtctctctgggcaggtgtagtggtcttgctgcttctccagggaggatctgcctacaaactggtttgctactttaccaactggtcccaggaccggcaggaaccaggaaaattcacccctgagaatattgaccccttcctatgctctcatctcatctattcattcgccagcatcgaaaacaacaaggttatcatcaaggacaagagtgaagtgatgctctaccagaccatcaacagtctcaaaaccaagaatcccaaactgaaaattctcttgtccattggagggtacctgtttggttccaaagggttccaccctatggtggattcttctacatcacgcttggaattcattaactccataatcctgtttctgaggaaccataactttgatggactggatgtaagctggatctacccagatcagaaagaaaacactcatttcactgtgctgattcatgagttagcagaagcctttcagaaggacttcacaaaatccaccaaggaaaggcttctcttgactgcgggcgtatctgcagggaggcaaatgattgataacagctatcaagttgagaaactggcaaaagatctggatttcatcaacctcctgtcctttgacttccatgggtcttgggaaaagccccttatcactggccacaacagccctctgagcaaggggtggcaggacagagggccaagctcctactacaatgtggaatatgctgtggggtactggatacataagggaatgccatcagagaaggtggtcatgggcatccccacatatgggcactccttcacactggcctctgcagaaaccaccgtgggggcccctgcctctggccctggagctgctggacccatcacagagtcttcaggcttcctggcctattatgagatctgccagttcctgaaaggagccaagatcacgcgcctccaggatcagcaggttccctacgcagtcaaggggaaccagtgggtgggctatgatgatgtgaagagtatggagaccaaggttcagttcttaaagaatttaaacctgggaggagccatgatctggtctattgacatggatgacttcactggcaaatcctgcaaccagggcccttaccctcttgtccaagcagtcaagagaagccttggctccttgtgaaggattaacttacagagaagcaggcaagatgaccttgctgcctggggcctgctctctcccaggaattctcatgtgggattccccttgccaggctggcctttggatctctcttccaagcctttcctgacttcctcttagatcatagattggacctggttttgttttcctgcagctgttgacttgttgccctgaagtacaataaaaaaaattcattttgctccagta

SEQ ID NO: 307 - protein, 385 aa, Homo sapiens
MDQKSLWAGVVVLLLLQGGSAYKLVCYFTNWSQDRQEPGKFTPENIDPFLCSHLIYSFASIENNKVIIKDKSEVMLYQTINSLKTKNPKLKILLSIGGYLFGSKGFHPMVDSSTSRLEFINSIILFLRNHNFDGLDVSWIYPDQKENTHFTVLIHELAEAFQKDFTKSTKERLLLTAGVSAGRQMIDNSYQVEKLAKDLDFINLLSFDFHGSWEKPLITGHNSPLSKGWQDRGPSSYYNVEYAVGYWIHKGMPSEKVVMGIPTYGHSFTLASAETTVGAPASGPGAAGPITESSGFLAYYEICQFLKGAKITRLQDQQVPYAVKGNQWVGYDDVKSMETKVQFLKNLNLGGAMIWSIDMDDFTGKSCNQGPYPLVQAVKRSLGSL

SEQ ID NO: 308 - DNA, 1230 bp, Homo sapiens
ggggagacttgtgagcggccatcttggtcctgccctgacagattctcctatcggggtcacagggacgctaagattgctacctggactttcgttgaccatgctgtcccgggtggtactttccgccgccgccacagcggccccctctctgaagaatgcagccttcctaggtccaggggtattgcaggcaacaaggacctttcatacagggcagccacaccttgtccctgtaccacctcttcctgaatacggaggaaaagttcgttatggactgatccctgaggaattcttccagtttctttatcctaaaactggtgtaacaggaccctatgtactcggaactgggcttatcttgtacgctttatccaaagaaatatatgtgattagcgcagagaccttcactgccctatcagtactaggtgtaatggtctatggaattaaaaaatatggtccctttgttgcagactttgctgataaactcaatgagcaaaaacttgcccaactagaagaggcgaagcaggcttccatccaacacatccagaatgcaattgatacggagaagtcacaacaggcactggttcagaagcgccattacctttttgatgtgcaaaggaataacattgctatggctttggaagttacttaccgggaacgactgtatagagtatataaggaagtaaagaatcgcctggactatcatatatctgtgcagaacatgatgcgtcgaaaggaacaagaacacatgataaattgggtggagaagcacgtggtgcaaagcatctccacacagcaggaaaaggagacaattgccaagtgcattgcggacctaaagctgctggcaaagaaggctcaagcacagccagttatgtaaatgtatctatcccaattgagacagctagaaacagttgactgactaaatggaaactagtctatttgacaaagtctttctgtgttggtgtctactgaagttatagtttacccttcctaaaaatgaaaagtttgtttcatatagtgagagaacgaaatctctatcggccagtcagatgtttctcatccttcttgctctgcctttgagttgttccgtgatcacttctgaataagcagtttgcctttataaaaacttgctgcctgactaaagattaacaggttatagtttaaatttgtaattaattctaccatcttgcaataaagtgacaattgaataaaaaaaaaaaaaaaaaaaaaaaaaaaaaa

SEQ ID NO: 309 - protein, 256 aa, Homo sapiens
MLSRVVLSAAATAAPSLKNAAFLGPGVLQATRTFHTGQPHLVPVPPLPEYGGKVRYGLIPEEFFQFLYPKTGVTGPYVLGTGLILYALSKEIYVISAETFTALSVLGVMVYGIKKYGPFVADFADKLNEQKLAQLEEAKQASIQHIQNAIDTEKSQQALVQKRHYLFDVQRNNIAMALEVTYRERLYRVYKEVKNRLDYHISVQNMMRRKEQEHMINWVEKHVVQSISTQQEKETIAKCIADLKLLAKKAQAQPVM

SEQ ID NO: 310 - DNA, 1445 bp, Homo sapiens
gcggggagccggcccggagcgcagtttccagtggggccggggtttcacccgggccctctctgtttgaaccgaacccgacaaatgggcgcatgacgatggagagcagggaaatggactgctatctccgtcgcctcaaacaggagctgatgtccatgaaggaggtgggtgatggcttacaggatcagatgaactgcatgatgggtgcactgcaagaactgaagctcctccaggtgcagacagcactggaacagctggagatctctggagggggtcctgtgccaggcagccctgaaggtcccaggacccagtgcgagcacccttgttgggagggtggcagaggtcctgccaggcccacagtctgttccccctccagtcaaccttctcttggcagcagcaccaagtttccatcccataggagtgtctgtggaagggatttagcccccttgcccaggacacagccacatcaaagctgtgctcagcaggggccagagcgagtggaaccggatgactggacctccacgttgatgtcccggggccggaatcgacagcctctggtgttaggggacaacgtttttgcagacctggtgggcaattggctagacttgccagaactggagaagggtggggagaagggtgagactgggggggcacgtgaacccaaaggagagaaaggccagccccaggagctgggccgcaggttcgccctgacagcaaacatctttaagaagttcttgcgtagtgtgcggcctgaccgtgaccggctgctgaaggagaagccaggctgggtgacacccatggtccctgagtcccgaaccggccgctcacagaaggtcaagaagcggagcctttccaagggctctggacatttccccttcccaggcaccggggagcacaggcgaggggagaatccccccacaagctgccccaaggccctggagcactcaccctcaggatttgatattaacacagctgtttgggtctgaatcctagagacagaaagttgactgagcctgaaagggccaggtcccagtgctgggcccctggggaggagggagggtgggcggtatggctctcgaaagcccaactccaagttcctttcccccagaaagcggggagaagccagagttcttggctcaggactgaagggaaggtggttgggagaggctgtcttgggggctagctggtggaggaggtaagagtagctggagagtgagctgtgcgtgtgtgtgtgtgtgtgtgcatgtgtgtgtctgtctggcatgcatgcactcactttggggctggaggtgacagtaggtgagggcagaggaggagatcagaaaatccctctgacatctccactgcccccaaagacctccgttgaacattctgtatggaaaagagccctggagcatcaggttccccagataggcccccaaataaagacctgtctatggctctcccaa

SEQ ID NO: 311 - protein, 297 aa, Homo sapiens
MTMESREMDCYLRRLKQELMSMKEVGDGLQDQMNCMMGALQELKLLQVQTALEQLEISGGGPVPGSPEGPRTQCEHPCWEGGRGPARPTVCSPSSQPSLGSSTKFPSHRSVCGRDLAPLPRTQPHQSCAQQGPERVEPDDWTSTLMSRGRNRQPLVLGDNVFADLVGNWLDLPELEKGGEKGETGGAREPKGEKGQPQELGRRFALTANIFKKFLRSVRPDRDRLLKEKPGWVTPMVPESRTGRSQKVKKRSLSKGSGHFPFPGTGEHRRGENPPTSCPKALEHSPSGFDINTAVWV

SEQ ID NO: 312 - DNA, 3680 bp, Homo sapiens
ggcacgaggctggggcgcagagcagcggcgggaggaggcggacacgtggcaacagcggtagcagcccgggcggcggcagcaacagcggcggcggcatcggcccgagccgccggccgccctcccaccctcccgccccgcggcagccctagctccctccacttggctcccctggtcccgctcgctcggccgggagctgctctgtgcttttctctctgattctccagcgacaggacccggcgccgggcactgagcaccgccaccatggggaagggggttggacgtgataagtatgagcctgcagctgtttcagaacaaggtgataaaaagggcaaaaagggcaaaaaagacagggacatggatgaactgaagaaagaagtttctatggatgatcataaacttagccttgatgaacttcatcgtaaatatggaacagacttgagccggggattaacatctgctcgtgcagctgagatcctggcgcgagatggtcccaacgccctcactccccctcccactactcctgaatggatcaagttttgtcggcagctctttggggggttctcaatgttactgtggattggagcgattctttgtttcttggcttatagcatccaagctgctacagaagaggaacctcaaaacgataatctgtacctgggtgtggtgctatcagccgttgtaatcataactggttgcttctcctactatcaagaagctaaaagttcaaagatcatggaatccttcaaaaacatggtccctcagcaagcccttgtgattcgaaatggtgagaaaatgagcataaatgcggaggaagttgtggttggggatctggtggaagtaaaaggaggagaccgaattcctgctgacctcagaatcatatctgcaaatggctgcaaggtggataactcctcgctcactggtgaatcagaaccccagactaggtctccagatttcacaaatgaaaaccccctggagacgaggaacattgccttcttttcaaccaattgtgttgaaggcaccgcacgtggtattgttgtctacactggggatcgcactgtgatgggaagaattgccacacttgcttctgggctggaaggaggccagacccccattgctgcagaaattgaacattttatccacatcatcacgggtgtggctgtgttcctgggtgtgtctttcttcatcctttctctcatccttgagtacacctggcttgaggctgtcatcttcctcatcggtatcatcgtagccaatgtgccggaaggtttgctggccactgtcacggtctgtctgacacttactgccaaacgcatggcaaggaaaaactgcttagtgaagaacttagaagctgtggagaccttggggtccacatccaccatctgctctgataaaactggaactctgactcagaaccggatgacagtggcccacatgtggtttgacaatcaaatccatgaagctgatacgacagagaatcagagtggtgtctcttttgacaagacttcagctacctggcttgctctgtccagaattgcaggtctttgtaacagggcagtgtttcaggctaaccaggaaaacctacctattcttaagcgggcagttgcaggagatgcctctgagtcagcactcttaaagtgcatagagctgtgctgtggttccgtgaaggagatgagagaaagatacgccaaaatcgtcgagatacccttcaactccaccaacaagtaccagttgtctattcataagaaccccaacacatcagagccccaacacctgttggtgatgaagggcgccccagaaaggatcctagaccgttgcagctctatcctcctccacggcaaggagcagcccctggatgaggagctgaaagacgcctttcagaacgcctatttggagctggggggcctcggagaacgagtcctaggtttctgccacctctttctgccagatgaacagtttcctgaagggttccagtttgacactgacgatgtgaatttccctatcgataatctgtgctttgttgggctcatctccatgattgaccctccacgggcggccgttcctgatgccgtgggcaaatgtcgaagtgctggaattaaggtcatcatggtcacaggagaccatccaatcacagctaaagctattgccaaaggtgtgggcatcatctcagaaggcaatgagaccgtggaagacattgctgcccgcctcaacatcccagtcagccaggtgaaccccagggatgccaaggcctgcgtagtacacggcagtgatctaaaggacatgacctccgagcagctggatgacattttgaagtaccacactgagatagtgtttgccaggacctcccctcagcagaagctcatcattgtggaaggctgccaaagacagggtgctatcgtggctgtgactggtgacggtgtgaatgactctccagctttgaagaaagcagacattggggttgctatggggattgctggctcagatgtgtccaagcaagctgctgacatgattcttctggatgacaactttgcctcaattgtgactggagtagaggaaggtcgtctgatctttgataacttgaagaaatccattgcttataccttaaccagtaacattcccgagatcaccccgttcctgatatttattattgcaaacattccactaccactggggactgtcaccatcctctgcattgacttgggcactgacatggttcctgccatctccctggcttatgagcaggctgagagtgacatcatgaagagacagcccagaaatcccaaaacagacaaacttgtgaatgagcggctgatcagcatggcctatgggcagattggaatgatccaggccctgggaggcttctttacttactttgtgattctggctgagaacggcttcctcccaattcacctgttgggcctccgagtggactgggatgaccgctggatcaacgatgtggaagacagctacgggcagcagtggacctatgagcagaggaaaatcgtggagttcacctgccacacagccttcttcgtcagtatcgtggtggtgcagtgggccgacttggtcatctgtaagaccaggaggaattcggtcttccagcaggggatgaagaacaagatcttgatatttggcctctttgaagagacagccctggctgctttcctttcctactgccctggaatgggtgttgctcttaggatgtatcccctcaaacctacctggtggttctgtgccttcccctactctcttctcatcttcgtatatgacgaagtcagaaaactcatcatcaggcgacgccctggcggctgggtggagaaggaaacctactattagccccccgtcctgcacgccgtggagcatcaggccacacactctgcatccgacacccaccccctctttgtgtacttcagtcttggagtttggaactctaccctggtaggaaagcaccgcagcatgtggggaagcaagacgtcctggaatgaagcatgtagctctatggggggaggggggagggctgcctgaaaaccatccatctgtggaaatgacagcggggaaggtttttatgtgcctttttgtttttgtaaaaaaggaacacccggaaagactgaaagaatacattttatatctggatttttacaaataaagatggctattataatggaaaaaaaaaaaaaaaaaaa

SEQ ID NO: 313 - protein, 1023 aa, Homo sapiens
MGKGVGRDKYEPAAVSEQGDKKGKKGKKDRDMDELKKEVSMDDHKLSLDELHRKYGTDLSRGLTSARAAEILARDGPNALTPPPTTPEWIKFCRQLFGGFSMLLWIGAILCFLAYSIQAATEEEPQNDNLYLGVVLSAVVIITGCFSYYQEAKSSKIMESFKNMVPQQALVIRNGEKMSINAEEVVVGDLVEVKGGDRIPADLRIISANGCKVDNSSLTGESEPQTRSPDFTNENPLETRNIAFFSTNCVEGTARGIVVYTGDRTVMGRIATLASGLEGGQTPIAAEIEHFIHIITGVAVFLGVSFFILSLILEYTWLEAVIFLIGIIVANVPEGLLATVTVCLTLTAKRMARKNCLVKNLEAVETLGSTSTICSDKTGTLTQNRMTVAHMWFDNQIHEADTTENQSGVSFDKTSATWLALSRIAGLCNRAVFQANQENLPILKRAVAGDASESALLKCIELCCGSVKEMRERYAKIVEIPFNSTNKYQLSIHKNPNTSEPQHLLVMKGAPERILDRCSSILLHGKEQPLDEELKDAFQNAYLELGGLGERVLGFCHLFLPDEQFPEGFQFDTDDVNFPIDNLCFVGLISMIDPPRAAVPDAVGKCRSAGIKVIMVTGDHPITAKAIAKGVGIISEGNETVEDIAARLNIPVSQVNPRDAKACVVHGSDLKDMTSEQLDDILKYHTEIVFARTSPQQKLIIVEGCQRQGAIVAVTGDGVNDSPALKKADIGVAMGIAGSDVSKQAADMILLDDNFASIVTGVEEGRLIFDNLKKSIAYTLTSNIPEITPFLIFIIANIPLPLGTVTILCIDLGTDMVPAISLAYEQAESDIMKRQPRNPKTDKLVNERLISMAYGQIGMIQALGGFFTYFVILAENGFLPIHLLGLRVDWDDRWINDVEDSYGQQWTYEQRKIVEFTCHTAFFVSIVVVQWADLVICKTRRNSVFQQGMKNKILIFGLFEETALAAFLSYCPGMGVALRMYPLKPTWWFCAFPYSLLIFVYDEVRKLIIRRRPGGWVEKETYY

SEQ ID NO: 314 - DNA, 6593 bp, Homo sapiens
ttccaaaactgttctctggagctataagtggattgccagaaatgagagattaggagctgggagaagaggaagcgccttgtgttgtgtctcctggaggctgccgacatgaagtgctttttcccggtgctgagctgtctggctgtgctgggtgtggtgtcagcacagcggcaggtcaccgttcaggaaggacccttgtaccgcacggagggctcccacatcactatctggtgcaatgtgagtggctaccagggaccttctgagcagaatttccagtggtccatttacctgccttcgtcgccagagcgagaggtgcagatcgtcagcaccatggactcttccttcccctatgccatctacacccagcgcgtccgcggagggaagatcttcatagaaagagtccaggggaactcaaccctattgcacatcacagatcttcaggcccgggatgccggggagtatgaatgccacacacccagcactgataagcaatactttgggagttacagtgcaaagatgaacctagtggtgatcccagactccctgcagaccactgccatgccccagactctgcacagagtggagcaggacccgctggagctcacttgtgaggtggcctcagagaccattcagcacagccacctgtctgtggcctggctccggcagaaagttggcgagaagcccgtggaggtcatctccctgagccgagatttcatgcttcactccagcagcgaatatgcccagaggcagagcctgggggaggtgcggctggacaagctggggaggaccaccttccgcctcaccatcttccacctgcagccttctgaccagggcgaattctactgcgaggccgccgagtggatccaggatccggatgggtcgtggtatgctatgacccgaaagcgttccgagggagccgtggtcaacgtccagccaactgacaaagaattcactgttcggctggagacagagaagcggctgcacacggtgggcgagccggtggagttcagatgcatcctggaggctcagaatgttcccgaccgttactttgctgtctcctgggccttcaacagctcgctcatcgccaccatgggtcctaacgctgtgcctgtcctcaacagcgaatttgctcaccgggaagccaggggacagcttaaggtggccaaagagagcgacagtgtctttgtgctgaagatctaccacctccgccaggaagatagcgggaaatacaactgccgggtgactgagcgagagaaaaccgtgaccggggaattcattgataaggagagcaagcgtcccaagaacatccccatcatagtcctccccctcaagagcagcatctccgtggaggtggccagcaatgccagcgtcatccttgagggcgaggacctgcgcttctcctgcagtgtccgcacggcaggcaggccgcagggtcgcttctctgtcatctggcagcttgtggacaggcagaaccgccgcagcaatatcatgtggctagaccgggatggcaccgtgcagccaggctcgtcctactgggagcgcagcagctttgggggcgtccagatggagcaggtgcagcccaactcgttcagcctgggcatcttcaacagcaggaaggaggacgagggccagtatgaatgccatgtgactgaatgggtgcgggcagtggatggcgagtggcagattgttggggagcgccgggccagcactcccatctccatcacagctcttgaaatgggcttcgcagtcacagccatctcccggacaccgggggtgacctacagcgactcctttgacttgcagtgtatcatcaaaccccactaccctgcctgggtccccgtgtcggtgacatggcggttccagccggtgggcacggtggagttccatgacttggtgaccttcacccgggacggaggggtccagtggggggacaggtcctccagcttccgaacccgaactgccatcgagaaggctgagtccagcaacaacgtccgcctaagcatcagccgagccagtgacacggaagcaggcaagtaccagtgtgtggcagagctgtggcggaagaactacaacaacacctggacgcgactggcggagaggacctccaacctgctggagatcagggtgctgcagccagtgacaaagctgcaggtgagcaaatcgaagaggaccctcaccctggtggaaaacaagcccattcagttgaactgctcagtcaagtctcagactagccagaactcccactttgcggtgctctggtatgtccacaagccctcggatgccgatggcaagcttatcctgaagaccacccacaactccgcctttgaatacggtacttacgccgaggaggagggcctgagagccaggctccagtttgagaggcatgtgtcggggggcctgttcagcctcaccgtccagagagccgaggtcagcgacagcggcagctactactgccacgtggaggagtggctgctgagccccaactacgcctggtacaagctggcagaggaggtttctgggcgcacagaagtcactgtgaaacagccagacagccgcctgaggctcagccaagcccaggggaacctgtcggttctggagacccggcaggtacagctggagtgtgtggttctcaaccgcaccagcataacctcccagctcatggtggaatggtttgtatggaagcccaaccaccctgagcgggagactgtggcccgcttgagccgtgacgccaccttccactatggagagcaggcagccaagaacaatctgaaggggcggctgcatttggagagtccttcccccggcgtgtaccgtctcttcatccagaacgtggctgtgcaggacagcgggacctacagctgccatgtggaggagtggctgcccagccccagtggcatgtggtataagcgggcagaggacaccgctgggcagacagctctgacagtcatgcgaccagatgcttccctgcaggtggacacagtggtccccaatgccacggtctctgagaaggcagctttccagctggactgtagcatcgtgtcccgctccagccaggactcccgcttcgctgtggcctggtattccctgaggactaaagctggggggaaaaggagcagccctggcctggaagaacaggaagaggaaagggaggaggaggaggaggaggacgacgacgacgacgacgacccaacagagcggacggccctgctgagcgtgggcccagatgctgtctttggcccagagggcagtccttgggagggcaggcttcgcttccagaggctctccccggtgctctaccggctcacagtgctgcaggcaagcccccaagatacaggcaattactcctgccatgtggaggagtggctgcccagccctcagaaggaatggtaccggctgacggaggaggagtcagcccccatcggcatccgtgttctagatacaagtcccaccctccagtccatcatctgctccaacgacgcactcttctacttcgtcttcttctaccctttccccatctttggcattcttatcatcaccatccttctggtgcgtttcaagagccggaactccagcaagaactctgatgggaagaatggggtgcctctgctgtggatcaaagagccacacctcaactactcccctacttgcctggagccccctgttctcagtatccatccaggggccatagactaagcgggtgatgccccagcggatgttggccacggaggagctgaggctctccctttctctgtgattggacagttgacagcacccaaactctggggtgcatgtgtgtggaaagttgtcagacttgaaaagtgttccaagttcccagtcagtcacagagacagactgcctctcggtggcagtcttggttggttagctatttgcgcgcaaatgttgtgatcctgccattatagatttcttgtttctgtttttagtaatgtagtgagtagctccaggtgccacatctactcacagatttatctagtattctcagatagatgttacagggcttcttattctttgtaatgtactctttttaaatccctttagtttaccctttttggattccttaatgtggacgaatttctcttacgtacaactgacagcaaaaggaagggcgaactttctagtgacaaggaatctcttccaagactttgtttttgcacatttgaaaatgccacccatggatcaaaatatacccaaacgttttttactttcttaacaagacttaagaattgtgtgtagtgtgggcaaaatttgtatgttgtcttttccctcagctggagttattggaaccactttgtagtcaagacgaaagcactgaattttgcttcaaagaactgtgtatgtacaagagaaatcctgcataaccccattaggagtagatggtgcccggcctatctgtcagggaggcaaaaaaggcttcatcccatccttgccaaaaaataagaaaactgtcttggagaatgggtcagaagccccaaacggcacacactttccaaattaaagtgggcaggggctgcttttagcagctgctgacctgcagatttgtcaaagccagtgactagagaaggaagggagaaaggctggctgttggcttgctctgagctgcaaggatggtctctaactgattaactgtgagcaggtgggcctgtgtcttcaggtgctttgccaaactcttaaaagaaagtgtccagtgaacttggaagtgggcccctgagctgagcacagggccaaagcagccatggcagacacctgacggagggcacggggctggctgacactaagtttggtgggacagtgaggggtgggaggggggtttccagggcctggtgttggagagtgcagagaaatatctacctccctggaggtgtgaagactaggtttttcttcttccttccaattagattttccttaattatagtgatgtcttccttattcatttttctctccctgcctctcactgccataagaatatcagcctgggggcagtccagacgcagccctttgtcatcctttctgtttgcctagtctcagcagactgtgatcacaaggcattgtctgtgggatttttcctttccctttcttgatctctcttgtggttctaggttgtttggttgttcattgttatggtggctttttattttaacgccccttgagccccatgatggctggtgtcaccctgttcttttacactgttgggccaggtgctgcttgtccttcttagggcatcatcaattgcaaatatttccttttgctccctttatgaagatgttcttatacccttgctttcccatatttttctggccaagcatgccatctcctttactctgggaacttacatcctgaatcccaagagggggtcacagtttggaaaaagtcatcagggattctggaactaagtctgataaaagattccagtgaagccctgttctgagaacgagcagactgcaggggaggccatgggattccccaggccagtgtctgtgctgatccttcaagggtctgcaggtatgcaggtggcctgggctgctcggcagatactttgctgattcccagctgaggggagcatggtggcgattgctcagccattttctgacagacacacagacctgccttttctcccccaagtataccgtaccctcctgtgagacagtgtgtgcaggcaccaccaccttaatcctgctgttgcctgacatgctgattctcatttattatgctgcatcaacacattagaggtacaggagcggctcagtcatgaaaaaagaaggtcttttgccccatttctttatttcagagatgtgggctttcagtgggaatttgctgactcctactttataggctgagtcaatgagggaagatgactggcgtttcctctgtctaaatgggaggttgccagagcgctggctgggactaggatgtgtaactaagatttcagtttgaaatcttagatttcagttcacggcgataaagaagtaggtgctgcacacaaatatgtaaagcaattgtaggaaatttgaaaggaaaaaaagaaaccgaagccagtattttaataattgctttttctgtgtattttgtattgggctgggggatagcatcaaaggttgaactttttgagctttctatgaaaaaccccaggaccttctttctttggccatttctatggaaatgcgatgtcagatggatggtaatggtgccctccagtggctgtgagacctcattgcgcattgtctactggagctttagtcttctgagacggaggaaaactgctgaatactctggattcatctatgtctacaatgttgcatttatgaaaaactacactgtgctaggcgcattctaggacatgaatatgaccacaccctctttcaccgggtgtttctgtagcaagttttcatattcttttcaaacaatggtttctctgcgttaattattgaggaaaaaaaaagatggggtaagaaaactacccatgcatgatgtagagagctgttgatttgtttctgtttttttaaaggaaaactatttgtaagatgttgcactaaaacattttatatacacttcagagacctgtagtaaattatgttgaaaat

SEQ ID NO: 315 - DNA, 5975 bp, Homo sapiens
gctctttgccgagggcgtgtggtgagagtccccacagcgaccctggttcgagtggtgggcactgagctggtcatcccctgcaacgtcagtgactatgatggccccagcgagcaaaactttgactggagcttctcatctttggggagcagctttgtggagcttgcaagcacctgggaggtggggttcccagcccagctgtaccaggagcggctgcagaggggcgagatcctgttaaggcggactgccaacgacgccgtggagctccacataaagaacgtccagccttcagaccaaggccactacaaatgttcaacccccagcacagatgccactgtccagggaaactatgaggacacagtgcaggttaaagtgctggccgactccctgcacgtgggccccagcgcgcggcccccgccgagcctgagcctgcgggagggggagcccttcgagctgcgctgcaccgccgcctccgcctcgccgctgcacacgcacctggcgctgctgtgggaggtgcaccgcggcccggccaggcggagcgtcctcgccctgacccacgagggcaggttccacccgggcctggggtacgagcagcgctaccacagtggggacgtgcgcctcgacaccgtgggcagcgacgcctaccgcctctcagtgtcccgggctctgtctgccgaccagggctcctacaggtgtatcgtcagcgagtggatcgccgagcagggcaactggcaggaaatccaagaaaaggccgtggaagttgccaccgtggtgatccagccatcagttctgcgagcagctgtgcccaagaatgtgtctgtggctgaaggaaaggaactggacctgacctgtaacatcacaacagaccgagccgatgacgtccggcccgaggtgacgtggtccttcagcaggatgcctgacagcaccctacctggctcccgcgtgttggcgcggcttgaccgtgattccctggtgcacagctcgcctcatgttgctttgagtcatgtggatgcacgctcctaccatttactggttcgggatgttagcaaagaaaactctggctactattactgccacgtgtccctgtgggcacccggacacaacaggagctggcacaaagtggcagaggccgtgtcttccccagctggtgtgggtgtgacctggctagaaccagactaccaggtgtacctgaatgcttccaaggtccccgggtttgcggatgaccccacagagctggcatgccgggtggtggacacgaagagtggggaggcgaatgtccgattcacggtttcgtggtactacaggatgaaccggcgcagcgacaatgtggtgaccagcgagctgcttgcagtcatggacggggactggacgctaaaatatggagagaggagcaagcagcgggcccaggatggagactttattttttctaaggaacatacagacacgttcaatttccggatccaaaggactacagaggaagacagaggcaattattactgtgttgtgtctgcctggaccaaacagcggaacaacagctgggtgaaaagcaaggatgtcttctccaagcctgttaacatattttgggcattagaagattccgtgcttgtggtgaaggcgaggcagccaaagcctttctttgctgccggaaatacatttgagatgacttgcaaagtatcttccaagaatattaagtcgccacgctactctgttctcatcatggctgagaagcctgtcggcgacctctccagtcccaatgaaacgaagtacatcatctctctggaccaggattctgtggtgaagctggagaattggacagatgcatcacgggtggatggcgttgttttagaaaaagtgcaggaggatgagttccgctatcgaatgtaccagactcaggtctcagacgcagggctgtaccgctgcatggtgacagcctggtctcctgtcaggggcagcctttggcgagaagcagcaaccagtctctccaatcctattgagatagacttccaaacctcaggtcctatatttaatgcttctgtgcattcagacacaccatcagtaattcggggagatctgatcaaattgttctgtatcatcactgtcgagggagcagcactggatccagatgacatggcctttgatgtgtcctggtttgcggtgcactcttttggcctggacaaggctcctgtgctcctgtcttccctggatcggaagggcatcgtgaccacctcccggagggactggaagagcgacctcagcctggagcgcgtgagtgtgctggaattcttgctgcaagtgcatggctccgaggaccaggactttggcaactactactgttccgtgactccatgggtgaagtcaccaacaggttcctggcagaaggaggcagagatccactccaagcccgtttttataactgtgaagatggatgtgctgaacgccttcaagtatcccttgctgatcggcgtcggtctgtccacggtcatcgggctcctgtcctgtctcatcgggtactgcagctcccactggtgttgtaagaaggaggttcaggagacacggcgcgagcgccgcaggctcatgtcgatggagatggactaggctggcccgggaggggagtgacagagggacgttctaggagcaattggggcaagaagaggacagtgatattttaaaacaaagtgtgttacactaaaaaccagtcctctctaatctcaggtgggacttggcgctctctcttttctgcatgtcaagttctgagcgcggacatgtttaccagcacacggctcttcttcccacggcactttctgatgtaacaatcgagtgtgtgttttcccaactgcagctttttaatggttaaccttcatctaattttttttctcccactggtttatagatcctctgacttgtgtgtgtttatagcttttgtttcgcggggttgtggtgaggaaggggtgatggcatgcggagttctttatcttcagtgagaatgtgcctgcccgcctgagagccagcttccgcgttggaggcacgtgttcagagagctgctgagcgccaccctctacccggctgacagacaacacagacctgtgccgaaggctaatttgtggcttttacgaccctaccccaccccctgttttcaggggtttagactacatttgaaatccaaacttggagtatataacttcttattgagcccaactgctttttttttttttttttttgcttctctgccccttttccatttcttttgtatttgttttctgtgagagcactgaaatggcagccctggaatctacaatttggctctccactgagcaccttatcttgccaccttagccttaagaatgaatatgaagaaaaatacacagccacctctgtccagggcagtaagaagggctgcaaggaaggggaggatggggacaaggaaaggatcagatacctgctccagtagttgtgaggccactgtgtctcaggggactccaggaggagcagaagagggatcccacgaagttattcttacgcagctggggccaggagggtcagagtggtgccaggtgcaagttaggctaaagaagccaccactattcctctctcttgcccattgtggggggcaaaggcattggtcaccaagagtcttgcagggggacccacagatatgccatgtccttcacacgtgcttgggctccttaacctgaaggcaaattgctacttgcaagactgactgacttcaaggaatcagaaattacctagaagcaccatgttttttctatgaccttttcagtccttcaggtcattttaaggtccactgcagggggttagtgagaaagggtatactttgtggtatgttttgctttcctaatagggacatgaaggaaacccagcaatttgctgttatgtgaatggcctgtagagcagagtcaagagcggtgtgctttgcccgactgctcccatcaggaataggagagtagacagagatcttccacatcccaggcttctgctgctgctttaaaagctctgtccttggagcctcccgctccctgaagtgtctcgccccctgcacagcactggcctttcggaagcatcccagtagggttttctgaggctcgctggtgactcatgccctaattgcaatcctctgcttttatcttgactttgaaggatctaacactgctctctcttccaaaggggaaaaaaagattcatttgttttgagcaataaactaatacaaaatgatggccattcatgtgcagctctttgtcaccatgggccggatgagttgtgctcctcctggctcaccatttccccctgctcccccacagccggttctgcacttatcaccgagtcgcccctggaagcagattcccattgagttttccccaccaaggggaccatgcacatggtagaaacattagattctgcattgacagtagcctttccttggcccgggcctgtggtgggaagacgggcaacaagtataccccaccagggcctgagtgactagaggaagaggacgaggccttgttggcactagatttgggtattttctgcatgtcataacatatcctaactgctatttcagaagaggcagcttgtaggtgattgtacaagtgagaattaaagagagaacagatatttaaacaggtgctgtattagtaacagccagtgccctttcagcccttgcatctattaaaaggagattcaggattttattggcacaggcccttcttagtaggaagaaagggtgcttagctttggacctgaccgggtgtgtgtaaaaccatggactgagtcacagcagacactcgatggtggtaaatgtgatgggtgcttacacactgtaccttttcctttcatactgatgctgcagttcagggctggagttgttaaggcattgacctccacccacctgccccatgtccactgggctgcccaagctgcatgtcacctgagggctggcaggaaggggcgagaaatcccagggcattgtaccaaggacctagttccttctagggatataaatttccaggaatgtgtatttttaatgtggtgagatgcactcttttgttgtaccaaatagggctccccaccccacccctgcgacaagtgctcttctagaacaggttcctaccagcagcactggtgtgaatgaaagagagacccagccgcgtctcacacaggtggaattgcacttcttaacaaaaaggaactttataaaagtttgggattttttttcctaatcataaaaatagccccagaaagagcctaagctatgttcagatagaagcctcgaaattcctgtaaattgtttactttatgatgtttacatacacgtttcactttgaaaaaaaatgcaaatcgactttttaacaactgttgagatgtttcatgggacagtagaactctgactcaccaactgggctaaattttaatttaaaaatgtatttatttgagtgtctttccccccctcaccctcaccatctgaggggctccctgagatcttggtagaggaggcccctcctgcccagaccttcgtttgtttccccggtggcccttgcttcttgctttgcagactgcctgcagccatgattttgtcactgacatctgtgagccaaagactgagcctttttggcaggaataataagcaatactacacaacttgctactttcagaaaacttttttttagcttcaccgatgacaacagaggaagaagggaactgggatttgggtaagttctcctccactgtttgaccaaattctcagtgataaatatgtgtgcagatccctagaagagaaaacgctgactttctttttaagtgtggcacataaggatctgcagaattttccgtagacaaagaaaggatcttgtgtatttttgtccatatccaatgttatatgaactaattgtattgttttatactgtgaccacaaatattatgcaatgcaccatttgttttttatttcattaaaggaagtttaattt

SEQ ID NO: 316 - protein, 560 aa, Homo sapiens [sequence omitted]

SEQ ID NO: 317 - DNA, 2388 bp, Homo sapiens
gtccattttgtcggtagaggcagaaggagaaggtcggattgtagaagctggggtggccggcagctcgctcatcggtgttcgtgggctttgtcggtccgtgcctcgtctctccctggaaagggagggaggcttcaacgtcgagagggagccgctgccgcgttagttccgagcttgaagtcactaggacttctctcaaacttgagtgctgaggagactcagatgttggcctcagctcctaggctgaactcagcagatcggcccatgaaaacttctgtattgagacaaaggaagggatctgtcagaaagcaacacttgttatcttgggcttggcagcaaggaagaggacaggtagtggagatcctgcaatctgaaaagcagactgaaaggtgacaaagaagctgaagatgggtggtagagagaggtataacattccagcccctcaatctagaaatgttagtaagaaccaacaacagcttaacagacagaagaccaaggaacagaattcccagatgaagattgttcataagaaaaaagaaagaggacatggttataactcatcagcaggtgcctggcaggccatgaaaaatggggggaagaacaaaaattttccaaataatcaaagttggaattctagcttatcaggtcccagcttactttttaaatctcaagctaaacagaactatgctggtgccaaatttagtgagccgccatcaccaagtgttcttcccaaaccaccaagccactgggtccctgtttcctttaatccttcagataaggaaataatgacatttcaacttaaaaccttacttaaagtacaggtataaaataagacaaatgtttaagtttagttatgttcacagatagttgtcaattggtctgaaacaaatttgctagggaatctatttgtgtagaactaattaatgtaaaaaaaatagacttcatctcgtgttgtgtgcactgtgatataatggtagtatcagtgcaacttaaactaatgattgtaattgatattaagtgttctcaactgagtaacttttaagtggaaaccaagtttagatttggggagtggtaaaggaatcagctttttctattgttaggggaagatagtaatttatcattcatggaccagtagattgttgaaagttggtgaatcggattataagcttctggctaacacaaggattcagaattaggtaaacatctgaaggtttagtatattagaaacacccaaaccagtaatatgctaacctgatgcactgctgaaagaaaatgtgaatttttcgtaataattgcattttagtgaattgtacagtgggtggaaagggcatttggagctcattagaatgagacatagtacaccccaatggccctgtttattaaatgtagtggattaagtgtctgtcaacaaatacaccaaaaccattttttatagaaacagtatttaatggtcactcaatagctttcaaaatacatttttgtattacagcactgcacaagctattctaatagtgatctggcctcctcattcctgccaagcttgctttggggagttggataatgtgaaaattttaagtacctaggggagaaagagccatgtaaatatctgtaataaacttgtagcatatgtaaagttttcttggcctttatcttacaaaaatggaatattttagtatgaatttgctgaatgtaagaccgtggactgttttttataatatggcctaattttaaaggtccaaaataacttgtttttaaagtttgcccttgtgctaaagtgccagtgtatgtatgttatacttgatttggttgtaaactatatttcaaagtaaaccctagtgtaataagttttataactaaaaaggtttaagctgctaaaactatttttaagagatgtgaaatgcagtatgggactatctttttttcctcctctaagcccaaagattaactagagtccctccaaccttatagatttttggctttcacaatcttataacctaggatacaggtagtttcgagtatggtgccagtgatgttttgtttttgtttggtcaaggggtaggtgcaacccaatggaccacttatgcaaaagatgtaaactcttgcataatacatcgataacatgttttgccaactttaaatgcttaaacataagcgaaaccagtagcaagtatgtgggtcagtttaaaaattttgattgttaatgccctattttctaatttggcacctcttttgatgcctaagcaggtaagcagatgcctaagctgtatttctccaaataaatcaagaggaagtactgcccaagttaaatattgatagcctaaagacaaattcatgtagtacttaatgtacatgatatgaatttgaagcataaaattaaatttttccccattg

SEQ ID NO: 318 - DNA, 11395 bp, Homo sapiens
tttcagccaaacttcgggcggcggctgaggcggcggccgaggagcggcggactcggggcgcggggagtcgaggcatttgcgcctgggcttcggagcgtagcgccagggcctgagcctttgaagcaggaggaggggaggagagagtggggctcctctatcgggaccccctccccatgtggatctgcccaggcggcggcggcggcggcggaggaggaggcgaccgagaagatgcccgccctgcgccccgctctgctgtgggcgctgctggcgctctggctgtgctgcgcggcccccgcgcatgcattgcagtgtcgagatggctatgaaccctgtgtaaatgaaggaatgtgtgttacctaccacaatggcacaggatactgcaaatgtccagaaggcttcttgggggaatattgtcaacatcgagacccctgtgagaagaaccgctgccagaatggtgggacttgtgtggcccaggccatgctggggaaagccacgtgccgatgtgcctcagggtttacaggagaggactgccagtactcaacatctcatccatgctttgtgtctcgaccctgcctgaatggcggcacatgccatatgctcagccgggatacctatgagtgcacctgtcaagtcgggtttacaggtaaggagtgccaatggacggatgcctgcctgtctcatccctgtgcaaatggaagtacctgtaccactgtggccaaccagttctcctgcaaatgcctcacaggcttcacagggcagaaatgtgagactgatgtcaatgagtgtgacattccaggacactgccagcatggtggcacctgcctcaacctgcctggttcctaccagtgccagtgccctcagggcttcacaggccagtactgtgacagcctgtatgtgccctgtgcaccctcaccttgtgtcaatggaggcacctgtcggcagactggtgacttcacttttgagtgcaactgccttccaggttttgaagggagcacctgtgagaggaatattgatgactgccctaaccacaggtgtcagaatggaggggtttgtgtggatggggtcaacacttacaactgccgctgtcccccacaatggacaggacagttctgcacagaggatgtggatgaatgcctgctgcagcccaatgcctgtcaaaatgggggcacctgtgccaaccgcaatggaggctatggctgtgtatgtgtcaacggctggagtggagatgactgcagtgagaacattgatgattgtgccttcgcctcctgtactccaggctccacctgcatcgaccgtgtggcctccttctcttgcatgtgcccagaggggaaggcaggtctcctgtgtcatctggatgatgcatgcatcagcaatccttgccacaagggggcactgtgtgacaccaaccccctaaatgggcaatatatttgcacctgcccacaaggctacaaaggggctgactgcacagaagatgtggatgaatgtgccatggccaatagcaatccttgtgagcatgcaggaaaatgtgtgaacacggatggcgccttccactgtgagtgtctgaagggttatgcaggacctcgttgtgagatggacatcaatgagtgccattcagacccctgccagaatgatgctacctgtctggataagattggaggcttcacatgtctgtgcatgccaggtttcaaaggtgtgcattgtgaattagaaataaatgaatgtcagagcaacccttgtgtgaacaatgggcagtgtgtggataaagtcaatcgtttccagtgcctgtgtcctcctggtttcactgggccagtttgccagattgatattgatgactgttccagtactccgtgtctgaatggggcaaagtgtatcgatcacccgaatggctatgaatgccagtgtgccacaggtttcactggtgtgttgtgtgaggagaacattgacaactgtgaccccgatccttgccaccatggtcagtgtcaggatggtattgattcctacacctgcatctgcaatcccgggtacatgggcgccatctgcagtgaccagattgatgaatgttacagcagcccttgcctgaacgatggtcgctgcattgacctggtcaatggctaccagtgcaactgccagccaggcacgtcaggggttaattgtgaaattaattttgatgactgtgcaagtaacccttgtatccatggaatctgtatggatggcattaatcgctacagttgtgtctgctcaccaggattcacagggcagagatgtaacattgacattgatgagtgtgcctccaatccctgtcgcaagggtgcaacatgtatcaacggtgtgaatggtttccgctgtatatgccccgagggaccccatcaccccagctgctactcacaggtgaacgaatgcctgagcaatccctgcatccatggaaactgtactggaggtctcagtggatataagtgtctctgtgatgcaggctgggttggcatcaactgtgaagtggacaaaaatgaatgcctttcgaatccatgccagaatggaggaacttgtgacaatctggtgaatggatacaggtgtacttgcaagaagggctttaaaggctataactgccaggtgaatattgatgaatgtgcctcaaatccatgcctgaaccaaggaacctgctttgatgacataagtggctacacttgccactgtgtgctgccatacacaggcaagaattgtcagacagtattggctccctgttccccaaacccttgtgagaatgctgctgtttgcaaagagtcaccaaattttgagagttatacttgcttgtgtgctcctggctggcaaggtcagcggtgtaccattgacattgacgagtgtatctccaagccctgcatgaaccatggtctctgccataacacccagggcagctacatgtgtgaatgtccaccaggcttcagtggtatggactgtgaggaggacattgatgactgccttgccaatccttgccagaatggaggttcctgtatggatggagtgaatactttctcctgcctctgccttccgggtttcactggggataagtgccagacagacatgaatgagtgtctgagtgaaccctgtaagaatggagggacctgctctgactacgtcaacagttacacttgcaagtgccaggcaggatttgatggagtccattgtgagaacaacatcaatgagtgcactgagagctcctgtttcaatggtggcacatgtgttgatgggattaactccttctcttgcttgtgccctgtgggtttcactggatccttctgcctccatgagatcaatgaatgcagctctcatccatgcctgaatgagggaacgtgtgttgatggcctgggtacctaccgctgcagctgccccctgggctacactgggaaaaactgtcagaccctggtgaatctctgcagtcggtctccatgtaaaaacaaaggtacttgcgttcagaaaaaagcagagtcccagtgcctatgtccatctggatgggctggtgcctattgtgacgtgcccaatgtctcttgtgacatagcagcctccaggagaggtgtgcttgttgaacacttgtgccagcactcaggtgtctgcatcaatgctggcaacacgcattactgtcagtgccccctgggctatactgggagctactgtgaggagcaactcgatgagtgtgcgtccaacccctgccagcacggggcaacatgcagtgacttcattggtggatacagatgcgagtgtgtcccaggctatcagggtgtcaactgtgagtatgaagtggatgagtgccagaatcagccctgccagaatggaggcacctgtattgaccttgtgaaccatttcaagtgctcttgcccaccaggcactcggggcctactctgtgaagagaacattgatgactgtgcccggggtccccattgccttaatggtggtcagtgcatggataggattggaggctacagttgtcgctgcttgcctggctttgctggggagcgttgtgagggagacatcaacgagtgcctctccaacccctgcagctctgagggcagcctggactgtatacagctcaccaatgactacctgtgtgtttgccgtagtgcctttactggccggcactgtgaaaccttcgtcgatgtgtgtccccagatgccctgcctgaatggagggacttgtgctgtggccagtaacatgcctgatggtttcatttgccgttgtcccccgggattttccggggcaaggtgccagagcagctgtggacaagtgaaatgtaggaagggggagcagtgtgtgcacaccgcctctggaccccgctgcttctgccccagtccccgggactgcgagtcaggctgtgccagtagcccctgccagcacgggggcagctgccaccctcagcgccagcctccttattactcctgccagtgtgccccaccattctcgggtagccgctgtgaactctacacggcaccccccagcacccctcctgccacctgtctgagccagtattgtgccgacaaagctcgggatggcgtctgtgatgaggcctgcaacagccatgcctgccagtgggatgggggtgactgttctctcaccatggagaacccctgggccaactgctcctccccacttccctgctgggattatatcaacaaccagtgtgatgagctgtgcaacacggtcgagtgcctgtttgacaactttgaatgccaggggaacagcaagacatgcaagtatgacaaatactgtgcagaccacttcaaagacaaccactgtgaccaggggtgcaacagtgaggagtgtggttgggatgggctggactgtgctgctgaccaacctgagaacctggcagaaggtaccctggttattgtggtattgatgccacctgaacaactgctccaggatgctcgcagcttcttgcgggcactgggtaccctgctccacaccaacctgcgcattaagcgggactcccagggggaactcatggtgtacccctattatggtgagaagtcagctgctatgaagaaacagaggatgacacgcagatcccttcctggtgaacaagaacaggaggtggctggctctaaagtctttctggaaattgacaaccgccagtgtgttcaagactcagaccactgcttcaagaacacggatgcagcagcagctctcctggcctctcacgccatacaggggaccctgtcataccctcttgtgtctgtcgtcagtgaatccctgactccagaacgcactcagctcctctatctccttgctgttgctgttgtcatcattctgtttattattctgctgggggtaatcatggcaaaacgaaagcgtaagcatggctctctctggctgcctgaaggtttcactcttcgccgagatgcaagcaatcacaagcgtcgtgagccagtgggacaggatgctgtggggctgaaaaatctctcagtgcaagtctcagaagctaacctaattggtactggaacaagtgaacactgggtcgatgatgaagggccccagccaaagaaagtaaaggctgaagatgaggccttactctcagaagaagatgaccccattgatcgacggccatggacacagcagcaccttgaagctgcagacatccgtaggacaccatcgctggctctcacccctcctcaggcagagcaggaggtggatgtgttagatgtgaatgtccgtggcccagatggctgcaccccattgatgttggcttctctccgaggaggcagctcagatttgagtgatgaagatgaagatgcagaggactcttctgctaacatcatcacagacttggtctaccagggtgccagcctccaggcccagacagaccggactggtgagatggccctgcaccttgcagcccgctactcacgggctgatgctgccaagcgtctcctggatgcaggtgcagatgccaatgcccaggacaacatgggccgctgtccactccatgctgcagtggcagctgatgcccaaggtgtcttccagattctgattcgcaaccgagtaactgatctagatgccaggatgaatgatggtactacacccctgatcctggctgcccgcctggctgtggagggaatggtggcagaactgatcaactgccaagcggatgtgaatgcagtggatgaccatggaaaatctgctcttcactgggcagctgctgtcaataatgtggaggcaactcttttgttgttgaaaaatggggccaaccgagacatgcaggacaacaaggaagagacacctctgtttcttgctgcccgggaggggagctatgaagcagccaagatcctgttagaccattttgccaatcgagacatcacagaccatatggatcgtcttccccgggatgtggctcgggatcgcatgcaccatgacattgtgcgccttctggatgaatacaatgtgaccccaagccctccaggcaccgtgttgacttctgctctctcacctgtcatctgtgggcccaacagatctttcctcagcctgaagcacaccccaatgggcaagaagtctagacggcccagtgccaagagtaccatgcctactagcctccctaaccttgccaaggaggcaaaggatgccaagggtagtaggaggaagaagtctctgagtgagaaggtccaactgtctgagagttcagtaactttatcccctgttgattccctagaatctcctcacacgtatgtttccgacaccacatcctctccaatgattacatcccctgggatcttacaggcctcacccaaccctatgttggccactgccgcccctcctgccccagtccatgcccagcatgcactatctttttctaaccttcatgaaatgcagcctttggcacatggggccagcactgtgcttccctcagtgagccagttgctatcccaccaccacattgtgtctccaggcagtggcagtgctggaagcttgagtaggctccatccagtcccagtcccagcagattggatgaaccgcatggaggtgaatgagacccagtacaatgagatgtttggtatggtcctggctccagctgagggcacccatcctggcatagctccccagagcaggccacctgaagggaagcacataaccacccctcgggagcccttgccccccattgtgactttccagctcatccctaaaggcagtattgcccaaccagcgggggctccccagcctcagtccacctgccctccagctgttgcgggccccctgcccaccatgtaccagattccagaaatggcccgtttgcccagtgtggctttccccactgccatgatgccccagcaggacgggcaggtagctcagaccattctcccagcctatcatcctttcccagcctctgtgggcaagtaccccacacccccttcacagcacagttatgcttcctcaaatgctgctgagcgaacacccagtcacagtggtcacctccagggtgagcatccctacctgacaccatccccagagtctcctgaccagtggtcaagttcatcaccccactctgcttctgactggtcagatgtgaccaccagccctacccctgggggtgctggaggaggtcagcggggacctgggacacacatgtctgagccaccacacaacaacatgcaggtttatgcgtgagagagtccacctccagtgtagagacataactgacttttgtaaatgctgctgaggaacaaatgaaggtcatccgggagagaaatgaagaaatctctggagccagcttctagaggtaggaaagagaagatgttcttattcagataatgcaagagaagcaattcgtcagtttcactgggtatctgcaaggcttattgattattctaatctaataagacaagtttgtggaaatgcaagatgaatacaagccttgggtccatgtttactctcttctatttggagaataagatggatgcttattgaagcccagacattcttgcagcttggactgcattttaagccctgcaggcttctgccatatccatgagaagattctacactagcgtcctgttgggaattatgccctggaattctgcctgaattgacctacgcatctcctcctccttggacattcttttgtcttcatttggtgcttttggttttgcacctctccgtgattgtagccctaccagcatgttatagggcaagacctttgtgcttttgatcattctggcccatgaaagcaactttggtctcctttcccctcctgtcttcccggtatcccttggagtctcacaaggtttactttggtatggttctcagcacaaacctttcaagtatgttgtttctttggaaaatggacatactgtattgtgttctcctgcatatatcattcctggagagagaaggggagaagaatacttttcttcaacaaattttgggggcaggagatcccttcaagaggctgcaccttaatttttcttgtctgtgtgcaggtcttcatataaactttaccaggaagaagggtgtgagtttgttgtttttctgtgtatgggcctggtcagtgtaaagttttatccttgatagtctagttactatgaccctccccacttttttaaaaccagaaaaaggtttggaatgttggaatgaccaagagacaagttaactcgtgcaagagccagttacccacccacaggtccccctacttcctgccaagcattccattgactgcctgtatggaacacatttgtcccagatctgagcattctaggcctgtttcactcactcacccagcatatgaaactagtcttaactgttgagcctttcctttcatatccacagaagacactgtctcaaatgttgtacccttgccatttaggactgaactttccttagcccaagggacccagtgacagttgtcttccgtttgtcagatgatcagtctctactgattatcttgctgcttaaaggcctgctcaccaatctttctttcacaccgtgtggtccgtgttactggtatacccagtatgttctcactgaagacatggactttatatgttcaagtgcaggaattggaaagttggacttgttttctatgatccaaaacagccctataagaaggttggaaaaggaggaactatatagcagcctttgctattttctgctaccatttcttttcctctgaagcggccatgacattccctttggcaactaacgtagaaactcaacagaacattttcctttcctagagtcaccttttagatgataatggacaactatagacttgctcattgttcagactgattgcccctcacctgaatccactctctgtattcatgctcttggcaatttctttgactttcttttaagggcagaagcattttagttaattgtagataaagaatagttttcttcctcttctccttgggccagttaataattggtccatggctacactgcaacttccgtccagtgctgtgatgcccatgacacctgcaaaataagttctgcctgggcattttgtagatattaacaggtgaattcccgactcttttggtttgaatgacagttctcattccttctatggctgcaagtatgcatcagtgcttcccacttacctgatttgtctgtcggtggccccatatggaaaccctgcgtgtctgttggcataatagtttacaaatggttttttcagtcctatccaaatttattgaaccaacaaaaataattacttctgccctgagataagcagattaagtttgttcattctctgctttattctctccatgtggcaacattctgtcagcctctttcatagtgtgcaaacattttatcattctaaatggtgactctctgcccttggacccatttattattcacagatggggagaacctatctgcatggacctctgtggaccacagcgtacctgcccctttctgccctcctgctccagccccacttctgaaagtatcagctactgatccagccactggatattttatatcctcccttttccttaagcacaatgtcagaccaaattgcttgtttctttttcttggactactttaatttggatcctttgggtttggagaaagggaatgtgaaagctgtcattacagacaacaggtttcagtgatgaggaggacaacactgcctttcaaactttttactgatctcttagattttaagaactcttgaattgtgtggtatctaataaaagggaaggtaagatggataatcactttctcatttgggttctgaattggagactcagtttttatgagacacatcttttatgccatgtatagatcctcccctgctatttttggtttatttttattgttataaatgctttctttctttgactcctcttctgcctgcctttggggataggtttttttgtttgtttatttgcttcctctgttttgttttaagcatcattttcttatgtgaggtggggaagggaaaggtatgagggaaagagagtctgagaattaaaatattttagtataagcaattggctgtgatgctcaaatccattgcatcctcttattgaatttgccaatttgtaatttttgcataataaagaaccaaaggtgtaatgttttgttgagaggtggtttagggattttggccctaaccaatacattgaatgtatgatgactatttgggaggacacatttatgtacccagaggcccccactaataagtggtactatggttacttccttgtgtacatttctcttaaaagtgatattatatctgtttgtatgagaaacccagtaaccaataaaatgaccgcatattcctgactaaacgtagtaaggaaaatgcacactttgtttttacttttccgtttcattctaaaggtagttaagatgaaatttatatgaaagcatttttatcacaaaataaaaaaggtttgccaagctcagtggtgttgtattttttattttccaatactgcatccatggcctggcagtgttacctcatgatgtcataatttgctgagagagcaaattttcttttctttctgaatcccacaaagcctagcaccaaacttctttttttcttcctttaattagatcataaataaatgatcctggggaaaaagcatctgtcaaataggaaacatcacaaaactgagcactcttctgtgcactagccatagctggtgacaaacagatggttgctcagggacaaggtgccttccaatggaaatgcgaagtagttgctatagcaagaattgggaactgggatataagtcataatattaattatgctgttatgtaaatgattggtttgtaacattccttaagtgaaatttgtgtagaacttaatatacaggattataaaataatattttgtgtataaatttgttataagttcacattcatacatttatttataaagtcagtgagatatttgaacatg

SEQ ID NO: 319 - DNA, 1911 bp, Homo sapiens
gaggaggaggaggagatgactggggagcgggagctggagaatactgcccagttactctagcgcgccaggccgaaccgcagcttcttggcttaggtacttctactcacagcggccgattccgaggccaactccagcaatggcttttgcaaatctgcggaaagtgctcatcagtgacagcctggacccttgctgccggaagatcttgcaagatggagggctgcaggtggtggaaaagcagaaccttagcaaagaggagctgatagcggagctgcaggactgtgaaggccttattgttcgctctgccaccaaggtgaccgctgatgtcatcaacgcagctgagaaactccaggtggtgggcagggctggcacaggtgtggacaatgtggatctggaggccgcaacaaggaagggcatcttggttatgaacacccccaatgggaacagcctcagtgccgcagaactcacttgtggaatgatcatgtgcctggccaggcagattccccaggcgacggcttcgatgaaggacggcaaatgggagcggaagaagttcatgggaacagagctgaatggaaagaccctgggaattcttggcctgggcaggattgggagagaggtagctacccggatgcagtcctttgggatgaagactatagggtatgaccccatcatttccccagaggtctcggcctcctttggtgttcagcagctgcccctggaggagatctggcctctctgtgatttcatcactgtgcacactcctctcctgccctccacgacaggcttgctgaatgacaacacctttgcccagtgcaagaagggggtgcgtgtggtgaactgtgcccgtggagggatcgtggacgaaggcgccctgctccgggccctgcagtctggccagtgtgccggggctgcactggacgtgtttacggaagagccgccacgggaccgggccttggtggaccatgagaatgtcatcagctgtccccacctgggtgccagcaccaaggaggctcagagccgctgtggggaggaaattgctgttcagttcgtggacatggtgaaggggaaatctctcacgggggttgtgaatgcccaggcccttaccagtgccttctctccacacaccaagccttggattggtctggcagaagctctggggacactgatgcgagcctgggctgggtcccccaaagggaccatccaggtgataacacagggaacatccctgaagaatgctgggaactgcctaagccccgcagtcattgtcggcctcctgaaagaggcttccaagcaggcggatgtgaacttggtgaacgctaagctgctggtgaaagaggctggcctcaatgtcaccacctcccacagccctgctgcaccaggggagcaaggcttcggggaatgcctcctggccgtggccctggcaggcgccccttaccaggctgtgggcttggtccaaggcactacgcctgtactgcaggggctcaatggagctgtcttcaggccagaagtgcctctccgcagggacctgcccctgctcctattccggactcagacctctgaccctgcaatgctgcctaccatgattggcctcctggcagaggcaggcgtgcggctgctgtcctaccagacttcactggtgtcagatggggagacctggcacgtcatgggcatctcctccttgctgcccagcctggaagcgtggaagcagcatgtgactgaagccttccagttccacttctaaccttggagctcactggtccctgcctctggggcttttctgaagaaacccacccactgtgatcaatagggagagaaaatccacattcttgggctgaacgcgggcctctgacactgcttacactgcactctgaccctgtagtacagcaataaccgtctaataaagagcctaccccc

SEQ ID NO: 320 - protein, 533 aa, Homo sapiens
MAFANLRKVLISDSLDPCCRKILQDGGLQVVEKQNLSKEELIAELQDCEGLIVRSATKVTADVINAAEKLQVVGRAGTGVDNVDLEAATRKGILVMNTPNGNSLSAAELTCGMIMCLARQIPQATASMKDGKWERKKFMGTELNGKTLGILGLGRIGREVATRMQSFGMKTIGYDPIISPEVSASFGVQQLPLEEIWPLCDFITVHTPLLPSTTGLLNDNTFAQCKKGVRVVNCARGGIVDEGALLRALQSGQCAGAALDVFTEEPPRDRALVDHENVISCPHLGASTKEAQSRCGEEIAVQFVDMVKGKSLTGVVNAQALTSAFSPHTKPWIGLAEALGTLMRAWAGSPKGTIQVITQGTSLKNAGNCLSPAVIVGLLKEASKQADVNLVNAKLLVKEAGLNVTTSHSPAAPGEQGFGECLLAVALAGAPYQAVGLVQGTTPVLQGLNGAVFRPEVPLRRDLPLLLFRTQTSDPAMLPTMIGLLAEAGVRLLSYQTSLVSDGETWHVMGISSLLPSLEAWKQHVTEAFQFHF

SEQ ID NO: 321 - DNA, 1484 bp, Homo sapiens
gggcaggggtgcggagggaccgacggacgcacgggcgggcggccgggagccatggagcgcggccctggggcccgggggcgcgggccggggtgggcttcccacggcacgacatggagacctgtggttgcgaggctccctggggctcggcttggaccgcgatggggctgggccctggcctcctaacggggctgctgtctggggcggtagctgggggggcgctctcccccctgcccgcgactcggagcaccccacccctcccctgccgggccaggccgggcggcgttgttggcgggggccccggtggaggcccggcccgggcggcgcccgccatgaacgggctgtcgctgagtgagctctgctgcctcttctgctgccctccctgccccggccgcatcgctgccaagctcgccttcctgccgccggaggccacctactccctggtgcctgagcccgagctggggcctggtggggccggggccgcccccttggggaccctgagagcctcctcgggcgcacccgggcgctggaagctgcacctgacggagcgtgccgacttccagtacagccagcgcgagctggacaccatcgaggtcttccccaccaagagcgcccgcggcaaccgtgtctcctgcatgtatgttcgctgcgtgcctggtgccaggtacacggtcctcttctcgcacggcaatgccgtggacctgggccagatgagcagcttctacattggcctgggctcccgcctccactgcaacatcttcacctacgactcctccggctacggtgccagctcgggcaggccttccgagaggaacctctatgccgacatcgacgccacctggcaggccctgcgcaccaggtacggcatcagcccggacagcatcatcctgtacgggcagagcatcggcacggtgcccaccatggacctggcctcgcgctacgagtgtgccgcggtggtgctgcactcgccgctcacctcgggcatgcgcgtcgccttccgcgacaccaagaagacctactgcttcgacgccttccctaacatcgagaaggtgtccaagatcacgtctcccgtgctcatcatccacggcagggaggacgaggtgatcgacttctcgcacgggctggcgctctacgagcgctgccccaaggcggtggagccgctgtgggtggagggcgccgggcacaacgacatcgagctctacagccagtacctggagcgcctgcgtcgcttcatctcccaggagctgcccagccagcgcgcctagcggcggccccaaccagccggacctcagcaataaggcggcccccggacctcaccccgcgccggcccccacccaggggctgcatgtggacccccccgggcggcccaggggaccccgccccgacccaggggctgtggacgatgtacaggcaacagagctacgcactcctttccttttggaagcaagaagaaaatacgtgaaaacggaaattaaagatttaaaatt

SEQ ID NO: 322 - protein, 310 aa, Homo sapiens
MNGLSLSELCCLFCCPPCPGRIAAKLAFLPPEATYSLVPEPELGPGGAGAAPLGTLRASSGAPGRWKLHLTERADFQYSQRELDTIEVFPTKSARGNRVSCMYVRCVPGARYTVLFSHGNAVDLGQMSSFYIGLGSRLHCNIFTYDSSGYGASSGRPSERNLYADIDATWQALRTRYGISPDSIILYGQSIGTVPTMDLASRYECAAVVLHSPLTSGMRVAFRDTKKTYCFDAFPNIEKVSKITSPVLIIHGREDEVIDFSHGLALYERCPKAVEPLWVEGAGHNDIELYSQYLERLRRFISQELPSQRA

SEQ ID NO: 323 - DNA, 4992 bp, Homo sapiens
agcgtgaacctgggaggcagagcttgcagtgagcctagatcgcgtcactgcactccagcctgggagacagagtgagactctgtctcaaaaaaaaaaaaaagtcaaaacaagagaacatactaaatgattccatttttttatttatgacttcatgactaccattaagaaaatataacctgttgggaaactgtttctgccttgatgatgttgtacagacaagagataaacagtgaggaatgtgcttagatgtattgggaaagacacgggtctgtggcattgtcacaagggtacacgaatactgagagtgaatgctgaaggaatgatccccattggtggtgaccctcaggtgagactagggtgcctgtgtttcagcaaagcctgggcaattggaatgcagggctcctaagattccatgacacccccaccttctaattctgttattgcaactgcagaccgttacctggcacgctggccacaatctacctcactcttatcagagtctgagctactggcagtgctttcagctctgagttgaggcacctcgaaccttgtttttgtggtgaaggatcctaaagtgctgtgggagtgatcacatttttcacaacagtaagtccctgactccacctcttctgccacaaacgtcagcatggtggtatcagccggcccttggtccagcgagaaggcagagatgaacattctagaaatcaacgagaaattgcgcccccagttggcagagaacaaacagcagttcgtaaacctcaaagagatgttttctaactcaactggccggcttcctggccaaccgacagaagaaatacagcaatataaagtcctggttcactctcaggaacgagagctgacgcagttaaaggagaagttacaggaagggagagatgcctcccgctcattgaatgagcatctccaggccctcctcactctggatgagccggacaagtcccaggggcaggacctccaagaacagctggctgaggggtgtagactggcacagcaccttgtccaaaagctcagcccagaaaatgacgaagatgaggatgaagatgttcaagttgaggaggatgagaaagtgcagaaatcatctgcccccagggaggtgcagaaggctgaagtgagcaaagtccctgaggactcactggaggaatgtgccatcacttgttcaaatagccacggcccttgtgactccaaccagcctcacaagaacatcaaaatcacatttgaggaagacgaagtcaactcaactctggttgtagacagagaatcctctcatgatgaatgtcaggatgctctaaacattctcccagtccctggccccacctcttctgccacaaacgtcagcatggtggtatcagccggccctttgtccagcgagaaggcagagatgaacattctagaaatcaatgagaaattgcacccccagctggcagagaagaaacagcagttcagaaacctcaaagagaaatgttttctaactcaactggccggcttcctggccaaccagcagaacaaatacaagtatgaagagtgtaaagacctcataaaatttatgctgaggaatgagcgacagttcaaggaggagaagcttgcagagcagctgaagcaagctgaggagctcaggcaatataaagtcctggttcacgctcaggaacgagagctgacccagttaagggagaagttgcgggaagggagagatgcctcccgctcattgaatgagcatctccaggccctcctcactccggatgagccggacaagtcccaggggcaggacctccaagaacagctggctgaggggtgtagactggcacagcaccttgtccaaaagctcagcccagaaaatgacaacgatgacaatgaagatgttcaagttgaggtggctgagaaagtgcagaaatcgtctgcccccagggagatgcagaaggctgaagaaaaggaagtccctgaggactcactggaggaatgtgccatcacttattcaaatagccatggcccttatgactccaaccagccacataggaaaaccaaaatcacatttgaggaagacaaagtcgactcaactctcattggctcatcctctcatgttgaacgggaagatgctgtacacattattccagaaaatgaaagtgatgatgaggaagaggaagaaaaagggccagtgtctcccaggaatctgcaggagtctgaagaggaggaagtcccccaggagtcctgggatgaaggttattcgactccctcaattcctcctgaaatgttggcctcgtacaagtcttacagcagcacatttcactcattagaggaacagcaagtctgcatggctgttgacataggcagacatcggtgggatcaagtgaaaaaggaggaccaagaggcaacaggtcccaggctcagcagggagctgctggatgagaaagggcctgaagtcttgcaggactcactgtatagatgttattcaactccttcaggttgtcttgaactgactgactcatgccagccctacagaagtgccttttacgtattggagcaacagcgtgttggcttggctgttgacatggatgaaattgaaaagtaccaagaagtggaagaagaccaagacccatcatgccccaggctcagcagggagctgctggatgagaaagagcctgaagtcttgcaggactcactgggtagatggtattcgactccttcaggttatcttgaactgcctgacttaggccagccctacagcagtgctgtttactcattggaggaacagtaccttggcttggctcttgacttggacagaattaaaaaggaccaagaagaggaagaagaccaaggcccaccatgccccaggctcagcagggagctgctggaggtagtagagcctgaagtcttgcaggactcactggatagatgttattcaactccttccagttgtcttgaacagcctgactcctgccagccctatggaagttccttttatgcattggaggaaaaacatgttggcttttctcttgacgtgggagaaattgaaaagaaggggaaggggaagaaaagaaggggaagaagatcaaagaaggaaagaagaaggggaagaaaagaaggggaagaagatcaaaacccaccatgccccaggctcaacggcgtgctgatggaagtggaagagcctgaagtcttgcaggactcactggatggatgttattctactccgtcaatgtactttgaactacctgactcattccagcactacagaagtgtgttttactcatttgaggaacagcacatcagcttcgccctttacgtggacaataggttttttactttgacggtgacaagtctccacctggtgttccagatggaagtcatattcccacaataagcagcccttactaagccgagagatgtcattcctgcaggcaggacctataggcacgtgaagatttgaatgaaactacagttccatttggaagcccagacataggatgggtcagtgggcatggctctattcctattctcaaaccatgccagtggcaacctgtgctcagtctgaagacaatggacccacgttaggtgtgacacgttcacataactgtgcagcacatgccgggagtgatcagtcagacattttaatttgaaccacgtatctctgggtagctacaaaattcctcagggatttcattttgcagacatgtctctgagcttctatacctgctcaaggtcattgtcatctttgtgtttagctcatccaaaggtgttaccctggtttcaatgaacctaacctcattcttcgtgtcttcagtgttggcttgttttagctgatccatctgtaacacaggagggatccttggctgaggattgtatttcagaaccaccaactgctcttgacaattgttaacccgctaggctcctttggttagagaagccacagtccttcagcctccaattggtgtcagtacttaggaagaccacagctagatggacaaacagcattgggaggccttagccctgctcctctcaattccatcctgtagagaacaggagtcaggagccgctggcaggagacagcatgtcacccaggactctgccggtgcagaatatgaacaatgccatgttcttgcagaaaacgcttagcctgagtttcataggaggtaatcaccagacaactgcagaatgtagaacactgagcaggacaactgacctgtctccttcacatagtccttatcaccacaaatcacacaacaaaaaggagaagagatattttgggttcaaaaaaagtaaaaagataatgtagctgcatttctttagttattttgaaccccaaatatttcctcatctttttgttgttgtcatggatggtggtgacatggacttgtttatagaggacaggtcagctgtctggctcaatgatctacattctgaagttgtctgaaaatgtcttcatgattaaattcagcctaaacgttttgccgggaacactgcagagacaatgctgtgagtttccaacctcagcccatctgcgggcagagaaggtctagtttgtccatcaccattatgatatcaggactggttacttggttaaggaggggtctaggagatctgtcccttttagagacaccttacttataatgaagtacttgggaaagcggttttcaagagtataaatatcctgtattctaatgatcatcctctaaacattttatcatttattaatcctccctgcctgtgtctattattatattcatatctctacgctgcaaattttgggtctcaatttttactgtgcctttgtttttactagtgtctgctgttgcaaaaagaagaaaacattctctgcctgagttttaatttttgtccaaagttaattttaatctatacaattaaaaccttttgcctatcactctggacttttggattgttttttacattcagtgttataatatttgattatgctgattggttttggtgggtactgatgcgaattaataaaaacatttcatttcc

SEQ ID NO: 324 - DNA, 4238 bp, Homo sapiens
gttttgtaactcaactggccggcttcctggccaagcagcagaacaaatacaaatatgaagagtgcaaagacctcataaaatctatgctgaggaatgagctacagttcaaggaggagaagcttgcagagcagctgaagcaagctgaggagctcaggtgaggggaccccatgggggcaggcaggggggcaggtgtgtaaatctctgaagtacaacagctcggtggggagacttaagagctaagctgggccaggggaagggcaggaattgccatggcaggctcgctacacacaaatatttatcaaacagagaagaaggataataaaaatttatgggttgcagtgtttctcagagcctgttttcttttttcaaacaagtaatgttgatgtgaaatttacataacacaaaattaaccaaaggagtgtgaaccacacagcagcattcagtatactcaaaatggtgtgccatcaccaccccacttaccctagtgagaatcacctcctgactgactgcggcttctcattctttcactcaatcaatgttgccttctcgaccctgtcattcttttcttctttcgtcttttcaattcgccctatctgcatctggcctcatttctgtacatggctttgtatctaatggccgcaagatgcactatgtgtattttcacatggaaatgtccatggccagagtgaggaactgaaaggatgtctttttgaaacggaattaggaagacacctacttttgtttacagaggggaaagatgaatggaacatcatcgaggatcttgcaggagccctctctgatacagaggaagcctgtaaaccattttctattctttctcttggccacagacattcctttcaacatgtgctgaccttctgcttggaggtctccttgaggacattgtctcagaaatctctgttgcaatatttgaacggatcactcaaccctttccactcttaaattttctctaccgtctcaccttaggcaatataaagtcctggttcactctcaggaacgagagctgacccagttaagggagaagttacgggaagggagagatgcctcccgctcattgaatgagcatctccaggccctcctcactccggatgagccggacaagtcccaggggcaggacctccaagaacagctggctgaggggtgtagactggcacaacaccttgtccaaaagctcagcccagaaaatgataacgatgacgatgaagatgttcaagttgaggtggctgagaaagtgcagaaatcgtcttcccccagggagatgcagaaggctgaagaaaaggaagtccctgaggactcactggaggagtgtgccatcacttgttcaaatagccatggcccttatgactccaaccagccacataggaaaaccaaaatcacatttgaggaagacaaagtcgactcaactctcattggctcatcctctcatgttgaatgggaggatgctgtacacattatcccagaaaatgaaagtgatgatgaggaagaggaagaaaaagggccagtgtctcccaggaatctgcaggagtctgaagaggaggaagtcccccaggagtcctgggatgaaggttattcgactctctcaattcctcctgaaaggttggcctcataccagtcttacagcagcacatttcactcattagaggaacagcaagtctgcatggctgttgacataggcagacatcggtgggatcaagtgaaaaaggaggaccaagaggcaacaggtcccaggctcagcagggagctgctggctgagaaagagcctgaagtcttgcaggactcactggatagatgttattcaactccttcagtttatcttggactgactgactcatgccagccctacagaagtgccttttacgtattggagcaacagcgtgttggcttggctgttgacatggatgaaattgaaaagtaccaagaagtggaagaagaccaagacccatcatgccccaggctcagcagggagctgctggctgagaaagagcctgaagtcttgcaggactcactggatagatgttattcgactccttcaggttatcttgaactgcctgacttaggccagccctacagaagtgctgtttactcattggaggaacagtaccttggcttggctcttgacgtggacagaattaaaaaggaccaagaagaggaagaagaccaaggcccaccatgccccaggctcagcagggagctgctggaggtagtagagcctgaagtcttgcaggactcactggatagatgttattcaactccttccagttgtcttgaacagcctgactcctgccagccctacagaagttccttttatgcattggaggaaaaacatgttggcttttctcttgacgtgggagaaattgaaaagaaggggaaggggaagaaaagaaggggaagaagatcaaagaagaaaagaagaaggggaagaaaagaaggggaagaagatcaaaacccaccatgccccaggctcaacagcgtgctgatggaagtggaagagcctgaagtcttgcaggactcactggatagatgttattcgactccatcaatgtactttgaactacctgactcattccagcactacagaagtgtgttttactcatttgaggaacagcacatcacctttgcccttgacatggacaatagcttttttactttgacggtgacaagtctccacctggtcttccagatgggagtcatattcccacaataagcagcccttactaagccgagaggtgtcattcctgcaggcaggacctataggcacctgaagatttgaatgaaactatagttccatttggaagcccagacataggatgggtcagtgggcatggctctattcctattctcagagcatgccagtggcaacctgtgctcagtctgaagacaatggacccacgttaggtgtgacacgttcacataactgtgcagcacatgccgggagtgatcagccggacattttaatttgaaccatgtatctctgggtagctacaaaattcctcagggatttcattttgcaggcatgtctctgagcttctatacctactcaaggtcagtgtcatctttgtgtttagttcatccaaaggtgttaccctggtttcaatgaacctaacctcattatttgtgtcttcagtgttggcttgttttagctgatccatctgtaacacaggagggatccttggctgaggattgtatttcagaaccaccaactgctcttgacaattgttaacccgctaggctcctttggttagagaagccacagtccttcagcctccaattggtgtcagtacttaggaagaccacagctagatggacaaacagcattgggaggccttagccctgctcctctcaattccatcctgtagagaacaggagtcaggagccgctggcaggagacagcatgtcacccaggactctgccggtgcagaatatgagcaatgccatgttcttgcagaaaacgcttagcctgagtttcataggaggtaatcaccagacaactgcagaatgtagaacactgagcaggacaactgacctgtctccttcacatagtccatatcaccacaaatcacacaacaaaaaggagaagagatattttgggttgaaaaaaagtaaaaagataattagctgcatttctttagttattttgaaccccaaatatttcctcatctttttgttgttgtcattgatggtggtgacatggacttgtttatagaggacaggtcagctctctggctcaatgatctacattctgaagttgtctgaaaatgtcttcatgattaaattcagcctaaactttttgctgggaacactgcagagacaatgctgtgagtttccaacctcagcccatctgcgggcagagaaggtctagtttgtccatcaccattatgatatcaggactggttacttggttaaggaggggtctaggagatctgtcccttttagagacaccttacttataatgaagtacttgggaaagcggttttcaagagtataaatatcctgtattctaatgatcatcctctaaacattttatcatttattaatcctccctgcctgtgtctattattatatacatatctctacgctgcaaattttgggtctcaatttttactgtgcctttgtttttactagtgtctgctgttgcaaaaagaagaaaacattctctgcctgagttttaatttttgtccaaagttaattttaatctatacaattaaaaccttttgcctatc

SEQ ID NO: 325 - protein, 258 aa, Homo sapiens
MLRNELQFKEEKLAEQLKQAEELRQYKVLVHSQERELTQLREKLREGRDASRSLNEHLQALLTPDEPDKSQGQDLQEQLAEGCRLAQHLVQKLSPENDNDDDEDVQVEVAEKVQKSSSPREMQKAEEKEVPEDSLEECAITCSNSHGPYDSNQPHRKTKITFEEDKVDSTLIGSSSHVEWEDAVHIIPENESDDEEEEEKGPVSPRNLQESEEEEVPQESWDEGYSTLSIPPERTSVGSSEKGGPRGNRSQAQQGAAG

SEQ ID NO: 326 - DNA, 1855 bp, Homo sapiens
ctccgcggtcttctgagcggtcacgtgaacggcttcctgcaggctggccatggcgcttcaagttcccaaggctccgggcttcgcccagatgctcaaggagggagcgaaacacttttcagaattagaagaggctgtgtatagaaacatacaagcttgcaaggagcttgcccaaaccactcgtacagcatatggacgaaatggaatgaaaaaaatggttatcaactacttggagaagttgtttgtgacaaatgatgcagcgactattttaagagaactagaagtacagcatcctgctgcaaaaatgactgtaatggcttctcatatgcaagagcaagaagttggagatggcacaaacattgttctggtatttgctggagctctcctggaattagctgaagaacttctgaggattggcctgtcagtttcagaggtcatagaaggttatgaaatagcttgcagaaaagctcatgagattcttcctaatttggtacgttgttctgcaaaaaaccttcgagatgttgatgaagtctcatctctacttcgtacctctgtaatgtgtaaacaatatggtaatgaagtatttctggccaagcttattgttcaggcatgcgtatctatttttcctgattctggccatttcaaagttgataacatcagagtttgtaaaattctgggctgtggtatcacttcctcttcagtattgcatggcatggtttttaagaaggaaacagaaggtgatgtacatctgtcaaagatgcaaaaatagcagtgtactcttgtccttttgatggcatgataacagaaactaagggaacagtgttgataaagactgatgaagaattgatgaatttaagtaagggagaagaaaatctcatggatgcataagtcaaagctattgctgatactggtgcaaatgttgtagtaacaggtggcaaagtggcagacatggctcttcattatgcaaacaaatataatatgatgttagtgaagctaaactcaaaatgggatgtctgaagactctgtaaaacagttggtgctacagctcttcctagattgacacctcctgtccttgaagaaatgggacactgagacagtgtttacctctcagaagttggagatactcaggtggtggtttttaagcatgaaaaggaagatggcatcatttctaccatagtacttcagggctctacagacaatctgatggatgacatagaaagggcagtagatgatggtgttaatactttcaaagttcttacaagggataaacgtcttgtacccggaggtggagcaacagaaattgaattagccaaacagatcacatcatatggagagacatgtcctggacttgaacagtacgctattaagaagtttgctgaggcgtttgaagctattccccgtgcactggcagaaatactctggagaaaactctggagttaaggccaatgaagtaatctctaaactttatgcagtacctcaagaaggaaataaaaatgttggattagatactgaggctgtagtccctgctgtaacggacatgttggaagctggtgttctagatacttacctgggaaaacactggtctatcaaactcgctgctaatgctgcagtcactgtacttagagtgggtcaggtaatcatggcaaaaccagatggtgggcccaagcctccaagtgggaagaaagactgggatgatgaccaaaatgattgaaattggcttaatttttactgtaggtgaaggctgtatttgtagtagtattctaagaatcgcgtgatgttttcttattctccttacattaagaggtattttgtgtttgtattcttggctggatgttataataaacatattgttactgtc

SEQ ID NO: 327 - DNA, 860 bp, Homo sapiens
gggcttcgcccagatgctcaaggagggagcgaaacacttttcagaattagaagaggctgtgtatagaaacatacaagcttgcaaggagcttgcccaaaccactcgtacagcatatggacgaaatggaatgaaaaaaatggttatcaactacttggagaagttgtttgtgacaaatgatgcagcgactattttaagagaactagaagtacagcatcctgctgcaaaaatgactgtaatggcttctcatatgcaagagcaagaagttggagatggcacaaacattgttctggtatttgctggagctctcctggaattagctgaagaacttctgaggattggcctgtcagtttcagaggtcatagaaggttatgaaatagcttgcagaaaagctcatgagattcttcctaatttggtacgttgttctgcaaaaaaccttcgagatgttgatgaagtctcatctctacttcgtacctctgtaatgtgtaaacaatatggtaatgaagtatttctggccaagcttattgttcaggcatgcgtatctatttttcctgattctggccatttcaaagttgataacatcagagtttgtaaaattctgggaacagtgttgataaagactgatgaagaattgatgaatttaagtaagggagaagaaaatctcatggatgcataagtcaaagctattgctgatactggtgcaaatgttgtagtaacaggtggcaaagtggcagacatggctcttcattatgcaaacaaatataatatgatgttagtgaagctaaactcaaaatgggatgtctgaagactctgtaaaacagttggtgctacagctcttcctagattgacacctcctgtccttg

SEQ ID NO: 328 - DNA, 1812 bp, Homo sapiens
gtgggtaggagcttgcttatagaaaagtggaatcgagtagtccttgctggtggagccgctgccgccagggaactcagggccggctcctgttccttcaagagtgctggaggccaaacttgaaatacaagtttaatgttcctcgtcgggcaaaagataaggatccgatctcccccggcccggtgtgcagcaggagcgaccaaccccgacccgggttaaaactcccagggactcttcgctgctgccacctcttgttctctcccccgttcccactcggggtctccctcagggccgggaggcacagcggtccctgcttgctgaggggctggatgtacgcatccgcaggttcccgcggacttgggggcgcccgctgagccccggcgcccgcagaagacttgtgtttgcctcctgcagcctcaacccggagggcagcgagggcctaccaccatgatcactggtgtgttcagcatgcgcttgtggaccccagtgggcgtcctgacctcgctggcgtactgcctgcaccagcggcgggtggccctggccgagctgcaggaggccgatggccagtgtccggtcgaccgcagcctgctgaagttgaaaatggtgcaggtcgtgtttcgacacggggctcggagtcctctcaagccgctcccgctggaggagcaggtagagtggaacccccagctattagaggtcccaccccaaactcagtttgattacacagtcaccaatctagctggtggtccgaaaccatattctccttacgactctcaataccatgagaccaccctgaaggggggcatgtttgctgggcagctgaccaaggtgggcatgcagcaaatgtttgccttgggagagagactgaggaagaactatgtggaagacattccctttctttcaccaaccttcaacccacaggaggtctttattcgttccactaacatttttcggaatctggagtccacccgttgtttgctggctgggcttttccagtgtcagaaagaaggacccatcatcatccacactgatgaagcagattcagaagtcttgtatcccaactaccaaagctgctggagcctgaggcagagaaccagaggccggaggcagactgcctctttacagccaggaatctcagaggatttgaaaaaggtgaaggacaggatgggcattgacagtagtgataaagtggacttcttcatcctcctggacaacgtggctgccgagcaggcacacaacctcccaagctgccccatgctgaagagatttgcacggatgatcgaacagagagctgtggacacatccttgtacatactgcccaaggaagacagggaaagtcttcagatggcagtaggcccattcctccacatcctagagagcaacctgctgaaagccatggactctgccactgcccccgacaagatcagaaagctgtatctctatgcggctcatgatgtgaccttcataccgctcttaatgaccctggggatttttgaccacaaatggccaccgtttgctgttgacctgaccatggaactttaccagcacctggaatctaaggagtggtttgtgcagctctattaccacgggaaggagcaggtgccgagaggttgccctgatgggctctgcccgctggacatgttcttgaatgccatgtcagtttataccttaagcccagaaaaataccatgcactctgctctcaaactcaggtgatggaagttggaaatgaagagtaactgatttataaaagcaggatgtgttgattttaaaataaagtgcctttatacaatgccaaaaaaaaaaaaaaaaaaaaaaaa

SEQ ID NO: 329 - protein, 428 aa, Homo sapiens
MITGVFSMRLWTPVGVLTSLAYCLHQRRVALAELQEADGQCPVDRSLLKLKMVQVVFRHGARSPLKPLPLEEQVEWNPQLLEVPPQTQFDYTVTNLAGGPKPYSPYDSQYHETTLKGGMFAGQLTKVGMQQMFALGERLRKNYVEDIPFLSPTFNPQEVFIRSTNIFRNLESTRCLLAGLFQCQKEGPIIIHTDEADSEVLYPNYQSCWSLRQRTRGRRQTASLQPGISEDLKKVKDRMGIDSSDKVDFFILLDNVAAEQAHNLPSCPMLKRFARMIEQRAVDTSLYILPKEDRESLQMAVGPFLHILESNLLKAMDSATAPDKIRKLYLYAAHDVTFIPLLMTLGIFDHKWPPFAVDLTMELYQHLESKEWFVQLYYHGKEQVPRGCPDGLCPLDMFLNAMSVYTLSPEKYHALCSQTQVMEVGNEE

SEQ ID NO: 330 - DNA, 764 bp, Homo sapiens
cttaaagtgaaataattttttgcaaaggggtttcctcgatttggagctttttttttcttccaccgtcatttctaactcttaaaaccaactcagttccatcatggtgatgttcaagaagatcaagtcttttgaggtggtctttaacgaccctgaaaaggtgtacggcagtggcgagaaggtggctggccgggtgatagtggaggtgtgtgaagttactcgtgtcaaagccgttaggatcctggcttgcggagtggctaaagtgcatcctcaacaacaatgtgcagtgagcatgtggaagaaaagaagcagctttacctacttgtttctttttgtctctcttcctggacactcactttttcagagactcaacagtctctgcaatggagtgtgggtccaccttagcctctgacttcctaatgtaggaggtggtcagcaggcaatctcctgggccttaaaggatgcggactcatcctcagccagcgcccatgttgtgatacaggggtgtttgttggatgggtttaaaaataactagaaaaactcaggcccatccattttctcagatctccttgaaaattgaggccttttcgatagtttcgggtcaggtaaaaatggcctcctggcgtaagcttttcaaggttttttggaggctttttgtaaattgtgataggaactttggaccttgaacttatgtatcatgtggagaagagccaatttaacaaactaggaagatgaaaagggaaattgtggccaaaactttgggaaaa

SEQ ID NO: 331 - DNA, 1085 bp, Homo sapiens
tgacttgctcactatcatgaactcaaaagaaactagcaattttttagacttcttttgggatccttgtaccgcatcctatactgcttttatgttcatgtgtgcatttgtgtacatgtatacacatattactccataacgaagcacagtcttcttttatacctttcctggttggggtagtagaggaattttacagcctacaatcagacacatccagaagaagagtggaatatgtatgataccttaaaaatcagcacatttaacaaagtataacttactcatggttacaactaagttaatgttttttccctttatttttcaaaaggctcatttttctccatttctctactatcaaagtcaagaactgcccaatggctctgtcaaggaggctccagctcctactcccacttctctggaagtctcaagtccaccagatactacagaggaagaagatcataagcctaaactctgcaggctggctaaaggtgaaaatggctatggctttcacttaaatgcgattcggggtctgccaggctcattcatcaaagaggtacagaagggcggtcctgctgacttggctgggctagaggatgaggatgtcatcattgaagtgaatggggtgaatgtgctagatgaaccctatgagaaggtggtggatagaatccagagcagtgggaagaatgtcacacttctagtctgtggaaagaaggcctatgattatttccaagctaagaaaatccctattgtttcctccctggctgatccacttgacacccctccagattctaaagaaggaatagtggtggagtcaaagcatgactcgcacatggcaaaagaacgggcccacagtacagcctcacattcttcttccaattctgaagatacagagatgtgatgaaaacaagcggctattgcagacggctaatttatgcttaacttaggaagagataaggttccttgagcaccaaagatgattcataactctgtataggtgacagctgcttataaaagcatcttagcagataagcctattaaaattgtgcttttgtaacaatgttgtggttgctagaataaataccattaacaaa

SEQ ID NO: 332 - DNA, 1328 bp, Homo sapiens
gtcccaactcttggactccatttgctattctcttctttctcccccacacctatctggtggtggtagtgggcgtttatatttgcgttccttttcattcatttctaaatctcttaaaaattttgggttgggggtattggggaaggcaggaaagggaaaaggagagtagtagctgaagagcaagaggaggacatggagatgaagaagaagattaacctggagttaaggaacagatccccggaggaggtgacagagttagtccttgataattgcctgtgtgtcaatggggaaattgaaggcctgaatgatactttcaaagaactagaatttctgagtatggctaatgtggaactaagttcgctggcccggcttcccagcttaaataaacttcgaaaattggagcttagtgataatataatttctggaggcttggaagtcctggcagagaaatgtccaaatcttacctacctcaatctgagtggaaacaaaataaaagatctcagtacagtagaagctctgcaaaatcttaaaaatttgaaaagtcttgacctgtttaactgtgagatcacaaacctggaagattatagagaaagtatttttgaactactgcagcaaatcacatacttagatggatttgatcaggaggataatgaagcgccggactctgaagaggaggatgatgaggatggagatgaagatgatgaagaggaagaggaaaatgaagctggtccaccggaaggatatgaggaagaggaggaggaagaggaagaggaggatgaggatgaggatgaagatgaagatgaagcaggttcagagttgggagagggagaagaggaagtgggcctctcatacttaatgaaagaagaaattcaggatgaagaagatgatgatgactatgttgaagaaggggaagaagaggaagaagaggaagaaggaggtcttcgaggggagaagaggaaacgagatgctgaagacgatggagaggaagaagatgactagatcattctaagaccagattctctaatgtttctgggtgtgcaatagagtgatcacatctttgtttcttcatgtacgatagctatccctacagaagataatgtgtaactttttataggaaaagtgtggttttactatttttgccttatcattccaaataagaactagtctgttaatgatcatattgtatgtagagaaaaattttcattgactcccattgtggaattccctagcaatttatttagacttaattttttaaattcaagcttactgtattagtcatttttagcccataattaaaacatgatcacttttaaaaaaaaaaaaaaaaaaaa

SEQ ID NO: 333 - protein, 268 aa, Homo sapiens
MEMKKKINLELRNRSPEEVTELVLDNCLCVNGEIEGLNDTFKELEFLSMANVELSSLARLPSLNKLRKLELSDNIISGGLEVLAEKCPNLTYLNLSGNKIKDLSTVEALQNLKNLKSLDLFNCEITNLEDYRESIFELLQQITYLDGFDQEDNEAPDSEEEDDEDGDEDDEEEEENEAGPPEGYEEEEEEEEEEDEDEDEDEDEAGSELGEGEEEVGLSYLMKEEIQDEEDDDDYVEEGEEEEEEEEGGLRGEKRKRDAEDDGEEEDD

SEQ ID NO: 334 - DNA, 1967 bp, Homo sapiens
gtggggtcgcgttgccaccccacgcggactccccagctggcgcgcccctcccatttgcctgtcctggtcaggcccccaccccccttcccacctgaccagccatgggggctgcggtgtttttcggctgcactttcgtcgcgttcggcccggccttcgcgcttttcttgatcactgtggctggggacccgcttcgcgttatcatcctggtcgcaggggcatttttctggctggtctccctgctcctggcctctgtggtctggttcatcttggtccatgtgaccgaccggtcagatgcccggctccagtacggcctcctgatttttggtgctgctgtctctgtccttctacaggaggtgttccgctttgcctactacaagctgcttaagaaggcagatgaggggttagcatcgctgagtgaggacggaagatcacccatctccatccgccagatggcctatgtttctggtctctccttcggtatcatcagtggtgtcttctctgttatcaatattttggctgatgcacttgggccaggtgtggttgggatccatggagactcaccctattacttcctgacttcagcctttctgacagcagccattatcctgctccataccttttggggagttgtgttctttgatgcctgtgagaggagacggtactgggctttgggcctggtggttgggagtcacctactgacatcgggactgacattcctgaacccctggtatgaggccagcctgctgcccatctatgcagtcactgtttccatggggctctgggccttcatcacagctggagggtccctccgaagtattcagcgcagctcttgtgtaaggactgactacctggactgatcgcctgacagatcccacctgcctgtccactgcccatgactgagcccagccccagcccggggtccattgcccacattctctgtctccttctcgtcggtctaccccactacctccagggttttgctttgtccttttgtgaccgttagtctctaagctttaccaggagcagcctgggttcagccagtcagtgactggtgggtttgaatctgcacttatccccaccacctggggacccccttgttgtgtccaggactccccctgtgtcagtgctctgctctcaccctgcccaagactcacctcccttcccctctgcaggccgacggcaggaggacagtcgggtgatggtgtattctgccctgcgcatcccacccgaggactgagggaacctaggggggacccctgggcctggggtgccctcctgatgtcctcgccctgtatttctccatctccagttctggacagtgcaggttgccaagaaaagggacctagtttagccattgccctggagatgaaattaatggaggctcaaggatagatgagctctgagtttctcagtactccctcaagactggacatcttggtctttttctcaggcctgagggggaaccatttttggtgtgataaataccctaaactgcctttttttcttttttgaggtggggggagggaggaggtatattggaactcttctaacctccttgggctatattttctctcctcgagttgctcctcatggctgggctcatttcggtccctttctccttggtcccagaccttgggggaaaggaaggaagtgcatgtttgggaactggcattactggaactaatggttttaacctccttaaccaccagcatccctcctctccccaaggtgaagtggagggtgctgtggtgagctggccactccagagctgcagtgccactggaggagtcagactaccatgacatcgtagggaaggaggggagatttttttgtagtttttaattggggtgtgggaggggcggggaggttttctataaactgtatcattttctgctgagggtggagtgtcccatccttttaatcaaggtgattgtgattttgactaataaaaaagaatttgtaaaaaa

SEQ ID NO: 335 - protein, 251 aa, Homo sapiens
MGAAVFFGCTFVAFGPAFALFLITVAGDPLRVIILVAGAFFWLVSLLLASVVWFILVHVTDRSDARLQYGLLIFGAAVSVLLQEVFRFAYYKLLKKADEGLASLSEDGRSPISIRQMAYVSGLSFGIISGVFSVINILADALGPGVVGIHGDSPYYFLTSAFLTAAIILLHTFWGVVFFDACERRRYWALGLVVGSHLLTSGLTFLNPWYEASLLPIYAVTVSMGLWAFITAGGSLRSIQRSSCVRTDYLD

SEQ ID NO: 336 - DNA, 450 bp, Homo sapiens
ttccggtgggctaggtactgagcgcgcgaggctctacagagtgaaggtttaaatccaaggtcatggcaaaacatctgaagttcatcgccaggactgtgatggtacaggaagggaacgtggaaagcgcatacaggaccctaaacagaatcctcactatggatgggctcattgaggacattaagcatcggcggtattatgagaagccatgccgccggcgacagagggaaagctatgaaaggtgccggcggatctacaacatggaaatggctcgcaagatcaacttcttgatgcgaaagaatcgggcagatccgtggcagggctgctgaggcctgtgggtgggacacccagtgcgaaaccctcatccagttttctctccatctcttttctttgtacaatcccatttcctattaccattctctgcaataaactcaaatcacatgtctgcaaaaa

SEQ ID NO: 337 - protein, 87 aa, Homo sapiens
MAKHLKFIARTVMVQEGNVESAYRTLNRILTMDGLIEDIKHRRYYEKPCRRRQRESYERCRRIYNMEMARKINFLMRKNRADPWQGC

SEQ ID NO: 338 - DNA, 4755 bp, Homo sapiens
atgtctccacttctgagaagcatctgtgacatcactgaaattttcaatcagtatgtctctcatgattgtgatggagcagcattaactaagaaagacctgaagaacctccttgaaagggaatttggagctgtgcttcggagaccacatgaccctaagacggtagatctgatcctggaacttctggatcttgacagtaatgggcgtgtcgatttcaacgaattcctcctatttattttcaaagtggctcaagcttgttactatgctctcggccaggccacgggactggatgaggagaagcgagcccggtgtgacggaaaggagagcctgttacaagatcgcaggcaagaagaagaccaaaggagattcgagccccgggacagacaactggaagaagaacctgggcaacgacgcaggcagaagaggcaggaacaggagagggagctagctgagggagaggagcaaagtgagaaacaagagcgacttgaacagcgcgacaggcagcgccgcgacgaggagctgtggcggcaaaggcaagaatggcaagaacgggaagagcgccgtgcagaggaagagcagctgcagagttgcaaaggtcacgaaactgaggagtttccagacgaagagcaactgcgaaggcgggagctgctggagctgaggaggaagggccgcgaggagaaacagcagcaaaggcgagagcggcaagacagagtgttccaggaggaagaagagaaagagtggaggaagcgcgagacagtgctccggaaggaagaagagaagcgcgaacgttggctgaagctcgaggaggaggagaggcgcgagcagcaggagaggcgcgagcagcaactaaggcgggagcaagaggagaggcgcgagcagcggctgaagcgccaggaggaggaagagaggctccagcagcggttgaggagcgagcaacaactaagacgcgagcaggaggagaggcgcgagcagctgctgaagcgcgaggaggagaagaggctcgagcaggagaggcgagagcagcggctgaagcgcgagcaggaggagaggcgcgatcagctgctgaagcgcgaggaggagaggcgccagcagcggctgaagcgcgagcaggaagagaggctcgagcagcgactgaagcgcgaggaggtggagagactcgagcaggaggagaggcgcgagcagcggctgaagcgcgaggagccggaggaagagaggcgccagcagctgctgaagagcgaggagcaggaggagaggcgccagcagcaactaaggcgcgagcagcaggaaaggcgcgagcagcggctgaagcgcgaggaggaggaagagaggctcgagcagcggctgaagcgcgagcatgaggaagagaggcgcgagcaggagctagctgaggaggagcaggaacaggcccgggagcggattaagagccgcatcccgaagtggcagtggcagctagaaagcgaggccgacgcacggcaaagcaaagtctactcgaggccccgcaagcaggaagggcagaggcgccgccaagagcaggaggaaaagaggcggcgccgggagagtgagctgcaatggcaggaggaggaacgggctcaccggcagcagcaggaagaggagcagcgccgggacttcacatggcagtggcaggcggaggaaaagagcgagaggggccgtcagaggctgtcggccaggcccccattgcgggagcagcgggagaggcagctgagggccgaggagcgccagcagcgggaacaacggtttctcccggaggaggaggagaaggagcagcggcgccgccagcgacgcgagagggagaaagagctgcagttcctggaggaagaggagcagctccagcggcgggagcgtgcccaacagctccaggaggaggaggacggcctccaggaggatcaggagaggaggcgaagccaggagcagcgccgcgaccaaaaatggaggtggcaactagaagaagaaaggaagagacgccgccacacgctgtacgccaagccagccctacaagagcagctgaggaaggaacagcagctgctgcaggaggaggaggaggagctacagagagaggagcgcgagaagagaaggcgccaagaacaggagagacaataccgcgaggaagagcagctgcagcaggaggaagagcagctgctgagagaggaacgggagaaaagaagacgccaggagcgggaaaggcaatatcggaaggataagaagctgcagcagaaggaagagcagctgctgggagaggaaccggagaagagaaggcgccaggagcgggagaaaaaataccgcgaggaagaggagttgcagcaggaggaagagcagctgctgagagaggaacgggagaagagaaggcgccaggagtgggagaggcagtaccgcaaaaaagacgagctgcagcaggaagaagagcagctgctgagagaggaacgggagaaaagaagactccaggagcgggagaggcaatatcgggaggaagaggagctgcagcaggaggaagagcagctgctgggagaggaacgggagacgagaaggcgccaggagctggagaggcaatatcggaaggaagaggagctgcagcaggaggaagagcagctgctgagagaggaaccggagaagagaaggcgccaggagcgggagaggcaatgcagagagaatgaacagttccggcagttggaagattcccagctgcgcgacagacaatcccagcaagatctgcagcacctgctgggtgaacagcaagagcgagatcgtgagcaagagaggaggcgctggcagcagcgcgacaggcatttcccagaggaagaacagctggagcgagaagagcaaaaggaagccaaaaggcgcgacaggaagtcccaagaggaaaagcagttgctgagagaggaaagagaagagaagagacgccgtcaagagacagacagaaaattccgcgaggaggaacagctgctccaggaaagggaggaacagccgctgcgccgccaagagcgtgacagaaaattccgcgaagaggaactgcgccatcaggaacaagggagaaaattcctcgaggaggaacagcggctgcgccgccaggaacgggagagaaaattccttaaggaggaacagcagctgcgctgccaggagcgcgagcaacagctgcgtcaggaccgcgacagaaaattccgcgaggaggaacagcagctgagccgccaagagcgtgacagaaaattccgtgaagaggaacagcaggtgcgccgccaggaacgagagagaaaattcctggaggaggaacagcagctgcgccaggagcgtcacagaaaattccgcgaagaggaacagctgctccaggaaagggaagaacagcagctgcaccgccaagagcgtgacagaaaattcctggaggaggaacaacagctgcgccgccaagagcgtgacagaaaattccgcgaacaggaactgcgcagtcaggaaccagagagaaaattcctcgaggaggaacagcagctgcaccgccagcaacggcagagaaaattcctccaggaggaacagcagctgcgccgccaggagcgcgggcaacagcggcgtcaggaccgtgacagaaaattccgcgaggaggaacagctgcgccaggagagggaggaacagcagctgagccgccaagagcgtgacagaaaattccgtttagaggaacagaaagtgcgccgccaggaacaagagagaaaattcatggaggacgaacagcagctgcgccgccaggagggccaacaacagctgcgccaggagcgcgacagaaaattccgcgaagacgaacagctgctccaggaaagggaagaacagcagctgcaccgccaagagcgtgacagaaaattcctcgaggaggaaccgcagctgcgccgccaggagcgcgaacaacagctgcgtcacgaccgcgacagaaaattccgtgaagaggaacagctgctccaggaaggggaggaacagcagctgcgccgccaagagcgtgacagaaaattccgcgaagaggaacagcagctccgccgtcaggaacgagagagaaaattcctccaggaggaacagcagctgcgccgccaggaactggagagaaaattccgtgaggaggaacagctgcgccaagaaacggagcaagagcagctgcgccgccaagaacgctacagaaaaatcctagaggaagagcagctccgtccggaaagggaagaacagcagctgcgccgccaggagcgcgacagaaaattccgcgaggaggaacagctccgccaggagagggaggaacagcagctgcgcagccaagagtctgacagaaaattccgcgaggaggaacagctacgccaggagagggaagaacagcagctgcgcccccaacagcgtgacggaaagtatcgctgggaagaagagcagctccaacttgaggaacaagagcagaggctgcggcaggagcgagaccggcagtaccgggcggaggagcagtttgccacgcaggagaagagtcgtcgtgaggaacaagaactatggcaagaagaggagcagaaacgtcgccaggaacgggaaaggaaattacgggaagaacacatccgccgccagcagaaggaggaacagaggcaccgccaagtcggggagataaaatcccaagaagggaagggccatgggcggcttctggagcccggcactcatcagtttgccagtgtcccagtgcgctccagccctctctatgagtacatccaagagcagagatctcaataccgcccttaa

SEQ ID NO: 339 - protein, 1584 aa, Homo sapiens
MSPLLRSICDITEIFNQYVSHDCDGAALTKKDLKNLLEREFGAVLRRPHDPKTVDLILELLDLDSNGRVDFNEFLLFIFKVAQACYYALGQATGLDEEKRARCDGKESLLQDRRQEEDQRRFEPRDRQLEEEPGQRRRQKRQEQERELAEGEEQSEKQERLEQRDRQRRDEELWRQRQEWQEREERRAEEEQLQSCKGHETEEFPDEEQLRRRELLELRRKGREEKQQQRRERQDRVFQEEEEKEWRKRETVLRKEEEKRERWLKLEEEERREQQERREQQLRREQEERREQRLKRQEEEERLQQRLRSEQQLRREQEERREQLLKREEEKRLEQERREQRLKREQEERRDQLLKREEERRQQRLKREQEERLEQRLKREEVERLEQEERREQRLKREEPEEERRQQLLKSEEQEERRQQQLRREQQERREQRLKREEEEERLEQRLKREHEEERREQELAEEEQEQARERIKSRIPKWQWQLESEADARQSKVYSRPRKQEGQRRRQEQEEKRRRRESELQWQEEERAHRQQQEEEQRRDFTWQWQAEEKSERGRQRLSARPPLREQRERQLRAEERQQREQRFLPEEEEKEQRRRQRREREKELQFLEEEEQLQRRERAQQLQEEEDGLQEDQERRRSQEQRRDQKWRWQLEEERKRRRHTLYAKPALQEQLRKEQQLLQEEEEELQREEREKRRRQEQERQYREEEQLQQEEEQLLREEREKRRRQERERQYRKDKKLQQKEEQLLGEEPEKRRRQEREKKYREEEELQQEEEQLLREEREKRRRQEWERQYRKKDELQQEEEQLLREEREKRRLQERERQYREEEELQQEEEQLLGEERETRRRQELERQYRKEEELQQEEEQLLREEPEKRRRQERERQCRENEQFRQLEDSQLRDRQSQQDLQHLLGEQQERDREQERRRWQQRDRHFPEEEQLEREEQKEAKRRDRKSQEEKQLLREEREEKRRRQETDRKFREEEQLLQEREEQPLRRQERDRKFREEELRHQEQGRKFLEEEQRLRRQERERKFLKEEQQLRCQEREQQLRQDRDRKFREEEQQLSRQERDRKFREEEQQVRRQERERKFLEEEQQLRQERHRKFREEEQLLQEREEQQLHRQERDRKFLEEEQQLRRQERDRKFREQELRSQEPERKFLEEEQQLHRQQRQRKFLQEEQQLRRQERGQQRRQDRDRKFREEEQLRQEREEQQLSRQERDRKFRLEEQKVRRQEQERKFMEDEQQLRRQEGQQQLRQERDRKFREDEQLLQEREEQQLHRQERDRKFLEEEPQLRRQEREQQLRHDRDRKFREEEQLLQEGEEQQLRRQERDRKFREEEQQLRRQERERKFLQEEQQLRRQELERKFREEEQLRQETEQEQLRRQERYRKILEEEQLRPEREEQQLRRQERDRKFREEEQLRQEREEQQLRSQESDRKFREEEQLRQEREEQQLRPQQRDGKYRWEEEQLQLEEQEQRLRQERDRQYRAEEQFATQEKSRREEQELWQEEEQKRRQERERKLREEHIRRQQKEEQRHRQVGEIKSQEGKGHGRLLEPGTHQFASVPVRSSPLYEYIQEQRSQYRP

SEQ ID NO: 340 - DNA, 595 bp, Homo sapiens
gggcaaggctgggccgggaagggcgtgggttgaggagaggctccagacccgcacgccgcgcgcacagagctctcagcgccgctcccagccacagcctcccgcgcctcgctcagctccaacatggcaaaaatctccagccctacagagactgagcggtgcatcgagtccctgattgctgtcttccagaagtatgctggaaaggatggttataactacactctctccaagacagagttcctaagcttcatgaatacagaactagctgccttcacaaagaaccagaaggaccctggtgtccttgaccgcatgatgaagaaactggacaccaacagtgatggtcagctagatttctcagaatttcttaatctgattggtggcctagctatggcttgccatgactccttcctcaaggctgtcccttcccagaagcggacctgaggaccccttggccctggccttcaaacccaccccctttccttccagcctttctgtcatcatctccacagcccacccatcccctgagcacactaaccacctcatgcaggccccacctgccaatagtaataaagcaatgtcacttttttaaaacatgaaa

SEQ ID NO: 341 - protein, 105 aa, Homo sapiens
MAKISSPTETERCIESLIAVFQKYAGKDGYNYTLSKTEFLSFMNTELAAFTKNQKDPGVLDRMMKKLDTNSDGQLDFSEFLNLIGGLAMACHDSFLKAVPSQKRT

SEQ ID NO: 342 - DNA, 1199 bp, Homo sapiens
ccggtggggcgggaagcccggcttctggggaggtgccgcccctccactggcgcaggccgccgagacccccagacggacctcctagggctaatctgatagtgcctctgaggtcgataggactccacgtgccactccctgcagggtcatccagcaagtaattcctagacccgtaggtggccgcagagccggttacctctggttctgcgccagcgtgccccacccgcaggacggccgggttctttgatttgtacactttctaaaaccaaacccgagaggaagggcaggctcagggtggggatgccctgaaatattcgagagcaggaccgtttctactgaagagaagtttacaagaacgctctgtctggggcgggcgaggcctctgcgaggcgggtccgggagcgagggcagggcgtgggccgcgcgcccggggtcgggggagtcgggggcaggaagagggggaggagacagggctgggggagcgccctgccgagcgcccgccaggctcctcccgctcccgcgccgcctccctctacccacccgccgcacgtactaaggaaggcgcacagcccgccgcgctcgcctctccgccccgcgtccagctcgcccagctcgcccagcgtccgccgcgcctcggccaaggcttcaacggaccacaccaaaatgccatctcaaatggaacacgccatggaaaccatgatgtttacatttcacaaattcgctggggataaaggctacttaacaaaggaggacctgagagtactcatggaaaaggagttccctggatttttggaaaatcaaaaagaccctctggctgtggacaaaataatgaaggacctggaccagtgtagagatggcaaagtgggcttccagagcttcttttccctaattgcgggcctcaccattgcatgcaatgactattttgtagtacacatgaagcagaagggaaagaagtaggcagaaatgagcagttcgctcctccctgataagagttgtcccaaagggtcgcttaaggaatctgccccacagcttcccccatagaaggatttcatgagcagatcaggacacttagcaaatgtaaaaataaaatctaactctcatttgacaagcagagaaagaaaagttaaataccagataagcttttgatttttgtattgtttgcatccccttgccctcaataaataaagttcttttttagttcc

SEQ ID NO: 343 - protein, 97 aa, Homo sapiens
MPSQMEHAMETMMFTFHKFAGDKGYLTKEDLRVLMEKEFPGFLENQKDPLAVDKIMKDLDQCRDGKVGFQSFFSLIAGLTIACNDYFVVHMKQKGKK

SEQ ID NO: 344 - DNA, 2331 bp, Homo sapiens
cggctgaagcgccgccggcggggctcactgtggtggtgtgagtgggaggcggcggcgctggtggctgcagctggggtgaggcgcgaggcggcgcactcgacggctgactggagcagcggtaaaggcgaggatggagaccgaaggatataagtcaaagagtacagcagaaaatgtctactgaacggacttcttggacaagcctgtccaccattcagaaaatagccctgggccttgggatcccagccagtgcaacagttgcctatatcctataccgcaggtatagggaaagcagagaagagcggctgacatttgttggggaagatgacattgagatagagatgcgggttccccaggaggctgtgaaactcatcattggccggcaaggagccaatattaaacagctgcggaaacagacaggtgctcggattgatgtggacacagaggatgtaggcgatgagcgagtgctgcttatcagtggttttcctgttcaggtgtgcaaggccaaagcagcaatccatcagatcctgacagagaataccccagtgtctgagcagctttcagttccccagagatctgtgggcagaatcatagggagaggcggcgagacaattcgttctatctgtaaggcatctggagccaaaattacctgtgacaaagaatcagaagggacattactactatcaagacttataaaaatctcaggaacacagaaggaagtggcagcagccaagcatttgatactggagaaagtttcagaagatgaagaacttcggaagagaattgctcattctgcagaaaccagggtcccacgcaaacagccaatcagtgtgagaagagaagacatgacagagccaggtggagctggagagccagcattatggaaaaacaccagttctagcatggagccgactgcacccctggtgactcctccacccaaaggaggaggcgacatggctgtggtagtgtcaaaggaaggttcctgggagaaacctagtgatgacagctttcagaagtctgaagcccaggccatcccagagatgcccatgtttgaaatccccagtcctgacttcagttttcatgctgatgagtacctagaagtctacgtttctgcttctgagcaccctaaccacttctggatccagatcgttggctcccgcagcctgcaattggataagcttgtcaatgagatgacccagcactatgagaatagtgtgcctgaagacttgactgtgcatgtaggagacattgtagcagcacctttacctacaaatggttcctggtatcgagcccgggtcctcggcaccttggagaatgggaacttggacctctattttgttgactttggagataatggagattgcccactgaaggacctcagggctctcaggagtgacttcctaagccttccatttcaagcaatagaatgtagtctggcacggattgctccctcaggtgaccagtgggaagaggaagctttggatgagtttgatagactcactcattgtgctgactggaagcctctggtagccaagatctctagctatgtccagactgggatctcaacttggccaaagatctacttatatgatactagcaatgggaagaaacttgatattgggctagaattagtacacaaaggatacgcaattgagcttcctgaagacatagaagaaaacagagctgtcccagacatgttgaaggacatggccacagaaacagatgcctctctcagcacgttgctcactgagaccaaaaagagctctggagagataacacataccctgtcctgcctcagcttatcagaagctgcttccatgtctggtgatgataaccttgaagatgactacttactcggaagtctgggcttcagtttgctcagccatctgctttgctgtatgttgcctgcaatgaactcgctgaagcatgctcagccctggaactggtgctaccagagttccgtagggaacctttactctttagaggttccctgatataaatcattcataagacttcctaccctggaaaatgagtaatgtctcattcttacctgcagtttgttactatgtataaaagtctttttctttaatatgcctttaagtcttacctgtttacagcccattctgatgggttctttgtcattctgttagtataacccagtacttttcctgctgcctggaatgccctcttctatgttacctattctgtccgttgagatgccccaacttgggccaaagccaagagatctatgtgccttctctggttttctccacatctatagcacctcaactgaaatatatggataaaaacagcctaacaaaaaaaaaaaaaaaa

SEQ ID NO: 345 - protein, 606 aa, Homo sapiens
MSTERTSWTSLSTIQKIALGLGIPASATVAYILYRRYRESREERLTFVGEDDIEIEMRVPQEAVKLIIGRQGANIKQLRKQTGARIDVDTEDVGDERVLLISGFPVQVCKAKAAIHQILTENTPVSEQLSVPQRSVGRIIGRGGETIRSICKASGAKITCDKESEGTLLLSRLIKISGTQKEVAAAKHLILEKVSEDEELRKRIAHSAETRVPRKQPISVRREDMTEPGGAGEPALWKNTSSSMEPTAPLVTPPPKGGGDMAVVVSKEGSWEKPSDDSFQKSEAQAIPEMPMFEIPSPDFSFHADEYLEVYVSASEHPNHFWIQIVGSRSLQLDKLVNEMTQHYENSVPEDLTVHVGDIVAAPLPTNGSWYRARVLGTLENGNLDLYFVDFGDNGDCPLKDLRALRSDFLSLPFQAIECSLARIAPSGDQWEEEALDEFDRLTHCADWKPLVAKISSYVQTGISTWPKIYLYDTSNGKKLDIGLELVHKGYAIELPEDIEENRAVPDMLKDMATETDASLSTLLTETKKSSGEITHTLSCLSLSEAASMSGDDNLEDDYLLGSLGFSLLSHLLCCMLPAMNSLKHAQPWNWCYQSSVGNLYSLEVP

SEQ ID NO: 346 - DNA, 925 bp, Homo sapiens
ttttttctgctaccgtgactaagatggaagcgtttttggggtcgcggtccggactttgggcggggggtccggccccaggacagttttaccgcattccgtccactcccgattccttcatggatccggcgtctgcactttacagaggtccaatcacgcggacccagaaccccatggtgaccgggacctcagtcctcggcgttaagttcgagggcggagtggtgattgccgcagacatgctgggatcctacggctccttggctcgtttccgcaacatctctcgcattatgcgagtcaacaacagtaccatgctgggtgcctctggcgactacgctgatttccagtatttgaagcaagttctcggccagatggtgattgatgaggagcttctgggagatggacacagctatagtcctagagctattcattcatggctgaccagggccatgtacagccggcgctcgaagatgaaccctttgtggaacaccatggtcatcggaggctatgctgatggagagagcttcctcggttatgtggacatgcttggtgtagcctatgaagccccttcgctggccactggttatggtgcatacttggctcagcctctgctgcgagaagttctggagaagcagccagtgctaagccagaccgaggcccgcgacttagtagaacgctgcatgcgagtgctgtactaccgagatgcccgttcttacaaccggtttcaaaccgccactgtcaccgaaaaaggtgttgaaatagagggaccattgtctacagagaccaactgggatattgcccacatgatcagtggctttgaatgaaatacagatgcattatccagaactgaagttgccctacttttaactttgaacttggctagttcaaagatagactcttcttttgtaaagtaaataaattcttcaaaatg

SEQ ID NO: 347 - protein, 264 aa, Homo sapiens [sequence omitted]

SEQ ID NO: 348 - DNA, 1313 bp, Homo sapiens
aattggaggagttgttgttaggccgtcccggagacccggtcgggagggaggaaggtggcaagatggtgttggaaagcactatggtgtgtgtggacaacagtgagtatatgcggaatggagacttcttacccaccaggctgcaggcccagcaggatgctgtcaacatagtttgtcattcaaagacccgcagcaaccctgagaacaacgtgggccttatcacactggctaatgactgtgaagtgctgaccacactcaccccagacactggccgtatcctgtccaagctacatactgtccaacccaagggcaagatcaccttctgcacgggcatccgcgtggcccatctggctctgaagcaccgacaaggcaagaatcacaagatgcgcatcattgcctttgtgggaagcccagtggaggacaatgagaaggatctggtgaaactggctaaacgcctcaagaaggagaaagtaaatgttgacattatcaattttggggaagaggaggtgaacacagaaaagctgacagcctttgtaaacacgttgaatggcaaagatggaaccggttctcatctggtgacagtgcctcctgggcccagtttggctgatgctctcatcagttctccgattttggctggtgaaggtggtgccatgctgggtcttggtgccagtgactttgaatttggagtagatcccagtgctgatcctgagctggccttggcccttcgtgtatctatggaagagcagcggcagcggcaggaggaggaggcccggcgggcagctgcagcttctgctgctgaggccgggattgctacgactgggactgaagactcagacgatgccctgctgaagatgaccatcagccagcaagagtttggccgcactgggcttcctgacctaagcagtatgactgaggaagagcagattgcttatgccatgcagatgtccctgcagggagcagagtttggccaggcggaatcagcagacattgatgccagctcagctatggacacatctgagccagccaaggaggaggatgattacgacgtgatgcaggaccccgagttccttcagagtgtcctagagaacctcccaggtgtggatcccaacaatgaagccattcgaaatgctatgggctccctggcctcccaggccaccaaggacggcaagaaggacaagaaggaggaagacaagaagtgagactggagggaaagggtagctgagtctgcttaggggactgcatgggaagcacggaatatagggttagatgtgtgttatctgtaaccattacagcctaaataaagcttggcaactttt

SEQ ID NO: 349 - protein, 377 aa, Homo sapiens
MVLESTMVCVDNSEYMRNGDFLPTRLQAQQDAVNIVCHSKTRSNPENNVGLITLANDCEVLTTLTPDTGRILSKLHTVQPKGKITFCTGIRVAHLALKHRQGKNHKMRIIAFVGSPVEDNEKDLVKLAKRLKKEKVNVDIINFGEEEVNTEKLTAFVNTLNGKDGTGSHLVTVPPGPSLADALISSPILAGEGGAMLGLGASDFEFGVDPSADPELALALRVSMEEQRQRQEEEARRAAAASAAEAGIATTGTEDSDDALLKMTISQQEFGRTGLPDLSSMTEEEQIAYAMQMSLQGAEFGQAESADIDASSAMDTSEPAKEEDDYDVMQDPEFLQSVLENLPGVDPNNEAIRNAMGSLASQATKDGKKDKKEEDKK

SEQ ID NO: 350 - DNA, 1324 bp, Homo sapiens
ctggtgaggggctgcaggtggcggcgcagtctcggtaggcggtatgagtttggctgggggccgggcaccccggaagaccgctgggaaccggctttctgggcttttggaggcagaggaggaagatgagttctaccagacgacttatgggggtttcacagaggaatccggagatgatgagtatcaaggggaccagtcagacacagaggacgaagtggactctgactttgacattgatgaaggggatgaaccatccagtgatggagaagcagaagagccaagaaggaagcgccgagtagtcaccaaggcctataaggaacctctcaagagcttaaggcctcgaaaggtcaacaccccggctggtagctctcagaaggcgcgagaagagaaggcactactgccattagaactacaagatgacggctctgacagtcggaagtctatgcgtcagtctacagctgagcatacacgacaaacgttccttcgggtacaggagaggcagggccagtcaagacggcgaaaggggccccactgtgagcggccactaacccaggaggaactgctccgggaggccaagatcacagaagagcttaatttacggtcactggagacatatgagcggctcgaggctgataaaaagaagcaggttcataagaagcggaagtgccccgggcccataatcacctatcattcagtgacagtgccacttgttggggagccaggccccaaggaagagaacgttgacatagaaggacttgatcctgctccctcggtgtctgcattgactcctcatgctgggactggacccgtcaacccccctgctcgctgctcacgtaccttcatcacttttagtgatgatgcaactttcgaggaatggttcccccaagggcggcccccaaaagtccctgttcgtgaggtctgtccagtgacccatcgtccagccctataccgggaccctgttacagacataccctatgccactgctcgagccttcaagatcattcgtgaggcttacaagaagtacattactgcccatggactgccgcccactgcctcagccctgggccccggcccgccacctcctgagcccctccctggctctgggccccgagccttgcgccagaaaattgtcattaaatgaagagatgtctagtcctcagaaacttctttcctgccctgattggggctcttgctgttccgtttcttctccctgcttctcccctttgtcatctctgatctttgcctaatctgtttctttttccttttcccctagttcttacaggtttcgttgtgttttttaatctaataaaatagaaagatccctttt

SEQ ID NO: 351 - protein, 364 aa, Homo sapiens
MSLAGGRAPRKTAGNRLSGLLEAEEEDEFYQTTYGGFTEESGDDEYQGDQSDTEDEVDSDFDIDEGDEPSSDGEAEEPRRKRRVVTKAYKEPLKSLRPRKVNTPAGSSQKAREEKALLPLELQDDGSDSRKSMRQSTAEHTRQTFLRVQERQGQSRRRKGPHCERPLTQEELLREAKITEELNLRSLETYERLEADKKKQVHKKRKCPGPIITYHSVTVPLVGEPGPKEENVDIEGLDPAPSVSALTPHAGTGPVNPPARCSRTFITFSDDATFEEWFPQGRPPKVPVREVCPVTHRPALYRDPVTDIPYATARAFKIIREAYKKYITAHGLPPTASALGPGPPPPEPLPGSGPRALRQKIVIK

SEQ ID NO: 352 - DNA, 2343 bp, Homo sapiens
cctggctttgtgcattgggttctggtgcctgatggacacatttttccagttacaggccgaatggtctcaatgtagctgaagaactgtgcccactgatcagtattacgtattgcaaatgcaggaggtggctgtatctgacagacccaggccttccagctccgacagatccagttctgggatgggcatcctccagaaaagaaaggaactgtactggctactcacagggtccctcatagcttcctagaaagaaaccacttgtcagtcttcatgctacagcaacttctttgtggcccatggcctttccttgcttagatactccacatactgttctccccgcaggggcggcggccttgaggggctgcagaggcaccctcccacgtcccgcgcagtgcagtgcctccgcagtccagaggggagcagtgcgccgggctccgagccggacgggtttcgtaatcgcgtcgccgccgcttccgccctcagccggccccacctctgccggctcgtactcggctcccccacctcgccgcagagctagcccgggaagcccacactggcggccacggagcagagtccctcacccccaccagctgtagctgaacgtctggatggtggagaagagcaggtgaggccgtgcagttggtcccctggcccgcctgccgcgccggccgggccaggcggagacacaccggatgcggggtgtgggggaggcgggtgtcctgggctgcagagatgctggggtggtgggaaaggggtgcgcgcccggggtggccgtagtcatccacgctcctggggtgcgcaggctgaggccgctgaagagtagaaggaaaagaaggaactggaatgttgggggaggtgggagggagagggtccgaaagattcccagagaggtcccagtccggttaagggttgagaacagcagagaacttctaggtagagttgtgtagtggggggagacagatacggaatctgtgtgattgaatatatttggggaggggaggcttagggcctagccctctttcctcttaagcccccagaagacctttcctggggaagggaaggttggtgttgggcctgtcacttggctgaaatatggagtccacaccgcttctccagagtccctcagcagccctccatgtctcggggtctccacacagggaccagctgctgccccgggcttctagccagaattgcccatgccattctctcgattctttctttctctccagctgcttcatgtgagggcttgtcaggccgcgggttggaggccttagggccagaggcggtgggaccgggagaaccggtttggggcccgaacaggaccagagaactagcctgtacatccttcctccctggcacctctttcccatcccttctgctcacctcccaacagctctgagaccctcaagtcctagtatgatcttggtgggggcggggggtggctttcccggttccatatttcactcttgccatttggaactcagagaggtcgagttctgagcaccacttggctctcaggacgtggccttatgaggtctaatcctcatccctcctgttgttttctcagccccttccctattcactgtggggttggattcgggtggctcttccgcctgggctgaccagctcaggacttcatttttcctcaacccactctcttctggctgctttaaagaagagtggccgccagtggctcttacttccttttctggctttgttcccatcccccactgccctgcgctaccatcacattcaccctgacctgtcttcttcacactctgaccccaccctcaagtttcagagaccctaatgtcctagggaatggaatttcctggtcacttctcgtcatcattggtcatttcatgccaagtcccacacacacgctttccctccacccagctctggtcaggtccctggaaaagaaacagaaatggccttgttctctccactgcccctttccctctctccttctcctccccctctcttctcttccctcccagcactatccacctctgtccctcagctttgagcagagtgggggatgttgagggagagtccagtcacagtacagcctgcctgctggtgttgggggtttcctctaattcttcatttttccccaacccttaccacctgccaccaccaccatcaggacaaaccctatgactgactcactgacgtcccactgaccacagctcccctctctggacagcgtgttttagcttccgctccttctggttactcctcccttccagtggtgagaagagaagagaaagcccagcctcctgggttctcccctcccctagaagctacatttgagtgtttgtgtgatctcatctcaaggctgtt

SEQ ID NO: 353 - DNA, 1621 bp, Homo sapiens
agtcagcacgggggtgctggaagagatcgggaataatagcgcagaccaatgagcctagggagatgctttcatcgtctctccttccctcaagtgttctggaacctatcatttgaattagccgagtcaggcaggagggggcggggaatccttccgcccttcttaggaggggctgcattgcagggggagagtgaactgacagactcagtcactgaagagggaaaaggagtgagaagacaaagccgtcaaagccccaacagctttgtatttctccagcccggcgcagaccccggagctcccgaggcactccctccatctttggaacacgccagtaattgattgataacaggaagctatgagggaccctgtgagtagccagtacagttcctttcttttctggaggatgcccatcccagaactggatctgtcggagctggaaggcctgggtctgtcagatacagccacctacaaggtcaaagacagcagcgttggcaaaatgatcgggcaagcaactgcagcagaccaggagaaaaaccctgaaggtgatggcctccttgagtacagcaccttcaacttctggagagctcccattgccagcatccactccttcgaactggacttgctctaaggccaagacttctctctcccatcaccttgccctcattgtcttccctctcaagccccttcctttccactcctttcccattttaatcttgttctctccctactgtgttggtggtgctgatgaatctgccagagttgagttctatgtatttatttatctatctgtctactccatttctctcaaaagccctcaagtcacaaagtaaatggttcaagcaatggagtactgggtcacagggattcctcctttcccccccaaatattaactccagaaactaggcctgactggggacacctgagagtagtatagtagtgcaaaatggaagactgatttttgactctattataatcagcttcagagattccttaaaccttcctaatttcctgctccagggcagtaaacacaaatatttcttcaaggggtgatgaaaacctcggaagttttaatttgaggttatctgctacgaaacagtatttctaaaaggctaaagtgataagtctcttgcttttttttgatcctgctcttatattcttttttttcctcagagaaatcaggagggtagttagaggtataaaacaggaggaaatattatggaaaatgaaaatagggaaaataattgaatcattttagaagtagctaatttcttttctcaaaagagtgtcccttcttcacacctactcactttacaactttgctcctaactgtgggttgaaaactctagctaaagaaagttatcaaatcttaacatgcattcctactattatgatagtttttaaggtttcaattcaatcttctgaacggcataagtcctattttagccttacctcctgcatttgcaatacgtaatactgatcagtgggcacagttcttcagctacattgagaccctgaaatgaacaattatattctgactcgacatcttgtccccaatccttccaaaaatattgatggtgatttgtgctaccatttactcgtttatttaataaagacattcaatccc

SEQ ID NO: 354 - DNA, 3054 bp, Homo sapiens
gggggcggggcgacgccggactccggagcgcccgcttacgcagttcctcccggggtcggaggccgattcgccgtgtggcgggttcgagtcccgcctcctgactctggcctctagtccctgagtcccgggcgggctgcattcgtcggggaaacctctcctcgaccaggggcacctctactcgaccaggggcgacggcgtactttgggcttcatcatggaggactacctgcagggttgtcgagctgctctgcaggagtcccgacctctacatgttgtgctgggaaatgaagcctgtgatttggactccacagtgtctgctcttgccctggctttttacctagcaaagacaactgaggctgaggaagtctttgtgccagttttaaatataaaacgttctgaactacctctgcgaggtgacattgtcttctttcttcagaaggttcatattccagagagtatcttgatttttcgggatgagattgacctccatgcattataccaggctggccaactcaccctcatccttgtcgaccatcatatcttatccaaaagtgacacagccctagaggaggcagtagcagaggtgctagaccatcgacccatcgagccgaaacactgccctccctgccatgtttcagttgagctggtggggtcctgtgctaccctggtgaccgagagaatcctgcagggggcaccagagatcttggacaggcaaactgcagcccttctgcatggaaccatcatcctggactgtgtcaacatggaccttaaaattggaaaggcaaccccaaaggacagcaaatatgtggagaaactagaggcccttttcccagacctacccaagagaaatgatatatttgattccctacaaaaggcaaagtttgatgtatcaggactgaccactgagcagatgctgagaaaagaccagaagactatctatagacaaggcgtcaaggtggccattagtgcaatatatatggatttggaggcctttctgcagaggtctaacctccttgcagatctccatgctttctgccaggctcacagctatgatgtcctggttgccatgactatctttttcaacactcacaatgagccagtgcggcagttggctattttctgtccccatgtggcactccaaacaacgatctgtgaagtcctggaacgctcccactctccacccctgaagctgacccctgcctcaagtacccaccctaacctccatgcctatcttcaaggcaacacccaggtctctcgaaagaaacttctgcccctgctccaggaagccctgtcagcatattttgactccatgaagatcccttcaggacagcctgagacagcagatgtgtccagggagcaagtggacaaggaattggacagggcaagtaactccctgatttctggcctgagtcaagatgaggaggaccctccgctgcccccgacgcccatgaacagcttggtggatgagtgccctctagatcaggggctgcctaaactctctgctgaggccgtcttcgagaagtgcagtcagatctcactgtcacagtctaccacagcctccctgtccaagaagtgactgttgagaggcgaggaggtagtgggtgaggctacctgactcacttcaaatgcatgttttgagatgtttggagattcagcaattctgtcttcattgctccaggatctggtatactgttctcataaaactgagaggagaaaaaaagtgaaagaaagcagctgctttaagaatggttttccaccttttccccctaatctctaccaatcagacacattttattatttaaatctgcacctctctctattttatttgccaggggcacgatgtgacatatctgcagtcccagcacagtgggacaaaaagaatttagaccccaaaagtgtcctcggcatggatcttgaacagaaccagtatctgtcatggaactgaacattcatcgatggtctccatgtattcatttattcacttgttcattcaagtatttattgaatacctgcctcaagctagagagaaaagagagtgcgctttggaaatttattccagttttcagcctacagcagattatcagctcggtgacttttctttctgccaccatttaggtgatggtgtttgattcagagatggctgaatttctattcttagcttattgtgactgtttcagatctagtttgggaacagattagaggccattgtcttctgtcctgatcaggtggcctggctgtttctttggatccctctgtcccagagccacccagaaccctgactcttgagaatcaagaaaacacccagaaaggccttaatgacctcataggcactcttccaaaaagacaacagaactggaatgagaggcctgggtctgtctcctgccttagcaggcctatcaatttcttgtcaatctctttttttccttgctcacattaaaaggaagcatggagttctaatgctcccataaactatgtattttggcaagacacttcactactccaggtctcactttccccatctgtaaaacagggtttggactaggtgttccctggtattctgtgatctgcctcttgctgccattctttctctcctctgcttctctgtatttttcttctgttatccctgggggtgctcaggttcacttgattgtctgtatttctgtgtggttgtagcaaggactcagcctcatgtagcacgaataggggtgtggttcatggcgtgttgacccagcagagcactccctcccactaacttgttctgcatgtgtagagtctccccattttttttaacgcaaccctttcccctttttcctaccccacagctctgttccatgtaagttgccaacagtttcactgaacagtggggtatgtgatggttttggcatgacatcttcagtatgagggggacagtttgacttcactttgagggtgtgatgtctgtagctatgtggaaggtaaaaatagtggtgtgatcatgaaccaaaggaatttatgttttgtaacttgggtactttattttgcattttgttatactattaaataattttttcctgtt

SEQ ID NO: 355 - protein, 453 aa, Homo sapiens
MEDYLQGCRAALQESRPLHVVLGNEACDLDSTVSALALAFYLAKTTEAEEVFVPVLNIKRSELPLRGDIVFFLQKVHIPESILIFRDEIDLHALYQAGQLTLILVDHHILSKSDTALEEAVAEVLDHRPIEPKHCPPCHVSVELVGSCATLVTERILQGAPEILDRQTAALLHGTIILDCVNMDLKIGKATPKDSKYVEKLEALFPDLPKRNDIFDSLQKAKFDVSGLTTEQMLRKDQKTIYRQGVKVAISAIYMDLEAFLQRSNLLADLHAFCQAHSYDVLVAMTIFFNTHNEPVRQLAIFCPHVALQTTICEVLERSHSPPLKLTPASSTHPNLHAYLQGNTQVSRKKLLPLLQEALSAYFDSMKIPSGQPETADVSREQVDKELDRASNSLISGLSQDEEDPPLPPTPMNSLVDECPLDQGLPKLSAEAVFEKCSQISLSQSTTASLSKK

SEQ ID NO: 356 - DNA, 1669 bp, Homo sapiens
gaaacaagcactggattccatatcccactgccaaaaccgcatggttcagattatcgctattgcagctttcatcataatacacacctttgctgccgaaacgaagccagacaacagatttccatcagcaggatgtgggggctcaaggttctgctgctacctgtggtgagctttgctctgtaccctgaggagatactggacacccactgggagctatggaagaagacccacaggaagcaatataacaacaaggtggatgaaatctctcggcgtttaatttgggaaaaaaacctgaagtatatttccatccataaccttgaggcttctcttggtgtccatacatatgaactggctatgaaccacctgggggacatgaccagtgaagaggtggttcagaagatgactggactcaaagtacccctgtctcattcccgcagtaatgacaccctttatatcccagaatgggaaggtagagccccagactctgtcgactatcgaaagaaaggatatgttactcctgtcaaaaatcagggtcagtgtggttcctgttgggcttttagctctgtgggtgccctggagggccaactcaagaagaaaactggcaaactcttaaatctgagtccccagaacctagtggattgtgtgtctgagaatgatggctgtggagggggctacatgaccaatgccttccaatatgtgcagaagaaccggggtattgactctgaagatgcctacccatatgtgggacaggaagagagttgtatgtacaacccaacaggcaaggcagctaaatgcagagggtacagagagatccccgaggggaatgagaaagccctgaagagggcagtggcccgagtgggacctgtctctgtggccattgatgcaagcctgacctccttccagttttacagcaaaggtgtgtattatgatgaaagctgcaatagcgataatctgaaccatgcggttttggcagtgggatatggaatccagaagggaaacaagcactggataattaaaaacagctggggagaaaactggggaaacaaaggatatatcctcatggctcgaaataagaacaacgcctgtggcattgccaacctggccagcttccccaagatgtgactccagccagccaaatccatcctgctcttccatttcttccacgatggtgcagtgtaacgatgcactttggaagggagttggtgtgctatttttgaagcagatgtggtgatactgagattgtctgttcagtttccccatttgtttgtgcttcaaatgatccttcctactttgcttctctccacccatgacctttttcactgtggccatcaggactttccctgacagctgtgtactcttaggctaagagatgtgactacagcctgcccctgactgtgttgtcccagggctgatgctgtacaggtacaggctggagattttcacataggttagattctcattcacgggactagttagctttaagcaccctagaggactagggtaatctgacttctcacttcctaagttcccttctatatcctcaaggtagaaatgtctatgttttctactccaattcataaatctattcataagtctttggtacaagtttacatgataaaaagaaatgtgatttgtcttcccttctttgcacttttgaaataaagtatttatc

SEQ ID NO: 357 - protein, 329 aa, Homo sapiens
MWGLKVLLLPVVSFALYPEEILDTHWELWKKTHRKQYNNKVDEISRRLIWEKNLKYISIHNLEASLGVHTYELAMNHLGDMTSEEVVQKMTGLKVPLSHSRSNDTLYIPEWEGRAPDSVDYRKKGYVTPVKNQGQCGSCWAFSSVGALEGQLKKKTGKLLNLSPQNLVDCVSENDGCGGGYMTNAFQYVQKNRGIDSEDAYPYVGQEESCMYNPTGKAAKCRGYREIPEGNEKALKRAVARVGPVSVAIDASLTSFQFYSKGVYYDESCNSDNLNHAVLAVGYGIQKGNKHWIIKNSWGENWGNKGYILMARNKNNACGIANLASFPKM

SEQ ID NO: 358 - DNA, 2399 bp, Homo sapiens
ggcacgaggaaggaacatggccctgtatcagaggtggcggtgtctccggctccaaggtttacaggcttgcaggctacacacggcagttgtgtcgacccctccacgctggttggcagagcggcttggcctttttgaggagctgtgggctgctcaggtaaagagattagcaagcatggcacagaaggaaccccggactattaagatatcacttcctggaggccagaaaattgatgctgtggcatggaacacaaccccctaccaactagcccggcagatcagttcaacactggcagatactgcagtggctgctcaagtgaatggagaaccttatgatctggagcggcccttggagacagattctgacctcagatttctgacattcgattccccagaggggaaagcagtgttctggcactccagcacccatgtcctgggggcagcagctgaacaattcctaggtgctgttctctgcagaggtccaagtacagaatatggcttttaccatgatttcttcctgggaaaggagaggacaatccggggctcagagctgcctgttttggagcggatttgccaggaacttacagctgctgctcgacccttccggaggctagaggcttcacgggatcagcttcgccagttgttcaaggataacccctttaagcttcacttgattgaggagaaagtgacaggtccaacagcaacagtatatgggtgtggcacattggttgacctttgccagggcccccaccttcggcatactggacagattggaggactgaagctgctatcgaactcatcatccttatggaggtcttcaggggccccagagacactgcagagagtgtcagggatttccttccccacaacagaattgctgagggtctgggaagcatggagggaggaagcagaattgcgggaccaccggcgcattgggaaggaacaggagctcttcttcttccatgaactgagccctgggagctgcttcttcctgccacgagggacaagggtgtataatgcactagtggcgtttatcagggctgagtatgcccatcgtggtttctccgaggtgaaaactcccacactgttttctacgaagctctgggaacagtcagggcactgggagcattatcaggaagacatgtttgccgtgcagcccccaggctctgacaggcctcccagctcccagagtgacgattctaccaggcatatcacagatacactcgccctcaagcctatgaactgccctgcacactgcctgatgttcgcccaccggcccagatcctggcgggaactgcccctgcgactagctgactttggggctctacaccgggccgaagcctctggtggtctggggggactgacccgactgcggtgcttccagcaggatgacgctcacatcttctgtacaacagatcagctggaagcagagatccaaagctgtcttgatttcctccgttccgtctatgccgttcttggcttctccttccgcctggcactgtccacccggccatctggcttcctgggggacccttgcctttgggaccaggccgaacaggtccttaaacaggccctgaaggaatttggagaaccctgggacctcaactctggagatggtgccttctatggacctaagattgacgtgcacctccacgatgccctgggccggccacatcagtgtgggacaattcagcttgacttccaactgcccctgagatttgacctccagtataaggggcaggcgggtgccctggagcgtccagtcctcattcaccgagcagtgctcggttctgtggaaagactgttgggagtgctggcagaaagctgcggggggaaatggccactgtggctgtccccgttccaggtggtggtcatccctgtggggagtgagcaagaggaatacgccaaagaggcacagcagagcctgcgggctgcaggactggtcagtgacctggatgcagactctggactgaccctcagccggagaatccgccgggcccagcttgcccactacaattttcagtttgtggttggccagaaagagcaaagtaagagaacagtgaacattcggactcgagataatcgtcgccttggggagtgggacttgcctgaggctgtgcagcgactggtggagctacagaacacgagggtcccaaatgccgaagaaattttctgagcctttgtacatagatgaggcaaaaacctgcgagtgccatcagcctccctcacatgggagaccccaacccagctgacaatgtggagcccccagaacttcagaactgtgtggaggcacatgtctgctctcctgaaaagagacttggtttggggaccccacaaaaggagggaagctgtagctgtttggatgtgaggagaatgaaactacaaaaaaaaaaaaaaaaaaa

SEQ ID NO: 359 - protein, 718 aa, Homo sapiens
MALYQRWRCLRLQGLQACRLHTAVVSTPPRWLAERLGLFEELWAAQVKRLASMAQKEPRTIKISLPGGQKIDAVAWNTTPYQLARQISSTLADTAVAAQVNGEPYDLERPLETDSDLRFLTFDSPEGKAVFWHSSTHVLGAAAEQFLGAVLCRGPSTEYGFYHDFFLGKERTIRGSELPVLERICQELTAAARPFRRLEASRDQLRQLFKDNPFKLHLIEEKVTGPTATVYGCGTLVDLCQGPHLRHTGQIGGLKLLSNSSSLWRSSGAPETLQRVSGISFPTTELLRVWEAWREEAELRDHRRIGKEQELFFFHELSPGSCFFLPRGTRVYNALVAFIRAEYAHRGFSEVKTPTLFSTKLWEQSGHWEHYQEDMFAVQPPGSDRPPSSQSDDSTRHITDTLALKPMNCPAHCLMFAHRPRSWRELPLRLADFGALHRAEASGGLGGLTRLRCFQQDDAHIFCTTDQLEAEIQSCLDFLRSVYAVLGFSFRLALSTRPSGFLGDPCLWDQAEQVLKQALKEFGEPWDLNSGDGAFYGPKIDVHLHDALGRPHQCGTIQLDFQLPLRFDLQYKGQAGALERPVLIHRAVLGSVERLLGVLAESCGGKWPLWLSPFQVVVIPVGSEQEEYAKEAQQSLRAAGLVSDLDADSGLTLSRRIRRAQLAHYNFQFVVGQKEQSKRTVNIRTRDNRRLGEWDLPEAVQRLVELQNTRVPNAEEIF

SEQ ID NO: 360 - DNA, 900 bp, Homo sapiens
accagatcccagaggctgaacacctcgaccttctctgcacagcaggtccagcatcctttgaagcatgagttcttaccagcagaagcagacctttaccccaccacctcagcttcaacagcagcaggtgaaacaacccagccagcctccacctcaggaaatatttgttcccacaaccaaggagccatgccactcaaaggttccacaacctggaaacacaaagattccagagccaggctgtaccaaggtccctgagccaggctgtaccaaggtccctgagccaggctgtaccaaggtccctgagccaggttgtaccaaggtccctgagccaggctgtaccaaggtccctgagccaggttgtaccaaggtccctgagccaggctacaccaaggtccctgaaccaggcagcatcaaggtccctgaccaaggcttcatcaagtttcctgagccaggtgccatcaaagttcctgagcaaggatacaccaaagttcctgtgccaggctacacaaagctaccagagccatgtccttcaacggtcactccaggcccagctcagcagaagaccaagcagaagtaatttggtgcacagacaagcccttgagaagccaaccaccagatgctggacaccctcttcccatctgtttctgtgtcttaattgtctgtagaccttgtaatcagcacattgtcaccccaagccatagtctctctcttatttgtatcctaaaaatacgtactataaagcttttgttcacacacactctgaagaatcctgtaagcccctgaattaagcagaaagtcttcatggcttttctggtcttcggctgctcagggttcatctgaagattcgaatgaaaagaaatgcatgtttcctgctcttccctcattaaattgcttttaattcca

SEQ ID NO: 361 - DNA, 617 bp, Homo sapiens
cagttctaagggaccatacagagtattcctctcttcacaccaggaccagtcactgttgcagcatgagttcccagcagcagaagcagccttgcaccccaccccctcagcttcagcagcagcaggtgaaacagccttgccagcctccacctcaggaaccatgcatccccaaaaccaaggagccctgccaccccaaggtgcctgagccctgccaccccaaagtgcccgagccctgccagcccaaggttccagagccatgccaccccaaggtgcctgagccctgcccttcaatagtcactccagcaccagcccagcagaagaccaagcagaagtaatgtggtccacagccatgcccttgaggagccggccaccagatgctgaatcccctatcccattctgcgtatgagtcccatttgccttgcaattagcattctgtctcccccaaaaaagaatgtgctatgaagctttctttcctacacactctgagtctctgaatgaagctgaaggtcttagtaccagagctagttttcagctgctcagaattcatctgaagagagacttaagatgaaagcaaatgattcagctcccttatacccccattaaattcactttcaattcca

SEQ ID NO: 362 - protein, 89 aa, Homo sapiens
MSSQQQKQPCTPPPQLQQQQVKQPCQPPPQEPCIPKTKEPCHPKVPEPCHPKVPEPCQPKVPEPCHPKVPEPCPSIVTPAPAQQKTKQK

SEQ ID NO: 363 - DNA, 1617 bp, Homo sapiens
atgacaattgcaaaggtggtagaagctcatgaccaggtgacagacagacacagaacacatcaacagaattgtctgatggttcccagggagagagctgctgctctttcttccgaagctctgggagctggcacagctgaggacttccttttcttagctccacctggacagtggcagtatggcagcctcagaaagggaatcttttgctgtcacagatcatcacaggcaggccacaggttaaggagaaagaagctccctgtgcatccatggaaggctttggtgagaagatgcaagtggagctgtggaacgagggagagagctgctgctctttcttccgaagctctgggagctggcacagcccaggacttcctttgctcagtctccacctggacagtggcagtatggcagcctcagaaaagaaactttttgctgtcagggatcatcatgggcagattactggctaaggagaaagaagctccctgtgtatccatggtaggctttgatgagaagatgaaggtggagctgtggaacgagatactttattcagggagtgaaagaaaagtgacaattgcacaggtggtagaagctcatgcccaggtgaaagacagacacagaacacatcaacagaattctctgatggttcccaggcacacagctgcagctctttctgctgaagctctgggaactgacaaagccaaggttcctttgctcagtctccacctggacagtggcatctccacctggacagtggcaatatggcagcctcagaaaggaaaccttttgctatcagggatcatcatgggcagatcactggctaagaggaaagaagctaactgtgtatccatggtaggctttgatgagaagatgcaggtgaagctgtggaacaagtgcaggcaccagagcagcagcagccctagtgcccccagcatctcagacaggctcactttacaagttgaggtgatgaacttgaagctaagagttcctcacagtccagggagtgaaaggaaagtgacaactgcacaggtggtggaagctcatgcccaggggacagacagacacagaaaacatcaacagaattctctaatggttcccagggagagagctgctctttcttctgaagctctgggagctggcacagcccaggacttcctttgctcagtctccacctggacagtggcagtatggcagcctcaaaaagaaaaccttttgctatcagagatcatcacaggccgatcacaggctaagaggaaagaagctccctgtgtatccctggatggctttgatgagaagatgcaggtggagctgtggaacgagcatcaaatcaacattcataggattggatcaaccaaacttgctgtattcagattaaattcaacatttcagggcacaaagaacagaggaactccaggaagccgactcaccaggttctccaaggcagatcggtgcttaggagactataatccgtgtggacagccacctagaagcaaacttctggccatggtagcacagactgtgtcatcattccaggttctgtggccaagccccccaaacaggaatcacgtagtgaagttcaaagaaacttccaaaaggtgcagcaaaagaaagaaaagaaaaacataa

SEQ ID NO: 364 - DNA, 576 bp, Homo sapiens
aaacactctgtgtggctcctcggctttgggacagagtgcaagacgatgacttgcaaaatgtcgcagctggaacgcaacatagagaccatcatcaacaccttccaccaatactctgtgaagctggggcacccagacaccctgaaccagggggaattcaaagagctggtgcgaaaagatctgcaaaattttctcaagaaggagaataagaatgaaaaggtcatagaacacatcatggaggacctggacacaaatgcagacaagcagctgagcttcgaggagttcatcatgctgatggcgaggctaacctgggcctcccacgagaagatgcacgagggtgacgagggccctggccaccaccataagccaggcctcggggagggcaccccctaagaccacagtggccaagatcacagtggccacggccatggccacagtcatggtggccacggccacaggccactaatcaggaggccaggccaccctgcctctacccaaccagggccccggggcctgttatgtcaaactgtcttggctgtggggctaggggctggggccaaataaagtctcttcctccaa

SEQ ID NO: 365 - protein, 114 aa, Homo sapiens
MTCKMSQLERNIETIINTFHQYSVKLGHPDTLNQGEFKELVRKDLQNFLKKENKNEKVIEHIMEDLDTNADKQLSFEEFIMLMARLTWASHEKMHEGDEGPGHHHKPGLGEGTP

SEQ ID NO: 366 - DNA, 494 bp, Homo sapiens
gagcagccttcctgagagaggagagagaaagctcagggaggtctggagcaaagatactcctggaggtggggagtgaggcagggataaggaaggagagtatcctccagcaccttccagtgggtggggcaagtccgtgggcatcatgttgaccgagctggagaaagccttgaactctatcatcgacgtctaccacaagtactccctgataaaggggaatttccatgccgtctacagggatgacctgaagaaattgctagagaccgagtgtcctcagtatatcaggaaaaagggtgcagacgtctggttcaaagagttggatatcaacactgatggtgcagttaacttccaggagttcctcattctggtgataaagatgggcgtggcagcccacaaaaaaagccatgaagaaagccacaaagagtagctgagttactgggcccagaggctgggcccctggacatgtacctgcagaataataaagtcatcaatacctc

SEQ ID NO: 367 - DNA, 470 bp, Homo sapiens
gggaccgctataaggccagtcggactgcgacatagcccatcccctcgaccgctcgcgtcgcatttggccgcctccctaccgctccaagcccagccctcagccatggcatgccccctggatcaggccattggcctcctcgtggccatcttccacaagtactccggcagggagggtgacaagcacaccctgagcaagaaggagctgaaggagctgatccagaaggagctcaccattggctcgaagctgcaggatgctgaaattgcaaggctgatggaagacttggaccggaacaaggaccaggaggtgaacttccaggagtatgtcaccttcctgggggccttggctttgatctacaatgaagccctcaagggctgaaaataaatagggaagatggagacacctctgggggtcctctctgagtcaaatccagtggtgggtaattgtacaataaattttttttggtcaaattt

SEQ ID NO: 368 - protein, 90 aa, Homo sapiens
MACPLDQAIGLLVAIFHKYSGREGDKHTLSKKELKELIQKELTIGSKLQDAEIARLMEDLDRNKDQEVNFQEYVTFLGALALIYNEALKG

SEQ ID NO: 369 - DNA, 512 bp, Homo sapiens
attcttcccctctctacaaccctctctcctcagcgcttcttctttcttggtttgatcctgactgctgtcatggcgtgccctctggagaaggccctggatgtgatggtgtccaccttccacaagtactcgggcaaagagggtgacaagttcaagctcaacaagtcagaactaaaggagctgctgacccgggagctgcccagcttcttggggaaaaggacagatgaagctgctttccagaagctgatgagcaacttggacagcaacagggacaacgaggtggacttccaagagtactgtgtcttcctgtcctgcatcgccatgatgtgtaacgaattctttgaaggcttcccagataagcagcccaggaagaaatgaaaactcctctgatgtggttggggggtctgccagctggggccctccctgtcgccagtgggcacttttttttttccaccctggctccttcagacacgtgcttgatgctgagcaagttcaataaagattcttggaagttt

SEQ ID NO: 370 - protein, 101 aa, Homo sapiens
MACPLEKALDVMVSTFHKYSGKEGDKFKLNKSELKELLTRELPSFLGKRTDEAAFQKLMSNLDSNRDNEVDFQEYCVFLSCIAMMCNEFFEGFPDKQPRKK

SEQ ID NO: 371 - DNA, 507 bp, Homo sapiens
ggtgcttctgagatgtgggcttgcacacgctgttgctatagtacgtgtgatcctgactgctgtcatggcgtgccctctggagaaggccctggatgtgatggtgtccaccttccacaagtactcgggcaaagagggtgacaagttcaagctcaacaagtcagaactaaaggagctgctgacccgggagctgcccagcttcttggggaaaaggacagatgaagctgctttccagaagctgatgagcaacttggacagcaacagggacaacgaggtggacttccaagagtactgtgtcttcctgtcctgcatcgccatgatgtgtaacgaattctttgaaggcttcccagataagcagcccaggaagaaatgaaaactcctctgatgtggttggggggtctgccagctggggccctccctgtcgccagtgggcacttttttttttccaccctggctccttcagacacgtgcttgatgctgagcaagttcaataaagattcttggaagttt

SEQ ID NO: 372 - protein, 101 aa, Homo sapiens; identical to SEQ ID NO: 370

SEQ ID NO: 373 - DNA, 1217 bp, Homo sapiens
acacattccccaccctctgggagctcctagtctgagagaggaaacactcctgcccaagggagcttccagttagatggcagagagagatgcctctggcttcaggagtcccgagtctaaggagggaaacgactccttcagggagcttcctgctcctaggctgtagccatggctcctgccagactgcacaggagcccccatctgccagccggtgcatgtggccctgctccccagagcctgcgcagatgccatcaaaatgggactctggtcaccctgtcatttcccttctggcagacactaaaatggggagccctgccctcaggggggtgtcccaagtgccatcagaggaggcttggtgactcccagacacaagggaagctttagcgtctgccctcagggtgagatggaggtatcgcctccggcctcagggaaccacagtctgagggggagatgcagcccctgccttcccattcagagaggggttttgtgaggtggcttgggggcatagggcagaagtggatcctacaggctgagctaaggccccaagagcctcagcagtgtacccatcacctggcacctctgcagccacagatccatgatgtgcagttctctggagcaggcgctggctgtgctggtcactaccttccacaagtactcctgccaagagggcgacaagttcaagctgagtaagggggaaatgaaggaacttctgcacaaggagctgcccagctttgtgggggagaaagtggatgaggaggggctgaagaagctgatgggcagcctggatgagaacagtgaccagcaggtggacttccaggagtatgctgttttcctggcactcatcactgtcatgtgcaatgacttcttccagggctgcccagaccgaccctgaagcagaactcttgacttcctgccatggatctcttgggcccaggactgttgatgcctttgagttttgtattcaataaactttttttgtctgttgataatattttaattgctcagtgatgttccataacccggctggctcagctggagtgctgggagatgagggcctcctggatcctgctcccttctgggctctgactctcctggaaatctctccaaggccagagctatgctttaggtctcaattttggaatttcaaacaccagcaaaaaattggaaatcgagataggttgctgacttttattttgtcaaataaagatattaaaaaaggc

SEQ ID NO: 374 - DNA, 607 bp, Homo sapiens
ggactgttgaagacaggtctccacacacagctccagcagccacatttgcaaccttggccatctgtccagaacctgctcccacctcaggcccaggccaaccgtgcactgctgcaatgggctctgagctggagacggcgatggagaccctcatcaacgtgttccacgcccactcgggcaaagagggggacaagtacaagctgagcaagaaggagctgaaagagctgctgcagacggagctctctggcttcctggatgcccagaaggatgtggatgctgtggacaaggtgatgaaggagctagacgagaatggagacggggaggtggacttccaggagtatgtggtgcttgtggctgctctcacagtggcctgtaacaatttcttctgggagaacagttgagcagacagccacattgggcagcgcccttcctctccaccctcccagacctgcctcttccccctgcttccacctcaccccacttatccctctccataaccccacccttgcccaccccacccccacccccaccaagggcgcaagagtagcggtccaagcctgcaactcatctttcattaaaggcttctctctcaccagcaaaaaaaaaaaaa

SEQ ID NO: 375 - protein, 94 aa, Homo sapiens
MGSELETAMETLINVFHAHSGKEGDKYKLSKKELKELLQTELSGFLDAQKDVDAVDKVMKELDENGDGEVDFQEYVVLVAALTVACNNFFWENS

SEQ ID NO: 376 - DNA, 1582 bp, Homo sapiens
tcagacaagcactggacgtggcggccattttgttttggacaccgagcaggagctggcggccgctgcagacgaaaggcaggaaagggcaggccgggtgagcagacggatcggccgactagacagccaaccagcaacaacgaactgagctcgcatactaccgcttacgcatctaaccaaccgcccatctagctaacccgagcccctccaccgtcaactcaggttcggccggtccccggcccgcctgccggagccgtggtggcagccccgggaggagcactggcgtctgtttccttcgattctcgggattcgaagatggctgcacagtcagcgccgaaagttgtgctaaaaagcaccaccaagatgtctctaaatgagcgctttactaatatgctgaagaacaaacagccgacgccagtgaatattcgggcttcgatgcagcaacaacagcagctagccagtgccagaaacagaagactggcccagcagatggagaatagaccctctgtccaggcagcattaaaacttaagcagagcttaaagcagcgcctgggtaagagtaacatccaggcacggttaggccgacccataggggccctggccaggggagcaatcggaggacgaggcctacccataatccagagaggcttgcccagaggaggactacgtgggggacgtgccaccagaaccctacttaggggcgggatgtcactccgaggtcaaaacctgctccgaggtggacgagccgtagctccccgaatgggcttaagaagaggtggtgttcgaggtcgtggaggtcctgggagagggggcctagggcgtggagctatgggtcgtggcggaatcggtggtagaggtcggggtatgataggtcggggaagagggggctttggaggccgaggccgaggccgtggacgagggagaggtgcccttgctcgccctgtattgaccaaggagcagctggacaaccaattggatgcatatatgtcgaaaacaaaaggacacctggatgctgagttggatgcctacatggcgcagacagatcccgaaaccaatgattgaagcctgcccatcctcccatgagagactcttgttagtcaacacatctgtaaataaccttgagataacagatgagaagaaatctgattgatgctggatggacctatcacaataggctgtggacttacttgccaccagcttgtgcatttagtgtgttccttttactttttgatactgtgttgtatgaaacccttttgtcctttgatttggttttttgtttttgtttttttaggggggagggggggtttcccctcctttgcccagacttctctttgaacacaaatgcattagccttgtggctagaacaccctcttcctacctctgtctcccctcacttgtcatatgctctgacatgctaacatttcttttgttcatccctgttgcccccacagaaacatcccagaaaaaccggtcagtgttccttcctccctgatccttaggtttctgaaatagggttctgttacatcctcttcgatagcctgtttaaaatgtttagaaggtctggagctcaaaaatgcgttcttcc

SEQ ID NO: 377 - DNA, 1540 bp, Homo sapiens
aggggtgacagaggccgtggtcgtggtgggcgctttggttccagaggaggcccaggaggagggttcaggccctttgtaccacatatcccatttgacttctatttgttgtttacttctggtttagtgtgaaatggcctttccccgggtcaagccagcacctgatgaaacttccttcagtgaggccttgctgaagaggaatcaggacctggctcccaattctgctgaacaggcatctatcctttctctggtgacaaaaataaacaatgtgattgataatctgattgtggctccagggacatttgaagtgcaaattgaagaagttcgacaggtgggatcctataaaaaggggacaatgactacaggacacaatgtggctgacctggtggtgatactcaagattctgccaacgttggaagctgttgctgccctggggaacaaagtcgtggaaagcctaagagcacaggatccttctgaagttttaaccatgctgaccaacgaaactggctttgaaatcagttcttctgatgctacagtgaagattctcattacaacagtgccacccaatcttcgaaaactggatccagaactccatttggatatcaaagtattgcagagtgccttagcagccatccgacatgcccgctggttcgaggaaaatgcttctcagtccacagttaaagttctcatcagactactgaaggacttgaggattcgttttcctggctttgagcccctcacaccctggatccttgacctactaggccattatgctgtgatgaacaaccccaccagacagcctttggccctaaacgttgcatacaggcgctgcttgcagattctggctgcaggactgttcctgccaggttcagtgggtatcactgacccctgtgagagtggcaactttagagtacacacagtcatgaccctagaacagcaggacatggtctgctatacagctcagactctcgtccgaatcctctcacatggtggctttaggaagatccttggccaggagggtgatgccagctatcttgcttctgaaatatctacctgggatggagtgatagtaacaccttcagaaaaggcttatgagaagccaccagagaagaaggaaggagaggaagaagaggagaatacagaagaaccacctcaaggagaggaagaagaaagcatggaaactcaggagtgacattcccttcactccttttcctacccaagggggaagactggagcctaagctgcctgctactgggctttacatggtgacagacatttccgtgggatagggaagatagcaggaagaaaagtaaactccatagaagtgtcattccactgggttttgatattggcttagctgccagtctcccatttgtgacctatgccatccatctataatggaggataccaacatttcttcctaatattctataatctccaactcctgaaaacccctctctcaactaatactttgctgttgaaatgttgtgaaatgttaagtgtctggaaatttttttttctaagaaaaactattaaagtactt

SEQ ID NO: 378 - protein, 390 aa, Homo sapiens
MRGDRGRGRGGRFGSRGGPGGGFRPFVPHIPFDFYLCEMAFPRVKPAPDETSFSEALLKRNQDLAPNSAEQASILSLVTKINNVIDNLIVAPGTFEVQIEEVRQVGSYKKGTMTTGHNVADLVVILKILPTLEAVAALGNKVVESLRAQDPSEVLTMLTNETGFEISSSDATVKILITTVPPNLRKLDPELHLDIKVLQSALAAIRHARWFEENASQSTVKVLIRLLKDLRIRFPGFEPLTPWILDLLGHYAVMNNPTRQPLALNVAYRRCLQILAAGLFLPGSVGITDPCESGNFRVHTVMTLEQQDMVCYTAQTLVRILSHGGFRKILGQEGDASYLASEISTWDGVIVTPSEKAYEKPPEKKEGEEEEENTEEPPQGEEEESMETQE

SEQ ID NO: 379 - DNA, 2430 bp, Homo sapiens
cacacccgcactcctcccgggtttctgctctccgcccgtgtggagtggtgggggcctgggtgggaatgggcgtgtgccagcgcacgcgcgctccctggaaggagaagtctcagctagaacgagcggccctaggttttcggaagggaggatcagggatgtttgcgagcggctggaaccagacggtgccgatagaggaagcgggctccatggctgccctcctgctgctgcccctgctgctgttgctaccgctgctgctgctgaagctacacctctggccgcagttgcgctggcttccggcggacttggcctttgcggtgcgagctctgtgctgcaaaagggctcttcgagctcgcgccctggccgcggctgccgccgacccggaaggtcccgaggggggctgcagcctggcctggcgcctcgcggaactggcccagcagcgcgccgcgcacacctttctcattcacggctcgcggcgctttagctactcagaggcggagcgcgagagtaacagggctgcacgcgccttcctacgtgcgctaggctgggactggggacccgacggcggcgacagcggcgaggggagcgctggagaaggcgagcgggcagcgccgggagccggagatgcagcggccggaagcggcgcggagtttgccggaggggacggtgccgccagaggtggaggagccgccgcccctctgtcacctggagcaactgtggcgctgctcctccccgctggcccagagtttctgtggctctggttcgggctggccaaggccggcctgcgcactgcctttgtgcccaccgccctgcgccggggccccctgctgcactgcctccgcagctgcggcgcgcgcgcgctggtgctggcgccagagtttctggagtccctggagccggacctgcccgccctgagagccatggggctccacctgtgggctgcaggcccaggaacccaccctgctggaattagcgatttgctggctgaagtgtccgctgaagtggatgggccagtgccaggatacctctcttccccccagagcataacagacacgtgcctgtacatcttcacctctggcaccacgggcctccccaaggctgctcggatcagtcatctgaagatcctgcaatgccagggcttctatcagctgtgtggtgtccaccaggaagatgtgatctacctcgccctcccactctaccacatgtccggttccctgctgggcatcgtgggctgcatgggcattggggccacagtggtgctgaaatccaagttctcggctggtcagttctgggaagattgccagcagcacagggtgacggtgttccagtacattggggagctgtgccgataccttgtcaaccagcccccgagcaaggcagaacgtggccataaggtccggctggcagtgggcagcgggctgcgcccagatacctgggagcgttttgtgcggcgcttcgggcccctgcaggtgctggagacatatggactgacagagggcaacgtggccaccatcaactacacaggacagcggggcgctgtggggcgtgcttcctggctttacaagcatatcttccccttctccttgattcgctatgatgtcaccacaggagagccaattcgggacccccaggggcactgtatggccacatctccaggtgagccagggctgctggtggccccggtaagccagcagtccccattcctgggctatgctggcgggccagagctggcccaggggaagttgctaaaggatgtcttccggcctggggatgttttcttcaacactggggacctgctggtctgcgatgaccaaggttttctccgcttccatgatcgtactggagacaccttcaggtggaagggggagaatgtggccacaaccgaggtggcagaggtcttcgaggccctagattttcttcaggaggtgaacgtctatggagtcactgtgccagggcatgaaggcagggctggaatggcagccctagttctgcgtcccccccacgctttggaccttatgcagctctacacccacgtgtctgagaacttgccaccttatgcccggccccgattcctcaggctccaggagtctttggccaccacagagaccttcaaacagcagaaagttcggatggcaaatgagggcttcgaccccagcaccctgtctgacccactgtacgttctggaccaggctgtaggtgcctacctgcccctcacaactgcccggtacagcgccctcctggcaggaaaccttcgaatctgagaacttccacacctgaggcacctgagagaggaactctgtggggtgggggccgttgcaggtgtactgggctgtcagggatcttttctataccagaactgcggtcactattttgtaataaatgtggctggagctgatccagctgtctctgacctacaaaaaaaaaaaaaaaaaa

SEQ ID NO: 380 - protein, 730 aa, Homo sapiens
MGVCQRTRAPWKEKSQLERAALGFRKGGSGMFASGWNQTVPIEEAGSMAALLLLPLLLLLPLLLLKLHLWPQLRWLPADLAFAVRALCCKRALRARALAAAAADPEGPEGGCSLAWRLAELAQQRAAHTFLIHGSRRFSYSEAERESNRAARAFLRALGWDWGPDGGDSGEGSAGEGERAAPGAGDAAAGSGAEFAGGDGAARGGGAAAPLSPGATVALLLPAGPEFLWLWFGLAKAGLRTAFVPTALRRGPLLHCLRSCGARALVLAPEFLESLEPDLPALRAMGLHLWAAGPGTHPAGISDLLAEVSAEVDGPVPGYLSSPQSITDTCLYIFTSGTTGLPKAARISHLKILQCQGFYQLCGVHQEDVIYLALPLYHMSGSLLGIVGCMGIGATVVLKSKFSAGQFWEDCQQHRVTVFQYIGELCRYLVNQPPSKAERGHKVRLAVGSGLRPDTWERFVRRFGPLQVLETYGLTEGNVATINYTGQRGAVGRASWLYKHIFPFSLIRYDVTTGEPIRDPQGHCMATSPGEPGLLVAPVSQQSPFLGYAGGPELAQGKLLKDVFRPGDVFFNTGDLLVCDDQGFLRFHDRTGDTFRWKGENVATTEVAEVFEALDFLQEVNVYGVTVPGHEGRAGMAALVLRPPHALDLMQLYTHVSENLPPYARPRFLRLQESLATTETFKQQKVRMANEGFDPSTLSDPLYVLDQAVGAYLPLTTARYSALLAGNLRI

SEQ ID NO: 381 - DNA, 997 bp, Homo sapiens
ggcacgagggggcttcaggacaattcgtgatggcgggggctggttccgccgctgtatcgggggcagggaccccggtggcggggcccacaggccgcgaccttttcgccgaagggctgctggagttcctgcgacccgctgtgcagcagctcgactctcacgtacacgccgtcagagagagccaggtagagctccgggaacaaattgacaacctagccacagaactgtgccgcataaatgaggatcagaaggtggccctggatcttgacccctatgttaagaagctacttaatgcccggcgacgcgttgtcttggttaacaacattctacagaatgctcaggaacgactgagacggctaaaccacagtgttgccaaggaaacagcccgcaggagagcaatgctggattcgggaatttacccccctggctccccaggcaaataacagatgagcctatggactcagtagcacaagtactgttccccagctgccttgtttcaacagacatgcaaagatcctaggagacagtccccatagaccttcagacattaaaaagggagccgtacagtttgtttgaagcacttcgtcttacccatttatgtaggggccccaggaaacctacacacagccagaatgaggttcccaaaggacttacattaattatggctcttgcttcctttcacaaatgagctgaggcctctacttttttttttttaagctgcatacttgaggcttaccttcttcaggactagttaaccagaggggcttcctttgtatgttacatgcctggttacatgggcctggacagcatgtcctctacctgtgacttctcattttcctgtttacactggggatttggagggggcaggcaaagtcaaagtgaatgacctctgtccacccacttttttattgcactggcttgaatacagtagcagtgttgatagaatcattttattcaataaatacttaaaatgaaaaaaaaaaaaaaaaaaaaaaaaaaa

SEQ ID NO: 382 - protein, 136 aa, Homo sapiens
MAGAGSAAVSGAGTPVAGPTGRDLFAEGLLEFLRPAVQQLDSHVHAVRESQVELREQIDNLATELCRINEDQKVALDLDPYVKKLLNARRRVVLVNNILQNAQERLRRLNHSVAKETARRRAMLDSGIYPPGSPGK

SEQ ID NO: 383 - DNA, 1726 bp, Homo sapiens
ctatgataagctaattatttatgtttgcataatatttatgtttgcatgttagtgacatatattttaaaatgtgatacactcctgtaatttatgagagtatgttcattgctgtgagctttgaaggtgctctaatccttcctcatatttggccttagaatgcacctcggatcccccaaggtttaggctttcttcatttgtctttgaaactatatcttctgtctcttgtcatatctgcttattgcgtgtttttcataccttccacctctctaaaagccgttacctgagccctcgttatcacttttggttgaatgtgctgcacttagctgcatttctaagtttctgattcttgcaagtttgtggaaacagaggagtctttaacccacatcagccttgatctaagtgtaccactttacttaaaagttcgtgggatctggagctcctggtctagcaagccatgaaaatgccaataaatgtttgtaataaagcttttatttaaacatccattttgttcgaccttgaagctttactaatatgctgaagaacaaacagccgacgccagtgaatattcgggcttcgatgcagcaacaacagcagctagccagtgccagaaacagaagactggcccagcagatggagaatagaccctctgtccaggcagcattaaaacttaagcagagcttaaagcagcgcctgggtaagagtaacatccaggcacggttaggccgacccataggggccctggccaggggagcaatcggaggacgaggcctacccataatccagagaggcttgcccagaggaggactacgtgggggacgtgccaccagaaccctacttaggggcgggatgtcactccgaggtcaaaacctgctccgaggtggacgagccgtagctccccgaatgggcttaagaagaggtggtgttcgaggtcgtggaggtcctgggagagggggcctagggcgtggagctatgggtcgtggcggaatcggtggtagaggtcggggtatgataggtcggggaagagggggctttggaggccgaggccgaggccgtggacgagggagaggtgcccttgctcgccctgtattgaccaaggagcagctggacaaccaattggatgcatatatgtcgaaaacaaaaggacacctggatgctgagttggatgcctacatggcgcagacagatcccgaaaccaatgattgaagcctgcccatcctcccatgagagactcttgttagtcaacacatctgtaaataaccttgagataacagatgagaagaaatctgattgatgctggatggacctatcacaataggctgtggacttacttgccaccagcttgtgcatttagtgtgttccttttactttttgatactgtgttgtatgaaacccttttgtcctttgatttggttttttgtttttgtttttttaggggggagggggggtttcccctcctttgcccagacttctctttgaacacaaatgcattagccttgtggctagaacaccctcttcctacctctgtctcccctcacttgtcatatgctctgacatgctaacatttcttttgttcatccctgttgcccccacagaaacatcccagaaaaaccggtcagtgttccttcctccctgatccttaggtttctgaaatagggttctgttacatcctcttcgatagcctgtttaaaatgtttagaaggtctggagctcaaaaatgcgttcttcc

SEQ ID NO: 384 - DNA, 426 bp, Homo sapiens
ccacagatccatgatgtgcagttctctggagcaggcgctggctgtgctggtcactaccttccacaagtactcctgccaagagggcgacaagttcaagctgagtaagggggaaatgaaggaacttctgcacaaggagctgcccagctttgtgggggagaaagtggatgaggaggggctgaagaagctgatgggcagcctggatgagaacagtgaccagcaggtggacttccaggagtatgctgttttcctggcactcatcactgtcatgtgcaatgacttcttccagggctgcccagaccgaccctgaagcagaactcttgacttcctgccatggatctcttgggcccaggactgttgatgcctttgagttttgtattcaataaactttttttgtctgttgaaaaaaaaaaaaaaaaaaaaaaaaaa

SEQ ID NO: 385 - protein, 98 aa, Homo sapiens
MMCSSLEQALAVLVTTFHKYSCQEGDKFKLSKGEMKELLHKELPSFVGEKVDEEGLKKLMGSLDENSDQQVDFQEYAVFLALITVMCNDFFQGCPDRP

SEQ ID NO: 386 - DNA, 3560 bp, Homo sapiens
gcgcccagacttgctgccgggctggacggtccgcacggtgctgggcagcagcgaaaacgcgctgggcgtgtgctccgacaccgcagcgcccctggccgcggtggacctcaagtgggagcacaaccccgctgtgttcctgggccccggctgcgtgtacgccgccgccccagtggggcgcttcaccgcgcactggcgggtcccgctgctgaccgccggcgccccggcgctgggcttcggtgtcaaggacgagtatgcgctgaccacccgcgcggggcccagctacgccaagctgggggacttcgtggcggcgctgcaccgacggctgggctgggagcgccaagcgctcatgctctacgcctaccggccgggtgacgaagagcactgcttcttcctcgtggaggggctgttcatgcgggtccgcgaccgcctcaatattacggtggaccacctggagttcgccgaggacgacctcagccactacaccaggctgctgcggaccatgccgcgcaaaggccgagttatctacatctgcagctcccctgatgccttcagaaccctcatgctcctggccctggaagctggcttgtgtggggaggactacgttttcttccacctggatatctttgggcaaagcctgcaaggtggacagggccctgctccccgcaggccctgggagagaggggatgggcaggatgtcagtgcccgccaggcctttcaggctgccaaaatcattacatataaagacccagataatcccgagtacttggaattcctgaagcagttaaaacacctggcctatgagcagttcaacttcaccatggaggatggcctggtgaacaccatcccagcatccttccacgacgggctcctgctctatatccaggcagtgacggagactctggcacatgggggaactgttactgatggggagaacatcactcagcggatgtggaaccgaagctttcaaggtgtgacaggatacctgaaaattgatagcagtggcgatcgggaaacagacttctccctctgggatatggatcccgagaatggtgccttcagggttgtactgaactacaatgggacttcccaagagctggtggctgtgtcggggcgcaaactgaactggcccctggggtaccctcctcctgacatccccaaatgtggctttgacaacgaagacccagcatgcaaccaagatcacctttccaccctggaggtgctggctttggtgggcagcctctccttgctcggcattctgattgtctccttcttcatatacaggaagatgcagctggagaaggaactggcctcggagctgtggcgggtgcgctgggaggacgttgagcccagtagccttgagaggcacctgcggagtgcaggcagccggctgaccctgagcgggagaggctccaattacggctccctgctaaccacagagggccagttccaagtctttgccaagacagcatattataagggcaacctcgtggctgtgaaacgtgtgaaccgtaaacgcattgagctgacacgaaaagtcctgtttgaactgaagcatatgcgggatgtgcagaatgaacacctgaccaggtttgtgggagcctgcaccgacccccccaatatctgcatcctcacagagtactgtccccgtgggagcctgcaggacattctggagaatgagagcatcaccctggactggatgttccggtactcactcaccaatgacatcgtcaagggcatgctgtttctacacaatggggctatctgttcccatgggaacctcaagtcatccaactgcgtggtagatgggcgctttgtgctcaagatcaccgactatgggctggagagcttcagggacctggacccagagcaaggacacaccgtttatgccaaaaagctgtggacggcccctgagctcctgcgaatggcttcaccccctgtgcggggctcccaggctggtgacgtatacagctttgggatcatccttcaggagattgccctgaggagtggggtcttccacgtggaaggtttggacctgagccccaaagagatcatcgagcgggtgactcggggtgagcagccccccttccggccctccctggccctgcagagtcacctggaggagttggggctgctcatgcagcggtgctgggctgaggacccacaggagaggccaccattccagcagatccgcctgacgttgcgcaaatttaacagggagaacagcagcaacatcctggacaacctgctgtcccgcatggagcagtacgcgaacaatctggaggaactggtggaggagcggacccaggcatacctggaggagaagcgcaaggctgaggccctgctctaccagatcctgcctcactcagtggctgagcagctgaagcgtggggagacggtgcaggccgaagcctttgacagtgttaccatctacttcagtgacattgtgggtttcacagcgctgtcggcggagagcacacccatgcaggtggtgaccctgctcaatgacctgtacacttgctttgatgctgtcatagacaactttgatgtgtacaaggtggagacaattggcgatgcctacatggtggtgtcagggctccctgtgcggaacgggcggctacacgcctgcgaggtagcccgcatggccctggcactgctggatgctgtgcgctccttccgaatccgccaccggccccaggagcagctgcgcttgcgcattggcatccacacaggacctgtgtgtgctggagtggtgggactgaagatgccccgttactgtctctttggggatacagtcaacacagcctcaagaatggagtctaatggggaagccctgaagatccacttgtcttctgagaccaaggctgtcctggaggagtttggtggtttcgagctggagcttcgaggggatgtagaaatgaagggcaaaggcaaggttcggacctactggctccttggggagagggggagtagcacccgaggctgacctgcctcctctcctatccctccacacctccctaccctgtgccagaagcaacagaggtgccaggcctcagcctcacccacagcagccccatcgccaaaggatggaagtaatttgaatagctcaggtgtgctgaccccagtgaagacaccagataggacctctgagaggggactggcatggggggatctcagagcttacaggctgagccaagcccacggccatgcacagggacactcacacaggcacacgcacctgctctccacctggactcaggccgggctgggctgtggattcctgatcccctcccctccccatgctctcctccctcagccttgctaccctgtgacttactgggaggagaaagagtcacctgaaggggaacatgaaaagagactaggtgaagagagggcaggggagcccacatctggggctggcccacaatacctgctcccccgaccccctccacccagcagtagacacagtgcacaggggagaagaggggtggcgcagaagggttgggggcctgtatgccttgcttctaccatgagcagagacaattaaaatctttattccagtg

SEQ ID NO: 387 - protein, 1061 aa, Homo sapiens
MPGPRRPAGSRLRLLLLLLLPPLLLLLRGSHAGNLTVAVVLPLANTSYPWSWARVGPAVELALAQVKARPDLLPGWTVRTVLGSSENALGVCSDTAAPLAAVDLKWEHNPAVFLGPGCVYAAAPVGRFTAHWRVPLLTAGAPALGFGVKDEYALTTRAGPSYAKLGDFVAALHRRLGWERQALMLYAYRPGDEEHCFFLVEGLFMRVRDRLNITVDHLEFAEDDLSHYTRLLRTMPRKGRVIYICSSPDAFRTLMLLALEAGLCGEDYVFFHLDIFGQSLQGGQGPAPRRPWERGDGQDVSARQAFQAAKIITYKDPDNPEYLEFLKQLKHLAYEQFNFTMEDGLVNTIPASFHDGLLLYIQAVTETLAHGGTVTDGENITQRMWNRSFQGVTGYLKIDSSGDRETDFSLWDMDPENGAFRVVLNYNGTSQELVAVSGRKLNWPLGYPPPDIPKCGFDNEDPACNQDHLSTLEVLALVGSLSLLGILIVSFFIYRKMQLEKELASELWRVRWEDVEPSSLERHLRSAGSRLTLSGRGSNYGSLLTTEGQFQVFAKTAYYKGNLVAVKRVNRKRIELTRKVLFELKHMRDVQNEHLTRFVGACTDPPNICILTEYCPRGSLQDILENESITLDWMFRYSLTNDIVKGMLFLHNGAICSHGNLKSSNCVVDGRFVLKITDYGLESFRDLDPEQGHTVYAKKLWTAPELLRMASPPVRGSQAGDVYSFGIILQEIALRSGVFHVEGLDLSPKEIIERVTRGEQPPFRPSLALQSHLEELGLLMQRCWAEDPQERPPFQQIRLTLRKFNRENSSNILDNLLSRMEQYANNLEELVEERTQAYLEEKRKAEALLYQILPHSVAEQLKRGETVQAEAFDSVTIYFSDIVGFTALSAESTPMQVVTLLNDLYTCFDAVIDNFDVYKVETIGDAYMVVSGLPVRNGRLHACEVARMALALLDAVRSFRIRHRPQEQLRLRIGIHTGPVCAGVVGLKMPRYCLFGDTVNTASRMESNGEALKIHLSSETKAVLEEFGGFELELRGDVEMKGKGKVRTYWLLGERGSSTRG

SEQ ID NO: 388 - DNA, 696 bp, Homo sapiens
ctgggtggcggttatggtggggccagcggcatgggaggcatcaccgcagtcatggtcaaccagaacctgctgagcccccttgtcctggaggtggaccccaacatccaggccgtgtgcacccaggagaaggagccgatcaagaccctcaacaacaagtttgcctccttcatagacaaggtacggttcctggagcagcagaacaagatgccggagaccaagtggagcctcctgcagcagcagaagacggctcggagcaacatggacaagttcgagagctacatcaacaaccttaggcagcagctggagattctgggccaggagaagctgaagctggaggcggagcttggcaacatgcaggggctggtggaggacttcaagaacaagtatgaggatgagatcaataagcgtacagagatggagaatgaatttgtgctcaccaagaaggatgtggatgaagcttacatgaacaaggtagagctggagtctcgcctggaagggcttactgaagagatcagcttcctcaggcagctgtatgaagaggagatccgggagctgcagtcccagatctcagacacatcattgctgaggtcaaggcacagtacgaggaccgccagccgcagccaggctgaggctgagagcatgtaccagatcaagaatgaggagctgcaagagcctggctgggaagcacggggatga

SEQ ID NO: 389 - DNA, 2075 bp, Homo sapiens
ttgcccgggactaggagcttaagtgaagaggtacgccttgttcggtggaaatcagccgtagccatgagtttctgccggggctagccctagagtacggagcaggcggacttttcggttccccgccccgccaggtggcggggcctactaggcctccgggcatccccggtctcaagtaggcctcatctgccggcaagggcgcccgaaacgcgggaggcgccatgtcgctggttgcttacgccagcagcgatgagagcgagccggatgaggctgagcccgagccggaggaagaggaggcggtggctcctacatctgggcccgctttagggggcttgttcgcttctctccctgcgcccaagggtccggccttgctgcctccgccccctcagatgctggcgccagcctttcccccgccgctgttgcttcccccacccaccggagaccccaggcttcagcctcctccccccttgcccttcggcctgggaggcttccccccacctccaggcgtgagcccggctgaagcggcgggagttggggagggactgggattggggttgccctcgccccgaggccctggcctcaatctgccccctccaattggcggtgccggtcccccgctggggcttcccaagccaaagaagaggaaagagcccgtgaagatcgcggcgccggagttgcataagggagattcagattctgaggaagatgaacccacaaagaagaaaactatccttcagggatccagtgaggggactggtttgtctgccttgcttccccaacctaaaaacctgactgtgaaagagactaacaggttgctcctgccccatgccttctcccgcaaaccctcggatggctcccctgatactaagccctccagactggcttctaagaccaagacttcctctcttgcccctgttgtgggcaccacaaccaccactccgtcgccctctgctatcaaggctgctgccaagagtgctgccctgcaggtgacaaagcagatcacgcaggaagaagacgacagtgatgaggaagtagcccccgaaaactttttctccctccctgaaaaggctgagccacctggagttgagccatacccttaccccatccccactgtccctgaagagctgcctccaggcacggaaccagagccggctttccaggacgatgcagccaatgccccccttgaattcaagatggcagcaggttcaagtggggccccttggatgcctaagcctggggacgactacagctacaatcagttttccacatatggcgatgccaatgccgctggtgcttattatcaggattattacagtggtggctactatcctgcacaggacccggccctggtccccacccaggaaattgccccagatgcctccttcatcgatgacgaagcatttaagcggctgcagggcaagaggaaccgagggagagaagaaatcaactttgtggagatcaaaggtgatgaccagctcagtggggcccagcaatggatgactaagtcattgacagaagagaaaaccatgaagtcattcagcaaaaagaaaggtgagcagccaacaggccagcagcggcggaaacaccagatcacatatcttattcatcaggccaaggagcgggagctggaactgaagaacacctggtcagagaacaagctcagccgccgtcagacccaagccaaatatggattctagggctctggaactgattgctcccaggatctcctgccagcccagctggcctggcccccagcttcacctctgggaccccagctgctctaagcccaggatctctttccccaaggacccagccctcgcctctgcgagaatgaacatatttgatagatttttcttaacaagttagaaaattcagctcctttctgtcctggagctagcaaagacttgtgtgatgcctccgaaggggctctgagttctggggtgggagttttgctctctgtcaggtgtgataaaatgttgaaccctccccaccaccactttttttttttttaaaccagggatgtctgttgaaataaaacattcagtctgacaaaaaaaaaaaaaaaaaaaaaaaaaaaa

SEQ ID NO: 390 - protein, 491 aa, Homo sapiens
MSLVAYASSDESEPDEAEPEPEEEEAVAPTSGPALGGLFASLPAPKGPALLPPPPQMLAPAFPPPLLLPPPTGDPRLQPPPPLPFGLGGFPPPPGVSPAEAAGVGEGLGLGLPSPRGPGLNLPPPIGGAGPPLGLPKPKKRKEPVKIAAPELHKGDSDSEEDEPTKKKTILQGSSEGTGLSALLPQPKNLTVKETNRLLLPHAFSRKPSDGSPDTKPSRLASKTKTSSLAPVVGTTTTTPSPSAIKAAAKSAALQVTKQITQEEDDSDEEVAPENFFSLPEKAEPPGVEPYPYPIPTVPEELPPGTEPEPAFQDDAANAPLEFKMAAGSSGAPWMPKPGDDYSYNQFSTYGDANAAGAYYQDYYSGGYYPAQDPALVPTQEIAPDASFIDDEAFKRLQGKRNRGREEINFVEIKGDDQLSGAQQWMTKSLTEEKTMKSFSKKKGEQPTGQQRRKHQITYLIHQAKERELELKNTWSENKLSRRQTQAKYGF

SEQ ID NO: 391 - DNA, 2219 bp, Homo sapiens
gaggaggagtggggaccgggcggggggtggaggaagaggcctcgcgcagaggagggagcaattgaatttcaaacacaaacaactgcacgagcgcgcacccaccgcgccggagccttgccccgatccgcgcccgccccgtccgtgcggcgcgcgggcggagacgccgtggccgcgccggagctcgggccgggggccaccatcgaggcgggggccgcgcgagggccggagcggagcggcgccgccaccgccgcacgcgcaaacttgggctcgcgcttcccggcccggcgcggagcccggggcgcccggagccccgccatgtcgcgatccaaccggcagaaggagtacaaatgcggggacctggtgttcgccaagatgaagggctacccacactggccggcccggattgacgagatgcctgaggctgccgtgaaatcaacagccaacaaataccaagtcttttttttcgggacccacgagacggcattcctgggccccaaagacctcttcccttacgaggaatccaaggagaagtttggcaagcccaacaagaggaaagggttcagcgaggggctgtgggagatcgagaacaaccctactgtcaaggcttccggctatcagtcctcccagaaaaagagctgtgtggaagagcctgaaccagagcccgaagctgcagagggtgacggtgataagaaggggaatgcagagggcagcagcgacgaggaagggaagctggtcattgatgagccagccaaggagaagaacgagaaaggagcgttgaagaggagagcaggggacttgctggaggactctcctaaacgtcccaaggaggcagaaaaccctgaaggagaggagaaggaggcagccaccttggaggttgagaggccccttcctatggaggtggaaaagaatagcaccccctctgagcccggctctggccgggggcctccccaagaggaagaagaggaggaggatgaagaggaagaggctaccaaggaagatgctgaggccccaggcatcagagatcatgagagcctgtagccaccaatgtttcaagaggagcccccaccctgttcctgctgctgtctgggtgctactggggaaactggccatggcctgcaaactgggaacccctttcccaccccaacctgctctcctcttctactcacttttcccactccaagcccagcccatggagattgacctggatggggcaggccacctggctctcacctctaggtccccatactcctatgatctgagtcagagccatgtcttctccctggaatgagttgaggccactgtgttccttccgcttgggaggggcaatcctcaaatgcggggtgggggcagcacaggagggcggcctccttctgagctcctgtcccctgctacacctattatcccagctgcctagattcagggaaagtgggacagcttgtaggggaggggctcctttccataaatccttgatgattgacaacacccatttttccttttgccgaccccaagagttttgggagttgtagttaatcatcaagagaatttggggcttccaagttgttcgggccaaggacctgagacctgaagggttgactttacccatttgggtgggagtgttgagcatctgtccccctttagatctctgaagccacaaataggatgcttgggaagactcctagctgtcctttttcctctccacacagtgctcaaggccagcttatagtcatatatatcacccagacataaaggaaaagacacattttttaggaaatgtttttaataaaagaaaattacaaaaaaaaattttaaagacccctaaccctttgtgtgctctccattctgctccttccccatcgttgcccccatttctgaggtgcactgggaggctccccttctatttggggcttgatgactttctttttgtagctggggctttgatgttccttccagtgtcatttctcatccacataccctgacctggccccctcagtgttgtcaccagatctgatttgtaacccactgagaggacagagagaaataagtgccctctcccaccctcttcctactggtctctctatgcctctctacagtctcgtctcttttaccctggcccctctcccttgggctctgatgaaaaattgctgactgtagctttggaagtttagctctgagaaccgtagatgatttcagttctaggaaaataaaacccgttgattact

SEQ ID NO: 392 - DNA, 969 bp, Homo sapiens
agctttggggttgtccctggacttgtcttggttccagaacctgacgacccggcgacggcgacgtctcttttgactaaaagacagtgtccagtgctccagcctaggagtctacggggaccgcctcccgcgccgccaccatgcccaacttctctggcaactggaaaatcatccgatcggaaaacttcgaggaattgctcaaagtgctgggggtgaatgtgatgctgaggaagattgctgtggctgcagcgtccaagccagcagtggagatcaaacaggagggagacactttctacatcaaaacctccaccaccgtgcgcaccacagagattaacttcaaggttggggaggagtttgaggagcagactgtggatgggaggccctgtaagagcctggtgaaatgggagagtgagaataaaatggtctgtgagcagaagctcctgaagggagagggccccaagacctcgtggaccagagaactgaccaacgatggggaactgatcctgaccatgacggcggatgacgttgtgtgcaccagggtctacgtccgagagtgagtggccacaggtagaaccgcggccgaagcccaccactggccatgctcaccgccctgcttcactgccccctccgtcccaccccctccttctaggatagcgctccccttaccccagtcacttctgggggtcactgggatgcctcttgcagggtcttgctttctttgacctcttctctcctcccctacaccaacaaagaggaatggctgcaagagcccagatcacccattccgggttcactccccgcctccccaagtcagcagtcctagccccaaaccagcccagagcagggtctctctaaaggggacttgagggcctgagcaggaaagactggccctctagcttctaccctttgtccctgtagcctatacagtttagaatatttatttgttaattttattaaaatgctttaaaaaaa

SEQ ID NO: 393 - protein, 138 aa, Homo sapiens
MPNFSGNWKIIRSENFEELLKVLGVNVMLRKIAVAAASKPAVEIKQEGDTFYIKTSTTVRTTEINFKVGEEFEEQTVDGRPCKSLVKWESENKMVCEQKLLKGEGPKTSWTRELTNDGELILTMTADDVVCTRVYVRE

SEQ ID NO: 394 - DNA, 3275 bp, Homo sapiens
gcagtctccgccgcagtctcagctgcagctgcaggactgagccgtgcacccggaggagacccccggaggaggcgacaaacttcgcagtgccgcgacccaaccccagccctgggtagcctgcagcatggcccagctgttcctgcccctgctggcagccctggtcctggcccaggctcctgcagctttagcagatgttctggaaggagacagctcagaggaccgcgcttttcgcgtgcgcatcgcgggcgacgcgccactgcagggcgtgctcggcggcgccctcaccatcccttgccacgtccactacctgcggccaccgccgagccgccgggctgtgctgggctctccgcgggtcaagtggactttcctgtcccggggccgggaggcagaggtgctggtggcgcggggagtgcgcgtcaaggtgaacgaggcctaccggttccgcgtggcactgcctgcgtacccagcgtcgctcaccgacgtctccctggcgctgagcgagctgcgccccaacgactcgggtatctatcgctgtgaggtccagcacggcatcgatgacagcagcgacgctgtggaggtcaaggtcaaaggggtcgtctttctctaccgagagggctctgcccgctatgctttctccttttctggggcccaggaggcctgtgcccgcattggagcccacatcgccaccccggagcagctctatgccgcctaccttgggggctatgagcaatgtgatgctggctggctgtcggatcagaccgtgaggtatcccatccagaccccacgagaggcctgttacggagacatggatggcttccccggggtccggaactatggtgtggtggacccggatgacctctatgatgtgtactgttatgctgaagacctaaatggagaactgttcctgggtgaccctccagagaagctgacattggaggaagcacgggcgtactgccaggagcggggtgcagagattgccaccacgggccaactgtatgcagcctgggatggtggcctggaccactgcagcccagggtggctagctgatggcagtgtgcgctaccccatcgtcacacccagccagcgctgtggtgggggcttgcctggtgtcaagactctcttcctcttccccaaccagactggcttccccaataagcacagccgcttcaacgtctactgcttccgagactcggcccagccttctgccatccctgaggcctccaacccagcctccaacccagcctctgatggactagaggctatcgtcacagtgacagagaccctggaggaactgcagctgcctcaggaagccacagagagtgaatcccgtggggccatctactccatccccatcatggaggacggaggaggtggaagctccactccagaagacccagcagaggcccctaggacgctcctagaatttgaaacacaatccatggtaccgcccacggggttctcagaagaggaaggtaaggcattggaggaagaagagaaatatgaagatgaagaagagaaagaggaggaagaagaagaggaggaggtggaggatgaggctctgtgggcatggcccagcgagctcagcagcccgggccctgaggcctctctccccactgagccagcagcccaggagaagtcactctcccaggcgccagcaagggcagtcctgcagcctggtgcatcaccacttcctgatggagagtcagaagcttccaggcctccaagggtccatggaccacctactgagactctgcccactcccagggagaggaacctagcatccccatcaccttccactctggttgaggcaagagaggtgggggaggcaactggtggtcctgagctatctggggtccctcgaggagagagcgaggagacaggaagctccgagggtgccccttccctgcttccagccacacgggcccctgagggtaccagggagctggaggccccctctgaagataattctggaagaactgccccagcagggacctcagtgcaggcccagccagtgctgcccactgacagcgccagccgaggtggagtggccgtggtccccgcatcaggtgactgtgtccccagcccctgccacaatggtgggacatgcttggaggaggaggaaggggtccgctgcctatgtctgcctggctatgggggggacctgtgcgatgttggcctccgcttctgcaaccccggctgggacgccttccagggcgcctgctacaagcacttttccacacgaaggagctgggaggaggcagagacccagtgccggatgtacggcgcgcatctggccagcatcagcacacccgaggaacaggacttcatcaacaaccggtaccgggagtaccagtggatcggactcaacgacaggaccatcgaaggcgacttcttgtggtcggatggcgtccccctgctctatgagaactggaaccctgggcagcctgacagctacttcctgtctggagagaactgcgtggtcatggtgtggcatgatcagggacaatggagtgacgtgccctgcaactaccacctgtcctacacctgcaagatggggctggtgtcctgtgggccgccaccggagctgcccctggctcaagtgttcggccgcccacggctgcgctatgaggtggacactgtgcttcgctaccggtgccgggaaggactggcccagcgcaatctgccgctgatccgatgccaagagaacggtcgttgggaggccccccagatctcctgtgtgcccagaagacctgcccgagctctgcacccagaggaggacccagaaggacgtcaggggaggctactgggacgctggaaggcgctgttgatccccccttccagccccatgccaggtccctagggggcaaggccttgaacactgccggccacagcactgccctgtcacccaaattttccctcacaccctgcgctcccgccaccacaggaagtgacaacatgacgaggggtggtgctggagtccaggtgacagttcctgaaggggcttctgggaaatacctaggaggctccagcccagcccaggccctctccccctaccctgggcaccagatcttccatcagggccggagtaaatccctaagtgcctcaactgccctctccctggcagccatcttgtcccctctattcctctagggagcactgtgcccactctttctgggttttccaagggaatgggcttgcaggatggagtgtctgtaaaatcaacaggaaataaaactgtgtatgagcccaggcaaaaaaaaaaaaaaaaaaaaaaa

SEQ ID NO: 395 - protein, 911 aa, Homo sapiens
MAQLFLPLLAALVLAQAPAALADVLEGDSSEDRAFRVRIAGDAPLQGVLGGALTIPCHVHYLRPPPSRRAVLGSPRVKWTFLSRGREAEVLVARGVRVKVNEAYRFRVALPAYPASLTDVSLALSELRPNDSGIYRCEVQHGIDDSSDAVEVKVKGVVFLYREGSARYAFSFSGAQEACARIGAHIATPEQLYAAYLGGYEQCDAGWLSDQTVRYPIQTPREACYGDMDGFPGVRNYGVVDPDDLYDVYCYAEDLNGELFLGDPPEKLTLEEARAYCQERGAEIATTGQLYAAWDGGLDHCSPGWLADGSVRYPIVTPSQRCGGGLPGVKTLFLFPNQTGFPNKHSRFNVYCFRDSAQPSAIPEASNPASNPASDGLEAIVTVTETLEELQLPQEATESESRGAIYSIPIMEDGGGGSSTPEDPAEAPRTLLEFETQSMVPPTGFSEEEGKALEEEEKYEDEEEKEEEEEEEEVEDEALWAWPSELSSPGPEASLPTEPAAQEKSLSQAPARAVLQPGASPLPDGESEASRPPRVHGPPTETLPTPRERNLASPSPSTLVEAREVGEATGGPELSGVPRGESEETGSSEGAPSLLPATRAPEGTRELEAPSEDNSGRTAPAGTSVQAQPVLPTDSASRGGVAVVPASGDCVPSPCHNGGTCLEEEEGVRCLCLPGYGGDLCDVGLRFCNPGWDAFQGACYKHFSTRRSWEEAETQCRMYGAHLASISTPEEQDFINNRYREYQWIGLNDRTIEGDFLWSDGVPLLYENWNPGQPDSYFLSGENCVVMVWHDQGQWSDVPCNYHLSYTCKMGLVSCGPPPELPLAQVFGRPRLRYEVDTVLRYRCREGLAQRNLPLIRCQENGRWEAPQISCVPRRPARALHPEEDPEGRQGRLLGRWKALLIPPSSPMPGP

SEQ ID NO: 396 - DNA, 879 bp, Homo sapiens
ctcctcacagaagcctggagctgggcatccaagaagaagcagcctcatttgttttctggtgtcatcgtaggtggccacctatggcttttgggaatgtaaaaagggcagctctctggcatgttcctgactgaggatctcataacatttaacttgaggaacttcctccttttccagctttgggagtcaagcttctcacctggggcgggtgggttctgcaccaccctcccaccctccttcctccgtgtggacgatagagccacatccagcaccacggacagctcccgggcgccttcatctcctcgtcctccaggcagcacaagccattgtggaatctccaccaggtgtacagaacggtgcctctgcgtcctgccactcaggacctctcaagtccccgatgtgatggctcctcagcatgatcaggagaaattccatgatcttgcttattcctgtcttgggaagtccttctccatgtctaaccaagatctatatggctatagcaccagctctttggctcttggcttggcatggctaagttgggagaccaaaaagaagaatgtacttcatctggttgggctggattccctctgataagccttcccagttgactgaaagatgaggctaggctctagcaagttgaagtcaaaccagctccttcaagaagctttgagcagaatgaagtggggaggacccagcttccagcccaggaagcccactgtacctggagccatctgggataagactttgacccatgactcccatatccacagcctgtccatcctagcccatcccagtttatcctgtatcatttgagctgggattcccacatcctctgagttggaagtcccatctcaagtcttcaataaagactcttgaatattg

SEQ ID NO: 397 - protein, 156 aa, Homo sapiens
MFLTEDLITFNLRNFLLFQLWESSFSPGAGGFCTTLPPSFLRVDDRATSSTTDSSRAPSSPRPPGSTSHCGISTRCTERCLCVLPLRTSQVPDVMAPQHDQEKFHDLAYSCLGKSFSMSNQDLYGYSTSSLALGLAWLSWETKKKNVLHLVGLDSL

SEQ ID NO: 398 - DNA, 2080 bp, Homo sapiens
ttgcgtagggggcgggactaaggctgtcaattggtctgtttttgtgccgatcaatgagatgggtgcggtgattggcgactaccttgagagtagcgggttgaggtgtaagccctgaggaggcagcgttttctgggcttctgtctggttctctctctccagaaggttctgccggttcccccagctctgggtacccggctctgcatcgcgtcgccatgatgggccatcgtccagtgctcgtgctcagccagaacacaaagcgtgaatccggaagaaaagttcaatctggaaacatcaatgctgccaagactattgcagatatcatccgaacatgtttgggacccaagtccatgatgaagatgcttttggacccaatgggaggcattgtgatgaccaatgatggcaatgccattcttcgagagattcaagtccagcatccagcggccaagtccatgatcgaaattagccggacccaggatgaagaggttggagatgggaccacatcagtaattattcttgcaggggaaatgctgtctgtagctgagcacttcctggagcagcagatgcacccaacagtggtgatcagtgcttaccgcaaggcattggatgatatgatcagcaccctaaagaaaataagtatcccagtcgacatcagtgacagtgatatgatgctgaacatcatcaacagctctattactaccaaagccatcagtcggtggtcatctttggcttgcaacattgccctggatgctgtcaagatggtacagtttgaggagaatggtcggaaagagattgacataaaaaaatatgcaagagtggaaaagatacctggaggcatcattgaagactcctgtgtcttgcgtggagtcatgattaacaaggatgtgacccatccacgtatgcggcgctatatcaagaaccctcgcattgtgctgctggattcttctctggaatacaagaaaggagaaagccagactgacattgagattacacgagaggaggacttcacccgaattctccagatggaggaagagtacatccagcagctctgtgaggacattatccaactgaagcccgatgtggtcatcactgaaaagggcatctcagatttagctcagcactaccttatgcgggccaatatcacagccatccgcagagtccggaagacagacaataatcgcattgctagagcctgtggggcccggatagtcagccgaccagaggaactgagagaagatgatgttggaacaggagcaggcctgttggaaatcaagaaaattggagatgaatactttactttcatcactgactgcaaagaccccaaggcctgcaccattctcctccggggggctagcaaagagattctctcggaagtagaacgcaacctccaggatgccatgcaagtgtgtcgcaatgttctcctggaccctcagctggtgccagggggtggggcctccgagatggctgtggcccatgccttgacagaaaaatccaaggccatgactggtgtggaacaatggccatacagggctgttgcccaggccctagaggtcattcctcgtaccctgatccagaactgtggggccagcaccatccgtctacttacctcccttcgggccaagcacacccaggagaactgtgagacctggggtgtaaatggtgagacgggtactttggtggacatgaaggaactgggcatatgggagccattggctgtgaagctgcagacttataagacagcagtggagacggcagttctgctactgcgaattgatgacatcgtttcaggccacaaaaagaaaggcgatgaccagagccggcaaggcggggctcctgatgctggccaggagtgagtgctaggcaaggctacttcaatgcacagaaccagcagagtctccccttttcctgagccagagtgccaggaacactgtggacgtctttgttcagaagggatcaggttggggggcagcccccagtccctttctgtcccagctcagttttccaaaagacactgacatgtaattcttctctattgtaaggtttccatttagtttgcttccgatgattaaatctaagtcatttg

SEQ ID NO: 399 - protein, 544 aa, Homo sapiens
MGHRPVLVLSQNTKRESGRKVQSGNINAAKTIADIIRTCLGPKSMMKMLLDPMGGIVMTNDGNAILREIQVQHPAAKSMIEISRTQDEEVGDGTTSVIILAGEMLSVAEHFLEQQMHPTVVISAYRKALDDMISTLKKISIPVDISDSDMMLNIINSSITTKAISRWSSLACNIALDAVKMVQFEENGRKEIDIKKYARVEKIPGGIIEDSCVLRGVMINKDVTHPRMRRYIKNPRIVLLDSSLEYKKGESQTDIEITREEDFTRILQMEEEYIQQLCEDIIQLKPDVVITEKGISDLAQHYLMRANITAIRRVRKTDNNRIARACGARIVSRPEELREDDVGTGAGLLEIKKIGDEYFTFITDCKDPKACTILLRGASKEILSEVERNLQDAMQVCRNVLLDPQLVPGGGASEMAVAHALTEKSKAMTGVEQWPYRAVAQALEVIPRTLIQNCGASTIRLLTSLRAKHTQENCETWGVNGETGTLVDMKELGIWEPLAVKLQTYKTAVETAVLLLRIDDIVSGHKKKGDDQSRQGGAPDAGQE

SEQ ID NO: 400 - DNA, 1584 bp, Homo sapiens
gaattgcggccgtatgcgcggctctgtggagtgcacctggggttgggggcactgtgcccccagccccctgctcctttggactctacttctgtttgcagccccatttggcctgctgggggagaagacccgccaggtgtctctggaggtcatccctaactggctgggccccctgcagaacctgcttcatatacgggcagtgggcaccaattccacactgcactatgtgtggagcagcctggggcctctggcagtggtaatggtggccaccaacaccccccacagcaccctgagcgtcaactggagcctcctgctatcccctgagcccgatgggggcctgatggtgctccctaaggacagcattcagttttcttctgcccttgtttttaccaggctgcttgagtttgacagcaccaacgtgtccgatacggcagcaaagcctttgggaagaccatatcctccatactccttggccgatttctcttggaacaacatcactgattcattggatcctgccaccctgagtgccacatttcaaggccaccccatgaacgaccctaccaggacttttgccaatggcagcctggccttcagggtccaggccttttccaggtccagccgaccagcccaaccccctcgcctcctgcacacagcagacacctgtcagctagaggtggccctgattggagcctctccccggggaaaccgttccctgtttgggctggaggtagccacattgggccagggccctgactgcccctcaatgcaggagcagcactccatcgacgatgaatatgcaccggccgtcttccagttggaccagctactgtggggctccctcccatcaggctttgcacagtggcgaccagtggcttactcccagaagccggggggccgagaatcagccctgccctgccaagcttcccctcttcatcctgccttagcatactctcttccccagtcacccattgtccgagccttctttgggtcccagaataacttctgtgccttcaatctgacgttcggggcttccacaggccctggctattgggaccaacactacctcagctggtcgatgctcctgggtgtgggcttccctccagtggacggcttgtccccactagtcctgggcatcatggcagtggccctgggtgccccagggctcatgctgctagggggcggcttggttctgctgctgcaccacaagaagtactcagagtaccagtccataaattaaggcccgctctctggagggaaggacattactgaacctgtcttgctgtgcctcgaaactctggaggttggagcatcaagttccagccggccccttcactcccccatcttgcttttctgtggaacctcagaggccagcctcgacttcctggagacccccaggtggggcttccttcatactttgttgggggactttggaggcgggcaggggacagggctattgataaggtccccttggtgttgccttcttgcatctccacacatttcccttggatgggacttgcaggcctaaatgagaggcattctgactggttggctgccctggaaggcaagaaaatagatttattttttttc

SEQ ID NO: 401 - protein, 406 aa, Homo sapiens
MRGSVECTWGWGHCAPSPLLLWTLLLFAAPFGLLGEKTRQVSLEVIPNWLGPLQNLLHIRAVGTNSTLHYVWSSLGPLAVVMVATNTPHSTLSVNWSLLLSPEPDGGLMVLPKDSIQFSSALVFTRLLEFDSTNVSDTAAKPLGRPYPPYSLADFSWNNITDSLDPATLSATFQGHPMNDPTRTFANGSLAFRVQAFSRSSRPAQPPRLLHTADTCQLEVALIGASPRGNRSLFGLEVATLGQGPDCPSMQEQHSIDDEYAPAVFQLDQLLWGSLPSGFAQWRPVAYSQKPGGRESALPCQASPLHPALAYSLPQSPIVRAFFGSQNNFCAFNLTFGASTGPGYWDQHYLSWSMLLGVGFPPVDGLSPLVLGIMAVALGAPGLMLLGGGLVLLLHHKKYSEYQSIN

SEQ ID NO: 402 - DNA, 2226 bp, Homo sapiens
ggcagcatggcgtctttccggcttctccaaacccttgcgaaaaactttattggcaaagctatcagagaacggacagtgtacccactgaggcggccaaagcttaactggatcagggcaggatgacatgaccttgtggtagatcccagaactgaggccccaggatgacagaacaggagaccctggccctactggaagtgaagaggtctgattccccagagaagagctcaccccaggccttggttcccaatggccggcagccagaaggggaaggtggggccgaatccccgggagctgagtccctcagagtggggtcttcagctggatctcccacagccatagagggggctgaggatggtctagacagcacagtaagtgaggctgccaccttgccctgggggactggccctcagcccagtgctccgttcccggatccccctggctggcgggacattgaaccagagccccctgagtcagaaccacttaccaagctagaggagctgcccgaagacgatgccaacctgctgcctgagaaagcggcccgtgccttcgtgcctattgacctacagtgcattgagcggcagccccaagaagaccttatcgtgcgctgtgaggcaggcgagggcgagtgccgaaccttcatgcccccccgggtcacccaccccgaccccactgagcgcaagtgggctgaggcagtggtgaggccgcctggctgttcctgtgggggctgcgggagctgtggagaccgtgagtggctaagggctgtggcctccgtgggagccgcactcattctcttcccttgcctactatacggggcatatgccttcctgccgtttgatgtcccacggctgcccaccatgagttcccgcctgatctacacactgcgctgcggggtctttgccaccttccccattgtgctggggatcctggtgtacgggctgagcctgttatgcttttctgcccttcggccctttggggagccacggcgggaggtggagatccaccggcgatatgtggcccagtcggtccagctctttattctctacttcttcaacctggccgtgctttccacttacctgccccaggataccctcaaactgctccctctgctcactggtctctttgccgtctcccggctgatctactggctgacctttgccgtgggccgctccttccgaggcttcggctacggcctgacgtttctgccactgctgtcgatgctgatgtggaacctctactacatgttcgtggtggagccggagcgcatgctcactgccaccgagagccgcctggactacccggaccacgcccgctcggcctccgactacaggccccgcccctggggctgagcctctccgccctcgccctcggagtagggggtagcggcttgggtctgacacatctttgaaccttgtggccaggcctggacttcgcccccaggcctaggaccgcggtgggtggaaccctgctactgccccaacagggactccaatcaatcggagttctccccttgccggagctgcccttcacctttggggcccgagacagtcataagggatggacttagttttcttgcagggaaaaaggtggacagccgtgtttcttaaggatgctgagggcatggggccaggaccaggggagaggcacagctccttcctgagcagcctctcaccactgccacaaggctccctaatgctggtctctgctccactccccggcttcccgtgaggcaggaggcagagccacagccaaggccctgaccacttctgtgccagttgtctaagcagagcgcctcagggacgctggaaatgccttaaggatagaggctgggcatcacatcaaatgggactgtggtgtttggtgaaaaccttcctgaggatctggattcaggaccctccatgactggcctatttactgtttacagctggccagtgcagagctgctgctcttttacctttttaggcccctgtaacttcccacctttaaactgcccagaaggcatgcctctcccacaggaagaggggagcagacagggaaatctgcctaccaagaggggtgtgtgtgtctttgtgcccacacgtggtggctggggagtgcctggatggtgcggtggttgatgttaacctagtgtgtgtgtgtgtgtgtgtgtgtgtgtgtgtaacaataaattactaccagtcaaaaaaaaaaaaaaaaaaaaaaaaaaaaaaaaaaaaaaaaaaaaaaaaa

SEQ ID NO: 403 - protein, 394 aa, Homo sapiens
MTEQETLALLEVKRSDSPEKSSPQALVPNGRQPEGEGGAESPGAESLRVGSSAGSPTAIEGAEDGLDSTVSEAATLPWGTGPQPSAPFPDPPGWRDIEPEPPESEPLTKLEELPEDDANLLPEKAARAFVPIDLQCIERQPQEDLIVRCEAGEGECRTFMPPRVTHPDPTERKWAEAVVRPPGCSCGGCGSCGDREWLRAVASVGAALILFPCLLYGAYAFLPFDVPRLPTMSSRLIYTLRCGVFATFPIVLGILVYGLSLLCFSALRPFGEPRREVEIHRRYVAQSVQLFILYFFNLAVLSTYLPQDTLKLLPLLTGLFAVSRLIYWLTFAVGRSFRGFGYGLTFLPLLSMLMWNLYYMFVVEPERMLTATESRLDYPDHARSASDYRPRPWG

SEQ ID NO: 404 - DNA, 2029 bp, Homo sapiens
actcagtgttcgcgggagccgcacctacaccagccaacccagatcccgaggtccgacagcgcccggcccagatccccacgcctgccaggagcaagccgagagccagccggccggcgcactccgactccgagcagtctctgtccttcgacccgagccccgcgccctttccgggacccctgccccgcgggcagcgctgccaacctgccggccatggagaccccgtcccagcggcgcgccacccgcagcggggcgcaggccagctccactccgctgtcgcccacccgcatcacccggctgcaggagaaggaggacctgcaggagctcaatgatcgcttggcggtctacatcgaccgtgtgcgctcgctggaaacggagaacgcagggctgcgccttcgcatcaccgagtctgaagaggtggtcagccgcgaggtgtccggcatcaaggccgcctacgaggccgagctcggggatgcccgcaagacccttgactcagtagccaaggagcgcgcccgcctgcagctggagctgagcaaagtgcgtgaggagtttaaggagctgaaagcgcgcaataccaagaaggagggtgacctgatagctgctcaggctcggctgaaggacctggaggctctgctgaactccaaggaggccgcactgagcactgctctcagtgagaagcgcacgctggagggcgagctgcatgatctgcggggccaggtggccaagcttgaggcagccctaggtgaggccaagaagcaacttcaggatgagatgctgcggcgggtggatgctgagaacaggctgcagaccatgaaggaggaactggacttccagaagaacatctacagtgaggagctgcgtgagaccaagcgccgtcatgagacccgactggtggagattgacaatgggaagcagcgtgagtttgagagccggctggcggatgcgctgcaggaactgcgggcccagcatgaggaccaggtggagcagtataagaaggagctggagaagacttattctgccaagctggacaatgccaggcagtctgctgagaggaacagcaacctggtgggggctgcccacgaggagctgcagcagtcgcgcatccgcatcgacagcctctctgcccagctcagccagctccagaagcagctggcagccaaggaggcgaagcttcgagacctggaggactcactggcccgtgagcgggacaccagccggcggctgctggcggaaaaggagcgggagatggccgagatgcgggcaaggatgcagcagcagctggacgagtaccaggagcttctggacatcaagctggccctggacatggagatccacgcctaccgcaagctcttggagggcgaggaggagaggctacgcctgtcccccagccctacctcgcagcgcagccgtggccgtgcttcctctcactcatcccagacacagggtgggggcagcgtcaccaaaaagcgcaaactggagtccactgagagccgcagcagcttctcacagcacgcacgcactagcgggcgcgtggccgtggaggaggtggatgaggagggcaagtttgtccggctgcgcaacaagtccaatgaggaccagtccatgggcaattggcagatcaagcgccagaatggagatgatcccttgctgacttaccggttcccaccaaagttcaccctgaaggctgggcaggtggtgacgatctgggctgcaggagctggggccacccacagcccccctaccgacctggtgtggaaggcacagaacacctggggctgcgggaacagcctgcgtacggctctcatcaactccactggggaagaagtggccatgcgcaagctggtgcgctcagtgactgtggttgaggacgacgaggatgaggatggagatgacctgctccatcaccaccatgtgagtggtagccgccgctgaggccgagcctgcactggggccacccagccaggcctgggggcagcctctccccagcctccccgtgccaaaaatcttttcattaaagaatgtttggaacttt

SEQ ID NO: 405 - protein, 572 aa, Homo sapiens
METPSQRRATRSGAQASSTPLSPTRITRLQEKEDLQELNDRLAVYIDRVRSLETENAGLRLRITESEEVVSREVSGIKAAYEAELGDARKTLDSVAKERARLQLELSKVREEFKELKARNTKKEGDLIAAQARLKDLEALLNSKEAALSTALSEKRTLEGELHDLRGQVAKLEAALGEAKKQLQDEMLRRVDAENRLQTMKEELDFQKNIYSEELRETKRRHETRLVEIDNGKQREFESRLADALQELRAQHEDQVEQYKKELEKTYSAKLDNARQSAERNSNLVGAAHEELQQSRIRIDSLSAQLSQLQKQLAAKEAKLRDLEDSLARERDTSRRLLAEKEREMAEMRARMQQQLDEYQELLDIKLALDMEIHAYRKLLEGEEERLRLSPSPTSQRSRGRASSHSSQTQGGGSVTKKRKLESTESRSSFSQHARTSGRVAVEEVDEEGKFVRLRNKSNEDQSMGNWQIKRQNGDDPLLTYRFPPKFTLKAGQVVTIWAAGAGATHSPPTDLVWKAQNTWGCGNSLRTALINSTGEEVAMRKLVRSVTVVEDDEDEDGDDLLHHHHVSGSRR

SEQ ID NO: 406 - DNA, 3072 bp, Homo sapiens
gcgcagacgccccagccccccaccgcccccaaaggggcgagcgacgccaagctctgcgctctctacaaagaggccgagctgcgcctgaagggcagcagcaacaccacggagtgtgttcccgtgcccacctccgagcacgtggccgagatcgtgggcaggcaaggctgcaagattaaggccttgagggccaagaccaacacctacatcaagacaccggtgaggggcgaggaaccagtgttcatggtgacagggcgacgggaggacgtggccacagcccggcgggaaatcatctcagcagcggagcacttctccatgatccgtgcctcccgcaacaagtcaggcgccgcctttggtgtggctcctgctctgcccggccaggtgaccatccgtgtgcgggtgccctaccgcgtggtggggctggtggtgggccccaaaggggcaaccatcaagcgcatccagcagcaaaccaacacatacattatcacaccaagccgtgaccgcgaccccgtgttcgagatcacgggtgccccaggcaacgtggagcgtgcgcgcgaggagatcgagacgcacatcgcggtgcgcactggcaagatcctcgagtacaacaatgaaaacgacttcctggcggggagccccgacgcagcaatcgatagccgctactccgacgcctggcgggtgcaccagcccggctgcaagcccctctccaccttccggcagaacagcctgggctgcatcggcgagtgcggagtggactctggctttgaggccccacgcctgggtgagcagggcggggactttggctacggcgggtacctctttccgggctatggcgtgggcaagcaggatgtgtactacggcgtggccgagactagccccccgctgtgggcgggccaggagaacgccacgcccacctccgtgctcttctcctctgcctcctcctcctcctcctcttccgccaaggcccgcgctgggcccccgggcgcacaccgctcccctgccacttccgcgggacccgagctggccggactcccgaggcgccccccgggagagccgctccagggcttctctaaacttggtgggggcggcctgcggagccccggcggcgggcgggattgcatggtctgctttgagagcgaagtgactgccgcccttgtgccctgcggacacaacctgttctgcatggagtgtgcagtacgcatctgcgagaggacggacccagagtgtcccgtctgccacatcacagccacgcaagccatccgaatattctcctaagccccgtgccccatgcctccggggcccactccactgggcccaccctggacctgttttccactaaagccttttggaaagcggtgatttgaggggcaaggtgcttagagatactcgctcgctggggaaggggggagggaggcagtggtggctggagggtgcgccactttcagagcctctggtcaccctgtcctggaaagattgggagggggccagactgaaaattttactagagttacaactctgatacctcaacacacccttaaatctggaagcagctaagagaaacttttgttttgccagaggtggccactaaggcattctgacgccctctgcccacctcccccgctgtgtgtcactccaccccttcttccgaggagggggtgggtaaaagggagagggagaattaccacctgtatctagaggtgctctttgcaatccctaagccctctggtcctgacctccgacctcccagctctgtcttgttccttgtctttgtctttcttcccttccccctgcccctgcccctaccagcccagctttggggacaccatccttctggggagaagtagggggaggaatatttggatggtccctccattcctcttcaggcatctggaggccctctcccccactcctccaaagaaacatctcaaattattgatggaatgtatccccattctcagtgaaaatgtgaggaggggactaatactggggtaaagggtcaaacccccaccttcatcactatgggcattatatttagggagtagttcttgggctggattttctggttgtggaagtgggggcgccagagtagtgtgtctgctatttaaaggagcaggaaagggcgtgaggcaggaggagagactggtggagggaagagctgctcctcccatgcagtgcccgactccctgcacccctctcaacctgacctgaacctttattgaatccttattagcttgaatccttattagcttgaatcctccatgcaaatcatggagtctgtgtcccacctgatgtggttgaggagaagccaggtcttcaaagaggggtcagcctggggcaaagcaggactggggggaggtgggcagcagggcctattctgagaatcacatattgttacaggccttgcaccccctttgctgcttccctcctgctcatttggggctgccaccagctctccaccctcctggttccgctggccgggccaagagaggatggagggatgggagtcccaggagatccttgtaaatagtggggtgggactgttctgagtgatcacccgagcacttaaagctccagagtcccattcttcctggatggagcaggtggaggtgcagaggggatttcctcctctccttcctcctgtcgagaattaacacctctccacagccttcccctccagaacaccagccagggaggggtggggaaggaggtcacagccaagaaaactgccctgtgacgacttccctccttcccgcctatgtgagccatcctgagatgtctgtacaatagaaaccaaaccaaatgggcaccctcggttgccggggggcaggtggggaggggggtgggaagaagggatgtctgtctgtcgtccccctccccctctccactctttacccacaaaggcagaagactgttacactagggggctcagcaaattcaatcccacccttaccaattgagccaaacctagaaacaaacacaaaacacgaatagtgagagacaaaatagaggagagaaagagagcatgagagggagcgagacaggcgaccaacacagaggagagaaaacaaaaatagc

SEQ ID NO: 407 - protein, 323 aa, Homo sapiens
LRLKGSSNTTECVPVPTSEHVAEIVGRQGCKIKALRAKTNTYIKTPVRGEEPVFMVTGRREDVATARREIISAAEHFSMIRASRNKSGAAFGVAPALPGQVTIRVRVPYRVVGLVVGPKGATIKRIQQQTNTYIITPSRDRDPVFEITGAPGNVERAREEIETHIAVRTGKILEYNNENDFLAGSPDAAIDSRYSDAWRVHQPGCKPLSTFRQNSLGCIGECGVDSGFEAPRLGEQGGDFGYGGYLFPGYGVGKQDVYYGVAETSPPLWAGQENATPTSVLFSSASSSSSSSAKARAGPPGAHRSPATSAGPELAGLPRRPPG

SEQ ID NO: 408 - DNA, 3527 bp, Homo sapiens
ggaggagccgggcgggctggcgggcggccgggtggcggcggcggcatggcggagccgagcggggccgagacgaggccccccattcgggtcaccgtcaagacccccaaggacaaggaggaaattgtgatctgcgatcgagcctcggtcaaggagttcaaagaggaaatctcccggaggtttaaggctcagcaggatcagctggtcctgatcttcgcaggcaagatcctcaaggatggggacacactgaaccagcacggaatcaaggacgggctcactgtccatctggtcatcaagacccctcagaaggctcaagatccagctgctgccactgcttcttccccctccacacctgaccctgcctcagcaccctccaccacgcctgcttcacccgccacccctgcccagccctccacctctggcagtgcctcttcagatgctggcagtggaagccggaggagcagtggtggggggccctctccgggggctggggagggatcccccagtgctactgcgtccatactctctggctttgggggcatcctggggctgggcagcctaggcctgggctctgccaacttcatggagctgcagcagcagatgcagcggcagctgatgtccaatcctgagatgctgtcacagatcatggagaaccccctggtccaggatatgatgtctaaccctgatctgatgcgtcacatgattatggccaacccccagatgcagcagttgatggagcggaaccctgagatcagccacatgctcaataaccctgaactcatgaggcagacaatggagcttgctcggaatccagccatgatgcaagagatgatgcggaaccaggaccgggccctgagcaaccttgagagcatccctggagggtataatgccctccgccgcatgtacacggacatccaggagcccatgttcagtgctgcccgggaacagtttggcaacaatcccttctcttccctggccgggaactccgacagctcatcctcccagcctctgcggactgagaatcgagagcccctccctaacccctggagcccctcgccccccacctcccaggcccccgggtccggtggggagggcaccggaggatcggggaccagccaggtgcacccgacagtctcgaacccctttgggatcaatgcggctagcctggggtcagggatgttcaatagcccagaaatgcaagccctcctccagcagatctctgagaacccccagctgatgcagaatgtgatctcagcaccctacatgcgcagcatgatgcagacgcttgcccagaaccccgactttgctgctcagatgatggtgaatgtgccgctcttcgcggggaacccccaactgcaggagcagctccgcctgcagctcccagtcttcctgcagcagatgcagaacccagagtcactctccatccttaccaatccccgagccatgcaggcattgctgcagatccagcagggactacagaccttgcagaccgaggcccctgggctggtacccagccttggctcctttgggatatcccggaccccagcaccctcagcaggcagcaacgcagggtctacgcccgaggcccccacttcctcaccagccacgccagccacatcttctccaacaggggcttccagcgcccagcagcaactcatgcagcagatgatccagcttttggctggaagtggaaactcacaggtgcagacgccagaagtgagatttcagcagcagctggagcagctcaactccatgggcttcatcaatcgtgaggctaacctgcaggccctgattgccacaggaggggacatcaacgcagctatcgagagactgctgggctcccagctctcctaatccctcggcccatgcctcctgcctctcccctccctcgatgtcagcattcggttcttctgtcaatccttaccctctgcagcttgtcctcccttccgtcttctccctcatcctttccaaacagcagggtgactttagaggcatgggctccaaccccttagctctgtctgagaattatggttttactgctacgtctctaacagactcttctctcctggtctccttgagcagtgctacttaaacagttttcacagtttcattgattgactctacctccttgccccacaccacttttgcaatctttaaactttcagtggctgtgcagagtcgagggaggaaccagctctctggtttactggaacatagtcttccatctataccactagggttttgtcttatgtttacttttggtaactctcttccttctttttctccctaccccccaacccctagcccaaccaatgctagaatttcttgctctgaaggaggagcaggtgaaacaggtggtaattttccttctcggcccctattctggttcattcagcactttttggtgggaactgttggaaattccagggtaaggaggaagatgcctgttctccctgtctgaagagggagatgagacagctctctggacaggaattaacaaacgctggagcagcccagaggaaattcgtgtgaaagaggagggaatgagattattcggaggaagggaatgggggagacagcctgagtaaaaggcttggaagttggaattaacagtggggagcagaagcactcatagctcttttaggcagaagaatccaggcccgagctggcagaagagacttagagatgctaatggaatttaaactgaaaaaaggagcccaatgaagctaagcgccacgccccacaaggggtcatattggctttagttcctcaagcatatgtgcttatatgcacacacacacacatttccatggacccaggtcttgcttgtgtccccaggcaccagtagtttgagcccccctcaaaagacatgaagggggttggggtctgtgtgagtagtggggaggtgcatgtgtatccacatgtgtgcatacactcttaagttgggtgggaagtggattccttgttggtttctggttcagagtgctctcccaccaccagagacaagtgggtaaaaaggtcagtccattgcaggaatatatatccgggagagctaggtcccttggggctctggatgctgggtaacccagaggtaatgtgggtaccctttctgaagctgtcagggctgtgactagcacccttatcacccctcactgccttgtgggaatagtagagggtttttttcctccagagcccctggcctttcagttcttaactatttccctccaggccagaaagttttctttgaggaaggagaggagagggtggcaatgatgcctttgatctggaattggacatttctctgtcagagcacagaggaggctcatatcacctcttccctctcctacttggcccagctgcttggaggaccgaccccatggctgagaatatgacggcaagaggaacagagtttgctccaagtgggaaagggtcccaagcagtccagagaagatgtctgtgtggctttccctccctgcctcccccagctcccacactggcctttgtaaataaatggcgtggtctttgttgtg

SEQ ID NO: 409 - DNA, 1093 bp, Homo sapiens
ggctctcttcctgtctttgtggctccggaaaggcgtttgggatgccaacgatgaggctgctgtcatttgtggtgttggctctatttgctgtcactcaagcagaggaaggagccaggcttttggcttccaaatcactgctgaacagatacgccgtggagggacgagacctgaccttgcagtacaacatctacaatgttggctcaagtgctgcattagacgtggaactatctgatgattccttccctccagaagactttggcattgtgtctggaatgctcaatgtcaaatgggaccggattgcccctgctagcaatgtctcccacactgtggtcctgcgccctctcaaggctggttatttcaacttcacctcggcaacaattacttacctggcccaggaggatgggcccgttgtgattggctctaccagtgcacctggacagggaggaatcctggctcagcgggagtttgacaggcgattctcccctcattttctggactgggcagcctttggggtcatgacccttccctccatcggcatccccctgctattgtggtactccagcaagaggaaatatgacactcccaaaacgaagaagaactgattggggcttccacagccctcctctcccaagaaatccaggctcctctcccaagaaatccaggtgctttccagactccaaagggtatcttaaatgcaatctcttctctcttagcccttggccactttctcctggatcctgccctgctctcagccatagtgaaggaccagccctaggagtctgcgagagcctccttggttccatcgtgaagccataaacaggaatgcctttggcaatagccttgagcctagagggccctctgatgccccactgaggtgctgttggtttattgctggcaacgtgaattctctcaggggtctaggaggggcattttggagactgcctgacaccacccctatcccctgcctccccctctcagaagagggtggaagatgaaatgaaagctatgggactcttggaggatacccagtgtctattctgggttagagaagtgcttactaaggggttttctaataaaaacaaatgccaattgc

SEQ ID NO: 410 - protein, 183 aa, Homo sapiens
MRLLSFVVLALFAVTQAEEGARLLASKSLLNRYAVEGRDLTLQYNIYNVGSSAALDVELSDDSFPPEDFGIVSGMLNVKWDRIAPASNVSHTVVLRPLKAGYFNFTSATITYLAQEDGPVVIGSTSAPGQGGILAQREFDRRFSPHFLDWAAFGVMTLPSIGIPLLLWYSSKRKYDTPKTKKN

SEQ ID NO: 411 - DNA, 4146 bp, Homo sapiens
gagaccaacgcgtgcgggccgaacccctccccccgccttcccccaacaatacaggacgccggggtccgcgccgcgtcctccctggtccccccgtccgattatgtctcggatcgaatccctcacgcgggcgcggatcgaccggagcagagagctggcgagcaagacccgggaaaaggagaaaatgaagaaagccaaggatgcccgctatacaaatgggcacctcttcaccaccatttcagtttcaggcatgaccatgtgctatgcctgtaacaagagcatcacagccaaggaagccctcatctgcccaacctgcaatgtgactatccacaaccgctgtaaagacaccctcgccaactgtaccaaggtcaagcagaagcaacagaaagcggccctgctgaagaacaacaccgccttgcagtccgtttctcttcgaagtaagacaaccatccgggagcggccaagctcggccatctacccctccgacagcttccggcagtccctcctgggctcccgccgtggccgctcctccttgtctttagccaagagtgtttctaccaccaacattgctggacatttcaatgatgagtctcccctggggctgcgccggatcctctcacagtccacagactccctcaacatgcggaaccgaaccctatccgtggaatccctcattgacgaagaggtaatctacagtgagctgatgagtgactttgagatggatgagaaggactttgcagctgactcttggagtcttgctgtggacagcagcttcctgcagcagcataaaaaggaggtgatgaagcagcaagatgtcatctatgagctaatccagacagagctgcaccatgtgaggacactgaagatcatgacccgcctcttccgcacggggatgctggaagagctacacttggagccaggagtggtccagggcctgttcccctgcgtggacgagctcagtgacatccatacacgcttcctcagccagctattagaacgccgacgccaggccctgtgccctggcagcacccggaactttgtcatccatcgcttgggtgatctgctcatcagccagttctcaggtcctagtgcggagcagatgtgtaagacctactcggagttctgcagccgccacagcaaggccttaaagctctataaggagctgtacgcccgagacaaacgcttccagcaattcatccggaaagtgacccgccccgccgtgctcaagcggcacggggtacaggagtgcatcctgctggtgactcagcgcatcaccaagtacccgttactcatcagccgcatcctgcagcattcccacgggatcgaggaggagcgccaggacctgaccacagcactggggctagtgaaggagctgctgtccaatgtggacgagggtatttatcagctggagaaaggggcccgtctgcaggagatctacaaccgcatggaccctcgggcccaaaccccagtgcctggcaagggcccctttggccgagaggaacttctgaggcgcaaactcatccacgatggctgcctgctctggaagacagcgacggggcgcttcaaagatgtgctagtgctgctgatgacagatgtactggtgtttctccaggaaaaggaccagaagtacatctttcctaccctggacaagccttcagtggtatcgctgcagaatctaatcgtacgagacattgccaaccaggagaaagggatgtttctgatcagcgcagccccacctgagatgtacgaggtgcacacagcatcccgggatgaccggagcacctggatccgggtcattcagcagagcgtgcgcacatgcccatccagggaggacttccccctgattgagacagaggatgaggcttacctgcggcgaattaagatggagttgcagcagaaggaccgggcactggtggagctgctgcgagagaaggtcgggctgtttgctgagatgacccatttccaggccgaagaggatggtggcagtgggatggccctgcccaccctgcccaggggccttttccgctctgagtcccttgagtcccctcgtggcgagcggctgctgcaggatgccatccgtgaggtggagggtctgaaagacctgctggtggggccaggagtggaactgctcttgacaccccgagagccagccctgcccttggaaccagacagcggtggtaacacgagtcctggggtcactgccaatggtgaggccagaaccttcaatggctccattgaactctgcagagctgactcagactctagccagagggatcgaaatggaaatcagctgagatcaccgcaagaggaggcgttacagcgattggtcaatctctatggacttctacatggcctacaggcagctgtggcccagcaggacactctgatggaagcccggttccctgagggccctgagcggcgggagaagctgtgccgagccaactctcgggatggggaggctggcagggctggggctgcccctgtggcccctgaaaagcaggccacggaactggcattactgcagcggcaacatgcgctgctgcaggaggagctacggcgctgccggcggctaggtgaagaacgggcaaccgaagctggcagcctggaggcccggctccgggagagtgagcaggcccgggcactgctggagcgtgaggccgaagaggctcgaaggcagctggccgccctgggccagaccgagccactcccagctgaggccccctgggcccgcagacctgtggatcctcggcggcgcagcctccccgcaggcgatgccctgtacttgagtttcaaccccccacagcccagccgaggcactgaccgcctggatctacctgtcactactcgctctgtccatcgaaactttgaggaccgagagaggcaggaactggggagccccgaagagcggctgcaagacagcagtgaccctgacactggcagcgaggaggaaggtagcagccgtctgtctccgccccacagtccacgagactttaccagaatgcaggacatcccggaggagacggagagccgcgacggggaggctgtagcctccgagagctaagggggcccctcccccctgccccgtgccccactgaagaacattactgagggggctaaccttggggactccaatttgccaatgatgagggaacatttgaaagaactgcaaattgtccttgccagctcttgggatccttggatacctggggccatttaagaagctaggggaattaggccacaacaccccctgggacatccgaaagctacaccacagatgccagtggttcatgccttcttcccgcaactttaggaaaatttatttatttattgtttattagttatggggggagaggggagatttaaaggaccagggacatgggaaccaagccatagggatcagagggccttgtccttgaacactactggggtatattcaggctcatccacgcagctgctgggttcttgccctaacggccctcccctgcaacatccgtcttggaggagaggctgcagccacagcaccctactgccctttaaataaaggagggctgtgggcagggccatgtccctttctcctctcccctcaacctcttactgctgttctccctttctccgtccttcatggaagccctgggagataacctggcttcctggagttgatggaataaaggttggggtggccataatggtttgttgggggtgagggaaaaaacccacagggaccagaatgttttgttgttcttttgttttcttttttgtaccaaagtcaactgcacgtgttttatatttttaagagatcgtaggcaattagagatcgaagcctcctatctccacatctctgaagaagttgaggggtgggggagagaatgacttctgccttcatctgcagtaacggggggacctatactgacctcttccccagccatttagaaacaagttctagggtgggttggaaaatctccaagagccctgacctcatcttccacctcagcaaccatgacctgaaacctcagcgtgaatttgggggatttttcagtggaacccttgcccccaaatgtcgaccagcccccaaatgtcgaagaattttcttcttgccaattttgttgtttaaaaaaaaaattcagggaaaattaaaaacctggaactcca

SEQ ID NO: 412 - DNA, 2508 bp, Homo sapiens
atgcagcagcacgttcagctcttgacccaaatccaccttcttgccacctgcaaccccaacctcaatccggaggccactaccaccaggatatttcttaaagagctgggaacctttgctcaaagctccatcgcccttcaccatcagtacaaccccaagtttcagaccctgttccaaccctgtaacttgatgggagctatgcagctgattgaagacttcagcacacatgtcagcattgactgcagccctcataaaactgtcaagaagactgcgaatgaatttccctgtttgccaaagcaagtggcttggattctggccacaagcaaggttttcatgtatccagagttacttccagtgtgttccctgaaggcaaagaatccccaggataagatcgtcttcaccaaggctgaggacaatttgttagctttaggactgaagcattttgaaggaactgagtttcctaatcctctaatcagcaagtaccttctaacctgcaaaactgcccaccaactgacagtgagaatcaagaacctcaacatgaacagagctcctgacaacatcattaaattttataagaagaccaaacagctgccagtcctaggaaaatgctgtgaagagatccagccacatcagtggaagccacctatagagagagaagaacaccggctcccattctggttaaaggccagtctgccatccatccaggaagaactgcggcacatggctgatggtgctagagaggtaggaaatatgactggaaccactgagatcaactcagatcgaagcctagaaaaagacaatttggagttggggagtgaatctcggtacccactgctattgcctaagggtgtagtcctgaaactgaagccagttgccacccgtttccccaggaaggcttggagacagaagcgttcatcagtcctgaagcccctccttatccaacccagcccctctctccagcccagcttcaaccctgggaaaacaccagcccgatcaactcattcagaagcccctccgagcaaaatggtgctccggattcctcacccaatacagccagccactgttttacagacagttccaggtgtccctccactgggggtcagtggaggtgagagttttgagtctcctgcagcactgcctgctgtgccccctgaggccaggacaagcttccctctgtctgagtcccagactttgctctcttctgcccctgtgcccaaggtaatgctgccctcccttgccccttctaagtttcgaaagccatatgtgagacggagaccctcaaagagaagaggagtcaaggcctctccctgtatgaaacctgcccctgttatccaccaccctgcatctgttatcttcactgttcctgctaccactgtgaagattgtgagccttggcggtggctgtaacatgatccagcctgtcaatgcggctgtggcccagagtccccagactattcccatcactaccctcttggttaaccctacttccttcccctgtccattgaaccagtcccttgtggcctcctctgtctcacccttaattgtttctggcaattctgtgaatcttcctataccatccacccctgaagataaggcccacgtgaatgtggacattgcttgtgctgtggctgatggggaaaatgcctttcagggcctagaacccaaattagagccccaggaactatctcctctctctgctactgttttcccgaaagtggaacatagcccagggcctccactagcagatgcagagtgccaagaaggattgtcagagaatagtgcctgtcgctggaccgttgtgaaaacagaggaggggaggcaagctctggagccgctccctcagggcatccaggagtctctaaacaaccctacccctggggatttagaggaaattgtcaagatggaacctgaagaagctagagaggaaatcagtggatcccctgagcgtgatatttgtgatgacatcaaagtggaacatgctgtggaattggacactggtgccccaagcgaggagttgagcagtgctggagaagtaacgaaacagacagtcttacagaaggaagaggagaggagtcagccaactaaaaccccttcatcttctcaagagccccctgatgaaggaacctcagggacagatgtgaacaaaggatcatcaaagaatgctttgtcctcaatggatcctgaagtgaggcttagtagccccccagggaagccagaagattcatccagtgttgatggtcagtcagtggggactccagttgggccagaaactggaggagagaagaatgggccagaagaagaggaagaagaggactttgatgacctcacccaagatgaggaagatgaaatgtcatcagcttctgaggaatctgtgctttctgtcccagaactccaggtgagagctggagaatattctcaagtatttcgtggactcagtaatatgtatcacttattgatatgccacctgcttgcttgctgcactatggatagtcctaaaatcatttgtatttga

SEQ ID NO: 413 - protein, 835 aa, Homo sapiens
MQQHVQLLTQIHLLATCNPNLNPEATTTRIFLKELGTFAQSSIALHHQYNPKFQTLFQPCNLMGAMQLIEDFSTHVSIDCSPHKTVKKTANEFPCLPKQVAWILATSKVFMYPELLPVCSLKAKNPQDKIVFTKAEDNLLALGLKHFEGTEFPNPLISKYLLTCKTAHQLTVRIKNLNMNRAPDNIIKFYKKTKQLPVLGKCCEEIQPHQWKPPIEREEHRLPFWLKASLPSIQEELRHMADGAREVGNMTGTTEINSDRSLEKDNLELGSESRYPLLLPKGVVLKLKPVATRFPRKAWRQKRSSVLKPLLIQPSPSLQPSFNPGKTPARSTHSEAPPSKMVLRIPHPIQPATVLQTVPGVPPLGVSGGESFESPAALPAVPPEARTSFPLSESQTLLSSAPVPKVMLPSLAPSKFRKPYVRRRPSKRRGVKASPCMKPAPVIHHPASVIFTVPATTVKIVSLGGGCNMIQPVNAAVAQSPQTIPITTLLVNPTSFPCPLNQSLVASSVSPLIVSGNSVNLPIPSTPEDKAHVNVDIACAVADGENAFQGLEPKLEPQELSPLSATVFPKVEHSPGPPLADAECQEGLSENSACRWTVVKTEEGRQALEPLPQGIQESLNNPTPGDLEEIVKMEPEEAREEISGSPERDICDDIKVEHAVELDTGAPSEELSSAGEVTKQTVLQKEEERSQPTKTPSSSQEPPDEGTSGTDVNKGSSKNALSSMDPEVRLSSPPGKPEDSSSVDGQSVGTPVGPETGGEKNGPEEEEEEDFDDLTQDEEDEMSSASEESVLSVPELQVRAGEYSQVFRGLSNMYHLLICHLLACCTMDSPKIICI

SEQ ID NO: 414 - DNA, 1635 bp, Homo sapiens
gccttttttgcagtctcaggacgggcgctttggagccggccccaggcagcgtgtgtcggtcgcctagtctggagaactagtcctcgactcacgtgcaaggatgatgctgaaaggaataacaaggcttatctctaggatccataagttggaccctgggcgttttttacacatggggacccaggctcgccaaagcattgctgctcacctagataaccaggttccagttgagagtccgagagctatttcccgcaccaatgagaatgacccggccaagcatggggatcagcacgagggtcagcactacaacatctccccccaggatttggagactgtatttccccatggccttcctcctcgctttgtgatgcaggtgaagacattcagtgaagcttgcctgatggtaaggaaaccagccctagaacttctgcattacctgaaaaacaccagttttgcttatccagctatacgatatcttctgtatggagagaagggaacaggaaaaaccctaagtctttgccatgttattcatttctgtgcaaaacaggactggctgatactacatattccagatgctcatctttgggtgaaaaattgtcgggatcttctgcagtccagctacaacaaacagcgctttgatcaacctttagaggcttcaacctggctgaagaatttcaaaactacaaatgagcgcttcctgaaccagataaaagttcaagagaagtatgtctggaataagagagaaagcactgagaaagggagtcctctgggagaagtggttgaacagggcataacacgggtgaggaacgccacagatgcagttggaattgtgctgaaagagctaaagaggcaaagttctttgggtatgtttcacctcctagtggccgtggatggaatcaatgctctttggggaagaaccactctgaaaagagaagataaaagcccgattgcccccgaggaattagcacttgttcacaacttgaggaaaatgatgaaaaatgattggcatggaggcgccattgtgtcggctttgagccagactgggtctctctttaagccccggaaagcctatctgccccaggagttgctgggaaaggaaggatttgatgccctggatccctttattcccatcctggtttccaactataacccaaaggaatttgaaagttgtattcagtattatttggaaaacaattggcttcaacatgagaaagctcctacagaagaagggaaaaaagagctgctgttcctaagtaacgcgaacccctcgctgctggagcggcactgtgcctacctctaagccaagatcacagcatgtgaggaagacagtggacatctgctttatgctggacccagtaagatgaggaagtcgggcagtacacaggaagaggagccaggcccttgtacctatgggattggacaggactgcagttggctctggacctgcattaaaatgggtttcactgtgaatgcgtgacaataagatattcccttgttcctaaaactttatatcagtttattggatgtggtttttcacatttaagataattatggctcttttcctaaaaaataaaatatctttctaaaaaaaaaaaaaaaaaaaaaaaaaaaaaaaaaaaaaaaaaaaaaaaaaaaaaa

SEQ ID NO: 415 - protein, 398 aa, Homo sapiens
MMLKGITRLISRIHKLDPGRFLHMGTQARQSIAAHLDNQVPVESPRAISRTNENDPAKHGDQHEGQHYNISPQDLETVFPHGLPPRFVMQVKTFSEACLMVRKPALELLHYLKNTSFAYPAIRYLLYGEKGTGKTLSLCHVIHFCAKQDWLILHIPDAHLWVKNCRDLLQSSYNKQRFDQPLEASTWLKNFKTTNERFLNQIKVQEKYVWNKRESTEKGSPLGEVVEQGITRVRNATDAVGIVLKELKRQSSLGMFHLLVAVDGINALWGRTTLKREDKSPIAPEELALVHNLRKMMKNDWHGGAIVSALSQTGSLFKPRKAYLPQELLGKEGFDALDPFIPILVSNYNPKEFESCIQYYLENNWLQHEKAPTEEGKKELLFLSNANPSLLERHCAYL

SEQ ID NO: 416 - DNA, 2558 bp, Homo sapiens
tcttcaccactgctctcccagaggtccaggtccgggagatgacagtggctcccagaaagcccaggattcaatcgctgagagagtgcttaggcccgaatgccggcccaaatcgttctactcaccgtgtcggaggccgagagcgatgagagtacagggaagtgaggaagagggggtggccgccaggctcctccgcttccctgggtccaccgcggatccctcccgcttgtcaggaggcggccagcgggtaagccgactggcggaaatgcgagagaggagaagggaaaggtggagggctaaaggggcaaactgagaggaggcggatcccgcaaccgacactgggatcgtttcccctcgcaaagcgaacccaaaatggcggcggcagcggcggcagcagagtggccgcggcagctcctccagagggagggagctaagggcgcctagcgacacccccaacctcccactcctccctcctcgcgttcttccccacggtcccccgcttcgcccgactccggccatgtagcgcgcacgtcagcccgcacgcgtacgagtgtctacgggctcgtcgctggctgctcccaccaaccaccaccttcggccgtcctgcgagccagccatcccgtacgcgctcacccacgggaacctcctcgcccagttctccactccccctcagaccctgtcaagccggctccagcgcaggccctcacgcgtaccttcagcggcgcgagcccaagccttctccacctcctcttctctcctccccctccctccccgcccgcacggccaccaaccgccgccaaagcagccgccgccagcacccccaccctacactcctcgcgcgtgcgcctcccacagtccccaccgcgggactgttccattcctggcggctgcaggggcaggagaggaagggaccggcaaagcgagtctggcttgccgtttgactggaattgccagggtggccggccgagtcccatgacaacctacctccctgggttcgtcgccgcggcgctgcggctcgcctcctcctccatgggaccgcggcgaggggatcgagggcggcctagcgcccctctgccggccggtggttggaggccgcggcggctgcgcgttgagtcgtttcctgccggatgacccgacccttttttgcagtctcaggacgggcgctttggagccggccccaggcagcgtgtgtcggtcgcctagtctggagaactagtcctcgactcacggtgagggaatggaccgacacgggtattgtaccgctgagggaaaggagcgggactccggacctccaggaggtagggagtgaggccggtagaccggcgcgcctccgggggggattcctcccgggcgttgagttgccaacctgggacccgaggaagttcggcgtggtggtgtgctttttgttgttgttaaccctcctcggatttctcgaatttcacaccactgtccatatgcgatgatgtttgtttgcccttgacgcacttactcatggatggtacttcagcctcgttagacagcctggtgatggaggatgaagaaaccatgtgcttctcattcagttctggactcagtttcccttgtcttcagcaagttatttttgttagttccttatcaaaaagtgtacataaaaattaggcaactccaaacatgcctccagggttggtgtgtgaaataataagatagggctgggcgcggtggctcacgcctgtaatcccagcactttgggaggccgaggcaggtggatgacaaggtgaagagatcgagacaatcctggccaacatggtgaaaccccgtctctactaaaaatacaaatattagccggccgtggtggcgggcgcctgtagccccagctactcgggaggctgaggcaggagaattgcttgaacccgggcggcggaagttgcagtgagccgagatcgcgccactgcactccagcctggcgacaaagcgagactccgtcacacacacacacacacacacgaaataataatatatgtaaagtggaattagctccaagtcgttaataaaacaaagcaggccgggcgtcttgttaaatagttgtatcaatgacttgatttagattaatgaggatatatttttcaaatttatgccttttacaaaatttttaaagagtaggtaatgtcggtgatagatataaagaaaggaaaagatctccagatgtggaatcttctactggatcctgtaacagaaagaagacattaggctgggcgcagtggctcacacctgtaatctcagcactttgggaggcggaggagggcgcattgcttgagcctaggagttcgagaccagcttaggcaacacggtgaaaccccatctctacaaaaagacacaaaaattagacaggtgtggcacacgcttgtagtctgagctacttgggaggctgaagcaggaggattgaggaagaggttgcaaagttagccgagatcacgccatcacactgcagcctaggtgacagagcgagaccctgtctcaaaaaaagaaagaagacattagcagaaaagctgaggaaatgcaaataaagtctgcaatttttaaat

SEQ ID NO: 417 - protein, 111 aa, Homo sapiens [sequence omitted]

SEQ ID NO: 418 - DNA, 2794 bp, Homo sapiens
gagagaagaggaggtggagaaggcttgggctcgcgccgctgaagtcggcttacccgctggccgcctcctgacaagcgggagggatccgcggtggacccagggaagcggaggagcctggcggccaccccctcttcctcacttccctgtactctcatcgctctcggcctccgacacgaaaaggaagcaaatgagctgatggaagatctgtttgaaactagacagggtcttgccatgttctggaactcataggctcaagtaatcttcctgcctcaacctcccaaagtgctggaattacagttccaagatgagatgggattctccaacatggaagatgatggcccagaagaggaggagcgtgtggctgagcctcaagctaactttaacacccctcaagctctacggtttgaggaactactggccaacctactaaatgaacaacatcagatagcgaaggaactatttgaacagctgaagatgaagaaaccttcagccaaacagcagaaggaggtagagaaggttaaaccccagtgtaaggaagttcatcagaccctgattctggacccagcacaaaggaagagactccagcagcagatgcagcagcatgttcagctcttgacacaaatccaccttcttgccacctgcaaccccaatctcaatccggaggccagtagcaccaggatatgtcttaaagagctgggaacctttgctcaaagctccatcgcccttcaccatcagtacaaccccaagtttcagaccctgttccaaccctgtaacttgatgggagctatgcagctgattgaagacttcagcacacatgtcagcattgactgcagccctcataaaactgtcaagaagactgccaatgaatttccctgtttgccaaagcaagtggcttggatcctggccacaagcaaggttttcatgtatccagagttacttccagtgtgttccctgaaggcaaagaatccccaggataagatcctcttcaccaaggctgaggacaatttgttagctttaggactgaagcattttgaagggactgagtttcttaaccctctaatcagcaagtaccttctaacctgcaagactgcccgccaactgacagtgagaatcaagaacctcaacatgaacagagctcctgacaacatcattaaattttataagaagaccaaacagctgccagtcctaggaaaatgctgtgaagagatccagccacatcagtggaagccacctatagagagagaagaacaccggctcccattctggttaaaggccagtctgccatccatccaggaagaactgcggcacatggctgatggtgctagagaggtaggaaatatgactggaaccactgagatcaactcagatcaaggcctagaaaaagacaactcagagttggggagtgaaactcggtacccactgctattgcctaagggtgtagtcctgaaactgaagccagttgccgaccgtttccccaagaaggcttggagacagaagcgttcatcagtcctgaaacccctccttatccaacccagcccctctctccagcccagcttcaaccctgggaaaacaccagcccaatcaactcattcagaagcccctccgagcaaaatggtgctccggattcctcacccaatacagccagccactgttttacagacagttccaggtgtccctccactgggggtcagtggaggtgagagttttgagtctcctgcagcactgcctgctatgccccctgaggccaggacaagcttccctctgtctgagtcccagactttgctctcttctgcccctgtgcccaaggtaatgatgccctcccctgcctcttccatgtttcgaaagccatatgtgagacggagaccctcaaaaagaaggggagccagggcctttcgctgtatcaaacctgcccctgttatccaccctgcatctgttatcttcactgttcctgctaccactgtgaagattgtgagccttggcggtggctgtaacatgatccagcctgtcaatgcggctgtggcccagagtccccagactattcccatcgccaccctcttggttaaccctacttccttcccctgtccattgaaccagccccttgtggcctcctctgtctcacccttaattgtttctggcaattctgtgaatcttcctataccatccacccctgaagataaggcccacatgaatgtggacattgcttgtgctgtggctgatggggaaaatgcctttcagggcctagaacccaaattagagccccaggaactatctcctctctctgctactgttttccccaaagtggaacatagcccagggcctccaccagtcgataaacagtgccaagaaggattgtcagagaacagtgcctatcgctggaccgttgtgaaaacagaggagggaaggcaagctctggagccgctccctcagggcatccaggagtctctaaacaactcttcccctggggatttagaggaagttgtcaagatggaacctgaagatgctacagaggaaatcagtggatttctttgagctaggagaataagagtctggagactgggagccttcacttcggcctccgattggtggcgcatagggtgtaaccaataggaaacccctaaagggtacttaaaccccagattttgcaactggggctcttgagcagcttgctttagcctgctcccactctgtggaatatacttttgcttcaataaatctgtgcttttattgctaaaaaaaaaaaaaaaaaaaaaaaaaaaaaaaaaaaaaaaaaaaaaaaaaaaaaaaaaaaaaaaaa

SEQ ID NO: 419 - protein, 739 aa, Homo sapiens
MGFSNMEDDGPEEEERVAEPQANFNTPQALRFEELLANLLNEQHQIAKELFEQLKMKKPSAKQQKEVEKVKPQCKEVHQTLILDPAQRKRLQQQMQQHVQLLTQIHLLATCNPNLNPEASSTRICLKELGTFAQSSIALHHQYNPKFQTLFQPCNLMGAMQLIEDFSTHVSIDCSPHKTVKKTANEFPCLPKQVAWILATSKVFMYPELLPVCSLKAKNPQDKILFTKAEDNLLALGLKHFEGTEFLNPLISKYLLTCKTARQLTVRIKNLNMNRAPDNIIKFYKKTKQLPVLGKCCEEIQPHQWKPPIEREEHRLPFWLKASLPSIQEELRHMADGAREVGNMTGTTEINSDQGLEKDNSELGSETRYPLLLPKGVVLKLKPVADRFPKKAWRQKRSSVLKPLLIQPSPSLQPSFNPGKTPAQSTHSEAPPSKMVLRIPHPIQPATVLQTVPGVPPLGVSGGESFESPAALPAMPPEARTSFPLSESQTLLSSAPVPKVMMPSPASSMFRKPYVRRRPSKRRGARAFRCIKPAPVIHPASVIFTVPATTVKIVSLGGGCNMIQPVNAAVAQSPQTIPIATLLVNPTSFPCPLNQPLVASSVSPLIVSGNSVNLPIPSTPEDKAHMNVDIACAVADGENAFQGLEPKLEPQELSPLSATVFPKVEHSPGPPPVDKQCQEGLSENSAYRWTVVKTEEGRQALEPLPQGIQESLNNSSPGDLEEVVKMEPEDATEEISGFL

SEQ ID NO: 420 - DNA, 1898 bp, Homo sapiens
agcgcagtatggcgggcggggcccgggaggtgctcacactgcagttgggacattttgccggtttcgtgggcgcgcactggtggaaccagcaggatgctgcgctgggccgagcgaccgattccaaggagcccccgggagagctgtgccccgacgtcctgtatcgtacgggccggacgctgcacggccaggagacctacacgccgcgactcatcctcatggatctgaagggtagtttgagctccctaaaagaggaaggtggactctacagggacaaacagttggatgctgcaatagcatggcaggggaagctcaccacacacaaagaggaactctatcccaagaacccttatctccaagactttctgagtgcagagggagtgctgagtagtgatggtgtctggagggtcaaatccattcccaatggcaaaggttcctcaccactccccaccgctacaactccaaaaccacttatccctacagaggccagcatcagggtctggtcagacttcctcagagtccatctccatccccggagcatctgtatgattcagaagtacaaccacgatggggaagcaggtcggctggaggcttttggccaaggggaaagtgtcctaaaggaacccaagtaccaggaagagctggaggacaggctgcatttctacgtggaggaatgtgactacttgcagggcttccagatcctgtgtgacctgcacgatggcttctctggggtaggcgcgaaggcggcagagctgctacaagatgaatattcagggcggggaataataacctggggcctgctacctggtccctaccatcgtggggaggcccagagaaacatctatcgtctattaaacacagcttttggtctcgtgcacctgactgctcacagctctcttgtctgccccttgtccttgggtgggagcctgggcctgcgacccgagccacctgtcagcttcccttacctgcattatgatgccactctgcccttccactgcagtgccatcctggctacagccctggacacagtcactgttccttatcgcctgtgttcctctccagtttccatggttcatctggctgacatgctgagcttctgtgggaaaaaggtggtgacagcaggagcaatcatccctttccccttggctccaggccagtcccttcctgattccctggtgcagtttggaggagccaccccatggaccccactgtctgcatgtggggagccttctggaacacgttgctttgcccagtcagtggtgctgaggggtatagacagagcatgccacacaagccagctcaccccagggacacctccaccctctgcccttcatgcatgtaccactggggaagaaatcttggctcagtatttacaacagcagcagcctggagtcatgagttcttcccatctgctgctgactccctgcagggtggctcctccttacccccacctcttctcaagctgcagtccaccgggtatggttctggatggttcccccaagggagcagcagtggagagcatcccagtgtttggggcactgtgttcctcttcgtccctgcaccagaccctggaagccttggccagagacctcaccaaactcgacttgcggcgctgggccagcttcatggatgctggagtggagcacgatgacgtagcagagctgctgcaggagctacaaagcctggcccagtgctaccagggtggtgacagcctcgtggactaaagttcccagtgtgggagaaaggagctagtttgcaataaaaacagctggatgcaggagcccagtgtcttcatgcagaggagctcaatgtcgcgggactagctacaccaacatatgcactttttacatttagaaacactgtgattagaccacagaacaataaatatgtgccatcagacc

SEQ ID NO: 421 - protein, 570 aa, Homo sapiens
MAGGAREVLTLQLGHFAGFVGAHWWNQQDAALGRATDSKEPPGELCPDVLYRTGRTLHGQETYTPRLILMDLKGSLSSLKEEGGLYRDKQLDAAIAWQGKLTTHKEELYPKNPYLQDFLSAEGVLSSDGVWRVKSIPNGKGSSPLPTATTPKPLIPTEASIRVWSDFLRVHLHPRSICMIQKYNHDGEAGRLEAFGQGESVLKEPKYQEELEDRLHFYVEECDYLQGFQILCDLHDGFSGVGAKAAELLQDEYSGRGIITWGLLPGPYHRGEAQRNIYRLLNTAFGLVHLTAHSSLVCPLSLGGSLGLRPEPPVSFPYLHYDATLPFHCSAILATALDTVTVPYRLCSSPVSMVHLADMLSFCGKKVVTAGAIIPFPLAPGQSLPDSLVQFGGATPWTPLSACGEPSGTRCFAQSVVLRGIDRACHTSQLTPGTPPPSALHACTTGEEILAQYLQQQQPGVMSSSHLLLTPCRVAPPYPHLFSSCSPPGMVLDGSPKGAAVESIPVFGALCSSSSLHQTLEALARDLTKLDLRRWASFMDAGVEHDDVAELLQELQSLAQCYQGGDSLVD

SEQ ID NO: 422 - DNA, 1430 bp, Homo sapiens
aggtgagagaggatgtgtgctgggccttggaggaagggggccgagaccgggccttacttctgtaacgatactgtgaggcatcggaaggccagcctgttgtgtccgttttgaaggatgcccctgtcccgctggttgagatctgtgggggtcttcctgctgccagccccctactgggcaccccgggagaggtggctgggttccctacggcggccctccctggtgcacgggtacccagtcctggcctggcacagtgcccgctgctggtgccaagcgtggacagaggaacctcgagccctttgctcctccctcagaatgaacggagaccagaattcagatgtttatgcccaagaaaagcaggatttcgttcagcacttctcccagatcgttagggtgctgactgaggatgagatggggcacccagagataggagatgctattgcccggctcaaggaggtcctggagtacaatgccattggaggcaagtataaccggggtttgacggtggtagtagcattccgggagctggtggagccaaggaaacaggatgctgatagtctccagcgggcctggactgtgggctggtgtgtggaactgctgcaagctttcttcctggtggcagatgacatcatggattcatcccttacccgccggggacagatctgctggtatcagaagccgggcgtgggtttggatgccatcaatgatgctaacctcctggaagcatgtatctaccgcctgctgaagctctattgccgggagcagccctattacctgaacctgatcgagctcttcctgcagagttcctatcagactgagattgggcagaccctggacctcctcacagccccccagggcaatgtggatcttgtcagattcactgaaaagaggtacaaatctattgtcaagtacaagacagctttctactccttctaccttcctatagctgcagccatgtacatggcaggaattgatggcgagaaggagcacgccaatgccaagaagatcctgctggagatgggggagttctttcagattcaggatgattaccttgacctctttggggaccccagtgtgaccggcaaaattggcactgacatccaggacaacaaatgcagctggctggtggttcagtgtctgcaacgggccactccagaacagtaccagatcctgaaggaaaattacgggcagaaggaggctgagaaagtggcccgggtgaaggcgctatatgaggagctggatctgccagcagtgttcttgcaatatgaggaagacagttacagccacattatggctctcattgaacagtacgcagcacccctgcccccagccgtctttctggggcttgcgcgcaaaatctacaagcggagaaagtgacctagagattgcaagggcggggagaggaggctctcaataaataatcgtgtaacctt

SEQ ID NO: 423 - protein, 419 aa, Homo sapiens
MPLSRWLRSVGVFLLPAPYWAPRERWLGSLRRPSLVHGYPVLAWHSARCWCQAWTEEPRALCSSLRMNGDQNSDVYAQEKQDFVQHFSQIVRVLTEDEMGHPEIGDAIARLKEVLEYNAIGGKYNRGLTVVVAFRELVEPRKQDADSLQRAWTVGWCVELLQAFFLVADDIMDSSLTRRGQICWYQKPGVGLDAINDANLLEACIYRLLKLYCREQPYYLNLIELFLQSSYQTEIGQTLDLLTAPQGNVDLVRFTEKRYKSIVKYKTAFYSFYLPIAAAMYMAGIDGEKEHANAKKILLEMGEFFQIQDDYLDLFGDPSVTGKIGTDIQDNKCSWLVVQCLQRATPEQYQILKENYGQKEAEKVARVKALYEELDLPAVFLQYEEDSYSHIMALIEQYAAPLPPAVFLGLARKIYKRRK

SEQ ID NO: 424 - DNA, 1614 bp, Homo sapiens
ggtagttggttgtgggcactgggttagaggtatcacgtgggggcactttcgtcttagcttttggacaagacgcaggcgcaacccacggctgctgcggggatccttgtggcccttccggtcggtggaaccaatccgtgcacagagaagcggggcgaactgaggcgagtgaagtggactctgagggctaccgctaccgccactgctgcggcaggggcgtggagggcagagggccgcggaggccgcagttgcaaacatggctcagagcagagacggcggaaacccgttcgccgagcccagcgagcttgacaacccctttcaggacccagctgtgatccagcaccgacccagccggcagtatgccacgcttgacgtctacaacccttttgagacccgggagccaccaccagcctatgagcctccagcccctgccccattgcctccaccctcagctccctccttgcagccctcgagaaagctcagccccacagaacctaagaactatggctcatacagcactcaggcctcagctgcagcagccacagctgagctgctgaagaaacaggaggagctcaaccggaaggcagaggagttggaccgaagggagcgagagctgcagcatgctgccctggggggcacagctactcgacagaacaattggccccctctaccttctttttgtccagttcagccctgctttttccaggacatctccatggagatcccccaagaatttcagaagactgtatccaccatgtactacctctggatgtgcagcacgctggctcttctcctgaacttcctcgcctgcctggccagcttctgtgtggaaaccaacaatggcgcaggctttgggctttctatcctctgggtcctccttttcactccctgctcctttgtctgctggtaccgccccatgtataaggctttccggagtgacagttcattcaatttcttcgttttcttcttcattttcttcgtccaggatgtgctctttgtcctccaggccattggtatcccaggttggggattcagtggctggatctctgctctggtggtgccgaagggcaacacagcagtatccgtgctcatgctgctggtcgccctgctcttcactggcattgctgtgctaggaattgtcatgctgaaacggatccactccttataccgccgcacaggtgccagctttcagaaggcccagcaagaatttgctgctggtgtcttctccaaccctgcggtgcgaaccgcagctgccaatgcagccgctggggctgctgaaaatgccttccgggccccgtgacccctgactgggatgccctggccctgctacttgagggagctgacttagctcccgtccctaaggtctctgggacttggagagacatcactaactgatggctcctccgtagtgctcccaatcctatggccatgactgctgaacctgacaggcgtgtggggagttcactgtgacctagtccccccatcaggccacactgctgccacctctcacacgccccaacccagcttccctctgctgtgccacggctgttgcttcggttatttaaataaaaagaaagtggaactggaactgacaaaaaaaaaaaaaaaaaaaaaaaa

SEQ ID NO: 425 - protein, 347 aa, Homo sapiens
MAQSRDGGNPFAEPSELDNPFQDPAVIQHRPSRQYATLDVYNPFETREPPPAYEPPAPAPLPPPSAPSLQPSRKLSPTEPKNYGSYSTQASAAAATAELLKKQEELNRKAEELDRRERELQHAALGGTATRQNNWPPLPSFCPVQPCFFQDISMEIPQEFQKTVSTMYYLWMCSTLALLLNFLACLASFCVETNNGAGFGLSILWVLLFTPCSFVCWYRPMYKAFRSDSSFNFFVFFFIFFVQDVLFVLQAIGIPGWGFSGWISALVVPKGNTAVSVLMLLVALLFTGIAVLGIVMLKRIHSLYRRTGASFQKAQQEFAAGVFSNPAVRTAAANAAAGAAENAFRAP

SEQ ID NO: 426 - DNA, 1525 bp, Homo sapiens
ggtagttggttgtgggcactgggttagaggtatcacgtgggggcactttcgtcttagcttttggacaagacgcaggcgcaacccacggctgctgcggggatccttgtggcccttccggtcggtggaaccaatccgtgcacagagaagcggggcgaactgaggcgagtgaagtggactctgagggctaccgctaccgccactgctgcggcaggggcgtggagggcagagggccgcggaggccgcagttgcaaacatggctcagagcagagacggcggaaacccgttcgccgagcccagcgagcttgacaacccctttcagccaccaccagcctatgagcctccagcccctgccccattgcctccaccctcagctccctccttgcagccctcgagaaagctcagccccacagaacctaagaactatggctcatacagcactcaggcctcagctgcagcagccacagctgagctgctgaagaaacaggaggagctcaaccggaaggcagaggagttggaccgaagggagcgagagctgcagcatgctgccctggggggcacagctactcgacagaacaattggccccctctaccttctttttgtccagttcagccctgctttttccaggacatctccatggagatcccccaagaatttcagaagactgtatccaccatgtactacctctggatgtgcagcacgctggctcttctcctgaacttcctcgcctgcctggccagcttctgtgtggaaaccaacaatggcgcaggctttgggctttctatcctctgggtcctccttttcactccctgctcctttgtctgctggtaccgccccatgtataaggctttccggagtgacagttcattcaatttcttcgttttcttcttcattttcttcgtccaggatgtgctctttgtcctccaggccattggtatcccaggttggggattcagtggctggatctctgctctggtggtgccgaagggcaacacagcagtatccgtgctcatgctgctggtcgccctgctcttcactggcattgctgtgctaggaattgtcatgctgaaacggatccactccttataccgccgcacaggtgccagctttcagaaggcccagcaagaatttgctgctggtgtcttctccaaccctgcggtgcgaaccgcagctgccaatgcagccgctggggctgctgaaaatgccttccgggccccgtgacccctgactgggatgccctggccctgctacttgagggagctgacttagctcccgtccctaaggtctctgggacttggagagacatcactaactgatggctcctccgtagtgctcccaatcctatggccatgactgctgaacctgacaggcgtgtggggagttcactgtgacctagtccccccatcaggccacactgctgccacctctcacacgccccaacccagcttccctctgctgtgccacggctgttgcttcggttatttaaataaaaagaaagtggaactggaactgaaaaaaaaaaaaaaa

SEQ ID NO: 427 - protein, 321 aa, Homo sapiens
MAQSRDGGNPFAEPSELDNPFQPPPAYEPPAPAPLPPPSAPSLQPSRKLSPTEPKNYGSYSTQASAAAATAELLKKQEELNRKAEELDRRERELQHAALGGTATRQNNWPPLPSFCPVQPCFFQDISMEIPQEFQKTVSTMYYLWMCSTLALLLNFLACLASFCVETNNGAGFGLSILWVLLFTPCSFVCWYRPMYKAFRSDSSFNFFVFFFIFFVQDVLFVLQAIGIPGWGFSGWISALVVPKGNTAVSVLMLLVALLFTGIAVLGIVMLKRIHSLYRRTGASFQKAQQEFAAGVFSNPAVRTAAANAAAGAAENAFRAP

SEQ ID NO: 428 - DNA, 3152 bp, Homo sapiens
cctgcggcagccggagctcggggagcggagcgtggtggggaggggagcgggacaggcgacacaggagacagcggcgccgcggcctctccccaccaggcggccccggatcctactggacgccctgagggcacaccgaccgcgcctctagagtcaccccacgccgacccctcccctcttctctagacttatttccatccttcccgcttttaccctccccacccgtccctgggctccaggccgccgccccctcctcactcctggaccggcccttctcggtgcccctcttccctagggagatgcgatgagccggtgcccccgcgtcctcatcgtcgccccgggcacggtgcccgtccagtgcccgtggtggggagggagcactccgcggtccctccgtgacgcccctcgcttggccccccccacagctggcgtccctcggccatgccccaggggacccagccagggggtgggctctagagcgagtggggtggagaggagaaaggacggggccttgggggcctctgagatgctcccaagtgccagggagggccgagcgaggcgcaggcaaccgggcagcaggcatgatgccctcgcctagtgactccagccgctcgctgaccagccggcccagcaccaggggccttacccacctccgcctccaccgaccctggctgcaggccctgcttacgctggggctggtccaagtgctcctgggcatcctggtggtcaccttcagcatggtggcctcttccgtcaccaccaccgagagcatcaagaggtcctgcccgtcttgggctgggttctcgctggcgttctccggggtggttggcattgtgtcctggaagcggccattcactctagtgatctccttcttctccttgctttcggtgctctgtgtcatgcttagcatggctggctctgttctctcctgtaagaatgctcaactggcccgagacttccaacagtgctctctggaaggaaaggtctgtgtgtgctgtccctctgttcccctcctccggccctgtccagagtcggggcaggaactgaaagttgcccctaactccacctgtgatgaagcccgaggggccctcaagaacctgctcttcagcgtctgtgggctcaccatttgtgccgctataatctgtacactctctgctattgtctgctgcatccaaatcttctccctggacctcgtgcatacgcagctggcccctgagcggtcagtctcaggcccactgggacctctgggctgcacgtccccgcccccagcccctctcctacacaccatgctggacctggaggaatttgtcccgcctgtgcccccaccgccctactatcccccagagtatacctgcagctcagaaacagatgcacagagcatcacgtacaatggctccatggacagcccagtgcccttgtaccctaccgattgccccccttcttatgaggcagtcatgggactacgaggagacagccaggccactctctttgaccctcagcttcacgatggctcgtgcatctgtgaacgagtggcctccattgtagacgtgtccatggacagcgggtctctggtgctgtcagccattggtgacctccctgggggctctagcccgtcggaggactcgtgcctgctggagctgcagggctccgtgcgctccgtggactacgttctctttcgctccatccagcgcagccgtgccggctactgcctcagcctggactgtggcctgcggggccccttcgaggaaagccccctgccacggcgccccccacgggctgcccgctcctattcctgctctgcccctgaagctccacccccactgggtgcccccacagctgcccgcagctgccaccggttggagggctggccgccctgggtgggaccctgcttccccgagctgaggcggcgggtcccccggggagggggccgcccagccgcagccccgcccacccgagccccgactcgtcgcttcagcgatagctcaggttccctcaccccaccggggcaccggcctcctcatccggcatccccaccaccgctgctgctgccacggtcccacagcgacccaggcatcacgacctccagtgacactgctgacttcagggacctttataccaaagtgcttgaggaagaagctgcttctgtttcctctgcagatacagggctctgctctgaagcctgcctcttccgcctagcccgctgcccttcccccaagttgctacgtgcccggtcagccgagaaacggcgccctgtgcccaccttccaaaaagttcccctgccctcgggccctgcacctgcccactccctgggggacctaaagggcagctggccaggtcggggcctggtcactcgtttcctccagatatccaggaaagccccagaccccagtgggactggagctcatggacataagcaggtgccccggagcctgtggggccggcctggccgagagagcctccaccttcgcagctgcggagatctgagctctagctcttccctgcggcgtctcctgtctggccgcaggctggagcgtggtacccgcccccacagcctcagcctcaacgggggcagccgggagactgggctctgacctaggcttcttgtcacactgaacacatccagccacaggcaccagctggttgggaccagcagcccccagcatcctcttgcactggctggcacaaaaagaaacctgctgtataccccccaaagtgtccctttccctcctacctctggggtctcttgctgcttgcctctgctgctctggtctgggagagcttctgtcctgtgctgcatgggtatttagactgtgggggagatgccccttcttatagcactggaggaggaaaacaaattcttgtccccctcagaatgagagtggctctttctgatttgcaagggcactatggtcagggcaaaggcatggcccaggtgtttaagtacagggtgacgtgtgcctatgcaatggggtggtaaggcaggcacgaagagtccaaaaaatctaggtggcctctcagctctgccacctctagctgcatgaccttgggcaagctatgtaaccccaattgcctgctccattaaagactgtgaaggtagaatgtttgtaaagctcttaacagtatgtaagccttcaataaatttcagttttcccctt

SEQ ID NO: 429 - protein, 669 aa, Homo sapiens
MMPSPSDSSRSLTSRPSTRGLTHLRLHRPWLQALLTLGLVQVLLGILVVTFSMVASSVTTTESIKRSCPSWAGFSLAFSGVVGIVSWKRPFTLVISFFSLLSVLCVMLSMAGSVLSCKNAQLARDFQQCSLEGKVCVCCPSVPLLRPCPESGQELKVAPNSTCDEARGALKNLLFSVCGLTICAAIICTLSAIVCCIQIFSLDLVHTQLAPERSVSGPLGPLGCTSPPPAPLLHTMLDLEEFVPPVPPPPYYPPEYTCSSETDAQSITYNGSMDSPVPLYPTDCPPSYEAVMGLRGDSQATLFDPQLHDGSCICERVASIVDVSMDSGSLVLSAIGDLPGGSSPSEDSCLLELQGSVRSVDYVLFRSIQRSRAGYCLSLDCGLRGPFEESPLPRRPPRAARSYSCSAPEAPPPLGAPTAARSCHRLEGWPPWVGPCFPELRRRVPRGGGRPAAAPPTRAPTRRFSDSSGSLTPPGHRPPHPASPPPLLLPRSHSDPGITTSSDTADFRDLYTKVLEEEAASVSSADTGLCSEACLFRLARCPSPKLLRARSAEKRRPVPTFQKVPLPSGPAPAHSLGDLKGSWPGRGLVTRFLQISRKAPDPSGTGAHGHKQVPRSLWGRPGRESLHLRSCGDLSSSSSLRRLLSGRRLERGTRPHSLSLNGGSRETGL

SEQ ID NO: 430 - DNA, 2366 bp, Homo sapiens
cagtgccccacagctcttcaggcccttcctgtgcctggctgccctcccaccctacccttttgtacctctgagaaggctctggccccacgcacagccccactgtcaccagggccagtatctgtctcagggacctcctatccagagcctgagccagccccagccccagccccagctccagctgctccatctgaacctgtatcttcttccaagccacccattaccctcttggagtcagactcacgcatctccaaagaagaacttttgagagcccaggcgctgagagagcagggtcagacactcccgagcctctcggtacagctgtaggggcgacacaggtaggcttgcagctgcgggaacagtgccacctccgcacctaagcactcccattcctggccagcatccttggggctcatctcatacaatagcccccggtctcagagctacctccttctccagctcttcctcgtcctcaggcctgtgctccccagtcagcagctgtagccgttccatgtactgccgctgcatgcggccaggcaggaagaagttgaggggaaagggcatagcctctgcataccacttccgggtcacttctacgtagttcttggtgtctatccaaaaagtatgtacctggattgggtgggcaggaagaaacaggcaggtctgagccagtgcacctgtctgattcaaggtgggcttctgacctccatgctctcctgagtctctgtgtgggtctgtgtgttcccgtcccctccccggctggccatggatgctgggaggtctgggcacactcaccagcaccgggatcaacttctcctccaggagagacatgaaggccagggtgtctgccccttgctgagctgacagatcataatcagcattgtacttctgtggaggaaatatccatggcgtggacgctggggagctgcaagggcacttcaccagggaggaaggagtcctgtctggtacccccctcactggcctctgagtgcagtggaggtacagcaaggaacttttcctgccaaggcccccttgcctgggcccagccagtagcctgttgctgttggcaaaaagcctgggccttggagcccgctggccgtcaaggtcctgggcccattgagaagaaggaagaaaggttgggccgcaaactaggagcagctcccagaatttccatggaaagctggaacaatgcctgctgacagcaactttctaacagtaactttcccgacccagacaccacaaagctagcacaacggagctcagatgcaggctaggactcggtccatgcctcaggaaccagggaaagccatcctcacactccctggatccagggaacccacgcccagggccccccagcttgttccctcagtgcccagctcttggctatttctttcacttcattccatcgcccagacaccattaccacatacacattccatccatacccccaggtctcagcctgccctaccttcccaggctccagtccctgttcctcagcatcccccaccacatcctgagtaagctttgtccccagataacctcttcagcatgatccttaaatctccctaagcctcagtttctcccctgtggaatgggggtaagaatctctttctctgaatgcccctgtgttaggaaataatttagaatacttcggaaacaaaaagctctgttcacacctaagcaatcagggcagtggccctggccttgccaggaacttaggcttttatctggatcctctttccaggcctctcaattaattccccaggtccttaacctttgggaaattagaaattaggaagagtgtcccacttctgacactgtgttccctcttggaacctgaccgtcaatgctagaagaacccttggaaaacatgctggcccagccctctagttttacaaataagggagtgcacagccctgagaggttacatggcctgcccaagatcacgcagtcaatggcagagtaaagagcatagcctaggcctccccactcctctagtaatgctctttcatcttctccaacctggctctaagccttgtccatcctgagccccatatctagcccaacctagtccctgaaaacaagaagtggcccttagaaatctctctccagtcccactatcagaggccaactgctgtcttccagtctccttcagcctgtgctcctctccctccctgactgacaggcagaaggtaccgtgcctctggatatccccacagtgccctgagctgcatctcttgccgactgctttaatacatcacagtgacattgtgtgtgtctctgccaccagactattgctccttgatgctctgggtcacctgcatctagcatggcatatatctagtgctcaataaatgtgtattgtacgg

SEQ ID NO: 431 - protein, 97 aa, Homo sapiens [sequence omitted]

SEQ ID NO: 432 - DNA, 1541 bp, Homo sapiens
aagccccagcccggcctccgctccggccgccgccaccgcccctgttttgtttccatggcgacaggcggcgcagggcccgctccaaacataacgcgctgtggaaaacatgctgctcgggggacccccccgcagtccccgctcggggacgagccccaaggggccctggagcagtacaggccacgtgcagtttggcaagagcccccagacctggcccaggcgcacaagaccccgctctccagagcctgccgcgccttcaagggttcggggctccacttggacgaggcgccgtgactctccgaggcgcgccgggccgacagcgctgtcccgctacgtgggccacctctggatgggccggcggccgccctcccccgaggcccgcggcccagtcccccgcagttcagctgccagtcgggccagaagaagcctcgcctccccggggatctccccaggccccctgaccgcaacgatcggaggggcggtggcggggggcgggcccaggcaggggagggcagaagcacacaaggaagtgtttccgggacagagggtgggcaagatggcggcgcccatggagctgttctgctggtcagggggctgggggctgccgtcagtggacctggacagcctggccgtgctgacctatgccagatttactggtgctccactgaaggtacacaagatcagcaacccctggcagagcccttcaggaactctgcctgcccttcggaccagtcatggagaggtcatctcagttccacacaagatcatcacccaccttcgaaaagaggtacatactttttggatagacaccaagaactacgtggaagtgacccggaagtggtatgcagaggctatgccctttcccctcaacttcttcctgcctggccgcatgcagcggcagtacatggaacggctacagctgctgactggggagcacaggcctgaggacgaggaagagctggagaaggagctgtaccgagaggctcgggagtgtctgaccctgctctctcagcgcctgggctctcaaaagttcttctttggagatgcccctgcctccttggacgccttcgtcttcagctacttggccctgctgctgcaggcaaagctgcccagtgggaagctgcaggtccacctgcgtgggctgcacaacctctgtgcctattgtacccacattctcagtctctacttcccctgggatggagctgaggtaccaccgcaacgccagacaccagcaggcccagagactgagtgagtgagccataccggcgccggaaccagatcctatctgtgctggcagtgactggcagccatggtgggctacgccttgctcagcggcattgtctccatccagcgggcaacgcctgctcgtggccccaggcacccggaccctgggcatggctgaggaggatgaagaggaatgatttgtcctcacgctcccaagactggtttttctactctcatgcattccagaggcccccgtgcctcctcgttgttggtacagccggacacggggtgtgccacccagaataaagccactcacactg

SEQ ID NO: 433 - DNA, 2033 bp, Homo sapiens
gccggaagcgcgcggagaccatgtagtgagaccctcgcgaggtctgagagtcactggagctaccagaagcatcatggggccctggggagagccagagctcctggtgtggcgccccgaggcggtagcttcagagcctccagtgcctgtggggctggaggtgaagttgggggccctggtgctgctgctggtgctcaccctcctctgcagcctggtgcccatctgtgtgctgcgccggccaggagctaaccatgaaggctcagcttcccgccagaaagccctgagcctagtaagctgtttcgcggggggcgtctttttggccacttgtctcctggacctgctgcctgactacctggctgccatagatgaggccctggcagccttgcacgtgacgctccagttcccactgcaagagttcatcctggccatgggcttcttcctggtcctggtgatggagcagatcacactggcttacaaggagcagtcagggccgtcacctctggaggaaacaagggctctgctgggaacagtgaatggtgggccgcagcattggcatgatgggccaggggtcccacaggcgagtggagccccagcaaccccctcagccttgcgtgcctgtgtactggtgttctccctggccctccactccgtgttcgaggggctggcggtagggctgcagcgagaccgggctcgggccatggagctgtgcctggctttgctgctccacaagggcatcctggctgtcagcctgtccctgcggctgttgcagagccaccttagggcacaggtggtggctggctgtgggatcctcttctcatgcatgacacctctaggcatcgggctgggtgcagctctggcagagtcggcaggacctctgcaccagctggcccagtctgtgctagagggcatggcagctggcacctttctctatatcacctttctggaaatcctgccccaggagctggccagttctgagcaaaggatcctcaaggtcattctgctcctagcaggctttgccctgctcactggcctgctcttcatccaaatctagggggcttcaagagaggggcaggggagattgatgatcaggtgcccctgttctcccttccctcccccagttgtggggaataggaaggaaaggggaagggaaatactgaggaccaaaaagttctctgggagctaaagatagagcctttggggctatctgactaatgagagggaagtgggcagacaagaggctggccccagtcccaaggaacaagagatggtcaagtcgctagagacatatcaggggacattaggattggggaagacacttgactgctagaatcagaggttggacactatacataaggacaggctcacatgggaggctggaggtgggtacccagctgctgtggaacgggtatggacaggtcataaacctagagtcagtgtcctgttggtcctagcccatttcagcaccctgccacttggagtggacccctcctactcttcttagcgcctaccctcatacctatctccctcctcccatctcctaggggactggcgccaaatggtctctccctgccaattttggtatcttctctggcctctccagtcctgcttactcctctatttttaaagtgccaaacaaatccccttcctctttctcaaagcacagtaatgtggcactgagccctacccagcacctcagtgaagggggcctgcttgctctttattttggtcccggatcctggggtggggcagaaatattttctgggctggggtaggaggaaggttgttgcagccatctactgctgctgtaccctaggaatatggggacatggacatggtgtcccatgcccagatgataaacactgagctgccaaaacatttttttaaatacacccgaggagcccaagggggaagggcaatgcctacccccagcgttatttttggggagggagggctgtgcatagggacatattctttagaatctattttattaactgacctgttttgggacctgttacccaaataaaagatgtttctag

SEQ ID NO: 434 - DNA, 1564 bp, Homo sapiens
agaaagaaaaggtgtagtgtttggggaggtcaacgggctatgctggcttgacagggctgggctcttcagaacagaagcatggatctcggaatccctgacctgctggacgcgtggctggagcccccagaggatatcttctcgacaggatccgtcctggagctgggactccactgcccccctccagaggttccggtaactaggctacaggaacagggactgcaaggctggaagtccggtggggaccgtggctgtggccttcaagagagtgagcctgaagatttcttgaagcttttcattgatcccaatgaggtgtactgctcagaagcatctcctggcagtgacagtggcatctctgaggacccctgccatccagacagtccccctgcccccagggcaaccagttctcctatgctctatgaggttgtctatgaggcaggggccctggagaggatgcagggggaaactgggccaaatgtaggccttatctccatccagctagatcagtggagcccagcatttatggtgcctgattcctgcatggtcagtgagctgccctttgatgctcatgcccacatcctgcccagagcaggcaccgtagccccagtgccctgtacaaccctgctgccctgtcaaaccctgttcctgaccgatgaggagaagcgtctgctggggcaggaaggggtttccctgccctctcacctgcccctcaccaaggcagaggagagggtcctcaagaaggtcaggaggaaaatccgtaacaagcagtcagctcaggacagtcggcggcggaagaaggagtacattgatgggctggagagcagggtggcagcctgttctgcacagaaccaagaattacagaaaaaagtccaggagctggagaggcacaacatctccttggtagctcagctccgccagctgcagacgctaattgctcaaacttccaacaaagctgcccagaccagcacttgtgttttgattcttcttttttccctggctctcatcatcctgcccagcttcagtccattccagagtcgaccagaagctgggtctgaggattaccagcctcacggagtgacttccagaaatatcctgacccacaaggacgtaacagaaaatctggagacccaagtggtagagtccagactgagggagccacctggagccaaggatgcaaatggctcaacaaggacactgcttgagaagatgggagggaagccaagacccagtgggcgcatccggtccgtgctgcatgcagatgagatgtgagctggaacagaccttcctggcccacttcctgatcacaaggaatcctgggcttccttatggctttgcttcccactgggattcctacttaggtgtctgccctcaggggtccaaatcacttcaggacaccccaagagatgtcctttagtctctgcctgaggcctagtctgcatttgtttgcatatatgagagggtacctcaaatacttctgttatgtatctgtgattttatttcttctttgggtatagggttgaggggaaataagttttgagtgagaaataaacgttttagctgaaattgt

SEQ ID NO: 435 - protein, 395 aa, Homo sapiens
MDLGIPDLLDAWLEPPEDIFSTGSVLELGLHCPPPEVPVTRLQEQGLQGWKSGGDRGCGLQESEPEDFLKLFIDPNEVYCSEASPGSDSGISEDPCHPDSPPAPRATSSPMLYEVVYEAGALERMQGETGPNVGLISIQLDQWSPAFMVPDSCMVSELPFDAHAHILPRAGTVAPVPCTTLLPCQTLFLTDEEKRLLGQEGVSLPSHLPLTKAEERVLKKVRRKIRNKQSAQDSRRRKKEYIDGLESRVAACSAQNQELQKKVQELERHNISLVAQLRQLQTLIAQTSNKAAQTSTCVLILLFSLALIILPSFSPFQSRPEAGSEDYQPHGVTSRNILTHKDVTENLETQVVESRLREPPGAKDANGSTRTLLEKMGGKPRPSGRIRSVLHADEM

SEQ ID NO: 436 - DNA, 1040 bp, Homo sapiens
gcgaggcgccaccgacgcggaagactataagccccagcgggcgacgaccgaacgcccccgggaacaccgggccccgagctcggtcccgcgcccgaggatcctccacggggctagatggctgcgtcgggggcgggagcggaggtgagcgggcgctagggccgcgagcccccgccggcccttcctccagcgccctgcggaccccgcagaaggcgctcgcctccctagcccgcaaaaacatatcgatttttctcgctgtggcaacggggacgtcctgatagatcctctgctccaataggcaactccggccttccctgccctgacctggaacctctgggagggctgcagagtaagtgccgcctctgcgctccgacggaggcacgaggcctgtggagtaggtccctctgttccgacaggtgcgacacttggcgctccatgcttgcgggtgccgggaggcctggcctcccccagggccgccacctctgctggttgctctgtgctttcaccttaaagctctgccaagcagaggctcccgtgcaggaagagaagctgtcagcaagcacctcaaatttgccatgctggctggtggaagagtttgtggtagcagaagagtgctctccatgctctaatttccgggctaaaactacccctgagtgtggtcccacaggatatgtagagaaaatcacatgcagctcatctaagagaaatgagttcaaaagctgccgctcagctttgatggaacaacgcttattttggaagttcgaaggggctgtcgtgtgtgtggccctgatcttcgcttgtcttgtcatcattcgtcagcgacaattggacagaaaggctctggaaaaggtccggaagcaaatcgagtccatatagctacattccacccttgtatcctgggtcttagagaccctatctcagacagtgaaagtgaaatggactgatttgcactcttggttctttggagccttgtggtggaatccccttttccccatcttcttctttcagatcattaatgagcagaataaaaagagtaaaatggt

SEQ ID NO: 437 - protein, 146 aa, Homo sapiens
MLAGAGRPGLPQGRHLCWLLCAFTLKLCQAEAPVQEEKLSASTSNLPCWLVEEFVVAEECSPCSNFRAKTTPECGPTGYVEKITCSSSKRNEFKSCRSALMEQRLFWKFEGAVVCVALIFACLVIIRQRQLDRKALEKVRKQIESI

SEQ ID NO: 438 - DNA, 1238 bp, Homo sapiens
gaattcgaggatccgggtaccatgggaggaaaacttcttcctggcctgggctccgtgccgctctgtttgccaaccgtccagtcccgcctaccagtgccgggcgctccccacccctcccccggctcccccggtgtccgccatggccaaagcctacgaccacctcttcaagttgctgctgatcggggactcgggggtgggcaagacttgtctgatcattcgctttgcagaggacaacttcaacaacacttacatctccaccatcggaattgatttcaagatccgcactgtggatatagaggggaagaagatcaaactacaagtctgggacacggctggccaagagcggttcaagacaataactactgcctactaccgtggagccatgggcattatcctagtatacgacatcacggatgagaaatctttcgagaatattcagaactggatgaaaagcatcaaggagaatgcctcggctggggtggagcgcctcttgctggggaacaaatgtgacatggaggccaagaggaaggtgcagaaggagcaggccgataagttggctcgagagcatggaatccgatttttcgaaactagtgctaaatccagtatgaatgtggatgaggcttttagttccctggcccgggacatcttgctcaagtcaggaggccggagatcaggaaacggcaacaagcctcccagtactgacctgaaaacttgtgacaagaagaacaccaacaagtgctccctgggctgaggaccctttcttgcctccccaccccggaagctgaacctgagggagacaacggcagagggagtgagcaggggagaaatagcagaggggcttggagggtcacataggtagatggtaaagagaatgaggagaaaaaggagaaaagggaaaagcagaaaggaaaaaaaggaagagagaggaagggagaagggagaggaatgaattgaggaagtgaaagaaggcaaggaggtaggaagagagggaggaggaaaggaaggagagagatgcctcaggcttcagaccttacctgggttttcagggcaaacataaatgtaaatacactgatttattctgttactagatcaggttttagggtcctgcaaaaggctagctcggcactacactagggaatttgctcctgttctgtcacttgtcatggtctttcttggtattaaaggccaccatttgcacaaaaaaaaaaaaaaaccatggtacccggatcctcgaattc

SEQ ID NO: 439 - protein, 203 aa, Homo sapiens
MAKAYDHLFKLLLIGDSGVGKTCLIIRFAEDNFNNTYISTIGIDFKIRTVDIEGKKIKLQVWDTAGQERFKTITTAYYRGAMGIILVYDITDEKSFENIQNWMKSIKENASAGVERLLLGNKCDMEAKRKVQKEQADKLAREHGIRFFETSAKSSMNVDEAFSSLARDILLKSGGRRSGNGNKPPSTDLKTCDKKNTNKCSLG

SEQ ID NO: 440 - DNA, 344 bp, Homo sapiens
cctttccggcggtgacgacctacgcacacgagaacatgcctctcgcaaaggatctccttcatccctctccagaagaggagaagaggaaacacaagaagaaacgcctggtgcagagccccaattcctacttcatggatgtgaaatgcccaggatgctataaaatcaccacggtctttagccatgcacaaacggtagttttgtgtgttggctgctccactgtcctctgccagcctacaggaggaaaagcaaggcttacagaaggatgttccttcaggaggaagcagcactaaaagcactctgagtcaagatgagtgggaaaccatctcaataaacacattttggat

SEQ ID NO: 441 - protein, 84 aa, Homo sapiens
MPLAKDLLHPSPEEEKRKHKKKRLVQSPNSYFMDVKCPGCYKITTVFSHAQTVVLCVGCSTVLCQPTGGKARLTEGCSFRRKQH

SEQ ID NO: 442 - DNA, 1128 bp, Homo sapiens
actcaggcagcagccccttctttcttgccccagtctccagttctccagtgttcacaggtgagcctaccaacagccactgctcatgatggaggccatcaagaaaaagatgcagatgctgaagttagacaaggagaatgctctggatcgggcagagcaagctgaagctgagcagaagcaggcagaagaaagaagtaaacagctggaggatgagctggcagccatgcagaagaagctgaaagggacagaggatgagctggacaagtattctgaagctttgaaggatgcccaggagaagctggaactggcagagaagaaggctgctgatgctgaggctgaggtggcctccttgaaccgtaggatccagctggttgaagaagagctggaccgtgctcaggagcgcctggccactgccctgcaaaagctggaagaagctgaaaaagctgctgatgagagtgagagaggtatgaaggttattgaaaaccgggccttaaaagatgaagaaaagatggaactccaggaaatccaactcaaagaagctaagcacattgcagaagaggcagataggaagtatgaagaggtggctcgtaagttggtgatcattgaaggagacttggaacgcacagaggaacgagctgagctggcagagtctaagtgttctgagctggaggaggagctgaagaatgtcaccaacaacctcaagtctcttgaggctcaggcggagaagtactctcaaaaagaagataaatatgaggaagaaatcaagattcttactgataaactcaaggaggcagagacccgtgctgagtttgctgagagatcggtagccaagctggaaaagacaattgatgacctggaagatgagctctatgcccagaaactgaagtacaaggccattagcgaggagctggaccacgccctcaatgacatgacctctatataattatcaccgtttctgctctgttctggatctgccccctttactcctcggggaacccaaggccccactctcgctctggattccatttgggtcagcctggctggtccccaaggcattaggatgggggagcaaaaagcaacttatgtattttcttccacccccaccccaaattaaaatgttaagctgctgga

SEQ ID NO: 443 - protein, 285 aa, Homo sapiens
MMEAIKKKMQMLKLDKENALDRAEQAEAEQKQAEERSKQLEDELAAMQKKLKGTEDELDKYSEALKDAQEKLELAEKKAADAEAEVASLNRRIQLVEEELDRAQERLATALQKLEEAEKAADESERGMKVIENRALKDEEKMELQEIQLKEAKHIAEEADRKYEEVARKLVIIEGDLERTEERAELAESKCSELEEELKNVTNNLKSLEAQAEKYSQKEDKYEEEIKILTDKLKEAETRAEFAERSVAKLEKTIDDLEDELYAQKLKYKAISEELDHALNDMTSI

SEQ ID NO: 444 - DNA, 1636 bp, Homo sapiens
gtcagcggggaagctggaaggcgtcgttctcctttcccagctctcctgcctgtccgccatgttttcaggccgggtctggcttggtcttcccccgtaaggaaatggccggggagctccaggggacccaggcgccgtcgcttcggcggagctgggctgaccagccaggacagcggggtaaacccgaacaattctgcgcgaggtagggaggccatggcgtccggcagtaactggctctccggggtgaatgtcgtgctggtgatggcctacgggagcctggacttgaaagaggagattgatattcgactctccagggttcaggatatcaagtatgagccccagctccttgcagatgatgatgctagactactacaactggaaacccagggaaatcaaagttgctacaactatctgtataggatgaaagctctggatgccattcgtacctctgagatcccatttcattctgaaggccggcatccccgttccttaatgggcaagaatttccgctcctacctgctggatctgcgaaacactagtacgcctttcaagggtgtacgcaaagcactcattgatacccttttggatggctatgaaacagcccgctatgggacaggggtctttggccagaatgagtacctacgctatcaggaggccctgagtgagctggccactgcggttaaagcacgaattgggagctctcagcgacatcaccagtcagcagccaaagacctaactcagtcccctgaggtctccccaacaaccatccaggtgacatacctcccctccagtcagaagagtaaacgtgccaagcacttccttgaattgaagagctttaaggataactataacacattggagagtactctgtgacggagctgaaggactcttgccgtagattaagccagtcagttgcaatgtgcaagacaggctgcttgccgggccgccctcggaacatctggcccagcaggcccagactgtatccatccaagttcccgttgtatccagagttcttagagcttgtgtctaaagggtaattccccaacccttccttatgagcatttttagaacattggctaagactattttcccccagtagcgcttttttctggatttgcattcgggtgttattcttaatgtttctgtcaaagcttcttaaaaatcttcacttggtttcagccatagttcaccttccctgttccaggtttatttaattccaaaggtgagagttggagtgagatgtcttccatatctatacctttgtgcacagttgaatgggaactgtttgggtttagggcatcttagagttgattgatggaaaaagcagacaggaactggtgggaggtcaagtggggaagttggtgaatgtggaataacttacctttgtgctccacttaaaccagatgtgttgcagctttcctgacatgcaaggatctactttaattccacactctcattaataaattgaataaaagggaatgttttggcacctgatataatctgccaggctatgtgacagtaggaaggaatggtttcccctaacaagcccaatgcactggtctgactttataaattatttaataaaatgaactattatcaaataaaacgtatgaatcagtaaaaaaaaaaaaaaaaaaaa

SEQ ID NO: 445 - protein, 219 aa, Homo sapiens
MASGSNWLSGVNVVLVMAYGSLDLKEEIDIRLSRVQDIKYEPQLLADDDARLLQLETQGNQSCYNYLYRMKALDAIRTSEIPFHSEGRHPRSLMGKNFRSYLLDLRNTSTPFKGVRKALIDTLLDGYETARYGTGVFGQNEYLRYQEALSELATAVKARIGSSQRHHQSAAKDLTQSPEVSPTTIQVTYLPSSQKSKRAKHFLELKSFKDNYNTLESTL

SEQ ID NO: 446 - DNA, 3411 bp, Homo sapiens
cccgactaagtgacttaaactcccacctactcctggaataaggagtcaaagcccggataggcgcagtattctaccttgtaaatactgttatttgtatatactgtaaatgatgacatcggtgggcactaaccgagcccggggaaactgggaacaacctcaaaaccaaaaccagacacagcacaagcagcggccacaggccactgcagaacaaattagacttgcacagatgatttcggaccataatgatgctgactttgaggagaaggtgaaacaattgattgatattacaggcaagaaccaggatgaatgtgtgattgctttgcatgactgcaatggagatgtcaacagagctatcaatgttcttctggaaggaaacccagacacgcattcctgggagatggtcgggaagaagaagggagtctcaggccagaaggatggtggccagacggaatccaatgaggaaggcaaagaaaatcgagaccgggacagagactatagtcggcgacgtggtgggccaccaagacgggggagaggtgccagccgtggacgagagtttcgaggtcaggaaaatggattggatggcaccaagagtggagggccttctggaagaggaacagaaagaggcagaaggggccgtggccgaggcagaggtggctctggtaggcgaggaggaaggttttctgctcaaggaatgggaacctttaacccagctgattatgcagagccagccaatactgatgataactatggcaatagcagcggcaatacgtggaacaacactggccactttgaaccagatgatgggacgagtgcatggaggactgcaacagaggagtgggggactgaagattggaatgaagatctttctgagaccaagatcttcactgcctctaatgtgtcttcagtgcctctgcctgcggagaatgtgacaatcactgctggtcagagaattgaccttgctgttctgctggggaagacaccatctacaatggagaatgattcatctaatctggatccgtctcaggctccttctctggcccagcctctggtgttcagtaattcgaagcagactgccatatcacagcctgcttcagggaacacattttctcatcacagtatggtgagcatgttagggaaaggatttggtgatgtcggtgaagctaaaggcggcagtactacaggctcccagttcttggagcaattcaagactgcccaagccctggctcagttggcagctcagcattctcagtctggaagcaccaccacctcctcttgggacatgggctcgacgacacaatccccatcactggtgcagtatgatttgaagaacccaagtgattcagcagtgcacagcccctttacaaagcgccaggcttttaccccatcttcaaccatgatggaggtgttccttcaggagaagtcacctgcagtggctacctccacagctgcacctccacctccgtcttctcctctgccaagcaaatccacatcggctccacagatgtcgcctggatcttcagacaaccagtcctctagccctcagccggctcagcagaaactgaaacagcagaagaaaaaagcctccttgacttctaagattcctgctctggctgtggagatgcctggctcagcagatatctcagggctaaacctgcagtttggggcattgcagtttgggtcagagcctgtcctttctgattatgagtccacccccaccacgagcgcctcttcaagccaggctccaagtagcctgtataccagcacggccagtgaatcatcctctacaatttcatctaaccagagtcaggagtctggttatcagagcggcccaattcagtcgacaacctatacctcccaaaataatgctcagggccctctttatgaacagagatccacacagactcggcggtaccccagctccatctcttcatcaccccaaaaggacctgactcaggcaaagaatggcttcagttctgtgcaggccacgcagttacagaccacacaatctgttgaaggtgctacaggctctgcagtgaaatctgattcaccttccacttctagcatcccccctctcaatgaaacggtatctgcagcttccttactgacgacaaccaatcagcattcatcctccttgggtggcttgagccacagtgaggagattccaaatactaccaccacacaacacagcagcacgttatctacgcagcagaataccctttcatcatcaacatcttctgggcgcacttcgacatccactcttttgcacacaagtgtggagagtgaggcgaatctccattcttcctccagcactttttccaccacatccagcacagtctctgcacctcccccagtggtcagtgtctcctccagtctcaatagtggcagtagcctgggcctcagcctaggcagcaactccactgtcacagcctcgactcgaagctcagttgctacgacttcaggaaaagctcctcccaacctccctcctggggtcccgccgttgttgcctaatccgtatattatggctccagggctgttacatgcctacccgccacaagtatatggttatgatgacttgcagatgcttcagacaagatttccattggattactacagcatcccatttcccacacccactactccgctgactgggagggatggtagcctggccagcaacccttattctggtgacctcacaaagttcggccgtggggatgcctcctccccagccccggccacaaccttggcccaaccccaacagaaccagacgcagactcaccataccacgcagcagacattcctgaacccggcgctgcctcctggctacagttacaccagcctgccatactatacaggggtcccgggcctccccagcaccttccagtatgggcctgctgtgttccctgtggctcctacctcttccaagcagcatggtgtgaatgtcagtgtgaatgcatcggccacccctttccaacagccgagtggatatgggtctcatggatacaacactggaagaaaatatccacccccttacaagcatttctggacggctgagagctaatttggcccaaggctgggggctgtgttttgtgtgtgtgtataaatttgcactgaagtcttgtttcagaaaccagaccactgaggagagcctgctgagctgaggccatggcctgcgtggcttggggaaatgagttggtggataccttctgggcttttgaacttgcccctcccccatttccctctcccccatgtgtctgaccctgtcttacccatttcaagttcaagcggtgcagcaccttcgaagcatcaatgcacacacctgctgttgcttttgatttctggaaggcatgtagtttcaacttgtaacaaaaatatttgtagtcttcaataaactgtggtatttctttagctaac

SEQ ID NO: 447 - protein, 983 aa, Homo sapiens
MMTSVGTNRARGNWEQPQNQNQTQHKQRPQATAEQIRLAQMISDHNDADFEEKVKQLIDITGKNQDECVIALHDCNGDVNRAINVLLEGNPDTHSWEMVGKKKGVSGQKDGGQTESNEEGKENRDRDRDYSRRRGGPPRRGRGASRGREFRGQENGLDGTKSGGPSGRGTERGRRGRGRGRGGSGRRGGRFSAQGMGTFNPADYAEPANTDDNYGNSSGNTWNNTGHFEPDDGTSAWRTATEEWGTEDWNEDLSETKIFTASNVSSVPLPAENVTITAGQRIDLAVLLGKTPSTMENDSSNLDPSQAPSLAQPLVFSNSKQTAISQPASGNTFSHHSMVSMLGKGFGDVGEAKGGSTTGSQFLEQFKTAQALAQLAAQHSQSGSTTTSSWDMGSTTQSPSLVQYDLKNPSDSAVHSPFTKRQAFTPSSTMMEVFLQEKSPAVATSTAAPPPPSSPLPSKSTSAPQMSPGSSDNQSSSPQPAQQKLKQQKKKASLTSKIPALAVEMPGSADISGLNLQFGALQFGSEPVLSDYESTPTTSASSSQAPSSLYTSTASESSSTISSNQSQESGYQSGPIQSTTYTSQNNAQGPLYEQRSTQTRRYPSSISSSPQKDLTQAKNGFSSVQATQLQTTQSVEGATGSAVKSDSPSTSSIPPLNETVSAASLLTTTNQHSSSLGGLSHSEEIPNTTTTQHSSTLSTQQNTLSSSTSSGRTSTSTLLHTSVESEANLHSSSSTFSTTSSTVSAPPPVVSVSSSLNSGSSLGLSLGSNSTVTASTRSSVATTSGKAPPNLPPGVPPLLPNPYIMAPGLLHAYPPQVYGYDDLQMLQTRFPLDYYSIPFPTPTTPLTGRDGSLASNPYSGDLTKFGRGDASSPAPATTLAQPQQNQTQTHHTTQQTFLNPALPPGYSYTSLPYYTGVPGLPSTFQYGPAVFPVAPTSSKQHGVNVSVNASATPFQQPSGYGSHGYNTGRKYPPPYKHFWTAES

SEQ ID NO: 448 - DNA, 1023 bp, Homo sapiens
cctacagaggggtccataccgtgttgttctggattcccgttgtaacttaaagggaaattttcacaatgtccagagcccttgatgtcctgcaaatgaaggaggaggatgtccttaagttccttgcagcaggaacccacttaggtggcactaatcttgacttccagatggaacagtacatctataaaaggaaaagtgatggcatctacatcataaatctgaagaggacctgggagaagcttctgctggcagctcgtgccattgttgccattgaaaaccctgctgatgtcagtgttatatcctccaggaatactggccagagggccatgctgaagtttgctgctgccactggagccactccaattgctggccacttcactcctggaaccttcactaaccggatccaggcagccttccgggagccacagcttcctgtggttactgaccccagggctgaccaccagcctctcacggaggtatcttatgttaacttacctaccattgcgctgtgtaacacagattctcctctgcgctatgtggacattgccatcccatgcaacaataagggagctcactcagtgggttggatgtggtggatgctggctcaggaagttctgcgcatgcgtggcaccatttcccgtgaacacccatgggaggtcatgcctgatctctgcttctacagagatcctgaagagattgaaaaagaagagcaggctgctgctgaagaggcagtgaccaaggaggaatttcagggtgaatggactgctccagctcctgagttcactgctactcagcctgaggttgcagactggtctgaaggtctgcaggtgccctctgtgtctattcagtagttccctactgaagactggagcgctcagcctgccacggaagactggtctgcagctcccactgctcaggccactgaatgggtaggagcaaccactgaatggtcttaagctgttcttgcatgggctcttaagcaacatggaaaaatggttgatggaaaataaataaacatcagtttct

SEQ ID NO: 449 - protein, 295 aa, Homo sapiens
MSRALDVLQMKEEDVLKFLAAGTHLGGTNLDFQMEQYIYKRKSDGIYIINLKRTWEKLLLAARAIVAIENPADVSVISSRNTGQRAMLKFAAATGATPIAGHFTPGTFTNRIQAAFREPQLPVVTDPRADHQPLTEVSYVNLPTIALCNTDSPLRYVDIAIPCNNKGAHSVGWMWWMLAQEVLRMRGTISREHPWEVMPDLCFYRDPEEIEKEEQAAAEEAVTKEEFQGEWTAPAPEFTATQPEVADWSEGLQVPSVSIQSSLLKTGALSLPRKTGLQLPLLRPLNGVGATTEWS

SEQ ID NO: 450 - DNA, 6612 bp, Homo sapiens
cgaaattgaaccggagccatcttgggcccggcgcgcagacccgcggagtttcccgtgccgacgccccggggccacttccagtgcggagtagcggaggcgtgggggcctcgaggggctggcgcggcccagcggtcgggccagggtcgtgccgccggcgggtcgggccgggcaatgcctcgcgggcgcaatgaatccgcggcaggggtattccctcagcggatactacacccatccatttcaaggctatgagcacagacagctcaggtaccagcagcctgggccaggatcttcccccagtagtttcctgcttaagcaaatagaatttctcaaggggcagctcccagaagcaccggtgattggaaagcagacaccgtcactgccaccttccctcccaggactccggccaaggtttccagtactacttgcctccagtaccagaggcaggcaagtggacatcaggggtgtccccaggggcgtgcatctcagaagtcaggggctccagagagggttccagcatccttcaccacgtggcaggagtctgccacagagaggtgttgattgcctttcctcacatttccaggaactgagtatctaccaagatcaggaacaaaggatcttaaagttcctggaagagcttggggaagggaaggccaccacagcacatgatctgtctgggaaacttgggactccgaagaaagaaatcaatcgagttttatactccctggcaaagaagggcaagctacagaaagaggcaggaacaccccctttgtggaaaatcgcggtctccactcaggcttggaaccagcacagcggagtggtaagaccagacggtcatagccaaggagccccaaactcagacccgagtttggaaccggaagacagaaactccacatctgtctcagaagatcttcttgagccttttattgcagtctcagctcaggcttggaaccagcacagcggagtggtaagaccagacagtcatagccaaggatccccaaactcagacccaggtttggaacctgaagacagcaactccacatctgccttggaagatcctcttgagtttttagacatggccgagatcaaggagaaaatctgcgactatctcttcaatgtgtctgactcctctgccctgaatttggctaaaaatattggccttaccaaggcccgagatataaatgctgtgctaattgacatggaaaggcagggggatgtctatagacaagggacaacccctcccatatggcatttgacagacaagaagcgagagaggatgcaaatcaagagaaatacgaacagtgttcctgaaaccgctccagctgcaatccctgagaccaaaagaaacgcagagttcctcacctgtaatatacccacatcaaatgcctcaaataacatggtaaccacagaaaaagtggagaatgggcaggaacctgtcataaagttagaaaacaggcaagaggccagaccagaaccagcaagactgaaaccacctgttcattacaatggcccctcaaaagcagggtatgttgactttgaaaatggccagtgggccacagatgacatcccagatgacttgaatagtatccgcgcagcaccaggtgagtttcgagccatcatggagatgccctccttctacagtcatggcttgccacggtgttcaccctacaagaaactgacagagtgccagctgaagaaccccatcagcgggctgttagaatatgcccagttcgctagtcaaacctgtgagttcaacatgatagagcagagtggaccaccccatgaacctcgatttaaattccaggttgtcatcaatggccgagagtttcccccagctgaagctggaagcaagaaagtggccaagcaggatgcagctatgaaagccatgacaattctgctagaggaagccaaagccaaggacagtggaaaatcagaagaatcatcccactattccacagagaaagaatcagagaagactgcagagtcccagacccccaccccttcagccacatccttcttttctgggaagagccccgtcaccacactgcttgagtgtatgcacaaattggggaactcctgcgaattccgtctcctgtccaaagaaggccctgcccatgaacccaagttccaatactgtgttgcagtgggagcccaaactttccccagtgtgagtgctcccagcaagaaagtggcaaagcagatggccgcagaggaagccatgaaggccctgcatggggaggcgaccaactccatggcttctgataaccagcctgaaggtatgatctcagagtcacttgataacttggaatccatgatgcccaacaaggtcaggaagattggcgagctcgtgagatacctgaacaccaaccctgtgggtggccttttggagtacgcccgctcccatggctttgctgctgaattcaagttggtcgaccagtccggacctcctcacgagcccaagttcgtttaccaagcaaaagttgggggtcgctggttcccagccgtctgcgcacacagcaagaagcaaggcaagcaggaagcagcagatgcggctctccgtgtcttgattggggagaacgagaaggcagaacgcatgggtttcacagaggtaaccccagtgacaggggccagtctcagaagaactatgctcctcctctcaaggtccccagaagcacagccaaagacactccctctcactggcagcaccttccatgaccagatagccatgctgagccaccggtgcttcaacactctgactaacagcttccagccctccttgctcggccgcaagattctggccgccatcattatgaaaaaagactctgaggacatgggtgtcgtcgtcagcttgggaacagggaatcgctgtgtgaaaggagattctctcagcctaaaaggagaaactgtcaatgactgccatgcagaaataatctcccggagaggcttcatcaggtttctctacagtgagttaatgaaatacaactcccagactgcgaaggatagtatatttgaacctgctaagggaggagaaaagctccaaataaaaaagactgtgtcattccatctgtatatcagcactgctccgtgtggagatggcgccctctttgacaagtcctgcagcgaccgtgctatggaaagcacagaatcccgccactaccctgtcttcgagaatcccaaacaaggaaagctccgcaccaaggtggagaacggagaaggcacaatccctgtggaatccagtgacattgtgcctacgtgggatggcattcggctcggggagagactccgtaccatgtcctgtagtgacaaaatcctacgctggaacgtgctgggcctgcaaggggcactgttgacccacttcctgcagcccatttatctcaaatctgtcacattgggttaccttttcagccaagggcatctgacccgtgctatttgctgtcgtgtgacaagagatgggagtgcatttgaggatggactacgacatccctttattgtcaaccaccccaaggttggcagagtcagcatatatgattccaaaaggcaatccgggaagactaaggagacaagcgtcaactggtgtctggctgatggctatgacctggagatcctggacggtaccagaggcactgtggatgggccacggaatgaattgtcccgggtctccaaaaagaacatttttcttctatttaagaagctctgctccttccgttaccgcagggatctactgagactctcctatggtgaggccaagaaagctgcccgtgactacgagacggccaagaactacttcaaaaaaggcctgaaggatatgggctatgggaactggattagcaaaccccaggaggaaaagaacttttatctctgcccagtatagtatgctccagtgacagatggattagggtgtgtcatactagggtgtgagagaggtaggtcgtagcattcctcatcacatggtcaggggatttttttttctcctttttttttctttttaagccataattggtgatactgaaaactttgggttcccatttatcctgctttctttgggattgctaggcaaggtctggccaggccccccttttttcccccaagtgaagaggcagaaacctaagaagttatcttttctttctacccaaagcatacatagtcactgagcacctgcggtccatttcctcttaaaagttttgttttgatttgtttccatttcctttccctttgtgtttgctacactgacctcttgcggtcttgattaggtttcagtcaactctggatcatgtcagggactgataatttcatttgtggattacgcagacccctctacttcccctctttcccttctgagattctttccttgtgatctgaatgtctccttttccccctcagagggcaaagaggtgaacataaaggatttggtgaaacatttgtaagggtaggagttgaaaactgcagttcccagtgccacggaagtgtgattggagcctgcagataatgcccagccatcctcccatcctgcactttagccagctgcagggcgggcaaggcaaggaaagctgcttccctggaagtgtatcactttctccggcagctgggaagtctagaaccagccagactgggttaagggagctgctcaagcaatagcagaggtttcacccggcaggatgacacagaccacttcccagggagcacgggcatgccttggaatattgccaagcttccagctgcctcttctcctaaagcattcctaggaatattttccccgccaatgctgggcgtacaccctagccaacgggacaaatcctagagggtataaaatcatctctgctcagataatcatgacttagcaagaataagggcaaaaaatcctgttggcttaacgtcactgttccacccggtgtaatatctctcatgacagtgacaccaagggaagttgactaagtcacatgtaaattaggagtgttttaaagaatgccatagatgttgattcttaactgctacagataacctgtaattgagcagatttaaaattcaggcatacttttccatttatccaagtgctttcatttttccagatggcttcagaagtaggctcgtgggcagggcgcagacctgatctttatagggttgacatagaaagcagtagttgtgggtgaaagggcaggttgtcttcaaactctgtgaggtagaatcctttgtctatacctccatgaacattgactcgtgtgttcagagcctttggcctctctgtggagtctggctctctggctcctgtgcattctttgaatagtcactcgtaaaaactgtcagtgcttgaaactgtttcctttactcatgttgaagggactttgttggcttttagagtgttggtcatgactccaagagcagagcagggaagagcccaagcatagacttggtgccgtggtgatggctgcagtccagttttgtgatgctgcttttacgtgtccctcgataacagtcagctagacacactcaggaggactactgaggctctgcgaccttcaggagctgagcctgcctctctcctttagatgacagaccttcatctgggaacgtgctgagccagcaccctcagatgatttccctccaaactgctgactaggtcatcctctgtctggtagagacattcacatctttgcttttattctatgctctctgtacttttgaccaaaaattgaccaaagtaagaaaatgcaagttctaaaaatagactaaggatgcctttgcagaacaccaaagcatcccaaggaactggtagggaagtggcgcctgtctcctggagtggaagaggcctgctccctggctctgggtctgctgggggcacagtaaatcagtcttggcacccacatccagggcagagaggtctgtggttctcagcatcagaaggcagcgcagcccctctcctcttcaggctacagggttgtcacctgctgagtcctcaggttgtttggcctctctggtccatcttgggcattaggttctccagcagagctctggccagctgcctcttctttaactgggaacacaggctctcacaagatcagaacccccactcacccccaagatcttatctagcaagcctgtagtattcagtttctgttgtaggaagagagcgaggcatccctgaattccacgcatctgctggaaacgagccgtgtcagatcgcacatccctgcgcccccatgcccctctgagtcacacaggacagaggaggcagagcttctgcccactgttatcttcactttctttgtccagtcttttgtttttaataagcagtgaccctccctactcttctttttaatgatttttgtagttgatttgtctgaactgtggctactgtgcattccttgaataatcacttgtaaaaattgtcagtgcttgaagctgtttcctttactcacattgaagggacttcgttggttttttggagtcttggttgtgactccaagagcagagtgaggaagacccccaagcatagactcgggtactgtgatgatggctgcagtccagttttatgattctgcttttatgtgtcccttgataacagtgacttaacaatatacattcctcataaataaaaaaaaaacaagaatctgaattctt

SEQ ID NO: 451 - DNA, 3054 bp, Homo sapiens
gagccagcgaggagtgaagctgagcctggcctcacacgctcctagaggaccacctcctgagagagttctttcaccccctcttctttctccaagctcccctcctgctctccctccctgcccaatacaatgcattcttgagtggcagcgtctggactccaggcagccccagagaaccgaagcaagccaaagagaggactggagccaagatactggtgggggagattggatgcctggctttctttgaggacatctttggagcgagggtggctttggggtgggggcttgtgctgcagggaatacagccaggccccaagatggacacttctgggcacttccatgactcgggggtgggggacttggatgaagaccccaagtgcccctgtccatcctctggggatgagcagcagcagcagcagcagcagcaacagcagcagcagccaccaccgccagcgccaccagcagccccccagcagcccctgggaccctcgctgcagcctcagcctccgcagcttcagcagcagcagcagcagcagcagcagcagcagcagcagcagccaccgcatcccctgtctcagctcgcccaactccagagccagcccgtccaccctggcctgctgcactcctctcccaccgctttcagggcccccccttcgtccaactccaccgccatcctccacccttcctccaggcaaggcagccagctcaatctcaatgaccacttgcttggccactctccaagttccacagctacaagtgggcctggcggaggcagccggcaccgacaggccagccccctggtgcaccggcgggacagcaaccccttcacggagatcgccatgagctcctgcaagtatagcggtggggtcatgaagcccctcagccgcctcagcgcctcccggaggaacctcatcgaggccgagactgagggccaacccctccagcttttcagccctagcaaccccccggagatcgtcatctcctcccgggaggacaaccatgcccaccagaccctgctccatcaccctaatgccacccacaaccaccagcatgccggcaccaccgccagcagcaccaccttccccaaagccaacaagcggaaaaaccaaaacattggctataagctgggacacaggagggccctgtttgaaaagagaaagcgactgagtgactatgctctgatttttgggatgtttggaattgttgttatggtgatagagaccgagctctcttggggtttgtactcaaaggactccatgttttcgttggccctgaaatgccttatcagtctgtccaccatcatccttttgggcttgatcatcgcctaccacacacgtgaagtccagctcttcgtgatcgacaatggcgcggatgactggcggatagccatgacctacgagcgcatcctgtacatcagcctggagatgctggtgtgcgccatccaccccattcctggcgagtacaagttcttctggacggcacgcctggccttctcctacacaccctcccgggcggaggccgatgtggacatcatcctgtctatccccatgttcctgcgcctgtacctgatcgcccgagtcatgctgctgcacagcaagctcttcaccgatgcctcgtcccgcagcatcggggccctcaacaagatcaacttcaacacccgctttgtcatgaagacgctcatgaccatctgccctggcactgtgctgctcgtgttcagcatctctctgtggatcattgctgcctggaccgtccgtgtctgtgaaaggtaccatgaccagcaggacgtaactagtaactttctgggtgccatgtggctcatctccatcacattcctttccattggttatggggacatggtgccccacacatactgtgggaaaggtgtctgtctcctcactggcatcatgggtgcaggctgcactgcccttgtggtggccgtggtggcccgaaagctggaactcaccaaagcggagaagcacgttcataacttcatgatggacactcagctcaccaagcggatcaagaatgctgcagccaatgtccttcgggaaacatggttaatctataaacacacaaagctgctaaagaagattgaccatgccaaagtgaggaaacaccagaggaagttcctccaagctatccaccagttgaggagcgtcaagatggaacagaggaagctgagtgaccaagccaacactctggtggacctttccaagatgcagaatgtcatgtatgacttaatcacagaactcaatgaccggagcgaagacctggagaagcagattggcagcctggagtcgaagctggagcatctcaccgccagcttcaactccctgccgctgctcatcgccgacaccctgcgccagcagcagcagcagctcctgtctgccatcatcgaggcccggggtgtcagcgtggcagtgggcaccacccacaccccaatctccgatagccccattggggtcagctccacctccttcccgaccccgtacacaagttcaagcagttgctaaataaatctccccactccagaagcattacccataggtcttaagatgcaaatcaactctctcctggtcgctttgccatcaagaaacattcagaccagggaacggaaagaagagagaccgagctaattaactaactcatgttcattcagcgtgcttggtccgacatgccttgaaaccagaaatctaatctctgtttaggtgcctctacttgggagcgggaagaggagatgacaggaagcgacgcctctggcagggcccttgctgcagagttggtggagaacagaaatccacgctcaatctcaggtcttcacgcggggggtgggggtcagatgcactgaagtagccaacagcgaagccagtccagaagaggggtccgctgggagggagggttgtgtcaggcttgggggatgggctcttcgccatgggggtctttgaacacacctctctcctttccttttgtctacggaagcctctgggtgacaaaagtaaaagagagctgcccacaacttgccaaaacagatatactcgaatcagactgaaaaaaaaa

SEQ ID NO: 452 - DNA, 1339 bp, Homo sapiens
gaaggttctgggcggggctggactgttctaagtgagttcgggtgggggagcttcacgaggggaggctgctctgtgaaggaaccgcctttctctccgcgtgtctcacccttttctccccatatctgtttggacatgagctgagggcacggtcgcgggcggtcagccctgttcgcagctacggcgaggaggggcgcgattgttccttgttgccgctccgcttagtggccgcgtccattccgcgcggtgtcccgattttaggggtagggagaagtgtcagcttcaggcatcgcgaggcgtggcggccccatggccccgctgggaggcgccccgcggctggtactgctgttcagcggcaagaggaaatccgggaaggacttcgtgaccgaggcgctgcagagcagacttggagctgatgtctgtgctgtcctccggctctctggtccactcaaggaacagtatgctcaggagcatggcttgaacttccagagactcctggacaccagcacctacaaggaggcctttcggaaggacatgatccgctggggagaggagaaacgccaggctgacccaggcttcttttgcaggaagattgtggagggcatctcccagcccatctggctggtgagtgacacacggagagtgtctgacatccagtggtttcgggaggcctatggggccgtgacgcagacggtccgcgttgtagcgttggagcagagccgacagcagcggggctgggtgttcacgccaggggtggacgatgctgagtcagaatgtggcctggacaacttcggggactttgactgggtcatcgagaaccatggagttgaacagcgcctggaggagcagttggagaacctgatagaatttatccgctccagactttagtcactaggttctaggagtgagctggggcctgctgaggtgggggtggggctgactctgcaaaatgggggtgtcccccgatcctggccgaggtgaggaacagacagggggggtctagattctgagggggttggtggatattgggcaaggcaggaaacctctggagacctcattttctccatggggaagacagccatgctcttcaggaggagactccaagggcaaaggagggtgtcttggctgtgcttgaaggcgaaaccctgccatatccccagtgccagtcccctcagcctgtggtggccttgcatcctgactggatgttctcagccccttgttctgggcaagaacccagagctccccagtgtggatactaataaacctcttggagcacactctcaaaacaaaaaaaaaaaaaaaaaaaaaaaaaaaaaaaaaaaaaaaaaaaaaaaacctcggg

SEQ ID NO: 453 - protein, 192 aa, Homo sapiens
MAPLGGAPRLVLLFSGKRKSGKDFVTEALQSRLGADVCAVLRLSGPLKEQYAQEHGLNFQRLLDTSTYKEAFRKDMIRWGEEKRQADPGFFCRKIVEGISQPIWLVSDTRRVSDIQWFREAYGAVTQTVRVVALEQSRQQRGWVFTPGVDDAESECGLDNFGDFDWVIENHGVEQRLEEQLENLIEFIRSRL

SEQ ID NO: 454 - DNA, 3450 bp, Homo sapiens
atggggcctgaaactgtctgggtctgagctggggagcggaagccacttgtccctctccctccccaggacttctgtgactcctgggccacagaggtccaaccaggctaagggcctggggataccccctgcctggcccccttgcccaaactggcaggggggccaggctgggcagcagcccctctttcacctcaactatggatctcctgccccccaagcccaagtacaatccactccggaatgagtctctgtcatcgctggaggaaggggcttctgggtccacccccccggaggagctgccttccccatcagcttcatccctggggcccatcctgcctcctctgcctggggacgatagtcccactaccctgtgctccttcttcccccggatgagcaacctgaggctggccaacccggctggggggcgcccagggtctaagggggagccaggaagggcagctgatgatggggaggggatcgtaggggcagccatgccagactcaggccccctacccctcctccaggacatgaacaagctgagtggaggcggcgggcgcaggactcgggtggaagggggccagcttgggggcgaggagtggacccgccacgggagctttgtcaataagcccacgcggggctggctgcatcccaacgacaaagtcatgggacccggggtttcctacttggttcggtacatgggttgtgtggaggtcctccagtcaatgcgtgccctggacttcaacacccggactcaggtcaccagggaggccatcagtctggtgtgtgaggctgtgccgggtgctaagggggcgacaaggaggagaaagccctgtagccgcccgctcagctctatcctggggaggagtaacctgaaatttgctggaatgccaatcactctcaccgtctccaccagcagcctcaacctcatggccgcagactgcaaacagatcatcgccaaccaccacatgcaatctatctcatttgcatccggcggggatccggacacagccgagtatgtcgcctatgttgccaaagaccctgtgaatcagagagcctgccacattctggagtgtcccgaagggcttgcccaggatgtcatcagcaccattggccaggccttcgagttgcgcttcaaacaatacctcaggaacccacccaaactggtcacccctcatgacaggatggctggctttgatggctcagcatgggatgaggaggaggaagagccacctgaccatcagtactataatgacttcccggggaaggaaccccccttggggggggtggtagacatgaggcttcgggaaggagccgctccaggggctgctcgacccactgcacccaatgcccagacccccagccacttgggagctacattgcctgtaggacagcctgttgggggagatccagaagtccgcaaacagatgccacctccaccaccctgtccaggcagagagctttttgatgatccctcctatgtcaacgtccagaacctagacaaggcccggcaagcagtgggtggtgctgggccccccaatcctgctatcaatggcagtgcaccccgggacctgtttgacatgaagcccttcgaagatgctcttcgcgtgcctccacctccccagtcggtgtccatggctgagcagctccgaggggagccctggttccatgggaagctgagccggcgggaggctgaggcactgctgcagctcaatggggacttcctggtacgggagagcacgaccacacctggccagtatgtgctcactggcttgcagagtgggcagcctaagcatttgctactggtggaccctgagggtgtggttcggactaaggatcaccgctttgaaagtgtcagtcaccttatcagctaccacatggacaatcacttgcccatcatctctgcgggcagcgaactgtgtctacagcaacctgtggagcggaaactgtgatctgccctagcgctctcttccagaagatgccctccaatcctttccaccctattccctaactctcgggacctcgtttgggagtgttctgtgggcttggccttgtgtcagagctgggagtagcatggactctgggtttcatatccagctgagtgagagggtttgagtcaaaagcctgggtgagaatcctgcctctccccaaacattaatcaccaaagtattaatgtacagagtggcccctcacctgggcctttcctgtgccaacctgatgccccttccccaagaaggtgagtgcttgtcatggaaaatgtcctgtggtgacaggcccagtggaacagtcacccttctgggcaagggggaacaaatcacacctctgggcttcagggtatcccagacccctctcaacacccgccccccccatgtttaaactttgtgcctttgaccatctcttaggtctaatgatattttatgcaaacagttcttggacccctgaattcaatgacagggatgccaacaccttcttggcttctgggacctgtgttcttgctgagcaccctctccggtttgggttgggataacagaggcaggagtggcagctgtcccctctccctggggatatgcaacccttagagattgccccagagccccactcccggccaggcgggagatggacccctcccttgctcagtgcctcctggccggggcccctcaccccaaggggtctgtatatacatttcataaggcctgccctcccatgttgcatgcctatgtactctacgccaaagtgcagcccttcctcctgaagcctctgccctgcctccctttctgggagggcggggtgggggtgactgaatttgggcctcttgtacagttaactctcccaggtggattttgtggaggtgagaaaaggggcattgagactataaagcagtagacaatccccacataccatctgtagagttggaactgcattcttttaaagttttatatgcatatattttagggctgtagacttactttcctattttcttttccattgcttattcttgagcacaaaatgataatcaattattacatttatacatcacctttttgacttttccaagcccttttacagctcttggcattttcctcgcctaggcctgtgaggtaactgggatcgcaccttttataccagagacctgaggcagatgaaatttatttccatctaggactagaaaaacttgggtctcttaccgcgagactgagaggcagaagtcagcccgaatgcctgtcagtttcatggaggggaaacgcaaaacctgcagttcctgagtaccttctacaggcccggcccagcctaggcccggggtggccacaccacagcaagccggccccccctcttttggccttgtggataagggagagttgaccgttttcatcctggcctccttttgctgtttggatgtttccacgggtctcacttataccaaagggaaaactcttcattaaagtccgtatttcttct

SEQ ID NO: 455 - DNA, 1838 bp, Homo sapiens
gaaagagccggtgaaggggcagaacaggcaggttccctcgacccaggaccccctgttcccaggctatggcccccagtgccctgtagacctggcaggccccccgtgcttgcgacccctatttgggggtctgggtggctactggagggccttgcagaggggcagagaaggcaggaccatgacatctagggcctctgaactttctccggggcgcagcgtgacggctggcatcatcattgttggagatgagatccttaagttggaaacaacaaatggcttttgagtccaagagtgatgcaatcacagtgacgcattaaaacggttactccggagacatcagagcactgtggctggaggctgggagcctggccaggaagctgtcgccattgtccaggtgaaaggtgctaaggacctgcttggtggcagtggggacagaaagaagaaagcaggccaggcgtggtggctcacacctataattccagcactttgggaggctgaggcaggaggatcacttgagaccaggaattcaacaccagcctgggcaacatggcaagaccccatttctacaaaaaaaatttaaaatgagctgaatgtggtggcacgcgcctgtagtcccagctactcggaaggctggggtggcccttgaagccaggaggttgaggctgcagtgaactgtgactgagccactatactccagcctgggtgacagagacccagctttaaaaccaaacaaatggattttcccactcttgtgtccagtccaggcccctcagcagcctgaggtggtgtccttcaaagagcagagcactgcatcatcaggtggatgcagccatcatcttcaacccctccccttcatccctacagtactgatggcctcatcttccccttcaacccccagggacacactcaggacaccaacaccttctttctgtgccggacactgcgctccctaggggtccaggtttgccgagtctcagttgtacctgatgaggtagccaccattgcagctgaggtcacttctttctccaaccgcttcacccatgtcctcacagcagggggcatcggccccactcatgatgatgtgacctttgaggcagtggcacaggcctttggagatgagctgaagccacaccccaagttggaagcagccaccaaagccctaggaggggaaggctgggagaagctatcattggtgccctcctctgcccgcctgcattatggcacagatccttgcactggtcaacctttcagattccctctggtctccgtccgaaacgtctacctcttcccaggcattccagagctgctgcggcgggtgctggaggggatgaagggactattccaaaacccagctgttcagttccactcaaaggagctatatgtggctgctgatgaagcctccatcgcccccattctggctgaggcccaggcccactttggacgtaggcttggcctgggttcctaccctgactggggcagcaactactatcaggtgaagctgactctagactcagaggaagaaggacccctggaggaatgcttggcctacctgactgcccgtttgccccagggatcgctggtcccctacatgcccaacgctgtggagcaggccagtgaggctgtatacaaactcgctgaatcaggtagggaccttatggaggaggggcattatgcccaaagccattggtggcaccccagatctcagtaatgcaggggctgttgggtgcttcctgcaaatccctgagagggcagaagatagcttctgttaattcattattcttccaataaatgttgattgagtacctaaaaaaaaaaaaaaaaaaaaaaaaaaaaaaaaaaaa

SEQ ID NO: 456 - protein, 294 aa, Homo sapiens
MQPSSSTPPLHPYSTDGLIFPFNPQGHTQDTNTFFLCRTLRSLGVQVCRVSVVPDEVATIAAEVTSFSNRFTHVLTAGGIGPTHDDVTFEAVAQAFGDELKPHPKLEAATKALGGEGWEKLSLVPSSARLHYGTDPCTGQPFRFPLVSVRNVYLFPGIPELLRRVLEGMKGLFQNPAVQFHSKELYVAADEASIAPILAEAQAHFGRRLGLGSYPDWGSNYYQVKLTLDSEEEGPLEECLAYLTARLPQGSLVPYMPNAVEQASEAVYKLAESGRDLMEEGHYAQSHWWHPRSQ

SEQ ID NO: 457 - DNA, 2740 bp, Homo sapiens
cgctgccatgcggctggcgctgctctgggccctggggctcctgggcgcgggcagccctctgccttcctggccgctcccaaatataggtggcactgaggagcagcaggcagagtcagagaaggccccgagggagcccttggagccccaggtccttcaggacgatctcccaattagcctcaaaaaggtgcttcagaccagtctgcctgagcccctgaggatcaagttggagctggacggtgacagtcatatcctggagctgctacagaatagggagttggtcccaggccgcccaaccctggtgtggtaccagcccgatggcactcgggtggtcagtgagggacacactttggagaactgctgctaccagggaagagtgcggggatatgcaggctcctgggtgtccatctgcacctgctctgggctcagaggcttggtggtcctgaccccagagagaagctataccctggagcaggggcctggggaccttcagggtcctcccattatttcgcgaatccaagatctccacctgccaggccacacctgtgccctgagctggcgggaatctgtacacactcagacgccaccagagcaccccctgggacagcgccacattcgccggaggcgggatgtggtaacagagaccaagactgtggagttggtgattgtggctgatcactcggaggcccagaaataccgggacttccagcacctgctaaaccgcacactggaagtggccctcttgctggacacattcttccggcccctgaatgtacgagtggcactagtgggcctggaggcctggacccagcgtgacctggtggagatcagcccaaacccagctgtcaccctcgaaaacttcctccactggcgcagggcacatttgctgcctcgattgccccatgacagtgcccagctggtgactggtacttcattctctgggcctacggtgggcatggccattcagaactccatctgttctcctgacttctcaggaggtgtgaacatggaccactccaccagcatcctgggagtcgcctcctccatagcccatgagttgggccacagcctgggcctggaccatgatttgcctgggaatagctgcccctgtccaggtccagccccagccaagacctgcatcatggaggcctccacagacttcctaccaggcctgaacttcagcaactgcagccgacgggccctggagaaagccctcctggatggaatgggcagctgcctcttcgaacggctgcctagcctaccccctatggctgctttctgcggaaatatgtttgtggagccgggcgagcagtgtgactgtggcttcctggatgactgcgtcgatccctgctgtgattctttgacctgccagctgaggccaggtgcacagtgtgcatctgacggaccctgttgtcaaaattgccagctgcgcccgtctggctggcagtgtcgtcctaccagaggggattgtgacttgcctgaattctgcccaggagacagctcccagtgtccccctgatgtcagcctaggggatggcgagccctgcgctggcgggcaagctgtgtgcatgcacgggcgttgtgcctcctatgcccagcagtgccagtcactttggggacctggagcccagcccgctgcgccactttgcctccagacagctaatactcggggaaatgcttttgggagctgtgggcgcaaccccagtggcagttatgtgtcctgcacccctagagatgccatttgtgggcagctccagtgccagacaggtaggacccagcctctgctgggctccatccgggatctactctgggagacaatagatgtgaatgggactgagctgaactgcagctgggtgcacctggacctgggcagtgatgtggcccagcccctcctgactctgcctggcacagcctgtggccctggcctggtgtgtatagaccatcgatgccagcgtgtggatctcctgggggcacaggaatgtcgaagcaaatgccatggacatggggtctgtgacagcaacaggcactgctactgtgaggagggctgggcaccccctgactgcaccactcagctcaaagcaaccagctccctgaccacagggctgctcctcagcctcctggtcttattggtcctggtgatgcttggtgccggctactggtaccgtgcccgcctgcaccagcgactctgccagctcaagggacccacctgccagtacagggcagcccaatctggtccctctgaacggccaggacctccgcagagggccctgctggcacgaggcactaagtctcaggggccagccaagcccccacccccaaggaagccactgcctgccgacccccagggccggtgcccatcgggtgacctgcccggcccaggggctggaatcccgcccctagtggtaccctccagaccagcgccaccgcctccgacagtgtcctcgctctacctctgacctctccggaggttccgctgcctccaagccggacttagggcttcaagaggcgggcgtgccctctggagtcccctaccatgactgaaggcgccagagactggcggtgtcttaagactccgggcaccgccacgcgctgtcaagcaacactctgcggacctgccggcgtagttgcagcgggggcttggggaggggctgggggttggacgggattgaggaaggtccgcacagcctgtctctgctcagttgcaataaacgtgacatcttgggagcgttaaaaaaaaaaaaaaa

SEQ ID NO: 458 - protein, 814 aa, Homo sapiens
MRLALLWALGLLGAGSPLPSWPLPNIGGTEEQQAESEKAPREPLEPQVLQDDLPISLKKVLQTSLPEPLRIKLELDGDSHILELLQNRELVPGRPTLVWYQPDGTRVVSEGHTLENCCYQGRVRGYAGSWVSICTCSGLRGLVVLTPERSYTLEQGPGDLQGPPIISRIQDLHLPGHTCALSWRESVHTQTPPEHPLGQRHIRRRRDVVTETKTVELVIVADHSEAQKYRDFQHLLNRTLEVALLLDTFFRPLNVRVALVGLEAWTQRDLVEISPNPAVTLENFLHWRRAHLLPRLPHDSAQLVTGTSFSGPTVGMAIQNSICSPDFSGGVNMDHSTSILGVASSIAHELGHSLGLDHDLPGNSCPCPGPAPAKTCIMEASTDFLPGLNFSNCSRRALEKALLDGMGSCLFERLPSLPPMAAFCGNMFVEPGEQCDCGFLDDCVDPCCDSLTCQLRPGAQCASDGPCCQNCQLRPSGWQCRPTRGDCDLPEFCPGDSSQCPPDVSLGDGEPCAGGQAVCMHGRCASYAQQCQSLWGPGAQPAAPLCLQTANTRGNAFGSCGRNPSGSYVSCTPRDAICGQLQCQTGRTQPLLGSIRDLLWETIDVNGTELNCSWVHLDLGSDVAQPLLTLPGTACGPGLVCIDHRCQRVDLLGAQECRSKCHGHGVCDSNRHCYCEEGWAPPDCTTQLKATSSLTTGLLLSLLVLLVLVMLGAGYWYRARLHQRLCQLKGPTCQYRAAQSGPSERPGPPQRALLARGTKSQGPAKPPPPRKPLPADPQGRCPSGDLPGPGAGIPPLVVPSRPAPPPPTVSSLYL

SEQ ID NO: 459 - DNA, 534 bp, Homo sapiens
cgactttcccgatcgccaggcaggagtttctctcggtgactactatcgctgtcatgtctggtcgtggcaagcaaggaggcaaggcccgcgccaaggccaagtcgcgctcgtcccgcgctggccttcagttcccggtagggcgagtgcatcgcttgctgcgcaaaggcaactacgcggagcgagtgggggccggcgcgcccgtctacatggctgcggtcctcgagtatctgaccgccgagatcctggagctggcgggcaacgcggctcgggacaacaagaagacgcgcatcatccctcgtcacctccagctggccatccgcaacgacgaggaactgaacaagctgctgggcaaagtcaccatcgcccagggcggcgtcttgcctaacatccaggccgtactgctccctaagaagacggagagtcaccacaaggcaaagggcaagtgaggctgacgtccggcccaagtgggcccagcccggcccgcgtctcgaaggggcacctgtgaactcaaaaggctcttttcagagccaccca

SEQ ID NO: 460 - protein, 130 aa, Homo sapiens
MSGRGKQGGKARAKAKSRSSRAGLQFPVGRVHRLLRKGNYAERVGAGAPVYMAAVLEYLTAEILELAGNAARDNKKTRIIPRHLQLAIRNDEELNKLLGKVTIAQGGVLPNIQAVLLPKKTESHHKAKGK

SEQ ID NO: 461 - DNA, 1527 bp, Homo sapiens
ctttcgccatggctgccgggccgatctccgagcggaatcaggatgccactgtgtacgtggggggcctggatgagaaggttagtgaaccgctgctgtgggaactgtttctccaggctggaccagtagtcaacacccacatgccaaaggatagagtcactggccagcaccaaggctatggctttgtggaattcttgagtgaggaagatgctgactatgccattaagatcatgaacatgatcaaactctatgggaagccaatacgggtgaacaaagcatcagctcacaacaaaaacctggatgtaggggccaacattttcattgggaacctggaccctgagattgatgagaagttgctttatgatactttcagcgcctttggggtcatcttacaaacccccaaaattatgcgggaccctgacacaggcaactccaaaggttatgcctttattaattttgcttcatttgatgcttcggatgcagcaattgaagccatgaatgggcagtacctctgtaaccgtcctatcaccgtatcttatgccttcaagaaggactccaagggtgagcgccatggctcagcagccgaacgacttctggcagctcagaacccgctctcccaggctgatcgccctcatcagctgtttgcagatgcacctcctccaccctctgctcccaatcctgtggtatcatcattggggtctgggcttcctccaccaggcatgcctcctcctggctccttcccacccccagtgccacctcctggagccctcccacctgggatacccccagccatgcccccaccacctatgcctcctggggctgcaggacatggccccccatcggcaggaaccccaggggcaggacatcctggtcatggacactcacatcctcacccattcccaccgggtgggatgccccatccagggatgtctcagatgcagcttgcacaccatggccctcatggcttaggacatccccacgctggacccccaggctctgggggccagccaccgccccgaccaccacctggaatgcctcatcctggacctcctccaatgggcatgcccccccgagggcctccattcggatctcccatgggtcacccaggtcctatgcctccgcatggtatgcgtggacctcctccactgatgcccccccatggatacactggccctccacgacccccaccctatggctaccagcgggggcctctccctccacccagacccactccccggccaccagttccccctcgaggcccacttcgaggccctctccctcagtaaattcacattttccttcctcctgttacattttcccaatatcttttctattccttggaccaatcagagatgctgtagctccttggggcaaaggtactaatccctttcagcacccccactccattcccctttttaatgtaactttttccacaggaggtatttcttttttatgttggtcctgagtattttgcaaatgcacagagaaaataaaactaaactccttgttaaaaaaaaaaaaaaaaaaaaa

SEQ ID NO: 462 - protein, 424 aa, Homo sapiens
MAAGPISERNQDATVYVGGLDEKVSEPLLWELFLQAGPVVNTHMPKDRVTGQHQGYGFVEFLSEEDADYAIKIMNMIKLYGKPIRVNKASAHNKNLDVGANIFIGNLDPEIDEKLLYDTFSAFGVILQTPKIMRDPDTGNSKGYAFINFASFDASDAAIEAMNGQYLCNRPITVSYAFKKDSKGERHGSAAERLLAAQNPLSQADRPHQLFADAPPPPSAPNPVVSSLGSGLPPPGMPPPGSFPPPVPPPGALPPGIPPAMPPPPMPPGAAGHGPPSAGTPGAGHPGHGHSHPHPFPPGGMPHPGMSQMQLAHHGPHGLGHPHAGPPGSGGQPPPRPPPGMPHPGPPPMGMPPRGPPFGSPMGHPGPMPPHGMRGPPPLMPPHGYTGPPRPPPYGYQRGPLPPPRPTPRPPVPPRGPLRGPLPQ

SEQ ID NO: 463 - DNA, 4353 bp, Homo sapiens
gccgggagcagtcgccgctgccgcctccgcccgcggccgggacccccgtcctcgcccgggactccttacccggggaacctagaccaggtctccagaggcttgtggaagagaagcaggcgacccttcctgagttatcctggcttagcctcccaatctggctccccttccccttcccattcccctgctccccctgtcccttccccatccacccaactgaactgggtataggtcaaagctcctctccttccttttccttcctaggcactcattggctaggacctgtttgctcttttttttgtgcccagagatactggaacacgcttcatctaagtaactgtggggaggggtctttttgactctacaagtccttgagcaaaaagctgaaaaagaagcaggaggtggagaagacccagtgaagtgccccaagccccatcatggaagagggcttccgagaccgggcagctttcatccgtggggccaaagacattgctaaggaagtcaaaaagcatgcggccaagaaggtggtgaagggcctggacagagtccaggacgaatattcccgaagatcgtactcccgctttgaggaggaggatgatgatgatgacttccctgctcccagtgatggttattaccgaggagaagggacccaggatgaggaggaaggtggtgcatccagtgatgctactgagggccatgacgaggatgatgagatctatgaaggggaatatcagggcattccccgggcagagtctgggggcaaaggcgagcggatggcagatggggcgcccctggctggagtaagggggggcttgagtgatggggagggtccccctgggggccggggggaggcacaacgacggaaagaacgagaagaactggcccaacagtatgaagccatcctacgggagtgtggccacggccgcttccagtggacactgtattttgtgcttggtctggcgctgatggctgacggtgtggaggtctttgtggtgggcttcgtgctgcccagcgctgagaaagacatgtgcctgtccgactccaacaaaggcatgctaggcctcatcgtctacctgggcatgatggtgggagccttcctctggggaggtctggctgaccggctgggtcggaggcagtgtctgctcatctcgctctcagtcaacagcgtcttcgccttcttctcatcttttgtccagggttacggcactttcctcttctgccgcctactttctggggttgggattggagggtccatccccattgtcttctcctatttctccgagtttctggcccaggagaaacgaggggagcatttgagctggctctgcatgttttggatgattggtggcgtgtacgcagctgctatggcctgggccatcatcccccactatgggtggagttttcagatgggttctgcctaccagttccacagctggagggtcttcgtcctcgtctgcgcctttccttctgtgtttgccattggggctctgaccacgcagcctgagagcccccgtttcttcctagagaatggaaagcatgatgaggcctggatggtgctgaagcaggtccatgataccaacatgcgagccaaaggacatcctgagcgagtgttctcagtaacccacattaagacgattcatcaggaggatgaattgattgagatccagtcggacacagggacctggtaccagcgctggggggtccgggccttgagcctaggggggcaggtttgggggaattttctctcctgttttggtcccgaatatcggcgcatcactctgatgatgatgggtgtgtggttcaccatgtcattcagctactatggcctgaccgtctggtttcctgacatgatccgccatctccaggcagtggactacgcatcccgcaccaaagtgttccccggggagcgcgtagagcatgtaacttttaacttcacgttggagaatcagatccaccgaggcgggcagtacttcaatgacaagttcattgggctgcggctcaagtcagtgtcctttgaggattccctgtttgaagagtgttattttgaggatgtcacatccagcaacacgtttttccgcaactgcacattcatcaacactgtgttctataacactgacctgttcgagtacaagtttgtgaacagccgtctgataaacagtacattcctgcacaacaaggagggctgcccgctagacgtgacagggacgggcgaaggtgcctacatggtatactttgtgagcttcctggggacactggcagtgcttcctgggaatatcgtgtctgccctgctcatggacaagatcggcaggctcagaatgcttgctggctccagcgtgatgtcctgtgtctcctgcttcttcctgtcttttgggaacagtgagtcggccatgatcgctctgctctgcctttttggcggggtcagcattgcatcctggaatgcgctggacgtgttgactgttgaactctacccctcagacaagaggaccacagcttttggcttcctgaatgccctgtgtaagctggcagctgtgctggggatcagcatcttcacatccttcgtgggaatcaccaaggctgcacccatcctctttgcctcagctgcccttgcccttggcagctctctggccctgaagctgcctgagacccgggggcaggtgctgcagtgaaggggtctctagggctttgggattggcaggcacactgtgagaccaacaactccttccttcccctccctgccctgccatcctgacctccagagccctcactccccactccccgtgtttggtgtcttagctgtgtgtgcgtgtgcgtgtgcatgtgtgtaaaccccgtgggcagggactacagggaaggctccttcatcccagttttgagatgaagctgtactccccatttcccactgcccttgactttgcacaagagaaggctgagccccatccttctccccctgttagagaggggcccttgcttccctgttccaggggttccagaataggcttcctgccttccccatcattccctctgcctaggccctggtgaaaccacaggtatgcaattatgctaggggctggggctctggtgtagaccatggaccaaaagaacttcttagagtctgaagagtgggcctcgggtgccctctcacatctcctgttggatgctgggggagaagcaataaacctcagccctctggcctccactttcctctcaatttgggctgcaaatatgaagcctgaattttatgaaattagctttctgattcttatttattaatagattaagttctgaggcagctccgcaggactgtgtgtgaatgtgtatgtatacttacatatgtgtgtgcatgtgccatggggcggggggtatcactatactgtcctcaaatataagccaagggtaatttcagcggatgcacacacaaccctgcctcccacagttcctcccctaatctggtttctgtgttgagcctgggatggaggagccctaggccagcctgggataagagtcccacagtctagggagatctgagggcatccgacaaggcccatctccttccctcctcaagaagcagaggcctcctctggagtgagaggctccacccactacagcacaggcgggaatagcacagctgccctcccatgctccctacctgtcccctcacagggaggggagcaggggagggaaagaaaccaggcatctggtcaaaccagcagatcaaaaagcacaaagagctggggcagaggcaggaagcaggggccctcctggcagctcctctgagtggggagaggttgggcagtgagtgagggacccctaatgcagggactagaagcctcagtttccccattttacccttccacacaatagcctctgtaggttaggctgccccatcccaccctactctgtgtggctgctttctttggtgccctcccctcaccccactgtagctgtgacgtgttgtagtttttagatgtttgtaaaatgtttaaaaaaatgttaaaaggaaaaaagtgaaaataacaaaaaagaaaatcaaaattcaccttcgtcatgctgcgtccagtgccccaaccctgtggtcactctccccattttgtaacactgtaccaggtggtgactgtttaactctttggtgtctgtgctcaaaagactgccttctccagtgcccagtgtatgagtgtgtgccctgtgcccttgtccctcactccccacatgctggacgtagccctcttcctcgcacccctgggagggacccatccatctcccttgctctcctggggaaccctaaacccaactctgttgatgtgaaaaatgcagtgaaaaatattgacgaaaaataaaacggaaacaaatcctcaaaat

SEQ ID NO: 464 - protein, 742 aa, Homo sapiens
MEEGFRDRAAFIRGAKDIAKEVKKHAAKKVVKGLDRVQDEYSRRSYSRFEEEDDDDDFPAPSDGYYRGEGTQDEEEGGASSDATEGHDEDDEIYEGEYQGIPRAESGGKGERMADGAPLAGVRGGLSDGEGPPGGRGEAQRRKEREELAQQYEAILRECGHGRFQWTLYFVLGLALMADGVEVFVVGFVLPSAEKDMCLSDSNKGMLGLIVYLGMMVGAFLWGGLADRLGRRQCLLISLSVNSVFAFFSSFVQGYGTFLFCRLLSGVGIGGSIPIVFSYFSEFLAQEKRGEHLSWLCMFWMIGGVYAAAMAWAIIPHYGWSFQMGSAYQFHSWRVFVLVCAFPSVFAIGALTTQPESPRFFLENGKHDEAWMVLKQVHDTNMRAKGHPERVFSVTHIKTIHQEDELIEIQSDTGTWYQRWGVRALSLGGQVWGNFLSCFGPEYRRITLMMMGVWFTMSFSYYGLTVWFPDMIRHLQAVDYASRTKVFPGERVEHVTFNFTLENQIHRGGQYFNDKFIGLRLKSVSFEDSLFEECYFEDVTSSNTFFRNCTFINTVFYNTDLFEYKFVNSRLINSTFLHNKEGCPLDVTGTGEGAYMVYFVSFLGTLAVLPGNIVSALLMDKIGRLRMLAGSSVMSCVSCFFLSFGNSESAMIALLCLFGGVSIASWNALDVLTVELYPSDKRTTAFGFLNALCKLAAVLGISIFTSFVGITKAAPILFASAALALGSSLALKLPETRGQVLQ

SEQ ID NO: 465 - DNA, 2393 bp, Homo sapiens
ggcaggaaaagcggaagagggagcgaaaaccaacgtgttcggtgacagaccccagcgccgactgagcctctaaagcgacttcagctctgccccaccaacaccaccgcgcgcccgggaacagccgctccgggaagaaacctgaggggactgcggggggcacgagggacagctgagggaagggaggacgcgagagaaacagcgcgagcacgctgagggccgggggttgccaggagaggggcccgcggacccgcagagcggaggaaggtccgggagaaaaggggcgggacggaggagaatccgggatcgcctggcagaaaaagagaagggagtttctgaatcctgggaagaggaggcgtgggtagggacgcttagcccgagatccgacagcagggaaccggagcgctccgggggaggggcttaatgctggggaagggatgtcttaaaagaggagaagctttaaattagacgatcggagaaggctgagggaattgctatgaaggggcgggagctgaagtgtagaggactcctttagacagcagaaagggaaagccgttgagaagttcccttcaaactccacctgcctcctctccaattcaaactccactcccttctccaaaagttaaaaggaaagccaagtttaccacgctcccctgttcctactcaataaatacttcttctactccgccaccgggaaaacagaaaaaaaaactaatttccttcccaatattaggacttagaaaagctctaggtcccgcaatttgaattttagcctaggggaatcaaaatagtaggagcattactcttgtttcctttttcaaaatcccacacctcatccttcctgcgacgccatgtccaccaacatttgtagtttcaaggacaggtgcgtgtccatcctgtgttgcaaattctgtaaacaagtgctcagctctaggggaatgaaggctgttttgctggctgatactgaaatagaccttttctctacagacatccctcctaccaacgcagtggacttcactggaagatgctatttcaccaaaatctgcaaatgtaaactgaaggacatcgcatgtttaaaatgtgggaacattgtaggttatcatgtgattgttccatgtagttcctgtcttctttcctgcaacaacagacacttctggatgtttcacagccaggcagtttatgatattaacagactagactccacaggtgtaaacgtcctacttcggggcaacttgccagagatagaagagagtacagatgaagatgtgttaaatatctcagcagaggagtgtattagataaatggaattatgatatatatgatatacaaacttttttctatttaaaaatatattaatggatcaactttaaaattgttagttgccagtgatcttttttggaaaacaaaaatggggcatttgttgatttatttattttctgtctctaattagttacctcagtttgattgaagccagtggagttgtgcttttcctctacttctacttcctctcccccacctttttctgcccagtgtaggtgtattcttaaattcagacgggaagattctttcacatatcactcagttacctcccaatctgggggagtttttcttacaacttgataccagataccattaattttacattcctgaataaaggcctagtacccacgcatatttcaaccatgcatatatcaagttcaaccgagttttaataggggattaaaaaaacaagctgttaggtttccatgggcactggttctcataggttctattggtgataactgctttaacatggagcaagagtttgtgaatcaggaaatagaataaattaaaatttaaaatatatagaggaatcctcttgattgctcagcatgatgttagataaatgagtttgtcagaaaatatcagtatacgctgtttaccaatgttatttatttacattcttctaaagccattatggatattgtattatgagagctaaacctaaataagttatcctgttccctaggaccttctctgtaaatagtgaattttagacgagtggtctgtcctaaatcttaaatagaaaaaaaaactaaagcgatttgcttaagccattgtacattataaagagctgttttgttttgctttgctttgctttgttttgtttttttaaagctgcattcagagctacaaaggaataggaaagtagggtagtgttggattctggttttatgtaactctaaaataaatgtatctctttaatatctcagttgtagggattttgtcaataccaaagcagactgagttgtggttttgtaaataaagttttttctaaaaatgaccattcttcctttaattttttgttatgcccacatattgtatgtaaaaatataaataaatagtacttaaagtat

SEQ ID NO: 466 - DNA, 2500 bp, Homo sapiens
cagcagtgctgtttactcattggaggaacagtaccttggcttggctcttgacgtggacagaattaaaaaggaccaagaagaggaagaagaccaaggcccaccatgccccaggctcagcagggagctgctggaggtagtagagcctgaagtcttgcaggactcactggatagatgttattcaactccttccagttgtcttgaacagcctgactcctgccagccctatggaagttccttttatgcattggaggaaaagcatgttggcttttctcttgacgtgggagaaattgaaaagaaggggaaggggaagaaaagaaggggaagaagatcaaagaaggaaagaagaaggggaagaaaagaaggggaagaagatcaaaacccaccatgccccaggctcagcagggagctgctggatgagaaagggcctgaagtcttgcaggactcactggatagatgttattcaactccttcaggttgtcttgaactgactgactcatgccagccctacagaagtgccttttacatattggagcaacagcgtgttggcttggctgttgacatggatgaaattgaaaagtaccaagaagtggaagaagaccaagacccatcatgccccaggctcagcggggagctgttggatgagaaagagcctgaagtcttgcaggagtcactggatagatgctattcaactccttcaggttgtcttgaactgactgactcatgccagccctacagaagtgccttttacatattggagcaacagcgtgttggcttggctgttgacatggatgaaattgaaaagtaccaagaagtggaagaagaccaagacccatcatgccccaggctcagcagggagctgctggatgagaaagagcctgaagtcttgcaggactcactgggtagatgttattcgactccttcaggttatcttgaactgcctgacttaggccagccctacagcagtgctgtttactcattggaggaacagtaccttggcttggctcttgacgtggacagaattaaaaaggaccaagaagaggaagaagaccaaggcccaccatgccccaggctcagcagggagctgctggaggtagtagagcctgaagtcttgcaggactcactggatagatgttattcaactccttccagttgtcttgaacagcctgactcctgccagccctatggaagttccttttatgcattggaggaaaaacatgttggcttttctcttgacgtgggagaaattgaaaagaaggggaaggggaagaaaagaaggggaagaagatcaaagaaggaaagaagaaggggaagaaaagaaggggaagaagatcaaaacccaccatgccccaggctcaacagcatgctgatggaagtggaagagcctgaagtcttgcaggactcactggatatatgttattcgactccgtcaatgtactttgaactacctgactcattccagcactacagaagtgtgttttactcatttgaggaagagcatatcagcttcgccctttacgtggacaataggttttttactttgacggtgacaagtctccacctggtgttccagatgggagtcatattcccacaataagcagcccttactaagccgagaggtgtcattcctgcaggcaggacctataggcacgtgaagatttgaatgaaagtacagttccatttggaagcccagacataggatgggtcagtgggcatggctctattcctattctcaaaccatgccagtggcaacctgtgctcagtctgaagacaatggacccacgttaggtgtgacacgttcacataactgtgcagcacatgccgggagtgatcagtcagacattttaatttgaaccacgtatctctgggtagctacaaaattcctcagggatgtcattttgcaggcatgtctctgagcttctatacctgctcaaggtcattgtcatctttgtgtttagctcatccaaaggtgttaccctggtttcaatgaacctaacctcattctttgtgtcttcagtgttggcttgttttagctgatccatctgtaacacaggagggatccttggctgaggattgtatttcagaaccaccaactgctcttgacaattgttaacccgctaggctcctttggttagagaagccacagtccttcagcctccaattggtgtcagtacttaggaagaccacagctagatggacaaacagcattgggaggccttagccctgctcctctcaattccatcctgtagagaacaggagtcaggagccgctggcaggagacagcatgtcacccaggactctgccggtgcagaatatgagcaatgccatgttcttgcagaaaacgcttaacctgagtttcataggaggtaatcaccagacaactgcagaatgtagaacactgagcaggacaactgacctgtctccttcacatagtccatatcaccacaaatcacacaacaaaaaggagaagagatattttcggttgaaaaaaagtaaaaagata

SEQ ID NO: 467 - protein, 269 aa, Homo sapiens
MDEIEKYQEVEEDQDPSCPRLSRELLDEKEPEVLQDSLGRCYSTPSGYLELPDLGQPYSSAVYSLEEQYLGLALDVDRIKKDQEEEEDQGPPCPRLSRELLEVAEPEVLQDSLDRCYSTPSSCLEQPDSCQPYGSSFYALEEKHVGFSLDVGEIEKKGKGKKRRGRRSKKERRRGRKEGEEDQNPPCPRLNGVLMEVEEPEVLQDSLDICYSTPSMYFELPDSFQHYRSVFYSFEEEHISFALYVDNRFFTLTVTSLHLVFQMGVIFTQ

SEQ ID NO: 468 - DNA, 1949 bp, Homo sapiens
atgacgcgagaccccgcccccgcagcgcccgcttccaagatggcggcagcgatgcctgcccggctgttggggtggcggtgacgacaggcagcaaaagaccagctggtcccagattcgctgctggagtgctggatggagcctttctctgccctctgtgacatttccaattttagataatgcctcacatctctgtccccccgggaccccctggagcccccatgatccctaagaagacagcttgaacctagatctcacccccaggatgttgcggaggctgctggagcggccttgcacgctggccctgcttgtgggctcccagctggctgtcatgatgtacctgtcactggggggcttccgaagtctcagtgccctatttggccgagatcagggaccgacatttgactattctcaccctcgtgatgtctacagtaacctcagtcacctgcctggggccccagggggtcctccagctcctcaaggtctgccctactgtccagaacgatctcctctcttagtgggtcctgtgtcggtgtcctttagcccagtgccatcactggcagagattgtggagcggaatccccgggtagaaccagggggccggtaccgccctgcaggttgtgagccccgctcccgaacagccatcattgtgcctcatcgtgcccgggagcaccacctgcgcctgctgctctaccacctgcaccccttcttgcagcgccagcagcttgcttatggcatctatgtcatccaccaggctggaaatggaacatttaacagggcaaaactgttgaacgttggggtgcgagaggccctgcgtgatgaagagtgggactgcctgttcttgcacgatgtggacctcttgccagaaaatgaccacaatctgtatgtgtgtgacccccggggaccccgccatgttgccgttgctatgaacaagtttggatacagcctcccgtacccccagtacttcggaggagtctcagcacttactcctgaccagtacctgaagatgaatggcttccccaatgaatactggggctggggtggtgaggatgacgacattgctaccagggtgcgcctggctgggatgaagatctctcggccccccacatctgtaggacactataagatggtgaagcaccgaggagataagggcaatgaggaaaatccccacagatttgacctcctggtccgtacccagaattcctggacgcaagatgggatgaactcactgacataccagttgctggctcgagagctggggcctctttataccaacatcacagcagacattgggactgaccctcggggtcctcgggctccttctgggccacgttacccacctggttcctcccaagccttccgtcaagagatgctgcaacgccggcccccagccaggcctgggcctctatctactgccaaccacacagccctccgaggttcacactgactcctccttcctgtctaccttaatcatgaaaccgaattcatggggttgtattctccccaccctcagctcctcactgttctcagagggatgtgagggaactgaactctggtgccgtgctagggggtaggggcctctccctcactgctggactggagctgggctcctgtagacctgaggggtccctctctctagggtctcctgtagggcttatgactgtgaatccttgatgtcatgattttatgtgacgattcctaggagtccctgcccctagagtaggagcagggctggaccccaagcccctccctcttccatggagagaagagtgatctggcttctcctcggacctctgtgaatatttattctatttatggttcccgggaagttgtttggtgaaggaagcccctccctgggcattttctgcctatgctggaatagctccctcttctggtcctggctcagggggctgggattttgatatattttctaataaaggactttgtctcgc

SEQ ID NO: 469 - protein, 393 aa, Homo sapiens
MLRRLLERPCTLALLVGSQLAVMMYLSLGGFRSLSALFGRDQGPTFDYSHPRDVYSNLSHLPGAPGGPPAPQGLPYCPERSPLLVGPVSVSFSPVPSLAEIVERNPRVEPGGRYRPAGCEPRSRTAIIVPHRAREHHLRLLLYHLHPFLQRQQLAYGIYVIHQAGNGTFNRAKLLNVGVREALRDEEWDCLFLHDVDLLPENDHNLYVCDPRGPRHVAVAMNKFGYSLPYPQYFGGVSALTPDQYLKMNGFPNEYWGWGGEDDDIATRVRLAGMKISRPPTSVGHYKMVKHRGDKGNEENPHRFDLLVRTQNSWTQDGMNSLTYQLLARELGPLYTNITADIGTDPRGPRAPSGPRYPPGSSQAFRQEMLQRRPPARPGPLSTANHTALRGSH

SEQ ID NO: 470 - DNA, 2070 bp, Homo sapiens
ggcacgagggccccaggagaggcagagagtgagggaaagggcctggccggcatgcacagataggatcacggtcctgggagaattcctgctcttatagtctaacctaccatggcttctcttttctcaaggctccctcatgctgccctttggccctagtggctggtttccagggctgaggggactgagtgagctgcctgagaaaagagggtagggaacagaaaagccagccaggagctgtgggaggaaacgccctcagtaaagatgaccgcggtcactgttatctaaacgcaagtgaagccgagtcacaggacccggatgttgtcagttcgacggtaaacgaccctgccagcttccaagagggcggcttcactgtgcgaataggtgagaagccaagaaggaggcgcgctggagttacttccgcccggttctccttcccgcagtctgcagccggagtaagatggcggcgctgagggctttgtgcggcttccggggcgtcgcggcccaggtgctgcggcctggggctggagtccgattgccgattcagcccagcagaggtgttcggcagtggcagccagatgtggaatgggcacagcagtttgggggagctgttatgtacccaagcaaagaaacagcccactggaagcctccaccttggaatgatgtggaccctccaaaggacacaattgtgaagaacattaccctgaactttgggccccaacacccagcagcgcatggtgtcctgcgactagtgatggaattgagtggggagatggtgcggaagtgtgatcctcacatcgggctcctgcaccgaggcactgagaagctcattgaatacaagacctatcttcaggcccttccatactttgaccggctagactatgtgtccatgatgtgtaacgaacaggcctattctctagctgtggagaagttgctaaacatccggcctcctcctcgggcacagtggatccgagtgctgtttggagaaatcacacgtttgttgaaccacatcatggctgtgaccacacatgccctggaccttggggccatgacccctttcttctggctgtttgaagaaagggagaagatgtttgagttctacgagcgagtgtctggagcccgaatgcatgctgcttatatccggccaggaggagtgcaccaggacctaccccttgggcttatggatgacatttatcagttttctaagaacttctctcttcggcttgatgagttggaggagttgctgaccaacaataggatctggcgaaatcggacaattgacattggggttgtaacagcagaagaagcacttaactatggttttagtggagtgatgcttcggggctcaggcatccagtgggacctgcggaagacccagccctatgatgtttacgaccaggttgagtttgatgttcctgttggttctcgaggggactgctatgataggtacctgtgccgggtggaggagatgcgccagtccctgagaattatcgcacagtgtctaaacaagatgcctcctggggagatcaaggttgatgatgccaaagtgtctccacctaagcgagcagagatgaagacttccatggagtcactgattcatcactttaagttgtatactgagggctaccaagttcctccaggagccacatatactgccattgaggctcccaagggagagtttggggtgtacctggtgtctgatggcagcagccgcccttatcgatgcaagatcaaggctcctggttttgcccatctggctggtttggacaagatgtctaagggacacatgttggcagatgtcgttgccatcataggtacccaagatattgtatttggagaagtagatcggtgagcaggggagcagcgtttgatcccccctgcctatcagcttcttctgtggagcctgttcctcactggaaattggcctctgtgtgtgtgtgtgtgtgtgtgtgtgtgtgtgtatgttcgtgtacacttggctgtcaggctttctgtgcatgtactaaaaaaggagaaattataataaattagccgtcttgcggcccctaggcctaaaaaaaaaaaaaaaaaaaa

SEQ ID NO: 471 - protein, 463 aa, Homo sapiens
MAALRALCGFRGVAAQVLRPGAGVRLPIQPSRGVRQWQPDVEWAQQFGGAVMYPSKETAHWKPPPWNDVDPPKDTIVKNITLNFGPQHPAAHGVLRLVMELSGEMVRKCDPHIGLLHRGTEKLIEYKTYLQALPYFDRLDYVSMMCNEQAYSLAVEKLLNIRPPPRAQWIRVLFGEITRLLNHIMAVTTHALDLGAMTPFFWLFEEREKMFEFYERVSGARMHAAYIRPGGVHQDLPLGLMDDIYQFSKNFSLRLDELEELLTNNRIWRNRTIDIGVVTAEEALNYGFSGVMLRGSGIQWDLRKTQPYDVYDQVEFDVPVGSRGDCYDRYLCRVEEMRQSLRIIAQCLNKMPPGEIKVDDAKVSPPKRAEMKTSMESLIHHFKLYTEGYQVPPGATYTAIEAPKGEFGVYLVSDGSSRPYRCKIKAPGFAHLAGLDKMSKGHMLADVVAIIGTQDIVFGEVDR

SEQ ID NO: 472 - DNA, 655 bp, Homo sapiens
ccggaacccaagatggctgcgctgttgctgagacacgttggtcgtcattgcctccgagcccactttagccctcagctctgtatcagaaattggtctcttcccatggcgatgtccatctgccaccgtggcactggtattgctttgagtgcaggggtctctctttttggcatgtcggccctgttactccctgggaactttgagtcttatttggaacttgtgaagtccctgtgtctggggccagcactgatccacacagctaagtttgcacttgtcttccctctcatgtatcatacctggaatgggatccgacacttgatgtgggacctaggaaaaggcctgaagattccccagctataccagtctggagtggttgtcctggttcttactgtgttgtcctctatggggctggcagccatgtgaagaaaggaggctcccagcatcatcttcctacacattattacattcacccatctttctgtttgtcattcttatctccagcctgggaaaagttctccttatttgtttagatccttttgtattttcagatctccttggagcagtagagtacctggtagaccataatagtggaaaagggtctagttttccccttgtttctaaagatgaggtggctgcatctctctccatattgggcttt

SEQ ID NO: 473 - DNA, 990 bp, Homo sapiens
aatcatagtgaaagattcgttttcattgcagagtggtatgatccaaatgcttcacttcttcgacgttatgagcttttattttacccaggggatggatctgttgaaatgcatgatgtaaagaatcatcgcacctttttaaagcggaccaaatatgataacctgcacttggaagatttatttataggcaacaaagtgaatgtcttttctcgacaactggtattaattgactatggggatcaatatacagctcgccagctgggcagtaggaaagaaaaaacgctagccctaattaaaccagatgcaatatcaaaggctggagaaataattgaaataataaacaaagctggatttactataaccaaactcaaaatgatgatgctttcaaggaaagaagcattggattttcatgtagatcaccagtcaagaccctttttcaatgagctgatccagtttattacaactggtcctattattgccatggagattttaagagatgatgctatatgtgaatggaaaagactgctgggacctgcaaactctggagtggcacgcacagatgcttctgaaagcattagagccctctttggaacagatggcataagaaatgcagcgcatggccctgattcttttgcttctgcggccagagaaatggagttgttttttccttcaagtggaggttgtgggccggcaaacactgctaaatttactaattgtacctgttgcattgttaaaccccatgctgtcagtgaaggactgttgggaaagatcctgatggctatccgagatgcaggttttgaaatctcagctatgcagatgttcaatatggatcgggttaatgttgaggaattctatgaagtttataaaggagtagtgaccgaatatcataggacatggtgacagaaatgtattctggcccttgtgtagcaatggagattcaacagaataatgctacaaagacatttcgagaattttgtggacctgctgatcctg

SEQ ID NO: 474 - DNA, 1360 bp, Homo sapiens
gcccttgccttgagtcagtgcgctgctctccagcccgcttgaacgctccccgcagccaccgccacccattggaatggccaacaggggacctgcatatggcctgagccgggaggtgcagcagaagattgagaaacaatatgatgcagatctggagcagatcctgatccagtggatcaccacccagtgccgaaaggatgtgggccggccccagcctggacgcgagaacttccagaactggctcaaggatggcacggtgctatgtgagctcattaatgcactgtaccccgaggggcaggccccagtaaagaagatccaggcctccaccatggccttcaagcagatggagcagatctctcagttcctgcaagcagctgagcgctatggcattaacaccactgacatcttccaaactgtggacctctgggaaggaaagaacatggcctgtgtgcagcggacgctgatgaatctgggtgggctggcagtagcccgagatgatgggctcttctctggggatcccaactggttccctaagaaatccaaggagaatcctcggaacttctcagataaccagctgcaagagggcaagaacgtgatcgggttacagatgggcaccaaccgcggggcgtctcaggcaggcatgactggctacgggatgccacgccagatcctctgatcccaccccaggccttgcccctgccctcccacgaatggttaatatatatgtagatatatattttagcagtgacattcccagagagccccagagctctcaagctcctttctgtcagggtggggggttcagcctgtcctgtcacctctgaggtgcctgctggcatcctctcccccatgcttactaatacattcccttccccatagccatcaaaactggaccaactggcctcttcctttcccctgggaccaaaatttaggggcctcagtccctcaccgccatgccctggcctattctgtctctccttcttccccctggcctgttctgtctctgagctctgtgtcctccgttcattccatggctgggagtcactgatgctgcctctgccttctgatgctggactggccttgcttctacaagtatgcttctcccacagctgtggctgcaggaacttaatttatagggaggagcctgtggcagctgctgccccagccacagctgcactgactgtgctcaccacacatctggggcagccttccctggcaggggccctcgtggcttctcattttccattcccttcactgtggctaaggggtggggtgaggggatggagagggagggctgcctaccatggtctggggcttgaggaagatgagtttgttgatttaaataaagaatttgtcatttttg

SEQ ID NO: 475 - protein, 199 aa, Homo sapiens
MANRGPAYGLSREVQQKIEKQYDADLEQILIQWITTQCRKDVGRPQPGRENFQNWLKDGTVLCELINALYPEGQAPVKKIQASTMAFKQMEQISQFLQAAERYGINTTDIFQTVDLWEGKNMACVQRTLMNLGGLAVARDDGLFSGDPNWFPKKSKENPRNFSDNQLQEGKNVIGLQMGTNRGASQAGMTGYGMPRQIL

SEQ ID NO: 476 - DNA, 4045 bp, Homo sapiens
gtggagccgagcggtgcggagcagatctggtggttctccggagagcagcttcctcgggtgttacatgagccaagccctcactgtacagaagagtgagagctgaaacctgttccctgagctgatcagaaggacatcccttggcccctccatctgggctcctgtggataggaggggctgggtgagcaggccagctgggctatggtgtggtgcctcggcctggccgtcctcagcctggtcatcagccagggggctgacggtcgagggaagcctgaggtggtatcggtggtgggccgggctggggagagtgtggtgctgggctgtgacctgctgcccccggccggccggccccccctgcatgtcatcgagtggctgcgctttggattcctgcttcccatcttcatccagttcggcctctactctccccgaattgaccctgattacgtgggacgagtccggctgcagaagggggcctctctccagattgagggtctccgggtggaagaccagggctggtacgagtgccgcgtgttcttcctggaccagcacatccctgaagacgattttgctaacggctcctgggtgcatctgacagtcaattcaccccctcaattccaggagacacctcctgctgtgttggaagtgcaggaactggagcctgtgaccctgcgttgtgtggcccgtggcagccccctgcctcatgtgacgtggaagctccgaggaaaggaccttggccagggccagggccaggtgcaagtgcagaacgggacgctgcggatccgccgggtagagcgaggcagctctggggtctacacctgccaagcctccagcactgagggcagcgccacccacgccacccagctgctagtgctaggacccccagtcatcgtggtgccccccaagaacagcacagtcaatgcctcccaggatgtttcattggcctgccatgctgaggcataccctgctaacctcacctacagctggttccaggacaacatcaatgtcttccacattagccgcctgcagccccgggtgcggatcctggtggacgggagcctgcggctgctggccacccagcctgatgatgccggctgctacacctgtgtgcccagcaatggcctcctgcatccaccctcagcctctgcctacctcactgtgctctacccagcccaggtgacagctatgcctcctgagacacccctgcccataggcatgccgggggtgatccgctgcccggttcgtgccaaccccccactgctctttgtcagctggaccaaggatggaaaggccctgcagctggacaagttccctggctggtcccagggcacagaaggctcactgatcatcgccctggggaacgaggatgccctgggagaatactcctgcaccccctacaacagtcttggtaccgccgggccctctcctgtgacccgcgtgctgctcaaggctcccccagcttttatagagcggcccaaggaagaatatttccaagaagtagggcgggagctgctcatcccctgctccgcccaaggggaccctcctcctgttgtctcttggaccaaggtgggccgggggctgcaaggccaggcccaggtggacagcaacagcagcctcatcctgcgaccattgaccaaggaggcccacgggcactgggaatgcagtgccagcaatgctgtggcccgagtggccacctccacgaacgtctacgtgctgggcactagccctcatgttgtcaccaatgtgtccgtggtggctttgcccaagggtgccaatgtctcctgggagcctggctttgatggtggttatctgcagagattcagtgtctggtacaccccactggccaagcgtcctgaccgaatgcaccatgactgggtgtccttggcagtgcctgtgggggctgctcacctcctagtgccagggctgcagccccacacccagtaccagttcagcgtgctagctcagaacaagctggggagtggtcccttcagcgaaatcgtcttgtctgctccggaagggcttcctaccacgccagctgcacccgggcttcccccaacagagataccgcctcccctgtcccctccgcggggtctggtggcagtgaggacaccccggggggtactcctgcattgggatcccccagagctggtccctaagagactggatggctacgtcttggaaggccggcaaggctcccagggctgggaggtgctggacccggctgtggcaggcacagaaacagagctgctggtgccaggcctcatcaaggtatgttctctacgagttccgcctcgtggccttcgcgggcagcttcgtcagcgaccccagcaacacggccaacgtctccacttccggtctggaggtctacccttcgcgcacgcagctgccgggcctcctgcctcagcccgtgctggccggcgtggtgggcggagtctgctttctgggagtggccgtccttgtgagcatcctggccggctgcctcctgaaccggcgcagggctgcccgccgccgccgcaagcgcctccgccaagatccacctcttatcttctctccgaccgggaagtcagctgcaccctctgctctgggctcaggcagtcctgacagcgtggcgaagctgaagctccagggatccccagtccccagcctgcgccagagtctgctctggggggatcctgccggaactcccagcccccacccggatcctccatctagccggggacccttacctctggagcccatttgccggggcccagacgggcgctttgtgatggggcccactgtggcggccccccaggaaaggtcaggccgggagcaggcagaacctcggactccagcccagcgtctggcccggtcctttgactgtagcagcagcagccccagtggggcaccccagcccctctgcattgaagacatcagccctgtggcaccccctccagcagccccacccagtcccttgccaggtcctggacccctgctccagtacctgagcctgcccttcttccgagagatgaatgtggatggggactggcccccgcttgaggagcccagccctgctgcacccccagattacatggatacccggcgctgtcccacctcatctttccttcgttctccagaaacccctcctgtatcccccagggaatcacttcctggggctgtggtaggggctggggccactgcagagcccccttacacagccctggctgactggacactgagggagcggctgctgccaggccttctccctgctgcccctcgaggcagcctcaccagccagagcagtgggcgaggcagcgcttcgttcctgcggcccccctccacagccccctctgcaggaggcagctacctcagccctgctccaggagacaccagcagctgggccagtggccctgagagatggccccgaagggagcatgtggtgacagtcagcaagaggaggaacacatctgtggacgagaactatgagtgggactcagaattccctggggacatggaattgctggagactttgcacctgggcttggccagctcccggctcagacctgaagctgagccagagctaggtgtgaagactccagaggagggctgcctcctgaacactgcccatgttactggccctgaggcccgctgtgctgcccttcgggaggaattcctggccttccgccgccgccgagatgctactagggctcggctaccagcctatcgacagccagtcccccaccccgaacaggccactctgctgtgaacatccctgatgtgaggctgtgaaaaggcatatggacctgcaaaggaggcccccaaccagacagacctagtttcaaacgagggcactgcccctgcctgcccctttggtgcccaggcacagaccctgatagtgggtttgggtcaccttggtatggaatgtatgtgctgaccccctaggtgagtctggggattggaacagggatcttaggtctgcctctctctctctctctctctctctctctctctctgtgtgtgtgtgtgtgtgtgtgaagttttttacaggtgaataaacaaagtttgaaagatg

SEQ ID NO: 477 - DNA, 1031 bp, Homo sapiens
tttccgtgctacctacagaggggtccatatggcgttgttctggattcccgtcgttaactcaaagggaaactttcacaatgtccggagcccttgatgtcctgcaaatgaaggaggaggatgtccttaagttccttgcagcaggaacccacttaggtggcaccaatcttgacttacagatggaacagtatatctataaaaggaaaagtgatggcatctacatcataaatctgaagggaacctgggagaagcttctgctggcagctcgtgctattgttgccattgaaaaccctgctgatgtcagtgttatatcctccaggaatactggccagagggctgtgctgaagtttgctgctgccactggagccactccaattgctggccacttcactcctggaaccttcactaaccagatccaggcagccttctgggagccatggcttcttatggttactgaccccaggggctgaccatcagcctctcacagaggcatcttatgttaatctacctaccatcgctctgtgtaacacagattctcctctgcgctatgtggacattgccatcccgtgcaacaacaagggagctcactgagtgggtttgatgtggtggatgctggctcgggaagtactgtgcatgcgtggcaccatttcccgtgaacacccatgggaggtcatgcctgatctctgcttctacagagatcctgaagagattgaaaaagaagagcaggctgctgctgaaaaggcagtgaccaaggaggaatttcagggtgaatggtctgctccagctcctgagttcactgctactcagcctgaggttgcagactggtttgaaggtatacaggtgccctctgtgcctattcagcagttcctactgaacaatggagcactcagcctgccacggaatactggtctgcagctcccactgctcaggccactgaatgggtaggagcaaccactgaatggtcttaagctgttcttgcatgggctcttaagcaacatggaaaaatggttgatggaaaataaacatcagtttct

SEQ ID NO: 478 - protein, 129 aa, Homo sapiens
MSGALDVLQMKEEDVLKFLAAGTHLGGTNLDLQMEQYIYKRKSDGIYIINLKGTWEKLLLAARAIVAIENPADVSVISSRNTGQRAVLKFAAATGATPIAGHFTPGTFTNQIQAAFWEPWLLMVTDPRG

SEQ ID NO: 479 - DNA, 604 bp, Homo sapiens
aaagggaaactttcacaatgtccggagcccttgatgtcctgcaaatgaaggaggaggatgtccttaagttccttgcagcaggaacccacttaggtggcaccaatcttgacttacagatggaacagtatatctataaaaggaaaagtgatggcatctacatcataaatctgaagggaacctgggagaagcttctgctggcagctcgtgctattgttgccattgaaaaccctgctgatgtcagtgttatatcctccaggaatactggccagagggctgtgctgaagtttgctgctgccactggagccactccaattgctggccacttcactcctggaaccttcactaaccagatccaggcatcttatgttaatctacctaccatcgctctgtgtaacacagattctcctctgcgctatgtggacattgccatcccgtgcaacaacaagggagctcactgagtgggtttgatgtggtggatgctggctcgggaagtactgtgcatgcgtggcaccatttcccgtgaacacccatgggaggtcatgcctgatctctgcttctacagagatcctgaagagattgaaaaagaagagcaggctgctgctga

SEQ ID NO: 480 - protein, 147 aa, Homo sapiens
MSGALDVLQMKEEDVLKFLTAGTHLGGTNLDFQMEQYIYKRRSDGIYIINLKRTWEKLLLAARAIVAIENPAVVSVISSRNTGQRAVLKFAAVTGATPIAGRFTPGNFTNQIQEASYVNLPTIALCNTDSPLHFVDIAIPCNNKGAH

SEQ ID NO: 481 - DNA, 3662 bp, Homo sapiens
aggtagcaagatggccgccgctgaggaaggctgtagtgtcggggccgaagcggacagggaattggaggagcttctggaaagtgctcttgatgatttcgataaagccaaaccctccccagcacccccttctaccaccacggcccctgatgcttcggggccccagaagagatcgccaggagacactgccaaagatgccctcttcgcttcccaagagaagtttttccaggaactattcgacagtgaactggcttcccaagccactgcggagttcgagaaggcaatgaaggagttggctgaggaagaaccccacctggtggagcagttccaaaagctctcagaggctgcagggagagtgggcagtgatatgacctcccaacaagaattcacttcttgcctaaaggaaacactaagtggattagccaaaaatgccactgaccttcagaactccagcatgtcggaagaagagctgaccaaggccatggaggggctaggcatggacgaaggggatggggaagggaacatcctccccatcatgcagagtattatgcagaacctactctccaaggatgtgctgtacccatcactgaaggagatcacagaaaagtatccagaatggttgcagagtcatcgggaatctctacctccagagcagtttgaaaaatatcaggagcagcacagcgtcatgtgcaaaatatgtgagcagtttgaggcagagacccccacagacagtgaaaccactcaaaaggctcgttttgagatggtgctggatcttatgcagcagctacaagatttaggccatcctccaaaagagctggctggagagatgcctcctggcctcaactttgacctggatgccctcaatctttcgggcccaccaggtgccagtggtgaacagtgtctgatcatgtgaaacacaacacgttttcctctctgagtcccagctatggggaacatctggagtcagcagaaccattgggacctgaggcaggagtgtcacctgcgggagaagtctgcccgctgccctctgtcatcccattcaagattgtgccataccagctgaggtttttcctctgtctctctaggaatagggtctgtttcacaggccatttctgtgaaccctactccattgtggtttctgccactatcaaagttccagctacctgcaaggtgaaggaaggcatcccttttggggcatgcactttctttcctttctcaaaataatgttatatgtggccacactgatgttcacctttacgtccagggtctttgtgccttgtctctactccctctcttggatctggggaggaggggcagagacctgggactctgtatttctatagttctcctggcagagcctttgagaatggggagaaacagcctgggctggggctacaggtctgtcactatgctctcttgccttcagacagaccattctgaattctctaaagggaaagggcttttgcatctaatcacaatagagttgaaagagaggccttaggattctcctctctctaggtgctgagccctcacctccctgttccaggctgagaactcaaatggttaccctgcttcttcctacaatgctgtgtgatatgggtgaacccagcccctgaccttcctctatcccctgcccatcctcccttttacctcctctcttttttaaacacctgtttatcccaacctttttgagctcaagctgtgataaagaagggcccatcctatttcccctcatctagtccatttacgattctcactgactccccgtcttcctggcagacacaaataaacccagtgtcaggtctaggaaattaatggctattcttccccagatacattctggcttatttgagatacatgattctcttagaatcctgtcccttggttcaggaaagtagcttggaaaaggagtaggggtatagcttgggtcccttttcctgcaaggccccatggggcagaatataataaatattctgagtgaggagtgtggtctttttctgatcttcctcagcttccgtaagttgcagagtgaggtatattaggagactagttctacacaatattgtaatgctgggttccatcaacacccaccttccacaactcagtctgcacctcagttggcaaaggagactggatggccatctttcctcatgttcccttgagtatttcaatgtagaaagcccttcaagtggtattatattttaaccttttacattattgttattaatgttagtaatatattgttatgttttctaaattatttttctttaagctgacgtggctttttttctgtggctcccagtgggtctacggaccttggctgacatatgttggtaggtactctggtcagctcagctggctgtcctggttcactcagaagataagtctctccaaagcaaattcacatgcattatgagtcgctttgagcttctgacatgtcacttgccccgaggttaaaacttttcaccccttgaagaccttacatgttttatggtattggtgaggaaggaaatgttctcaaggtctcaggctatttgggaaattccaactcctataccttaccagagcatggaagagcccagatctgaatgtaaaacgtctctgttctgccagagatggaaaaaatacaggtatacttgtgatatagtcatggggcttcagtgtcactattttctccttaaagctccagccaaaaactggacaaggatagagaggaggagggaagaacaaaagagcccttctctatgaaccttgtgccttctgtcctaccagttttcttttacagattctcacttctgctagcctagccagggcttactccaggaatctaaatagatgccctagtccactttatctttgttcccaaggcactcatttttattttgattttgattgaatgtgagcaggttgacctcaggtcacactttgttccaaaaacttttggaattattccaggacttgtggtggagttatggtactctagggcagtctttctcaaactatgtatggtaaaggaccaggttttttgttttccagtccttcacttatcaatatgcattcctattgccgatgacaggtatggagttcacactgtgtgctgccgacccggcaagtttgacagcacccaaactggccagactgttctgtaggttaagtccattgatcatgtacttggatatcacagcaacattgaaatgctaaaaagtttttaaacactctcaatttctaattcaccatgtcacagactggtgaaaaaaaaaaaaaggtgttcactgaccagcacaagtctgcagatcatctttgagtagcactgttttggggccctcggtctctctgaagaccctagcagaactgatacctacctgtatctcttgttctctcctatttgagtttcacttccagagaacttgttcttcagcaagaatgtgtcactagtaaggacatctctagcatttctctagccttccttttctgctgctcaaaaataatcgttacaaagcttaggtttaagctgtatatgaaatatttatgcgactctcaaactttaaaggagttgctcctttgttccaaaattaaatgtgttagataaatttgtgattgtatgggtggcttcatgaattaagaattgaattaatacagactttttgataataaaaaaaaaaaaa

SEQ ID NO: 482 - protein, 299 aa, Homo sapiens
MAAAEEGCSVGAEADRELEELLESALDDFDKAKPSPAPPSTTTAPDASGPQKRSPGDTAKDALFASQEKFFQELFDSELASQATAEFEKAMKELAEEEPHLVEQFQKLSEAAGRVGSDMTSQQEFTSCLKETLSGLAKNATDLQNSSMSEEELTKAMEGLGMDEGDGEGNILPIMQSIMQNLLSKDVLYPSLKEITEKYPEWLQSHRESLPPEQFEKYQEQHSVMCKICEQFEAETPTDSETTQKARFEMVLDLMQQLQDLGHPPKELAGEMPPGLNFDLDALNLSGPPGASGEQCLIM

SEQ ID NO: 483 - DNA, 5053 bp, Homo sapiens
gagaagggaccttcaggtccaggcaaagggggaacttctgtcgtgggaacgaaaaagaaagaggatttacagggtggggggacagaggggcagcaggaaccagaagggagacagtggcggtcgcggcggggccgatccgagagttccccttagagaacggagctcacgggcggggaggcctcacctgctagtaggacgcagaaagacagaaggcgaaggagaccccgacttcccgggtcagccccagagccaccccctgccgtagccatcttgcctctctgctgagcggaagcccccgttcggctcctgtctgttagcggcctctctaggctaccactgacaccgtctctgtggcccggagcctaagagaccggaagttcgtgtttccaggcgcttccggaaaccgcgggagagggtcgctgacgtggaggcgtccgaagggcagcagggtgtgtcggggctcggattaagacatcggagtcggagacctgagagatgttaaccaaattcgagaccaagagcgcgcgggtcaaagggctcagctttcaccccaaaagaccttggatcctgactagtttacataatggggtcatccagttatgggactatcggatgtgcactctcattgacaagtttgatgaacatgatggtccagtgcgaggcattgacttccataagcagcagccactgttcgtctctggaggagatgactataagattaaggtttggaattacaagcttcggcgctgtcttttcacattgcttgggcacttagattatattcgcaccacgttttttcatcatgaatatccctggattctgagtgcctccgatgatcagaccatccgagtgtggaactggcaatctagaacctgtgtttgtgtgttaacagggcacaaccattatgtgatgtgtgctcagttccaccccacagaagacttggtagtatcagccagcctggaccagactgtgcgcgtttgggatatttctggtctgaggaaaaaaaacctgtcccctggtgcggtggaatcggatgtgagaggaataactggggttgatctatttggaactacagatgcagtggtgaagcatgtactagagggtcacgatcgtggagtaaactgggctgccttccaccccactatgccccttattgtatctggggcagatgatcgtcaagtgaagatctggcgcatgaatgaatcaaaggcatgggaggttgatacctgccggggccattacaacaatgtatcttgtgccgtcttccaccctcgccaagagttgatcctcagcaattctgaggacaagagtattcgagtctgggatatgtctaagcggactggggttcagactttccgcagagaccatgatcgtttctgggtcctagctgctcaccctaaccttaacctctttgcagcaggccatgatggtggtatgattgtgtttaagctggaacgggaacggccagcctatgctgttcatggcaatatgctacactatgtcaaggaccgattcttacgacagctggatttcaacagctccaaagatgtagctgtgatgcagttgcggagtggttccaagtttccagtattcaatatgtcatacaatccagcagaaaatgcagtcctgctttgtacaagagctagcaatctagagaatagtacctatgacctgtacaccatccctaaagatgctgactcccagaatcctgatgcgcctgaagggaaacgatcctcaggcctgacagccgtttgggtcgctcgaaatcggtttgctgtcctagatcggatgcattcgcttctgatcaagaatctgaagaatgagatcaccaaaaaggtacaggtgcccaactgtgatgagatcttctatgctggcacaggcaatctcctgcttcgagatgcggactctatcacactctttgacgtacagcagaagcggactctggcatctgtgaagatttctaaagtgaaatacgttatctggtcagcagacatgtcacatgtagcactactagccaaacacgccattgtgatctgtaaccgcaaactggatgctttatgtaacattcatgagaacattcgtgtcaagagtggggcctgggatgagagtggggtatttatctataccacaagcaaccacatcaaatatgctgtcaccactggggaccacgggatcattcgaactctggatttacccatctatgtcacacgggtgaagggcaacaatgtatactgcctagacagggagtgtcgtccccgggtactcaccattgatcccactgagttcaaattcaagctggccctgatcaacagaaaatatgatgaggtactgcacatggtgaggaatgccaaactagttggccagtctattattgcttatctccagaagaagggctatcctgaagtggcactgcattttgtcaaggatgagaaaactcgctttagtctggcactggagtgtggaaacattgagattgctctggaagcagccaaagcactggatgacaagaactgctgggaaaagctgggagaagtggccctgctgcaggggaaccaccagattgtggaaatgtgctatcagcgtaccaaaaactttgacaaactttccttcctgtatcttatcactggcaacttagaaaaacttcgcaagatgatgaagattgctgagatcagaaaggacatgagtggccactatcagaatgccctatacctgggtgatgtgtcagagcgtgtgcggatcctgaagaactgtggacagaagtccctggcctatctcacagctgctacccatggcttagatgaagaagctgagagcctaaaggagacatttgacccagagaaggagacaatcccagacattgaccctaatgccaagctgctccagccacctgcacctatcatgccattggataccaattggcctttattgactgtatccaaaggattttttgaaggcaccattgccagcaaagggaagggaggagcactggctgctgacattgacattgacactgttggtacagagggctggggagaggatgcagagctgcagttggatgaagatgggtttgtggaggctacagaaggtttgggggatgatgctcttggcaagggacaggaagaaggaggtggctgggatgtagaagaagatctggagctccctcctgagctggatatatcccctggggcagctggtggggctgaagatggtttctttgtgcccccaaccaagggaacaagtccaactcagatctggtgtaataactctcagcttccagttgatcacatcctggcaggctctttcgaaacagccatgcggctccttcatgaccaagtaggggtaatccagtttggcccctacaagcaactgttcctacagacatacgcccgaggccgcacaacctatcaggctctgccctgcctaccctccatgtatggctatcctaatcgcaactggaaggatgcagggctgaagaatggtgtaccagctgtgggcctgaagcttaatgacctcatccaacggttgcagctgtgctaccagctcaccacagttggcaaatttgaggaggctgtggaaaaattccgttccatccttctcagtgtgccacttcttgttgtggacaataaacaagagattgcagaggcccagcagctcatcaccatttgccgtgagtacattgtgggtttgtccgtggagacagaaaggaagaagctgcccaaagagactctagaacagcagaagcgcatctgtgagatggcagcctatttcacccactcaaacctgcagcctgtgcacatgatcctggtgctgcgtacagccctcaatctgttcttcaagctcaagaacttcaagacagctgccacctttgctcggcgcctactagaactcgggcccaagcctgaggtggcccaacagacccgaaaaatcctgtctgcctgtgagaagaatcccacagatgcctaccagctcaattatgacatgcacaacccctttgacatttgtgctgcatcatatcggcccatctaccgtggaaagccagtagaaaagtgtccactcagtggggcctgctattcccctgagttcaaaggtcaaatctgcagggtcaccacagtgacagagattggcaaagatgtgattggtttaaggatcagtcctctgcagtttcgctaaggccccctttgtgtgcatgggtcagtcaccatatgttccccccagagaatgtgtctatatcctccttctaacagcaccttccccctgcagctactcttcagatctggctctctgtaccctaaaacctagtatctttttctcttctatggaaaatccgaaggtctaaacttgacttttttgaggtcttctcaacttgactacagttgtgctcataattgtccttgcctttccagcttaattattttaaggaacaaatgaaaactctgggctgggtggagtggctcatacctgtaatcccagcactttgggaggctacggtgggcagatcatctgaggccaggagttcgagacctgcctggccaacatggcaacaccccgtctctaataaaaatataaaaattagcctggcatggtagcatgcgcctatagtcccagctgctcaggaggctgaggcatgagaatcgcttgaacctaggaggtggaggttgcattcaactgagatcataccacttcattccagcctgggtgacagagcaagactctgtctcaaaaaaaaaaaaaaggaaaactctgtgatggacatttgtttagtaaatcccttcagtatttatccctcctttccccacagcagctttctttcctgtcaactagaaaggagcaggatgtaataaatacattttggtgtgactaggccacaccaactcttaatcatctcccattttccttagacatttaaatttcaaggcaggtaccctctgtgtactcagaaatttgaagaagttatttggttttccaaaatgcacactgcgggttattgatttgttctttacaactattgttctcatatttctcacactaaataaatctctatgagagcttcttg

SEQ ID NO: 484 - DNA, 289 bp, Homo sapiens
agctgcggtgttgtgctgtggggaagggagaaggatttgtaaaccccggagtgaggttctgcttacccgaggccgctgctgtgcggagacccccgggtgaagccactgtcatcatgtctgaccaggaggcaaaaccttcaactgaggacttgggggataagaaggaaggtgaatatattaaactcaaagtcattggacaggatagcagtgagattcacttcaaagtggttccaatgaattcattcaggtttctctttgagggtcagagaattgctgataatcatactcc

SEQ ID NO: 485 - DNA, 700 bp, Homo sapiens
gaaggatttgtaaaccccggagtgaggttctgcttacccgaggccgctgctgtgcggagacccccgggtgaagccactgtcatcatgtctgaccaggaggcaaaaccttcaactgaggacttgggggataagaaggaaggtgaatatattaaactcaaagtcattggacaggatagcagtgagattcacttcaaagtgaaaatgacaacacatctcaagaaactcaaagaatcatactgtcaaagacagggcgttccaatgaattcattcaggtttctctttgagggtcagagaattgctgataatcatactccaaaagaactgggaatggaggaagaagatgtgattgaagtttatcaggaacaaatggggggtcattcaacagtttagatattctttttattttttttcttttccctcaatcctttctcatttttaaaaatagttcttttgtaatgtggtgttaaaaacggaattgaaaactggcaccccatctctttgaaacatctggtaatctgaattctagtgctcattattcattattgtttattttcattgtgctgatttttggtgatcaagcctcagtccccttcatattaccctctcctttttattgtggtgataaataagattgaccaatgcaagcgttcataataacttgcgaattggccctgatgttctagcatgtgattacttcact

SEQ ID NO: 486 - DNA, 1705 bp, Homo sapiens
gtttgccaaaatcccaggcagcatggacctcagtcttctctgggtacttctgcccctagtcaccatggcctggggccagtatggcgattatggatacccataccagcagtatcatgactacagcgatgatgggtgggtgaatttgaaccggcaaggcttcagctaccagtgtccccaggggcaggtgatagtggccgtgaggagcatcttcagcaagaaggaaggttctgacagacaatggaactacgcctgcatgcccacgccacagagcctcggggaacccacggagtgctggtgggaggagatcaacagggctggcatggaatggtaccagacgtgctccaacaatgggctggtggcaggattccagagccgctacttcgagtcagtgctggatcgggagtggcagttttactgttgtcgctacagcaagaggtgcccatattcctgctggctaacaacagaatatccaggtcactatggtgaggaaatggacatgatttcctacaattatgattactatatccgaggagcaacaaccactttctctgcagtggaaagggatcgccagtggaagttcataatgtgccggatgactgaatacgactgtgaatttgcaaatgtttagatttgccacataccaaatctgggtgaaaggaaaggggccggggacaggagggtgtccacatatgttaacatcagttggatctcctatagaagtttctgctgctctctttccttctccctgagctggtaactgcaatgccaacttcctgggcctttctgactagtatcacacttctaataaaatccacaattaaaccatgtttctcacttttcacatgtttcatagcaactgctttatatgactgatgatggcttccttgcacaccacatatacagtgcgcatgcttacagccgggcttctggagcaccagctgcagcctggctactgctttttactgcagaatgaactgcaagttcagcatagtggaggggagaggcagaactggaggagaggtgcagtgaaggttctctacagctaagcctgtttgaatgatacgtaggttccccaccaaaagcaggctttctgccctgagggacatcttcccactcccctgctccacatgagccatgcatgcttagcaatccaagtgcagagctctttgctccaggagtgaggagactgggaggtgaaatggggaaatggaagggtttggaggcagagctgaaaacagggttggaaggatttcctgaattagaagacaaacgttagcatacccagtaaggaaaatgagtgcaggggccaggggaacccgtgaggatcactctcaaatgagattaaaaacaaggaagcagagaatggtcagagaatgggattcagattgggaacttgtggggatgagagtgaccaggttgaactgggaagtggaaaaaggagtttgagtcactggcacctagaagcctgcccacgattcctaggaaggctggcagacaccctggaaccctggggagctactggcaaactctcctggattgggcctgatttttttggtgggaaaggctgccctggggatcaactttccttctgtgtgtggctcaggagttcttctgcagagatggcgctatctttcctcctcctgtgatgtcctgctcccaaccatttgtactcttcattacaaaagaaataaaaatattaacgttc

SEQ ID NO: 487 - protein, 201 aa, Homo sapiens
MDLSLLWVLLPLVTMAWGQYGDYGYPYQQYHDYSDDGWVNLNRQGFSYQCPQGQVIVAVRSIFSKKEGSDRQWNYACMPTPQSLGEPTECWWEEINRAGMEWYQTCSNNGLVAGFQSRYFESVLDREWQFYCCRYSKRCPYSCWLTTEYPGHYGEEMDMISYNYDYYIRGATTTFSAVERDRQWKFIMCRMTEYDCEFANV

SEQ ID NO: 488 - DNA, 2061 bp, Homo sapiens
agaggaagccaagaacggtgaaaaggccaggcggagttcagaggaggtggacggccagcacccggcccaagaggaggtcccggaatcgccccagacctctggcccagaggcagaaaataggtgtgggagccccagggaggaaaagccagctggagaggaagcagagatggaaaaggctacagaggtgaagggggagagggtgcaaaatgaagaggtgggacctgaacatgacagccaagaaacaaagaagctggaggagggagctgcagtgaaggagaccccccacagtccccctggaggagtgaagggcggagatgtccccaagcaggaaaaaggcaaggaaaaacaacaggagggggcagtgctcgagccaggctgcagcccccagaccggccctgcccagctggagaccagcagtgaggtccagagcgagccagcagtccccaagccggaggatgacactcctgtccaggacactaaaatgtgaagaacagctcattgtgccccagtgatgaagttgctggacacatctctttgcaggtagcagcaacagttgtagcagcagcagacgaagccattgcagaggcagaatatgctgagtgtctggagtcagcctgaagacacagggtggattatttcctggcctccacaccaaacgttcccttgcagatggagactgaatctgagggcagcagacttttatcagcttgagtttatgtcatttgatggacttggttcaacaacaagaacttacttaaaacaatgtactgtggtgatgagtcccaggggcactggtcagcctgtggagccctggatgctatccacacccacctatccctgcagctaatttagctgatctctaatttaactgagctctaatttagctgatcagattttgcttgggtaaagttcctttttaatgttctaaagtgtttacggttctcaaatatcagttaaaaactaattttaggtggccataaacataaaatagaaaccctgtaagttacagaagaccctaaattgtatcaaaaccctagagacaacttttcaatttgatccaaatttgaactggccaaccagtctttaaaacactggactagaagagataatgattgaaacatttaaaaaaaaaaagtgctccattcgcaggagcttttcctgtcctgtggttttccagttggtgaccaccatgggaggtcgctggctcggctcactcccttctcccacccttgagaatgtggagaactcccatggagaggcagaatggcaggaggtttcatgtcccgcgttgcatctcctcctgaaagaaaagcagtgatacctgaataatgctggctctccgattgatcctgtgaggatgaatttgcatttccagaatccttgagcatggattagatgtttcctgggaggtgccttgagtaccattatgtgcaagctacataattaaaacatttttcttagtttccctgggaagcttttcttgactcacagcccaggttcttctgcccaacacaaaaggagtgagttggggtctttagtctcttcttattgggtagctcttgctttaatattctgtttggtgagtgtaagggattctgcaagggacagggggcctgactacccagtctttgacttgtatcctctcccctcttcatacactcctgctgaaaaatgttaatccaaatacacatttaaacttagggtcggtccttattctgatttgagtattttaatgtctcagtgtgctgatttggtagttggaagaattattcttctggaggtctgttagactacatcctacactgacttcagaaaacagtctgtcagacaaaaaggccttatgtcaccactggtacctcagtttcctcatcccatttacagtttttctaactccagggtagtgtttagtgttaatatttgggatatattttttttcaaaactgtttttaagtagtttgtaatttgtaacaaacttgtaacctggttgggactgatattgtcatagctatgataaactttggatattagcagaatttgggaaaaaaaaaaaaaaaaaaaaaa

SEQ ID NO: 489 - protein, 106 aa, Homo sapiens
MEKATEVKGERVQNEEVGPEHDSQETKKLEEGAAVKETPHSPPGGVKGGDVPKQEKGKEKQQEGAVLEPGCSPQTGPAQLETSSEVQSEPAVPKPEDDTPVQDTKM

SEQ ID NO: 490 - DNA, 2177 bp, Homo sapiens
ggacgttgagagaacgaggaggaaggagagaaaatggcatccatggattacagtacctatagccaagctgcagcgcagcagggctacagtgcttacaacacccagcccactcaaggatatgcacagaccacccaggcatatgggcaacaaagctatggaacctatggacagcccattgatgtcagctatacccaggctcagaccactgcaatctatgggcagaccgcctatgcaacttcttatggacagcctcccactggttatactactccaactgccccccaggcatacagccagcctgtccaggggtatggcactggtgcttatgataccaccactgctacagtcaccaccacccaggcctcctatgcagctcaatctgcatatggcactcagcctgcttatccagcttatgggcagcagccagtagccactgcacctacaagactgcagaatggaaacaagcccactgagactagtcaacctcaatctagcacagggggttacaaccagcccagcctaggatatggacagagtaactgcagttatccccaggtacctgggagctactccatgcagccagtcaccgcacctccatcctaccctcctaccagctattcctctacacagccaactagttatgatcagagcagttactctcagcagaacacctatgggaaaccgagcagctatggacagcagagtagctatggtcaacaaagcagctatgggcagctgcctcccactagttacccaccccaaacttgatcctacagccaagctccaagtcagtatagctaacagagcagcagctacgggcagcagagttcattctgacaggaccaccccagtagcatgggtgtttatgggcaggagtctggaggattttccggactaggagagaaccggagcatgagtggccctgataactggggcaggggaagagggggatttgatcgtggaggcatgagcagaggtgggcggggaggaggatgcggtggaatgggcagcgctggagagcaagttggcttcaataagcctggtggacccatggatgaaggaccagatcttgatctaggcccacctgtagatccagatgaagactctgacaacagtgcaatttatgtacaaggattaaatgacaatgtgactctagatgatctggtagacttctttaagcagtgtggggttgttaagatgaacaagagaactgagcaacccatgatccacacctacctggacaaggaaacaagaaagcccaaaggtgatgccacagtgtcctgtgaagactcacctactgccaaagctgccgtggaatggtttgatgggaaagattttcaagggagcaaacttaaagtctctcttgctcggaagaggcctccagtgaacagtatgcagggtggtatgccaccccatgagggcagagggatgccaccaccactctgcggaggtccaggaggcccaggaagtcctgggggacccatgggtcacatgggaggccgtggaggagatagaggaggcctccctccaagaggaccccagggttcccgagggaacacctctggaggaggaaacgtccagcaccaagctggagacaggcagtgtcccaatccgggttgtggaaaccagaacttcgcctggagaacagagagcaacaagtgtaaggctccaaagcctgaaggcttcctcccgccacccttcccacccccgggtggtgatcatggcagaggtggccctggtggcatgtggggaggaagaggtggcctcatggatcatggtggtcccggtggaatgttcagaggtggctgtggtagagacagaagtggcttctgtggtggctgggcatggaccgaggtggctttggtggaggaagacaaggtggccctggggggcccccggacctttgatgtaaccaatgggaggaagaagaggaggacgtgaaggacctggaaaaacggataaaggcgagcactgtcaggagcgcagagatcagccctactagatgcagagaacccgcagagctgcattgactaccagatttattttttaaaccagaaaatgttttaaatttataattccatatttataatgttggccacaacattatgattattctttctctgtactttagtatttttcaccatttgtgaagaaacattaaaacaagttaaatggta

SEQ ID NO: 491 - protein, 361 aa, Homo sapiens
MGVYGQESGGFSGLGENRSMSGPDNWGRGRGGFDRGGMSRGGRGGGCGGMGSAGEQVGFNKPGGPMDEGPDLDLGPPVDPDEDSDNSAIYVQGLNDNVTLDDLVDFFKQCGVVKMNKRTEQPMIHTYLDKETRKPKGDATVSCEDSPTAKAAVEWFDGKDFQGSKLKVSLARKRPPVNSMQGGMPPHEGRGMPPPLCGGPGGPGSPGGPMGHMGGRGGDRGGLPPRGPQGSRGNTSGGGNVQHQAGDRQCPNPGCGNQNFAWRTESNKCKAPKPEGFLPPPFPPPGGDHGRGGPGGMWGGRGGLMDHGGPGGMFRGGCGRDRSGFCGGWAWTEVALVEEDKVALGGPRTFDVTNGRKKRRT

SEQ ID NO: 492 - DNA, 845 bp, Homo sapiens
aacgaggaggaaggagagaaaatggcatccatggattacagtacctatagccaagctgcagcgcagcagggctacagtgcttacaacacccagcccactcaaggatatgcacagcgcctatgcaacttcttatggacagcctcccactggttatactactccaactgccccccaggcatacagccagcctgtccaggggtatggcactggtgcttatgataccaccactgctacagtcaccaccacccaggcctcctatgcagctcaatctgcatatggcactcagcctgcttatccagcttatgggcagcagccagtagccactgcacctacaagactgcagaatggaaacaagcccactgagactagtcaacctcaatctagcacagggggttacaaccagcccagcctaggatatggacagagtaactgcagttatccccaggtacctgggagctactccatgcagccagtcaccgcacctccatcctaccctcctaccagctattcctctacacagccaactagttatgatcagagcagttactctcagcagaacacctatgggaaaccgagcagctatggacagcagagtagctatggtcaacaaagcagctatgggcagctgcctcccactagttacccaccccaaacttgatcctacagccaagctccaagtcagtatagctaacagagcagcagctacgggcagcagagttcattctgacaggaccaccccagtagcatgggtgtttatgggcaggagtctggaggattttccggactaggagagaaccggagcatgagtggccctgataactggggcaggggaagagggggatttg

SEQ ID NO: 493 - DNA, 684 bp, Homo sapiens
aacgaggaggaaggagagaaaatggcatccatggattacagtacctatagccaagctgcagcgcagcagggctacagtgcttacaacacccagcccactcaaggatatgcacagaccacccaggcatatgggcaacaaagctatggaacctatggacagcccattgatgtcagctatacccaggctcagaccactgcaatctatgggcagaccgcctatgcaacttcttatggacagcctcccactggttatactactccaactgccccccaggcatacagccagcctgtccaggggtatggcactggtgcttatgataccaccactgctacagtcaccaccacccaggcctcctatgcagctcaatctgcatatggcactcagcctgcttatccagcttatgggcagcagccagtagccactgcacctacaagactgcagaatggaaacaagcccactgagactagtcaacctcaatctagcacagggggttacaaccagcaccaagctggagacaggcagtgtcccaatccgggttgtggaaaccagaacttcgcctggagaacagagagcaacaagtgtaaggctccaaagcctgaaggcttcctcccgccacccttcccacccccgggtggtgatcatggcagaggtggccctggtggcatgtggggaggaagaggtggc

SEQ ID NO: 494 - DNA, 856 bp, Homo sapiens
ggaggaaggagagaaaatggcatccatggattacagtacctatagccaagctgcagcgcagcagggctacagtgcttacaacacccagcccactcaaggatatgcacagaccacccaggcatatgggcaacaaagctatggaacctatggacagcccattgatgtcagctatacccaggctcagaccactgcaatctatgggcagaccgcctatgcaacttcttatggacagcctcccactggttatactactccaactgccccccaggcatacagccagcctgtccaggggtatggcactggtgcttatgataccaccactgctacagtcaccaccacccaggcctcctatgcagctcaatctgcatatggcactcagcctgcttatccagcttatgggcagcagccagtagccactgcacctacaagactgcagaatggaaacaagcccactgagactagtcaacctcaatctagcacagggggttacaaccagcccagcctaggatatggacagagtaactgcagttatccccaggtacctgggagctactccatgcagccagtcaccgcacctccatcctaccctcctaccagctattcctctacacagccaactagttatgatcagagcagttactctcagcagaacacctatgggcagctgcctcccactagttacccaccccaaacttgatcctacagccaagctccaagtcagtatagctaacagagcagcagctacgggcagcagagttcattctgacaggaccaccccagtagcatgggtgtttatgggcaggagtctggaggattttccggactaggagagaaccggagcatgagtggccctgat

SEQ ID NO: 495 - DNA, 1206 bp, Homo sapiens
tttccggtgctatgccccggaagcggaagtgcgatcttcgggctgtcagagttggtctgttactcggtggtggcggagtctacggaagccgttttcgcttcacttttcctggctgtagagcgctttccccctggcgggtgagagtgcagagacgaaggtgcgagatgagcactatgttcgcggacactctcctcatcgtttttatctctgtgtgcacggctctgctcgcagagggcataacctgggtcctggtttacaggacagacaagtacaagagactgaaggcagaagtggaaaaacagagtaaaaaattggaaaagaagaaggaaacaataacagagtcagctggtcgtctatcaatggttcgaatgaaatccatgtttgctattggcttttgttttactgccctaatgggaatgttcaattccatatttgatggtagagtggtggcaaagcttccttttacccctctttcttacatccaaggactgtctcatcgaaatctgctgggagatgacaccacagactgttccttcattttcctgtatattctctgtactatgtcgattcgacagaacattcagaagattctcggccttgccccttcacgagccgccaccaagcaggcaggtggatttcttggcccaccacctccttctgggaagttctcttgaactcaagaactctttattttctatcattctttctagacacacacacatcagactggcaactgttttgtagcaagagccataggtagccttactacttgggcctctttctagttttgaattatttctaagccttttgggtatgattagagtgaaaatggcagccagcaaacttgatagtgcttttggtcctagatgatttttatcaaataagtggattgattagttaagttcaggtaatgtttatgtaatgaaaaacaaatagcatccttcttgtttcatttacataagtattttctgtgggaccgactctcaaggcactgtgtatgccctgcaagttggctgtctatgagcatttagagatttagaagaaaaatttacaagccaaatacatgacataagatcaataaagaggccaaatttttagctgttttatgtacaaggagagatctgtttcattttgttttgccgtatttctagatataagttttagcatgggccaggaaggactaaaataaaagtttttaaggtactg

SEQ ID NO: 496 - protein, 188 aa, Homo sapiens
MSTMFADTLLIVFISVCTALLAEGITWVLVYRTDKYKRLKAEVEKQSKKLEKKKETITESAGRQQKKKIERQEEKLKNNNRDLSMVRMKSMFAIGFCFTALMGMFNSIFDGRVVAKLPFTPLSYIQGLSHRNLLGDDTTDCSFIFLYILCTMSIRQNIQKILGLAPSRAATKQAGGFLGPPPPSGKFS

SEQ ID NO: 497 - DNA, 2076 bp, Homo sapiens
agacagttttgaagttttcaaagactggctctgctgttaagaagttgtacttaaagcggaggagctaagccacctgccaaaatgtgcaaaggacttgcagctttgccccactcatgcctggaaagggccaaggagattaagatcaagttgggaattctcctccagaagccagactcagttggtgaccttgtcattccgtacaatgagaagccagagaaaccagccaagacccagaaaacctcgctggacgaggccctgcagtggcgtgattccctggacaaactcctgcagaacaactatggacttgccagtttcaaaagtttcctgaagtctgaattcagtgaggaaaaccttgagttctggattgcctgtgaggattacaagaagatcaagtcccctgccaagatggctgagaaggcaaagcaaatttatgaagaattcattcaaacggaggctcctaaagaggtgaatattgaccacttcactaaggacatcacaatgaagaacctggtggaaccttccctgagcagctttgacatggcccagaaaagaatccatgccctgatggaaaaggattctctgcctcgctttgtgcgctctgagttttatcaggagttaatcaagtagtaatttagccaggctatgaaatcatcctgtgagttatttcctccataataaccctgcatttcccattaatctacatatcttcccacagcagctttgctcagtgatacccacatgggaaaaatcccaggggatgttgcttactctttttgcccacactgctttggatacttatctactgtccgaaggccttctttccccactcaattcttcctgccctgttattaattaagatatcttcagcttgtagtcagacccaatcagaatcacagaaaaatcctgcctaaggcaaagaaatataagacaagactatgatatcaatgaatgtgggttaagtaatagatttccagctaaattggtctaaaaaagaatattaagtgtggacagacctatttcaaaggagcttaattgatctcacttgttttagttctgatccagggagatcacccctctaattatttctgaacttggttaataaaagtttataagatttttatgaagcagccactgtatgatattttaagcaaatatgttatttaaaatattgatccttcccttggaccaccttcatgttagttgggtattataaataagagatacaaccatgaatatattatgtttatacaaaatcaatctgaacacaattcataaagatttctcttttataccttcctcactggccccctccacctgcccatagtcaccaaattctgttttaaatcaatgacctaagatcaacaatgaagtattttataaatgtatttatgctgctagactgtgggtcaaatgtttccattttcaaattatttagaattcttatgagtttaaaatttgtaaatttctaaatccaatcatgtaaaatgaaactgttgctccattggagtagtctcccacctaaatatcaagatggctatatgctaaaaagagaaaatatggtcaagtctaaaatggctaattgtcctatgatgctattatcatagactaatgacatttatcttcaaaacaccaaattgtctttagaaaaattaatgtgattacaggtagaggccttctaggtgagacacttttaaggtacactgcattttgcagaaaaaaaaaaaaaaaagtaatcttttagcaaccccagtattccttcactatttcgcttcctgcattagcaaattttacttacagtcaaaagtgcagatttatactcctgacgtgtctcattcacagctaaataataggccataggacttttggtaggtttaaacttttaattctgtatttcatgattataagtcttgctagaattttttctaatctttagtagatttgattaaataatgattcacagaatttagtaacagaatcaaactaagccatgtatgagggtaatcgagatgaggatattaactcaaaagaaatagggtgatttttaaaggattaataaaattctgaaatgttaagtag

SEQ ID NO: 498 - protein, 181 aa, Homo sapiens
MCKGLAALPHSCLERAKEIKIKLGILLQKPDSVGDLVIPYNEKPEKPAKTQKTSLDEALQWRDSLDKLLQNNYGLASFKSFLKSEFSEENLEFWIACEDYKKIKSPAKMAEKAKQIYEEFIQTEAPKEVNIDHFTKDITMKNLVEPSLSSFDMAQKRIHALMEKDSLPRFVRSEFYQELIK

SEQ ID NO: 499 - DNA, 1909 bp, Homo sapiens
gacaccttttaaaatgcagaactaactgaggcatttcagtaactttgctttcaaatcaataaagtcaaatgtatggaaacattttgtgccctactctccataccctgtgtactcaaattctctactgtatgaattatgctttaagtagaattcagtgccaaggagaacttggtgaaataaattattttaattttttttttatcctttacaaagccatggattttatttggttgatgtgtgctctgtacacaagccatttcaataggatggagctgttaattattttccaaagagtaatagacatgcaaaagtttcaataaaaactgggccattaacaaataaattaataaactaataagcattcccttctaggtttttgccaaactgcctatccaataacaaatttgagaatcgttgaaaaagctagttatatttcagagaaatgattttcattattgaaactgttctccctagcaggccattttccctttttcctgggagtttagcaagtttaggagagaatagtcatgaaaagaaagggaagaaaggggagaagggaagaggttaaaaagtaagtgctcagacctatgaacgtaatccctttgctagaaatatttaagagcagctcagcttggttgaaactgagttttgtcatcttccatatttgcaggaaggtattttctgacttgcaatgcagctagatgtaaaattttattttatcatcctagaaagccttgactagaaaaatgaataaatattgagggtttcctgtccatatctggcttgcatgtgccagaaagcagagaatagaaaatgtaatctccaacatccaagcatcgaaacccaaggggtaggcaattctatgtaggttttggacatgaagtttggtgcatcttggtttatgctggctcaactgctattaaacctctctggcttatagtctcttcattctattagacaagcacgtatcgaacacttgcttcgcacaaggctctttagttaacaatttagcagctactgtttgtgttaaacacacttttcaccaaataggttctgaggcaaacgagagcaatgactatttaaagaaaggctttcccagcatcacttacacatcccaaaactaaaaagatcaactcttccaactgagaaaagactcctggctttgaatggaaacttacagcagagagtcacaggccacggcaacaacaacgacaacaacaaacatttggaatattattctcaactcacgttttaataatacatcttaattatttttctagtagagaaactacaaatcagcctcttcaacatttatatacagtttaataagcctcttgcaagttacttgttctctcacctgaggtatttttttcctccccaccttgcccctgttcctcccttcctcttctccctttgcaagaggaaatatttaacatatttgggtccaacttcaataatgtaataattaatacattaaaagcatttaacttcctttctagaaaaatgcacaggctaaggcatagacaaaacaaagagaaatgctgagaaatttgccactggagacaagcaatctgaataaatatttgccaaaagttctttttatgtcatatagtgtcaggatttgaaggagctattttttttaatgttgcaactagcaactcatcttcggaagacacagccaggagaatgaagtagaagtgaaaggtttataaatccatttgtaagcatttatcccatatattttaaattcaagaaaaattgtgtttatctttagaattttgtattcaatactttatgtactatgtgactcatgcttctggataaataaagcaccaaatatgtatctgtaaccacaatcacacatattatattaaatatatatctatataacaaaaaaaaaaaaaaaaaa

SEQ ID NO: 500 - protein, 83 aa, Homo sapiens
MYGNILCPTLHTLCTQILYCMNYALSRIQCQGELGEINYFNFFFILYKAMDFIWLMCALYTSHFNRMELLIIFQRVIDMQKFQ

SEQ ID NO: 501 - DNA, 1909 bp, Homo sapiens
agcggcccctgcagaggcaggtccacctgagaggccggccggcctcccagcccactgtcatccggggcatcacctactataaagccaaggtctctgaagaagagaatgacattgaagagcagcaagatgagtttttcagcggtgacaatggagtggatttgctgattgaagatcagctcctgagacacaacggcctgatgaccagtgtcacccggaggcctgcagccacccgtcagggacacagcactgctgtgacaagcgacctgaacgctcggaccgcaccctggtcctcagcactgccacagccctcgacctcagatcccagcatcgccaaccatgcctcagtgggaccaacactccaaacaacctcggtgtctccagatcccacaagggagtcagtcctgcagccttctcctcaggtaccagccaccactgtggcccacacagccacccagcaaccagcagccccagctcctccggcagtgtctcccagggaggcattgatggaagctatgcacacagtcccagtgcctcccaccacagtcagaacagactcgctggggaaagatgctcctgctgggtggggaacaacccctgccagccccacgctgagccccgaagaagaagatgacatccggaatgtcataggaaggtgcaaggacactctctccacaatcacggggccgaccacccagaacacatatgggcggaatgaaggggcctggatgaaggaccccctggccaaggatgagcggatttacgtaaccaactattactacggcaacaccctggtagagttccggaacctggagaacttcaaacaaggtcgctggagcaattcctacaagctcccgtacagctggatcggcacaggccacgtggtatacaatggcgccttctactacaatcgcgccttcacccgcaacatcatcaagtacgacctgaagcagcgctacgtggctgcctgggccatgctgcatgacgtggcctacgaggaggccaccccctggcgatggcagggccactcagacgtggactttgctgtggacgagaatggcctatggctcatctacccggccctggacgatgagggcttcagccaggaggtcattgtcctgagcaagctcaatgccgcggacctgagcacacagaaggagaccacatggcgcacggggctccggaggaatttctacggcaactgcttcgtcatctgtggggtgctgtatgccgtggatagctacaaccagcggaatgccaacatctcctacgctttcgacacccacaccaacacacagatcgtccccaggctgctgttcgagaatgagtattcctatacgacccagatagactacaaccccaaggaccgcctgctctatgcctgggacaatggccaccaggtcacttaccatgtcatctttgcctactgacacccttgtccccacaagcagaagcacagaggggtcactagcaccttgtgtgtatgtgtgtgcgcgcacgtgtgtgtaggtgggtatgtgttgtttaaaaatatatattattttgtataatattgcaaatgtaaaatgacaatttgggtctatttttttatatggattgtagatcaatccatacgtgtatgtgctggtctcatcctccccagtttatatttttgtgcaaatgaacttctccttttgaccagtaaccaccttccttcaagccttcagcccctccagctccaagtctcagatctcgaccattgaaaaggtttcttcatctgggtcttgcaggaggcaggcaacaccaggagcagaaatgaaagaggcaagaaagaagtgctatgtggcgagaaaaaaagttttaatgtattggagaagttttaaaaaacccagaaaaacgctttttttttttaataaagaagaaatttaaaatc

SEQ ID NO: 502 - protein, 409 aa, Homo sapiens
MTSVTRRPAATRQGHSTAVTSDLNARTAPWSSALPQPSTSDPSIANHASVGPTLQTTSVSPDPTRESVLQPSPQVPATTVAHTATQQPAAPAPPAVSPREALMEAMHTVPVPPTTVRTDSLGKDAPAGWGTTPASPTLSPEEEDDIRNVIGRCKDTLSTITGPTTQNTYGRNEGAWMKDPLAKDERIYVTNYYYGNTLVEFRNLENFKQGRWSNSYKLPYSWIGTGHVVYNGAFYYNRAFTRNIIKYDLKQRYVAAWAMLHDVAYEEATPWRWQGHSDVDFAVDENGLWLIYPALDDEGFSQEVIVLSKLNAADLSTQKETTWRTGLRRNFYGNCFVICGVLYAVDSYNQRNANISYAFDTHTNTQIVPRLLFENEYSYTTQIDYNPKDRLLYAWDNGHQVTYHVIFAY

SEQ ID NO: 503 - DNA, 2181 bp, Homo sapiens
ggcacgagggatgcaaggagatgagacagttagatttacttcctcttttctaatctgagaggtttcatgttgaagaaaatcagtgttggggttgcaggagacctaaacacagtcaccatgaagctgggctgtgtcctcatggcctgggccctctacctttcccttggtgtgctctgggtggcccagatgctactggctgccagttttgagacgctgcagtgtgagggacctgtctgcactgaggagagcagctgccacacggaggatgacttgactgatgcaagggaagctggcttccaggtcaaggcctacactttcagtgaacccttccacctgattgtgtcctatgactggctgatcctccaaggtccagccaagccagtttttgaaggggacctgctggttctgcgctgccaggcctggcaagactggccactgactcaggtgaccttctaccgagatggctcagctctgggtccccccgggcctaacagggaattctccatcaccgtggtacaaaaggcagacagcgggcactaccactgcagtggcatcttccagagccctggtcctgggatcccagaaacagcatctgttgtggctatcacagtccaagaactgtttccagcgccaattctcagagctgtaccctcagctgaaccccaagcaggaagccccatgaccctgagttgtcagacaaagttgcccctgcagaggtcagctgcccgcctcctcttctccttctacaaggatggaaggatagtgcaaagcagggggctctcctcagaattccagatccccacagcttcagaagatcactccgggtcatactggtgtgaggcagccactgaggacaaccaagtttggaaacagagcccccagctagagatcagagtgcagggtgcttccagctctgctgcacctcccacattgaatccagctcctcagaaatcagctgctccaggaactgctcctgaggaggcccctgggcctctgcctccgccgccaaccccatcttctgaggatccaggcttttcttctcctctggggatgccagatcctcatctgtatcaccagatgggccttcttctcaaacacatgcaggatgtgagagtcctcctcggtcacctgctcatggagttgagggaattatctggccaccagaagcctgggaccacaaaggctactgctgaatagaagtaaacagttcatccatgatctcacttaaccaccccaataaatctgattctttattttctcttcctgtcctgcacatatgcataagtacttttacaagttgtcccagtgttttgttagaataatgtagttaggtgagtgtaaataaatttatataaagtgagaattagagtttagctataattgtgtattctctcttaacacaacagaattctgctgtctagatcaggaatttctatctgttatatcgaccagaatgttgtgatttaaagagaactaatggaagtggattgaatacagcagtctcaactgggggcaattttgccccccagaggacattgggcaatgtttggagacattttggtcattatacttggggggttgggggatggtgggatgtgtgtgctactggcatccagtaaatagaagccaggggtgccgctaaacatcctataatgcacagggcagtaccccacaacgaaaaataatctggcccaaaatgtcagttgtactgagtttgagaaaccccagcctaatgaaaccctaggtgttgggctctggaatgggactttgtcccttctaattattatctctttccagcctcattcagctattcttactgacataccagtctttagctggtgctatggtctgttctttagttctagtttgtatcccctcaaaagccattatgttgaaatcctaatccccaaggtgatggcattaagaagtgggcctttgggaagtgattagatcaggagtgcagagccctcatgattaggattagtgcccttatttaaaaaggccccagagagctaactcacccttccaccatatgaggacgtggcaagaagatgacatgtatgagaaccaaaaaacagctgtcgccaaacaccgactctgtcgttgccttgatcttgaacttccagcctccagaactatgagaaataaaattctgttgtttgtaaaaaaaaaaaaaaaaaa

SEQ ID NO: 504 - protein, 359 aa, Homo sapiens
MKLGCVLMAWALYLSLGVLWVAQMLLAASFETLQCEGPVCTEESSCHTEDDLTDAREAGFQVKAYTFSEPFHLIVSYDWLILQGPAKPVFEGDLLVLRCQAWQDWPLTQVTFYRDGSALGPPGPNREFSITVVQKADSGHYHCSGIFQSPGPGIPETASVVAITVQELFPAPILRAVPSAEPQAGSPMTLSCQTKLPLQRSAARLLFSFYKDGRIVQSRGLSSEFQIPTASEDHSGSYWCEAATEDNQVWKQSPQLEIRVQGASSSAAPPTLNPAPQKSAAPGTAPEEAPGPLPPPPTPSSEDPGFSSPLGMPDPHLYHQMGLLLKHMQDVRVLLGHLLMELRELSGHQKPGTTKATAE

SEQ ID NO: 505 - DNA, 1123 bp, Homo sapiens
aagcagtggtatcaacgcagagtgcccattacggccgggggtggcatcatgtggcagctgctcctcccaactgctctgctacttctagtttcagctggcatgcggactgaagatctcccaaaggctgtggtgttcctggagcctcaatggtacagggtgctcgagaaggacagtgtgactctgaagtgccagggagcctactcccctgaggacaattccacacagtggtttcacaatgagagcctcatctcaagccaggcctcgagctacttcattgacgctgccacagtcgacgacagtggagagtacaggtgccagacaaacctctccaccctcagtgacccggtgcagctagaagtccatatcggctggctgttgctccaggcccctcggtgggtgttcaaggaggaagaccctattcacctgaggtgtcacagctggaagaacactgctctgcataaggtcacatatttacagaatggcaaaggcaggaagtattttcatcataattctgacttctacattccaaaagccacactcaaagacagcggctcctacttctgcagggggcttgttgggagtaaaaatgtgtcttcagagactgtgaacatcaccatcactcaaggtttggcagtgtcaaccatctcatcattctttccacctgggtaccaagtctctttctgcttggtgatggtactcctttttgcagtggacacaggactatatttctctgtgaagacaaacattcgaagctcaacaagagactggaaggaccataaatttaaatggagaaaggaccctcaagacaaatgacccccatcccatgggggtaataagagcagtagcagcagcatctctgaacatttctctggatttgcaaccctatcatcctcaggcctctctacaagcagcaggaaacatagaactcagagccagatcccttatccaactctcgacttttccttggtctccagtggaagggaaaagcccatgatcttcaagcagggaagccccagtgagtagctgcattcctagaaattgaagtttcagagctacacaaacactttttctgtcccaaccgttccctcacagcaaaaaaaaaaaaaaaaaaaaaaaaaaaaaa

SEQ ID NO: 506 - protein, 254 aa, Homo sapiens
MWQLLLPTALLLLVSAGMRTEDLPKAVVFLEPQWYRVLEKDSVTLKCQGAYSPEDNSTQWFHNESLISSQASSYFIDAATVDDSGEYRCQTNLSTLSDPVQLEVHIGWLLLQAPRWVFKEEDPIHLRCHSWKNTALHKVTYLQNGKGRKYFHHNSDFYIPKATLKDSGSYFCRGLVGSKNVSSETVNITITQGLAVSTISSFFPPGYQVSFCLVMVLLFAVDTGLYFSVKTNIRSSTRDWKDHKFKWRKDPQDK

SEQ ID NO: 507 - DNA, 324 bp, Homo sapiens
atggcggacgggacctgtcaggacgtggccatcgtgggctacaaggactcgccctccatctgggccgccgtccccgggaaaaccttcgccaacatcgcgccagctgaggttggtgtcctggctggcaaagacaggtcaagatggggaattttgcatggatcttcgtataccaagagtaccggtggagcccccaccttcaatgtcactgtcaccaagactgacaagacgctagtcctgctgatgggcaaagaaggtgtccacggtggtttgatcaacaagaaatgttatgaaatggcctcccaccttcggcgttcccagtactga

SEQ ID NO: 508 - protein, 107 aa, Homo sapiens
MADGTCQDVAIVGYKDSPSIWAAVPGKTFANIAPAEVGVLAGKDRSRWGILHGSSYTKSTGGAPTFNVTVTKTDKTLVLLMGKEGVHGGLINKKCYEMASHLRRSQY

SEQ ID NO: 509 - DNA, 741 bp, Homo sapiens
atggttgtaggattcactgagtttgaatccttccacccaggccttgctgctgcagcctctgccagagccagctcctggtggacccatgtggaaatgggacctccagatcccatcctgggagtcactgaagcctttaagagggacatcaatagcaaaaagatgaatctgggagttgggatgataatgggaagccgctttgccagtggtgatggtgataaggatgcctgggctctgcaccacttcatcgaacagggcattaatgtttgtctctgccaatcatatgccaagaacatgggcttatatggtgagcatgtaggagccttcactgtggtctgcaaagatgcagatgaagccaaaagggtagagtcacagttgaagatcttgattagtcccatgtattccaactctcccctcaatggggcccagattgcttctaccattccaaacaccccagttggtttgaaggtctgggtcatgggaggcctacatgatcatcctcaggttatgagtgacgagaaagagacaacactgagagcagtggctgtcaagtactggatcagagtccggctgtgccacttccttgaaacattcatgtctccggaccttactggctggaaaaaactgcagcaggaagatggccttacctcacttctagcttccaagtctcacaagagagcacaggcagaaccgaagccacatccaggacctgggctgagaacatctggcacatggagcctgtag

SEQ ID NO: 510 - protein, 246 aa, Homo sapiens [sequence omitted]

SEQ ID NO: 511 - DNA, 1653 bp, Homo sapiens
cggttgcttgctgtcccagcggcgccccctcatcaccgtcgccatgcccggaggtctgcttctcggggacgtggctcccaactttgaggccaataccaccgtcggccgcatccgtttccacgactttctgggagactcatggggcattctcttctcccaccctcgggactttaccccagtgtgcaccacagagcttggcagagctgcaaagctggcaccagaatttgccaagaggaatgttaagttgattgccctttcaatagacagtgttgaggaccatcttgcctggagcaaggatatcaatgcttacaattgtgaagagcccacagaaaagttaccttttcccatcatcgatgataggaatcgggagcttgccatcctgttgggcatgctggatccagcagagaaggatgaaaagggcatgcctgtgacagctcgtgtggtgtttgtttttggtcctgataagaagctgaagctgtctatcctctacccagctaccactggcaggaactttgatgagattctcagggtagtcatctctctccagctgacagcagaaaaaagggttgccaccccagttgattggaaggatggggatagtgtgatggtccttccaaccatccctgaagaagaagccaaaaaacttttcccgaaaggagtcttcaccaaagagctcccatctggcaagaaatacctccgctacacaccccagccttaagtctcttggagaagttggtgctgtgagccagaggatgtcagctgccaattgtgttttcctgcagcaattccataaacacatcctggtgtcatcacagccaaggtttttaggttgctataccaatggcttattaaatgaaaatggcactaaaagtttcttgagattctttatactctctgccttcagcaatcaattccattcatacatcagcactctgctggttctgtttgaaatatgttctgtatttaaaactcaaatcttgttggatctctgcagggcttgtgaccaatgaagtcatatttgttgatggttgacaaagcttgcttcactccatcagagaatgactatcaatttttttttaactgtcctatcacgtcctctcctgtcacccattttgaagagtggcagaacttgaagttcaacttcctctgtaaatatccaagtataaagcccaggaacttctagaataacccagatgcgctttaattttttttaatatgttttgatcacagaacttctagaataacccagatgctctttcatattcttttaatacatcttgatcacagctgggggaaaaaaagctttttaattctgtaccttcctagtagataagtgaagagcagggaaagagacctttaaatattttgctataaaaaaatttgtgataagtttctatcaaaatggggagattgcagaaaaggcttcccttggctcccaaggaggtgtagcaggtgtgagcaatattagtgccatgtgcctttcacacagggtttgcatttatcagtctgttttccgatgatgtgtacatgaaagagtacaccatgtgaagagaagagagaatgattgaaaatgttttagtatagaactcttcttgcagtgggttgctattttctagattttactttttagggaacaaaataaaatcctttgtt

SEQ ID NO: 512 - protein, 224 aa, Homo sapiens
MPGGLLLGDVAPNFEANTTVGRIRFHDFLGDSWGILFSHPRDFTPVCTTELGRAAKLAPEFAKRNVKLIALSIDSVEDHLAWSKDINAYNCEEPTEKLPFPIIDDRNRELAILLGMLDPAEKDEKGMPVTARVVFVFGPDKKLKLSILYPATTGRNFDEILRVVISLQLTAEKRVATPVDWKDGDSVMVLPTIPEEEAKKLFPKGVFTKELPSGKKYLRYTPQP

SEQ ID NO: 513 - DNA, 1924 bp, Homo sapiens
agagaccgtccgaggtaattgtctgccacgagtgcacattctgaaaacaggagattttagttcctaaaaatgggaagaacctacattgtagaagagactgttggccagtatctttcaaacataaatctccaaggaaaggcttttgtctctggccttttaataggacagtgttcgtcacaaaaggattatgtgattcttgccactagaacgccacccaaagaggagcaaagtgagaacctcaaacatcccaaagctaagttggataacttggatgaagaatgggccacagaacatgcctgccaggtatccagaatgctaccagggggacttttagttcttggagtatttattattactactttagaactggcaaatgattttcaaaatgccctgcgtagactaatgtttgctgtggaaaagtctataaatagaaagagattgtggaatttcacagaggaggaagtctcagaacgagtgacacttcacatttgtgcttctacaaaaaaaatattttgtcgaacttatgatatccatgatccaaagagttcagcaagaccagcagattggaagtatcaaagtggattatcatcctcatggctttctttagagtgtacagttcacattaatattcacatcccactttctgctacttctgtcagctatactctggagaaaaatacaaagaatggacttacacgctgggccaaggaaatagaaaatggtgtttatttgattaatggacaagttaaagatgaagattgtgacctattagaaggacagaaaaaatcttctagaggaaatactcaagcaactagtcattcttttgatgtcagagtgctaacgcagttgctcctgaattcagaccacagatccacagccacagtccagatatgtagcggttctgtaaaccttaagggtgctgtgaaatgcagagcttatatccacagcagtaaacccaaagttaaagatgctgtgcaggcagtaaagagggatatattgaacacagttgctgatcgttgtgaaatgctatttgaggatctgcttttgaatgaaattccagaaaaaaaagattctgaaaaagagttccacgtcctcccttatcgagtctttgttccccttcctggatccactgtaatgttgtgtgattataaatttgacgatgagtcagctgaagaaatcagggaccattttatggagatgttggatcacacaattcaaatagaagatttggaaattgcagaggaaacaaacacagcttgtatgagttcttctatgaatagtcaagcttcattggacaacacagatgatgaacaaccaaaacaaccaattaaaactacaatgttattgaaaattcagcaaaacataggtgtgattgcagcatttacagttgcagtccttgctgcgggtatctcctttcattacttcagtgattagggtgaggcacaaagagtttcttgatcatccagagaacattgacagacaattatgaataataaagatgttaacaatccatctgtatttaaaacactagcagccagatctgctgccatgatgcctatttggtgtgtttctgattaaaatgaaatcacaagctgccttgtttagcctgctttacattgtaggtggcccgcatttccagaaataacgttatgcatctagatggaagctgcatgtaacaaatcattattatctatttttaaaagcttcaaaatgatgggatatgatcatagattttagtcttactaatctgaatcacatattaatcaggacattaaaaactttaacagaggcatgatggctcacacgtataatcctaatgctttgagaggctgaggtaggagcatcacctggggctgggagggagttggagaccagcctggatgacataatgagattctgtctctactggaaaaaaaaaaaaaaa

SEQ ID NO: 514 - protein, 373 aa, Homo sapiens
MLPGGLLVLGVFIITTLELANDFQNALRRLMFAVEKSINRKRLWNFTEEEVSERVTLHICASTKKIFCRTYDIHDPKSSARPADWKYQSGLSSSWLSLECTVHINIHIPLSATSVSYTLEKNTKNGLTRWAKEIENGVYLINGQVKDEDCDLLEGQKKSSRGNTQATSHSFDVRVLTQLLLNSDHRSTATVQICSGSVNLKGAVKCRAYIHSSKPKVKDAVQAVKRDILNTVADRCEMLFEDLLLNEIPEKKDSEKEFHVLPYRVFVPLPGSTVMLCDYKFDDESAEEIRDHFMEMLDHTIQIEDLEIAEETNTACMSSSMNSQASLDNTDDEQPKQPIKTTMLLKIQQNIGVIAAFTVAVLAAGISFHYFSD

SEQ ID NO: 515 - DNA, 4199 bp, Homo sapiens
cgagacggaagcgggctgggaggcgtcggcggcggcagcgcacgtggtgacgtgcgagggggtgcggcgcgagcggtcggcggcggcggaggcagtgtctcccggtcgcgcgtggaggtcggtcgctcagagctgctgggcgcagtttctccgcctgctgcttcggcgcggctgtatcggcgagcgagcgagttcccgcgagttctcggtggcgctcccccttcctttcagtctccacggactggcccctcgtccttctacttgaccgctcccgtcttccgccgccttctggcgctttccgttgggccgattcccgcccgcttcctcctgcttcccatcgaagctctagaaatgaatgtttccatctcttcagagatgaaccagattatgatgcatcattatcacagaagaaattcgtgtctatagcttttaaggacttgattacatcattttcaagcctgatagttttggaatcaccattagagcttaagacacacctgccttcatttcaaccacctgtcttcataccctgacgaagtgcaccttttaacactcctttgtccttggattacttaagagttcccagaaatacatttgccaccaacagagtagccaaatttataaggaaaaatgattcccaatggatatttgatgtttgaggatgaaaattttattgagtcttctgttgccaaattaaatgccctgaggaaaagtggccagttctgtgatgttcgacttcaggtctgtggccatgaaatgttagcacacagagcagtgctagcttgctgcagtccctatttatttgaaatctttaatagtgatagtgatcctcatggaatttctcacgttaaatttgatgatctcaatccagaagctgttgaagtcttgttgaattatgcctacactgctcagttgaaagcagataaggaattggtaaaagatgtttattctgcagcaaaaaagctgaagatggatcgagtaaagcaggtttgtggtgattatttactgtctagaatggatgttaccagctgcatctcttaccgaaattttgcaagttgtatgggagactcccgtttgttgaataaggttgatgcttatattcaggagcatttgttacaaatttctgaagaggaggagtttcttaagcttccaaggctaaagttggaggtaatgcttgaagataatgtttgcttgcccagcaatggcaaattatatacaaaggtaatcaactgggtgcagcgtagcatctgggagaatggagacagtctggaagagctgatggaagaggttcaaaccttgtactactcagctgatcacaagctgcttgatgggaacctactagatggacaggctgaggtgtttggcagtgatgatgaccacattcagtttgtgcagaaaaagccaccacgtgagaatggccataagcagataagtagcagttcaactggatgtctctcttctccaaatgctacagtacaaagccctaagcatgagtggaaaatcgttgcttcagaaaagacttcaaataacacttacttgtgcctggctgtgctggatggtatattctgtgtcatttttcttcatgggagaaacagcccacagagctcaccaacaagtactccaaaactaagtaagagtttaagctttgagatgcaacaagatgagctaatcgaaaagcccatgtctcctatgcagtacgcacgatctggtctgggaacagcagagatgaatggcaaactcatagctgcaggtggctataacagagaggaatgtcttcgaacagtcgaatgctataatccacatacagatcactggtcctttcttgctcccatgagaacaccaagagcccgatttcaaatggctgtactcatgggccagctctatgtggtaggtggatcaaatggccactcagatgacctgagttgtggagagatgtatgattcaaacatagatgactggattcctgttccagaattgagaactaaccgttgtaatgcaggagtgtgtgctctgaatggaaagttatacatcgttggtggctctgatccatatggtcaaaaaggactgaaaaattgtgatgtatttgatcctgtaacaaagttgtggacaagctgtgcccctcttaacattcggagacaccagtctgcagtctgtgagcttggtggttatttgtacataatcggaggtgcagaatcttggaattgtctgaacacagtagaacgatacaatcctgaaaataatacctggactttaattgcacccatgaatgtggctaggcgaggagctggagtggctgttcttaatggaaaactgtttgtatgtggtggctttgatggttctcatgccatcagttgtgtggaaatgtatgatccaactagaaatgaatggaagatgatgggaaatatgacttcaccaaggagcaatgctgggattgcaactgtagggaacaccatttatgcagtgggaggattcgatggcaatgaatttctgaatacggtggaagtctataaccttgagtcaaatgaatggagcccctatacaaagattttccagttttaacaaatttaagaccctctcaaactaacaggcttagtgatgtaattatggttagtagaggtacacttgtgaataaagagggtgggtgggtatagatgttgctaacagcaacacaaagcttttgcatattgcatactattaaacatgctgtacatactttttgggtttatttggaaaggaatgcaaagatgaaggtctgttttgtgtacttttaagactttggttattttactttttggaaaagaataaaccaagaattgattgggcacatcatttcaagaagtcccctctcctccacatttgttttgccaatttgcacattaaatgactcttccctcaaatgtgtactatggggtaaaaggggtagggtttaaagatgtagacagttgggttttttaagggccctttttcaataactggaacactctataacaaaggatacttatttaaatagatgacattgactatttttgtttttattaaaaggaagcttacatgcctaccaatatttaatcttttatgattgcctttttataactttttatattctcagcagagtgctttaccaattgaagtaaaatgtggcaggctggagttattgaagcagagtggcagtcttcagtttgcagagtaggggtctgtcttttaaactctgagtgcaaacttcagagttcttgccttggctgcagtttttttccttcaagaatgcagtactaacatttatttgagtggagttactgaacagtaacatagctgtgatttttggtatttgaaacactggttttaaatattttgacttgttgagggtatgttttatatagcaagacattatatagcagtaaaaaatggtgttttatcttctatataattcctgtttttattattaacaaaacagtcctaaatagcagccctcaattgtgaaaaaatttactttaaactacattaggttgtgaatgcaggttttatcagaactatgtttttgttcagtttatctgttcatatggataaatattggttgggatgacttggtgtctaatgtgtagtgctacacacctaacttatggggccaaaatagcatgtcctaatgcttgctgctgatttaaacacattaaaggtactttgcaggaaatccttgcaccatgggattaatatccaattgctgcttgtacactcattcattactaaaagttttgagaaatttttttttccagtaatgagcttaagaaatttgtggaaaataactcacctggcatcttacatctgaaataaggaatgatataaggtttttttttctcacagaagatgaagcacacaggaacctaatgggccaactgggatgaggtgactattctgagatgactattcagtggctaacttgggttaggaagaaaataattaggtattttctccaaatgttcactggtactctgccactttatttctctcatctgttacacaaagaaccaccaggaaagcaaatcagtttggttggtaactctgtaattcctaactatcactggtttggttctggactaaaactacattgacagattgaatttgcctaatatgatgactgtttttaatatggatctgtatgtgttctattcagcacaaggaaataaaattttagttgaggattcagc

SEQ ID NO: 516 - protein, 642 aa, Homo sapiens
MIPNGYLMFEDENFIESSVAKLNALRKSGQFCDVRLQVCGHEMLAHRAVLACCSPYLFEIFNSDSDPHGISHVKFDDLNPEAVEVLLNYAYTAQLKADKELVKDVYSAAKKLKMDRVKQVCGDYLLSRMDVTSCISYRNFASCMGDSRLLNKVDAYIQEHLLQISEEEEFLKLPRLKLEVMLEDNVCLPSNGKLYTKVINWVQRSIWENGDSLEELMEEVQTLYYSADHKLLDGNLLDGQAEVFGSDDDHIQFVQKKPPRENGHKQISSSSTGCLSSPNATVQSPKHEWKIVASEKTSNNTYLCLAVLDGIFCVIFLHGRNSPQSSPTSTPKLSKSLSFEMQQDELIEKPMSPMQYARSGLGTAEMNGKLIAAGGYNREECLRTVECYNPHTDHWSFLAPMRTPRARFQMAVLMGQLYVVGGSNGHSDDLSCGEMYDSNIDDWIPVPELRTNRCNAGVCALNGKLYIVGGSDPYGQKGLKNCDVFDPVTKLWTSCAPLNIRRHQSAVCELGGYLYIIGGAESWNCLNTVERYNPENNTWTLIAPMNVARRGAGVAVLNGKLFVCGGFDGSHAISCVEMYDPTRNEWKMMGNMTSPRSNAGIATVGNTIYAVGGFDGNEFLNTVEVYNLESNEWSPYTKIFQF

SEQ ID NO: 517 - DNA, 1833 bp, Homo sapiens
cctttgccgctggtcgggattgggatgtcgaagaacacagtgtcgtcggcccgcttccggaaggtggacgtggatgaatatgacgagaacaagttcgtggacgaagaagatgggggcgacggccaggccgggcccgacgagggcgaggtggactcctgcctgcggcaaggaaacatgacagctgccctacaggcagctctgaagaacccccctatcaacaccaagagtcaggcagtgaaggaccgggcaggcagcattgtcttgaaggtgctcatctcttttaaagctaatgatatagaaaaggcagttcaatctctggacaagaatggtgtggatctcctaatgaagtatatttataaaggatttgagagcccgtctgacaatagcagtgctatgttactgcaatggcatgaaaaggcacttgctgctggaggagtagggtccattgttcgtgtcttgactgcaagaaaaactgtgtagtctggcaggaagtggattatctgcctcgggagtgggaattgctggtacaaagaccaaaacaaccaaatgccaccgctgccctgtgggtagcatctgtttctctcagctttgccttcttgctttttcatatctgtaaagaaaaaaattacatatcagttgtcctttaatgaaaattgggataatatagaagaaattgtgttaaaatagaagtgtttcatcctttcaaaaccatttcagtgatgtttataccaatctgtatatagtataatttacattcaagtttaattgtgcaacttttaacccctgttggctggttttttgttctgttttgttttgtattatttttaactaatactgagagatttggtcagaatttgaggccagtttcctagctcattgctagtcaggaaatgatatttataaaaaatatgagagactggcagctattaacattgcaaaactggaccatatttcccttatttaataagcaaaatatgtttttggaataagtggtgggtgaataccactgccaagttatagctttgtttttgcttgcctcctgattatctgtactgtgggtttaagtatgctactttctctcagcatccaataatcatggcccctcaatttatttgtggtcacccagggttcagagcaagaagtcttgctttatacaaatgtatccataaaatatcagagcttgttgggcatgaacatcaaacttttgttccactaatatggctctgtttggaaaaaactgcaaatcagaaagaatgatttgcagaaagaaagaaaaactatggtgtaatttaaactctgggcagcctctgaatgaaatgctactttctttagaaatataatagctgccttagacattatgaggtatacaactagtatttaagataccatttaatatgccccgtaaatgtcttcagtgttcttcagggtagttgggatctcaaaagatttggttcagatccaaacaaatacacattctgtgttttagctcagtgttttctaaaaaaagaaactgccacacagcaaaaaattgtttactttgttggacaaaccaaatcagttctcaaaaaatgaccggtgcttataaaaagttataaatatcgagtagctctaaaacaaaccacctgaccaagagggaagtgagcttgtgcttagtatttacattggatgccagttttgtaatcactgacttatgtgcaaactggtgcagaaattctataaactctttgctgtttttgatacctgctttttgtttcattttgttttgttttgtaaaaatgataaaacttcagaaaataaaatgtcagtgttgaataaaaaaaaaaaaaaaaaaaa

SEQ ID NO: 518 - protein, 151 aa, Homo sapiens
MSKNTVSSARFRKVDVDEYDENKFVDEEDGGDGQAGPDEGEVDSCLRQGNMTAALQAALKNPPINTKSQAVKDRAGSIVLKVLISFKANDIEKAVQSLDKNGVDLLMKYIYKGFESPSDNSSAMLLQWHEKALAAGGVGSIVRVLTARKTV

SEQ ID NO: 519 - DNA, 5082 bp, Homo sapiens
gccaggcagagtcctactataggcatgcagctcagcttgtcccctccaatgaagcattgctgtgaagttccctttcccagctgcctccactaatctgcaaaaagcactttctaaagcactggaaagccgagatgaggtgaaaaccaagtggggtgtttctgacttcatcaaggcctttattaaattccacggtcatgtgtacctgagtaagagcttggaaaagttgagccctcttcgagagaaattggaagaacagtttaagaggctgctattccaaaaagctttcaactctcagcagttagttcatgtcactgtcattaacctgtttcaacttcatcaccttcgtgactttagcaatgaaaccgagcagcacacttatagccaagatgagcagctatgttggacacagttgctggccctctttatgtcttttcttggcatcctgtgcaagtgtcctctacagaatgagtctcaggaggagtcctacaatgcctatcctcttccagcagtcaaggtctccatggactggctaagactcagacccagggtctttcaggaggcagtggtggatgaaagacagtacatttggccctggttgatttctcttctgaatagtttccatccccatgaagaggacctctcaagtattagtgcgacaccacttccagaggagtttgaattacaaggatttttggcattgagaccttctttcaggaacttggatttttccaaaggtcaccagggtattacaggggacaaagaaggccagcaacgacgaatacgacagcaacgcttgatctctataggcaaatggattgctgataatcagccaaggctgattcagtgtgaaaatgaggtagggaaattgttgtttatcacagaaatcccagaattaatactggaagaccccagtgaagccaaagagaacctcattctgcaagaaacatctgtgatagagtcgctggctgcagatgggagcccagggctaaaatcagtgctatctacaagccgaaatttaagcaacaactgtgacacaggagagaagccagtggttaccttcaaagaaaacattaagacacgagaagtgaacagagaccaaggaagaagttttcctcccaaagaggtgagaagggactatagcaaaggaataactgtaactaagaatgatggaaagaaggacaacaacaagaggaaaactgaaaccaagaaatgcaccttagaaaagttacaggaaacaggaaagcagaatgtggcagtgcaggtaaaatcccagacagaactaagaaagactccagtgtctgaagccagaaaaacacctgtaactcaaaccccaactcaagcaagtaactcccagttcatccccattcatcaccctggagccttccctcctcttcccagcaggccagggtttccgcccccaacatatgttatccccccgcctgtggcattttctatgggctcaggttacaccttcccagctggtgtttctgtcccaggaacctttcttcagcctacagctcactctccagcaggaaaccaggtgcaagctgggaaacagtcccacattccttacagccagcaacggccctctggaccagggccaatgaaccagggacctcaacaatcacagccaccttcccagcaaccccttacatctttaccagctcagccaacagcacagtctacaagccagctgcaggttcaagctctaactcagcaacaacaatcccctacaaaagctgtgccggctttggggaaaagcccgcctcaccactctggattccagcagtatcaacaggcagatgcctccaaacagctgtggaatccccctcaggttcaaggcccattagggaaaattatgcctgtgaaacagccctactaccttcagacccaagaccccataaaactgtttgagccgtcattgcaacctcctgtaatgcagcagcagcctctagaaaaaaaaatgaagccttttcccatggagccatataaccataatccctcagaagtcaaggtcccagaattctactgggattcttcctacagcatggctgataacagatctgtaatggcacagcaagcaaacatagaccgcaggggcaaacggtcaccaggaatcttccgtccagagcaggatcctgtacccagaatgccgtttgagaaatccttattggagaagccctcagagctcatgtcacattcatcctctttcctgtccctcaccggattctctctcaatcaggaaagatacccaaataatagtatgttcaatgaggtatatgggaaaaacctgacatccagctccaaagcagaactcagtccctcaatggccccccaggaaacatctctgtattccctttttgaagggactccgtggtctccatcacttcctgccagttcagatcattcaacaccagccagccagtctcctcattcctctaacccaagcagcctacccagctctcctccaacacacaaccataattctgttccattctccaattttggacccattgggactccagataacagggatagaaggactgcagatcggtggaaaactgataagccagccatgggtgggtttggcattgattatctctcagcaacgtcatcctctgagagcagttggcatcaggccagcactccgagtggcacctggacaggccatggcccttccatggaggattcctctgctgtcctcatggaaagcctaaagtctatctggtccagttccatgatgcatcctggaccttctgctctggagcagctgttaatgcagcagaagcagaaacagcaacggggacaaggcaccatgaaccctccacactgaggccaaagtggcaacctgggaatgaaggctccataaaccatggcatgttgggtttgcaggactggcccacacagtcccctgcaggtggcagccctcttttctgtttctcgctgtcaagagggtgtaagtattccaccagcccgctgagtgtgcacgaaatgttcgcagtgcaacaaaaagaaaaatccatcaggaactctccgtccccccggggccttccggagggagagagagaggaactgctgtttatctcactcagttacttggtatcaccgcctctcaccttctccatcgtgcatgtccccagccacatgggaagtgaaagctgagaagggaaggcagatgggagaagccaatgggaacttctcagtccttttttcctctttggggaataaaataggaatccattaatgattgctttgctgactgagaatgtagttgaaattaaacatcttttattattattactctcagtagtaaaatatcacactgaattcttccatacacaggtgtgcttctagtcagtgtgtagcaaggaaagccccgttcactgctcctgtgagaggttggtggtgacaggatggggaaccgacctcttcagccagtggaaatgttccataagggagagttcaaggcctgtcagaaggctctggtaggccttcctctggccaggagactccagcagggaatgcccttcactctgtaggtgctcgagccccaatcgaggatacagtgtgggtggtggtgctgggctggactagcaggtagactgctgtaggatttcaaattacgtttttgattcctgtacattttacagtcgcacagcaagcagtctcacagaaggcaggctagtccattcacagcctgacacgttctaataggtagaagctttcagtgtggttattttttctttggttggtttttgtgcccccattctacttcccaccctcctgccccatctccatcccttcttttacccaatgctgtatgctagtaattgtttttattcctaatgtgtgcaacatcacatctccccaagaagcaacagcatggggtccagcagttggggcccaaaagacagtctgaagaggaaggaagcagcagtatctgcgtagcccacagagggcccaggcccctgcccagctgcagtctcccagcctccactttcagagtgaaattcaaggcagcacggacatgtgcccatcaggcacagaagaaaacacgacgtcgtccattttggaagagacgaaagaaaggaaaataaactctttgtatgatatttattaggaggaaagaggactgaaaatgttcttgtgtagaaacagaaggacagcatttctgttagtcatttcctggaaaagtaatattttaaggggaaattatggaaacaatctaattgttcaattgctgtgctagtggtagggtttattttctgggaggtctctcctttgtgtgtctgtatgtttgtgtacacacacgtgcccatctgctgtcccagaggggaggggttgtgtgtgcgagtgtatggagttagtgtggaacttaagagctggaagacagctgtagagcaaagcacatccaggagccccagttgtcactgcagtctgggcaaccccagcaatgaaaaggggtgagataacgctcattgctcttcagagagagtggttggagccccccccgccccgtatgcttacattattgctcttttagtttgacatggtgtttgggttttgtttttttgaaaggtctgaaaaggtgaagccccctacccaatggcaatatgaaaccttttgtgcttctcttcagccccttccctgtgtccacctttctctcctcttcccaagcctttttcctactacctttacccagtttgtgtgtttgagctctgcattcaggcagctgcaacattccagtgtttgaactgtcactgattcttgcgccctagacaagctaaccaggtttaccatctcactcccagtaatacccagctcctatctaaagccccattctgcatgagaatttggtgtttggaatgttttctgactcttggggcgggattcctcgccttatcatcctcactgtggagtaatgagggggaggagaatctttatcagaaactggttttgtgtagtaaactttcttttgtggttttttgttttgttttctgggttttgttttttgtttttgtctgtgcaagacctgcagctgctgaaaatcagctttgcctttaattaaaccatgttctctcc

SEQ ID NO: 520 - protein, 802 aa, Homo sapiens
MSFLGILCKCPLQNESQEESYNAYPLPAVKVSMDWLRLRPRVFQEAVVDERQYIWPWLISLLNSFHPHEEDLSSISATPLPEEFELQGFLALRPSFRNLDFSKGHQGITGDKEGQQRRIRQQRLISIGKWIADNQPRLIQCENEVGKLLFITEIPELILEDPSEAKENLILQETSVIESLAADGSPGLKSVLSTSRNLSNNCDTGEKPVVTFKENIKTREVNRDQGRSFPPKEVRRDYSKGITVTKNDGKKDNNKRKTETKKCTLEKLQETGKQNVAVQVKSQTELRKTPVSEARKTPVTQTPTQASNSQFIPIHHPGAFPPLPSRPGFPPPTYVIPPPVAFSMGSGYTFPAGVSVPGTFLQPTAHSPAGNQVQAGKQSHIPYSQQRPSGPGPMNQGPQQSQPPSQQPLTSLPAQPTAQSTSQLQVQALTQQQQSPTKAVPALGKSPPHHSGFQQYQQADASKQLWNPPQVQGPLGKIMPVKQPYYLQTQDPIKLFEPSLQPPVMQQQPLEKKMKPFPMEPYNHNPSEVKVPEFYWDSSYSMADNRSVMAQQANIDRRGKRSPGIFRPEQDPVPRMPFEKSLLEKPSELMSHSSSFLSLTGFSLNQERYPNNSMFNEVYGKNLTSSSKAELSPSMAPQETSLYSLFEGTPWSPSLPASSDHSTPASQSPHSSNPSSLPSSPPTHNHNSVPFSNFGPIGTPDNRDRRTADRWKTDKPAMGGFGIDYLSATSSSESSWHQASTPSGTWTGHGPSMEDSSAVLMESLKSIWSSSMMHPGPSALEQLLMQQKQKQQRGQGTMNPPH

SEQ ID NO: 521 - DNA, 5197 bp, Homo sapiens
accacctgatcaaggaaaaggaaggcacagcggagcgcagagtgagaaccaccaaccgaggcgccgggcagcgacccctgcagcggagacagagactgagcggcccggccccgccatgcctgcgctctggctgggctgctgcctctgcttctcgctcctcctgcccgcagcccgggccacctccaggagggaagtctgtgattgcaatgggaagtccaggcagtgtatctttgatcgggaacttcacagacaaactggtaatggattccgctgcctcaactgcaatgacaacactgatggcattcactgcgagaagtgcaagaatggcttttaccggcacagagaaagggaccgctgtttgccctgcaattgtaactccaaaggttctcttagtgctcgatgtgacaactccggacggtgcagctgtaaaccaggtgtgacaggagccagatgcgaccgatgtctgccaggcttccacatgctcacggatgcggggtgcacccaagaccagagactgctagactccaagtgtgactgtgacccagctggcatcgcagggccctgtgacgcgggccgctgtgtctgcaagccagctgtcactggagaacgctgtgataggtgtcgatcaggttactataatctggatggggggaaccctgagggctgtacccagtgtttctgctatgggcattcagccagctgccgcagctctgcagaatacagtgtccataagatcacctctacctttcatcaagatgttgatggctggaaggctgtccaacgaaatgggtctcctgcaaagctccaatggtcacagcgccatcaagatgtgtttagctcagcccaacgactagaccctgtctattttgtggctcctgccaaatttcttgggaatcaacaggtgagctatggtcaaagcctgtcctttgactaccgtgtggacagaggaggcagacacccatctgcccatgatgtgattctggaaggtgctggtctacggatcacagctcccttgatgccacttggcaagacactgccttgtgggctcaccaagacttacacattcaggttaaatgagcatccaagcaataattggagcccccagctgagttactttgagtatcgaaggttactgcggaatctcacagccctccgcatccgagctacatatggagaatacagtactgggtacattgacaatgtgaccctgatttcagcccgccctgtctctggagccccagcaccctgggttgaacagtgtatatgtcctgttgggtacaaggggcaattctgccaggattgtgcttctggctacaagagagattcagcgagactggggccttttggcacctgtattccttgtaactgtcaagggggaggggcctgtgatccagacacaggagattgttattcaggggatgagaatcctgacattgagtgtgctgactgcccaattggtttctacaacgatccgcacgacccccgcagctgcaagccatgtccctgtcataacgggttcagctgctcagtgatgccggagacggaggaggtggtgtgcaataactgccctcccggggtcaccggtgcccgctgtgagctctgtgctgatggctactttggggacccctttggtgaacatggcccagtgaggccttgtcagccctgtcaatgcaacaacaatgtggaccccagtgcctctgggaattgtgaccggctgacaggcaggtgtttgaagtgtatccacaacacagccggcatctactgcgaccagtgcaaagcaggctacttcggggacccattggctcccaacccagcagacaagtgtcgagcttgcaactgtaaccccatgggctcagagcctgtaggatgtcgaagtgatggcacctgtgtttgcaagccaggatttggtggccccaactgtgagcatggagcattcagctgtccagcttgctataatcaagtgaagattcagatggatcagtttatgcagcagcttcagagaatggaggccctgatttcaaaggctcagggtggtgatggagtagtacctgatacagagctggaaggcaggatgcagcaggctgagcaggcccttcaggacattctgagagatgcccagatttcagaaggtgctagcagatcccttggtctccagttggccaaggtgaggagccaagagaacagctaccagagccgcctggatgacctcaagatgactgtggaaagagttcgggctctgggaagtcagtaccagaaccgagttcgggatactcacaggctcatcactcagatgcagctgagcctggcagaaagtgaagcttccttgggaaacactaacattcctgcctcagaccactacgtggggccaaatggctttaaaagtctggctcaggaggccacaagattagcagaaagccacgttgagtcagccagtaacatggagcaactgacaagggaaactgaggactattccaaacaagccctctcactggtgcgcaaggccctgcatgaaggagtcggaagcggaagcggtagcccggacggtgctgtggtgcaagggcttgtggaaaaattggagaaaaccaagtccctggcccagcagttgacaagggaggccactcaagcggaaattgaagcagataggtcttatcagcacagtctccgcctcctggattcagtgtctcggcttcagggagtcagtgatcagtcctttcaggtggaagaagcaaagaggatcaaacaaaaagcggattcactctcaagcctggtaaccaggcatatggatgagttcaagcgtacacagaagaatctgggaaactggaaagaagaagcacagcagctcttacagaatggaaaaagtgggagagagaaatcagatcagctgctttcccgtgccaatcttgctaaaagcagagcacaagaagcactgagtatgggcaatgccactttttatgaagttgagagcatccttaaaaacctcagagagtttgacctgcaggtggacaacagaaaagcagaagctgaagaagccatgaagagactctcctacatcagccagaaggtttcagatgccagtgacaagacccagcaagcagaaagagccctggggagcgctgctgctgatgcacagagggcaaagaatggggccggggaggccctggaaatctccagtgagattgaacaggagattgggagtctgaacttggaagccaatgtgacagcagatggagccttggccatggaaaagggactggcctctctgaagagtgagatgagggaagtggaaggagagctggaaaggaaggagctggagtttgacacgaatatggatgcagtacagatggtgattacagaagcccagaaggttgataccagagccaagaacgctggggttacaatccaagacacactcaacacattagacggcctcctgcatctgatggaccagcctctcagtgtagatgaagaggggctggtcttactggagcagaagctttcccgagccaagacccagatcaacagccaactgcggcccatgatgtcagagctggaagagagggcacgtcagcagaggggccacctccatttgctggagacaagcatagatgggattctggctgatgtgaagaacttggagaacattagggacaacctgcccccaggctgctacaatacccaggctcttgagcaacagtgaagctgccataaatatttctcaactgaggttcttgggatacagatctcagggctcgggagccatgtcatgtgagtgggtgggatggggacatttgaacatgtttaatgggtatgctcaggtcaactgacctgaccccattcctgatcccatggccaggtggttgtcttattgcaccatactccttgcttcctgatgctgggcaatgaggcagatagcactgggtgtgagaatgatcaaggatctggaccccaaagaatagactggatggaaagacaaactgcacaggcagatgtttgcctcataatagtcgtaagtggagtcctggaatttggacaagtgctgttgggatatagtcaacttattctttgagtaatgtgactaaaggaaaaaactttgactttgcccaggcatgaaattcttcctaatgtcagaacagagtgcaacccagtcacactgtggccagtaaaatactattgcctcatattgtcctctgcaagcttcttgctgatcagagttcctcctacttacaacccagggtgtgaacatgttctccattttcaagctggaagaagtgagcagtgttggagtgaggacctgtaaggcaggcccattcagagctatggtgcttgctggtgcctgccaccttcaagttctggacctgggcatgacatcctttcttttaatgatgccatggcaacttagagattgcatttttattaaagcatttcctaccagcaaagcaaatgttgggaaagtatttactttttcggtttcaaagtgatagaaaagtgtggcttgggcattgaaagaggtaaaattctctagatttattagtcctaattcaatcctacttttcgaacaccaaaaatgatgcgcatcaatgtattttatcttattttctcaatctcctctctctttcctccacccataataagagaatgttcctactcacacttcagctgggtcacatccatccctccattcatccttccatccatctttccatccattacctccatccatccttccaacatatatttattgagtacctactgtgtgccaggggctggtgggacagtggtgacatagtctctgccctcatagagttgattgtctagtgaggaagacaagcatttttaaaaaataaatttaaacttacaaactttgtttgtcacaagtggtgtttattgcaataaccgcttggtttgcaacctctttgctcaacagaacatatgttgcaagaccctcccatgggggcacttgagttttggcaaggctgacagagctctgggttgtgcacatttctttgcattccagctgtcactctgtgcctttctacaactgattgcaacagactgttgagttatgataacaccagtgggaattgctggaggaaccagaggcacttccaccttggctgggaagactatggtgctgccttgcttctgtatttccttggattttcctgaaagtgtttttaaataaagaacaattgttaga

SEQ ID NO: 522 - DNA, 2390 bp, Homo sapiens
cccaaccgcagttgactagcacctgctaccgcgcctttgcttcctggcgcacgcggagcctcctggagcctgccaccatcctgcctactacgtgctgccctgcgcccgcagccatgtgccgcaccctggccgccttccccaccacctgcctggagagagccaaagagttcaagacacgtctggggatctttcttcacaaatcagagctgggctgcgatactgggagtactggcaagttcgagtggggcagtaaacacagcaaagagaatagaaacttctcagaagatgtgctggggtggagagagtcgttcgacctgctgctgagcagtaaaaatggagtggctgccttccacgctttcctgaagacagagttcagtgaggagaacctggagttctggctggcctgtgaggagttcaagaagatccgatcagctaccaagctggcctccagggcacaccagatctttgaggagttcatttgcagtgaggcccctaaagaggtcaacattgaccatgagacccacgagctgacgaggatgaacctgcagactgccacagccacatgctttgatgcggctcaggggaagacacgtaccctgatggagaaggactcctacccacgcttcctgaagtcgcctgcttaccgggacctggctgcccaagcctcagccgcctctgccactctgtccagctgcagcctggacgagccctcacacacctgagtctccacggcagtgaggaagccagccgggaagagaggttgagtcacccatccccgaggtggctgcccctgtgtgggaggcaggttctgcaaagcaagtgcaagaggacaaaaaaaaaaaaaaaaaaaaaaaaaatgcgctccagcagcctgtttgggaagcagcagtctctccttcagatactgtgggactcatgctggagaggagccgcccacttccaggacctgtgaataagggctaatgatgagggttggtggggctctctgtggggcaaaaaggtggtatgggggttagcactggctctcgttctcaccggagaaggaagtgttctagtgtggtttaggaaacatgtggataaagggaaccatgaaaatgagaggaggaaagacatccagatcagctgttttgcctgttgctcagttgactctgattgcatcctgttttcctaattcccagactgttctgggcacggaagggaccctggatgtggagtcttcccctttggccctcctcactggcctctgggctagcccagagtcccttagcttgtacctcgtaacactcctgtgtgtctgtccagccttgcagtcatgtcaaggccagcaagctgatgtgactcttgccccatgcgagatatttatacctcaaacactggcctgtgagccctttccaagtcagtggagagccctgaaaggaggctcacttgaatccagctcagtgctctgggtggccccctgcaggtggcccctgaccctgcgttgcagcagggtccacctgtgagcaggcccgccctggggcctcttcctggatgtgccctctctgagttctgtgctgtctcttggaggcagggcccaggagaacaaagtgtggaggcctcggggagtggcttttccagctctcatgccccgcagtgtggaacaaggcagaaaaggatcctaggaaataagtctcttggcggtccctgagagtcctgctgaaatccagccagtgttttttgtggtatgagaacaggcaaaaagagatgccccgagatagaaggggagccttgtgtttctttcctgcagacgtgagatgaacactggagtgggcagaggtggcccaggaccatggcacccttagagtgcagaagctggggggagaggctgcttcgaagggcaggactggggataatcagaacctgcctgtcacctcagggcatcactgaacaaacatttcctgatggcaactcctgcggcagagcccaggctggggaagtgaactacccagggcagcccctttgtggcccaggataatcaacactgttctctctgtaccatgagctcctccaggagattatttaagtgtattgtatcattggttttctgtgattgtcataacattgtttttgttattgttggtgctgttgttatttattattgtaatttcagtttgcctctactggagaatctcagcaggggtttcagcctgactgtctccctttctctaccagactctacctctgaatgtgctgggaacctcttggagcctgtcaggaactcctcactgtttaaatatttatttattgtgacaaatggagctggtttcctagatatgaatgatgtttgcaatccccattttcctgtttcagcatgttatattcttataaaataaaagcaaaagtcaaatatg

SEQ ID NO: 523 - DNA, 3136 bp, Homo sapiens
gggtgcggggctgctggcggctctgcagagtcgagagtgggagaagagcggagcgtgtgagcagtactgcggcctcctctcctctcctaacctcgctctcgcggcctagctttacccgcccgcctgctcggcgaccagcggggatcctcccccagccgcaagtccacgaagaaagcaacgaatgaaaattatgaagacaacgagaagtcagactcctccgggtcgcgctccagctgcttcggcttcgtcgcctactctgtgaactccggggagagatctcgagtcaagattaagaccttaacccaccaacctgcctgttcggacaccccccgggccggccgctgtctgtccccttctccatcgccctctcccagaaagctccggtgcttggaccagctagagtctgagaaagaggagaggcgcgaacgccactccaaaaagagaagggttaaagagggcaaccctaacgatacgcttgactttctgtggctgggaacaccttccaccatgaccacctcagcaagttcccacttaaataaaggcatcaagcaggtgtacatgtccctgcctcagggtgagaaagtccaggccatgtatatctggatcgatggtactggagaaggactgcgctgcaagacccggaccctggacagtgagcccaagtgtgtggaagagttgcctgagtggaatttcgatggctctagtactttacagtctgagggttccaacagtgacatgtatctcgtgcctgctgccatgtttcgggaccccttccgtaaggaccctaacaagctggtgttatgtgaagttttcaagtacaatcgaaggcctgcagagaccaatttgaggcacacctgtaaacggataatggacatggtgagcaaccagcacccctggtttggcatggagcaggagtataccctcatggggacagatgggcacccctttggttggccttccaacggcttcccagggccccagggtccatattactgtggtgtgggagcagacagagcctatggcagggacatcgtggaggcccattaccgggcctgcttgtatgctggagtcaagattgcggggactaatgccgaggtcatgcctgcccagtgggaatttcagattggaccttgtgaaggaatcagcatgggagatcatctctgggtggcccgtttcatcttgcatcgtgtgtgtgaagactttggagtgatagcaacctttgatcctaagcccattcctgggaactggaatggtgcaggctgccataccaacttcagcaccaaggccatgcgggaggagaatggtctgaagtacatcgaggaggccattgagaaactaagcaagcggcaccagtaccacatccgtgcctatgatcccaagggaggcctggacaatgcccgacgtctaactggattccatgaaacctccaacatcaacgacttttctgctggtgtagccaatcgtagcgccagcatacgcattccccggactgttggccaggagaagaagggttactttgaagatcgtcgcccctctgccaactgcgaccccttttcggtgacagaagccctcatccgcacgtgtcttctcaatgaaaccggcgatgagcccttccagtacaaaaattaagtggactagacctccagctgttgagcccctcctagttcttcatcccactccaactcttccccctctcccagttgtcccgattgtaactcaaagggtggaatatcaaggtcgtttttttcattccatgtgcccagttaatcttgctttctttgtttggctgggatagaggggtcaagttattaatttcttcacacctaccctcctttttttccctatcactgaagctttttagtgcattagtggggaggagggtggggagacataaccactgcttccatttaatggggtgcacctgtccaataggcgtagctatccggacagagcacgtttgcagaagggggtctcttcttccaggtagctgaaaggggaagacctgacgtactctggttaggttaggacttgccctcgtggtggaaacttttcttaaaaagttataaccaacttttctattaaaagtgggaattaggagagaaggtaggggttgggaatcagagagaatggctttggtctcttgcttgtgggactagcctggcttgggactaaatgccctgctctgaacacgaagcttagtataaactgatggatatccctaccttgaaagaagaaaaggttcttactgcttggtccttgatttatcacacaaagcagaatagtatttttatatttaaatgtaaagacaaaaaactatatgtatggttttgtggattatgtgtgttttgctaaaggaaaaaaccatccaggtcacggggcaccaaatttgagacaaatagtcggattagaaataaagcatctcattttgagtagagagcaagggaagtggttcttagatggtgatctgggattaggccctcaagacccttttgggtttctgccctgcccaccctctggagaaggtgggcactggattagttaacagacaacacgttactagcagtcacttgatctccgtggctttggtttaaaagacacacttgtccacataggtttagagataagagttggctggtcaacttgagcatgttactgacagagggggtattggggttattttctggtaggaatagcatgtcactaaagcaggccttttgatattaaattttttaaaaagcaaaattatagaagtttagattttaatcaaatttgtagggtttctaggtaatttttacagaattgcttgtttgcttcaactgtctcctacctctgctcttggaggagatggggacagggctggagtcaaaacacttgtaattttgtatcttgatgtctttgttaagactgctgaagaattattttttttcttttataataaggaataaaccccacctttattccttcatttcatctaccattttctggttcttgtgttggctgtggcaggccagctgtggttttcttttgccatgacaacttctaattgccatgtacagtatgttcaaagtcaaataactcctcattgtaaacaaactgtgtaactgcccaaagcagcacttataaatcagcctaacat

SEQ ID NO: 524 - DNA, 4565 bp, Homo sapiens
gcggggaggggcggggctatggagaggaggaggaagatggcgggcgggctgctctgaagagacctcggcggcggcggaggaggagagaagcgcagcgccgcgccgcgccggggcccatgtggggaggagtcggagtcgctgttgccgccgccgcctgtagctgctggacccgagtgggagtgagggggaaacggcaggatgaagttcgccgagcacctctccgcgcacatcactcccgagtggaggaagcaatacatccagtatgaggctttcaaggatatgctgtattcagctcaggaccaggcaccttctgtggaagttacagatgaggacacagtaaagaggtattttgccaagtttgaagagaagtttttccaaacctgtgaaaaagaacttgccaaaatcaacacattttattcagagaagctcgcagaggctcagcgcaggtttgctacacttcagaatgagcttcagtcatcactggatgcacagaaagaaagcactggtgttactacgctgcgacaacgcagaaagccagtcttccacttgtcccatgaggaacgtgtccaacatagaaatattaaagaccttaaactggccttcagtgagttctacctcagtctaatcctgctgcagaactatcagaatctgaattttacagggtttcgaaaaatcctgaaaaagcatgacaagatcctggaaacatctcgtggagcagattggcgagtggctcacgtagaggtggccccattttatacatgcaagaaaatcaaccagcttatctctgaaactgaggctgtagtgaccaatgaacttgaagatggtgacagacaaaaggctatgaagcgtttacgtgtcccccctttgggagctgctcagcctgcaccagcatggactacttttagagttggcctattttgtggaatattcattgtactgaatattacccttgtgcttgccgctgtatttaaacttgaaacagatagaagtatatggcccttgataagaatctatcggggtggctttcttctgattgaattcctttttctactgggcatcaacacgtatggttggagacaggctggagtaaaccatgtactcatctttgaacttaatccgagaagcaatttgtctcatcaacatctctttgagattgctggattcctcgggatattgtggtgcctgagccttctggcatgcttctttgctccaattagtgtcatccccacatatgtgtatccacttgccctttatggatttatggttttcttccttatcaaccccaccaaaactttctactataaatcccggttttggctgcttaaactgctgtttcgagtatttacagcccccttccataaggtaggctttgctgatttctggctggcggatcagctgaacagcctgtcagtgatactgatggacctggaatatatgatctgcttctacagtttggagctcaaatgggatgaaagtaagggcctgttgccaaataattcagaagaatcaggaatttgccacaaatatacatatggtgtgcgggccattgttcagtgcattcctgcttggcttcgcttcatccagtgcctgcgccgatatcgagacacaaaaagggcctttcctcatttagttaatgctggcaaatactccacaactttcttcatggtgacgtttgcagccctttacagcactcacaaagaacgaggtcactcggacactatggtgttcttttacctgtggattgtcttttatatcatcagttcctgctataccctcatctgggatctcaagatggactggggtctcttcgataagaatgctggagagaacactttcctccgggaagagattgtatacccccaaaaagcctactactactgtgccataatagaggatgtgattctgcgctttgcttggactatccaaatctcgattacctctacaactttgttgcctcattctggggacatcattgctactgtctttgccccacttgaggttttccggcgatttgtgtggaacttcttccgcctggagaatgaacatctgaataactgtggtgaattccgtgctgtgcgggacatctctgtggcccccctgaacgcagatgatcagactctcctagaacagatgatggaccaggatgatggggtacgaaaccgccagaagaatcggtcatggaagtacaaccagagcatatccctgcgccggcctcgcctcgcttctcaatccaaggctcgtgacactaaggtattgatagaagacacagatgatgaagctaacacttgaattttctgaagtctagcttaacatctttggttttcctactctacaatcctttcctcgaccaacgcaacctctagtacctttccagccgaaaacaggagaaaacacataacacattttccgagctcttccggatcggatcctatggactccaaacaagctcactgtgtttcttttcttttcttctggtttaattttaattttctattttcaaaacaaatatttacttcatttgccaatcagaggatgttttaagaaacaaaacatagtatcttatggattgtttacaatcacaaggacatagatacctatcaggatgaagaacaggcattgcaaggaccctctgatgggacggtactgagatatctcggcttccgctcagcccggttttgactggttgaaaccggacattggtttttaaattttttgtcagtttatgtggagaatttttttctttccttcatacccagcgcaaaggcactggccgcacttgcaggaaaagtgcaacttaaagcagtaccttcattcatgaagctactttttaatttgatgtaacttttcttattttgggaagggttgctgggtgggtgggaaatatgatgtatttgttacacatagttttctcattatttatgaaacttaaccatacagaatgatataactcctgtgcaatgaaggtgataacagtaaaagaaggcaggggaaacttacgttggatgacatttatgagggtcagtcccacatacctctttcaggagacaacttgcaccagtttgaccttttcttttctttgtttttattttaagccaaagtttcattgctaacttcttaagttgctgctgctttagagtcctgagcatatctctcataacaaggaatcccacacttcacaccaccggctgaatttcatggaagaggttctgataatttttttaactttttaaggaacagatgtggaatacactggcccatatttcaaccttaacagctgaagctatgccttattatgcatccacatgtatggtccctgtagcgtgacctttactagctctgaatcagaagacagagctatttcagaggctctgtgtgccctcactagatagtttttcttctgggttcaaccactttagccagaatttgatcaaattaaaagtctgtcatggggaaactatatttttgagcacatggaacaaattatacttcctcattcatattatgttgatacaaaagaccttggcagccatttctcccagcagttttaaaggatgaacattggatttcatgccatcccatagaaaacctgttttaaaattttagggatctttacttggtcatacatgaaaagtacactgcttagaaattatagactattatgatctgtccacagtgcccattgtcacttctttgtctcatttcttccctttgttccttagtcatccaaataagcctgaaaaccataagagatattactttattgaatatggttggcattaaatttagcatttcattatctaacaaaattaatataaattccaggacatggtaaaatgtgttttaataacccccagacccaaatgaaaatttcaaagtcaataccagcagattcatgaaagtaaatttagtcctataattttcagcttaattataaacaaaggaacaaataagtggaagggcagctattaccattcgcttagtcaaaacattcggttactgccctttaatacactcctatcatcagcacttccaccatgtattacaagtcttgacccatccctgtcgtaactccagtaaaagttactgttactagaaaatttttatcaattaactgacaaatagtttctttttaaagtagtttcttccatctttattctgactagcttccaaaatgtgttccctttttgaatcgaggtttttttgttttgttttgttttctgaaaaaatcatacaactttgtgcttctattgcttttttgtgttttgttaagcatgtcccttggcccaaatggaagaggaaatgtttaattaatgctttttagtttaaataaattgaatcatttataataatcagtgttaacaatttagtgacccttggtaggttaaaggttgcattatttatacttgagatttttttcccctaactattctgttttttgtactttaaaactatgggggaaatatcactggtctgtcaagaaacagcagtaattattactgagttaaattgaaaagtccagtggaccaggcatttcttatataaataaaattggtggtactaatgtg

SEQ ID NO: 525 - DNA, 2284 bp, Homo sapiens
aataaattatttttgttaaggcaagcattggtgtgttctttaacttgctacttggagacctagtgtccagtctggacagaatgcacagagaccagcctcacctggaatgcagccagactcgatgtccctcagcacacacagctcctggccacagactgcccatagaactgtctgcacccaaaccccatggccttttcatgcacggagacaggcctctggatgtgcagccttgccaccccctgccccaatcctccctgagagctcctgcctcagtgccctgggctggtgagggagaagcctgtctgcacctgcctaattccagctcctccaggaagcaagggcttgtttgtcagagctgcagggttggccactcggtggggaggagtcagccaggattagagagcctgcccctaatccggcctgctgggttttacaaggatcagagctgctgataatgaacctcattaagggggagcaggagcctcaatccgatttggttttctctttgacatcttcactctgctcagatggcctgggtgctatgtggagcaggtgggatgccaaggccactcctgctatggggcagctggggctggggagggatggcagtctccctgcatgtttccctcgacctctttagctgcagcgccttgctgggctcctgggttggactccctctctgtgcccctgctccaggcacccattggctccatcctcctggttgtgctctgcaccccctgctcccttgggctggccctggctgggggcctgagagacagacaggaacccacaatcaggaggcaaccctggcctgcaagaggaagacagaggctcccagggccggtgccctgtgtgcccactgcaccaaggccgctgaataagcctgcccttcaccccctaagggctccttgcccaatgccaagtgctggggatttctgtcagcaagccctgtggctccagtgacggtatttctaaagccaaacttagttacctagaattagcgccatgttggaaacactgtcgcagcagcccgggctgcacagtgtgtagcccagcctccaggtccacggagtggtgtggacctcccacctcacagctgcctctggcagccaagcctcttttcgcccggccccagcccctctggttgataaacgggtgggcctcctcagcagcgtggctgcctttcaccttgatttccccagggctctcggcaacatcgataaaccagcctcgcccaccagctgggccctcccccacccagtctgccaggctgggagctggagcttgctgagtcttgaatgcccttctagatggcttctctagaggctctcctggcaagagagggtcccaaggggagccctgcaaagcaaaggctccttgtctggggcgggatagagaatctcgcctctgtctggtgtgttacctactgggggcacaggaacaatttcctcaaggagacagtggcatggagctttgaaagacgagtaggtgttagcaaggaaataaggaggaacgggggttacgggcagaggagaaagcacatgccaagtcagcaaagaaaagtagaattcgaaaactttttaaaaatattactaaggattttcacaatgctgcactgggctagaaactgaagctaaaacagatacgtggtccctgctgctatggggcttccgttctagaggcaaggacaggttgtgatgagggttctgaaggatagagaccaagcagggagggtgttgaggaggcttctgcgagacctgaaggatgggaagccaggaagtgggaggggtgggggtccaggctggaggggcccaatgtaggtgtagagggactacagccctgaggggctgctccatgcggcattcttggaggtccaagaggggcagcgccaccttgggccaggctcctctccagcagccttggtatggggtgggggtgggaagacccctgatgcagcctgtcctctgggtgtgggggtggaggagagggctccaggggacccagccagccttgaccctggaggaaagtcaggtgggctcagagagagccctcaaatctgggccctgggtcagggtggggtcaagtccagccttgaagagaatggactctggaatctgacgtctgggtttgaatccagcttccaacactcactggctgtgtgactttgggcaagataacttatccccttgtccccatgtgtcattggagataaactacccacctaccagattgttgtaccatgctgggcaaacactaagtgcttaataatggtagcccactgctc

SEQ ID NO: 526 - protein, 123 aa, Homo sapiens
MHRDQPHLECSQTRCPSAHTAPGHRLPIELSAPKPHGLFMHGDRPLDVQPCHPLPQSSLRAPASVPWAGEGEACLHLPNSSSSRKQGLVCQSCRVGHSVGRSQPGLESLPLIRPAGFYKDQSC

SEQ ID NO: 527 - DNA, 2016 bp, Homo sapiens
agccggatggtcccgcagctcggggccggccatgcttcgcggtccgtggcgccagctttggctctttctcctgctgctgctcccgggcgcgcctgagccccgcggcgcctccaggccgtgggagggaaccgacgagccgggctcggcctgggcctggccgggcttccagcgcctgcaggagcagctcagggcggcgggtgccctctccaagcggtactggacgctcttcagctgccaggtgtggcccgacgactgtgacgaggacgaggaggcagccacggggcccctgggctggcgccttcctctgttgggccagcggtacctggacctcctgaccacgtggtactgcagcttcaaagactgctgccctagaggggattgcagaatctccaacaactttacaggcttagagtgggacctgaatgtgcggctgcatggccagcatttggtccagcagctggtcctaagaacagtgaggggctacttagagacgccccagccagaaaaggcccttgctctgtcgttccacggctggtctggcacaggcaagaacttcgtggcacggatgctggtggagaacctgtatcgggacgggctgatgagtgactgtgtcaggatgttcatcgccacgttccactttcctcaccccaaatatgtggacctgtacaaggagcagctgatgagccagatccgggagacgcagcagctctgccaccagaccctgttcatcttcgatgaagcggagaagctgcacccagggctgctggaggtccttgggccacacttagaacgccgggcccctgagggccacagggctgagtctccatggactatctttctgtttctcagtaatctcaggggcgatataatcaatgaggtggtcctaaagttgctcaaggctggatggtcccgggaagaaattacgatggaacacctggagccccacctccaggcggagattgtggagaccatagacaatggctttggccacagccgtcttgtgaaggaaaacctgattgactacttcatccccttcctgcctttggagtaccgtcacgtgaggctgtgtgcacgggatgccttcctgagccaggagctcctgtataaagaagagacactggatgaaatagcccagatgatggtgtatgtccccaaggaggaacaactcttttcttcccagggctgcaagtctatttcccagaggattaactacttcctgtcatgaaggctagaggaagacttcctggaactgcctttcttccactaacaggaccctgggacctgtaggagcaccccgtttgggactgtgaggtgtttgagggtgtggactggcatccagcagccactaacaaacacacaactggtgtgtaaaaggcaggccttacattagaagccaagccaatcctttttcttttttttggaggtcccaccgagatagataggaacttggattgctgaattcaaaaacagagcccattcttaagatcacttggtgccttaaagacacgcattccaaagtggaatgtggttgaagaaagtgggccaggtggttgaagaaagccatgtgggagctcagcaaatcccaagggcttattatgacactccagatggtctccttagcatctcagctcttctgcaaggaagagcttgggtgttaggcctcagaggctgtagggtccttgggttacagagccggggagaacgaagttctgtgacccaggggtggagaatacactctaggtttgcgggctggtgggctttcaaattggtacttccagaggaaagccaagctgcttctgttgtgagcgaatcagccaagagcctgaggctgaagggaaaagtacacagaggaagatattttacaaaccaggtcagtgtaggccaagacttatggtctacagattttggcgggggaggggggaccttttcaaagacaatagggggtcttgacatgtttgttgtatgtaaagatgataagattaaaatttttgatttttctaaaaaaaaaaaaaaaaa

SEQ ID NO: 528 - protein, 397 aa, Homo sapiens
MLRGPWRQLWLFLLLLLPGAPEPRGASRPWEGTDEPGSAWAWPGFQRLQEQLRAAGALSKRYWTLFSCQVWPDDCDEDEEAATGPLGWRLPLLGQRYLDLLTTWYCSFKDCCPRGDCRISNNFTGLEWDLNVRLHGQHLVQQLVLRTVRGYLETPQPEKALALSFHGWSGTGKNFVARMLVENLYRDGLMSDCVRMFIATFHFPHPKYVDLYKEQLMSQIRETQQLCHQTLFIFDEAEKLHPGLLEVLGPHLERRAPEGHRAESPWTIFLFLSNLRGDIINEVVLKLLKAGWSREEITMEHLEPHLQAEIVETIDNGFGHSRLVKENLIDYFIPFLPLEYRHVRLCARDAFLSQELLYKEETLDEIAQMMVYVPKEEQLFSSQGCKSISQRINYFLS

SEQ ID NO: 529 - DNA, 2066 bp, Homo sapiens
atttctccatgtggcagacagagcaaagccacaacgctttctctgctggattaaagacggcccacagaccagaacttccactatactacttaaaattacataggtggcttgtcaaattcaattgattagtattgtaaaaggaaaaagaagttccttcttacagcttggattcaacggtccaaaacaaaaatgcagctgccattaaagtcacagatgaacaaacttctacactgatttttaaaatcaagaataagggcagcaagtttctggattcactgaatcaacagacacaaaaagctggcaatatagcaactatgaagagaaaagctactaataaaattaacccaacgcatagaagacttttttttctcttctaaaaacaactaagtaaagacttaaatttaaacacatcattttacaacctcatttcaaaatgaagacttttacctggaccctaggtgtgctattcttcctactagtggacactggacattgcagaggtggacaattcaaaattaaaaaaataaaccagagaagataccctcgtgccacagatggtaaagaggaagcaaagaaatgtgcatacacattcctggtacctgaacaaagaataacagggccaatctgtgtcaacaccaaggggcaagatgcaagtaccattaaagacatgatcaccaggatggaccttgaaaacctgaaggatgtgctctccaggcagaagcgggagatagatgttctgcaactggtggtggatgtagatggaaacattgtgaatgaggtaaagctgctgagaaaggaaagccgtaacatgaactctcgtgttactcaactctatatgcaattattacatgagattatccgtaagagggataattcacttgaactttcccaactggaaaacaaaatcctcaatgtcaccacagaaatgttgaagatggcaacaagatacagggaactagaggtgaaatacgcttccttgactgatcttgtcaataaccaatctgtgatgatcactttgttggaagaacagtgcttgaggatattttcccgacaagacacccatgtgtctcccccacttgtccaggtggtgccacaacatattcctaacagccaacagtatactcctggtctgctgggaggtaacgagattcagagggatccaggttatcccagagatttaatgccaccacctgatctggcaacttctcccaccaaaagccctttcaagataccaccggtaactttcatcaatgaaggaccattcaaagactgtcagcaagcaaaagaagctgggcattcggtcagtgggatttatatgattaaacctgaaaacagcaatggaccaatgcagttatggtgtgaaaacagtttggaccctgggggttggactgttattcagaaaagaacagacggctctgtcaacttcttcagaaattgggaaaattataagaaagggtttggaaacattgacggagaatactggcttggactggaaaatatctatatgcttagcaatcaagataattacaagttattgattgaattagaagactggagtgataaaaaagtctatgcagaatacagcagctttcgtctggaacctgaaagtgaattctatagactgcgcctgggaacttaccagggaaatgcaggggattctatgatgtggcataatggtaaacaattcaccacactggacagagataaagatatgtatgcaggaaactgcgcccactttcataaaggaggctggtggtacaatgcctgtgcacattctaacctaaatggagtatggtacagaggaggccattacagaagcaagcaccaagatggaattttctgggccgaatacagaggcgggtcatactccttaagagcagttcagatgatgatcaagcctattgactgaagagagacactcgccaatttaaatgacacagaactttgtacttttcagctcttaaaaatgtaaatgttacatgtatattacttggcacaatttatttctacacataaagtttttaaaatgaattttaccgtaactataaaagggaacctataaatgt

SEQ ID NO: 530 - protein, 491 aa, Homo sapiens
MKTFTWTLGVLFFLLVDTGHCRGGQFKIKKINQRRYPRATDGKEEAKKCAYTFLVPEQRITGPICVNTKGQDASTIKDMITRMDLENLKDVLSRQKREIDVLQLVVDVDGNIVNEVKLLRKESRNMNSRVTQLYMQLLHEIIRKRDNSLELSQLENKILNVTTEMLKMATRYRELEVKYASLTDLVNNQSVMITLLEEQCLRIFSRQDTHVSPPLVQVVPQHIPNSQQYTPGLLGGNEIQRDPGYPRDLMPPPDLATSPTKSPFKIPPVTFINEGPFKDCQQAKEAGHSVSGIYMIKPENSNGPMQLWCENSLDPGGWTVIQKRTDGSVNFFRNWENYKKGFGNIDGEYWLGLENIYMLSNQDNYKLLIELEDWSDKKVYAEYSSFRLEPESEFYRLRLGTYQGNAGDSMMWHNGKQFTTLDRDKDMYAGNCAHFHKGGWWYNACAHSNLNGVWYRGGHYRSKHQDGIFWAEYRGGSYSLRAVQMMIKPID

SEQ ID NO: 531 - DNA, 348 bp, Homo sapiens
atggggctgctcactggcactggaggccgaaagaaggtgagggcaagtgagatgcagggacctcttctcacagctgtgctgacaagcacaaaaaggagccccccacgtccacaccaggaaaggggggatggtgcacaagatccagaggcgtcaacagacacgtccagcgaacaagcacagggtgggccgtccgggagccttgtgccgccaggaggaaagccgcaccgagggcagcagggaggctctgatggctgccaagagggtctgatccagaaatatggcctcaatatgtgcccccagtgtttccgtcagtacgcgaaggatatcggtttcattaaattggactaa

SEQ ID NO: 532 - DNA, 2361 bp, Homo sapiens
taggtttcatttggaagcttgagttttatcattggcaacaaatgccatcagttttttccaagctgacttgttcttttttgagcaaatctctgccaaaattacccctaaaatatgaataatcaatttgtcaggttttttcaaactaaaaatgttctgtgaaaacaagcagctagttcagcttgtatctcaaacaattgtaactactttttctagggaaaaaaaaatctagacatccatactttatggcagatgtgcttcatgcatacttcccattttgtcacacagaatatcaaaataacgtgtactcaaggtcaagatttactaacaactaaaattccaaaactgctaaacaacagaatgctgaataaggtgatccaatttttaatattttatttgagacaacatctcaccctgtcacccaggctggaatccagtggtgtgacacagctcactgcatcctcaacctcctgggctcaagcgatcgtcccacctcagtctcatgagtggttgggactacaggcatgcaccatcatgcccggctcactttttttttctttttttttttaattgtagacacagggtctcactatgttgcccaggccggtcttgaactcctggactcaagcaatccccccaccttggtttcccaaagtgttgggattacaggcatgagctactacatacaactgaaatcttttaatatgcttgtcaaaaagttttctgattcagcaaatggcacttatatataaaagagagaacaagaagctggatgcggtggctcacgcctgtaatcccagcactttgggaggctaggtgggcagatcacgaggtcaggagttcgagaccagcctggccaacgtggtgaaaccccctctctactaaaaatacaaaaatagccaggcatggtggcccacgcctgtaatcccagctacttggaaggctgaggcaggagaatcgcttgaacctgggaggtggaggttgcagtgagccaagattgcgccgctacattccagcctgggcaacacgagcgaaactccgtctcaaaaaaaaaaaaaaaaagaatagaacttggctggatgcagtggctcacacctgtaatcccagcactttgggagggcagggcagttggatcacttgaggccaggagttcaagactagcctggctgacatggtgaaactccatctctactaaaaatacagaaaaaaaaattagctgggagtggtggcacacacctgtcatcccagctactcaggtagttgaggcacaacaatcacttgagcctaggaggcccaggctggagtgaggtggcacgatcttggttcactgcaacctccacctccagggttcagagtagctgggactacaggcccacactaccacacccggctaattttcgctttttttcagtagagaccgggttttgccatgttggccaggctggtctcgaagcctgagccataacctggcgaaaagatactttgaaatgtaacatcgtttttcacttcaaaatcaaggtattttaccaacttgtctttggtacctccccaaaaactgatctactacatttgcagtttcattcatttttccaacattaaggaataaacttgaagcgcttacattcttgtgggggaagtaagaacaaaacacataataggtcatggtggtcacatgaaaagtaaagggtaaccgattggggtaggtggtggtagttttgtgtgtgtgtttttttttgagaccaagtctcgccgttgcccaggctggagtgcggtggcatgatctcagttcactgcaacctccacttcctaggttcaagcaattctcctgcctcagctactcaagaggctgaggcaggagaattccttgaacctgggaggcagaggttgcagtgaactgatagtgccgctgcactccattctgggcaagagctagactcttgtctaaaaaaaaaaaaaaaatacttggaactgctatacctttgcttctttaaaacttgctccacacagtgtagtcaagccgactctccatacctgtagaaatttaatctcctttaccaataggtagtaataggtggatttctaaaagatttcccaactactgtttcagtttaagattaatctccattttctttctcagagagattcccatctgctttaattttaaaatcatcactaacagtagctcaatcaattaacgttaacatcaataaaacatgtacctttaaaaggtatgacaggaactgtcttcatgtccttacccaagcaagtcatccatggataaaaacgttaccaggagctggaatacaaatgaggacttccattaaaatgctaaacatcattaaactcttttcaaagttgtctgtc

SEQ ID NO: 533 - protein, 105 aa, Homo sapiens
MCFMHTSHFVTQNIKITCTQGQDLLTTKIPKLLNNRMLNKVIQFLIFYLRQHLTLSPRLESSGVTQLTASSTSWAQAIVPPQSHEWLGLQACTIMPGSLFFSFFF

SEQ ID NO: 534 - DNA, 528 bp, Homo sapiens
atctgtagatgggagtgattagctgtttaaaagttaaaatgtgactgagaaggaaattgagtagggcaaattttaaatgggtattatttttcatcttcaaacaggcagacctgttatcctaaactaggtgagtcagcttttggtacatgtgatgattttcagtgtaaccaatgatgtaatgattctgccaaatgaaatataatgatatcactgtaaaaccgttccattttgattctgaggttactctactaacaagcatcacacatttgtattttgccctgattaatatgttggcttcgctttcagggtttttaatgaccacaacaagcaagcatgcagcttactgcttgaaagggtcttgcctcacccaagctagagtgcagtggcctttgaagcttactacagcctcaaacttctgggctcaagtgatcctcagcctcccagtggtctttgtagactgcctgatggagtctcatggcacaagaagattaaaacagtgtctccaattttaataaatttttgcaatcc

SEQ ID NO: 535 - DNA, 2229 bp, Homo sapiens
agttaaaacagctgagcttctgaatgcctgcaagaagctgccctttgaaattaagaacttcgtgaagaaaacagaggctcttcggttgcagtatcgctacttagacttgcgtagtttccaaatgcagtataacctgcgactgaggtcccagatggtcatgaaaatgcgggaatatctctgtaatctgcatgggtttgtggatatagaaacccccacattgtttaagaggaccccagggggtgccaaagagtttttagtaccatccagggaacctggaaagttttgttctctccctcagagtcctcaacagtttaagcaacttctgatggttggcggtttagacagatattttcaggttgcccgatgttatcgagatgaaggttcaagaccagacagacagcctgagtttactcagattgacatagagatgtcatttgtagaccagactgggatccagagtttaattgagggtttgctccagtattcctggcccaatgacaaagatcctgtggttgttccttttcctactatgacttttgctgaggtgctggccacctatggaactgataaacctgacactcgctttggaatgaagattatagatatcagtgatgtgtttagaaacacagagattggatttcttcaagatgcacttagtaagccccatggaactgtgaaagccatatgtatccctgaaggagcaaaatacttaaaaaggaaagacattgaatccattagaaactttgcagctgaccattttaatcaggaaatcttacctgtattccttaacgccaatagaaactggaattctccagttgctaatttcataatggagtcacaaagactggaattaatcagactaatggagacccaagaggaagatgtggtcctactaactgctggagagcacaataaagcatgctctttgttaggaaaattacgactggaatgtgctgaccttctagaaacaagaggagtggtgctccgtgaccccactctgttctctttcctttgggtggtagatttcccactcttcctgcccaaggaggaaagtcccagagagctggaatcggcccaccacccatttactgctccccaccccagtgacatacatctcctgtacactgagcccaaaaaggcccgtagccaacactatgacttggttttaaatggcaatgaaataggaggtggttcaattcgaattcacaatgcagagctgcagcgttatatcctggcaaccttactaaaggaggatgtgaaaatgctctcccatctgctccaggctttagattatggggcaccccctcatggaggaattgccttagggttagacagactgatatgccttgtcactggatctccaagcatcagagatgtcatagccttcccaaagtccttccggggacatgacctcatgagcaataccccagattctgtccctcctgaggaactgaagccctatcatatccgagtctccaagccaacagactccaaagcagaaagagctcattgaatcatgcataccatgcagaaagttgagcttttaggttttgtcctctttgcttccccaaggctaaagtcagatctagagttctgccacaggtctaacaatcaagtctttagatggaaggaatccaggcaacattcttcaccacaacgaagaaacagataaaagatacccaattttgacttgatttcatgcatcatttggattttttttggttaggactttttttgaagttcctttttacttaggtgtgaaagatggttctttgttgaaataatatagtggtttagtgttttcaaatcatgtttctcatacccagatagtagattattcacttaggacagaggtaatcaaattatgtgtgaaatgtaggaaaatgcttgcccctgtaaactagtgagttgatggagcatttgcttcatcatcctcatcaagagaatcatataaattaagctttataatgacatttcaaccatcaacataatatagtgaggagtagcataatattttttaataatgcagaaaacatcactgaaatgagagtcacaaatttttcttcagtgtttcagcctgagtaagttacataaacctcgcttagcctcccttcctgctaatgtgtaaaatacatacttgccctggctacctcaccgggctgttattgctggaatcagaggagataacatatatggaagataaagtgaataaaagtactttgaaaaact

SEQ ID NO: 536 - protein, 463 aa, Homo sapiens
MQYNLRLRSQMVMKMREYLCNLHGFVDIETPTLFKRTPGGAKEFLVPSREPGKFCSLPQSPQQFKQLLMVGGLDRYFQVARCYRDEGSRPDRQPEFTQIDIEMSFVDQTGIQSLIEGLLQYSWPNDKDPVVVPFPTMTFAEVLATYGTDKPDTRFGMKIIDISDVFRNTEIGFLQDALSKPHGTVKAICIPEGAKYLKRKDIESIRNFAADHFNQEILPVFLNANRNWNSPVANFIMESQRLELIRLMETQEEDVVLLTAGEHNKACSLLGKLRLECADLLETRGVVLRDPTLFSFLWVVDFPLFLPKEESPRELESAHHPFTAPHPSDIHLLYTEPKKARSQHYDLVLNGNEIGGGSIRIHNAELQRYILATLLKEDVKMLSHLLQALDYGAPPHGGIALGLDRLICLVTGSPSIRDVIAFPKSFRGHDLMSNTPDSVPPEELKPYHIRVSKPTDSKAERAH

SEQ ID NO: 537 - DNA, 1396 bp, Homo sapiens
gcctgtctgcattctactatataaagcagcagagacgttgactagcgcatatttgctaagagcaccatgcgcgcagcagccatctccactccaaagttagacaaaatgccaggaatgttcttctctgctaacccaaaggaattgaaaggaaccactcattcacttctagacgacaaaatgcaaaaaaggaggccaaagacttttggaatggatatgaaagcatacctgagatctatgatcccacatctggaatctggaatgaaatcttccaagtccaaggatgtactttctgctgctgaagtaatgcaatggtctcaatctctggaaaaacttcttgccaaccaaactggtcaaaatgtctttggaagtttcctaaagtctgaattcagtgaggagaatattgagttctggctggcttgtgaagactataagaaaacagagtctgatcttttgccctgtaaagcagaagagatatataaagcatttgtgcattcagatgctgctaaacaaatcaatattgacttccgcactcgagaatctacagccaagaagattaaagcaccaacccccacgtgttttgatgaagcacaaaaagtcatatatactcttatggaaaaggactcttatcccaggttcctcaaatcagatatttacttaaatcttctaaatgacctgcaggctaatagcctaaagtgactggtccctggctgaagggaattaacagatagtatcaagcgcagaaggaatgtgccagtatggctccctgggtgaacagcttggccttttttgggtgtcttgacaggccaagaagaacaaatgactcagaatggattaacatgaaagttatccaggcgcagagttgaagaagcataagcaagacaaaaacagagagaccgcagaaggaggaagatactgtggtactgtcataaaaaacagtggagctctgtattagaaagcccctcagaactgggaaggccaggtaactctagttacacagaaactgtgactaaagtctatgaaactgattacaacagactgtaagaatcaaagtcaactgacatctatgctacatattattatatagtttgtactgagctattgaagtcccattaacttaaagtatatgttttcaaattgccattgctactattgcttgtcggtgttattttattttattgtttttgactttggaagagatgaactgtgtatttaacttaagctattgctcttaaaaccagggagtcagaatatatttgtaagttaaatcattggtgctaataataaatgtggattttgtattaaaatatatagaagcaatttctgtttacatgtccttgctacttttaaaaacttgcatttattcctcagattttaaaaataaataaataattcattt

SEQ ID NO: 538 - DNA, 471 bp, Homo sapiens
cttttcgatccgccatctgcagtggagccgccaccaaaatgcagattttcgtgaaaacccttatggggaagaccatcaccctcgaggttgaactctcggatacaatagataatgtaaaggccaagatccaggataaggaaggaattcctcctgatcagcagagactgatctttgctggcaagcagttggaagatggacgtactttgtctgactacaatattcaaaaggagtctactcttcatcttgtgttgagacttcgtggtggtgctaagaaaaggaagaagaagtcttacaccactcccaggaagaataagcacaagagaaagaaggttaagctggctctcctgaaatattataaggtggatgagaatggctttatggcaagccactttgacagacattattgtggcaaatgttgtctgacttactgtttcaacaaaccagaagacaagtaactgtatgacttaataa

SEQ ID NO: 539 - protein, 138 aa, Homo sapiens
MQIFVKTLMGKTITLEVELSDTIDNVKAKIQDKEGIPPDQQRLIFAGKQLEDGRTLSDYNIQKESTLHLVLRLRGGAKKRKKKSYTTPRKNKHKRKKVKLALLKYYKVDENGFMASHFDRHYCGKCCLTYCFNKPEDK

SEQ ID NO: 540 - DNA, 1345 bp, Homo sapiens
aaaacagccggggctccagcgggagaacgataatgcaaagtgctatgttcttggctgttcaacacgactgcagacccatggacaagagcgcaggcagtggccacaagagcgaggagaagcgagaaaagatgaaacggacccttttaaaagattggaagacccgtttgagctacttcttacaaaattcctctactcctgggaagcccaaaaccggcaaaaaaagcaaacagcaagctttcatcaagccttctcctgaggaagcacagctgtggtcagaagcatttgacgagctgctagccagcaaatatggtcttgctgcattcagggcttttttaaagtcggaattctgtgaagaaaatattgaattctggctggcctgtgaagacttcaaaaaaaccaaatcaccccaaaagctgtcctcaaaagcaaggaaaatatatactgacttcatagaaaaggaagctccaaaagagataaacatagattttcaaaccaaaactctgattgcccagaatatacaagaagctacaagtggctgctttacaactgcccagaaaagggtatacagcttgatggagaacaactcttatcctcgtttcttggagtcagaattctaccaggacttgtgtaaaaagccacaaatcaccacagagcctcatgctacatgaaatgtaaaagggagcccagaaatggaggacatttcattctttttcctgaggggaaggactgtgacctgccataaagactgaccttgaattcagcctgggtgttcaggaaacatcactcagaactattgattcaaagttgggtagtgaatcaggaagccagtaactgactaggagaagctggtatcagaacagcttccctcactgtgtacagaacgcaagaagggaataggtggtctgaacgtggtgtctcactctgaaaagcaggaatgtaagatgatgaaagagacaatgtaatactgttggtccaaaagcatttaaaatcaatagatctgggattatgtggccttaggtagctggttgtacatctttccctaaatcgatccatgttaccacatagtagttttagtttaggattcagtaacagtgaagtgtttactatgtgcaagggtattgaagttcttatgaccacagatcatcagtactgttgtctcatgtaatgctaaaactgaaatggtccgtgtttgcattgttaaaaatgatgtgtgaaatagaatgagtgctatggtgttgaaaactgcagtgtccgttatgagtgccaaaaatctgtcttgaaggcagctacactttgaagtggtctttgaatacttttaataaatttattttgataaataatattg

SEQ ID NO: 541 - protein, 211 aa, Homo sapiens
MQSAMFLAVQHDCRPMDKSAGSGHKSEEKREKMKRTLLKDWKTRLSYFLQNSSTPGKPKTGKKSKQQAFIKPSPEEAQLWSEAFDELLASKYGLAAFRAFLKSEFCEENIEFWLACEDFKKTKSPQKLSSKARKIYTDFIEKEAPKEINIDFQTKTLIAQNIQEATSGCFTTAQKRVYSLMENNSYPRFLESEFYQDLCKKPQITTEPHAT

SEQ ID NO: 542 - DNA, 664 bp, Homo sapiens
tgaagatgaaaaagaagatcataaaaatgtgcgccaacaacggcaggcggcatctaaagcagcttctaaacagagagagatgctcatggaagatgtgggcagtgaggaagaacaagaagaggaggatgaggcaccattccaggagaaagattccggcagcgatgaagatttcctaatggaagatgatgacgatagtgactatggcagttcgaaaaagaaaaacaaaaagatggttaagaagtccaaacctgaaagaaaagaaaagaaaatgcccaaacccagactaaaggctacagtgacgccaagtccagtgaaaggcaaagggaaagtgggtcgccccacagcttcaaaggcatcaaaggaaaagactccttctcccaaagaagaagatgaggaaccggaaagcccgccagaaaagaaaacatctacaagccccccacccgagaaatctggggatgaagggtctgaagatgaagccccttctggggaggattaaaagtgatgatggtctggggagagattttattaaaaaaaaaaagaaaaaagagggaggaaaaaaaagaacctacttaagatagaacatggttttggctatggcttgactcatgggctttcagtgcttttttccatttgttgaaagtaacatttctctctctctctcttt

SEQ ID NO: 543 - DNA, 1164 bp, Homo sapiens
agcctgaggagctattttgagcaatggggaatgctcacggactgtgtggtaatgagagacccaaacaccaagtgctccaggggctttgggtttgtcacatatgccattgtggaggaggtggatgcagccatgaatgcaaggccacacaaggtggatggaagagttggagaaccaaagagagctgtttcaagggaagattctcaaagaccaggtgctcacttaactgtgaaaaagatatttgttggcagcattaaagaagacactgaagaacatcacctaagagataatttgaacagtttggaaaaacggaagtgattgaaatcatgactgactgaggcagtggcaagaaaaggggctttgcctttgtaacctttgatgaccatgactctgtgaataagactgccattcagaaataccatcctacgaatggccataactgtgaagttaggaaagccctgtcaaagtaagagatggctagtgcttcatccagccaaagaagtcgaagtggttctggaaactttggtttggtcgtggaggtggtttcggttggcatgacagccgtggtggtggtggtggatatggtggcagtgaggatggcgataatggatttggtaatgatggaagcaattttggaggtggtggaagctacagtgattttggcaactacaataatcagtcttcaaattttggacccatgaagggaggaaactttggaggcagaagctctgggcccctatggcggtggaggccaatactctgccaaaccacgaaaccaaggtggctatggtggtttcagtagcagcagtagctatggcagtggcagaagattttaattaggaaacaaagcttagctggagaggagagccggagaagtgacagggaagctacaggttacaacagatttgtgaactcagccaagcacagtggtggcagggcctaactgctacaaaggagacatgttttagacaaatactcatgtgtatgggcaaaaaactcgaggactgtatttgtgactaattgtgtaacaggttattttagtttctgttctgtggaaagcgtaaagcattccaacaaagggttttaatgcagatttttttttttttggcacccatgctgttgattgctaaatgtaatagtctgatggtgatgctgaataaatgtctt

SEQ ID NO: 544 - DNA, 2210 bp, Homo sapiens
aggcagagcccgcgaggaggtgacgcggctgcggaggtgacgcgggaggtcgcgcgccccttccggcgcggggagggcgctgaagatcggggccgctcggccgcaggccgcctccagcgccgcgggatgtagcgcgggggaccgcggcccccagcagagcccgcctgcccggcttttagaagaccaaactggacaatggactttgctcactatgatgacatgatctccattgacctccatttgtctaccatcagagggagatctctgccccctggggctgagagaccccaacctttccccaagctgaagctgcagggtattgaggtaccagccagatgtcttcccacaaaggatctgtggtggcacaggggaatggggctcctgccagtaacagggaagctgacacggtggaactggctgaactgggacccctgctagaagagaagggcaaacgggtaatcgccaacccacccaaagctgaagaagagcaaacatgcccagtgccccaggaagaagaggaggaggtgcgggtactgacacttcccctgcaagcccaccacgccatggagaagatggaagagtttgtgtacaaggtctgggagggacgttggagggtcatcccatatgatgtgctccctgactggctaaaggacaacgactatctgctacatggtcatagacctcccatgccctcctttcgggcttgcttcaagagcatcttccgcattcatacagaaactggcaacatctggacccatctgcttggtttcgtgctgtttctctttttgggaatcttgaccatgctcagaccaaatatgtacttcatggcccctctacaggagaaggtggtttttgggatgttctttttgggtgcagtgctctgcctcagcttctcctggctctttcacaccgtctattgtcattcagagaaagtctctcggactttttccaaactggactattcagggattgctcttctaattatggggagctttgtcccctggctctattattccttctactgctccccacagccacggctcatctacctctccatcgtctgtgtcctgggcatttctgccatcattgtggcgcagtgggaccggtttgccactcctaagcaccggcagacaagagcaggcgtgttcctgggacttggcttgagtggcgtcgtgcccaccatgcactttactatcgctgagggctttgtcaaggccaccacagtgggccagatgggctggttcttcctcatggctgtgatgtacatcactggagctggcctttatgctgctcgaattcctgagcgcttctttcctggaaaatttgacatatggttccagtctcatcagattttccatgtcctggtggtggcagcagcctttgtccacttctatggagtctccaaccttcaggaattccgttacggcctagaaggcggctgtactgatgacacccttctctgagccttcccacctgcggggtggaggaggaacttcccaagtgcttttaaaaataacttctttgctgaagtgagaggaagagtctgagttgtctgtttctagaagaaacctcttagagaattcagtaccaaccaagcttcagcccactttcacacccactgggcaataaactttccatttccattctcctagctggggatggggcatggtcaaacttagccatcccctcctcagcaaggcatctaccggcccctcacagagacagtactttgaaactcatgttgagattttaccctctcctccaaccattttgggaaaattatggactgggactcttcagaaattctgtcttttcttctggaagaaaatgtccctcccttacccccatccttaactttgtatcctggcttataacaggccatccatttttgtagcacacttttcaaaaacaattatataccctggtcccatctttctagggcctggatctgcttatagagcaggaagaataaagccaccaacttttacctagcccggctaatcatggaagtgtgtccaggcttcaagtaacttgagttttaattttttttttttcttggcagagtaatgtaaaatttaaatggggaaagatatttaatatttaatactaagctttaaaaagaaacctgctatcattgctatgtatcttgatgcaaagactatgatgttaataaaagaaagtacagaagacacttggcattcaaagatttc

SEQ ID NO: 545 - DNA, 1759 bp, Homo sapiens
ggccgcggagccgggcggagctggcttgcggctcccggggccggctctccggccggagacatggcccgggggcccggcccgctaggcaggcctcgccccgatacggtcgccatgcccaagagaggaaagcgactcaagttccgggcccacgacgcctgctccggccgagtgaccgtggcggattacgccaactcggatccggcggtcgtgaggtctggacgagtcaagaaagccgtagccaacgctgttcagcaggaagtaaaatctctttgtggcttggaagcctctcaggttcctgcagaggaagctctttctggggctggtgagccctgtgacatcatcgacagcagtgatgagatggatgcccaggaggaaagcatccatgagagaactgtctccagaaaaaagaaaagcaagagacacaaagaagaactggacggggctggaggagaagagtatcccatggatatttggctattgctggcctcctatatccgtcctgaggacattgtgaatttttccctgatttgtaagaatgcctggactgtcacttgcactgctgccttttggaccaggttgtaccgaaggcactacacgctggatgcttccctgcctttgcgtctgcgaccagagtcaatggagaagctgcgctgtctccgggcttgtgtgatccgatctctgtaccatatgtatgagccatttgctgctcgaatctccaagaatccagccattccagaaagcacccccagcacattaaagaattccaaatgcttacttttctggtgcagaaagattgttgggaacagacaggaaccaatgtgggaattcaacttcaagttcaaaaaacagtcccctaggttaaagagcaagtgtacaggaggattgcagcctcccgttcagtacgaagatgttcataccaatccagaccaggactgctgcctactgcaggtcaccaccctcaatttcatctttattccgattgtcatgggaatgatatttactctgtttactatcaatgtgagcacggacatgcggcatcatcgagtgagactggtgttccaagattcccctgtccatggtggtcggaaactgcgcagtgaacagggtgtgcaagtcatcctggacccagtgcacagcgttcggctctttgactggtggcatcctcagtacccattctccctgagagcgtagttactgcttcccatcccttgggggcagcctcgagtgtagtccattagtaatcagattccagtttggacagggtggctggattgtatatctcgttagtaatgtacatgctcttcaggttctagggctcctgttaggggagggagaaatgttgaatcaagagggaaaacaactactatgatttataaacatattttaatgtaaaaatttgcatttaaaaggagtggccctgttttctgtgttaaaaccccatttggtgctattgagtttgttctttattcttttatcccagtgaaaattgttgatcttgctgtagggaaaaattaaactctttgaatctccaaacaaggaagtttcagcattcccttatggatcagaggaaccttagaggcctgaaattgttgcttccagtttagctgcccctcaaattcaagtgaatattttcccttctccctttacccttctccagaaataaagcaggtgacagggttttcagaatcttaaaaaaaaaaaaaaaaaaaaaaaaaaaaaaaaaaaaaaaaaaaaaaaaaaaaaaaaaaaaaaaaaaaaa

SEQ ID NO: 546 - protein, 376 aa, Homo sapiens
MARGPGPLGRPRPDTVAMPKRGKRLKFRAHDACSGRVTVADYANSDPAVVRSGRVKKAVANAVQQEVKSLCGLEASQVPAEEALSGAGEPCDIIDSSDEMDAQEESIHERTVSRKKKSKRHKEELDGAGGEEYPMDIWLLLASYIRPEDIVNFSLICKNAWTVTCTAAFWTRLYRRHYTLDASLPLRLRPESMEKLRCLRACVIRSLYHMYEPFAARISKNPAIPESTPSTLKNSKCLLFWCRKIVGNRQEPMWEFNFKFKKQSPRLKSKCTGGLQPPVQYEDVHTNPDQDCCLLQVTTLNFIFIPIVMGMIFTLFTINVSTDMRHHRVRLVFQDSPVHGGRKLRSEQGVQVILDPVHSVRLFDWWHPQYPFSLRA

SEQ ID NO: 547 - DNA, 1921 bp, Homo sapiens
agtggagtgggacaggtatataaaggaagtacagggcctggggaagaggccctgtctaggtagctggcaccaggagccgtgggcaagggaagaggccacaccctgccctgctctgctgcagccagaatgggtgtgaaggcgtctcaaacaggctttgtggtcctggtgctgctccagtgctgctctgcatacaaactggtctgctactacaccagctggtcccagtaccgggaaggcgatgggagctgcttcccagatgcccttgaccgcttcctctgtacccacatcatctacagctttgccaatataagcaacgatcacatcgacacctgggagtggaatgatgtgacgctctacggcatgctcaacacactcaagaacaggaaccccaacctgaagactctcttgtctgtcggaggatggaactttgggtctcaaagattttccaagatagcctccaacacccagagtcgccggactttcatcaagtcagtaccgccatttctgcgcacccatggctttgatgggctggaccttgcctggctctaccctggacggagagacaaacagcattttaccaccctaatcaaggaaatgaaggccgaatttataaaggaagcccagccagggaaaaagcagctcctgctcagcgcagcactgtctgcggggaaggtcaccattgacagcagctatgacattgccaagatatcccaacacctggatttcattagcatcatgacctacgattttcatggagcctggcgtgggaccacaggccatcacagtcccctgttccgaggtcaggaggatgcaagtcctgacagattcagcaacactgactatgctgtggggtacatgttgaggctgggggctcctgccagtaagctggtgatgggcatccccaccttcgggaggagcttcactctggcttcttctgagactggtgttggagccccaatctcaggaccgggaattccaggccggttcaccaaggaggcagggacccttgcctactatgagatctgtgacttcctccgcggagccacagtccatagaatcctcggccagcaggtcccctatgccaccaagggcaaccagtgggtaggatacgacgaccaggaaagcgtcaaaagcaaggtgcagtacctgaaggacaggcagctggcgggcgccatggtatgggccctggacctggatgacttccagggctccttctgtggccaggatctgcgcttccctctcaccaatgccatcaaggatgcactcgctgcaacgtagccctctgttctgcacacagcacgggggccaaggatgccccgtccccctctggctccagctggccgggagcctgatcacctgccctgctgagtcccaggctgagcctcagtctccctcccttggggcctatgcagaggtccacaacacacagatttgagctcagccctggtgggcagagaggtagggatggggctgtggggatagtgaggcatcgcaatgtaagactcgggattagtacacacttgttgattaatggaaatgtttacagatccccaagcctggcaagggaatttcttcaactccctgccccccagccctccttatcaaaggacaccattttggcaagctctatcaccaaggagccaaacatcctacaagacacagtgaccatactaattataccccctgcaaagcccagcttgaaaccttcacttaggaacgtaatcgtgtcccctatcctacttccccttcctaattccacagctgctcaataaagtacaagagcttaacagtgtgttggcgctttgctttggtctatctttgagcgcccactagacccactggactcacctcccccatctcttctgggttccttcctctgagccttgggacccctgagcttgcagagatgaggccgccatgt

SEQ ID NO: 548 - DNA, 2717 bp, Homo sapiens
cagggtaacgctgtcttgtggacccgcacttcccacccgagacctctcactgagcccgagccgcgcgcgacatgagccacgggaagggaaccgacatgctcccggagatcgccgccgccgtgggcttcctctccagcctcctgaggacccggggctgcgtgagcgagcagaggcttaaggtcttcagcggggcgctccaggaggcactcacagagcactacaaacaccactggtttcccgaaaagccgtccaagggctccggctaccgctgcattcgcatcaaccacaagatggaccccatcatcagcagggtggccagccagatcggactcagccagccccagctgcaccagctgctgcccagcgagctgaccctgtgggtggacccctatgaggtgtcctaccgcattggggaggacggctccatctgcgtcttgtacgaggaggccccactggccgcctcctgtgggctcctcacctgcaagaaccaagtgctgctgggccggagcagcccctccaagaactacgtgatggcagtctccagctaggcccttccgcccccgccctgggcgccgccgtgctcatgctgccgtgacaacaggccaccacatacctcaacctggggaactgtatttttaaatgaagagctatttatatatattatttttttttaagaaaggaggaaaagaaaccaaaagttttttttaagaaaaaaaatccttcaagggagctgcttggaagtggcctccccaggtgcctttggagagaactgttgcgtgcttgagtctgtgagccagtgtctgcctataggagggggagctgttagggggtagacctagccaaggagaagtgggagacgtttggctagcaccccaggaagatgtgagagggagcaagcaaggttagcaactgtgaacagagaggtcgggatttgccctgggggaggaagagaggccaagttcagagctctctgtctcccccagccagacacctgcatccctggctcctctattactcaggggcattcatgcctggacttaaacaatactatgttatcttttcttttatttttctaatgaggtcctgggcagagagtgaaaaggcctctcctgattcctactgtcctaagctgcttttcttgaaatcatgacttgtttctaattctaccctcaggggcctgtagatgttgctttccagccaggaatctaaagctttgggttttctgagggggggaggagggaactggaggttattggggttaggatggaagggaactctgcacaaaacctttgctttgctagtgctgctttgtgtgtatgtgtggcaaataatttgggggtgatttgcaatgaaattttgggacccaaagagtatccactggggatgttttttggccaaaactcttccttttggaaccacatgaaagtcttgatgctgctgccatgatccctttgagaggtggctcaaaagctacagggaactccaggtcctttattactgccttcttttcaaaagcacaactctcctctaaccctcccctcccccttcccttctggtcgggtcatagagctaccgtattttctaggacaagagttctcagtcactgtgcaatatgccccctgggtcccaggagggtctggaggaaaactggctatcagaacctcctgatgccctggtgggcttagggaaccatctctcctgctctccttgggatgatggctggctagtcagccttgcatgtattccttggctgaatgggagagtgccccatgttctgcaagactacttggtattcttgtagggccgacactaaataaaagccaaaccttgggcactgttttttctccctggtgctcagagcacctgtgggaaaggttgctgtctgtctcagtacaatccaaatttgtcgtagacttgtgcaatatatactgttgtgggttggagaaaagtggaaagctacactgggaagaaactcccttccttcaatttctcagtgacattgatgaggggtcctcaaaagacctcgagtttcccaaaccgaatcaccttaagaaggacagggctagggcatttggccaggatggccaccctcctgctgttgccccttagtgaggaatcttcaccccacttcctctacccccaggttctcctccccacagccagtcccctttcctggatttctaaactgctcaattttgactcaaaggtgctatttaccaaacactctccctacccattcctgccagctctgcctccttttcaactctccacattttgtattgccttcccagacctgcttccagtctttattgctttaaagttcactttgggcccacagacccaagagctaattttctggtttgtgggttgaaacaaagctgtgaatcactgcaggctgtgttcttgcatcttgtctgcaaacaggtccctgcctttttagaagcagcctcatggtctcatgcttaatcttgtctctcttctcttctttatgatgttcactttaaaaacaacaaaacccctgagctggactgttgagcaggcctgtctctcctattaagtaaaaataaatagtagtagtatgtttgtaagctattctgacagaaaagacaaaggttactaattgtatgatagtgtttttatatggaagaatgtacagcttatggacaaatgtacacctttttgttactttaataaaaatgtagtaggataaaaaaaaa

SEQ ID NO: 549 - protein, 158 aa, Homo sapiens
MSHGKGTDMLPEIAAAVGFLSSLLRTRGCVSEQRLKVFSGALQEALTEHYKHHWFPEKPSKGSGYRCIRINHKMDPIISRVASQIGLSQPQLHQLLPSELTLWVDPYEVSYRIGEDGSICVLYEEAPLAASCGLLTCKNQVLLGRSSPSKNYVMAVSS

SEQ ID NO: 550 - DNA, 3493 bp, Homo sapiens
atgtccatgaggagccccatctctgcccagctggccctggatggcgttggcaccatggtgaactgcaccatcaagtcagaggagaagaaagagccttgccacgaggccccccagggctcagccactgccgctgaacctcagcctggagacccagcccgggcctcccaggatagtgctgacccccaagctccagcccaggggaatttcaggggctcctgggactgtagctctccagagggtaatgggtccccagaacccaagagaccaggagcgtcggaggctgcctctggaagccaggagaagctggacttcaaccgaaatttgaaagaagtggtgccagccatagagaagctgttgtccagtgactggaaggagaggtttctaggaaggaactctatggaagccaaagatgtcaaagggacccaagagagcctagcagagaaggagctccagcttctggtcatgattcaccagctgtccaccctgcgggaccagctcctgacagcccactcggagcagaagaacatggctgccatgctgtttgagaagcagcagcagcagatggagcttgcccggcagcagcaggagcagattgcaaagcagcagcagcagctgattcagcagcagcataagatcaacctccttcagcagcagatccagcaggttaacatgccttatgtcatgatcccagccttccccccaagccaccaacctctgcctgtcacccctgactcccagctggccttacccattcagcccattccctgcaaaccagtggagtatccgctgcagctgctgcacagcccccctgccccagtggtgaagaggcctggggccatggccacccaccaccccctgcaggagccctcccagcccctgaacctcacagccaagcccaaggcccccgagctgcccaacacctccagctccccaagcctgaagatgagcagctgtgtgccccgcccccccagccatggaggccccacgcgggacctgcagtccagccccccgagcctgcctctgggcttccttggtgaaggggacgctgtcaccaaagccatccaggatgctcggcagctgctgcacagccacagtggggccttggatggctcccccaacacccccttccgtaaggacctcatcagcctggactcatccccagccaaggagcggctggaggacggctgtgtgcacccactggaggaagccatgctgagctgcgacatggatggctcccgccacttccccgagtcccgaaacagcagccacatcaagaggcccatgaacgccttcatggtgtgggccaaggatgagcggaggaagatcctgcaagccttcccagacatgcacaactccagcatcagcaagatccttggatctcgctggaagtccatgaccaaccaggagaagcagccctactatgaggaacaggcgcggctgagccggcagcacctggagaagtatcctgactacaagtacaagccgcggcccaagcgcacctgcatcgtggagggcaagcggctgcgcgtgggagagtacaaggccctgatgaggacccggcgtcaggatgcccgccagagctacgtgatccccccgcaggctggccaggtgcagatgagctcctcagatgtcctgtaccctcgggcagcaggcatgccgctggcacagccactggtggagcactatgtccctcgtagcctggaccccaacatgcctgtgatcgtcaacacctgcagcctcagagaggagggtgagggcacagatgacaggcactcggtggctgatggcgagatgtaccggtacagcgaggacgaggactcggagggtgaagagaagagcgatggggagttggtggtgctcacagactgatcccggctgggtgggcctggccccttctcctctggggaagaccttgtcccaactcgatgggcacagccagccaacctaagactatgttggtacttggacttgttcgtgccccagagatgggcaaagctgtgcacttgcagatacattcatgaggggagaggcgccctcccttcctgaggagctgttggcctgggtgggcaggaactgcagtatggccatgggctgagcaggctgagcacctcagcctttagggcttatggccaggggacactgtatgactctcctctcctgcaggtgtctatccacctggggtatggcatctaccgacctgtctccctggggtcacatgctttgtttccattcttgtcctggctggaccagccactgtgggaccaacacccctcccacactcccccagactgctcgtctatcaccaggatcgctttgtactttgtgcaaaagggtctggctgtcccttgctgttttcatctctgccaagcctattgtgcctctggctgctgtatgtgtgcgcgtgcacgtgtgtgtgtttcatctgttcattcactgcacaagatatttattgagtgcccactacgtgccaggcactgttgctgagttcctgtgggtgtgtctctcgatgccactcctgcttctctgggggcctctttctgtgcttctctttgtccccaaattgctacctctttgtcagtctgggtgtctcaggttctgtgtgtccttgtgtgcatttctgtctctctctgtcctcgtctctctgcaaggccctctatttctctctttcttggtgtctgtcctttgccccctgtgccctctggattctctgggtctatgtaggcccctggtctgccctgggctcatcagccttcctgacctcctcctgccctccccttcactccctccctggctctgccagtcggttcccacggagccatttttagctctgatcagcatgggaatgtgcctcggcctccaaggggctttgtcctggtgcccccgcccctggtcccaacctgatcccacgagggagttgggacaggaggattgatggtgctccccttcctgccagcgtcagaggccctggagaggggctgtccatggcagctggtctttattcctccctcatgagcacagggtcgggggggtccccattcttggaagaggttgagaagactcctgggcttcagcctctcccacccagccctgcccctcacctgcctgccctcccctcccccactctatactagggactggatctcagcctctgatcagtttcacaaagtttgttccctaaggaaatcaaatcccattgtcacctaactctgaagatctaaatagcccttggatcagtatgggaaccccaaatcccacagggccagatgtggagtctgtgtctgcccccgtcttctctccatcctcaaagcccccacttctctccaggctgtttctttttttatgactgtaaacatagatagtgctttattttgttaataataagataatgatgagtaacttaaccagcacatttctcctgtttacactcgggggatttttttgttttctgatgacataataaagacagatcatttcagaaaaaaaaaaaaaaaaa

SEQ ID NO: 551 - protein, 622 aa, Homo sapiens
MSMRSPISAQLALDGVGTMVNCTIKSEEKKEPCHEAPQGSATAAEPQPGDPARASQDSADPQAPAQGNFRGSWDCSSPEGNGSPEPKRPGASEAASGSQEKLDFNRNLKEVVPAIEKLLSSDWKERFLGRNSMEAKDVKGTQESLAEKELQLLVMIHQLSTLRDQLLTAHSEQKNMAAMLFEKQQQQMELARQQQEQIAKQQQQLIQQQHKINLLQQQIQQVNMPYVMIPAFPPSHQPLPVTPDSQLALPIQPIPCKPVEYPLQLLHSPPAPVVKRPGAMATHHPLQEPSQPLNLTAKPKAPELPNTSSSPSLKMSSCVPRPPSHGGPTRDLQSSPPSLPLGFLGEGDAVTKAIQDARQLLHSHSGALDGSPNTPFRKDLISLDSSPAKERLEDGCVHPLEEAMLSCDMDGSRHFPESRNSSHIKRPMNAFMVWAKDERRKILQAFPDMHNSSISKILGSRWKSMTNQEKQPYYEEQARLSRQHLEKYPDYKYKPRPKRTCIVEGKRLRVGEYKALMRTRRQDARQSYVIPPQAGQVQMSSSDVLYPRAAGMPLAQPLVEHYVPRSLDPNMPVIVNTCSLREEGEGTDDRHSVADGEMYRYSEDEDSEGEEKSDGELVVLTD

SEQ ID NO: 552 - DNA, 530 bp, Homo sapiens
aactgccatcttccagtaattcgccaaaatgacgaatacaaagggaaagaggagaggcacccgatgtatgttctctaggccttttagaaaacatggagttgttcctttggccacgtatatgcgagtctataagaaaggtgatattgtagacatcaagggaatgggtactgttcaaaaaggaatgccccacacgcgttaccacggcaaaactggaagagtctacaatgttacccagcatgctgttggcattgttgtaaacaaacaagttaaaggcaagattcttgccaagagaattaatgtgcgtattgagcacattaagcactctaagagccgagatagcttcctgaaacgtgtgaaggaaaatgatcagaaaaagaaagaagccaaagagaaagttacctggattcaactaaagcgccagcctgctccacccagagaagcacactttgtgagaaccaatgggaaggagcctgagctgctggaacctattccctatgaattcatggcataataggtgttaaaaaaaaaaa

SEQ ID NO: 553 - DNA, 3971 bp, Homo sapiens
gctttcaggcgatctggagaaagaacggcagaacacacagcaaggaaaggtcctttctggggatcaccccattggctgaagatgagaccattcttcctcttgtgttttgccctgcctggcctcctgcatgcccaacaagcctgctcccgtggggcctgctatccacctgttggggacctgcttgttgggaggacccggtttctccgagcttcatctacctgtggactgaccaagcctgagacctactgcacccagtatggcgagtggcagatgaaatgctgcaagtgtgactccaggcagcctcacaactactacagtcaccgagtagagaatgtggcttcatcctccggccccatgcgctggtggcagtcccagaatgatgtgaaccctgtctctctgcagctggacctggacaggagattccagcttcaagaagtcatgatggagttccaggggcccatgcccgccggcatgctgattgagcgctcctcagacttcggtaagacctggcgagtgtaccagtacctggctgccgactgcacctccaccttccctcgggtccgccagggtcggcctcagagctggcaggatgttcggtgccagtccctgcctcagaggcctaatgcacgcctaaatggggggaaggtccaacttaaccttatggatttagtgtctgggattccagcaactcaaagtcaaaaaattcaagaggtgggggagatcacaaacttgagagtcaatttcaccaggctggcccctgtgccccaaaggggctaccaccctcccagcgcctactatgctgtgtcccagctccgtctgcaggggagctgcttctgtcacggccatgctgatcgctgcgcacccaagcctggggcctctgcaggcccctccaccgctgtgcaggtccacgatgtctgtgtctgccagcacaacactgccggcccaaattgtgagcgctgtgcacccttctacaacaaccggccctggagaccggcggagggccaggacgcccatgaatgccaaaggtgcgactgcaatgggcactcagagacatgtcactttgaccccgctgtgtttgccgccagccagggggcatatggaggtgtgtgtgacaattgccgggaccacaccgaaggcaagaactgtgagcggtgtcagctgcactatttccggaaccggcgcccgggagcttccattcaggagacctgcatctcctgcgagtgtgatccggatggggcagtgccaggggctccctgtgacccagtgaccgggcagtgtgtgtgcaaggagcatgtgcagggagagcgctgtgacctatgcaagccgggcttcactggactcacctacgccaacccgcagggctgccaccgctgtgactgcaacatcctggggtcccggagggacatgccgtgtgacgaggagagtgggcgctgcctttgtctgcccaacgtggtgggtcccaaatgtgaccagtgtgctccctaccactggaagctggccagtggccagggctgtgaaccgtgtgcctgcgacccgcacaactcccctcagcccacagtgcaaccagttcacagggcagtgccctgtcgggaaggctttggtggcctgatgtgcagcgctgcagccatccgccagtgtccagaccggacctatggagacgtggccacaggatgccgagcctgtgactgtgatttccggggaacagagggcccgggctgcgacaaggcatcaggccgctgcctctgccgccctggcttgaccgggccccgctgtgaccagtgccagcgaggctactgcaatcgctacccggtgtgcgtggcctgccacccttgcttccagacctatgatgcggacctccgggagcaggccctgcgctttggtagactccgcaatgccaccgccagcctgtggtcagggcctgggctggaggaccgtggcctggcctcccggatcctagatgcaaagagtaagattgagcagatccgagcagttctcagcagccccgcagtcacagagcaggaggtggctcaggtggccagtgccatcctctccctcaggcgaactctccagggcctgcagctggatctgcccctggaggaggagacgttgtcccttccgagagacctggagagtcttgacagaagcttcaatggtctccttactatgtatcagaggaagagggagcagtttgaaaaaataagcagtgctgatccttcaggagccttccggatgctgagcacagcctacgagcagtcagcccaggctgctcagcaggtctccgacagctcgcgccttttggaccagctcagggacagccggagagaggcagagaggctggtgcggcaggcgggaggaggaggaggcaccggcagccccaagcttgtggccctgaggctggagatgtcttcgttgcctgacctgacacccaccttcaacaagctctgtggcaactccaggcagatggcttgcaccccaatatcatgccctggtgagctatgtccccaagacaatggcacagcctgtggctcccgctgcaggggtgtccttcccagggccggtggggccttcttgatggcggggcaggtggctgagcagctgcggggcttcaatgcccagctccagcggaccaggcagatgattagggcagccgaggaatctgcctcacagattcaatccagtgcccagcgcttggagacccaggtgagcgccagccgctcccagatggaggaagatgtcagacgcacacggctcctaatccagcaggtccgggacttcctaacagaccccgacactgatgcagccactatccaggaggtcagcgaggccgtgctggccctgtggctgcccacagactcagctactgttctgcagaagatgaatgagatccaggccattgcagccaggctccccaacgtggacttggtgctgtcccagaccaagcaggacattgcgcgtgcccgccggttgcaggctgaggctgaggaagccaggagccgagcccatgcagtggagggccaggtggaagatgtggttgggaacctgcggcaggggacagtggcactgcaggaagctcaggacaccatgcaaggcaccagccgctcccttcggcttatccaggacagggttgctgaggttcagcaggtactgcggccagcagaaaagctggtgacaagcatgaccaagcagctgggtgacttctggacacggatggaggagctccgccaccaagcccggcagcagggggcagaggcagtccaggcccagcagcttgcggaaggtgccagcgagcaggcattgagtgcccaagagggatttgagagaataaaacaaaagtatgctgagttgaaggaccggttgggtcagagttccatgctgggtgagcagggtgcccggatccagagtgtgaagacagaggcagaggagctgtttggggagaccatggagatgatggacaggatgaaagacatggagttggagctgctgcggggcagccaggccatcatgctgcgctcggcggacctgacaggactggagaagcgtgtggagcagatccgtgaccacatcaatgggcgcgtgctctactatgccacctgcaagtgatgctacagcttccagcccgttgccccactcatctgccgcctttgcttttggttgggggcagattgggttggaatgctttccatctccaggagactttcatgcagcctaaagtacagcctggaccacccctggtgtgtagctagtaagattaccctgagctgcagctgagcctgagccaatgggacagttacacttgacagacaaagatggtggagattggcatgccattgaaactaagagctctcaagtcaaggaagctgggctgggcagtatcccccgcctttagttctccactggggaggaatcctggaccaagcacaaaaacttaacaaaagtgatgtaaaaatgaaaagccaaataaaaatctttgg

SEQ ID NO: 554 - protein, 1172 aa, Homo sapiens
MRPFFLLCFALPGLLHAQQACSRGACYPPVGDLLVGRTRFLRASSTCGLTKPETYCTQYGEWQMKCCKCDSRQPHNYYSHRVENVASSSGPMRWWQSQNDVNPVSLQLDLDRRFQLQEVMMEFQGPMPAGMLIERSSDFGKTWRVYQYLAADCTSTFPRVRQGRPQSWQDVRCQSLPQRPNARLNGGKVQLNLMDLVSGIPATQSQKIQEVGEITNLRVNFTRLAPVPQRGYHPPSAYYAVSQLRLQGSCFCHGHADRCAPKPGASAGPSTAVQVHDVCVCQHNTAGPNCERCAPFYNNRPWRPAEGQDAHECQRCDCNGHSETCHFDPAVFAASQGAYGGVCDNCRDHTEGKNCERCQLHYFRNRRPGASIQETCISCECDPDGAVPGAPCDPVTGQCVCKEHVQGERCDLCKPGFTGLTYANPQGCHRCDCNILGSRRDMPCDEESGRCLCLPNVVGPKCDQCAPYHWKLASGQGCEPCACDPHNSPQPTVQPVHRAVPCREGFGGLMCSAAAIRQCPDRTYGDVATGCRACDCDFRGTEGPGCDKASGRCLCRPGLTGPRCDQCQRGYCNRYPVCVACHPCFQTYDADLREQALRFGRLRNATASLWSGPGLEDRGLASRILDAKSKIEQIRAVLSSPAVTEQEVAQVASAILSLRRTLQGLQLDLPLEEETLSLPRDLESLDRSFNGLLTMYQRKREQFEKISSADPSGAFRMLSTAYEQSAQAAQQVSDSSRLLDQLRDSRREAERLVRQAGGGGGTGSPKLVALRLEMSSLPDLTPTFNKLCGNSRQMACTPISCPGELCPQDNGTACGSRCRGVLPRAGGAFLMAGQVAEQLRGFNAQLQRTRQMIRAAEESASQIQSSAQRLETQVSASRSQMEEDVRRTRLLIQQVRDFLTDPDTDAATIQEVSEAVLALWLPTDSATVLQKMNEIQAIAARLPNVDLVLSQTKQDIARARRLQAEAEEARSRAHAVEGQVEDVVGNLRQGTVALQEAQDTMQGTSRSLRLIQDRVAEVQQVLRPAEKLVTSMTKQLGDFWTRMEELRHQARQQGAEAVQAQQLAEGASEQALSAQEGFERIKQKYAELKDRLGQSSMLGEQGARIQSVKTEAEELFGETMEMMDRMKDMELELLRGSQAIMLRSADLTGLEKRVEQIRDHINGRVLYYATCK

SEQ ID NO: 555 - DNA, 879 bp, Homo sapiens
gcggagtctccaactgggagagctgcagctgccgagaggaggagaacgctgaggtcggtcggaccaacggacgcgctgaccgctgccaactgcagctcgcgctgcctcctgctcgcgccgtgccactaaggtcactcccgcctccgagagcccagagccgagatggaaacggtccaggagctgatccccctggccaaggagatgatggcccagaagcgcaaggggaagatggtgaagctgtacgtgctgggcagcgtgctggccctcttcggcgtggtgctcggcctgatggagactgtgtgcagccccttcacggccgccagacgtctgcgggaccaggaggcagccgtggcggagctgcaggccgccctggagcgacaggctctccagaagcaagccctgcaggagaaaggcaagcagcaggacacggtcctcggcggccgggccctgtccaaccggcagcacgcctcctaggaactgtgggagaccagcggagtgggagggagacgcagtagacagagacagaccgagaaggaagggagagacagagggggcgcgcgcacaggagcctgactccgctgggagagtgcaggagcacgtgctgttttttatttggacttaacttcagagaaaccgctgacatctagaactgacctaccacaagcatccaccaaaggagtttgggattgagttttgctgctgtgcagcactgcattgtcatgacatttccaacactgtgtgaattatctaaatgcgtctaccattttgcactagggaggaaggataaatgctttttatgttattattattaattattacaatgaccaccattttgcattttgaaataaaaaactttttataccaaaaaaaaaaaaaaaa

SEQ ID NO: 556 - protein, 103 aa, Homo sapiens
METVQELIPLAKEMMAQKRKGKMVKLYVLGSVLALFGVVLGLMETVCSPFTAARRLRDQEAAVAELQAALERQALQKQALQEKGKQQDTVLGGRALSNRQHAS

SEQ ID NO: 557 - DNA, 310 bp, Homo sapiens
cccgcctccgagagcccagagccgagatggaaacggtccaggagctgatccccctggccaaggagatgatggcccagaagcgcaaggggaagatggtgaagctgtacgtgctgggcagcgtgctggccctcttcggcgtggtgctcggcctgatggagactgtgtgcagcggagtgggagggagacgcagtagacagagacagaccgagagaggaatggagagacagagggggcgcgcgcacaggagcctgactccgctgggagagtgcaggagcacgtgctgttttttatttggacttaacttcagaga

SEQ ID NO: 558 - DNA, 2102 bp, Homo sapiens
ccgctgggcgtagctgcgactcggcggagtcccggcggcgcgtccttgttctaacccggcgcgccatgaccgtcgcgcggccgagcgtgcccgcggcgctgcccctcctcggggagctgccccggctgctgctgctggtgctgttgtgcctgccggccgtgtggggtgactgtggccttcccccagatgtacctaatgcccagccagctttggaaggccgtacaagttttcccgaggatactgtaataacgtacaaatgtgaagaaagctttgtgaaaattcctggcgagaaggactcagtgatctgccttaagggcagtcaatggtcagatattgaagagttctgcaatcgtagctgcgaggtgccaacaaggctaaattctgcatccctcaaacagccttatatcactcagaattattttccagtcggtactgttgtggaatatgagtgccgtccaggttacagaagagaaccttctctatcaccaaaactaacttgccttcagaatttaaaatggtccacagcagtcgaattttgtaaaaagaaatcatgccctaatccgggagaaatacgaaatggtcagattgatgtaccaggtggcatattatttggtgcaaccatctccttctcatgtaacacagggtacaaattatttggctcgacttctagtttttgtcttatttcaggcagctctgtccagtggagtgacccgttgccagagtgcagagaaatttattgtccagcaccaccacaaattgacaatggaataattcaaggggaacgtgaccattatggatatagacagtctgtaacgtatgcatgtaataaaggattcaccatgattggagagcactctatttattgtactgtgaataatgatgaaggagagtggagtggcccaccacctgaatgcagaggaaaatctctaacttccaaggtcccaccaacagttcagaaacctaccacagtaaatgttccaactacagaagtctcaccaacttctcagaaaaccaccacaaaaaccaccacaccaaatgctcaagcaacacggagtacacctgtttccaggacaaccaagcattttcatgaaacaaccccaaataaaggaagtggaaccacttcaggtactacccgtcttctatctgggcacacgtgtttcacgttgacaggtttgcttgggacgctagtaaccatgggcttgctgacttagccaaagaagagttaagaagaaaatacacacaagtatacagactgttcctagtttcttagacttatctgcatattggataaaataaatgcaattgtgctcttcatttaggatgctttcattgtctttaagatgtgttaggaatgtcaacagagcaaggagaaaaaaggcagtcctggaatcacattcttagcacacctacacctcttgaaaatagaacaacttgcagaattgagagtgattcctttcctaaaagtgtaagaaagcatagagatttgttcgtatttagaatgggatcacgaggaaaagagaaggaaagtgatttttttccacaagatctgtaatgttatttccacttataaaggaaataaaaaatgaaaaacattatttggatatcaaaagcaaataaaaacccaattcagtctcttctaagcaaaattgctaaagagagatgaaccacattataaagtaatctttggctgtaaggcattttcatctttccttcgggttggcaaaatattttaaaggtaaaacatgctggtgaaccaggggtgttgatggtgataagggaggaatatagaatgaaagactgaatcttcctttgttgcacaaatagagtttggaaaaagcctgtgaaaggtgtcttctttgacttaatgtctttaaaagtatccagagatactacaatattaacataagaaaagattatatattatttctgaatcgagatgtccatagtcaaatttgtaaatcttattcttttgtaatatttatttatatttatttatgacagtgaacattctgattttacatgtaaaacaagaaaagttgaagaagatatgtgaagaaaaatgtatttttcctaaatagaaataaatgatcccattttttggt

SEQ ID NO: 559 - protein, 381 aa, Homo sapiens
MTVARPSVPAALPLLGELPRLLLLVLLCLPAVWGDCGLPPDVPNAQPALEGRTSFPEDTVITYKCEESFVKIPGEKDSVICLKGSQWSDIEEFCNRSCEVPTRLNSASLKQPYITQNYFPVGTVVEYECRPGYRREPSLSPKLTCLQNLKWSTAVEFCKKKSCPNPGEIRNGQIDVPGGILFGATISFSCNTGYKLFGSTSSFCLISGSSVQWSDPLPECREIYCPAPPQIDNGIIQGERDHYGYRQSVTYACNKGFTMIGEHSIYCTVNNDEGEWSGPPPECRGKSLTSKVPPTVQKPTTVNVPTTEVSPTSQKTTTKTTTPNAQATRSTPVSRTTKHFHETTPNKGSGTTSGTTRLLSGHTCFTLTGLLGTLVTMGLLT

SEQ ID NO: 560 - DNA, 6339 bp, Homo sapiens
gtggatttggtcgtctccctgattccgagctgcgggcagggagaggggcctcgcgccgccctcagcagccggcggcggccgaggtagaccgagcggggacggaaggacagaccgacgtcgccgagctggaatcatgtgagggccaaccggggaaggtggagcagatgagcacacacaggagccgtctcctcaccgccgcccctctcagcatggaacagaggcggccctggccccgggccctggaggtggacagccgctctgtggtcctgctctcagtggtctgggtgctgctggcccccccagcagccggcatgcctcagttcagcaccttccactctgagaatcgtgactggaccttcaaccacttgaccgtccaccaagggacgggggccgtctatgtgggggccatcaaccgggtctataagctgacaggcaacctgaccatccaggtggctcataagacagggccagaagaggacaacaagtcttgttacccgcccctcatcgtgcagccctgcagcgaagtgctcaccctcaccaacaatgtcaacaagctgctcatcattgactactctgagaaccgcctgctggcctgtgggagcctctaccagggggtctgcaagctgctgcggctggatgacctcttcatcctggtggagccatcccacaagaaggagcactacctgtccagtgtcaacaagacgggcaccatgtacggggtgattgtgcgctctgagggtgaggatggcaagctcttcatcggcacggctgtggatgggaagcaggattacttcccgaccctgtccagccggaagctgccccgagaccctgagtcctcagccatgctcgactatgagctacacagcgattttgtctcctctctcatcaagatcccttcagacaccctggccctggtctcccactttgacatcttctacatctacggctttgctagtgggggctttgtctactttctcactgtccagcccgagacccctgagggtgtggccatcaactccgctggagacctcttctacacctcacgcatcgtgcggctctgcaaggatgaccccaagttccactcatacgtgtccctgcccttcggctgcacccgggccggggtggaataccgcctcctgcaggctgcttacctggccaagcctggggactcactggcccaggccttcaatatcaccagccaggacgatgtactctttgccatcttctccaaagggcagaagcagtatcaccacccgcccgatgactctgccctgtgtgccttccctatccgggccatcaacttgcagatcaaggagcgcctgcagtcctgctaccagggcgagggcaacctggagctcaactggctgctggggaaggacgtccagtgcaccaaggcgcctgtccccatcgatgataacttctgtggactggacatcaaccagcccctgggaggctcaactccagtggagggcctgaccctgtacaccaccagcagggaccgcatgacctctgtggcctcctacgtttacaacggctacagcgtggtttttgtggggactaagagtggcaagctgaaaaagattcgggccgacggtcccccccatggtggggtccagtacgagatggtctctgtgctcaaggacggaagccccatcctccgggacatggccttctccattgatcagcgctacctgtacgtcatgtctgagagacaggtcaccagggtccccgtggagtcatgtgagcagtatacgacttgtggggagtgcctgagctctggggaccctcactgtggctggtgtgccctgcacaacatgtgctcccgcagggacaaatgccaacaggcctgggaacctaatcgatttgctgccagcatcagccagtgtgtgagccttgcagtgcatcccagcagcatctcagtatctgagcacagccggttgcttagcctggtagtgagtgatgctcctgatctatctgcgggtatcgcctgtgcctttgggaacctgacagaggtggaggggcaggtgtccgggagccaggtcatctgcatctcacctgggcccaaggatgtccctgtcatcccgctggatcaagactggtttgggctggagctacagctgaggtccaaggagacagggaagatatttgtcagcaccgagttcaagttttacaactgcagtgcccaccaactgtgcctgtcctgtgtcaacagcgccttccgctgccattggtgcaagtaccgcaacctctgcactcatgaccccaccacctgctccttccaggagggccggatcaatatttcagaggactgtccccagctggtgcccacagaggagatcttgattccagtcggggaggtaaagccaatcacccttaaggcgcgaaatctgccccagccgcagtccggccagcgaggctatgagtgtgtcctcaacatacaaggagccatccaccgggtccccgctctgcgcttcaacagctccagcgttcagtgtcagaacagctcgtaccagtatgatggcatggacatcagcaatctggccgtggatttcgctgtggtgtggaacggcaatttcatcattgacaaccctcaggacctgaaagtccatctctacaagtgtgcagcccagcgggagagctgcggcctctgcctcaaggccgaccggaagtttgagtgtggctggtgcagcggcgagcgcaggtgcaccctccaccagcactgtaccagcccttccagcccctggctcgactggtccagccacaatgtcaagtgctccaaccctcaaatcaccgagattttgacggtgtctggaccgccggaaggagggacgcgagtgaccatccatggcgtgaacctgggtctggacttctccgagatcgcccaccatgtgcaggtggctggggtgccctgcacgcccctcccaggggaatacatcatcgctgagcagattgtctgtgagatgggccatgccctcgtgggaaccacctccgggccagtacgcctgtgtattggcgagtgtaagccagagttcatgacgaagtcccatcagcagtacaccttcgtgaacccttctgtgctgtcactcaacccaatccgaggtcccgagtcaggaggcactatggtgaccattaccggccattaccttggggctgggagcagcgtggcagtctacctgggcaaccagacctgcgagttctacgggaggtcaatgagtgagatcgtgtgtgtctcacccccatcatccaatggccttggcccggtccctgtttctgtgagtgtcgaccgagcccatgtggatagcaacctgcagtttgagtacatagatgaccctcgggtccagcgcatcgagccagagtggagcattgccagtggccacacacccctgaccatcacaggcttcaacctggatgtcattcaggagccaaggatccgagtcaaattcaatggcaaagaatctgtcaatgtgtgtaaagttgtgaacacaaccaccctcacctgcctggcaccctctctgaccacggactaccgccctggcctggacactgtggaacgcccagatgagtttggatttgtctttaacaatgtccaatccttgctaatttacaacgacaccaagtttatctactaccccaacccgacctttgaactgcttagccctactggagtcttggatcaaaagccaggatcgcccatcattctgaagggcaaaaacctctgccctcctgcctctggaggggccaaactcaactacactgtgctcatcggagagaccccttgtgctgtcaccgtatctgagacccagcttctctgcgagcctcccaacctcaccgggcagcacaaggtcatggttcacgtgggcgggatggtgttctcgcctggctcggtgagtgtcatctcagacagcttgctgaccctgccagccatcgtcagcatcgcggccggcggcagcctcctcctcatcatcgtcatcatcgtcctcattgcctacaagcgcaagtctcgagaaaatgacctcactctcaagcggctgcaaatgcagatggacaatctggagtcccgtgtggccttggagtgcaaggaagcttttgctgagctccagacggatatcaatgagttgaccagtgacctggaccgctcaggaatcccttacctggactatcgtacctacgctatgcgagtcctgttcccgggcatcgaggaccaccccgtcctgcgggagctggaggtacaaggaaacgggcagcagcacgtggagaaggccctgaagctctttgcccagctcatcaacaacaaggtgttcctgctgaccttcatccgcaccctggagctgcagcgcagtttctccatgcgcgaccggggcaacgtggcttcgctcatcatgaccggcctgcagggccgcctggaatatgccactgatgtcctcaagcagctgctctctgacctcatcgataagaacctggagaacaagaaccaccccaagctgctactccggaggacagagtctgtggctgaaaagatgctgaccaattggttcgccttcctcctgcacaagttcctaaaggagtgcgcaggggagccactcttcatgctatactgtgccatcaagcagcagatggagaagggccccattgatgccatcacgggcgaggcccgctactccctgagcgaggacaagctcatccggcagcagatcgagtacaagaccctgatcctgaactgcgtcaaccctgacaacgagaacagtccagagatcccagtgaaggtgttaaactgtgacaccatcacacaggtcaaggagaagattcttgatgccgtgtataagaatgtgccctattcccagcggccgagggcagtggacatggacttggagtggcgccaaggccggatcgcccgggtcgtgctgcaagatgaggacatcaccaccaagattgagggtgactggaagcggctcaacacactgatgcattatcaggtgtcagacaggtcggtggtggctctggtccccaaacagacctcctcctacaacatccctgcctctgccagcatctcccggacgtccatcagcagatacggtgactcctccttcaggtatacgggcagccccgacagcctgcggtcccgggccccgatgatcaccccagacctggaaagtggggtcaaggtgtggcatctggtgaagaaccatgaccacggtgaccagaaggagggtgaccggggcagcaagatggtgtccgagatctacctgacccggctactggccaccaagggcaccctgcagaagtttgtggacgacttgtttgagaccttgttcagcactgtgcaccggggcagcgctctccccctggccatcaagtacatgtttgatttcctagatgagcaggcagacaggcacagcatccatgacacagatgtgcggcacacctggaaaagcaactgcctccctctgcgcttctgggtgaacgtgattaagaacccccagttcgtgtttgacatccacaagggcagcatcacggacgcctgcctctctgtggtggcccagaccttcatggactcttgttcaacgtcagagcaccggctgggcaaggactccccctccaacaagctgctctatgccaaggacatccccagctacaagagctgggtggagagatactacgcagacatcgccaagctcccagccatcagtgaccaggacatgaatgcctacctcgccgagcagtcccgcctgcacgccgtggagttcaacatgctgagtgccctcaatgagatctactcctatgtcagcaagtatagtgaggagctcatcggggccctagagcaggatgagcaggcacggcggcagcggctggcttataaggtggagcagctcattaatgccatgtccattgagagctgagaggaggagcctcgcattcctgggaagagggacctgtccaagctgtcacactgggagtctcagatggaaggacaagtgatggggatcaggccccagagcttgctgtcccctgagaccccatcctggggagaggggaggactcctctccctacgccagccaagtttcgtcatagccagttccagctgggagagacagtgggcgtcgtccatcctcagtgagaacaccagagaacccggggccgggagaaggtggttcttcaagccgagaggcacgagctggggacagttctgcctctgtgactgctgctttgcatgaaaactcatttgatgtatattggggaaataatgagaactttatttaatttttttaagaaaaagggaaaaaaacagaaataaaacaaaaagccgccctgttaatccaaattaaaaaaaaaaaaaaaaa

SEQ ID NO: 561 - DNA, 724 bp, Homo sapiens
actgaattcaacaattatttattgagtgtctattatgtgctagatactgagacacatcagagaacaaaaccaaaagccctgccctcgtcgggcttacagtctagcacttactgccagttaacctggaggctacctggaaccccgggcaagtcaccgcacctctgtgcctcggtcctcagctgcctaatgggagaataagcagacctggctcagacatgaatcatgtgcttggtgtactgcagatgccaaactgcatccccataacccaccacccagacagtagatagggctggaagttgatttttaatgatcaagtacaatggagggagggcagaggggctaagcctagctgtctggggtgctgtggtggtggtgggctggctacacaaactgttgctgctgctgctgcttcttggtggctgccttgctggcgaggtccttggccttctctgtagctgccagtgctgtctcctttgccttctccttggcttccttggctgtctcaacaagtgttttggaaggggcctcgccttgcagctttgccaagatatattcaaaacccttcatagtcttggtcacattgcttttgaaccaggcaagaccaaattcctggacagctctggagacaccaaataagctagaggagacccaggcttcccggcggatttcggtccggccactgttgtcagagttcacacagtaaacacatcgttcctccaccacc

SEQ ID NO: 562 - DNA, 472 bp, Homo sapiens
tttcggccggaaccgccatcttccagtaattcgccaaaatgacaaacacaaagggaaagaggagaggcacccgatatatgttctctaggccttttagaaaacatggagttgttcctttggccacatatatgcgaatctataagaaaggtgatattgtagacatcaagggaacgggtactgttcaaaaaggaatgccccacaagtgttaccatggcaaaactggaagagtctacaatgttacccagcatgctgttggcattgttgtaaacaaacaagttaagggcaagattcttgccaagagaattaatgtgcgtattgagcacattaagcattctaagagccgagatagcttcctgaaacgtgtgaaggaaaatgatcctccacccagagaagcacactttgtgagaaccaatgggaaggagcctgagctgctggaacctattccctatgaattcatggcataataggtgtt

SEQ ID NO: 563 - protein, 101 aa, Homo sapiens [sequence omitted]

SEQ ID NO: 564 - DNA, 552 bp, Homo sapiens
atgaagctcttatctttggtggctgtggtcgggtgtttgctggtgcccccagctgaagccaacaagagttctgaagatatccggtgcaaatgcatctgtccaccttatagaaacatcagtgggcacatttacaaccagaatgtatcccagaaggactgcaactgcctgcacgtggtggagcccatgccagtgcctggccatgacgtggaggcctactgcctgctgtgcgagtgcaggtacgaggagcgcagcaccaccaccatcaaggtcatcattgtcatctacctgtccgtggtgggtgccctgttgctctacatggccttcctgatgctggtggaccctctgatccgaaagccggatgcatatactgagcaactgcacaatgaggaggagaatgaggatgctcgctctatggcagcagctgctgcatccctcgggggaccccgagcaaacacagtcctggagcgtgtggaaggtgcccagcagcggtggaagctgcaggtgcaggagcagcggaagacagtcttcgatcggcacaagatgctcagctag

SEQ ID NO: 565 - protein, 183 aa, Homo sapiens
MKLLSLVAVVGCLLVPPAEANKSSEDIRCKCICPPYRNISGHIYNQNVSQKDCNCLHVVEPMPVPGHDVEAYCLLCECRYEERSTTTIKVIIVIYLSVVGALLLYMAFLMLVDPLIRKPDAYTEQLHNEEENEDARSMAAAAASLGGPRANTVLERVEGAQQRWKLQVQEQRKTVFDRHKMLS

SEQ ID NO: 566 - DNA, 1097 bp, Homo sapiens
acctgcactgacttttttctccttttggagggagagcagagaccatgtctgacatagaagaggtggtggaagagtacgaggaggaggagcaggaagaagcagctgttgaagagcaggaggaggcagcggaagaggatgctgaagcagaggctgagaccgaggagaccagggcagaagaagatgaagaagaagaggaagcaaaggaggctgaagatggcccaatggaggagtccaaaccaaagcccaggtcgttcatgcccaacttggtgcctcccaagatccccgatggagagagagtggactttgatgacatccaccggaagcgcatggagaaggacctgaatgagttgcaggcgctgatcgaggctcactttgagaacaggaagaaagaggaggaggagctcgtttctctcaaagacaggatcgagagacgtcgggcagagcgggccgagcagcagcgcatccggaatgagcgggagaaggagcggcagaaccgcctggctgaagagagggctcgacgagaggaggaggagaacaggaggaaggctgaggatgaggcccggaagaagaaggctttgtccaacatgatgcattttgggggttacatccagaagacagagcggaaaagtgggaagaggcagactgagcgggaaaagaagaagaagattctggctgagaggaggaaggtgctggccattgaccacctgaatgaagatcagctgagggagaaggccaaggagctgtggcagagcatctataacttggaggcagagaagttcgacctgcaggagaagttcaagcagcagaaatatgagatcaatgttctccgaaacaggatcaacgataaccagaaagtctccaagacccgcgggaaggctaaagtcaccgggcgctggaaatagagcctggcctccttcaccaaagatctgctcctcgctcgcacctgcctccggcctgcactcccccagttcccgggccctcctgggcaccccaggcagctcctgtttggaaatggggagctggcctaggtgggagccaccactcctgcctgcccccacacccactccacaccagtaataaaaagccaccacacactg

SEQ ID NO: 567 - DNA, 2559 bp, Homo sapiens
  unsure 55: unknown base
ccagccttgcccggcagaggactctggaggatgaggaggaacaggagcgcgcganggcggcggcaccgcaacctgagctccaccacggacgatgaggctcccaggctcagcagaatggagaccggcagcctctgcttctgagagactaccgagcgtggaagaagcagaggtgcccaagccactgcccccagcctccaaagatgaggacgaggacatccagagcatcctcagaacacggcaggagcggaggcagaggcggcaggtggtggaggctgcacaggcccccatccaggagaggctggaggcagaggaggggaggaacagcttgagccctgtgcaggccacacagaaacccctagtctccaagaaggaactggaaatcccacctcgccggagactgagtcgggaacagcggggcccctgcgctggaggaggagagcttggtgggcagggagccagaagagaggaagaaaggggttccagaaaagtccccagtcttggagaaatcctccatgccaaagaagacggcacctgaaaagagcctggtctccgataaaacctccatctctgagaaggtgctggcctcagagaagacatctctatcagagaagatagcagtgtcagagaaaagaaacagctcagagaagaagtctgttctagaaaaaaccagtgtctctgagaagtcgctggccccagggatggcactgggctcaggaaggaggctggtgtctgagaaagcttccatctttgagaaggcactggcctcagagaagagcccaactgcagatgctaagccggccccaaagaggccacagcctcagagcagcccctggcgcaggagccgccagcctctgggggaagcccagccaccaccaaggagcagagaggaagggccctccctgggaagaacctgccctctttggcagagcagggggcttcagaccctccgactgtggcctcccgcctcccacccgtcacactccaggtgaaaatccccagcaaggaggaagaggcagatatgtcctcacccacacagcgaacctacagcagctccctcaaacgctccagccccaggaccatctcctttcggatgaaacccaagaaagaaaactcggaaacaaccctaactcgcagtgccagcatgaagctcccagacaacacagtgaagttgggagagaagctggagagataccacacggccatacggagatcagaatctgtcaagtctcggggtctgccttgcactgagttattcgtggctcctgtgggtgtagccagcaagcgccacctctttgagaaggaactggcgggccagagccgagcagaaccagcctccagccggaaggagaacttgaggctctcaggggttgtgacatcaaggctcaacctgtggatcagcaggacccaggaatctggagatcaggacccccaggaggcacagaaagcatcatctgcaaccgagaggactcagtggggacagaaatctgactcctcgctggacgctgaggtgtgacaagccccgccaagacagacctgcaagtcttcgtctcaagggacctccctcatgccaggcccctgcctctcacagcagcaccctttcctctcattgtccctgttccctttttgcctgtggatctgtttggccagggtccctggggtcaggaatatttgcaagactcagccagctccttcccagcccagcctcttggggctgggactttctcaccctgcggcaggcacaacagatgctgggacccagtctctgcccaggtcacagcacaagtgcacatcagcactatggggcctatgtcctgcccagagacctctgctccttcctgctcacatccacagtcagggcacggcgcccctcaagaactccagagtcacctgtctcatcggctcccagcaagtgcctctttgtctatgatgtcccccttctctgaggcctggacccacccatctttgtccctggggcctgctcccagccactgaggcccgctctggccaggggagaaggagctgccgtgcgtcttccctgtgccccgtctccctgcttggttctcccctcccttccctggccggctgccatggccaggagctaagtgcctttttgtgtgcaaccacttaccctttctctgaaaaacctgttctcaggaaggatctgataaactcatttactctcaggtgtaagagactgatgagaccttagaagcgaattcctctctggaggccttgctttctagcagagtcacctgaagtgtgtgaggaggatcatcattttcctcatcccccctcttctcacattaaggtggtggcttgccactcagcagtcctagcttggtgactgggaactgccacatacagggccaggcctaccctccttccccacaagccccctccaacccccacccccatgctctggacctcatggctcctatgagcttggagcatggtgaaccatcagagaatctagaaccaaccaagctaggaacatcagcctggtgcctgttaaccccttaaagctgtggtttacaacttttcaaaaatttaaatcattag

SEQ ID NO: 568 - DNA, 1704 bp, Homo sapiens
attcaaggcctgggggagctgcggttccgagaagcggcagacggcagccagaaggcttgggctgttgagtaagcagccccctctcagtcccggccctccccgccccgcgccctgcgcctccagtgagtgactgagcccccgctgcggccccgcccccggggccctgccggagctggtgcgcggcgcggaggggagggccggccagggtaggaatgcgctgcgggcgggcggcgcaggaggcgagcggcggaacatgtaagggcacatcccgcgagctgccgcccagcgcgcagacagagcccaggggagcaagagaacgggcgggcggtggggctcacggcctagggaggcgcggaggcatctggcagaggcgggtcgggctgggccagctggggtagagcggaggagcgggtgccggctgaagcggggcggtgggcgcggagcgcgctgggggcaccgacaccacctcaccggcagccgggtgctgagggccgcggtgtgggtgcgcggagcagtcagggcgcaggtgggcagcgcgcacggcctgccagcccggggcgccagaatcctgcgctgcggggccgagaggggcgccgcgcccgccgcagcctggagctttccgcgaacctcggggcgcccatgacggcggcggcgacggctaccgtgctcaaggagggcgtgctggagaagcgcagcggcgggctgctgcagctgtggaagcggaagcgctgcgtcctcaccgaacgcgggctgcagctcttcgaggccaagggcacgggcggccggcccaaggagctcagcttcgcccgcatcaaggccgtggagtgcgtggagagcaccgggcgccacatctacttcacgctggtgaccgaagggggcggcgagatcgacttccgctgccccctggaagatcccggctggaacgcccagatcaccctaggcctggtcaagttcaagaaccagcaggccatccagacagtgcgggcccggcagagcctcgggaccgggaccctcgtgtcctaaaccaccgggcgcaccatctttccttcatgctacccaccacctcagtgctgaggtcaaggcagcttcgttgttccctctggcttgtgggggcacggctgtgctccatgtggcaaggtggaaggaatggacgagccctgggaggagggcagaaggctacgcagggctgaggatgaagatgcagcccctggatggtcccagactctcaggacatgcccagctcaggggcttcgagccacaggcctggcctcatatggcatgagggggagctggcataggagccccctccctgctgtggtcctgccctctgtcctgcagactgctcttagccccctggctttgtgccaggcctggaggagggcagtcccccatggggtgccgagccaacgcctcaggaatcaggaggccagcctggtaccaaaaggagtacccagggcctggtacccaggcccactccagaatggcctctggactcaccttgagaagggggagctgctgggcctaaagcccactcctgggggtctcctgctgcttaggtccttttgggacccccacccatccaggccctttctttgcacacttcttcccccacctctacgcatcttccccccactgcggtgttcggcctgaaggtggtgggggtgagggggggtttggccattagcatttcatgtctttccccaa

SEQ ID NO: 569 - DNA, 3126 bp, Homo sapiens
atggcggcggcggcggcagctggtgcggcctccgggctgccgggtccagtggcacaaggattaaaggaagcgttagtggatacgctcaccgggatcctatccccagtacaggaggtgcgggcggctgctgaagaacagattaaggtgctggaggtgacggaggaatttggtgttcacttggcagaactgactgtagatccccagggggcactggcaatccgtcagctggcatcagtcatcttgaaacaatatgtggagactcactggtgtgcccaatcagagaaatttaggcctcctgaaactacagaaagggcaaaaattgttatccgggagctattgcctaatgggttgagagaatcgataagcaaagtgcgctccagtgtggcctatgcagtgtcagccattgcccactgggactggcctgaagcttggccccaactcttcaacctgctcatggagatgttggtgagcggagacttaaatgccgtccatggagccatgcgtgtgctgacagaattcactcgtgaagttacagacacacagatgccacttgttgctcctgtcattctcccagagatgtataagatcttcaccatggctgaggtgtatggtattcgaacccgttcccgagccgtggagatttttaccacttgtgcccatatgatctgtaacatggaggagctggaaaagggtgcagccaaagtcctgatctttcccgtggtacagcagttcacagaggcctttgttcaggccctccagataccagatggccccacatctgacagtgggtttaagatggaggtcctaaaggcagtgacagccctagtgaaaaacttcccaaagcacatggtgtcctccatgcagcagattctgcctattgtttggaacaccctaaccgagagtgcagctttttatgtgaggacagaagtaaattacacagaagaagtagaagatcctgtggattctgatggtgaagtcctgggctttgaaaatctcgtctttagcatttttgaatttgtccatgctctactagaaaatagcaaattcaaaagcactgttaagaaagccttgcctgaattgatttattatattatcctgtacatgcaaatcactgaggagcagattaaagtatggacagccaacccccaacaatttgtagaagatgaagatgatgatacattctcctatactgttagaatagcagctcaagacttgttgctggctgtggccacagatttccagaatgaaagtgcagcagccctggctgctgcagccactcgacatttacaagaagctgagcaaaccaaaaacagtggcactgagcactggtggaagatccatgaggcatgcatgcttgccctaggctcagtgaaggccatcatcactgacagtgtgaaaaatggcaggattcattttgacatgcatgggttcctgaccaatgtcatccttgcagacctcaacctctcagtgtctcctttcctcttgggccgggcactttgggctgccagtcggttcactgttgctatgtcccctgaactgatccagcagttcctacaggcaacagttagtggtcttcacgagacacagcccccatcagttcgaatttctgcagtgagagccatctggggttattgtgaccaactgaaagtctcagagagtacccacgtgctccagcccttcctccccagcatccttgatggcttaattcacctagcagcccagttcagctcagaggtcctcaacctggtgatggagaccctgtgcatcgtttgtacagtagaccccgaattcacagcaagcatggaaagcaaaatctgccccttcaccatcgccattttcctaaagtacagtaatgatcccgtcgtcgcctcactggctcaggacatcttcaaggagctgtcccagattgaagcctgtcagggcccaatgcaaatgaggctgattcccactctggtcagcataatgcaggccccagcagacaagattcctgcagggctttgtgcgacagccattgatatcctgacaacagtagtacgaaatacaaagcctcccctttcccagcttctcatctgccaagctttccctgctgtggcacagtgtacccttcacacagatgacaatgccaccatgcagaatggcggagagtgcttgcgggcctatgtgtcagtgaccctggaacaagtagcccagtggcatgatgagcagggccacaatggactgtggtatgtgatgcaagtggtgagccagctcctggacccccgcacctcagagttcactgcggcctttgtgggccgccttgtttccaccctcatctccaaggcagggcgggaactcggggagaatctagaccagattcttcgtgccatcctcagtaagatgcagcaggcagagacgctcagtgtcatgcagtccctgatcatggtgttcgctcatctggtgcacactcagctagaacctctcttggagttcctgtgtagcctcccaggacctactggcaaacctgctctagagtttgtgatggctgagtggacaagccgacagcacctgttctatggacagtatgaaggcaaagtcagctctgtggcactctgtaagctgctccagcatggcatcaatgcagatgacaaacggctacaggatatccgtgtgaagggagaggagatctacagcatggatgagggcatccgcacccgctctaagtcagccaaaaacccagaacgctggacaaacattcctttgctggtcaagatcctaaagctgatcatcaacgagctctccaacgtcatggaggctaatgccgctcgccaggccactcctgcagagtggagtcaagatgactccaatgatatgtgggaggaccaggaggaggaagaggaggaggaggaggatggtttagctggccaacttttatctgacattcttgctacaagtaaatatgaggaggattactacgaggatgatgaggaagatgaccctgatgccctgaaggatcctctctatcagattgatctgcaggcatatctcacagatttcctctgccagtttgctcagcagccctgctacataatgttttcaggccaccttaatgacaatgagaggcgagttctacagaccatcggcatctaa

SEQ ID NO: 570 - protein, 1041 aa, Homo sapiens
MAAAAAAGAASGLPGPVAQGLKEALVDTLTGILSPVQEVRAAAEEQIKVLEVTEEFGVHLAELTVDPQGALAIRQLASVILKQYVETHWCAQSEKFRPPETTERAKIVIRELLPNGLRESISKVRSSVAYAVSAIAHWDWPEAWPQLFNLLMEMLVSGDLNAVHGAMRVLTEFTREVTDTQMPLVAPVILPEMYKIFTMAEVYGIRTRSRAVEIFTTCAHMICNMEELEKGAAKVLIFPVVQQFTEAFVQALQIPDGPTSDSGFKMEVLKAVTALVKNFPKHMVSSMQQILPIVWNTLTESAAFYVRTEVNYTEEVEDPVDSDGEVLGFENLVFSIFEFVHALLENSKFKSTVKKALPELIYYIILYMQITEEQIKVWTANPQQFVEDEDDDTFSYTVRIAAQDLLLAVATDFQNESAAALAAAATRHLQEAEQTKNSGTEHWWKIHEACMLALGSVKAIITDSVKNGRIHFDMHGFLTNVILADLNLSVSPFLLGRALWAASRFTVAMSPELIQQFLQATVSGLHETQPPSVRISAVRAIWGYCDQLKVSESTHVLQPFLPSILDGLIHLAAQFSSEVLNLVMETLCIVCTVDPEFTASMESKICPFTIAIFLKYSNDPVVASLAQDIFKELSQIEACQGPMQMRLIPTLVSIMQAPADKIPAGLCATAIDILTTVVRNTKPPLSQLLICQAFPAVAQCTLHTDDNATMQNGGECLRAYVSVTLEQVAQWHDEQGHNGLWYVMQVVSQLLDPRTSEFTAAFVGRLVSTLISKAGRELGENLDQILRAILSKMQQAETLSVMQSLIMVFAHLVHTQLEPLLEFLCSLPGPTGKPALEFVMAEWTSRQHLFYGQYEGKVSSVALCKLLQHGINADDKRLQDIRVKGEEIYSMDEGIRTRSKSAKNPERWTNIPLLVKILKLIINELSNVMEANAARQATPAEWSQDDSNDMWEDQEEEEEEEEDGLAGQLLSDILATSKYEEDYYEDDEEDDPDALKDPLYQIDLQAYLTDFLCQFAQQPCYIMFSGHLNDNERRVLQTIGI

SEQ ID NO: 571 - DNA, 1645 bp, Homo sapiens
agtcaagatggaggagtacgcgcgagagccttgcccatggcgaattgtggatgactgtggtggggcctttacgatgggtaccattggtggtggtatctttcaagcaatcaaaggttttcgcaattctccagtgggagtaaaccacagactacgagggagtttgacagctattaaaaccagggctccacagttaggaggtagctttgcagtttggggagggctgttttccatgattgactgtagtatggttcaagtcagaggaaaggaagatccctggaactccatcacaagtggtgccttaacgggagccatactggcagcaagaaatggaccagtggccatggttgggtcagccgcaatgggtggcattctcctagctttaattgaaggagctggtatcttgttgacaagatttgcctctgcacagtttcccaatggtcctcagtttgcagaagacccctcccagttgccttcaactcagttaccttcctcaccttttggagactatcgacaatatcagtaggacttctttcctaggatttctttaacagaacgagttgtggttcgagaaggatttcagaagatcaagttacagtctgtttttaaaaccataggtgggacagctatggccaataggctataaagagacatttagcacttttttctatttaaaggaacaagcggggaagggtgctaaaagataatacgtttatttattcacacttgaattgcatttgtgatcaaaataaatgtttaaatcgctaaaggaaaatacagtaagtgcttgaaagatgaaggaccaaaaggccaaaaaacagtgaaatatgatcatcatctcttgcggacttctctgcctggttttgtgtgttctgttattcaaacaataaaaagctggtggaacttactctttcttttaagataagttgtagacttcgatgtttcatgctcatgtacttcaaataatgcatgttttatagttagtccctcatcacttgaagtgacttctgagaattatgcagagtcaacatggatcatttcacagtgagatgctttatggattgaaggatatggtaaaatgtttatagtttactttgaaagtaaaatatactatgtcttggttttgaggatattggatacaaaactctcttcctttagggctactgagtcttgattcctgatcatcagaaatttcaccagaaacaacttgcttccaatatacccaattctatatgaagaattcatggagagtgtactggcactggaagagtttagtgtttcttgtatgcttgaaaataaagtatgtactgttttgaatgtgttccaagtcctctgcataaacgatgtattttggggtctggttgggcctggaaaatggatgagcacttcagaacaggtcattttcctgatattggaagtgacatgtggccctataggaggcatgatgttagttaattacacatttgcctacatctgtgggaaatggagaacaaagccatgtgggtactgtaaacacacgtttatcttttggcccaatgccatacatatggtaggcatttaattactgattgtgtttggataatttgggaattttcgactgtggtaaaatatacataaaataatacttattaaaaaaaaaaaaaaaaaa

SEQ ID NO: 572 - protein, 171 aa, Homo sapiens
MEEYAREPCPWRIVDDCGGAFTMGTIGGGIFQAIKGFRNSPVGVNHRLRGSLTAIKTRAPQLGGSFAVWGGLFSMIDCSMVQVRGKEDPWNSITSGALTGAILAARNGPVAMVGSAAMGGILLALIEGAGILLTRFASAQFPNGPQFAEDPSQLPSTQLPSSPFGDYRQYQ

SEQ ID NO: 573 - DNA, 2382 bp, Homo sapiens
ggccatggcgagcggcgagcattcccccggcagcggcgcggcccggcggccgctgcactccgcgcaggctgtggacgtggcctcggcctccaacttccgggcctttgagctgctgcacttgcacctggacctgcgggctgagttcgggcctccagggcccggcgcagggagccgggggctgagcggcaccgcggtcctggacctgcgctgcctggagcccgagggcgccgccgagctgcggctggactcgcacccgtgcctggaggtgacggcggcggcgctgcggcgggagcggcccggctcggaggagccgcctgcggagcccgtgagcttctacacgcagcccttctcgcactatggccaggccctgtgcgtgtccttcccgcagccctgccgcgccgccgagcgcctccaggtgctgctcacctaccgcgtcggggagggacccggggtttgctggttggctcccgagcagacagcaggaaagaagaagcccttcgtgtacacccagggccaggctgtcctaaaccgggccttcttcccttgcttcgacacgcctgctgttaaatacaagtattcagctcttattgaggtcccagatggcttcacagctgtgatgagtgctagcacctgggagaagagaggtccaaataagttcttcttccagatgtgtcagcccatcccctcctatctgatagctttggccatcggagatctggtttcggctgaagttggacccaggagccgggtgtgggctgagccctgcctgattgatgctgccaaggaggagtacaacggggtgatagaagaatttttggcaacaggagagaagctttttggaccttatgtttggggaaggtatgacttgctcttcatgccaccgtcctttccatttggaggaatggagaacccttgtctgacctttgtcaccccctgcctgctagctggggaccgctccttggcagatgtcatcatccatgagatctcccacagttggtttgggaacctggtcaccaacgccaactggggtgaattctggctcaatgaaggtttcaccatgtacgcccagaggaggatctccaccatcctctttggcgctgcgtacacctgcttggaggctgcaacggggcgggctctgctgcgtcagcacatggacatcactggagaggaaaacccactcaacaagctccgcgtgaagattgaaccaggcgttgacccggacgacacctataatgagaccccctacgagaaaggtttctgctttgtttcatacctggcccacttggtgggtgatcaggatcagtttgacagttttctcaaggcctatgtgcatgaattcaaattccgaagcatcttagccgatgactttctggacttctacttggaatatttccctgagcttaagaaaaagagagtggatatcattccaggttttgagtttgatcgatggctgaatacccccggctggcccccgtacctccctgatctctcccctggggactcactcatgaagcctgctgaagagctagcccaactgtgggcagccgaggagctggacatgaaggccattgaagccgtggccatctctccctggaagacctaccagctggtctacttcctggataagatcctccagaaatcccctctccctcctgggaatgtgaaaaaacttggagacacatacccaagtatctcaaatgcccggaatgcagagctccggctgcgatggggccaaatcgtccttaagaacgaccaccaggaagatttctggaaagtgaaggagttcctgcataaccaggggaagcagaagtatacacttccgctgtaccacgcaatgatgggtggcagtgaggtggcccagaccctcgccaaggagacttttgcatccaccgcctcccagctccacagcaatgttgtcaactatgtccagcagatcgtggcacccaagggcagttagaggctcgtgtgcatggcccctgcctcttcaggctctccaggctttcagaataattgtttgttcccaaattcctgttccctgatcaacttcctggagtttatatcccctcaggataatctattctctagcttaggtatctgtgactcttgggcctctgctctggtgggaacttacttctctatagcccactgagccccgagacagagaacctgcccacagctctccccgctacaggctgcaggcactgcagggcagcgggtattctcctccccacctaagtctctgggaagaagtggagaggactgatgctcttcttttttctctttctgtcctttttcttgctgattttatgcaaagggctggcattctgattgttcttttttcaggtttaatccttattttaataaagttttcaagcaaaaatt

SEQ ID NO: 574 - protein, 650 aa, Homo sapiens
MASGEHSPGSGAARRPLHSAQAVDVASASNFRAFELLHLHLDLRAEFGPPGPGAGSRGLSGTAVLDLRCLEPEGAAELRLDSHPCLEVTAAALRRERPGSEEPPAEPVSFYTQPFSHYGQALCVSFPQPCRAAERLQVLLTYRVGEGPGVCWLAPEQTAGKKKPFVYTQGQAVLNRAFFPCFDTPAVKYKYSALIEVPDGFTAVMSASTWEKRGPNKFFFQMCQPIPSYLIALAIGDLVSAEVGPRSRVWAEPCLIDAAKEEYNGVIEEFLATGEKLFGPYVWGRYDLLFMPPSFPFGGMENPCLTFVTPCLLAGDRSLADVIIHEISHSWFGNLVTNANWGEFWLNEGFTMYAQRRISTILFGAAYTCLEAATGRALLRQHMDITGEENPLNKLRVKIEPGVDPDDTYNETPYEKGFCFVSYLAHLVGDQDQFDSFLKAYVHEFKFRSILADDFLDFYLEYFPELKKKRVDIIPGFEFDRWLNTPGWPPYLPDLSPGDSLMKPAEELAQLWAAEELDMKAIEAVAISPWKTYQLVYFLDKILQKSPLPPGNVKKLGDTYPSISNARNAELRLRWGQIVLKNDHQEDFWKVKEFLHNQGKQKYTLPLYHAMMGGSEVAQTLAKETFASTASQLHSNVVNYVQQIVAPKGS

SEQ ID NO: 575 - DNA, 2556 bp, Homo sapiens
aggctctatttagagccgggtaggggagcgcagcggccagatacctcagcgctacctggcggaactggatttctctcccgcctgccggcctgcctgccacagccggactccgccactccggtaggattccccgcctgtcattccctagcccagctcttgggaaactgcagaggggtccagaggatttgcagttctgaacctgcacactccagtctaggatctccgagcaagagcgtagcctcatggctgcaacctgtgagattagcaacatttttagcaactacttcagtgcgatgtacagctcggaggactccaccctggcctctgttccccctgctgccacctttggggccgatgacttggtactgaccctgagcaacccccagatgtcattggagggtacagagaaggccagctggttgggggaacagccccagttctggtcgaagacgcaggttctggactggatcagctaccaagtggagaagaacaagtacgacgcaagcgccattgacttctcacgatgtgacatggatggcgccaccctctgcaattgtgcccttgaggagctgcgtctggtctttgggcctctgggggaccaactccatgcccagctgcgagacctcacttccagctcttctgatgagctcagttggatcattgagctgctggagaaggatggcatggccttccaggaggccctagacccagggccctttgaccagggcagcccctttgcccaggagctgctggacgacggtcagcaagccagcccctaccaccccggcagctgtggcgcaggagccccctcccccggcagctctgacgtctccaccgcagggactggtgcttctcggagctcccactcctcagactccggtggaagtgacgtggacctggatcccactgatggcaagctcttccccagcgatggttttcgtgactgcaagaagggggatcccaagcacgggaagcggaaacgaggccggccccgaaagctgagcaaagagtactgggactgtctcgagggcaagaagagcaagcacgcgcccagaggcacccacctgtgggagttcatccgggacatcctcatccacccggagctcaacgagggcctcatgaagtgggagaatcggcatgaaggcgtcttcaagttcctgcgctccgaggctgtggcccaactatggggccaaaagaaaaagaacagcaacatgacctacgagaagctgagccgggccatgaggtactactacaaacgggagatcctggaacgggtggatggccggcgactcgtctacaagtttggcaaaaactcaagcggctggaaggaggaagaggttctccagagtcggaactgagggttggaactatacccgggaccaaactcacggaccactcgaggcctgcaaaccttcctgggaggacaggcaggccagatggcccctccactggggaatgctcccagctgtgctgtggagagaagctgatgttttggtgtattgtcagccatcgtcctgggactcggagactatggcctcgcctccccaccctcctcttggaattacaagccctggggtttgaagctgactttatagctgcaagtgtatctccttttatctggtgcctcctcaaacccagtctcagacactaaatgcagacaacaccttcctcctgcagacacctggactgagccaaggaggcctggggaggccctaggggagcaccgtgatggagaggacagagcaggggctccagcaccttctttctggactggcgttcacctccctgctcagtgcttgggctccacgggcaggggtcagagcactccctaatttatgtgctatataaatatgtcagatgtacatagagatctattttttctaaaacattcccctccccactcctctcccacagagtgctggactgttccaggccctccagtgggctgatgctgggacccttaggatggggctcccagctcctttctcctgtgaatggaggcagagacctccaataaagtgccttctgggctttttctaacctttgtcttagctacctgtgtactgaaatttgggcctttggatcgaatatggtcaagaggttggaggggaggaaaatgaaggtctaccaggctgagggtgagggcaaaggctgacgaagaggggagttacagatttcctgtagcaggtgtgggcttacagacacatggactgggctgggaggcgagcaaaggaagcagctgagactgttggagaacgcttacaagacttcatgcaagcaaggacatgaactcagaacactgaggtcagaagcatcctgctgtcatgacaccgctcgagtgaccttgaccttgaccaagtctgtcctgtttaggactgatttttcctattaggctagggtttggacctgatgttctcaagatgtctagaattgcatggctggccttgtggaatagatggttttgcattccagccaagtgtgctgtaaactgtatatctgtaatatgaatcccagcttttgagtctgacaaaatcagagttaggatcttgtaaagga

SEQ ID NO: 576 - DNA, 1638 bp, Homo sapiens
cgggtacagggggcccaagagctgggctggctgtctcctgctcatccagccatgcggtggctgtggcccctggctgtctctcttgctgtgattttggctgtggggctaagcagggtctctgggggtgcccccctgcacctgggcaggcacagagccgagacccaggagcagcagagccgatccaagaggggcaccgaggatgaggaggccaagggcgtgcagcagtatgtgcctgaggagtgggcggagtacccccggcccattcaccctgctggcctgcagccaaccaagcccttggtggccaccagccctaaccccgacaaggatgggggcaccccagacagtgggcaggaactgaggggcaatctgacaggggcaccagggcagaggctacagatccagaaccccctgtatccggtgaccgagagctcctacagtgcctatgccatcatgcttctggcgctggtggtgtttgcggtgggcattgtgggcaacctgtcggtcatgtgcatcgtgtggcacagctactacctgaagagcgcctggaactccatccttgccagcctggccctctgggattttctggtcctctttttctgcctccctattgtcatcttcaacgagatcaccaagcagaggctactgggtgacgtttcttgtcgtgccgtgcccttcatggaggtctcctctctgggagtcacgactttcagcctctgtgccctgggcattgaccgcttccacgtggccaccagcaccctgcccaaggtgaggcccatcgagcggtgccaatccatcctggccaagttggctgtcatctgggtgggctccatgacgctggctgtgcctgagctcctgctgtggcagctggcacaggagcctgcccccaccatgggcaccctggactcatgcatcatgaaaccctcagccagcctgcccgagtccctgtattcactggtgatgacctaccagaacgcccgcatgtggtggtactttggctgctacttctgcctgcccatcctcttcacagtcacctgccagctggtgacatggcgggtgcgaggccctccagggaggaagtcagagtgcagggccagcaagcacgagcagtgtgagagccagctcaacagcaccgtggtgggcctgaccgtggtctacgccttctgcaccctcccagagaacgtctgcaacatcgtggtggcctacctctccaccgagctgacccgccagaccctggacctcctgggcctcatcaaccagttctccaccttcttcaagggcgccatcaccccagtgctgctcctttgcatctgcaggccgctgggccaggccttcctggactgctgctgctgctgctgctgtgaggagtgcggcggggcttcggaggcctctgctgccaatgggtcggacaacaagctcaagaccgaggtgtcctcttccatctacttccacaagcccagggagtcacccccactcctgcccctgggcacaccttgctgaggccccagtaggggtggggagggagggagaggccgccacccccgccggtgtctgctgttctttccccataggtcttgctttgttgcctgtcttgctgtctagggatggacttggttcctcttgtcaaggtttgggaatccg

SEQ ID NO: 577 - protein, 481 aa, Homo sapiens
MRWLWPLAVSLAVILAVGLSRVSGGAPLHLGRHRAETQEQQSRSKRGTEDEEAKGVQQYVPEEWAEYPRPIHPAGLQPTKPLVATSPNPDKDGGTPDSGQELRGNLTGAPGQRLQIQNPLYPVTESSYSAYAIMLLALVVFAVGIVGNLSVMCIVWHSYYLKSAWNSILASLALWDFLVLFFCLPIVIFNEITKQRLLGDVSCRAVPFMEVSSLGVTTFSLCALGIDRFHVATSTLPKVRPIERCQSILAKLAVIWVGSMTLAVPELLLWQLAQEPAPTMGTLDSCIMKPSASLPESLYSLVMTYQNARMWWYFGCYFCLPILFTVTCQLVTWRVRGPPGRKSECRASKHEQCESQLNSTVVGLTVVYAFCTLPENVCNIVVAYLSTELTRQTLDLLGLINQFSTFFKGAITPVLLLCICRPLGQAFLDCCCCCCCEECGGASEASAANGSDNKLKTEVSSSIYFHKPRESPPLLPLGTPC

SEQ ID NO: 578 - DNA, 928 bp, Homo sapiens
gcgcgcagcgctggtaccccgttggtccgcgcgttgctgcgttgtgaggggtgtcagctcagtgcatcccaggcagctcttagtgtggagcagtgaactgtgtgtggttccttctacttggggatcatgcagagagcttcacgtctgaagagagagctgcacatgttagccacagagccacccccaggcatcacatgttggcaagataaagaccaaatggatgacctgcgagctcaaatattaggtggagccaacacaccttatgagaaaggtgtttttaagctagaagttatcattcctgagaggtacccatttgaacctcctcagatccgatttctcactccaatttatcatccaaacattgattctgctggaaggatttgtctggatgttctcaaattgccaccaaaaggtgcttggagaccatccctcaacatcgcaactgtgttgacctctattcagctgctcatgtcagaacccaaccctgatgacccgctcatggctgacatatcctcagaatttaaatataataagccagccttcctcaagaatgccagacagtggacagagaagcatgcaagacagaaacaaaaggctgatgaggaagagatgcttgataatctaccagaggctggtgactccagagtacacaactcaacacagaaaaggaaggccagtcagctagtaggcatagaaaagaaatttcatcctgatgtttaggggacttgtcctggttcatcttagttaatgtgttctttgccaaggtgatctaagttgcctaccttgaatttttttttaaatatatttgatgacataatttttgtgtagtttatttatcttgtacatatgtattttgaaatcttttaaacctgaaaaataaatagtcatttaatgttgaaaaaaaaaaaaaaaaaaaaaaaaaaaaaaa

SEQ ID NO: 579 - protein, 197 aa, Homo sapiens
MQRASRLKRELHMLATEPPPGITCWQDKDQMDDLRAQILGGANTPYEKGVFKLEVIIPERYPFEPPQIRFLTPIYHPNIDSAGRICLDVLKLPPKGAWRPSLNIATVLTSIQLLMSEPNPDDPLMADISSEFKYNKPAFLKNARQWTEKHARQKQKADEEEMLDNLPEAGDSRVHNSTQKRKASQLVGIEKKFHPDV

SEQ ID NO: 580 - DNA, 4098 bp, Homo sapiens
atgctgcaaatgccgaagttaaatgaaatacctccggggagggcaggccgcagggaggctcggggggagggaagatggcctggacaaacaggtcctgaagctgcgaggctggagtggagggcgcaggggcaggcgggcggcgccagagctccatgggacagctggggaagctccaggctacctacacaacctggcccaggctggtcacggtgtcccccctccctgctctgtgccctctccttccagaaatccaccatggagagtaaggatgaggtcagcgacaccgacagtggcatcatcctgcagtctggccccgacagcccggtctccccaatgaaggagctgacccatgcagtgcacaagcagcagagggccctggaagcgaggctggaggcctgcctggaggagctgaggagactctgccttcgggaagcggagctgacgggcaccttgccagcggagtatcccctcaaaccaggggaaaaggcccccaaggttcgccgcaggatcggagcggcttacaaactggatgactgggccttgcacagagaggaccccctaagcagcctggagcgccagctggccctgcagctgcagatcacagaggcagcccgtcggctgtgcctggaggagaacctcagcaggcaggctcggcggcagcggaagcactccatgctgcaggaggagaagaagctgcaggagctccagcgctgcctggtcgagcggcggcgcaatagcgagccacctccggctgctgctctccccctgggccgagagctcagtgcctctgatgacagctccctgtcagatgggctcctcctggaggaagaggaatcccaagtgccaaaacctcctccagagtctccagccccaccttctcggcctctcccaccccaaacccttgagggtctgcagccaacaggacctgaggctgggagcccagaacgggctccagtccagaacagcccctggaaggaaaccagcctggaccacccctatgagaagcccaggaagtcttctgagccctggagcgagtccagcagcccagccaccacaccacaggatgggcccagtgcctccagcctgtggcttctggagcctgcctcctaccacgtggttcccatccgtggtgttcctggccagtggcagggccgcaccagtgccccagccacccctgagatacaggggaggaggggccagtcgcagtctctgagggtggattccttccgggcgggtcctgagggccgaggtcgcagcgcctttccccgccgccgccccactcactacacggtgacagtgccagattcctgctttcccgcgaccaagcccccgctgccccacgccgcctgccactcctgctcagaagacagtggctctgacgtctccagcatctcccaccccacttcgccgggcagcagcagccccgacatctcctttctgcagcctctctcccctcccaagacccatcgtcaccgcggggcctgggtcccagccggcagcagagagctggtcgcccaccaccccaagctactgctgccgcctggctatttcccggcggggcggtacgtggtggtggctgagagccccctgccgcctggcgagtgggagctgcgccgcgcagccccgggccctgcttacgaggaggagggcactcccctgcgctaccagcgtctggtgccctcccgcagccgcatcgtgcggacgccctccctgaaggacagcccggcaggccgggggctcagcaaggccgccgtgtccgaggagctcaagtggtggcacgagcgtgcacgcctccggagcacccgcccccactcactggaccgccaaggagctttccgggtcaggagcctgccccttgggagagagggcttcggacgagccctgggaccccgggcacaggtgcccacagtttgtgtgctgcggagatcgcctgatggggcccctgtgcaagtctttgtacctgaaaaaggagagatcatcagccaggtgtaactctgcgccccacgctggaaaaaactgtttcatagaggggctgggctgagacccccccacccctgagtgcctctttcagctcccccatccccatcgcaggccgatgacctggagctgagaccttttattattttttttttacacgacttttttcagaagccctgacctaaggatttatatatgtggattgtcctcaatacccctgtgatatgattatgttttatcccccagagtttggcctactggacttaaggccttgcctgtctgactgacagcctctatctccttatataagacaagtggcaggggacgagtgaagcagagtgagccaccttgggagttctccaacgctctgtgctctggttctaagaaattccctggggaactgcccctggccctcctgtcccactattgctggaggctggacatggtacatactcatgcacatgactctcccccatttcccaggtctctgggtaccccagcctgggctgggggagaatctcttcccccttttctaatgtgctctgtgatgcacacaccaagtggtaggtcaaaggtcagtatatcccggtggtgtattgtcttgctagaccctgctattttcctgaccccctaaatcctctttagggacccagtcactataccctgtctatgccctgtgggctcccagacccctgagctttgagtcagtggcatcacagtttgtagcctcagggggtctggctgggggctggtccatgcttgtggttagtggacagcagccaccctttgacagctacctctgggcatctcaagggcttgcagccccactgctccttctaacattttgtttgtttttgagatggagtctcgctctgtcgcccaggctggaatgctgtagcaagatttcggctcactgcaacccccgtctcccgggttcaagcgaatctcctgcctcagccttccgagtagctgggattacaggcaagcaccaccatgcctgctaattttttatttttagtagagatggggtttcatcatgttggccaggctggtctcgaactcctgacctcaagtgatccacctgccttggcctttcaaagtgctgggattacaggcatgagccaccgcacctggcccttctaacgttttttcatcatagtcccaaaaaccaatactttacaagtggttttggaaaggcaccacttttgtggcatgttctggttgggagagggagtcacagttcctactccccccaccagctatgcttctgctctgagaaggtggttatttatacaaacatggacatactcactcccaagggctgatgagatgctgaattttctttgggggcattcattaattgtcccagctgcagcgactggagcaagtctggaagctgcctgtgctaagaccacccagctgtccctgggttctcatcctagggccttctttgcttccaggtcaggggacctgcttcaatgagaaagcaactgaattgaggctaggagaggtagggagagctgagttctgacttcacctgtgcagaactctctgcccccatgttacctggactggaacagactgtgaatatagcagaaggttccaagaactctggtgtctgacctagaagaggcacagttctctctactggaaagaaaacgatgtagccgattgcacaagggtgccaagggaagacccaggatggcccatcaaaggaacctgggggaggatgcaggaggctgaagggatgcacctggcatttctctcactgtgctcttaccgcatcagcaacccccaacttttgggcctactctgccccccatgcgtgaataccctgcttggatgctgtgcttttccggtttgtctctaagcccctttctccagggcatgttggtttccctggcctctcagtgtcctaactggagcccagagtgccttgttctgagccaggagacggctgagcactggccctccacacctaagcgtcctttacattaacttattggtcttgtataacacctggtgccattgccaagtggctgtgtcctcagctacagagctggaattgtgtggggtttagtgctaaatacttcaataaagtctgttttttgtgattggctg

SEQ ID NO: 581 - DNA, 3466 bp, Homo sapiens
tcccgggccgggagcccagcaggccgggagcggctgaggccacaccccgcgggccgggccgcttccctccggtgaatcatcgctcgcagcggcggcgcccgcagtggccgcagcagcgcgccgggccctggccgcgccccagccgagcgcagcgcggagtcgccccgacctttctctgcgcagtacggccgccgggaccgcagcatggcgggcatcgcggccaagctggcgaaggaccgggaggcggccgaggggctgggctcccacgacagggccatcaagtacctcaaccaggactacgaggcgctgcggaacgagtgcctggaggccgggacgctcttccaggacccgtccttcccggccatcccctcggccctgggcttcaaggagttggggccctactccagcaaaacccggggcatcgagtggaagcgccccacggagatctgcgctgacccccagtttatcattggaggagccacccgcacagacatctgccaaggagccctgggtgactgctggctgctggcagccattgcctccctcaccttgaatgaagaaatcctggctcgagtcgtccccctaaaccagagcttccaggaaaactatgcagggatctttcacttccagttctggcaatacggcgagtgggtggaggtggtggtggatgacaggctgcccaccaaggacggggagctgctctttgtgcattcagccgaagggagcgagttctggagcgccctgctggagaaggcatacgccaagatcaacggatgctatgaagcgctatcagggggtgccaccactgagggcttcgaagacttcaccggaggcattgctgagtggtatgagttgaagaagccccctcccaacctgttcaagatcatccagaaagctctgcaaaaaggctctctccttggctgctccatcgacatcaccagcgccgcggactcggaggccatcacgtttcagaagctggtgaaggggcacgcgtactcggtcaccggagccgaggaggttgaaagtaacggaagcctacagaaactgatccgcatccgaaatccctggggagaagtggagtggacagggcggtggaatgacaactgcccaagctggaacactatagacccagaggagagggaaaggctgaccagacggcatgaagatggagaattctggatgtctttcagtgacttcctgaggcactattcccgcctggagatctgtaacctgaccccagacactctcaccagcgatacctacaagaagtggaaactcaccaaaatggatgggaactggaggcggggctccaccgcgggaggttgcaggaactacccgaacacattctggatgaaccctcagtacctgatcaagctggaggaggaggatgaggacgaggaggatggggagagcggctgcaccttcctggtggggctcattcagaagcaccgacggcggcagaggaagatgggcgaggacatgcacaccatcggctttggcatctatgaggttccagaggagttaagtgggcagaccaacatccacctcagcaaaaacttcttcctgacgaatcgcgccagggagcgctcagacaccttcatcaacctccgggaggtgctcaaccgcttcaagctgccgccaggagagtacattctcgtgccttccaccttcgaacccaacaaggatggggatttctgcatccgggtcttttctgaaaagaaagctgactaccaagctgtcgatgatgaaatcgaggccaatcttgaagagttcgacatcagcgaggatgacattgatgatggattcaggagactgtttgcccagttggcaggagaggatgcggagatctctgcctttgagctgcagaccatcctgagaagggttctagcaaagcgccaagatatcaagtcagatggcttcagcatcgagacatgcaaaattatggttgacatgctagattcggacgggagtggcaagctggggctgaaggagttctacattctctggacgaagattcaaaaataccaaaaaatttaccgagaaatcgacgttgacaggtctggtaccatgaattcctatgaaatgcggaaggcattagaagaagcaggtttcaagatgccctgtcaactccaccaagtcatcgttgctcggtttgcagatgaccagctcatcatcgattttgataattttgttcggtgtttggttcggctggaaacgctattcaagatatttaagcagctggatcccgagaatactggaacaatagagctcgaccttatctcttggctctgtttctcagtactttgaagttataactaatctgcctgaagacttctcatgatggaaaatcagccaaggactaagcttccatagaaatacactttgtatctggacctcaaaattatgggaacatttacttaaacggatgatcatagctgaaaataatgatactgtcaatttgagatagcagaagtttcacacatcaaagtaaaagatttgcatatcattatactaaatgcaaatgagtcgcttaacccttgacaaggtcaaagaaagctttaaatctgtaaatagtatacactttttacttttacacactttcctgttcatagcaatattaaatcaggaaaaaaaaatgcagggaggtatttaacagctgagcaaaaacattgagtcactctcaaaggacacgaggcccttggcagggaatatttaaagcaacttcaagtttaaaatgcagctgttgattctaccaaacaacagtccaagattaccatttcccatgagccaactgggaaacatggtatatcatgaagtaatcttgtcaaggcatctggagagtccaggagagaagactcacctctgtcgcttgggttaaacaagagacaggttttgtagaatattgattggtaatagtaaatcgttctccttacaatcaagttcttgaccctattcggccttatacatctggtcttacaaagaccaaagggatcctgcgcttgatcaactgaaccagtatgccaaaaccaggcatccaatttgtaaaccaattatgataaaggacaaaataagctgtttgccacctcaaaactttatgaacttcaccaccactagtgtctgtccatggagttagaggggacatcacttagaagttcttatagaaaggacacaagtttgtttcctggctttaccttgggaaaatgctagcaacattatagaaattttgccttgttgccttatcttcttccaaatgtactgttaaataaaaataaagggttaccccatgcaatcacaccatgccatgttttccttcctggagggcagccccacaggacggtttatgagcacacaattatagcttgtttctactttaacaaggtatgctgcctctgtaaattcatgtattcaaaggaaaagacaccttgcctataattaaaatgtggaactataaaattttttaaaatcc

SEQ ID NO: 582 - DNA, 841 bp, Homo sapiens
tctaatacctattgatctgttactttctcccatcacgctcaggtgggaacatccagttgcaggaaaacaagcttaacacgcccactgattctacattatggtgagttccataattattttattatatattacagtgtaataatggaaataaagtgcctaataaatgcaaatgtgcttacatcttttggcccagctcctacctcccggcagcctctccaggcccagaactttctccagtcagcctctacagaccaagctcatgactctcaatggcctatttaggcccataccctacgtcacggcagcctccgcagatgaggctactgcctcacaacagcctccacaggcacagctccatcgttacaatggcctctttagacccagctcctgcctcccagccttctctccaggccctgaactttctcaagttgacctcaccaggcccagctcatgcttctttgcagcctctccaggcccagctcctgcatcttggtggcccctccaggcccagcctctgcctcccgtcagcctctacagtcccaacgtctgcctcacagcagattcttcacgcccagcttctacctcacttggaccctccagacccagatggtgtctcactgtggcatcctcaggtgaagctcctgcctttcggcagcctctccaggcccagctcctcctgcctcccagtggcctctttcggcccagcccagctcatgcctcccggcggccttcccaagccccgcttttgactttcggtggcctctgcaggcctcgacaaggcccagcctcctgcctcccgaaggcctgcacaggcccagcctctgcctcacagcggactctc

SEQ ID NO: 583 - DNA, 3266 bp, Homo sapiens
ggtatttcaggacagccaggagggggcgcacatccgccgagaaactgtgagcaagagcgtctgtgctgaaccatggcgccaccagagggcgcgcgatcccgccccaaccaacttcccgctgaggtgccagaagcagcgaggagcttcagcttcctcagggcagcacgagggtcgtgttaacttggtgttcttcattgatgatgattattccccaccttctaagagacaaagaccaacgagccaccacagccaccagtcccagaacctgccaatgctggggaacggaaaatgagggagttcaactctggccctcacaatccagtggaggagacgaaactcatctgcctctgtccctctgggcacgcctcatgccaggtgcatctgtggacaggggccatgcccctgggcttccaaagttggagagagctgccaggctcaggtctgaaggccagaattctacagtaagtcctactgagtcaaggtgggagcagggtcggtagcttccgaggctctgcgggagaatccgtttcctggccgtagaggtggcctgcactccgcagcttgtgctgcccgtctcgaatgactggagtttcctgcttctgtcactacacctcccaccctctccatcacctgctctgctcttacaaggatccgaagaaatggaatcatcgtatcgctgatctacgtaaacaaactgaagaattgtctgaaagaaaatatgacatgaacttatgaattcaacaggtgaagatttacaacttgataaatcaactttgtcagctcgagctgtaaaagccaaaggtccggtgatgatcccatacccttttttccagtctcatgttgaagatttttatgtagaaggccttcccaaaggaattttttttttttttttttttttgagatggagttttcactcttatcgcccaggctggggtgcaatggcgcaaccttgctggtcactgcaacctctgcctcctgggttcaagaaattctcctgccttagcctcccaagtcactgggattacaggtgcccaccaccataccaggctaatttttgtatttttagtggagatgcggtttcaccatgttggccgggccagtctcgaactcctgacgtcaagtgatcttcccgcctcgactcctgatatcaagtgatcttcccgcctcggcctcccagagtgctgagattacagacgtgaacccatgcctggccaggaattttgttttttaggaaggctttctactaatggaattcctggccttgagaggatgttactttagaaggaaaggatttttttgttattaaaagctggacctaccatgaaagacttctgaatccaggaagagaaactgactgggcaacatgttattcagaaacaggaccttgccctgtcactcaggatggagttcagtggtcctatcatggctcattatagcctcaaactcccaggctcaagcaatcctaccatgtcagccttcccagtagctgggactacagataccgggtctcacactgtcacccaggctggagtacagtggcacaacctctgctcactgcagcctccacctgccaggctcaagcaattctcctgcctcagcctcccgagtagctggtgatttccaggatgtgagctcacaatgactcaagctgccacatactgttgattgtgaaatgccagttgaagcatatgtcctgcgagcttaggggtgctacaagttgaccactgcagcagtaaagatgactctgaagaatggcgtgggttggttcctttcaaatgcacttgagcagcggtctccaaccacagggccacagagctggagctggatctaccatgaaagacttgtgaatccaggaagagagactgactgggcaacatgttattcagaatcttcctgtgccatccaggctggagtgcagtgatgtgatcatagctcactatagctttggccttctgagatcaagcaatcctcccatctcaacctcccaagtagctaggactacacacgcatgtcacccatgcccagatcatttttgtagagtcagagtttcaccgtggtggccaggttggccatgttggccagatggggtcttcttttgttgcccaggctggccacaaattcctgggctcaagtgatcctcccacctcgtccttgtagagatgagatttagttatgtcgtccaggctgatctcaaactcctgggctaaatcgattgtctcacctcagcctctcaagtatgttatgaaggttatatgttaggaagggtcccaggaggtaaacccacacagatgggatttgggcataggtttggtttcccagggggcagtgctgagctctttgccagtgggaaatgggatgctggtgatttccagtaggtgacctcacagtgactcaagctaccacttactgttgattgtgacgaaatgccagctgaggcacatgccttgggagctaagtggttgctgcccttgaccactgtgaagactggtgtgggaagggtcgttttggatgcacttgagcaggggtccccaacccctgagccatggagccgcaaggagccacacagcaggaggtgggaacatccagttgcaggaaaacaagcttaacacgcccactgattctacattatgctcctacctcccggcagcctctccaggcccagaactttctccagtcagcctctacagaccaagctcatgactctcaatggcctatttaggcccataccctacgtcacggcagcctccgcagatgaggctactgcctcacaacagcctccacaggcacagctccatcgttacaatggcctctttagacccagctcctgcctcccagccttctctccaggccctgaactttctcaagttgacctcaccaggcccagctcatgcttctttgcagcctctccaggcccagctcctgcatcttggtggcccctccaggcccagcctctgcctcccgtcagcctctacagtcccaacgtctgcctcacagcagattcttcacgcccagcttctacctcactgtggaccccccaagccaagctcccaacctttcagcagcttctacacacccagctcctgccacccagtggcctctttaggccaagctcatgcttcacaagggcctttccaggcccaacttttgtctcatggcaaccttccctggccagattcctgcctgtctcccagcagcctagacaggcccaggtcttgcctcacactggcctctctacatccagcttatgcctcacggtggcctctcca

SEQ ID NO: 584 - protein, 100 aa, Homo sapiens
MMIIPHLLRDKDQRATTATSPRTRQCWGTENEGVQLWPSQSSGGDETHLPLSLWARLMPGASVDRGHAPGLPKLEKAARLRSEGQNSTVSPTESRWEQGR

SEQ ID NO: 585 - DNA, 652 bp, Homo sapiens
ggacggaaggagcggcggcgacggaggaggaggatggaggcggtggtgttcgtcttctctctcctcgattgttgcgcgctcatcttcctctcggtctacttcataattacattgtctgatttagaatgtgattacattaatgctagatcatgttgctcaaaattaaacaagtgggtaattccagaattgattggccataccattgtcactgtattactgctcatgtcattgcactggttcatcttccttctcaacttacctgttgccacttggaatatatatcgatacattatggtgccgagtggtaacatgggagtgtttgatccaacagaaatacacaatcgagggcagctgaagtcacacatgaaagaagccatgatcaagcttggtttccacttgctctgcttcttcatgtatctttatagtatgatcttagctttgataaatgactgaagctggagaagccgtggttgaagtcagcctacactacagtgcacagttgaggagccagagacttcttaaatcatccttagaaccgtgaccatagcagtatatattttcctcttggaacaaaaaactatttttgctgtatttttaccatataaagtatttaaaaaacaggaaaaaaaaaaaaaaaaaaaaaaaaaaaaaa

SEQ ID NO: 586 - protein, 139 aa, Homo sapiens
MEAVVFVFSLLDCCALIFLSVYFIITLSDLECDYINARSCCSKLNKWVIPELIGHTIVTVLLLMSLHWFIFLLNLPVATWNIYRYIMVPSGNMGVFDPTEIHNRGQLKSHMKEAMIKLGFHLLCFFMYLYSMILALIND

SEQ ID NO: 587 - DNA, 2943 bp, Homo sapiens
ccctaatcaagtaccccctcctcctccaccacctcctgccccacccctccctgcatctggattctttttggcatccatgtcagaagacaatcgccctttaactggacttgcagctgcaattgccggagcaaaacttaggaaagtgtcacggatggaggatacctctttcccaagtggagggaatgctattggtgtgaactccgcctcatctaaaacagatacaggccgtggaaatggaccccttcctttagggggtagtggtttaatggaagaaatgagtgccctgctggccaggaggagaagaattgctgaaaagggatcaacaatagaaacagaacaaaaagaggacaaaggtgaagattcagagcctgtaacttctaaggcctcttcaacaagtacacctgaaccaacaagaaaaccttgggaaagaacaaatacaatgaatggcagcaagtcacctgttatctccagaccaaaatccacacccttatcacagcccagtgccaatggagtccagacggaaggacttgactatgacaggctgaagcaggacattttagatgaaatgagaaaagaattaacaaagctaaaagaagagctcattgatgcaatcaggcaggaactgagcaagtcaaatactgcatagaggaacagactaaggagagataggactttaatctggaggaaaaatatcctacaaacaacaactgttcacaacagcaaacccctacatttatgagctgtaagaagaaaatggagacaaacagaaggagggaaaaaccaacctactctgaaagccttcagacattatgactctggtgataagctctttccctctccgtttgctgcttttttctggcctttacaacagaatggaagagaatcatttaagagttcctgtaacagttatgcagaaaatactaaaacccatcaggcaagatcaccacgcattgaaatattttcatatcaagataaagtcgcacattttccacaatacattgctaaaataaagaggagaaaggcttaggaagtttttctgcagagagtgctggtaaagaattgagcaagtttgctattgtattgtaatgtttctctcaggtttgttcttcctatcatgtttgatattccatgaataattgagatcagccctatgtaagttaagatcataatatgtggaacaaatggaattgtaagtgctttcaaagggtaatatttataagaaagtgtccgaaaaatgtttcttcagcttgagaaattttagaatgataggaagtttctcgagttagccttcatgcaattttgtagattaaaacataaaatttgtccagaacttaaagatttagatgccttcctaaattgttacaatgctttaccaaatctatgacttctacataacacaaaccagtggtcaaatgtaaacactatattgtagatttactgtaggttttcaaccttttttagatttatgcatgtggacatttttataatgtaattacaatcaccacaaggttagcttttttaattgcagacagtaatgcatgtcacactaatatgtagtggccttttcaaggcctagtcccagggaaaacattttgtagagtataggggagtgggaggaaggggaggaataattttttatttaaagttgatttctgcactatctttttctcagttacctgcatgaataaataatgagaaatattttgtgactttaattggtaaatatgttacaaaaccaagtacttaatcttttacatcatgtcttcagctatttgtattttaaccagtaatttcaatggtctgaaacatgattctgagcttcacataatatcttaactgtggaactcaaaagtttgatcactgaatttggcagttattattacctaggtacccccgctgttacacaggtgtttagatacgtgttcctgaatgaagctgcttttgaattttgttatgttgaaatgcaagaaataacaatgatggcagcaattaaggtcacagaaatcattaggtaaaggaaaaccaatgaggagttctgcagttttcttttaataagtaaagtgagacttgggtggtgggaagaaggaaggtgggaagaaggaattagacactctgcctgccactctgcgtgtgtgtgctctcgcgcacgtgctgtctatatggaagccactcccttttctttcctttgaaactggtaaggttaaaataggggagaaatcctacatgttggaatgatagctttttggaaaatttaagaaactctccaggctctccatcttgatttatgcttgagttgttatgtgccatatttgctttgaactctgattatcagaagttttactaaaactttgaaataattcactttcatctgctttctagattttgtacatctcagtccataaagcaaagcttgttgatagtgtagttttctaaacgctgcaaatttgcagcctttaccactacaaagaagtttggatgagggattttttttttctttgtcaaaatagttcctgtttctgtagaaatttcatttttagattaaactgtgatggatgggctatcataattcaagtatacatttcttttttctatcagatattcattgtcatgcagtagtagtaaaaacatcaaagatgcagcaagcttattaagtattattttctaaaagaaataggaggcattttcatctttattattgtacttttggttatgcaaacactttgataatataaacagttatgtcccctataaatctggtcagcaacctcttttgattttgttgggtaagttaaatagtctgtagtaggtagagtactgggtacaagtggtccaaactaagataagagactaaaataaaatgctaaatcttaaaagaaactgggtttatgcactaaacgttttgtgccttggtctaatattaacatgatgtatgtgtaaactgac

SEQ ID NO: 588 - protein, 189 aa, Homo sapiens
MSEDNRPLTGLAAAIAGAKLRKVSRMEDTSFPSGGNAIGVNSASSKTDTGRGNGPLPLGGSGLMEEMSALLARRRRIAEKGSTIETEQKEDKGEDSEPVTSKASSTSTPEPTRKPWERTNTMNGSKSPVISRPKSTPLSQPSANGVQTEGLDYDRLKQDILDEMRKELTKLKEELIDAIRQELSKSNTA

SEQ ID NO: 589 - DNA, 1464 bp, Homo sapiens
ggggctgctgggactcgcgtcggttggcgactcccggacgtaggtagtttgttgggccgggttctgaggccttgcttctctttacttttccactctaggccacgatgccgcagtaccagacctgggaggagttcagccgcgctgccgagaagctttacctcgctgaccctatgaaggcacgtgtggttctcaaatataggcattctgatgggaacttgtgtgttaaagtaacagatgatttagtttgtttggtgtataaaacagaccaagctcaagatgtaaagaagattgagaaattccacagtcaactaatgcgacttatggtagccaaggaagcccgcaatgttaccatggaaactgagtgaatggtttgaaatgaagactttgtcgtgtacttaggaagtaaatatcttttgaattagagaaagtgttgggacagaaagtactttatgtaactaagtgggctgttcagaagcttagaggtcattttttgtaattttctttttaattactttagagagctagggatgcaaatgttttcagttagaaagcctttatttacttttggaaattgaacaagaaatgcatctgtcttagaaactggagattatttgatgttaggtaaaacatgtaattgtttctctggcaaatttgtatcagtaatttgaaaatgagatattaggaaaaaccaattcttcttaaatttagttcatctttctttaaaagaacattaaatgtaaccattttgtcagatccatgtattttggagcataaaatgtatgctgttgtgaccaataaatataaaatatggtaattggaattaactccacaccatagtatgcattgttatacatactgtgtacctaattatgtatagcagtgtagtctcaattatatctgaaagtaattgtgactaacaagtatgctttgccttatttccacatttaaactacctgttaatataagggatttgtagtatcagcttgttgagcaatgactttgaatctagttttcagtgatcagaagcagcagttatttgagtgtatgaatggaatgatgatcactgtgctataatgtactgaaaccaccatattacagaaatatttactacatattttccatctgtagtttctcagaagggctatggattagtttgaactgtcaaatccttgcatacttctgtgacacccctgcccattttctgtctttaattaaccaaggtgttaggtgtgactgtcacaactgttatgttttccagtaaactagaagtacgatatttgataattatatttgtatttcaccacctaaatgtaatgttgattcctcaagaatgaaatgaaggcactacattgaaatatgttttgtataaatttgtcatgttgaacagcattttagcatggtaagttcccttagctatatgaattttggcatgtttcagagagatcagtaaataaaatattagat

SEQ ID NO: 590 - protein, 86 aa, Homo sapiens
MPQYQTWEEFSRAAEKLYLADPMKARVVLKYRHSDGNLCVKVTDDLVCLVYKTDQAQDVKKIEKFHSQLMRLMVAKEARNVTMETE

SEQ ID NO: 591 - DNA, 1002 bp, Homo sapiens
gcggctcccaggaggcgtgaaccgcggaccatgagcgtgggcttcatcggggccggccagctggcctatgctctggcgcggggcttcacggccgcaggcatcctgtcggctcacaagataatagccagctccccagaaatgaacctgcccacggtgtccgcgctcaggaagatgggtgtgaacctgacacgcagcaacaaggagacggtgaagcacagcgacgtcctgtttctggctgtgaagccacatatcatccccttcatcctggatgagattggggccgacgtgcaagccagacacatcgtggtctcctgtgcggctggtgtcaccatcagctctgtggagaagaagctgatggcattccagccagcccccaaagtgattcgctgcatgaccaacacacctgtggtagtgcaggaaggcgctacagtgtacgccacgggcacccatgccctggtggaggatgggcagctcctggagcagctcatgagcagcgtgggcttctgcactgaggtggaagaggacctcatcgatgccgtcacggggctcagtggcagcgggcctgcctatgcattcatggctctggacgcattggctgatggtggggtgaagatgggtttgccacggcgcctggcaatccaactcggggcccaggctttgctgggagctgccaagatgctgctggactcggagcagcatccatgccagcttaaggacaatgtctgctcccctgggggagccaccatccacgccctgcactttctagagagtgggggcttccgctctctgctcatcaatgcagttgaggcctcctgtatccgaacacgagagctacagtccatggccgaccaagaaaagatctccccagctgcccttaagaagaccctcttagacagagtgaagctggaatcccccacagtctccacactgaccccctccagcccagggaagctcctcacaagaagcctggccctgggaggcaagaaggactaaggcagcatc

SEQ ID NO: 592 - DNA, 1308 bp, Mus musculus
ttttcttttgacttgtttgtggatggaatgtttacagacatttctaattactgctttaattaaataaattggatcaaaggccgttcgaggtatttttgttttgccgtttgtcgctcagaattggcattttgagaggtgattgatactgctaacaattttctagtactctagtttgtttcaagaagagattttgggtagacgtaatcttcaccctttcaaattatataacaatacgaacattattttttatactgatcataatttccagatttggggagggggtgatcgtggcaggaaaagttgtatgtttggtagttgcatatggtgatttttgatttttcaatgctggtaggtaagtaaggaggtctctgtaccatggctcgtacaaagcagactgcccgcaaatcgaccggtggtaaagcacccaggaagcaactggctacaaaagccgctcgcaagagtgcgccctctactggaggggtgaagaaacctcatcgttacaggcctggtactgtggcgctccgtgaaattagacgttatcagaagtccactgaacttctgattcgcaaacttcccttccagcgtctggtgcgagaaattgctcaggactttaaaacagatctgcgcttccagagcgcagctatcggtgctttgcaggaggcaagtgaggcctatctggttggcctttttgaagacaccaacctgtgtgctatccatgccaaacgtgtaacaattatgccaaaagacatccagctagcacgccgcatacgtggagaacgtgcttaagaatccactatgatgggaaacatttcattctcaaaaaaaaaaaaaaaaatttctcttcttcctgttattggtagttctgaacgttagatattttttttccatggggtcaaaaggtacctaagtatatgattgcgagtggaaaaataggggacagaaatcaggtattggcagtttttccattttcatttgtgtgtgaatttttaatataaatgcggagacgtaaagcattaatgcaagttaaaatgtttcagtgaacaagtttcagcggttcaactttataataattataaataaacctgttaaatttttctggacaatgccagcatttggatttttttaaaacaagtaaatttcttattgatggcaactaaatggtgtttgtagcatttttatcatacagtagattccatccattcactatacttttctaactgagttgtcctacatgcaagtacatgtttttaatgttgtctgtcttctgtgctgttcctgtaagtttgctattaaaatacattaaactat

SEQ ID NO: 593 - DNA, 3861 bp, Homo sapiens
aatctatcagggaacggcggtggccggtgcggcgtgttcggtggcggctctggccgctcaggcgcctgcggctgggtgagcgcacgcgaggcggcgaggcggcagcgtgtttctaggtcgtggcgtcgggcttccggagctttggcggcagctaggggaggatggcggagtcttcggataagctctatcgagtcgagtacgccaagagcgggcgcgcctcttgcaagaaatgcagcgagagcatccccaaggactcgctccggatggccatcatggtgcagtcgcccatgtttgatggaaaagtcccacactggtaccacttctcctgcttctggaaggtgggccactccatccggcaccctgacgttgaggtggatgggttctctgagcttcggtgggatgaccagcagaaagtcaagaagacagcggaagctggaggagtgacaggcaaaggccaggatggaattggtagcaaggcagagaagactctgggtgactttgcagcagagtatgccaagtccaacagaagtacgtgcaaggggtgtatggagaagatagaaaagggccaggtgcgcctgtccaagaagatggtggacccggagaagccacagctaggcatgattgaccgctggtaccatccaggctgctttgtcaagaacagggaggagctgggtttccggcccgagtacagtgcgagtcagctcaagggcttcagcctccttgctacagaggataaagaagccctgaagaagcagctcccaggagtcaagagtgaaggaaagagaaaaggcgatgaggtggatggagtggatgaagtggcgaagaagaaatctaaaaaagaaaaagacaaggatagtaagcttgaaaaagccctaaaggctcagaacgacctgatctggaacatcaaggacgagctaaagaaagtgtgttcaactaatgacctgaaggagctactcatcttcaacaagcagcaagtgccttctggggagtcggcgatcttggaccgagtagctgatggcatggtgttcggtgccctccttccctgcgaggaatgctcgggtcagctggtcttcaagagcgatgcctattactgcactggggacgtcactgcctggaccaagtgtatggtcaagacacagacacccaaccggaaggagtgggtaaccccaaaggaattccgagaaatctcttacctcaagaaattgaaggttaaaaaacaggaccgtatattccccccagaaaccagcgcctccgtggcggccacgcctccgccctccacagcctcggctcctgctgctgtgaactcctctgcttcagcagataagccattatccaacatgaagatcctgactctcgggaagctgtcccggaacaaggatgaagtgaaggccatgattgagaaactcggggggaagttgacggggacggccaacaaggcttccctgtgcatcagcaccaaaaaggaggtggaaaagatgaataagaagatggaggaagtaaaggaagccaacatccgagttgtgtctgaggacttcctccaggacgtctccgcctccaccaagagccttcaggagttgttcttagcgcacatcttgtccccttggggggcagaggtgaaggcagagcctgttgaagttgtggccccaagagggaagtcaggggctgcgctctccaaaaaaagcaagggccaggtcaaggaggaaggtatcaacaaatctgaaaagagaatgaaattaactcttaaaggaggagcagctgtggatcctgattctggactggaacactctgcgcatgtcctggagaaaggtgggaaggtcttcagtgccacccttggcctggtggacatcgttaaaggaaccaactcctactacaagctgcagcttctggaggacgacaaggaaaacaggtattggatattcaggtcctggggccgtgtgggtacggtgatcggtagcaacaaactggaacagatgccgtccaaggaggatgccattgagcacttcatgaaattatatgaagaaaaaaccgggaacgcttggcactccaaaaatttcacgaagtatcccaaaaagttctaccccctggagattgactatggccaggatgaagaggcagtgaagaagctgacagtaaatcctggcaccaagtccaagctccccaagccagttcaggacctcatcaagatgatctttgatgtggaaagtatgaagaaagccatggtggagtatgagatcgaccttcagaagatgcccttggggaagctgagcaaaaggcagatccaggccgcatactccatcctcagtgaggtccagcaggcggtgtctcagggcagcagcgactctcagatcctggatctctcaaatcgcttttacaccctgatcccccacgactttgggatgaagaagcctccgctcctgaacaatgcagacagtgtgcaggccaaggtggaaatgcttgacaacctgctggacatcgaggtggcctacagtctgctcaggggagggtctgatgatagcagcaaggatcccatcgatgtcaactatgagaagctcaaaactgacattaaggtggttgacagagattctgaagaagccgagatcatcaggaagtatgttaagaacactcatgcaaccacacacaatgcgtatgacttggaagtcatcgatatctttaagatagagcgtgaaggcgaatgccagcgttacaagccctttaagcagcttcataaccgaagattgctgtggcacgggtccaggaccaccaactttgctgggatcctgtcccagggtcttcggatagccccgcctgaagcgcccgtgacaggctacatgtttggtaaagggatctatttcgctgacatggtctccaagagtgccaactactgccatacgtctcagggagacccaataggcttaatcctgttgggagaagttgcccttggaaacatgtatgaactgaagcacgcttcacatatcagcaagttacccaagggcaagcacagtgtcaaaggtttgggcaaaactacccctgatccttcagctaacattagtctggatggtgtagacgttcctcttgggaccgggatttcatctggtgtgaatgacacctctctactatataacgagtacattgtctatgatattgctcaggtaaatctgaagtatctgctgaaactgaaattcaattttaagacctccctgtggtaattgggagaggtagccgagtcacacccggtggctctggtatgaattcacccgaagcgcttctgcaccaactcacctggccgctaagttgctgatgggtagtacctgtactaaaccacctcagaaaggattttacagaaacgtgttaaaggttttctctaacttctcaagtcccttgttttgtgttgtgtctgtggggaggggttgttttggggttgtttttgttttttcttgccaggtagataaaactgacatagagaaaaggctggagagagattctgttgcatagactagtcctatggaaaaaaccaagcttcgttagaatgtctgccttactggtttccccagggaaggaaaaatacacttccacccttttttctaagtgttcgtctttagttttgattttggaaagatgttaagcatttatttttagttaaaaataaaaactaatttcatactatttagattttcttttttatcttgcacttattgtcccctttttagttttttttgtttgcctcttgtggtgaggggtgtgggaagaccaaaggaaggaacgctaacaatttctcatacttagaaacaaaaagagctttccttctccaggaatactgaacatgggagctcttgaaatatgtagtattaaaagttgcatttg

SEQ ID NO: 594 - DNA, 2236 bp, Homo sapiens
cgagcggcggcggagcaggcatttccagcagtgaggagacagccagaagcaagctattggagctgaaggaacctgagacagaagctagtcccccctctgaattttactgatgaagaaactgaggccacagagctaaagtgacttttcccaaggtcgcccagcgaggacgtgggacttctcagacgtcaggagagtgatgtgagggagctgtgtgaccatagaaagtgacgtgttaaaaaccagcgctgccctctttgaaagccagggagcatcattcatttagcctgctgagaagaagaaaccaagtgtccgggattcagacctctctgcggccccaagtgttcgtggtgcttccagaggcagggctatgctcacattcatggcctctgacagcgaggaagaagtgtgtgatgagcggacgtccctaatgtcggccgagagccccacgccgcgctcctgccaggagggcaggcagggcccagaggatggagagaacactgcccagtggagaagccaggagaacgaggaggacggtgaggaggaccctgaccgctatgtctgtagtggggttcccgggcggccgccaggcctggaggaagagctgaccctcaaatacggagcgaagcacgtgatcatgctgtttgtgcctgtcactctgtgcatgatcgtggtggtagccaccatcaagtctgtgcgcttctacacagagaagaatggacagctcatctacacgacattcactgaggacacaccctcggtgggccagcgcctcctcaactccgtgctgaacaccctcatcatgatcagcgtcatcgtggttatgaccatcttcttggtggtgctctacaagtaccgctgctacaagttcatccatggctggttgatcatgtcttcactgatgctgctgttcctcttcacctatatctaccttggggaagtgctcaagacctacaatgtggccatggactaccccaccctcttgctgactgtctggaacttcggggcagtgggcatggtgtgcatccactggaagggccctctggtgctgcagcaggcctacctcatcatgatcagtgcgctcatggccctagtgttcatcaagtacctcccagagtggtccgcgtgggtcatcctgggcgccatctctgtgtatgatctcgtggctgtgctgtgtcccaaagggcctctgagaatgctggtagaaactgcccaggagagaaatgagcccatattccctgccctgatatactcatctgccatggtgtggacggttggcatggcgaagctggacccctcctctcagggtgccctccagctcccctacgacccggagatggaagaagactcctatgacagttttggggagccttcataccccgaagtctttgagcctcccttgactggctacccaggggaggagctggaggaagaggaggaaaggggcgtgaagcttggcctcggggacttcatcttctacagtgtgctggtgggcaaggcggctgccacgggcagcggggactggaataccacgctggcctgcttcgtggccatcctcattggcttgtgtctgaccctcctgctgcttgctgtgttcaagaaggcgctgcccgccctccccatctccatcacgttcgggctcatcttttacttctccacggacaacctggtgcggccgttcatggacaccctggcctcccatcagctctacatctgagggacatggtgtgccacaggctgcaagctgcagggaattttcattggatgcagttgtatagttttacactctagtgccatatatttttaagacttttctttccttaaaaaataaagtacgtgtttacttggtgaggaggaggcagaaccagctctttggtgccagctgtttcatcaccagactttggctcccgctttggggagcgcctcgcttcacggacaggaagcacagcaggtttatccagatgaactgagaaggtcagattagggcggggagaagagcatccggcatgagggctgagatgcgcaaagagtgtgctcgggagtggcccctggcacctgggtgctctggctggagaggaaaagccagttccctacgaggagtgttcccaatgctttgtccatgatgtccttgttattttattgcctttagaaactgagtcctgttcttgttacggcagtcacactgctgggaagtggcttaatagtaatatcaataaatagatgagtcctgttagaaaaa

SEQ ID NO: 595 - protein, 448 aa, Homo sapiens
MLTFMASDSEEEVCDERTSLMSAESPTPRSCQEGRQGPEDGENTAQWRSQENEEDGEEDPDRYVCSGVPGRPPGLEEELTLKYGAKHVIMLFVPVTLCMIVVVATIKSVRFYTEKNGQLIYTTFTEDTPSVGQRLLNSVLNTLIMISVIVVMTIFLVVLYKYRCYKFIHGWLIMSSLMLLFLFTYIYLGEVLKTYNVAMDYPTLLLTVWNFGAVGMVCIHWKGPLVLQQAYLIMISALMALVFIKYLPEWSAWVILGAISVYDLVAVLCPKGPLRMLVETAQERNEPIFPALIYSSAMVWTVGMAKLDPSSQGALQLPYDPEMEEDSYDSFGEPSYPEVFEPPLTGYPGEELEEEEERGVKLGLGDFIFYSVLVGKAAATGSGDWNTTLACFVAILIGLCLTLLLLAVFKKALPALPISITFGLIFYFSTDNLVRPFMDTLASHQLYI

SEQ ID NO: 596 - DNA, 2233 bp, Homo sapiens
cgagcggcggcggagcaggcatttccagcagtgaggagacagccagaagcaagctattggagctgaaggaacctgagacagaagctagtcccccctctgaattttactgatgaagaaactgaggccacagagctaaagtgacttttcccaaggtcgcccagcgaggacgtgggacttctcagacgtcaggagagtgatgtgagggagctgtgtgaccatagaaagtgacgtgttaaaaaccagcgctgccctctttgaaagccagggagcatcattcatttagcctgctgagaagaagaaaccaagtgtccgggattcagacctctctgcggccccaagtgttcgtggtgcttccagaggcagggctatgctcacattcatggcctctgacagcgaggaagaagtgtgtgatgagcggacgtccctaatgtcggccgagagccccacgccgcgctcctgccaggagggcaggcagggcccagaggatggagagaacactgcccagtggagaagccaggagaacgaggaggacggtgaggaggaccctgaccgctatgtctgtagtggggttcccgggcggccgccaggcctggaggaagagctgaccctcaaatacggagcgaagcacgtgatcatgctgtttgtgcctgtcactctgtgcatgatcgtggtggtagccaccatcaagtctgtgcgcttctacacagagaagaatggacagctcatctacacgacattcactgaggacacaccctcggtgggccagcgcctcctcaactccgtgctgaacaccctcatcatgatcagcgtcatcgtggttatgaccatcttcttggtggtgctctacaagtaccgctgctacaagttcatccatggctggttgatcatgtcttcactgatgctgctgttcctcttcacctatatctaccttggggaagtgctcaagacctacaatgtggccatggactaccccaccctcttgctgactgtctggaacttcggggcagtgggcatggtgtgcatccactggaagggccctctggtgctgcagcaggcctacctcatcatgatcagtgcgctcatggccctagtgttcatcaagtacctcccagagtggtccgcgtgggtcatcctgggcgccatctctgtgtatgatctcgtggctgtgctgtgtcccaaagggcctctgagaatgctggtagaaactgcccaggagagaaatgagcccatattccctgccctgatatactcatctgccatggtgtggacggttggcatggcgaagctggacccctcctctcagggtgccctccagctcccctacgacccggagatggaagactcctatgacagttttggggagccttcataccccgaagtctttgagcctcccttgactggctacccaggggaggagctggaggaagaggaggaaaggggcgtgaagcttggcctcggggacttcatcttctacagtgtgctggtgggcaaggcggctgccacgggcagcggggactggaataccacgctggcctgcttcgtggccatcctcattggcttgtgtctgaccctcctgctgcttgctgtgttcaagaaggcgctgcccgccctccccatctccatcacgttcgggctcatcttttacttctccacggacaacctggtgcggccgttcatggacaccctggcctcccatcagctctacatctgagggacatggtgtgccacaggctgcaagctgcagggaattttcattggatgcagttgtatagttttacactctagtgccatatatttttaagacttttctttccttaaaaaataaagtacgtgtttacttggtgaggaggaggcagaaccagctctttggtgccagctgtttcatcaccagactttggctcccgctttggggagcgcctcgcttcacggacaggaagcacagcaggtttatccagatgaactgagaaggtcagattagggcggggagaagagcatccggcatgagggctgagatgcgcaaagagtgtgctcgggagtggcccctggcacctgggtgctctggctggagaggaaaagccagttccctacgaggagtgttcccaatgctttgtccatgatgtccttgttattttattgcctttagaaactgagtcctgttcttgttacggcagtcacactgctgggaagtggcttaatagtaatatcaataaatagatgagtcctgttagaaaaa

SEQ ID NO: 597 - protein, 447 aa, Homo sapiens
MLTFMASDSEEEVCDERTSLMSAESPTPRSCQEGRQGPEDGENTAQWRSQENEEDGEEDPDRYVCSGVPGRPPGLEEELTLKYGAKHVIMLFVPVTLCMIVVVATIKSVRFYTEKNGQLIYTTFTEDTPSVGQRLLNSVLNTLIMISVIVVMTIFLVVLYKYRCYKFIHGWLIMSSLMLLFLFTYIYLGEVLKTYNVAMDYPTLLLTVWNFGAVGMVCIHWKGPLVLQQAYLIMISALMALVFIKYLPEWSAWVILGAISVYDLVAVLCPKGPLRMLVETAQERNEPIFPALIYSSAMVWTVGMAKLDPSSQGALQLPYDPEMEDSYDSFGEPSYPEVFEPPLTGYPGEELEEEEERGVKLGLGDFIFYSVLVGKAAATGSGDWNTTLACFVAILIGLCLTLLLLAVFKKALPALPISITFGLIFYFSTDNLVRPFMDTLASHQLYI

SEQ ID NO: 598 - DNA, 4402 bp, Homo sapiens
tatacttcgctacttggctagagttgcaactacagctgggttatatggctctaatctgatggaacatactgagattgatcactggttggagttcagtgctacaaaattatcttcatgtgattcctttacttctacaattaatgaactcaatcattgcctgtctctgagaacatacttagttggaaactccttgagtttagcagatttatgtgtttgggccaccctaaaaggaaatgctgcctggcaagaacagttgaaacagaagaaagctccagttcatgtaaaacgttggtttggctttcttgaagcccagcaggccttccagtcagtaggtaccaagtgggatgtttcaacaaccaaagctcgagtggcacctgagaaaaagcaagatgttgggaaatttgttgagcttccaggtgcggagatgggaaaggttaccgtcagatttcctccagaggccagtggttacttacacattgggcatgcaaaagctgctcttctgaaccagcactaccaggttaactttaaagggaaactgatcatgagatttgatgacacaaatcctgaaaaagaaaaggaagattttgagaaggttatcttggaagatgttgcaatgttgcatatcaaaccagatcaatttacttatacttcggatcattttgaaactataatgaagtatgcagagaagctaattcaagaagggaaggcttatgtggatgatactcctgctgaacagatgaaagcagaacgtgagcagaggatagaatctaaacatagaaaaaaccctattgagaagaatctacaaatgtgggaagaaatgaaaaaagggagccagtttggtcagtcctgttgtttgcgagcaaaaattgacatgagtagtaacaatggatgcatgagagatccaaccctttatcgctgcaaaattcaaccacatccaagaactggaaataaatacaatgtttatccaacatatgattttgcctgccccatagttgacagcatcgaaggtgttacacatgccctgagaacaacagaataccatgacagagatgagcagttttactggattattgaagctttaggcataagaaaaccatatatttgggaatatagtcggctaaatctcaacaacacagtgctatccaaaagaaaactcacatggtttgtcaatgaaggactagtagatggatgggatgacccaagatttcctacggttcgtggtgtactgagaagagggatgacagttgaaggactgaaacagtttattgctgctcagggctcctcacgttcagtcgtgaacatggagtgggacaaaatctgggcgtttaacaaaaaggttattgacccagtggctccacgatatgttgcattactgaagaaagaagtgatcccagtgaatgtacctgaagctcaggaggagatgaaagaagtagccaaacacccaaagaatcctgaggttggcttgaagcctgtgtggtatagtcccaaagttttcattgaaggtgctgatgcagagactttttcggagggtgagatggttacatttataaattggggcaacctcaacattacaaaaatacacaaaaatgcagatggaaaaatcatatctcttgatgcaaagttgaatttggaaaacaaagactacaagaaaaccactaaggtcacttggcttgcagagactacacatgctcttcctattccagtaatctgtgtcacttatgagcacttgatcacaaagccagtgctaggaaaagacgaggactttaagcagtatgtcaacaagaacagtaagcatgaagagctaatgctaggggatccctgccttaaggatttgaaaaaaggagatattatacaactccagagaagaggattcttcatatgtgatcaaccttatgaacctgttagcccatatagttgcaaggaagccccgtgtgttttgatatacattcctgatgggcacacaaaggaaatgccaacatcagggtcaaaggaaaagaccaaagtagaagccacaaaaaatgagacctctgctccttttaaggaaagaccaacaccttctctgaataataattgtactacatctgaggattccttggtcctttacaatagagtggctgttcaaggagatgtggttcgtgaattaaaagccaagaaagcaccaaaggaagatgtagatgcagctgtaaaacagcttttgtctttgaaagctgaatataaggagaaaactggccaggaatataaacctggaaaccctcctgctgaaataggacagaatatttcttctaattcctcagcaagtattctggaaagtaaatctctgtatgatgaagttgctgcacaaggggaggtggttcgtaagctaaaagctgaaaaatcccctaagcttctcaaggggaagtagttcggaaacttaaaactgaaaaagcccctaaggatcaagtagatatagctgttcaagaactccttcagctaaaggcacagtacaagtctttgataggagtagagtataagcctgtgtcggccactggagctgaggacaaagataagaagaagaaagaaaaagaaaataaatctgaaaagcagaataagcctcagaaacaaaatgatggccaaaggaaagacccttctaaaaaccaaggaggtgggctctcatcaagtggagcaggagaagggcaggggcctaagaaacagaccaggttgggtcttgaggcaaaaaaagaagaaaatcttgctgattggtattctcaggtcatcacaaagtcagaaatgattgaataccatgacataagtggctgttatattcttcgtccctgggcctatgccatttgggaagccatcaaggacttttttgatgctgagatcaagaaacttggtgttgaaaactgctacttccccatgtttgtgtctcaaagtgcattagagaaagagaagactcatgttgctgactttgccccagaggttgcttgggttacaagatctggcaaaaccgagctggcagaaccaattgccattcgtcctactagtgaaacagtaatgtatcctgcatatgcaaaatgggtacaatcacacagagacctgcccatcaagctcaatcagtggtgcaatgtggtgcgttgggaattcaagcatcctcagcctttcctacgtactcgtgaatttctttggcaggaagggcacagtgcttttgctaccatggaagaggcagcggaagaggtcttgcagatacttgacttatatgctcaggtatatgaagaactcctggcaattcctgttgttaaaggaagaaagacggaaaaggaaaaatttgcaggaggagactatacaactacaatagaagcatttatatctgctagtggaagagctatccagggaggaacatcacatcatttagggcagaatttttccaaaatgtttgaaatcgtttttgaagatccaaagataccaggagagaagcaatttgcctatcaaaactcctggggcctgacaactcgaactattggtgttatgaccatggttcatggggacaacatgggtttagtattaccaccccgtgtagcatgtgttcaggtggtgattattccttgtggcattaccaatgcactttctgaagaagacaaagaagcgctgattgcaaaatgcaatgattatcgaaggcgattactcagtgttaacatccgcgttagagctgatttacgagataattattctccaggttggaaattcaatcactgggagctcaagggagttcccattagacttgaagttgggccacgtgatatgaagagctgtcagtttgtagccgtcagacgagatactggagaaaagctgacagttgctgaaaatgaggcagagactaaacttcaagctattttggaagacatccaggtcacccttttcacaagggcttctgaagaccttaagactcatatggttgtggctaatacaatggaagactttcagaagatactagattctggaaagattgttcagattccattctgtggggaaattgactgtgaggactggatcaaaaagaccactgccagggatcaagatcttgaacctggtgctccatccatgggagctaaaagcctttgcatccccttcaaaccactctgtgaactgcagcctggagccaaatgtgtctgtggcaagaaccctgccaagtactacaccttatttggtcgcagctactgagggatgaacgaaagccccctcttcaactcctctcactttttaaagcattgatattagtatcttctcagatacagaccgttttatgattttttaaaaagtaaaagttctaaaatgaagtcacacaggacaattattcttatgcctaagttaacagtggataaaagacttttctgtaaacaactccagtaataaatatcatgaacta

SEQ ID NO: 599 - DNA, 4917 bp, Homo sapiens
agtagctgcggcgcaggggcggagcgaaggctgcggcggcgtcgggtacgcgcacacgttgcatcttcttcctttcgcggggtcctccgtagttctggcacgagccaggcgtactgacaggtggaccagcggactggtggagatggcgacgctctctctgaccgtgaattcaggagaccctccgctaggagctttgctggcagtagaacacgtgaaagacgatgtcagcatttccgttgaagaagggaaagagaatattcttcatgtttctgaaaatgtgatattcacagatgtgaattctatacttcgctacttggctagagttgcaactacagctgggttatatggctctaatctgatggaacatactgagattgatcactggttggagttcagtgctacaaaattatcttcatgtgattcctttacttctacaattaatgaactcaatcattgcctgtctctgagaacatacttagttggaaactccttgagtttagcagatttatgtgtttgggccaccctaaaaggaaatgctgcctggcaagaacagttgaaacagaagaaagctccagttcatgtaaaacgttggtttggctttcttgaagcccagcaggccttccagtcagtaggtaccaagtgggatgtttcaacaaccaaagctcgagtggcacctgagaaaaagcaagatgttgggaaatttgttgagcttccaggtgcggagatgggaaaggttaccgtcagatttcctccagaggccagtggttacttacacattgggcatgcaaaagctgctcttctgaaccagcactaccaggttaactttaaagggaaactgatcatgagatttgatgacacaaatcctgaaaaagaaaaggaagattttgagaaggttatcttggaagatgttgcaatgttgcatatcaaaccagatcaatttacttatacttcggatcattttgaaactataatgaagtatgcagagaagctaattcaagaagggaaggcttatgtggatgatactcctgctgaacagatgaaagcagaacgtgagcagaggatagactctaaacatagaaaaaaccctattgagaagaatctacaaatgtgggaagaaatgaaaaaagggagccagtttggtcagtcctgttgtttgcgagcaaaaattgacatgagtagtaacaatggatgcatgagagatccaaccctttatcgctgcaaaattcaaccacatccaagaactggaaataaatacaatgtttatccaacatatgattttgcctgccccatagttgacagcatcgaaggtgttacacatgccctgagaacaacagaataccatgacagagatgagcagttttactggattattgaagctttaggcataagaaaaccatatatttgggaatatagtcggctaaatctcaacaacacagtgctatccaaaagaaaactcacatggtttgtcaatgaaggactagtagatggatgggatgacccaagatttcctacggttcgtggtgtactgagaagagggatgacagttgaaggactgaaacagtttattgctgctcagggctcctcacgttcagtcgtgaacatggagtgggacaaaatctgggcgtttaacaaaaaggttattgacccagtggctccacgatatgttgcattactgaagaaagaagtgatcccagtgaatgtacctgaagctcaggaggagatgaaagaagtagccaaacacccaaagaatcctgaggttggcttgaagcctgtgtggtatagtcccaaagttttcattgaaggtgctgatgcagagactttttcggagggtgagatggttacatttataaattggggcaacctcaacattacaaaaatacacaaaaatgcagatggaaaaatcatatctcttgatgcaaagttgaatttggaaaacaaagactacaagaaaaccactaaggtcacttggcttgcagagactacacatgctcttcctattccagtaatctgtgtcacttatgagcacttgatcacaaagccagtgctaggaaaagacgaggactttaagcagtatgtcaacaagaacagtaagcatgaagagctaatgctaggggatccctgccttaaggatttgaaaaaaggagatattatacaactccagagaagaggattcttcatatgtgatcaaccttatgaacctgttagcccatatagttgcaaggaagccccgtgtgttttgatatacattcctgatgggcacacaaaggaaatgccaacatcagggtcaaaggaaaagaccaaagtagaagccacaaaaaatgagacctctgctccttttaaggaaagaccaacaccttctctgaataataattgtactacatctgaggattccttggtcctttacaatagagtggctgttcaaggagatgtggttcgtgaattaaaagccaagaaagcaccaaaggaagatgtagatgcagctgtaaaacagcttttgtctttgaaagctgaatataaggagaaaactggccaggaatataaacctggaaaccctcctgctgaaataggacagaatatttcttctaattcctcagcaagtattctggaaagtaaatctctgtatgatgaagttgctgcacaaggggaggtggttcgtaagctaaaagctgaaaaatcccctaaggctaaaataaatgaagctgtagaatgcttactgtccctgaaggctcagtataaagaaaaaactgggaaggagtacatacctggtcagcccccattatctcaaagttcggattcaagcccaaccagaaattctgaacctgctggtttagaaacaccagaagcgaaagtactttttgacaaagtagcttctcaaggggaagtagttcggaaacttaaaactgaaaaagcccctaaggatcaagtagatatagctgttcaagaactccttcagctaaaggcacagtacaagtctttgataggagtagagtataagcctgtgtcggccactggagctgaggacaaagataagaagaagaaagaaaaagaaaataaatctgaaaagcagaataagcctcagaaacaaaatgatggccaaaggaaagacccttctaaaaaccaaggaggtgggctctcatcaagtggagcaggagaagggcaggggcctaagaaacagaccaggttgggtcttgaggcaaaaaaagaagaaaatcttgctgattggtattctcaggtcatcacaaagtcagaaatgattgaataccatgacataagtggctgttatattcttcgtccctgggcctatgccatttgggaagccatcaaggacttttttgatgctgagatcaagaaacttggtgttgaaaactgctacttccccatgtttgtgtctcaaagtgcattagagaaagagaagactcatgttgctgactttgccccagaggttgcttgggttacaagatctggcaaaaccgagctggcagaaccaattgccattcgtcctactagtgaaacagtaatgtatcctgcatatgcaaaatgggtacagtcacacagagacctgcccatcaagctcaatcagtggtgcaatgtggtgcgttgggaattcaagcatcctcagcctttcctacgtactcgtgaatttctttggcaggaagggcacagtgcttttgctaccatggaagaggcagcggaagaggtcttgcagatacttgacttatatgctcaggtatatgaagaactcctggcaattcctgttgttaaaggaagaaagacggaaaaggaaaaatttgcaggaggagactatacaactacaatagaagcatttatatctgctagtggaagagctatccagggaggaacatcacatcatttagggcagaatttttccaaaatgtttgaaatcgtttttgaagatccaaagataccaggagagaagcaatttgcctatcaaaactcctggggcctgacaactcgaactattggtgttatgaccatggttcatggggacaacatgggtttagtattaccaccccgtgtagcatgtgttcaggtggtgattattccttgtggcattaccaatgcactttctgaagaagacaaagaagcgctgattgcaaaatgcaatgattatcgaaggcgattactcagtgttaacatccgcgttagagctgatttacgagataattattctccaggttggaaattcaatcactgggagctcaagggagttcccattagacttgaagttgggccacgtgatatgaagagctgtcagtttgtagccgtcagacgagatactggagaaaagctgacagttgctgaaaatgaggcagagactaaacttcaagctattttggaagacatccaggtcacccttttcacaagggcttctgaagaccttaagactcatatggttgtggctaatacaatggaagactttcagaagatactagattctggaaagattgttcagattccattctgtggggaaattgactgtgaggactggatcaaaaagaccactgccagggatcaagatcttgaacctggtgctccatccatgggagctaaaagcctttgcatccccttcaaaccactctgtgaactgcagcctggagccaaatgtgtctgtggcaagaaccctgccaagtactacaccttatttggtcgcagctactgagggatgaacgaaagccccctcttcaactcctctcactttttaaagcattgatattagtatcttctcagatacagaccgttttatgattttttaaaaagtaaaagttctaaaatgaagtcacacaggacaattattcttatgcctaagttaacagtggataaaagacttttctgtaaacaactccagtaataaatatcatgaactaatatggtttaaaaaaaaaaaaaaaaaaaagg

SEQ ID NO: 600 - DNA, 1752 bp, Homo sapiens
cccaggatgtagagctggcagtgcctgacggcgcgtctgacgcggagttgggtggggtagagagtagggggcggtagtcgggggtggtgggagaaggaggaggcggcaaatcacttataaatggcgcggaagcaggacccgaagcctaaattccaggagggtgagcgagtgctgtgctttcatgggcctcttctttatgaagcaaagtgtgtaaaggttgccataaaggacaaacaagtgaaatacttcatacattacagtggttggaataaaaattgggatgagtgggttccggagagcagagtactcaaatacgtggacaccaatttgcagaaacagcgagaacttcaaaaagccaatcaggagcagtatgcagaggggaagatgagaggggctgccccaggaaagaagacatctggtctgcaacagaaaaatgttgaagtgaaaacgaaaaagaacaaacagaaaacacctggaaatggagatggtggcagtaccagtgagacccctcagcctccttggaagaaaagggcccgggtagatcctactgttgaaaatgaggaaacattcatgaacagagttgaagttaaagtaaagattcctgaatagctaaaaccgtggcttgttgatgactgggacttaattaccaggcaaaaacagctcttttatcttcctgccaagaagaatgtggattccattcttgaggattatgcaaattacaagaaatctcgtggaaacacagataataaggagtatgcggttaatgaagttgtggcagggataaaagaatacttcaacgtaatgttgggtacccagctactctataaatttgagagaccacagtatgccgaaattcttgcagatcatcccgatgcacccatgtcccaggtgtatggagcgccacatctcctgagattatttgtacgaattggagcaatgttggcctatacacctctggatgagaagagccttgctttattactcaattatcttcacgatttcctaaagtacctggcaaagaattctgcaactttgtttagtgccagcgattatgaagtggctcctcctgagtaccatcggaaagctgtgtgagaggcactctcactcacttatgtttggatctccgtaaacacatttttgttcttagtctatctcttgtacaaacaatgtgctttgaagatgttagtgtataacaattgatgtttgttttctgtttgattttaaacagagaaaataaaaggggtaatagctccttttttcttttctttttttttttcatttcaaagttgctgccagtgttttcaatgatggacaacagagggatatgctgtagagtgttttattgcctagttgacaaagctgcttttgaatgctggtggttctattcctttgacactatgcacttttataatacatgttaatgctatatgacaaaatgctctgattcctagtgccaaaggttcaattcagtgtatataactgaacacactcatccatttgtgcttttttttttttttttatggtgcttaaagtaaagagcccatcctttgcaaggcatccatgttgttacttaggcattttatcttggctcaaattgttgaagaatggtggcttgtttcatggtttttgtatttgtgtctaatgcacgttttaacatgatagatgcaatgcactgtgtagctagttttctggaaaagtcaatcttttaggaattgtttttcagatcttcaataaattttttctttaaatttc

SEQ ID NO: 601 - DNA, 601 bp, Homo sapiens
gaggaggcggcaaatcacttataaatggcgcggaagcaggacccgaagcctaaattccaggagggtgagcgagtgctgtgctttcatgggcctcttctttatgaagcaaagtgtgtaaaggttgccataaaggacaaacaagtgaaatacttcatacattacagtggttggaataaaaattgggatgagtgggttccggagagcagagtactcaaatacgtggacaccaatttgcagaaacagcgagaacttcaaaaagccaatcaggagcagtatgcagaggggaagatgagaggggctgccccaggaaagaagacatctggtctgcaacagaaaaatgttgaagtgaaaacgaaaaagaacaaacagaaaacacctggaaatggagatggtggcagtaccagtgagacccctcagcctccttggaagaaaagggcccgggtagatcctactgttgaaaatgaggaaacattcatgaacagagttgaagttaaagtaaagattcctgaatagctaaaaccgtggcttgttgatgactgggacttaattaccaggcattatgcaaattacaagaaatctcgtggaaacacagataataagg

SEQ ID NO: 602 - DNA, 675 bp, Homo sapiens
aatcacttataaatggcgcggaagcaggacccgaagcctaaattccaggagggtgagcgagtgctgtgctttcatgggcctcttctttatgaagcaaagtgtgtaaaggttgccataaaggacaaacaagtgaaatacttcatacattacagtggttggaataaaaattgggatgagtgggttccggagagcagagtactcaaatacgtggacaccaatttgcagaaacagcgagaacttcaaaaagccaatcaggagcagtatgcagaggggaagatgagaggggctgccccaggaaagaagacatctggtctgcaacagaaaaatgttgaagttacgaattggagcaatgttggcctatacacctctggatgagaagagccttgctttattactcaattatcttcacgatttcctaaagtacctggcaaagaattctgcaactttgtttagtgccagcgattatgaagtggctcctcctgagtaccatcggaaagctgtgtgagaggcactctcactcacttatgtttggatctccgtaaacacatttttgttcttagtctatctcttgtacaaacaatgtgctttgaagatgttagtgtataacaattgatgtttgttttctgtttgattttaaacagagaaaataaaaggggtaatagctccttttttctt

SEQ ID NO: 603 - DNA, 2887 bp, Homo sapiens
ttttgcgctcggaccttcgccagaggggccgggacatcatgacggtgggagccaggctccgaagcaaggcggagagcagcctcctgcgccgcgggccccgagggcgagggcgaaccgagggggacgaggaggcggccgccatcctggagcacctggagtacgcggacgaggcggaggcggcggccgagagcgggacgagcgcggcggacgagcggggcccggggacccggggcgcgcggagggtgcacttcgccctcctgcccgagcgctacgagccactggaggagccggcgccgagcgagcagcccaggaagaggtaccggaggaagctgaagaagtacggcaagaatgtcgggaaggtcatcatcaaaggatgccgctacgtggtcatcggcctgcaaggcttcgctgcagcctactccgccccgtttgcggtagccaccagcgtggtatccttcgtgcgctaatgggagctgctgtggcaggtgcccccagagtgaacgggagcccctgctgtgggaactttgtgaatcctggagcatctcagacttgaacacacagcatatttggaagagaaaacatgcctttctttgttgaatcacattagtatgatgagtgagtcatccctgcccatctgctgagcttctcacatctctcagtcacacgtggacccagtggtcaatcctgcagagaattcggcggaggttaggtttgggagtggagctagcgtgctaaagccagagccttcacgtgaaggtggcaggcactggggcggaagccaacactcaacagatgcaagcagtgtgggtgtgcagcagaacagtgatcttgggggaggaagaggatgttactagagtcagatgatttgctgtattctcctgaaaggtcgtaggctgacaggcgctcacattccttggctgcctcggttctgagggcagctaaggagctgtttattcctcaagtcatgctccccgatctccttcctctaccactctgtcaccaggagtttaattacaggcttgaggagaagaaaggaagaaaagatatcttgatgctttgaaaactgtgttggcagtgtggcatgactgtttaaagtagataaaaccttgtcattttaccccatccctgcatgactgtgaagctggcgaggaaggaggaagaagggcaagttcagatgcaggctgggtggctgggacaggttggctaagggactactctggagggctcttctgcctggcattgcccacttcggcccagccacgtgtttgcagcgaccagagtccctgcaaaggtgtggctggctgtggtcagggtgctactagcaccatcagcgcactcccgccattggctcagctcctctctgccagtccaactaagagtgctttgtcctgggtgggacataggggctgagagagatggggggagacataacacccaggaatgaaaatacagatttagagaaggaaccagtaagtaggagacagatgtgaaggaaatggaaatgaggcaagaggacattggaagagagaagtttgctgtccaggagccaggtctggagcatcagtgtgagggagttcaggtaggctgggcctgtgcctctaggtagggacaagggaggctgggtagccagggctggtgcttaaaacccctgaggccatgagctcattggctgcctttgtagcatcctgtcttcttctgtgctgcctggtttgatctcatctcacctggattcaaagggtaaggtgggcatgggtcttgggcctgacacccaccaaggatgacctgtggactgccatcggatgctgaacagggagatgaaaggaggtcctcttaccatacccctctgccaaccccccagtaggccactgttctgactttgtttccagaatatccagaaatccaaaggggctgttgctgaacagtctgcaggaccagtgacagcacctacctgttgtcccaaggcatacaaaggaggcctcaacgctcatgcttctctaatcaagccctaccaagacagacagaaagacagacagaaaaaaggaaggggtagaggagaaggttgaagctgtggagctagactctgcttcacttcctgaagcttcaacttcatgtcgaagattcactgggacccaattcctgcattgttaatatttgtgaggaaaagtgaaacaagtgatctggttttagcccagatgatgaaagtggatatggcacattttcacacacgtgagataattacagcttgccccacaacactgggtgttggagaaagggagagatagtcataagtggaagaaaaagccaagcatagtgagtgggaaggagagtgagagcctgtgcaggctgctgacgagccccaggcagcccacaagtttctcgtggggagatggaggcagagcccagggtaggggacagagctgctggggcctttccttgcctgggaatctgtcccaggaagagcttccccactcccatcccccaaattggaaaaaccgtacattcaagcctgtttggccctgaaattcttaagaatctggttaagaattaactcactaatgtcaaaagtcaaaacctcctaggggttgtcctgggagtcaggttcacgggtacagaagatgaatctcagatgtcactcaacctgagccgtcattctctgtggcagggctgccctgggtttctcttactcaatccctggagtgtaagcatttggattgtgtcacagattacctttttaccttttctttctttttttttctttttttcaatatcagtgcccacaccttactgagtattgagttttagagctttcgcttgatgtgcttgaccaagagacttcttttgtatccttttcttgtcctatgatgtaaataaaagcctcgatttatgt

SEQ ID NO: 604 - protein, 142 aa, Homo sapiens
MTVGARLRSKAESSLLRRGPRGRGRTEGDEEAAAILEHLEYADEAEAAAESGTSAADERGPGTRGARRVHFALLPERYEPLEEPAPSEQPRKRYRRKLKKYGKNVGKVIIKGCRYVVIGLQGFAAAYSAPFAVATSVVSFVR

SEQ ID NO: 605 - DNA, 802 bp, Homo sapiens
tctaatacctattgatctgtcactttctcccatcacgctcaggtgggaccatccagttgcaggaaaacaagcttaacatgcccactgattctacattatggtgagttctataattattttattatatattacagtgtaataatggaaataaagcacctaataaatgtaaatgtgcttaaatcttttgtcccagctcctacctcccggcagcctctccaggcccagaactttctccagtcagcctctacagaccaagctcatgactcacaatggcctatttaggcccataccctacctcacggcagtctccgcagatgagcctactgcctcacaacagcctccacaggcacagctccatcgttacaatggcctctttagacccagctcctgcctcccagccttctctccaggccctgaactttctcaagtcgacctcaccaggcccagttcatgcttctttgcagcctctccaggcccagctcctgcatcttggtggcccctccaggcccagcctctgcctcccgtcggcctctacagtcccaacatctgcctcacagcagattcttcaggcccagcatctgcctcactgtggaccccccagacccagatggtgtctcactgtggcatcctcaggtgaagctcctgcctttctgcagcctctccaggcccagctcctcctgcctcccagtggcctctttcagcccagcccagctcatgcctcctggcggccttcccaggccctgcttttgacttttggtggcctctgcaggcctcgacaaggcccggcctcctgcctcccgaa

SEQ ID NO: 606 - DNA, 1801 bp, Homo sapiens
ggcacgagggctctgtggagctgcgcctgccaactcattgctttctgctgtgctgtgatcctgcagtcagttgccgctgttgctactgcaatcatttgcaccaaactgagccagagaagttccctcttttaacataaagagtcaagaaattggagcatggctatgagcaatggaaacaatgattttgtggttctgagcaacagcagcatcgcaaccagtgctgctaacccgagtcccctcaccccctgtgatggagaccatgcagcccagcagctcacacccaaagaagcaacaagaacaaaagtgagtccaaatggatgcctgcaacttaatggcacggtcaaatcatcctttctgcctttagacaaccaaagaatgcctcagatgttaccccaatgctgccatccttgcccataccatcaccctttgactagccatagcagtcaccaagagtgccatcccgaggctggccctgcagcaccctctgctttggcctcgtgttgcatgcagccacactccgagtattctgcatctctttgtccaaatcattcacctgtgtatcagactacgtgctgtcttcagccctctccatccttctgcctgcatcatccgtggcctgaccattttcagcatcagcctgtgcaacagcacatagccaacataagaccatccagacctttcaagttgccaaaaagttatgcagccctgatagccgactggccggtggtggtcttgggcatgtgcaccatgttcatcgtagtctgtgccttggttggagtattagtgccagagctccctgacttctctgatccattgctgggttttgaaccaagaggaacagcaataggccagagattggtcacatggaataatatggtgaaaaatacaggatacaaagcaacattagcaaattatccctttaaatatgcagatgaacaagccaaaagccatcgggatgatagatggtcagatgatcattatgaaagagagaaaagagaagttgactggaacttccacaaggacagctttttctgcgacgttccaagtgaccgatattccagagtggtatttacttcatctggaggggagacattatggaatttacctgcaattaaatcaatgtgcaatgtagataattccaggatcagatctcatccccagtttggtgatctctgccagaggaccactgctgcctcctgctgccccagctggacactgggaaactacatcgccattctgaacaatagatcgtcctgtcagaaaatagttgagcgagacgtttctcataccttgaagctgcttcggacttgtgccaaacactaccaaaatggcactctggggccagactgctgggacatggcagccagaagaaaggaccagctcaagtgcaccaatgtgccacgcaaatgtaccaagtacaatgctgtgtaccagatcctccattacttggtggacaaagactttatgaccccaaagacggctgactatgccacgccagctttaaaatacagcatgctcttctctcccacagagaaaggggagagcatgatgaacatttacttggacaactttgaaaactggaactcttctgacggcgtgactaccatcaccgggattgagtttggtatcaaacacagtttgtttcaggattatcttctaatggatactgtgtatcctgccatagccattgtgattgtccttttagttatgtgtgtctacaccaagtccatgtttatcactctgatgacaatgtttgcaataatcagttctttgattgtttcctaaaaaaaaaaaaaaaaaa

SEQ ID NO: 607 - protein, 542 aa, Homo sapiens
MAMSNGNNDFVVLSNSSIATSAANPSPLTPCDGDHAAQQLTPKEATRTKVSPNGCLQLNGTVKSSFLPLDNQRMPQMLPQCCHPCPYHHPLTSHSSHQECHPEAGPAAPSALASCCMQPHSEYSASLCPNHSPVYQTTCCLQPSPSFCLHHPWPDHFQHQPVQQHIANIRPSRPFKLPKSYAALIADWPVVVLGMCTMFIVVCALVGVLVPELPDFSDPLLGFEPRGTAIGQRLVTWNNMVKNTGYKATLANYPFKYADEQAKSHRDDRWSDDHYEREKREVDWNFHKDSFFCDVPSDRYSRVVFTSSGGETLWNLPAIKSMCNVDNSRIRSHPQFGDLCQRTTAASCCPSWTLGNYIAILNNRSSCQKIVERDVSHTLKLLRTCAKHYQNGTLGPDCWDMAARRKDQLKCTNVPRKCTKYNAVYQILHYLVDKDFMTPKTADYATPALKYSMLFSPTEKGESMMNIYLDNFENWNSSDGVTTITGIEFGIKHSLFQDYLLMDTVYPAIAIVIVLLVMCVYTKSMFITLMTMFAIISSLIVS

SEQ ID NO: 608 - DNA, 2707 bp, Homo sapiens
gcttccgcctcggctcctcttcctgccggcatccgggatccctacgtcccgcgtcccccgagcgctcggagcctacgcgcccagcgctaccgaaacccagagtcctgcgccctggagtccccgcgccccggagcccgagcacccgggagtcccgagcctcgcgccccggagtgcccgagcctgcgccgccgcacccggataccccgggtccccgcgagctgccgaggccgcccgccgccgccccgcggacagtaccgccttcctcccctctgtccgcgccatggccgcccccgacctgtccaccaacctccaggaggaggccacctgcgccatctgcctcgactacttcacggatccggtgatgaccgactgcggccacaacttctgccgcgagtgcatccggcgctgctggggccagcccgaggcccgtacgcgtgccccgagtgccgcgagctgtccccgcagaggaacctgcggcccaaccgcccgcttgctaagatggccgagatggcgcggcgcctgcacccgccgtcgccggtcccgcaggcgtgtgcccgcgcaccgcgagccactggccgccttctgtggcgacgagctgcgcctcctgtgtgcggcctgcgagcgctctggggagcactgggcgcaccgcgttggccgctgcaggacgcggccgaagacctcaaggcgaagctggagaagtcactggagcatctccggaagcagatgcaggatgcgttgctgttccaagcccaggcggatgagacctgcgtcttgtggcagaagatggtggagagcagcggcagaacgtgctgcgtgagttcgagcgtcttcgccgtttgctggcagagggagggacagcagctgctgcagaggctggagaggaggagctgaaggtgctgccccggctgcgggaggcgcagcccacctaggccagcagagcgcccacctagctgagctcatcgccgagctcgagaggccgctgccagctgcctgcgctggggctgctgcaggacatcaaggacgccctgcgcagggtccaggatgtgaagctgcagcccccagaagttgtgcctatggagctgaggaccgtgtgcagggtcccgggactggtagagacactgcggaggtttcgaggggacgtgaccttggacccggacaccgccaaccctgagctgatcctgtctgaagacaggcggagcgtgcagcggggggacctacggcaggccctgccggacagcccagagcgctttgaccccggcccctgcgtgctgggccaggagcgcttcacctcaggccgccactactgggaggtggaggttggggaccgcaccagctgggccctgggggtgtgcagggagaacgtgaacaggaaggagaagggcgagctgtccgcgggcaacggcttctggatcctggtcttcctggggagctattacaattcctcggaacgggccttggctccactccgggacccacccaggcgcgtggggatctttctggactacgaggctggacatctctctttctacagtgccaccgatgggtcactgctattcatctttcccgagatccccttctcggggacgctgcggcccctcttctcacccctgtccagcagcccgaccccgatgactatctgccggccgaaaggtgggtccggggacaccctggctccccagtgactcgggccctcctggaggagtcctgttgcctctcctgcccctccaggccactgagtgttttggccacttggaggacctgggaggagggagtgtgtcctttgagcaagaggaggaactcctggtgcctttctgagcctgcgtgggagaaccccaattctagcactccaggaaactgtgggagagtgtggggcaggctccgtcctccctgggagacccctccagccaccgggtgccacttaatgccaacagcccttaccaaagctgggagccccattgccccggcagctctggcctgtggttccagaagctgagaaaactccactggggcttgcagaatccagggttcacctaagctgcacagttcctgcagctttgtcagccccctgaaagtcttgtgtaccccacctctgaagatgctggggaaggcagctgggatgggagccagccccatgcctgtctgtgaccccacagtgggtgagagcccgtcacagtcctgggtgtggctgctctggaagaattaggaggcagccataataagagtcttcagagagatgatgggaggggccagtgaggacaggaacagagagtagatgtcctataataaaggggcttctgggaggtgcctgggcacagatgtctgttcagcaggtgtgtgggcctagaggagagagcagagcccagaaatgtcttttgcaggcccacgttctgacttgaagctttcgtgggcatgttgccattgggttttgcccttgcaaaggcttcctaggtctccagtggcccctcaggacccagggtcccagctgctgcttggggatgtgcactgctgcgccggccttgcagtctctctaccctggggaggaacagtggcttctcagagcctggggcatacagaagaaggcaggagttgatttttgtgttgggtttggggtttctttgtcctcaaggtactgttctgtttctctttacccctctgctttatttattgtaagcattcccacgttaaataaactttggctgttgtctac

SEQ ID NO: 609 - protein, 96 aa, Homo sapiens
MELRTVCRVPGLVETLRRFRGDVTLDPDTANPELILSEDRRSVQRGDLRQALPDSPERFDPGPCVLGQERFTSGRHYWEVEVGDAPAGPWGCAGRT

SEQ ID NO: 610 - DNA, 2103 bp, Homo sapiens
ccgcaggcagtagagtgaagcgcgcagctgccaggacttgcgcggtgacgtgcgccgctgccaggaccttgcaggtggagagcatagttgccaaaatcaaggcggaggagcgcaccgccgctaggatccaggcggagaagcccaccgcggccaggacctaaggatgcagtacactgctgccaggatcttgtctgtggagcgcagcgcggccaggacctccggctgcagcacaccgctgccaggatcttatcggcagagcgctccgcggtccggaccccgccccgtgcgcgtccccgaccccgccccgtgcgcgtccccggcgttggcgtcttcgtcctgttgctggtctccgtccggtcgccggccgtctaggtctccggccctccccagccgctcctgcgcccttgccggccccgccgcccgcagccctggcgctccctgcgggccccgccgaggccgcctgcgccctgtgccagcgcgcgccccgggaaccggtgcgcgccgactgcggccaccgcttctgtcgggcgtgcgtggtgcgcttctgggccgaggaggacgggcccttcccgtgccccgagtgcgccgacgactgctggcagcgcgccgtggagcccggcaggcccccgctcagccgccgccttctggcgctcgaggaggcggccgcggcgcccgcgcgcgacggcccggccagcgaggccgcgctgcagctgctgtgccgcgccgacgccggcccgctctgcgccgcctgccgtatggctgcgggccccgagccgcccgagtgggaaccgcgctggaggaaggcgctgcgcggcaaggagaacaaggggtctgtggaaatcatgagaaaggacttgaatgacgcccgggacctgcatggccaggcagagtcagcagctgcagtgtggaagggacacgtgatggaccgtaggaagaaggcactgaccgactacaagaagctgcgggccttctttgtggaggaggaggagcatttcctgcaggaggctgagaaggaggaggggctccctgaggacgagctggctgaccccactgagcggttcaggtcactgctgcaggcggtctcggagctggagaagaagcatcgcaacctgggcctcagcatgctgctgcagtgatggcgccaacccgtggcagtcccagagctggaggcaggaggatggatcctcatctccatgggaagtgtcagcgtgtggctgccagggaagcgtggcaggcgcctggccttgggtccatctacatagttgcgtgtttcaacaatgtccatttatccttcaccccgaggcgtgttttgggggctgcaaacacctccctgtgctccacctgcctccgcagaaggaagcctctttctctgtttccctgggtgagggggctggcaggtggctaaccccatttagcatctccaggccctgccatcgtgtctcatcttgctgttatctctagctctttccctcctcccatttcctttagtagttgaattttgcaaagcttgtagcagtagctcagttgcctgcagcatccttgtgtgtagataaattagtcgacagaaactcagcactggggacaggattgcaaagtcggggacatagatgcagacagttgttgagatttggggatagccgggcttgtgagcggtgcccatttccagatgaagcctttcagcccttctgagtccccggcccttggtgcgatgtctgtgagtttgacctgcccagcgtgtgggctggctcaatgctgaataaagtgggtttgtgtcagctcgtttgcttcgtctccgtgtgtccacctggcctcttccccctgccctggccaccctccagtgtcaaaggaaacttcctcgtgacacgtgctaaagcatggtgaggaggactttgattgggaccattgagatgggtgtgggaccctttccttggggcctggggggagatggggctccaccccgacgtagcagggcaggggttggaggagcgaggagcagtatagggtccatgggtgggaatgactgtgaggagacatcagggctgagggggctctggctaaacccacctcacagagtccttgctgcaggcaggcagggcgatcaga

SEQ ID NO: 611 - protein, 232 aa, Homo sapiens
MQYTAARILSVERSAARTSGCSTPLPGSYRQSAPRSGPRPVRVPDPAPCASPALASSSCCWSPSGRRPSRSPALPSRSCALAGPAARSPGAPCGPRRGRLRPVPARAPGTGARRLRPPLLSGVRGALLGRGGRALPVPRVRRRLLAARRGARQAPAQPPPSGARGGGRGARARRPGQRGRAAAAVPRRRRPALRRLPYGCGPRAARVGTALEEGAARQGEQGVCGNHEKGLE

SEQ ID NO: 612 - DNA, 1082 bp, Homo sapiens
ggcacgaggcgctggccgggctggctgcggccgccctgggccgggccccaccggacggcttgctctgctctttacctggggttgctgtcgaggaccctgtgcaagactcggccggtttttctttctccctgatggacagacccaaacatagccgcgcagcatcgtgaagggctggggccttcactcctctgtggctctggaagagcccgatttcctcaggaggcatgtcgggccccaggcctgtggtgctgagcgggccttcgggagctgggaagagcaccctgctgaagaggctgctccaggagcacagcggcatctttggcttcagcgtgtcccataccacgaggaacccgaggcccggcgaggagaacggcaaagattactactttgtaaccagggaggtgatgcagcgtgacatagcagccggcgacttcatcgagcatgccgagttctcggggaacctgtatggcacgagcaaggtggcggtgcaggccgtgcaggccatgaaccgcatctgtgtgctggacgtggacctgcagggtgtgcggaacatcaaggccaccgatctgcggcccatctacatctctgtgcagccgccttcactgcacgtgctggagcagcggctgcggcagcgcaacactgaaaccgaggagagcctggtgaagcggctggctgctgcccaggccgacatggagagcagcaaggagcccggcctgtttgatgtggtcatcattaacgacagcctggaccaggcctacgcagagctgaaggaggcgctctctgaggaaatcaagaaagctcaaaggaccggcgcctgaggcttgctgtctgttctcggcaccccgggcccatacaggaccagggcagcagcattgagccacccccttggcaggcgatacggcagctctgtgcccttggccagcatgtggagtggaggagatgctgcccctgtggttggaacatcctggggtgacccccgacccagcctcgctgggctgtcccctgtccctatctctcactctggacccagggctgacatcctaataaaataactgttggattagaaaaaaaaaaaaaaaaaa

SEQ ID NO: 613 - protein, 197 aa, Homo sapiens
MSGPRPVVLSGPSGAGKSTLLKRLLQEHSGIFGFSVSHTTRNPRPGEENGKDYYFVTREVMQRDIAAGDFIEHAEFSGNLYGTSKVAVQAVQAMNRICVLDVDLQGVRNIKATDLRPIYISVQPPSLHVLEQRLRQRNTETEESLVKRLAAAQADMESSKEPGLFDVVIINDSLDQAYAELKEALSEEIKKAQRTGA

SEQ ID NO: 614 - DNA, 1316 bp, Homo sapiens
ggcacgaggtcgggcctgggtccgacggtagtgggtagcgggtctcgggttgcgggttgcaggttgcaagccgcaggccccaggcaactgccttcccggcgccatgttcggctccagtcgtggaggcgtgcgcggcgggcaggaccagttcaactgggaggacgtgaagactgacaagcagcgggagaactacctgggcaactcgctgatggcgccggtaggccgctggcagaagggccgcgacctcacctggtacgccaagggccgggcgccatgcgcgggcccgagccgcgaggaggaactggcagccgtgcgggaggcggagcgcgaggcgctgctggccgcccttggctacaagaacgtgaagaagcagcccacgggcctgagcaaggaggacttcgcggaggtctgcaagcgggaaggaggcgaccccgaggagaagggcgtggaccggctgctggggctggggagcgcaagtggctccgtgggccgcgtggcgatgtcccgagaggacaaggaggccgccaaactggggctgtctgtgttcacgcatcaccgcgtagagagcggcgggcccgggacctcggcagcctcggccaggaggaagccgcgggcggaggatcagacggaaagcagttgtgagagccacaggaaaagcaagaaggagaagaagaaaaagaaaaagaggaaacacaagaaagagaagaagaagaaagacaaagagcacaggcggccagctgaggccacctcctctcccacatctcctgagaggcccaggcaccaccaccatgactccgactccaactccccctgctgtaagaggaggaagcggggacacagtggggacaggaggagcccgtctcgcaggtggcatgacagaggctctgaggcctgatggctggaccctgctcactgctgttgtgggaccctgaaccctcccttcaccttgcttgcctcctgcctcggaagctccttgggtgtgggtgaagcccgaggctgctcctgtggaagtggctctgggcaccagcctgtggggctaaagacttgacagctagctctggagcagccggcttcctggaaaacctccaggtttcgcataccagggatggcccctggcttggcctgcgaaggtgaacctgcccagatttatcagtagaggctggactccctctgtgtcctgcccatggttgcagcagccatgggcctatgagcggtctaactgtggccaagtatggtgacctctatttttctttatattgactctttgtatttcaataaatatattttaaaaggaaggtaaaaaaaaaaaaaaaaaa

SEQ ID NO: 615 - protein, 263 aa, Homo sapiens
MFGSSRGGVRGGQDQFNWEDVKTDKQRENYLGNSLMAPVGRWQKGRDLTWYAKGRAPCAGPSREEELAAVREAEREALLAALGYKNVKKQPTGLSKEDFAEVCKREGGDPEEKGVDRLLGLGSASGSVGRVAMSREDKEAAKLGLSVFTHHRVESGGPGTSAASARRKPRAEDQTESSCESHRKSKKEKKKKKKRKHKKEKKKKDKEHRRPAEATSSPTSPERPRHHHHDSDSNSPCCKRRKRGHSGDRRSPSRRWHDRGSEA

SEQ ID NO: 616 - DNA, 1980 bp, Homo sapiens
aggaagccctgcttgatgagcatgaggctccacgggggcagtggctgtgacggtgagtgccacacagagctgcccacactggtggagggaaggcagggagataccaggaccatccggaaggggctgagtgtcatttgacaggtgccatgtgagcagagatgtgaaggagtggcccgggacaatcagggcagaatccctgaggtgtccctggccagtgtccttccacctgtccacaagcatggggaacatcttcgccaacctcttcaagggcctttttggcaaaaaagaaatgcgcatcctcatggtgggcctggatgctgcagggaagaccacgatcctctacaagcttaagctgggtgagatcgtgaccaccattcccaccataggcttcaacgtggaaaccgtggagtacaagaacatcagcttcactgtgtgggacgtgggtggccaggacaagatccggcccctgtggcgccactacttccagaacacacaaggcctgatcttcgtggtggacagcaatgacagagagcgtgtgaacgaggcccgtgaggagctcatgaggatgctggccgaggacgagctccgggatgctgtcctcctggtgttcgccaacaagcaggacctccccaacgccatgaatgcggccgagatcacagacaagctggggctgcactcactacgccacaggaactggtacattcaggccacctgcgccaccagcggcgacgggctctatgaaggactggactggctgtccaatcagctccggaaccagaagtgaacgcgacccccctccctctcactcctcttgccctctgctttactctcatgtggcaaacgtgcggctcgtggtgtgagtgccagaagctgcctccgtggtttggtcaccgtgtgcatcgcaccgtgctgtaaatgtggcagacgcagcctgcggccaggctttttatttaatgtaaatagtttttgtttccaatgaggcagtttctggtactcctatgcaatattactcagctttttttattgtaaaaagaaaaatcaactcactgttcagtgctgagaggggatgtaggcccatgggcacctggcctccaggagtcgctgtgttgggagagccggccacgcccttggctttagagctgtgttgaaatccattttggtggttggtttttaacccaaactcagtgcattttttaaaatagttaagaatccaagtcgagaacacttgaacacacagaagggagaccccgcctagcatagatttgcagttacggcctggatgccagtcgccagcccagctgttcccctcgggaacatgaggtggtggtggcgcagcagactgcgatcaattctgcatggtcacagtagagatccccgcaactcgcttgtccttgggtcaccctgcattccatagccatgtgcttgtccctgtgctcccacggttcccaggggccaggctgggagcccacagccaccccactatgccgcaggccgccctacccaccttcaggcagcctatgggacgcagggccccatctgtccctcggtcgccgtgtggccagagtgggtccgtcgtccccaacactcgtgctcgctcagacactttggcaggatgtctggggcctcaccagcaggagcgcgtgcaagccgggcaggcggtccacctagacccacagcccctcgggagcaccccacctctgtgtgtgatgtagctttctctccctcagcctgcaagggtccgatttgccatcgaaaaagacaacctctacttttttcttttgtattttgataaacactgaagctggagctgttaaatttatcttggggaaacctcagaactggtctatttggtgtcgtggaacctcttactgctttcaatacacgattagtaatcaactgttttgtatacttgttttcagttttcatttcgacaaacaagcactgtaattatagctattagaataaaatctcttaactatt

SEQ ID NO: 617 - protein, 181 aa, Homo sapiens
MGNIFANLFKGLFGKKEMRILMVGLDAAGKTTILYKLKLGEIVTTIPTIGFNVETVEYKNISFTVWDVGGQDKIRPLWRHYFQNTQGLIFVVDSNDRERVNEAREELMRMLAEDELRDAVLLVFANKQDLPNAMNAAEITDKLGLHSLRHRNWYIQATCATSGDGLYEGLDWLSNQLRNQK

SEQ ID NO: 618 - DNA, 3712 bp, Homo sapiens
gtgggaccatccagttgcaggaaaacaagcttaacacgcccactgattctacattatgctcctacctcccagcagcctctccaggcccagaactttctccagtcagcctctacagaccaagctcatgactcacaatggcctatttaggcccataccctacctcacggcagtctccgcagatgagcctactgcctcacaacagcctccacaggcacagctccatcgttacaatggcctctttagacccagctcctgcctcccagccttctctccaggccctgaactttctcaagtcgacctcaccaggcccagctcatgcttctttgcagcctctccaggcccagctcctgcatcttggtggcacctccaggcccagcctctgcctcccgtcggcctctacaatcccaacatctgcctcacagcagattcttcaggcccagcatctgcctcactgtggaccccccaagccaagctcccaacctttcagcagcttctacacacccaactcctgccacccagtggcctctttaggccaagctcatgcttcacaagggcctttccaggctcaacttttgtctcatggcaacctttcctggccagattcctgcctgtctcccagcagcctagacaggcccaggtcttgcctcacactggcctctctacatccagctcatgcctcacggtggcctctccaggcccaactcctgtcccaggacgtcatctccgggcccaaaacttactcaagtcagactctctagtcccaactgctgcctcctggtggcctatgaaggcccaaaatctcctcaagtggacctctccaggcccagctcctgcctcctgtcagcgtctacaggcccaacctctgcctcatgggggcttctccaggcccacctcttcctcttggctgggtctacaggcacaactgctgcctcacaacagccttttttggcccagttcctgtccagctcatggcggccaatgtaggcccaaaacttcctcaagtcaaactctccaggcccaccttctgcttcccggtggcatgaacaggcccagctttgacttgagaacagcctctgcaggccctgctcttgcctcccaggggctttttccagacccagctcctgcctcatggcagctgccccaggccaaatttctgcctgcctgccagcagcctcaacaggcacagctcctccctcacagtggcccatttaggcccaactcatgactgtcgggccatttccaggcctagtgcctgcctcgtggctgactcttgaagcccaaaacttcctcaaatcagccttttgcccaacttctgtctactgtcggactctacaggccagcctctgcctcacagtggaccctccagacccagatggtgtctcactgtggcatcctcaggcgaagctcctgcctttccgcagcctctacaggcccagctcctgccttgcagtggcctctttaggccaagctcatgccccatggcgacttttccaggcacagcttttgccttttgcagcctgtcgaggcccagaatgtccttaactcggcatctccaggatgagctcatcctcccagtgcgtctacaggcccgtctcctgcctcacaacaacctcctttggcccaactcctgctgagctgctggcagcctctgtaggccacagaattcttaaggtaaagctttccaggcccacctttggcctcccggcaggctcagcaatcaaactattccctcactgcggccaccgaaagccaagtttctccctgcctcacggcatcctccgaaaactgagcatttgcctcacggtggcctccccaggccatgaatctgcctgcctcccaggcagctgctgcctcacaatggtctctttaggcccagctcatgctaaaagatggactctccaggcacagctcttgcctcctggcagcctctgcaggcccaaattctccaaaagttggcctctcctaactcagctcctgcctcatgtctgcctacacaggcccagactcttaccacacagtagaccctccaggcccaccacttgcctgatcatagcctcctaaggccaagctcctgcctttcggcagcctctacaggccaagctcctgcctcgcaattgcctctgtaggccaagatcatgccgtgaagtggccttccctagcctaacttttgctttttgacgcatactccagtcccaaaacttcctccagtcagccggtccaggccaagctcttcctcccaaaggcttctgcaggccaaaatcatcctgaagtcaccctctgcaggcgcagctcctgcctccaagtgctgtgtaggccaagctaatgcctcacagcacactttccaggctgagcatttccttttgtgcatcctctccaagccctgaacttactccagttggcctctccagaccaagctctccctcccagtggcctctacaggccaaaattgtcctcaggtcagcctctccagggccaactcctagctaccggtggcttctgcaggccaaaatcgacctcaagtcagcctcttcacacccagctcttgcctctgagtggcctctccaggagcaaaactttctcaagtcggcctctccaggcccagcctcctgcttcccgagggcatgtacaggcccagcctctgcctcacagcagactcttcacacccagctcttccctgtctgcggcctctccagtccaaagctgctcctgccttttggcagcttgtacaggcccagctcctccctcacggtggcctctttcggcccaactcatgcctcttgcaacgtgcccaagtgtcagctcctgcctcacactggcctgttgaggcccagctcatgcctctcgtggcctcaacgggcccatcccctgcctgtcggcggcctctacaggcccggcctctacctcacagtgggctctccaggcccacctcttcctcaccgtggcctcctggggcaatgctcctccctctcgggagcctctgtgggcccagctcctgcctcccagtggcctctgctggccaagcccgtgcctcagggcagcctttccaggcctagcgtttgctgctttgcatcctctccaggccctggacttcctccagtcggcctctccaggcccagctcttcctctcggcggcctctgcaggcccagactgtcgtcaagtcggcctgtccagggccagctcctgcctcccggcggcctctgcaggcccaagtcgtcctcaagttggcctccccaggcccagcaacggcctctcggcggcctttccgggtgcaaaagttcctcgagtcagcctctccaggcccagctcctcctgcctcccagtggcctctttcggcccagcccagctcatgcctcccggcggccttcccaggccctgcttttgactttcggtggcctctgcaggcctcgacaaggccaggcctcctgcctcccaaaggcctgcacaggcccagcctctgcctcacagcagactctccacgcccagctagctctcgcctcactgcggcttcccgagtccaaagctcctgcctctcagccgcttcggcaggcccagctcccgcctgccagtggcctcttcaggcccatggggctcattcctcacaacggcctttccaggcccagtttttcccttccggcggcctcttggcctctaatttgtttatcttttgggtataaatcccaaaatattgaattttggaatatttccaccatt

SEQ ID NO: 619 - DNA, 772 bp, Homo sapiens
tctaatacctattgatctgtcactttctcccatcacgctcaggtgggaccatccagttgcaggaaaacaagcttaacacgcccactgattctacattatggtgagttctataattattttattatatattacagtgtaataatggaaataaagtgcctaataaatgtaaatgtgcttaaatcttttggcccagctcctacctcccagcagcctctccaggcccagaactttctccagtcagcctctacagaccaagctcatgactcacaatggcctatttaggcccataccctacctcacggcagtctccgcagatgagcctactgcctcacaacagcctccacaggcacagctccatcgttacaatggcctctttagacccagctcctgcctcccagccttctctccaggccctgaactttctcaagtcgacctcaccaggcccagctcatgcttctttgcagcctctccaggcccagctcctgcatcttggtggcacctccaggcccagcctctgcctcccgtcggcctctacaatcccaacatctgcctcacagcagattcttcaggcccagcatctgcctcactgtggaccccccagacccagatggtgtctcactgtggcatcctcaggcgaagctcctgcctttccgcagcctctccaggcccagctcctcctgcctcccagtggcctctttcggcccagcccagctcatggctctcggcggccttcccaggccccgcttttgacttttggcggcctcttcaggcc

SEQ ID NO: 620 - DNA, 460 bp, Homo sapiens
ttgaagaactttgccaaatactttcttcaccaatctcatgaggagagggaacatgctgagaaactgatgaagctgcagaaccaacgaggtggccgaatcttccttcaggatatcaagaaaccagactgtgatgactgggagagcgggctgaatgcgatggagtgtgcattacatttggaaaaaagtgtgaatcagtcactactggaactgcacaaactggccactgacaaaaatgacccccatttgtgtgacttcattgagacacattacctgaataagcaggtgaaagccatcaaagaattgggtgagcacgtgaccaacttgtgcaagatgggagcgcccgaatctggctcggcggaatacctcttagacaagcacaccctgggggacagtgataatgaaagctaagcctcaggctaatttccacatagccgtgggagtgacttccctggtcaccaag

SEQ ID NO: 621 - protein, 113 aa, Homo sapiens [sequence omitted]

SEQ ID NO: 622 - DNA, 1026 bp, Homo sapiens
atggccggcacaaagatggggcgggaggacagcgtgctggatacggcgtggggcgggtccgcggcccgggagacccatgctggggcggccctgtcactcgtctcgctgccaagcacagggctgaggtgcggagggaccactgagaggacttcgctgcgtgtcagctcagctctggacggcgtggaggagccctggaaactttatttacaaaaactgacagcagctgcccttagtttggcagctggaaaatgggaaagagaaagtaagaggaagggtggcaaaggagggagcccatgtggacagcaggaacgggtacacgatagcacaagaatcaaaacaaaggctctctggtcggagtttagaaaggctgaaggggatactaaaggaggagataaagcccaggtgaaggacgaaccacagaatagatccgcgaggttgtctgctaaacctgctcctccaaaaccagagcccaagcctaaaaaggcccctgcagagacagtacccaaagggaaaaagggaaaagctgttgctggcaaggaggggaataaccctgcagaaaatggagatgccaaaacagaccaggcacagaaagctgaaggtgctggagatgccaaggcaaatctgctgccacggtgtggcagcaaagaaatgaaaggaagtgtctggcagcgcaggggagaaattgtgtttcctccttctccaaaggttcaccttttctatttcaccttcatcattcataagaaggtgaaaggatgccaggagcaaggcggatctacgggacttttgaaaagaaatgtactgacctttggctgtaaaaactgtgtcatgagaacagaaagccctgagagaagaagacagccattcatgggatctatggcgcactctgtgctagggcagaatgccagggaagagctgcctgtcttcagcgcccttgctgggaaccacacgccagaacccgaccctgccatgctttgtgcttcaggcagcaggaccccacccctaacagagtctcaagtcagacactaa

SEQ ID NO: 623 - protein, 341 aa, Homo sapiens [sequence omitted]

SEQ ID NO: 624 - DNA, 2099 bp, Homo sapiens
aagaagctgccgttgttctgggtactacagcagaagggtatgcggaagcgagcaccccagtctgagatggctcctgccggtgtgagcctgagggccaccatcctctgcctcctggcctgggctggcctggctgcaggtgaccgggtgtacatacaccccttccacctcgtcatccacaatgagagtacctgtgagcagctggcaaaggccaatgccgggaagcccaaagaccccaccttcatacctgctccaattcaggccaagacatcccctgtggatgaaaaggccctacaggaccagctggtgctagtcgctgcaaaacttgacaccgaagacaagttgagggccgcaatggtcgggatgctggccaacttcttgggcttccgtatatatggcatgcacagtgagctatggggcgtggtccatggggccaccgtcctctccccaacggctgtctttggcaccctggcctctctctatctgggagccttggaccacacagctgacaggctacaggcaatcctgggtgttccttggaaggacaagaactgcacctcccggctggatgcgcacaaggtcctgtctgccctgcaggctgtacagggcctgctagtggcccagggcagggctgatagccaggcccagctgctgctgtccacggtggtgggcgtgttcacagccccaggcctgcacctgaagcagccgtttgtgcagggcctggctctctatacccctgtggtcctcccacgctctctggacttcacagaactggatgttgctgctgagaagattgacaggttcatgcaggctgtgacaggatggaagactggctgctccctgatgggagccagtgtggacagcaccctggctttcaacacctacgtccacttccaagggaagatgaagggcttctccctgctggccgagccccaggagttctgggtggacaacagcacctcagtgtctgttcccatgctctctggcatgggcaccttccagcactggagtgacatccaggacaacttctcggtgactcaagtgcccttcactgagagcgcctgcctgctgctgatccagcctcactatgcctctgacctggacaaggtggagggtctcactttccagcaaaactccctcaactggatgaagaaactgtctccccggaccatccacctgaccatgccccaactggtgctgcaaggatcttatgacctgcaggacctgctcgcccaggctgagctgcccgccattctgcacaccgagctgaacctgcaaaaattgagcaatgaccgcatcagggtgggggaggtgctgaacagcattttttttgagcttgaagcggatgagagagagcccacagagtctacccaacagcttaacaagcctgaggtcttggaggtgaccctgaaccgcccattcctgtttgctgtgtatgatcaaagcgccactgccctgcacttcctgggccgcgtggccaacccgctgagcacagcatgaggccagggccccagaacacagtgcctggcaaggcctctgcccctggcctttgaggcaaaggccagcagcagataacaaccccggacaaatcagcgatgtgtcacccccagtctcccaccttttcttctaatgagtcgactttgagctggaaagcagccgtttctccttggtctaagtgtgctgcatggagtgagcagtagaagcctgcagcggcacaaatgcacctcccagtttgctgggtttattttagagaatgggggtggggaggcaagaaccagtgtttagcgcgggactactgttccaaaaagaattccaaccgaccagcttgtttgtgaaacaaaaaagtgttcccttttcaagttgagaacaaaaattgggttttaaaattaaagtatacatttttgcattgccttcggtttgtatttagtgtcttgaatgtaagaacatgacctccgtgtagtgtctgtaataccttagttttttccacagatgcttgtgatttttgaacaatacgtgaaagatgcaagcacctgaatttctgtttgaatgcggaacaatagctggttatttctcccttgtgttagtaataaacgtcttgccac

SEQ ID NO: 625 - protein, 485 aa, Homo sapiens
MRKRAPQSEMAPAGVSLRATILCLLAWAGLAAGDRVYIHPFHLVIHNESTCEQLAKANAGKPKDPTFIPAPIQAKTSPVDEKALQDQLVLVAAKLDTEDKLRAAMVGMLANFLGFRIYGMHSELWGVVHGATVLSPTAVFGTLASLYLGALDHTADRLQAILGVPWKDKNCTSRLDAHKVLSALQAVQGLLVAQGRADSQAQLLLSTVVGVFTAPGLHLKQPFVQGLALYTPVVLPRSLDFTELDVAAEKIDRFMQAVTGWKTGCSLMGASVDSTLAFNTYVHFQGKMKGFSLLAEPQEFWVDNSTSVSVPMLSGMGTFQHWSDIQDNFSVTQVPFTESACLLLIQPHYASDLDKVEGLTFQQNSLNWMKKLSPRTIHLTMPQLVLQGSYDLQDLLAQAELPAILHTELNLQKLSNDRIRVGEVLNSIFFELEADEREPTESTQQLNKPEVLEVTLNRPFLFAVYDQSATALHFLGRVANPLSTA

SEQ ID NO: 626 - DNA, 2470 bp, Homo sapiens
gaattcggcacgagccgggatcctgtgtagcggctgcagagggtgccgccgccctaggcgaagtagggccgtcctgagcgaaagaaccgcccccagcaggagcaccaccacggcttagcaaagaatcccagaccccgcccgggaaggcagccgcaccatggagtcttccagttcatctaactcttatttctccgttggcccaaccagtcccagcgctgtcgtgctcctctactcgaaggagctcaaaaagtgggatgagtttgaagatattttagaagagaggaggcatgtcagtgacttgaaatttgcaatgaaatgctacacacctcttgtctataagggaattactccatgtaaaccaattgatattaaatgtagtgttctcaattctgaggagattcattatgtcattaaacagctttccaaggaatcccttcaatctgtggatgtcctccgagaggaagtgagtgagatcttagatgaaatgagtcacaaactgcgtcttggagccattcggttttgtgccttcaccctgagcaaagtatttaaacaaattttctcgaaggtgtgtgtaaatgaagaaggtattcagaaactacaaagagccatccaggagcatcctgttgttctgctgcctagtcatcgaagttacattgacttcctcatgttgtcttttcttctatacaattatgatttgcctgtgccagttatagcagcaggaatggacttcctgggaatgaaaatggttggtgagctgctacgaatgtcgggtgcctttttcatgcggcgtacctttggtggcaataaactctactgggctgtattctctgaatatgtaaaaactatgttacggaatggttatgctcctgttgaatttttcctcgaagggacaagaagccgctctgccaagacattgactcctaaatttggtcttctgaatattgtgatggagccattttttaaaagagaagtttttgatacctaccttgtcccaattagtatcagttatgataagatcttggaagaaactctttatgtgtatgagcttctaggggttcctaaaccaaaagagtctacaactgggttgctgaaagccagaaagattctctctgaaaattttggaagcatccatgtgtactttggagatcctgtgtcacttcgatctttggcagctgggaggatgagtcggagctcatataacttggttccaagatacattcctcagaaacagtctgaggacatgcatgcctttgtcactgaagttgcctacaaaatggagcttctgcaaattgaaaacatggttttgagcccctggaccctaatagttgctgttctgcttcagaaccggccatccatggactttgatgctctggtggaaaagactttatggctaaaaggcttaacccaggcatttggagggtttctcatttggcctgataataaacctgctgaagaagttgtcccggccagcattcttctgcattccaacattgccagccttgtcaaagaccaggtgattctgaaagtggactccggagactcggaagtggtcgatgggcttatgctccagcacatcactctcctcatgtgctcagcttataggaaccagctgctcaacatttttgtgcgcccatccttagtagcagtagcattgcagatgacaccagggttcaggaaagaggatgtctacagttgctttcgcttcctacgtgatgtttttgcagatgagttcatcttccttccaggaaacacactaaaggactttgaagaaggctgttacctgctttgtaaaagtgaagccatacaagtgactacgaaagacatcctagttacagagaaaggaaatactgtgttagaatttttagtaggactctttaaaccttttgtggaaagctatcagataatttgcaagtaccttttgagtgaagaagaggaccacttcagtgaggaacagtacttggctgcagtcagaaaattcacaagtcagcttctcgatcaaggtacctctcaatgttatgatgtattatcttctgatgtgcagaaaaacgccttagcagcctgtgtgaggctcggagtagtggagaagaagaagataaataataactgtatatttaatgtgaatgaacctgccacaaccaaattagaagaaatgcttggttgtaagacaccaataggaaaaccagccactgcaaaactttaataatcaacaaatagttatggaaaattcggtcacgtaattactctcatcgaaggactcattacaacaaacagggaagtaaaggaagagacacatcctctcatactccctgagactctgagaacagtggacgcagagggaagagatgatcattggaagcaatcagtttactcttccccaccacagtggttaaaaggcgtttgtatctgacactatgtgtgtgttttaaaataaacttttggaaacatgaaaaaaaaaaaaaaaaaactcgag

SEQ ID NO: 627 - protein, 680 aa, Homo sapiens
MESSSSSNSYFSVGPTSPSAVVLLYSKELKKWDEFEDILEERRHVSDLKFAMKCYTPLVYKGITPCKPIDIKCSVLNSEEIHYVIKQLSKESLQSVDVLREEVSEILDEMSHKLRLGAIRFCAFTLSKVFKQIFSKVCVNEEGIQKLQRAIQEHPVVLLPSHRSYIDFLMLSFLLYNYDLPVPVIAAGMDFLGMKMVGELLRMSGAFFMRRTFGGNKLYWAVFSEYVKTMLRNGYAPVEFFLEGTRSRSAKTLTPKFGLLNIVMEPFFKREVFDTYLVPISISYDKILEETLYVYELLGVPKPKESTTGLLKARKILSENFGSIHVYFGDPVSLRSLAAGRMSRSSYNLVPRYIPQKQSEDMHAFVTEVAYKMELLQIENMVLSPWTLIVAVLLQNRPSMDFDALVEKTLWLKGLTQAFGGFLIWPDNKPAEEVVPASILLHSNIASLVKDQVILKVDSGDSEVVDGLMLQHITLLMCSAYRNQLLNIFVRPSLVAVALQMTPGFRKEDVYSCFRFLRDVFADEFIFLPGNTLKDFEEGCYLLCKSEAIQVTTKDILVTEKGNTVLEFLVGLFKPFVESYQIICKYLLSEEEDHFSEEQYLAAVRKFTSQLLDQGTSQCYDVLSSDVQKNALAACVRLGVVEKKKINNNCIFNVNEPATTKLEEMLGCKTPIGKPATAKL

SEQ ID NO: 628 - DNA, 665 bp, Homo sapiens
ctcttcctaagccggcgctcggcaagttctcccaggagaaggccatgttcagtacgagcgccaagatcgtgaagcctaatggcgagaagccggacgagttcgagtcccgcatctcccaggctcttctggagctggagatgaacttggacctcaaggctcagctcagggagctgaatattatggcagccaaggaaattgaggttggtggtggtcagaaagctatcataatctttgttcccgttcctcaactgaaatctttccagaaaatccaagtccggctagtatgtgaattggagaaaaagttcagtgggaagcatgttgtctttatcgcttaaaggagaatcctgcctaagccaacttggaaaagctgtacaaaatataagcaaaagcatcccaggagccatactctgacagctgtgcacgatgccatccttgaggacttggtcttcacaagcaaaattgtgggcaagagaatccgcgtgaaactagatggcagccggctcatgaaggttcatttggacaaagcacagcagaacaatgtggaacacaaggttgaaactttttctggtgtctataagaagctcatgggcaaggatgttaattttgaattcccagagtttcaattgtaaacaaaaatgactaaataaaaaatatatattcacagt

SEQ ID NO: 629 - protein, 194 aa, Homo sapiens
MFSTSAKIVKPNGEKPDEFESRISQALLELEMNLDLKAQLRELNIMAAKEIEVGGGQKAIIIFVPVPQLKSFQKIQVRLVCELEKKFSGKHVVFIAKRRILPKPTWKSCTKYKQKHPRSHTLTAVHDAILEDLVFTSKIVGKRIRVKLDGSRLMKVHLDKAQQNNVEHKVETFSGVYKKLMGKDVNFEFPEFQL

SEQ ID NO: 630 - DNA, 926 bp, Homo sapiens
gtcgcgaccctggtccggacctgacctgaattgcgaccccaacctggactgctcccctgaccgcaacccctacccccgcccaccagtatggcccggcacgtgttcctaacggggcccccaggagttggaaaaacaacattgatccataaagccagtgaggttttaaaatcctctggtgtgcctgttgatggattttataccgaagaagtcagacagggagggagaagaataggattcgatgtcgtcacgttgtccggcacccgggggcctttatcgagagttgggttagagcctccacctggaaaacgtgaatgccgagttgggcagtatgtggtcgacctgacttcttttgagcagttggcactacccgtcttgaggaatgccgactgcagcagtggcccagggcaaagagtgtgcgtcatcgatgagattgggaagatggagctcttcagtcagcttttcattcaagctgttcgtcagacgctgtctaccccagggactataatccttggcacaatcccagttcctaaaggaaagccactggctcttgtagaagaaatcagaaacagaaaggatgtgaaggtgtttaatgtcaccaaggaaaacagaaaccaccttctgccagatatcgtgacgtgcgtgcagagcagcaggaagtgaagacacgtgcattcctgccttccgtgaaggagtgcccagttcaagaggagcctgatggagccctgcctgtcgaggctgtatgcctatggggttatggaaccttgtgggcttttctagagaaaactcaacagctgtttcccataaaatgtttaaaagatcaaattagccttaatgctggattgtctgtacaagattaactatccattgtggcttatctatgcttaaagatttcttgtttatttaaaaaaaaaaaaaaaaaaaaaaaa

SEQ ID NO: 631 - protein, 190 aa, Homo sapiens
MARHVFLTGPPGVGKTTLIHKASEVLKSSGVPVDGFYTEEVRQGGRRIGFDVVTLSGTRGPLSRVGLEPPPGKRECRVGQYVVDLTSFEQLALPVLRNADCSSGPGQRVCVIDEIGKMELFSQLFIQAVRQTLSTPGTIILGTIPVPKGKPLALVEEIRNRKDVKVFNVTKENRNHLLPDIVTCVQSSRK

SEQ ID NO: 632 - DNA, 412 bp, Homo sapiens
gcaagatggcagaagtagagcagaagaagaagcggaccttccgcaagttcacctaccgcggcgtggacctggaccagctgctggacatgtcctacgaacagctgatgcagctgtacagtgcgcgccagcggcggcggctgaaccggggcctgcggcggaagcggcactacctgctgaagcgcctgcgcaaggccaagaaggaggcgccgcccatggagaagccggaagtggtgaagacgcacctgagggacgtgatcatcctgcccgaggtggtgggcagcatggtgggcgtccacaacggcaagaccttcacctacaagcccgtaaagcaatgccggtccggcatcggcgccacccactccttctgcttcatccctctcaagtagtggctcagctaataaaggcgcacatg

SEQ ID NO: 633 - protein, 126 aa, Homo sapiens
MAEVEQKKKRTFRKFTYRGVDLDQLLDMSYEQLMQLYSARQRRRLNRGLRRKRHYLLKRLRKAKKEAPPMEKPEVVKTHLRDVIILPEVVGSMVGVHNGKTFTYKPVKQCRSGIGATHSFCFIPLK

SEQ ID NO: 634 - DNA, 434 bp, Homo sapiens
accatgtctattctcaagatccatgccagggagctctttgactctcgtgggaatcccactgttgaggttgatctcttcacctcagaaggtctcttcagagctgctgtgcccagtggtgcttcaactggtatctatgaggtcctagagctccaggacaatgataagactcgctatatggggaagggtgtctcaaagcctgttgagcccatcaataaaactattgcacctgtcctggttagcaagaaactgaacgtcacagaacttctacagaagccaagctccctggagccctgttggcagctctagccttgcagtcatgtaattggcccaaatcaccggagccacgtgaccctccagtgtcatctccggggtggccacaggcaagatccccagtgattttgtgctcaaaataaaaagcctcattgacccatgag

SEQ ID NO: 635 - protein, 100 aa, Homo sapiens
MSILKIHARELFDSRGNPTVEVDLFTSEGLFRAAVPSGASTGIYEVLELQDNDKTRYMGKGVSKPVEPINKTIAPVLVSKKLNVTELLQKPSSLEPCWQL

SEQ ID NO: 636 - DNA, 1791 bp, Homo sapiens
cccagaaattctacccaagctccctcagcaccatgtaccgagcacttcggctcctcgcgcgctcgcgtcccctcgtgcgggctccagccgcagccttagcttcggctcccggcttgggtggcgcggccgtgccctcgttttggcctccgaacgcggctcgaatggcaagccaaaattccttccggatagaatatgatacctttggtgaactaaaggtgccaaatgataagtattatggcgcccagaccgtgagatctacgatgaactttaagattggaggtgtgacagaacgcatgccaaccccagttattaaagcttttggcatcttgaagcgagcggccgctgaagtaaaccaggattatggtcttgatccaaagattgctaatgcaataatgaaggcagcagatgaggtagctgaaggtaaattaaatgatcattttcctctcgtggtatggcagactggatcaggaactcagacaaatatgaatgtaaatgaagtcattagcaatagagcaattgaaatgttaggaggtgaacttggcagcaagatacctgtgcatcccaacgatcatgttaataaaagccagagctcaaatgatacttttcccacagcaatgcacattgctgctgcaatagaagttcatgaagtactgttaccaggactacagaagttacatgatgctcttgatgcaaaatccaaagagtttgcacagatcatcaagattggacgtactcatactcaggatgctgttccacttactcttgggcaggaatttagtggttatgttcaacaagtaaaatatgcaatgacaagaataaaagctgccatgccaagaatctatgagctcgcagctggaggcactgctgttggtacaggtttaaatactagaattggctttgcagaaaaggttgctgcaaaagtggctgcacttacaggcttgccttttgtcactgctccgaataaatttgaagctctggctgctcatgacgctctggttgagctcagtggagccatgaacactactgcctgcagtctgatgaagatagcaaatgatattcgatttttgggttctggtcctcggtcaggtctgggagaattgatcttgcctgaaaatgaaccaggaagcagtatcatgccaggcaaggtgaaccctactcagtgtgaagcaatgaccatggttgcagcccaagtcatggggaaccatgttgctgtcactgtcggaggcagcaatggacattttgagttgaatgttttcaagccaatgatgattaaaaatgtgttacactcagccaggctgctgggggatgcttcagtttcctttacagaaaactgcgtggtgggaatccaggccaatacagaaaggatcaacaagctgatgaatgagtctctaatgttggtgacagctctcaatcctcatatagggtatgacaaggcagcaaagattgctaagacagcacacaaaaatggatcaaccttaaaggaaactgctatcgaacttggctatctcacagcagagcagtttgacgaatgggtaaaacctaaggacatgctgggtccaaagtgatttacataaatttataatgaaaataaacatgtataaaatttaaaaaaacagactcccatttcttaaaaacggataagtttgaaaggaaactgctattgaacttaagcatctctagcagagcaatttgatcagtatataaaaccctaggatgtgctaggtctaagatggattaaacaagtataaaataaaatacatttataaaataaaaaggaaaacagacttaaaa

SEQ ID NO: 637 - protein, 510 aa, Homo sapiens
MYRALRLLARSRPLVRAPAAALASAPGLGGAAVPSFWPPNAARMASQNSFRIEYDTFGELKVPNDKYYGAQTVRSTMNFKIGGVTERMPTPVIKAFGILKRAAAEVNQDYGLDPKIANAIMKAADEVAEGKLNDHFPLVVWQTGSGTQTNMNVNEVISNRAIEMLGGELGSKIPVHPNDHVNKSQSSNDTFPTAMHIAAAIEVHEVLLPGLQKLHDALDAKSKEFAQIIKIGRTHTQDAVPLTLGQEFSGYVQQVKYAMTRIKAAMPRIYELAAGGTAVGTGLNTRIGFAEKVAAKVAALTGLPFVTAPNKFEALAAHDALVELSGAMNTTACSLMKIANDIRFLGSGPRSGLGELILPENEPGSSIMPGKVNPTQCEAMTMVAAQVMGNHVAVTVGGSNGHFELNVFKPMMIKNVLHSARLLGDASVSFTENCVVGIQANTERINKLMNESLMLVTALNPHIGYDKAAKIAKTAHKNGSTLKETAIELGYLTAEQFDEWVKPKDMLGPK

SEQ ID NO: 638 - DNA, 3156 bp, Homo sapiens
  unsure 4: unknown base
gggntcggcccctccccctcttctgcgctctcttcgggatacacgtgggcttcgggcctgggccgcgcagtttttctttggctttctcgaatcatcgaggagactggcaaaattagtaatgtctttagactgcgtcactagcgccaatcgaattcgtagttgattgttctttgaattcacatttgagtcctcggttaaaacctcagttaaaaagcaggataaagtcgagctgctttggttctcggaacggaaaagcgtttttttgttgtttagaggcttggcctttatggggctcgtgtgtgttttaggggacggcaaaacagaacagaaaggcggagataaaaagaggggtgttaaaagaccacgagaagatcatggccgtggatattttgagtacattgaagagaacaagtatagcagagccaaatctcctcagccacctgttgaagaagaagatgaacacttcgatgacacagtggtttgtcttgatacttataattgtgatctacattttaaaatatcaagagatcgtctcagtgcttcttcccttacaatggagagttttgcttttctttgggctggaggaagagcatcctatggtgtgtcaaaaggcaaagtgtgttttgagatgaaggttacagagaagatcccagtaaggcatttatatacaaaagatattgacatacatgaagttcgtattggctggtcactaactacaagtggaatgttacttggtgaagaagaattttcttatgggtattctctaaaaggaataaaaacatgcaactgtgagactgaagattatggagaaaagtttgatgaaaatgatgtgattacatgttttgctaactttgaaagtgatgaagtagaactctcgtatgctaagaatggacaagatcttggcgttgccttcaaaatcagtaaggaagttcttgctggacggccactgttcccgcatgttctctgccacaactgtgcagttgaatttaattttggtcagaaggaaaagccatattttccaatacctgaagagtatactttcatccagaacgtccccttagaggatcgagttagaggaccaaaggggcctgaagagaagaaagattgtgaagttgtgatgatgattggcttgccaggagctggaaaaactacctgggttactaaacatgcagcagaaaatccagggaaatataacattcttggcacaaatactattatggataagatgatggtggcaggttttaagaagcaaatggcagatactggaaaactgaacacactgttgcagagagccccccagtgtcttgggaaatttattgagattgctgcccgaaagaagcgaaattttattctggatcagacaaatgtgtctgctgctgcccagaggagaaaaatgtgcctgtttgcaggcttccagcgaaaagctgttgtagtttgcccaaaagatgaagactataagcaaagaacacagaagaaagcagaagtagaggggaaagacctaccagaacatgcggtcctcaaaatgaaaggaaactttaccctcccagaggtagctgagtgctttgatgaaataacctatgttgaacttcagaaggaagaagcccaaaaactcttggagcaatataaggaagaaagcaaaaaggctcttccaccagaaaagaaacagaacactggctcaaagaaaagcaataaaaataagagtggcaagaaccagtttaacagaggtggtggccatagaggacgtggaggattcaatatgcgtggtggaaatttcagaggaggagcccctgggaatcgtggcggatataataggaggggcaacatgccacagagaggtggtggcggtggaggaagtggtggaatcggctatccataccctcgtgcccctgtttttcctggccgtggtagttactcaaacagagggaactacaacagaggtggaatgcccaacagagggaactacaaccagaacttcagaggacgaggaaacaatcgtggctacaaaaatcaatctcagggctacaaccagtggcagcagggtcaattctggggtcagaagccatggagtcagcattatcaccaaggatattattgaatacccaaataaaacgaactgatacatatttctccaaaaccttcacaagaagtcgactgttttctttagtaggctaactttttaaacattccacaagaggaagtgcctgcgggttccttttttagaagctttgtgggttgattttttttcttttcttttttgtacatttttaattgcagtttaaaagtgaatcgtaagagaacctcagcattgtgcacgataagagaatgtgtcagtatttcagggttctacattttatctgtaaaatgtgacttttttttttttttatcacaacagaagtaaaatgttgctttgtacctggtgtcttttattaagaatttactccccccatttctcacagagaataacagtcgggagtcattgtcacaatataatagaaatgttagcaaccagattcatgtaaggactaagtggtcctcatgaattgcattaagactctgtactgctcatattacactccatcctctctgtagtttgctgggtagtggagggggtaagctaaatcatagtttctgacaataactgggaaggttttttcttaaaataacaatggaattggtataattgggattgaaaactaaaacttggaactaagatagagaagatggagtgtatgtagaagggctgttaaaaatgtaaaacttggttgcattatttgtggaggctcaaacttgtgaaggttaataccataatttttccatttgttctgcattttgattctgaaaagaaagctggctttgcccatttcttattaaaaaaacttgttgtaaatccagttgtctaatgggatctatatgaagttagccatgtctgtatgcccttctcccacaaaatactgtataactagtgtgcttgtagtagttaactccaccatctttgtaagctaatgaaattgtgagtcacccatttatatcttaatttttaatcatgtcagttcttgaatgggtatctccttagcctgctgatttctttttctttctaaagaaagtgggtggagaaattaatttagacgtttgtttgcaataaaaagaattcatttt

SEQ ID NO: 639 - DNA, 3239 bp, Homo sapiens
ggcgttgccggccgtgggtgctctggccacagtgagttaggggcgtcggagcgggtttctccaaccgcaatcggctccgctcaaggggaggaggagagtcccttctcggaaggcctaaggaaacgtgtcgtctggaatgggcttgggggccacgcctgcacatctccgcgagacagagggataaagtgaagatggtgctgttattgttacctcgagtgccacatgcgacctctgagatatgtacacagtcattcttactatcgcactcagccattcttactacgctaaagaagaaataattattcgaggatatttgcctggcccagaagaaacttatgtaaatttcatgaactattatatccgttttcctcggagtgagagaaaactctttttagatatcatctgagagaactagtgaatcccagtcactgagtggagttgagagtctaagaacctctgaaatttgagaactgctggaccagagcctttagagctctgataaggtgtcaacagggtagttaatttggcaccatggggatacagggattgctacaatttatcaaagaagcttcagaacccatccatgtgaggaagtataaagggcaggtagtagctgtggatacatattgctggcttcacaaaggagctattgcttgtgctgaaaaactagccaaaggtgaacctactgataggtatgtaggattttgtatgaaatttgtaaatatgttactatctcatgggatcaagcctattctcgtatttgatggatgtactttaccttctaaaaaggaagtagagagatctagaagagaaagacgacaagccaatcttcttaagggaaagcaacttcttcgtgaggggaaagtctcggaagctcgagagtgtttcacccggtctatcaatatcacacatgccatggcccacaaagtaattaaagctgcccggtctcagggggtagattgcctcgtggctccctatgaagctgatgcgcagttggcctatcttaacaaagcgggaattgtgcaagccataattacagaggactcggatctcctagcttttggctgtaaaaaggtaattttaaagatggaccagtttggaaatggacttgaaattgatcaagctcggctaggaatgtgcagacagcttggggatgtattcacggaagagaagtttcgttacatgtgtattctttcaggttgtgactacctgtcatcactgcgtgggattggattagcaaaggcatgcaaagtcctaagactagccaataatccagatatagtaaaggttatcaagaaaattggacattatctcaagatgaatatcacggtaccagaggattacatcaacgggtttattcgggccaacaataccttcctctatcagctagtttttgatcccatcaaaaggaaacttattcctctgaacgcctatgaagatgatgttgatcctgaaacactaagctacgctgggcaatatgttgatgattccatagctcttcaaatagcacttggaaataaagatataaatacttttgaacagatcgatgactacaatccagacactgctatgcctgcccattcaagaagtcatagttgggatgacaaaacatgtcaaaagtcagctaatgttagcagcatttggcataggaattactctcccagaccagagtcgggtactgtttcagatgccccacaattgaaggaaaatccaagtactgtgggagtggaacgagtgattagtactaaagggttaaatctcccaaggaaatcatccattgtgaaaagaccaagaagtgcagagctgtcagaagatgacctgttgagtcagtattctctttcatttacgaagaagaccaagaaaaatagctctgaaggcaataaatcattgagcttttctgaagtgtttgtgcctgacctggtaaatggacctactaacaaaaagagtgtaagcactccacctaggacgagaaataaatttgcaacatttttacaaaggaaaaatgaagaaagtggtgcagttgtggttccagggaccagaagcaggtttttttgcagttcagattctactgactgtgtatcaaacaaagtgagcatccagcctctggatgaaactgctgtcacagataaagagaacaatctgcatgaatcagagtatggagaccaagaaggcaagagactggttgacacagatgtagcacgtaattcaagtgatgacattccgaataatcatattccaggtgatcatattccagacaaggcaacagtgtttacagatgaagagtcctactcttttgagagcagcaaatttacaaggaccatttcaccacccactttgggaacactaagaagttgttttagttggtctggaggtcttggagatttttcaagaacgccgagcccctctccaagcacagcattgcagcagttccgaagaaagagcgattcccccacctctttgcctgagaataatatgtctgatgtgtcgcagttaaagagcgaggagtccagtgacgatgagtctcatcccttacgagaaggggcatgttcttcacagtcccaggaaagtggagaattctcactgcagagttcaaatgcatcaaagctttctcagtgctctagtaaggactctgattcagaggaatctgattgcaatattaagttacttgacagtcaaagtgaccagacctccaagctatgtttatctcatttctcaaaaaaagacacacctctaaggaacaaggttcctgggctatataagtccagttctgcagactctctttctacaaccaagatcaaacctctaggacctgccagagccagtgggctgagcaagaagccggcaagcatccagaagagaaagcatcataatgccgagaacaagccggggttacagatcaaactcaatgagctctggaaaaactttggatttaaaaaagattctgaaaagcttcctccttgtaagaaacccctgtccccagtcagagataacatccaactaactccagaagcggaagaggatatatttaacaaacctgaatgtggccgtgttcaaagagcaatattccagtaaatgcagactgctgcaaagcttttgcctgcaagagaatctgatcaatttgaagtccctgtttgggaatgaggcacttatcagcatgaagaattttttctcattctgtgccattttaaaaatagaatacattttgtatattgactttaaaaaaaaaaaaaaaaaaaaaa

SEQ ID NO: 640 - protein, 846 aa, Homo sapiens
MGIQGLLQFIKEASEPIHVRKYKGQVVAVDTYCWLHKGAIACAEKLAKGEPTDRYVGFCMKFVNMLLSHGIKPILVFDGCTLPSKKEVERSRRERRQANLLKGKQLLREGKVSEARECFTRSINITHAMAHKVIKAARSQGVDCLVAPYEADAQLAYLNKAGIVQAIITEDSDLLAFGCKKVILKMDQFGNGLEIDQARLGMCRQLGDVFTEEKFRYMCILSGCDYLSSLRGIGLAKACKVLRLANNPDIVKVIKKIGHYLKMNITVPEDYINGFIRANNTFLYQLVFDPIKRKLIPLNAYEDDVDPETLSYAGQYVDDSIALQIALGNKDINTFEQIDDYNPDTAMPAHSRSHSWDDKTCQKSANVSSIWHRNYSPRPESGTVSDAPQLKENPSTVGVERVISTKGLNLPRKSSIVKRPRSAELSEDDLLSQYSLSFTKKTKKNSSEGNKSLSFSEVFVPDLVNGPTNKKSVSTPPRTRNKFATFLQRKNEESGAVVVPGTRSRFFCSSDSTDCVSNKVSIQPLDETAVTDKENNLHESEYGDQEGKRLVDTDVARNSSDDIPNNHIPGDHIPDKATVFTDEESYSFESSKFTRTISPPTLGTLRSCFSWSGGLGDFSRTPSPSPSTALQQFRRKSDSPTSLPENNMSDVSQLKSEESSDDESHPLREGACSSQSQESGEFSLQSSNASKLSQCSSKDSDSEESDCNIKLLDSQSDQTSKLCLSHFSKKDTPLRNKVPGLYKSSSADSLSTTKIKPLGPARASGLSKKPASIQKRKHHNAENKPGLQIKLNELWKNFGFKKDSEKLPPCKKPLSPVRDNIQLTPEAEEDIFNKPECGRVQRAIFQ

SEQ ID NO: 641 - DNA, 801 bp, Homo sapiens
tctaatacctattgatctgtcactttctcccatcacgctcaggtgggaccatccagttgcaggaaaacaagcttaacacgcccactgattctacattatggtgagttctataattattttattatatattacagtgtaataatggaaataaagtgcctaataaatgcaaatgtgcttacatcttttggcccagctcctacctcctggcagcctctccaggcccagaactttctccagtcagcctctacagaccaagctcatgactcacaatggcctatttaggcccataccctacgtcacggcagtctccgcagatgaggctactgcctcacaacagcctccacaggcacagctccatcgttacaatggcctctttagacccagctcctgcctcccagccttctctccaggccctgaactttctcaagtcgacctcaccaggcccagctcatgcttctttgcagcctctccaggcccagctcctgcatcttggtggcccctccaggcccagcctctgcctcccgtcggcctctacagtcccaacatctgtctcacagcagattcttcaggcccagcatctgcctcacttggaccctccagacccagatggtgtctcactgtggcatcctcaggtgaagctcctgcctttcggcagcctctccaggcccagctcctcctgcctcccagtggcctctttcggcccagcccagctcatgcctcccggcggccttcccaagccccgcttttgactttccaccgaaagtcccagcctcctgcctcccgaaggcctgcacaggccca

SEQ ID NO: 642 - DNA, 1129 bp, Homo sapiens
gtccacatgcagaggctcgctacagaagctacagaagaagatggttacatttcaagtgggcaggtgccgtttgcttatgagcaccatcagccacatcagccacggttctttgaattttacctaattgtctctaattcttaacaattctttgaggtgatctgcaactctttcaccatctgtaatgcggagatgcaggaagttggtgttggcctatatcccagtatctctttgctcaatcacagctgtgaccccaactgttcgattgtgttcaatgggccccacctcttactgcgagcagtccgagacatcgaggtgggagaggagctcaccatctgctacctggatatgctgatgaccagtgaggagcgccggaagcagctgagggaccagtactgctttgaatgtgactgtttccgttgccaaacccaggacaaggatgctgatatgctaactggtgatgagcaagtatggaaggaagttcaagaatccctgaaaaaaattgaagaactgaaggcacactggaagtgggagcaggttctggccatgtgccaggcaatcataagcagcaattctgaacggcttcccgatatcaacatctaccagctgaaggtgctcgactgcgccatggatgcctgcatcaacctcggcctgttggaggaagccttgttctatggtactcggaccatggagccatacaggatttttttcccaggaagccatcccgtcagaggggttcaagtgatgaaagttggcaaactgcagctacatcaaggcatgtttccccaagcaatgaagaatctgagactggcttttgatattatgagagtgacacatggcagagaacacagcctgattgaagatttgattctacttttagaagaatgcgacgccaacatcagagcatcctaagggaacgcagtcagagggaaatacggcgtgtgtctttgttgaatgccttattgaggtcacacactctatgctttgttagctgtgtgaacctctcctattggaaattctgttccgtgtttgtgtaggtaaataaaggcagacatggtttgcaaaccacaagaatcattagttgtagagaagcacgattataataaattcaaaacatttggttgaggatgcc

SEQ ID NO: 643 - DNA, 729 bp, Rattus norvegicus
cttgcttcggacgccggattttgacgtgctctcgcgagatttgggtctcttcctaagccggcgctcggcaagttctcccaggagaaagccatgttcagttcgagcgccaagatcgtgaagcccaatggcgagaagccggacgagttcgagtccggcatctcccaggctcttctggagctggagatgaactcggacctcaaggctcagctcagggagctgaatattacggcagctaaggaaattgaagttggtggtggtcggaaagctatcataatctttgttcccgttcctcaactgaaatctttccagaaaatccaagtccggctagtacgcgaattggagaaaaagttcagtgggaagcatgtcgtctttatcgctcagaggagaattctgcctaagccaactcgaaaaagccgtacaaaaaataagcaaaagcgtcccaggagccgtactctgacagctgtgcacgatgccatccttgaggacttggtcttcccaagcgaaattgtgggcaagagaatccgcgtcaaactagatggcagccggctcataaaggttcatttggacaaagcacagcagaacaatgtggaacacaaggttgaaactttttctggtgtctataagaagctcacgggcaaggatgttaattttgaattcccagagtttcaattgtaaacaaaaatgactaaataaaaagtatatattcacagtaaaaaaaaaaaaaaaaaa

SEQ ID NO: 644 - protein, 194 aa, Rattus norvegicus [sequence omitted]

SEQ ID NO: 645 - DNA, 1257 bp, Homo sapiens
ggcacgaggcgggccagcgacgggcaggacgccccgttcgcctagcgcgtgctcaggagttggtgtcctgcctgcgctcaggatgagggggaatctggccctggtgggcgttctaatcagcctggccttcctgtcactgctgccatctggacatcctcagccggctggcgatgacgcctgctctgtgcagatcctcgtccctggcctcaaaggggatgcgggagagaagggagacaaaggcgcccccggacggcctggaagagtcggccccacgggagaaaaaggagacatgggggacaaaggacagaaaggcagtgtgggtcgtcatggaaaaattggtcccattggctctaaaggtgagaaaggagattccggtgacataggaccccctggtcctaatggagaaccaggcctcccatgtgagtgcagccagctgcgcaaggccatcggggagatggacaaccaggtctctcagctgaccagcgagctcaagttcatcaagaatgctgtcgccggtgtgcgcgagacggagagcaagatctacctgctggtgaaggaggagaagcgctacgcggacgcccagctgtcctgccagggccgcgggggcacgctgagcatgcccaaggacgaggctgccaatggcctgatggccgcatacctggcgcaagccggcctggcccgtgtcttcatcggcatcaacgacctggagaaggagggcgccttcgtgtactctgaccactcccccatgcggaccttcaacaagtggcgcagcggtgagcccaacaatgcctacgacgaggaggactgcgtggagatggtggcctcgggcggctggaacgacgtggcctgccacaccaccatgtacttcatgtgtgagtttgacaaggagaacatgtgagcctcaggctggggctgcccattgggggccccacatgtccctgcagggttggcagggacagagcccagaccatggtgccagccagggagctgtccctctgtgaagggtggaggctcactgagtagagggctgttgtctaaactgagaaaatggcctatgcttaagaggaaaatgaaagtgttcctggggtgctgtctctgaagaagcagagtttcattacctgtattgtagccccaatgtcattatgtaattattacccagaattgctcttccataaagcttgtgcctttgtccaagctatacaataaaatctttaagtagtgcagtaaaaaaaaaaaaaaaaaaaaaaaaaaaaaaaa

SEQ ID NO: 646 - protein, 271 aa, Homo sapiens
MRGNLALVGVLISLAFLSLLPSGHPQPAGDDACSVQILVPGLKGDAGEKGDKGAPGRPGRVGPTGEKGDMGDKGQKGSVGRHGKIGPIGSKGEKGDSGDIGPPGPNGEPGLPCECSQLRKAIGEMDNQVSQLTSELKFIKNAVAGVRETESKIYLLVKEEKRYADAQLSCQGRGGTLSMPKDEAANGLMAAYLAQAGLARVFIGINDLEKEGAFVYSDHSPMRTFNKWRSGEPNNAYDEEDCVEMVASGGWNDVACHTTMYFMCEFDKENM

SEQ ID NO: 647 - DNA, 2426 bp, Homo sapiens
ggcacgaggggcttctgtcaccttcctcacggaccttggtcacggccgcaggtgaccccttagcccagctccagtgggcgggtggcagggtcatggaggacgctggcggcggcgaggagaccccggccccggaggccccgcacccccctcagctcgcgcctccggaggagcaggggttgctcttccaggaggaaaccatcgatcttggcggagatgagtttggatccgaagagaacgagaccgcatcggaaggctcgagtcctctcgcggacaagctgaacgaacacatgatggagagcgtcctcatctctgactcccccaacagcgagggcgacgcgggcgacctgggccgagtgcgggacgaagctgagcccggaggggaaggcgacccaggcccggagcccgcgggcaccccgagtcccagcggcgaggccgacggcgactgtgcccccgaggacgcggcacccagtagcggaggggccccgaggcaggacgcggcccgcgaggtcccaggcagcgaagccgcgcgcccggagcaggagcctcccgttgcggagccggtcccggtgtgcaccatcttcagccagcgcgcgcccccagcctccggggacggcttcgagccgcagatggtgaagtcgcccagcttcggtggcgccagcgaggcctcggccaggacaccgccccaggtcgtgcagcccagccccagcctcagcacgttcttcggagacacggccgccagccactccttggcctcggacttcttcgactcctttactacctccgccttcatttccgtcagcaatcccggcgcgggctccccggcccccgccagcccgcctcccctcgctgtgcccgggaccgaggggcgccccgaacccgtggccatgcgagggccccaggcagctgcgcccccggcgtcgccagagcctttcgcgcacatccaggcagtgtttgcagggagtgacgacccctttgccaccgccctgagcatgagcgagatggaccggaggaacgacgcctggcttcccggcgaggctacgcgtggagtcctgcgggccgtggccacccagcagcgcggcgccgtgttcgtggacaaggagaacctcaccatgccgggcctcaggttcgacaacatccagggagatgcagttaaagacttgatgcttcgctttctgggtgaaaaagctgcagcaaagagacaagtcctaaatgccgactcagtggaacaatcttttgttggattgaaacagctaatcagctgcagaaactggagggcagcagtggacctgtgcggacgtctcctcacagcccacggccagggctacggcaagagcgggctgctcaccagccacacgacagattcactgcagctctggtttgtcaggctggcactactagtgaagttgggccttttccagaatgctgagatggaatttgaacccttcggaaatcttgatcagccagatctttattacgagtactacccgcacgtgtaccctgggcgcaggggctccatggtccccttctcgatgcgcatcttgcacgcggagcttcagcagtacctggggaacccacaggagtcgctggatagactgcacaaggtgaagactgtctgcagcaagatcctggccaatttggagcaaggcttagcagaagacggcggcatgagcagcgtgactcaggagggcagacaagcctctatccggctgtggaggtcacgtctgggccgggtgatgtactccatggcaaactgtctgctcctgatgaaggattatgtgctggccgtggatgcgtatcattcggttatcaagtattacccagagcaagagccccagctgctcagcggcatcggccggatttccctccagattggagacataaaaacagctgaaaagtattttcaagacgttgagaaagtaacacagaaattagacggactacagggtaaaatcatggttttgatgaacagcgcgttccttcacctcgggcagaataactttgcagaagcccacaggttcttcacagagatcttaaggatggatccaagaaacgcagtggccaacaacaacgctgccgtgtgtctgctctacctgggcaagctcaaggactccctgcggcagctggaggccatggtccagcaggaccccaggcactacctgcacgagagcgtgctcttcaacctgaccaccatgtacgagctggagtcctcacggagcatgcagaagaaacaggccctgctggaggctgtcgccggcaaggagggggacagcttcaacacacagtgcctcaagctggcctagctgcctccaacacactacgtcagaaggacccgggtctttgaaactgtgtcttgaagctaatgtattaatgtgacatggaggaactcaataaaactcctgcttcaaaaaaaaaaaaaaaaaaaaaaa

SEQ ID NO: 648 - protein, 379 aa, Homo sapiens
MLRFLGEKAAAKRQVLNADSVEQSFVGLKQLISCRNWRAAVDLCGRLLTAHGQGYGKSGLLTSHTTDSLQLWFVRLALLVKLGLFQNAEMEFEPFGNLDQPDLYYEYYPHVYPGRRGSMVPFSMRILHAELQQYLGNPQESLDRLHKVKTVCSKILANLEQGLAEDGGMSSVTQEGRQASIRLWRSRLGRVMYSMANCLLLMKDYVLAVDAYHSVIKYYPEQEPQLLSGIGRISLQIGDIKTAEKYFQDVEKVTQKLDGLQGKIMVLMNSAFLHLGQNNFAEAHRFFTEILRMDPRNAVANNNAAVCLLYLGKLKDSLRQLEAMVQQDPRHYLHESVLFNLTTMYELESSRSMQKKQALLEAVAGKEGDSFNTQCLKLA

SEQ ID NO: 649 - DNA, 1705 bp, Homo sapiens
aattcggcacgagaagacttccagtttggagtcgtttgctgcggggagggaatgaatgggcgctgggaacacgcccgcgaggtggggacgcgccggccgtagcgaggtccttagcgtgtgagtggccggggtcgggtcgcttccccgcagcatggaggacgatgcaccagtgatctacgggctggagttccaggcacgtgccttaacacctcaaactgcagaaacagatgccattcggtttttggttgggacgcagtctcttaaatatgataatcagatccatatcatagattttgacgatgaaaacaacattataaataaaaatgtcctcctccatcaagcgggtgaaatctggcatattagcgctagccctgcagacagaggtgtgctgacgacctgctacaacagaacttcagacagcaaagtcctgacatgtgcagccgtgtggaggatgccgaaggaattggaatcaggcagccacgagtcccctgatgattcatccagcactgcacagaccctggagctgctctgtcaccttgacaacacagcccatggcaacatggcctgtgtcgtgtgggagccaatgggagatgggaagaaaatcatttccttggctgataaccatatcctgctgtgggatttacaggaaagctcgagccaggctgtgctggccagctcagcgtccctggaagggaagggacaactgaagttcacctcaggacggtggagcccacatcataactgcacccaggtggccacagcgaacgacaccaccctccgtggctgggacacccggagcatgagccagatctactgcatagagaatgcccacggacagctggtgcgggaccttgactttaatcccaataagcagtactacttggccagctgcggagacgactgtaaggtgaagttctgggacacccgaaatgtcaccgaacccgtgaagaccctggaggagcactcccactgggtgtggaacgtccgctacaaccactctcatgaccagctggtcctcacgggcagcagtgacagcagagtcatcctttccaacatggtgtccatctcgtcggagcccttcggccacttggtagacgacgatgacatcagtgaccaggaggaccaccgttctgaagagaagagcaaggagcccctgcaggacaacgtgatcgccacctacgaggagcacgaggacagcgtctatgccgtggactggtcctcggctgacccgtggctgtttgcctccctgagctatgacgggaggctcgtgatcaacagggtgcccagggccctgaagtaccacatcctgctatgactcccgggcctgggttatccaggtcccattgagtggttttcctcttggcagattctcaaacagtcgcagctctttggaggtgactcgtgttccaggtggatccctctctgggagagccgctgttcccttcctgtagcagcagcatttatgaatggggtgaatggggctattgtcgacggcacagctaatgcccgaacccagcccctgtcggcagagacagagccccacattattatgtgaataacaatgttttctgttttaagggtgtcaggagtttcgctttttaaaaaaatgtctgttcctgcagtagtaactcttctttctcttgagagtaaaaaatgaaataaaataaatccacgctgacaaaaaaaaaaaaaaaaaaaaaaaaaa

SEQ ID NO: 650 - protein, 387 aa, Homo sapiens
MEDDAPVIYGLEFQARALTPQTAETDAIRFLVGTQSLKYDNQIHIIDFDDENNIINKNVLLHQAGEIWHISASPADRGVLTTCYNRTSDSKVLTCAAVWRMPKELESGSHESPDDSSSTAQTLELLCHLDNTAHGNMACVVWEPMGDGKKIISLADNHILLWDLQESSSQAVLASSASLEGKGQLKFTSGRWSPHHNCTQVATANDTTLRGWDTRSMSQIYCIENAHGQLVRDLDFNPNKQYYLASCGDDCKVKFWDTRNVTEPVKTLEEHSHWVWNVRYNHSHDQLVLTGSSDSRVILSNMVSISSEPFGHLVDDDDISDQEDHRSEEKSKEPLQDNVIATYEEHEDSVYAVDWSSADPWLFASLSYDGRLVINRVPRALKYHILL

SEQ ID NO: 651 - DNA, 2500 bp, Homo sapiens
cccaggcgcagccaatgggaagggtcggaggcatggcacagccaatgggaagggccggggcaccaaagccaatgggaagggccgggagcgcgcggcgcgggagatttaaaggctgctggagtgaggggtcgcccgtgcaccctgtcccagccgtcctgtcctggctgctcgctctgcttcgctgcgcctccactatgctctccctccgtgtcccgctcgcgcccatcacggacccgcagcagctgcagctctcgccgctgaaggggctcagcttggtcgacaaggagaacacgccgccggccctgagcgggacccgcgtcctggccagcaagaccgcgaggaggatcttccaggagcccacggagccgaaaactaaagcagctgcccccggcgtggaggatgagccgctgctgagagaaaacccccgccgctttgtcatcttccccatcgagtaccatgatatctggcagatgtataagaaggcagaggcttccttttggaccgccgaggaggttgacctctccaaggacattcagcactgggaatccctgaaacccgaggagagatattttatatcccatgttctggctttctttgcagcaagcgatggcatagtaaatgaaaacttggtggagcgatttagccaagaagttcagattacagaagcccgctgtttctatggcttccaaattgccatggaaaacatacattctgaaatgtatagtcttcttattgacacttacataaaagatcccaaagaaagggaatttctcttcaatgccattgaaacgatgccttgtgtcaagaagaaggcagactgggccttgcgctggattggggacaaagaggctacctatggtgaacgtgttgtagcctttgctgcagtggaaggcattttcttttccggttcttttgcgtcgatattctggctcaagaaacgaggactgatgcctggcctcacattttctaatgaacttattagcagagatgagggtttacactgtgattttgcttgcctgatgttcaaacacctggtacacaaaccatcggaggagagagtaagagaaataattatcaatgctgttcggatagaacaggagttcctcactgaggccttgcctgtgaagctcattgggatgaattgcactctaatgaagcaatacattgagtttgtggcagacagacttatgctggaactgggttttagcaaggttttcagagtagagaacccatttgactttatggagaatatttcactggaaggaaagactaacttctttgagaagagagtaggcgagtatcagaggatgggagtgatgtcaagtccaacagagaattcttttaccttggatgctgacttctaaatgaactgaagatgtgcccttacttggctgattttttttttccatctcataagaaaaatcagctgaagtgttaccaactagccacaccatgaattgtccgtaatgttcattaacagcatctttaaaactgtgtagctacctcacaaccagtcctgtctgtttatagtgctggtagtatcaccttttgccagaaggcctggctggctgtgacttaccatagcagtgacaatggcagtcttggctttaaagtgaggggtgaccctttagtgagcttagcacagcgggattaaacagtcctttaaccagcacagccagttaaaagatgcagcctcactgcttcaacgcagattttaatgtttacttaaatataaacctggcactttacaaacaaataaacattgttttgtactcacggcggcgataatagcttgatttatttggtttctacaccaaatacattctcctgaccactaatgggagccaattcacaattcactaagtgactaaagtaagttaaacttgtgtagactaagcatgtaatttttaagttttattttaatgaattaaaatatttgttaaccaactttaaagtcagtcctgtgtatacctagatattagtcagttggtgccagatagaagacaggttgtgtttttatcctgtggcttgtgtagtgtcctgggattctctgccccctctgagtagagtgttgtgggataaaggaatctctcagggcaaggagcttcttaagttaaatcactagaaatttaggggtgatctgggccttcatatgtgtgagaagccgtttcattttatttctcactgtattttcctcaacgtctggttgatgagaaaaaattcttgaagagttttcatatgtgggagctaaggtagtattgtaaaatttcaagtcatccttaaacaaaatgatccacctaagatcttgcccctgttaagtggtgaaatcaactagaggtggttcctacaagttgttcattctagttttgtttggtgtaagtaggttgtgtgagttaattcatttatatttactatgtctgttaaatcagaaattttttattatctatgttcttctagattttacctgtagttcataaaaaaaaaaaaaaaaaaaaaaaaa

SEQ ID NO: 652 - protein, 389 aa, Homo sapiens
MLSLRVPLAPITDPQQLQLSPLKGLSLVDKENTPPALSGTRVLASKTARRIFQEPTEPKTKAAAPGVEDEPLLRENPRRFVIFPIEYHDIWQMYKKAEASFWTAEEVDLSKDIQHWESLKPEERYFISHVLAFFAASDGIVNENLVERFSQEVQITEARCFYGFQIAMENIHSEMYSLLIDTYIKDPKEREFLFNAIETMPCVKKKADWALRWIGDKEATYGERVVAFAAVEGIFFSGSFASIFWLKKRGLMPGLTFSNELISRDEGLHCDFACLMFKHLVHKPSEERVREIIINAVRIEQEFLTEALPVKLIGMNCTLMKQYIEFVADRLMLELGFSKVFRVENPFDFMENISLEGKTNFFEKRVGEYQRMGVMSSPTENSFTLDADF

SEQ ID NO: 653 - DNA, 2893 bp, Homo sapiens
gtcgctgaggcgcccatggccttcgcccgccggctcctgcgcgggccactgtcggggccgctgctcgggcggcgcggggtctgcgctggggccatggctccgccgcgccgcttcgtcctggagcttcccgactgcaccctggctcacttcgccctaggcgccgacgcccccggcgacgcagacgcccccgacccccgcctggcggcgctgctggggcccccggagcgcagctactcgctgtgcgtgcccgtgaccccggacgccggctgcggggcccgggtccgggcggcgcggctgcaccagcgcctgctgcaccagctgcgccgcggccccttccagcggtgccagctgctcaggctgctctgctactgcccgggcggccaggccggcggcgcacagcaaggcttcctgctgcgcgaccccctggatgaccctgacacccggcaagcgctgctcgagctgctgggcgcctgtcaggaggcaccacgcccgcacttgggcgagttcgaggccgacccgcgcggccagctgtggcagcgcctctgggaggtgcaagacggcaggcggctgcaggtgggctgcgcacaggtcgtgcccgtcccggagcccccgctgcacccggtggtgccagacttgcccagttccgtggtcttcccggaccgggaagccgcccgggccgttttggaggagtgtacctcctttattcctgaagcccgggcagtgcttgacctggtcgaccagtgcccaaaacagatccagaaaggaaagttccaggttgttgccatcgaaggactggatgccacgggtaaaaccacggtgacccagtcagtggcagattcacttaaggctgtcctcttaaagtcaccaccctcttgcattggccagtggaggaagatctttgatgatgaaccaactatcattagaagagctttttactctttgggcaattatattgtggcctccgaaatagctaaagaatctgccaaatctcctgtgattgtagacaggtactggcacagcacggccacctatgccatagccactgaggtgagtgggggtctccagcacctgcccccagcccatcaccctgtgtaccagtggccagaggacctgctcaaacctgaccttatcctgctgctcactgtgagtcctgaggagaggttgcagaggctgcagggccggggcatggagaagaccagggaagaagcagaacttgaggccaacagtgtgtttcgtcaaaaggtagaaatgtcctaccagcggatggagaatcctggctgccatgtggttgatgccagcccctccagagaaaaggtcctgcagacggtattaagcctaatccagaatagttttagtgaaccgtagttactctggccaggtgccacgtctaactagattagatgttgtttgaaacatctacatccaccatttgttatgcagtgttcccaaatttctgttctacaagcatgttgtgtggcagaaaactggagaccaggcatcttaattttacttcagccatcgtaccctcttctgactgatggacccgtcatcacaaaggtccctctcatcatgttccagtgagaggccagcgattgctttcttcctggcatagtaaacattttcttggaacatatgtttcacttaatcactaccaaatatctggaagacctgtcttactcagacagcaccaggtgtacagaagcagcagacaagatcttccagatcagcagggagaccccggagcctctgcttctcctacactggcatgctgatgagatcgtgacatgcccacattggcttcttccacatctggttgcactcgtcatgatgggctcgctgcatctccctcagtcccaaattctagagccaagtgttcctgcagaggctgtctatgtgtcctggctgcccaaggacactcctgcagagccatttttgggtaaggaacacttacaaagaaggcattgatcttgtgtctgaggctcagagcccttttgataggcttctgagtcatatataaagacattcaagccaagatgctccaactgcaaatataccaaccttctctgaattatattttgcttatttatatttcttttctttttttctaaagtatggctctgaatagaatgcacattttccattgaactggatgcatttcatttagccaatccagtaatttatttatattaatctatacataatatgtttcctcagcataggagctatgattcattaattaaaagtggagtcaaaacgctaaatgcaatgtttgttgtgtattttcattacacaaacttaatttgtcttgttaaataagtacagtggatcttggagtgggatttcttggtaaattatcttgcacttgaatgtctcatgattacatatgaaatcgctttgacatatctttagacagaaaaaagtagctgagtgagggggaaattatagagctgtgtgactttagggagtaggttgaaccaggtgattacctaaaattccttccagttcaaaggcagataaatctgtaaattattttatcctatctaccatttcttaagaagacattactccaaaataattaaatttaaggctttatcaggtctgcatatagaatcttaaattctaataaagtttcatgttaatgtcataggatttttaaaagagctataggtaatttctatataatatgtgtatattaaaatgtaattgatttcagttgaaagtattttaaagctgataaatagcattagggttctttgcaatgtggtatctagctgtattattggttttatttactttaaacattttgaaaagcttatactggcagcctagaaaaacaaacaattaatgtatctttatgtccctggcacatgaataaactttgctgtggtttact

SEQ ID NO: 654 - protein, 449 aa, Homo sapiens
MAFARRLLRGPLSGPLLGRRGVCAGAMAPPRRFVLELPDCTLAHFALGADAPGDADAPDPRLAALLGPPERSYSLCVPVTPDAGCGARVRAARLHQRLLHQLRRGPFQRCQLLRLLCYCPGGQAGGAQQGFLLRDPLDDPDTRQALLELLGACQEAPRPHLGEFEADPRGQLWQRLWEVQDGRRLQVGCAQVVPVPEPPLHPVVPDLPSSVVFPDREAARAVLEECTSFIPEARAVLDLVDQCPKQIQKGKFQVVAIEGLDATGKTTVTQSVADSLKAVLLKSPPSCIGQWRKIFDDEPTIIRRAFYSLGNYIVASEIAKESAKSPVIVDRYWHSTATYAIATEVSGGLQHLPPAHHPVYQWPEDLLKPDLILLLTVSPEERLQRLQGRGMEKTREEAELEANSVFRQKVEMSYQRMENPGCHVVDASPSREKVLQTVLSLIQNSFSEP

SEQ ID NO: 655 - DNA, 2166 bp, Homo sapiens
gtggtgggactcgcgtcgcggccgcggagacgtgaagctctcgaggctcctcccgctgcgggtcggcgctcgccctcgctctcctcgccctccgccccggccccggccccgcgcccgccatggagaagactgagctgatccagaaggccaagctggccgagcaggccgagcgctacgacgacatggccacctgcatgaaggcagtgaccgagcagggcgccgagctgtccaacgaggagcgcaacctgctctccgtggcctacaagaacgtggtcgggggccgcaggtccgcctggagggtcatctctagcatcgagcagaagaccgacacctccgacaagaagttgcagctgattaaggactatcgggagaaagtggagtccgagctgagatccatctgcaccacggtgctggaattgttggataaatatttaatagccaatgcaactaatccagagagtaaggtcttctatctgaaaatgaagggtgattacttccggtaccttgctgaagttgcgtgtggtgatgatcgaaaacaaacgatagataattcccaaggagcttaccaagaggcatttgatataagcaagaaagagatgcaacccacacacccaatccgcctggggcttgctcttaacttttctgtattttactatgagattcttaataacccagagcttgcctgcacgctggctaaaacggcttttgatgaggccattgctgaacttgatacactgaatgaagactcatacaaagacagcaccctcatcatgcagttgcttagagacaacctaacactttggacatcagacagtgcaggagaagaatgtgatgcggcagaaggggctgaaaactaaatccatacagggtgtcatccttctttccttcaagaaacctttttacacatctccattccttattccacttggatttcctatagcaaagaaacccattcatgtgtatggaatcaactgtttatagtcttttcacactgcagctttgggaaaacttcattccttgatttgtgtttgtcttggccttcctggtgtgcagtactgctgtagaaaagtattaatagcttcatttcatataaacataagtaactcccaaacacttatgtagaggactaaaaatgtatctggtatttaagtaatctgaaccagttctgcaagtgactgtgttttgtattactgtgaaaataagaaaatgtagttaattacaatttaaagagtattccacataacttcttaatttctacattccctcccttactcttcgggggtttcctttcagtaagcaacttttccatgctcttaatgtattcctttttagtaggaatccggaagtattagattgaatggaaaagcacttgccatctctgtctaggggtcacaaattgaaatggctcctgtatcacatacggaggtcttgtgtatctgtggcaacagggagtttccttattcactctttatttgctgctgtttaagttgccaacctcccctcccaataaaaattcacttacacctcctgcctttgtagttctggtattcactttactatgtgatagaagtagcatgttgctgccagaatacaagcattgcttttggcaaattaaagtgcatgtcatttcttaatacactagaaaggggaaataaattaaagtacacaagtccaagtctaaaactttagtacttttccatgcagatttgtgcacatgtgagagggtgtccagtttgtctagtgattgttatttagagagttggaccactattgtgtgttgctaatcattgactgtagtcccaaaaaagccttgtgaaaatgttatgccctatgtaacagcagagtaacataaaataaaagtacattttataaaccatttactatggctttgtaacaattgcatacccatattttaagggacaggtgaatttactactttctaaagtttattgatacttcccttttatgtaaaatgtagtagtgatacctatatttccacattgtgcattgtgacacacttgtctagggatgcctggaagtgtataaaattggactgcatttcttagagtgttttactatagatcagtctcatgggccatctcttcctcagatgtaaatgatatctggttaagtgttatatggaataaagtggacattttaaaacta

SEQ ID NO: 656 - protein, 245 aa, Homo sapiens
MEKTELIQKAKLAEQAERYDDMATCMKAVTEQGAELSNEERNLLSVAYKNVVGGRRSAWRVISSIEQKTDTSDKKLQLIKDYREKVESELRSICTTVLELLDKYLIANATNPESKVFYLKMKGDYFRYLAEVACGDDRKQTIDNSQGAYQEAFDISKKEMQPTHPIRLGLALNFSVFYYEILNNPELACTLAKTAFDEAIAELDTLNEDSYKDSTLIMQLLRDNLTLWTSDSAGEECDAAEGAEN

SEQ ID NO: 657 - DNA, 2467 bp, Homo sapiens
ggcacgaggctccggtgtgtctgtcggttgcagtgttggaggtcggcgccggcccccgccttccgcgccccccacgggaaggaagcacccccggtattaaaacgaacggggcggaaagaagccctcagtcgccggccgggaggcgagccgatgccgagctgctccacgtccaccatgccgggcatgatctgcaagaacccagacctcgagtttgactcgctacagccctgcttctacccggacgaagatgacttctacttcggcggccccgactcgacccccccgggggaggacatctggaagaagtttgagctgctgcccacgcccccgctgtcgcccagccgtggcttcgcggagcacagctccgagcccccgagctgggtcacggagatgctgcttgagaacgagctgtggggcagcccggccgaggaggacgcgttcggcctggggggactgggtggcctcacccccaacccggtcatcctccaggactgcatgtggagcggcttctccgcccgcgagaagctggagcgcgccgtgagcgagaagctgcagcacggccgcgggccgccaaccgccggttccaccgcccagtccccgggagccggcgccgccagccctgcgggtcgcgggcacggcggggctgcgggagccggccgcgccggggccgccctgcccgccgagctcgcccacccggccgccgagtgcgtggatcccgccgtggtcttcccctttcccgtgaacaagcgcgagccagcgcccgtgcccgcagccccggccagtgccccggcggcgggccctgcggtcgcctcgggggcgggtattgccgccccagccggggccccgggggtcgcccctccgcgcccaggcggccgccagaccagcggcggcgaccacaaggccctcagtacctccggagaggacaccctgagcgattcagatgatgaagatgatgaagaggaagatgaagaggaagaaatcgacgtggtcactgtggagaagcggcgttcctcctccaacaccaaggctgtcaccacattcaccatcactgtgcgtcccaagaacgcagccctgggtcccgggagggctcagtccagcgagctgatcctcaaacgatgccttcccatccaccagcagcacaactatgccgccccctctccctacgtggagagtgaggatgcacccccacagaagaagataaagagcgaggcgtccccacgtccgctcaagagtgtcatccccccaaaggctaagagcttgagcccccgaaactctgactcggaggacagtgagcgtcgcagaaaccacaacatcctggagcgccagcgccgcaacgaccttcggtccagctttctcacgctcagggaccacgtgccggagttggtaaagaatgagaaggccgccaaggtggtcattttgaaaaaggccactgagtatgtccactccctccaggccgaggagcaccagcttttgctggaaaaggaaaaattgcaggcaagacagcagcagttgctaaagaaaattgaacacgctcggacttgctagacgcttctcaaaactggacagtcactgccactttgcacattttgattttttttttaaacaaacattgtgttgacattaagaatgttggtttactttcaaatcggtcccctgtcgagttcggctctgggtgggcagtaggaccaccagtgtggggttctgctgggaccttggagagcctgcatcccaggatgctgggtggccctgcagcctcctccacctcacctccatgacagcgctaaacgttggtgacggttgggagcctctggggctgttgaagtcaccttgtgtgttccaagtttccaaacaacagaaagtcattccttctttttaaaatggtgcttaagttccagcagatgccacataaggggtttgccatttgatacccctggggaacatttctgtaaataccattgacacatccgccttttgtatacatcctgggtaatgagaggtggcttttgcggccagtattagactggaagttcatacctaagtactgtaataatacctcaatgtttgaggagcatgttttgtatacaaatatattgttaatctctgttatgtactgtactaattcttacactgcctgtatactttagtatgacgctgatacataactaaatttgatacttatattttcgtatgaaaatgagttgtgaaagttttgagtagatattactttatcactttttgaactaagaaacttttgtaaagaaatttactatatatatatgcctttttcctagcctgtttcttcctgttaatgtatttgttcatgtttggtgcatagaactgggtaaatgcaaagttctgtgtttaatttcttcaaaatgtatatatttagtgctgcatcttatagcactttgaaatacctcatgtttatgaaaataaatagcttaaaattaaaaaaaaaaaaaaaaaa

SEQ ID NO: 658 - protein, 464 aa, Homo sapiens
MPSCSTSTMPGMICKNPDLEFDSLQPCFYPDEDDFYFGGPDSTPPGEDIWKKFELLPTPPLSPSRGFAEHSSEPPSWVTEMLLENELWGSPAEEDAFGLGGLGGLTPNPVILQDCMWSGFSAREKLERAVSEKLQHGRGPPTAGSTAQSPGAGAASPAGRGHGGAAGAGRAGAALPAELAHPAAECVDPAVVFPFPVNKREPAPVPAAPASAPAAGPAVASGAGIAAPAGAPGVAPPRPGGRQTSGGDHKALSTSGEDTLSDSDDEDDEEEDEEEEIDVVTVEKRRSSSNTKAVTTFTITVRPKNAALGPGRAQSSELILKRCLPIHQQHNYAAPSPYVESEDAPPQKKIKSEASPRPLKSVIPPKAKSLSPRNSDSEDSERRRNHNILERQRRNDLRSSFLTLRDHVPELVKNEKAAKVVILKKATEYVHSLQAEEHQLLLEKEKLQARQQQLLKKIEHARTC

SEQ ID NO: 659 - DNA, 2062 bp, Homo sapiens
gtcagtccctcctgtagccgccgccgccgccgcccgccgcccctctgccagcagctccggcgccacctcgggccggcgtctccggcgggcgggagccaggcgctgacgggcgcggcgggggcggccgagcgctcctgcggctgcgactcaggctccggcgtctgcgcttccccatggggctggcctgcggcgcctgggcgctctgagattgtcactgctgttccaagggcacacgcagagggatttggaattcctggagagttgcctttgtgagaagctggaaatatttctttcaattccatctcttagttttccataggaacatcaagaaatcatgaacaactttggtaatgaagagtttgactgccacttcctcgatgaaggttttactgccaaggacattctggaccagaaaattaatgaagtttcttcttctgatgataaggatgccttctatgtggcagacctgggagacattctaaagaaacatctgaggtggttaaaagctctccctcgtgtcacccccttttatgcagtcaaatgtaatgatagcaaagccatcgtgaagacccttgctgctaccgggacaggatttgactgtgctagcaagactgaaatacagttggtgcagagtctgggggtgcctccagagaggattatctatgcaaatccttgtaaacaagtatctcaaattaagtatgctgctaataatggagtccagatgatgacttttgatagtgaagttgagttgatgaaagttgccagagcacatcccaaagcaaagttggttttgcggattgccactgatgattccaaagcagtctgtcgtctcagtgtgaaattcggtgccacgctcagaaccagcaggctccttttggaacgggcgaaagagctaaatatcgatgttgttggtgtcagcttccatgtaggaagcggctgtaccgatcctgagaccttcgtgcaggcaatctctgatgcccgctgtgtttttgacatgggggctgaggttggtttcagcatgtatctgcttgatattggcggtggctttcctggatctgaggatgtgaaacttaaatttgaagagatcaccggcgtaatcaacccagcgttggacaaatactttccgtcagactctggagtgagaatcatagctgagcccggcagatactatgttgcatcagctttcacgcttgcagttaatatcattgccaagaaaattgtattaaaggaacagacgggctctgatgacgaagatgagtcgagtgagcagacctttatgtattatgtgaatgatggcgtctatggatcatttaattgcatactctatgaccacgcacatgtaaagccccttctgcaaaagagacctaaaccagatgagaagtattattcatccagcatatggggaccaacatgtgatggcctcgatcggattgttgagcgctgtgacctgcctgaaatgcatgtgggtgattggatgctctttgaaaacatgggcgcttacactgttgctgctgcctctacgttcaatggcttccagaggccgacgatctactatgtgatgtcagggcctgcgtggcaactcatgcagcaattccagaaccccgacttcccacccgaagtagaggaacaggatgccagcaccctgcctgtgtcttgtgcctgggagagtgggatgaaacgccacagagcagcctgtgcttcggctagtattaatgtgtagatagcactctggtagctgttaactgcaagtttagcttgaattaagggatttggggggaccatgtaacttaattactgctagttttgaaatgtctttgtaagagtagggtcgccatgatgcagccatatggaagactaggatatgggtcacacttatctgtgttcctatggaaactatttgaatatttgttttatatggatttttattcactcttcagacacgctactcaagagtgcccctcagctgctgaacaagcatttgtagcttgtacaatggcagaatgggccaaaagcttagtgttgtgacctgtttttaaaataaagtatcttgaaataattaggc

SEQ ID NO: 660 - protein, 461 aa, Homo sapiens
MNNFGNEEFDCHFLDEGFTAKDILDQKINEVSSSDDKDAFYVADLGDILKKHLRWLKALPRVTPFYAVKCNDSKAIVKTLAATGTGFDCASKTEIQLVQSLGVPPERIIYANPCKQVSQIKYAANNGVQMMTFDSEVELMKVARAHPKAKLVLRIATDDSKAVCRLSVKFGATLRTSRLLLERAKELNIDVVGVSFHVGSGCTDPETFVQAISDARCVFDMGAEVGFSMYLLDIGGGFPGSEDVKLKFEEITGVINPALDKYFPSDSGVRIIAEPGRYYVASAFTLAVNIIAKKIVLKEQTGSDDEDESSEQTFMYYVNDGVYGSFNCILYDHAHVKPLLQKRPKPDEKYYSSSIWGPTCDGLDRIVERCDLPEMHVGDWMLFENMGAYTVAAASTFNGFQRPTIYYVMSGPAWQLMQQFQNPDFPPEVEEQDASTLPVSCAWESGMKRHRAACASASINV

SEQ ID NO: 661 - DNA, 2029 bp, Homo sapiens
atgagtcagcagcggccggcgaggaagttacccagtctcctcctggacccgacggaggagacggttcgccgtcggtgccgagaccccatcaacgtggagggcctgctgccatcaaaaataaggattaatttagaagataatgtacaatatgtgtccatgagaaaagctctaaaagtgaagagacctcgttttgatgtatcgctggtttatttaactcgaaaatttatggatcttgtcagatctgctcccgggggtattcttgacttaaacaaggttgcaacgaaactgggagtccgaaagcggagagtgtatgacatcaccaatgtcttagatggaatcgacctcgttgaaaagaaatccaagaaccatattagatggataggatctgatcttagcaattttggagcagttccccaacaaaagaagctacaggaggaactttctgacttatcagcaatggaagatgctttggatgagttaattaaggattgtgctcagcagctgtttgagttaacagatgacaaagaaaatgaaagactagcatatgtgacctatcaagacattcatagcattcaggccttccatgaacagatcgtcattgcagttaaagctccagcagaaaccagattggatgttccagctcccagagaagactctatcacagtgcacataaggagcaccaacggacctatcgatgtctatttgtgtgaagtggagcagggtcagaccagtaacaaaaggtctgaaggtgtcgggacctcttcatctgagagcactcatccagaaggccctgaggaagaagaaaatcctcagcaaagtgaagaattgcttgaagtaagcaactgatggcatttgagaatttatgtatcactgagttttttgggaatatcttcgtggagaattacgcatcaaatttgattctcagagcaataaattatccatgaagtgctctcgttctcagtagcggcatcatggccagtagtgtctttgaggagttcaccacttagattactgagtaattgtggtttccacatttgaaaacaactccttttataattattcactgctttttgtcagtgaaatagacatcttgcctcctgaagtagcttcatcacagagtgtcatgaagacagacagtcaggctgaaatggacagttctttgtggactctacccttcccttcaaggagtatgtcatatatcacaaaagaaattgccttacactggttcatgtttgcagttactgttgtacattgcatagatgtacacacgaatttaaatgtgatgtctttgtatatatctgtataatgttgagattacttacgaaatatgtctgagtgacacttttcacccttgtacagccaaaataatgtatatatggaaagtgacagacaaattctctaatctctttggtacctataacttattagaatcctctggatgagggttagaagagactttttccaaacttctacatgtagaagtatcataaatgtgctacacatttatgtttgtggatttaattaaagtattttaatatggttttcagtgctaaaattggagtcagatacttcttggttttaagctgtctacctaattgctgtctcccagcagactggtggcatgcccagtggctttgggggcaaggatagaaatgccatcaggaaatagctgaattcattgtgaaacatgaattcagtcatggtgataattggaaactcctttcaggtttttgcaagtagattttgtaatgtttgtgtatgcagccttgctgttgagtcagtccaaggggttttacttaggacaagttgtaccttgccctctctccagctctgctcccacattttcacatacctagctgtttctacctcattgggtaagtcatttaccactctgtgcctcagtttactctgtagtttaccattagactgtgagctccttgagggactttgtcataatcactgttacatcccagtgcctcacaccatgcctggcccttaagaagtgctcaataaatgtctgaacaaataa

SEQ ID NO: 662 - DNA, 2706 bp, Homo sapiens
ctctgtagctgtgaccctgataccgcgtggtgtgctccgaacacatggtgcccagaacgaaggcggcgtccagaagccctaggtcccagaggtccgctcagcggcaggcgcataaggcggggccggcgcgggcctttccttccatcggaaccgttctcccggggctgagtccctgcccggactccgaacgccgaagaccaggggccggaagcgcgcgccgccactgccacgccgtgtcagtcgggagggagggagcgagcaggcgaagccgcggaggacggggtgaagatggcggccttctccgagatgggtgtaatgcctgagattgcacaagctgtggaagagatggattggctcctcccaactgatatccaggctgaatctatcccattgatcttaggaggaggtgatgtacttatggctgcagaaacaggaagtggcaaaactggtgcttttagtattccagttatccagatagtttatgaaactctgaaagaccaacaggaaggcaaaaaaggaaaaacaacaattaaaactggtgcttcagtgctgaacaaatggcagatgaacccatatgacagaggatctgcttttgcaattgggtcagatggtctttgttgtcaaagcagagaagtaaaggaatggcatgggtgtagagctactaaaggattaatgaaagggaaacactactatgaagtatcctgtcatgaccaagggttatgcagggtcgggtggtctaccatgcaggcctctttggacctaggtactgacaagtttggatttggctttggtggaacaggaaagaaatcccataacaaacaatttgataattatggagaggaattcactatgcatgataccattggatgttacctggatatagataagggacatgtcaagttctccaaaaatggaaaagatcttggtctggcatttgaaataccaccacatatgaaaaaccaagccctctttcctgcctgtgttttgaagaatgctgaactgaaatttaacttcggtgaagaggaatttaagtttccaccaaaagatggctttgttgctctttccaaggcaccggatggttacattgtcaaatcacagcactcaggtaatgcacaggtgacacaaacaaagtttctccccaatgctccgaaagctctcattgttgaaccttcccgggagttagctgaacaaactttgaacaacatcaagcagtttaagaaatacattgataatcctaaattaagggagcttctgataattggaggtgttgcagcccgggatcagctctctgttttggaaaatggagtagatatagttgtaggtactccgggaagactagatgacttggtgtcaactggaaagctgaacttatctcaagttagattcctggtcctggatgaagctgatgggcttctttctcaaggttattctgattttataaataggatgcacaatcagattcctcaggttacctctgatggaaaaagacttcaggtgattgtttgctctgccactttgcattctttcgatgtaaagaaactgtccgagaagataatgcattttcctacatgggttgacttaaaaggagaagactctgttccagatactgtacaccatgttgttgtcccagtaaatcccaaaactgacagactctgggaaaggcttggaaagagccacattagaactgatgatgtacatgcaaaagataacacaagacctggtgctaatagtccagagatgtggtctgaagctattaaaatcctgaaaggggagtatgctgtccgggcaatcaaggaacataagatggatcaagcaattatcttctgtagaaccaaaattgactgtgataacttggagcagtactttatacaacaaggaggaggacctgataaaaaaggacaccagttctcatgtgtttgtcttcatggtgacagaaagcctcatgagagaaagcaaaacttggaaagatttaagaaaggagatgtaagattcttgatttgcacagatgtagctgctagaggaattgatatccacggtgttccttatgttataaatgtcactctgcccgatgaaaagcaaaactacgtacatcgaattggcagagtaggaagagctgaaaggatgggtctggcaatttccctggtggcaacagaaaaagaaaaggtttggtaccatgtatgtagcagccgtggaaaagggtgttataacacaagactcaaggaagatggaggctgtaccatatggtacaacgagatgcagttactatctgagatagaagaacacctgaactgtaccatttctcaggttgagccggatataaaggtaccagtggatgaatttgatgggaaagttacctacggtcagaaaagggctgctggtggtggaagctataaaggccatgtggatattttggcacctactgttcaagagttggctgcccttgaaaaggaggcgcagacatctttcctgcatcttggctaccttcctaaccagctgttcagaaccttctgatttttacatttactgaataagatttgagtaatgaaagtctgtagtcttaaaactctaaaacagttgtactgcttccaagcagcagtatttatagtaacgtaagctattaatgctaactcttgcatgtcaagaaacattagtcttaggaattcttcaaaaaatggcatcccaatgaaaataaatttgatgactata

SEQ ID NO: 663 - protein, 740 aa, Homo sapiens
MAAFSEMGVMPEIAQAVEEMDWLLPTDIQAESIPLILGGGDVLMAAETGSGKTGAFSIPVIQIVYETLKDQQEGKKGKTTIKTGASVLNKWQMNPYDRGSAFAIGSDGLCCQSREVKEWHGCRATKGLMKGKHYYEVSCHDQGLCRVGWSTMQASLDLGTDKFGFGFGGTGKKSHNKQFDNYGEEFTMHDTIGCYLDIDKGHVKFSKNGKDLGLAFEIPPHMKNQALFPACVLKNAELKFNFGEEEFKFPPKDGFVALSKAPDGYIVKSQHSGNAQVTQTKFLPNAPKALIVEPSRELAEQTLNNIKQFKKYIDNPKLRELLIIGGVAARDQLSVLENGVDIVVGTPGRLDDLVSTGKLNLSQVRFLVLDEADGLLSQGYSDFINRMHNQIPQVTSDGKRLQVIVCSATLHSFDVKKLSEKIMHFPTWVDLKGEDSVPDTVHHVVVPVNPKTDRLWERLGKSHIRTDDVHAKDNTRPGANSPEMWSEAIKILKGEYAVRAIKEHKMDQAIIFCRTKIDCDNLEQYFIQQGGGPDKKGHQFSCVCLHGDRKPHERKQNLERFKKGDVRFLICTDVAARGIDIHGVPYVINVTLPDEKQNYVHRIGRVGRAERMGLAISLVATEKEKVWYHVCSSRGKGCYNTRLKEDGGCTIWYNEMQLLSEIEEHLNCTISQVEPDIKVPVDEFDGKVTYGQKRAAGGGSYKGHVDILAPTVQELAALEKEAQTSFLHLGYLPNQLFRTF

SEQ ID NO: 664 - DNA, 4493 bp, Homo sapiens
gaacatggcggcccccgagtcagggccggctttgagtccaggcactgcagaggcctagaggcaaccaaaaacatggtgcatcctttatcatcacgaaagcaattcgagatcgtttattatttttacgccaatacatctggtacagcccggcaccttttttgctccctgatggactggttcgcttggttaataaacagataaactggcatttggtacttgcaagcaatagcactagagtgcatctatacctgtgaacgaaatgatcaactctgtctttgctatgacctactagaatgtctgccagaaagaggatatggtgataagacagaggcaaccacaaagcttcatgacatggtagaccaactggaacaaattctcagtgtgtcagagcttttggaaaaacatggactcgagaaaccaatttcatttgttaaaaacactcaatctagctcagaagaggcacgcaagctgatggttagattgacgaggcacactggccggaagcagcctcctgtcagtgagtctcattggagaacgttgctgcaagacatgttaactatgcagcagaatgtatacacatgtctagattctgatgcctgctatgagatatttacagaaagccttctgtgctctagtcgccttgaaaacatccacctggctggacagatgatgcactgcagtgcttgttcagaaaatcctccagctggtatagcccataaagggaaaccccactacagggtcagctacgaaaagagtattgacttggttttggctgccagcagagagtacttcaattcttctaccaacctcactgatagctgcatggatctagccaggtgctgcttacaactgataacagacagaccccctgccattcaagaggagctagatcttatccaagccgttggatgtcttgaagaatttggggtaaagatcctgcctttgcaagtgcgattgtgccctgatcggatcagtctcatcaaggagtgtatttcccagtcccccacatgctataaacaatccaccaagcttctgggccttgctgagctgctgagggttgcaggtgagaacccagaagaaaggcggggacaggttctaatccttttagtggagcaggcacttcgcttccatgactacaaagcagccagtatgcattgtcaggagctgatggccacaggttatcctaaaagttgggatgtttgtagccagttaggacaatcagaaggttaccaggacttggccactcgtcaagagctcatggcttttgctttgacacattgccctcctagcagcattgaacttcttttggcagctagcagctctctgcagacagaaattctttatcaaagagtgaatttccagatccatcatgaaggaggggaaaatatcagtgcttcaccattaactagtaaagcagtacaagaggatgaagtaggtgttccaggtagcaattcagctgacctattgcgctggaccactgctaccaccatgaaagtcctttccaacaccacaaccaccaccaaagcggtgctgcaggccgtcagtgatgggcagtggtggaagaagtctttaacttaccttcgaccccttcaggggcaaaaatgtggtggtgcatatcaaatcggaactacagccaatgaagatctagagaaacaagggtgtcatcctttttatgaatctgtcatctcaaatccttttgtcgctgagtctgaagggacctatgacacctatcagcatgttccagtggaaagctttgcagaagtattgctgagaactggaaaattggcagaggctaaaaataaaggagaagtatttccaacaactgaagttctcttgcaactagcaagtgaagccttgccaaatgacatgaccttggctcttgcttaccttcttgccttaccacaagtgttagatgctaaccggtgctttgaaaagcagtccccctctgcattatctctccagctggcagcgtattactatagcctccagatctatgcccgattggccccatgtttcagggacaagtgccatcctctttacagggctgatcccaaagaactaatcaagatggtcaccaggcatgtgactcgacatgagcacgaagcctggcctgaagaccttatttcactgaccaagcagttacactgctacaatgaacgtctcctggatttcactcaggcgcagatccttcagggccttcggaagggtgtggacgtgcagcggtttactgcagatgaccagtataaaagggaaactatccttggtctggcagaaactctagaggaaagcgtctacagcattgctatttctctggcacaacgttacagtgtctcccgctgggaagtttttatgacccatttggagttcctcttcacggacagtggtttgtccacactagaaattgaaaatagagcccaagaccttcatctctttgagactttgaagactgatccagaagcctttcaccagcacatggtcaagtatatttaccctactattggtggctttgatcacgaaaggctgcagtattatttcactcttctggaaaactgtggctgtgcagatttggggaactgtgccattaaaccagaaacccacattcgactgctgaagaagtttaaggttgttgcatcaggtcttaattacaaaaagctgacagatgaaaacatgagtcctcttgaagcattggagccagttctttcaagtcaaaatatcttgtctatttccaaacttgttcccaaaatccctgaaaaggatggacagatgctttccccaagctctctgtacaccatctggttacagaagttgttctggactggagaccctcatctcattaaacaagtcccaggctcttcaccggagtggcttcatgcctatgatgtctgcatgaagtactttgatcgtctccacccaggtgacctcatcactgtggtagatgcagttacattttctccaaaagctgtgaccaagctgtctgtggaagcccgtaaagagatgactagaaaggctattaagacagtcaaacattttattgagaagccaaggaaaagaaactcagaagacgaagctcaagaagctaaggattctaaagttacctatgcagatactttgaatcatctggagaaatcacttgcccacctggaaaccctgagccacagcttcatcctttctctgaagaatagtgagcaggaaacactgcaaaaatacagtcacctctatgatctgtcccgatcagaaaaagagaaacttcatgatgaagctgtggctatttgtttagatggtcagcctctagcaatgattcagcagctgctagaggtggcagttggccctcttgacatctcacccaaggatatagtgcagagtgcaatcatgaaaataatttctgcattgagtggtggcagtgctgaccttggtgggccaagggacccactgaaggtcctggaaggtgttgttgcagcagtccacgccagtgtggacaagggtgaggagctggtttcacctgaggacctgctggagtggctgcggcctttctgtgctgatgacgcctggccggtgcggccccgcattcacgtgctgcagattttggggcaatcatttcacctgactgaggaggacagcaagctcctcgtgttctttagaactgaagccattctcaaagcctcctggccccagagacaggtagacatagctgacattgagaatgaagagaaccgctactgtctattcatggaactcctggaatctagtcaccacgaggctgaatttcagcacttggttttacttttgcaagcttggccacctatgaaaagtgaatatgtcataaccaataatccatgggtgagactagctacagtgatgctaaccagatgtacgatggagaacaaggaaggattggggaatgaagttttgaaaatgtgtcgctctttgtataacaccaagcagatgctgcctgcagagggtgtgaaggagctgtgtctgctgctgcttaaccagtccctcctgcttccatctctgaaacttctcctcgagagccgagatgagcatctgcacgagatggcactggagcaaatcacggcagtcactacggtgaatgattccaattgtgaccaagaacttctttccctgctcctggatgccaagctgctggtgaagtgtgtctccactcccttctatccacgtattgttgaccacctcttggctagcctccagcaagggcgctgggatgcagaggagctgggcagacacctgcgggaggccggccatgaagccgaagccgggtctctccttctggccgtgagggggactcaccaggccttcagaaccttcagtacagccctccgcgcagcacagcactgggtgtgagggccacctgtggccctgctccttagcagaaaaagcatctggagttgaatgctgttcccagaagcaacatgtgtatctgccgattgttctccatggttccaacaaattgcaaataaaactgtatggaaacg

SEQ ID NO: 665 - DNA, 1110 bp, Homo sapiens
atgagatctcggctgcgaagtgtgtcatcagcatctggctttctgggttatgatgtggtcagggatgtgtcttctggcccattttggaggcgcaaaaatggtgatccatgtttggatttatgtggaagggacagttccacagtatggaaaaggggagacagtcccaggaagcgtgaagaggaaaggtcattgggaatctctcagtacctctgccctaatctcttctctcctacggaggcagttaagtctaaagccatttgtctggtttccatatctgaacttcaagcagcatcttctggacttagttcttggtggctggagcagggaaagtgtggcctcattgaaatgggatcaggtttcaggatgtttcatgtgtctgtgtctttctcacacattgtgaggaacaggacagtccctctgatgcgctggtacctggccgccatgcagatcatgaggggagagaagcaggctgcttcggggaatcctgccatagaggctggagcttcatgtgcatctcagccagccctgcagcagccctcagcagcccttctgtggggctggggtatctgttgcccaggaaatcactgggctgaggaagtaggagatgaatggctctgtgctatcacaccatcttctgcattgagtcttcttcgctttcttatcatcgtcatcatgattatcatcaataaatttgtaaggaaggaaacaggactgcttattgattttcatttctatgctactgagagccaaggctacggatttctttccccaggaatggagagaggaaagagatgtgagattggctacccaactgttgcatcagtaccccattctatcatcaacgggtacaaacgagtcctggccttgtctgtggagacggattacaccttcccactcgctgaaaaggtcaaggccttcttggctgatccatctgcctttgagatggaggagtggaggggtgatgataaaatggaagctcccgtgtcaagagatcaggcaaatggggagactccgtgggatcctctgaagaatctacatgcacgtacttacgagaatcagattagggatgcctaccacacaggagtaccaatgtttagtattagcccgtaa

SEQ ID NO: 666 - protein, 175 aa, Homo sapiens
MRSRLRSVSSASGFLGYDVVRDVSSGPFWRRKNGDPCLDLCGRDSSTVWKRGDSPRKREEERSLGISQYLCPNLFSPTEAVKSKAICLVSISELQAASSGLSSWWLEQGKCGLIEMGSGFRMFHVSVSFSHIVRNRTVPLMRWYLAAMQIMRGEKQAASGNPAIEAGWERTGAQM

SEQ ID NO: 667 - DNA, 1404 bp, Homo sapiens
cgcgaagaagctggcaggggcacgagccgggggcgggtttgaagacgcgtcgttgggttttggaggccgtgaaacagccgtttgagtttggctgcgggtggagaacgtttgtcaggggcccggccaagaaggaggcccgcctgttacgatggtgtccatgagtttcaagcggaaccgcagtgaccggttctacagcacccggtgctgcggctgttgccatgtccgcaccgggacgatcatcctggggacctggtacatggtagtaaacctattgatggcaattttgctgactgtggaagtgactcatccaaactccatgccagctgtcaacattcagtatgaagtcatcggtaattactattcgtctgagagaatggctgataatgcctgtgttctttttgccgtctctgttcttatgtttataatcagttcaatgctggtttatggagcaatttcttatcaagtgggttggctgattccattcttctgttaccgactttttgacttcgtcctcagttgcctggttgctattagttctctcacctatttgccaagaatcaaagaatatctggatcaactacctgattttccctacaaagatgacctcctggccttggactccagctgcctcctgttcattgttcttgtgttctttgccttattcatcatttttaaggcttatctaattaactgtgtttggaactgctataaatacatcaacaaccgaaacgtgccggagattgctgtgtaccctgcctttgaagcacctcctcagtacgttttgccaacctatgaaatggccgtgaaaatgcctgaaaaagaaccaccacctccttacttacctgcctgaagaaattctgcctttgacaataaatcctataccagctttttgtttgtttatgttacagaatgctgcaattcagggctcttcaaacttgtttgatataaaatatgttgtcttttgtttaagcatttattttcaaacactaaggagctttttgacatctgttaaacgtctttttgtttttttgttaagtcttttacattttaatagtttttgaagacaatctaggttaagcaagagcaaagtgccattgtttgcctttaattggggggtgggaagggaaagagggtacttgccacatagtttcctttttaactgcactttctttatataatcgtttgcattttgttacttgctaccctgagtactttcaggaagactgacttaaatattcggggtgagtaagtagttgggtataagatctgaacttttcatctgcagaggcaagaaaaatatttgacattgtgacttgactgtggaagatgatggttgcatgtttctagtttgtatatgtttccatctttgtgataagatgatttaataaatctctttaaatactt

SEQ ID NO: 668 - protein, 233 aa, Homo sapiens
MVSMSFKRNRSDRFYSTRCCGCCHVRTGTIILGTWYMVVNLLMAILLTVEVTHPNSMPAVNIQYEVIGNYYSSERMADNACVLFAVSVLMFIISSMLVYGAISYQVGWLIPFFCYRLFDFVLSCLVAISSLTYLPRIKEYLDQLPDFPYKDDLLALDSSCLLFIVLVFFALFIIFKAYLINCVWNCYKYINNRNVPEIAVYPAFEAPPQYVLPTYEMAVKMPEKEPPPPYLPA

SEQ ID NO: 669 - DNA, 1190 bp, Homo sapiens
gcggcttgcggggaccacagctcccgaaagcgacgttcggccaccggaggagcgggagccaagcaggcggagctcggcgggagaggtgcgggccgaatccgagccgagcggagaggaatccggcagtagagagcggactccagccggcggaccctgcagccctcgcctgggacagcggcgcgctgggcaggcgcccaagagagcatcgagcagcggaacccgcgaagccggcccgcagccgcgacccgcgcagcctgccgctctcccgccgccggtccgggcagcatgaggcgcgcggcgctctggctctggctgtgcgcgctggcgctgagcctgcagccggccctgccgcaaattgtggctactaatttgccccctgaagatcaagatggctctggggatgactctgacaacttctccggctcaggtgcaggtgctttgcaagatatcaccttgtcacagcagaccccctccacttggaaggacacgcagctcctgacggctattcccacgtctccagaacccaccggcctggaggctacagctgcctccacctccaccctgccggctggagaggggcccaaggagggagaggctgtagtcctgccagaagtggagcctggcctcaccgcccgggagcaggaggccaccccccgacccagggagacagcatcagggttaagaagactttttttttttttttttaaactaggagaaccaaatctggaagccaaaatgtaggcttagtttgtgtgttgtctcttgagtttgtcgctcatgtgtgcaacagggtatggactatctgtctggtggccccgtttctggtggtctgttggcaggctggccagtccaggctgccgtggggccgccgcctctttcaagcaaggccagaggcccccagcccagggctcctgcacttacttgcttatttgacaacgtttcagcgactccgttggccactccgagaggtgggccagtctgtggatcagagatgcaccaccaagccaagggaacctgtgtccggtattcgatactgcgactttctgcctggagtgtatgactgcacatgactcgggggtggggaaaggggtcggctgaccatgctcatctgctggtccgtgggacggtgcccaagccagaggctgggttcatttgtgtaacgacaataaacggtacttgtcatttcgggc

SEQ ID NO: 670 - DNA, 1795 bp, Homo sapiens
actgcgcgccccgcccggagtccccgccgccgtcatgcagtccccggcggtgctcgtcacctccaggcgacttcagaatgcccacactggcctcgacctgactgtgccccagcaccaggaggtacggggcaagatgatgtctggacacgtggagtaccagatcctggtggtgacccgtctggctgcgttcaagtcggccaagcacaggcccgaggatgtcgtccagttcttggtctccaaaaagtacagcgagattgaggagttttaccagaaactgagcagtcgttatgcagcagccagcctccccccactacccaggaaggtcctgtttgttggggagtctgacatccgggagaggagagccgtgttcaatgagatcctgcgctgtgtctccaaggatgccgagttggcaggcagcccagagctgctagagttcttaggtaccagatccccaggggctgcagggctcaccagcagagattcctctgtcctggatggcacagacagtcagacagggaatgatgaagaggctttcgacttttttgaggagcaagaccaagtggcagaagagggtccgcccgtccagagcctgaagggcgaggatgctgaggaatccttggaggaggaggaggcgctggaccctctgggcattatgcgctccaagaagcccaagaaacatcggtgtgaagggaagggactgggccctgcagggtcagaacctccccacccccaggggaggccaggcagaagcctgggtcacagcacccagaactgcatggttccattttctccggggctgtggggccaaagtagaagcctgcgggctgcgggagcggctctcaccctaggagccagagcccaatgtgtcttattccccgtggacatgaaggggagggagggtgtggggatgccttgccaaccagaagcccagccccaaggatgaagcaagacatgtggggccgtagcgaggtgtcacatggggcagggaagcttcatgcccacgggttctgccagccccagcacagacccaaactggggctgggcctctatccctcctctgcctctgttcgcatagtaagaaggagtgaccggtatcctccccttcccctaccctaagctgtagcctgggtgactgactggcctgggcctggggtggggacgtccccaagccaaattactccagggcctctgctcctcgtggctgccaggggcctgcagggtctgggtgggtctcccaggagaggaatactgagtgggagatcggctgtctggagtgttctgatgcaagtctctctctcctgagcctcctcttgatgcaagctctaaagggagaagtcaggccctgcctctccagggtatagacggccctgctaggccccagttcttcctccttccccctttcccaggaaaggccagcccagtccatggccttcttgggcctctgggcacagagccaatgttcgtcattgcagctctcagcaaactgggtcatagctttccccacagctcagcctggggcctgggcagggctcccagcctgcaccgcctcccactgccagtggggcatgattctctcaggcttctgccccgaggccttcgtcgtcctcagggtctggacttggtcagtggcctttcaccagtggagctgccttcccagggagaaggagccgtgcgccagggcagggcccgtgccttagacttctcccgacccccagagcgctggtacacaggtctaggcaccacacagtgctttggaaattctcagtgaatgatgtttaataaagcaaaaaatgtc

SEQ ID NO: 671 - protein, 302 aa, Homo sapiens
MQSPAVLVTSRRLQNAHTGLDLTVPQHQEVRGKMMSGHVEYQILVVTRLAAFKSAKHRPEDVVQFLVSKKYSEIEEFYQKLSSRYAAASLPPLPRKVLFVGESDIRERRAVFNEILRCVSKDAELAGSPELLEFLGTRSPGAAGLTSRDSSVLDGTDSQTGNDEEAFDFFEEQDQVAEEGPPVQSLKGEDAEESLEEEEALDPLGIMRSKKPKKHRCEGKGLGPAGSEPPHPQGRPGRSLGHSTQNCMVPFSPGLWGQSRSLRAAGAALTLGARAQCVLFPVDMKGREGVGMPCQPEAQPQG

SEQ ID NO: 672 - DNA, 1260 bp, Homo sapiens
atgggtcaaagtcagagtggtggtcatggtcctggaagtggcaagaaggatgacaaggacaaaaaaaagaaatatgaaccttctgtaccaactagagtgaggaaaaagaagaagaaaacaaagggaccagatgcagtcagcaaactgccactggtgacacctcacactcagtgccggttaaaattactgacattagagagaattaaagactatcttctcatggaggaagaattcattagaaatcaggaacagatgaaaccattagaagaaaagcaaaaggaggaaagatcaaaagtggatgatctgagggggaccccgatacaaggatcttctggaaactggctgctcggtcctgctcaaccacaaggtgcatgccgtgatggggtgctgatggatgacacggatcccctggtcacagtgatgaagatggaaaagaccccccaggagacctatgccaatattggggggctggacaaccaaattcaggaaataaaggaagctgtggagtttcctctcacccatcctgaatattatgaagagatgggtaaaaagcctcctaagggggtcattctctatggtccacctggcacaggcaaaaccttgttatccaaagcagtagcaaaccaaacctcagccactttcttgagagtggttggctctgaacttattcagaagtacctagttgctgaagagcatgaactatccatcatgtttactgatgaaattggagccattgggacaaaaagatatgactcaaattctggtggccgcattgacaggaagatcaagttctccctgcctgatgaaaggactaagaagcgtatctttcagaatcacacaagcaggatgacactggccgatgaagtaaccctggacgacttgatcatggttaaagatgacctctctggtgctgacatcaaggcaatctgtacagaagctggtctgatggcctcaagagaacgtagaatgaaagtaacgaatgaattcttcaaaaaatataaagaaatgttctttataagaaacaggaaggcacccctgaggggctctatctctagtgaaccacagctgccatcaggaaaatggttgggcgattcctcgacccctgaaaaggatgagcaacttgttcccaaagctggagaagacactcctgagggctatttaggacaacttatgactcagctctttgagcagaaagaggccaaaaagttcagcagaaaaagccctgaactcttggaagagctggcttcaagcctggcttag

SEQ ID NO: 673 - protein, 419 aa, Homo sapiens [sequence omitted]

SEQ ID NO: 674 - DNA, 1846 bp, Homo sapiens
gacggcgccttcgcgaaacactatgctaatggcatggtgccgcggtcctgtcttgctgtgcctgcggcaggggctcggaaccaattcattcctgcacggcctggggcaggagcccttcgagggagctcggtcactgtgttgcaggtcctcgcctagagacctgcgagatggagaaagagagcacgaggcggcacaaaggaaagccccaggagcagagtcttgcccatctctccctctgagcatctcggacattgggactggatgtctttcgtcactggaaaacctcagactgccgacgctgcgggaagagtcatcacctcgagagctcgaggactcgagcggagaccagggccggtgcggtcccacacaccagggatccgaggatccttcgatgctctcgcaggcccagtccgctatcgaggtcgaagagcgtcacgtctccccttcttgttcaacttccagagagagaccctttcaggctggggagctgattttagctgagactggggagggagaaacaaaatttaagaaattatttaggttgaacaacttcggactcttaaatagtaactggggggcagtcccgttcggcaagatcgtggggaagttccccggccagatactgaggagttccttcggtaagcagtacatgctgaggaggccagccttggaagactatgtagtattgatgaaaagagggactgccataacattcccaaaggatattaatatgattctctcaatgatggatatcaacccaggtgatactgttttggaagctggctcaggctctggtggaatgagcttatttttatccaaagcagttggatcacaaggacgagtcataagttttgaggtacgaaaagaccaccatgatctggctaagaagaattacaaacactggcgtgattcatggaaattaagtcatgtagaagagtggccagacaatgtggattttattcataaggacatttcaggagcaaccgaagacataaaatctttaacatttgacgcagtagctttggatatgttaaatcctcatgttactttgcctgttttttacccacatcttaagcatggtggtgtatgtgctgtatatgtagtaaacatcacacaggttattgaacttttagatggaattcgcacctgtgaacttgctctttcatgtgaaaagataagcgaggtcattgtcagagattggttggtttgccttgcaaaacagaaaaatggaattttagctcaaaaagtagaatctaaaatcaacacagatgtacaactagattctcaagagaaaattggagttaaaggtgagctgtttcaagaggatgaccatgaagaatcgcattctgattttccatatggatcatttccctatgttgctagaccagtacactggcaacctggtcatacagcttttcttgtcaagttgaggaaggtcaaaccacaacttaactgagtactccagatgacagtaactgacttgaagatggaaaaatatcaaaatagaactttatattgaaaatcactgcttccatagattggcatttttagctattactatgacttatataacttatacatataattttgaaaataacaactaaaagatgtataacatagcaaaactgcttaaacatcccattttgacacttgtcttgcagttagtttgacattttgtagttaatgattccaaattggtttagttgggccatctcattcttcacttcctgtaaaccactccatagatttgtctttcttcaagaaattagttttctttcctttatttgattgatggtcattgactactgaaataaaatatgcattttaagataaaaaaaaaaaaaaa

SEQ ID NO: 675 - protein, 477 aa, Homo sapiens
MLMAWCRGPVLLCLRQGLGTNSFLHGLGQEPFEGARSLCCRSSPRDLRDGEREHEAAQRKAPGAESCPSLPLSISDIGTGCLSSLENLRLPTLREESSPRELEDSSGDQGRCGPTHQGSEDPSMLSQAQSAIEVEERHVSPSCSTSRERPFQAGELILAETGEGETKFKKLFRLNNFGLLNSNWGAVPFGKIVGKFPGQILRSSFGKQYMLRRPALEDYVVLMKRGTAITFPKDINMILSMMDINPGDTVLEAGSGSGGMSLFLSKAVGSQGRVISFEVRKDHHDLAKKNYKHWRDSWKLSHVEEWPDNVDFIHKDISGATEDIKSLTFDAVALDMLNPHVTLPVFYPHLKHGGVCAVYVVNITQVIELLDGIRTCELALSCEKISEVIVRDWLVCLAKQKNGILAQKVESKINTDVQLDSQEKIGVKGELFQEDDHEESHSDFPYGSFPYVARPVHWQPGHTAFLVKLRKVKPQLN

SEQ ID NO: 676 - DNA, 1155 bp, Homo sapiens
atgcaacaagcttcctacccccaacccggccagacaaagccccggcagcagggccggcacttccgagcctccggactcgggacgccgcgctcttaccctggcctcatccagagtgacgccggcgccaccgcttcccccggctttggcggcggggcagctggcggcgcgggtcttggaggagcgggtccgagaggagatgaaatggctgctgcctccggtcgccccaggctctgctccggccccaggcccaggcccgggaccaggagacttggacccgagaaggcggagagagctcttccgggtgttcaccatggtccagccagggggacggagtccacgccgcgcccgggagagccgagcaaggccggcccgccggccgctgccccgcccccggcgcggcgtcagcgctcggcggccggggagcgacgctctaggctgtcagctcggtggtttccagctctccccgaccgcagggctggggcgaccagaaaagccagactaatcaggacgagttcgggcgtggaattgggcctgaagccctcatgcccagccaggcctgaatgccccagaccccaccgtcacccccgtggcctggatggagcaggggacggccggcgaaggcgcggggtggaaggggagcggcgacgaaggcgcgaggagctgactgggaatccccaagctacccgaggcaagacactgaacttgagtcgcacttttcatgcctgtagaaatgagaatgacagctgtgataaaaaaaaaattcatctgggcggtatctggaacttgggcgttccgaaacttacagttatgcgcaacacaatgtttctattttcaaaggcgaacgctgcacgatcgcagtccagtgatacaaataataaaagagtttattacttgtcagcaatgatgaatgttcgtgtggcatccagcgttgagttcctattcttacttggaactcattggtccctgtgtctggggccagcactgatggacacaactaagtttgcactcgtcttccctctcatgtatcatacctggaatgggatccaacacttgatgtgggacctaggaaaaggcctgaagattccccagctataccagtctggagtggttgtcctggttcttactgtgttatttgtagggctggcagctgtgtga

SEQ ID NO: 677 - protein, 384 aa, Homo sapiens
MQQASYPQPGQTKPRQQGRHFRASGLGTPRSYPGLIQSDAGATASPGFGGGAAGGAGLGGAGPRGDEMAAASGRPRLCSGPRPRPGTRRLGPEKAERALPGVHHGPARGTESTPRPGEPSKAGPPAAAPPPARRQRSAAGERRSRLSARWFPALPDRRAGATRKARLIRTSSGVELGLKPSCPARPECPRPHRHPRGLDGAGDGRRRRGVEGERRRRREELTGNPQATRGKTLNLSRTFHACRNENDSCDKKKIHLGGIWNLGVPKLTVMRNTMFLFSKANAARSQSSDTNNKRVYYLSAMMNVRVASSVEFLFLLGTHWSLCLGPALMDTTKFALVFPLMYHTWNGIQHLMWDLGKGLKIPQLYQSGVVVLVLTVLFVGLAAV

SEQ ID NO: 678 - DNA, 3834 bp, Homo sapiens
acagagagattggtgtttttgtgaggcagtgagacctaaggtaacctttatcaaaaggatggagttgggaaaaggaaaactactcaggactggactgaatgcgttgcatcaagcagtgcatccgatccatggccttgcctggaccgatgggaatcaagttgtcctaactgatttgcggcttcacagtggagaggtcaagtttggggactccaaagtcattggacagtttgaatgtgtctgtgggttgtcctgggccccacctgttgcagatgatacacctgttctactcgctgtccagcatgagaagcatgtcactgtgtggcagctgtgtcccagccctatggagtcaagcaaatggctgacgtctcagacttgtgagattagaggatcactacctatccttccccagggctgtgtgtggcacccaaaatgtgctattctgactgtgttgactgctcaggatgtctccattttccctaatgttcactctgatgattcccaggtaaaggcagacatcaacacccagggccgcattcactgtgcatgttggacccaggatggcctgaggctggtggtggcagtaggcagcagcctgcattcttatatttgggacagcgctcagaagactcttcacaggtgctcctcctgcctggtgtttgatgtggacagccacgtctgctccatcacagcaactgtggactcacaggttgctatagctactgagcttccattggataagatctgtggcttaaatgcatctgaaacctttaatatcccacctaacagtaaagacatgactccgtatgctttaccagttattggtgaagtacgctctatggataaagaggcaactgattctgaaacaaattctgaagtatcagtttcttcttcctatttagaacctctggatctaactcacatacatttcaatcaacataagtctgagggtaattctcttatttgtctaagaaaaaaggactacttgacaggaactggccaagattcttcacatttggtccttgtgacctttaagaaggcagttaccatgacgagaaaagtcactattccaggcattctggttcctgatctgatagcatttaatcttaaagcccacgtagtggcagtggcttccaacacttgtaatataattttgatctactctgtcattccatcttcagtcccaaacatccagcaaattcgattagagaacactgaaagaccaaaagggatatgtttcttgacagaccaactattactaattttggtaggaaaacaaaaactcactgatacaacatttcttccttcttcaaagtctgatcagtatgccattagcttgattgttagagaaataatgttggaagaagaaccttcaataacatcaggtgaaagccagactacctactctactttcagtgctccgttaaataaagcaaatagaaaaaagttaattgaaagtctttccccagatttttgtcaccaaaacaaagggctgttgctgacagttaataccagtagtcagaatggaaggcctggaagaacacttattaaagaaatccagagtcctctgtctagtatctgtgatggctccatagctctagatgctgagcctgttacccagccagcatcgctgcccagacacagcagcacaccagaccacaccagcacactggagcctcctcgtttgcctcaaagaaagaacttacaaagtgaaaaggaaacttatcagctgtctaaggaggtggaaattttatctaggaacctggttgaaatgcaacggtgtctttctgaacttacaaaccgtctgcataatgggaagaaatcctcttcagtgtatccactctctcaagatcttccttatgttcacatcatttaccagaaaccttattatctaggtcctgttgttgaaaaaagagcggtgcttctctgtgatggtaaactaaggctcagtacagttcagcagacttttggcctttctctcattgaaatgctacatgattcccactggattcttctctctgctgacagtgagggctttatcccgttaaccttcacagccacacaggaaataatcataagagatggcagcctgtccaggtcagatgtcttcagagactctttttctcacagtccaggtgctgtttcttctcttaaagtctttacaggccttgctgcccccagtttagataccactggctgttgtaaccatgtagatggcatggcttgatatctgcagtgtccttgctgtgtagctcttcagatgagaccattacaaacaaggcctgcttgacactggacactcgccaatgagactcccactgcactcaggcgaagcgcttgccatggtcggctctcctggtttccccctgtttcccctgagctgaggctcgctgctgtgtagcagagctcagtctttattagatggctccgaaagtggtgtttatgtattcatgactgtgtggttttgactaagggcagaattctcagaacaaaacaatattatggtgccatatggatggtgttttatggtttctctgaggctttgtgtcccttgtccaaagctgcattgaagctgtcttaggagcacttaaaagataccttggcattgttataggtctttttcttggcttcaagaggaggttgaggagtctgctggggggcatgtgctctagcatattaacctcaaaccagcaagaattagcagagctccaaggaggaccagagacccactggcttctgctctcaggaacaggaagtggctctgatgttgcctggacctcccagaatttaaaccaaaccctcttgcttccttaacaaattctggctgacgaaggtccaggtactcttaaaaactggccctgggaaaattttgaatgaaatttcaagggaatttgtcccctctgggttccacttgaggttgtgccgatgctgctaccacactgtcgagcccaggtaagtcctactgcaggattttgtgctgtggccactcatgagtgtccctgaaataactttttttttttttaaatccagttttgggatcacgcaactttcctatttttctcccagtagtcagctcccttagttaacttgtcactttaatttgatatttttattttctctccttttaagtcttagagaccagcagagaatctgtgagagaaagtatttcaggaagttagaaattcaaccgaatctgaggtagtcctaaaaagtgccattttgtttcacttatgggctaaagtaccagcttagtcaggtaagagccctgacccacttcagatggtaacaccacttctcactgccttcagatggaatcacagatttcagtcacggcgcataacaaattgatcagtgagtggctaggcatctgcagataaattgtttcagccatagaagctccattagcacatatgcttccttttccccccttcctttaaaatcatctggaaagaaactattttgtgcccttggggactcctgtctgtctgttacagtttaccaagatggagctgggttaggaaagaagtgagggcccattttgtggttcaagtgcactagacagctgctggggtaggaagcacaggcaatgtctgcaatcagctgtgggagagcggtgactgagaacagtctgaggcctggctccacttggaagtatctggggtgcgatgaaatcacaattatcttgaagcctaaagagggaactacaagactgttaactaagatcaatgtgggcacctaaaagggtatgttaaaatcaccatttctcaggtcaaaatactgtgaaataaaaatggaaacggaaaaaaaaaaaaaaaaaaaaaaaaaaaaaaaaaaaaa

SEQ ID NO: 679 - protein, 721 aa, Homo sapiens
MELGKGKLLRTGLNALHQAVHPIHGLAWTDGNQVVLTDLRLHSGEVKFGDSKVIGQFECVCGLSWAPPVADDTPVLLAVQHEKHVTVWQLCPSPMESSKWLTSQTCEIRGSLPILPQGCVWHPKCAILTVLTAQDVSIFPNVHSDDSQVKADINTQGRIHCACWTQDGLRLVVAVGSSLHSYIWDSAQKTLHRCSSCLVFDVDSHVCSITATVDSQVAIATELPLDKICGLNASETFNIPPNSKDMTPYALPVIGEVRSMDKEATDSETNSEVSVSSSYLEPLDLTHIHFNQHKSEGNSLICLRKKDYLTGTGQDSSHLVLVTFKKAVTMTRKVTIPGILVPDLIAFNLKAHVVAVASNTCNIILIYSVIPSSVPNIQQIRLENTERPKGICFLTDQLLLILVGKQKLTDTTFLPSSKSDQYAISLIVREIMLEEEPSITSGESQTTYSTFSAPLNKANRKKLIESLSPDFCHQNKGLLLTVNTSSQNGRPGRTLIKEIQSPLSSICDGSIALDAEPVTQPASLPRHSSTPDHTSTLEPPRLPQRKNLQSEKETYQLSKEVEILSRNLVEMQRCLSELTNRLHNGKKSSSVYPLSQDLPYVHIIYQKPYYLGPVVEKRAVLLCDGKLRLSTVQQTFGLSLIEMLHDSHWILLSADSEGFIPLTFTATQEIIIRDGSLSRSDVFRDSFSHSPGAVSSLKVFTGLAAPSLDTTGCCNHVDGMA

SEQ ID NO: 680 - DNA, 1618 bp, Homo sapiens
ttctcttagcagcacccagcttgcccacccatgctcaagatgggcgggatgccagcctgttacataaatgtgccaaaagcctggccatgcctggaaaatggaccaatccgcccgccaagaggttgggtctcgttccctagagagaaggaagtttcctctccttgaagtgagagctagaatcgcactttctgtcaagctgagagaaagactcttttccagaggctaaaaggacaagaaaatctgatttgcttgcttctaactttgcgttttaaagggggaaggaggaaaggaaagagggggagggtggttctgcttagccccacccctccggctaccccaggtccagccgtccattccggtggaggcagaggcagtcctggggctctggggctcgggctttgtcaccgggacccgcaggagccagaaccactcggcgccgcctggtgcatgggaggggagccgggccaggaacaatatgttagccgtgcactttgacaagccgggaggaccggaaaacctctacgtgaaggaggtggccaagccgagcccgggggagggtgaagtcctcctgaaggtggcggccagcgccctgaaccgggcggacttaatgcagagacaaggccagtatgacccacctccaggagccagcaacattttgggacttgaggcatctggacatgtggcagagctggggcctggctgccagggacactggaagatcggggacacagccatggctctgctccccggtgggggccaggctcagtacgtcactgtccccgaagggctcctcatgcctatcccagagggattgaccctgacccaggctgcagccatcccagaggcctggctcaccgccttccagctgttacatcttgtgggaaatgttcaggctggagactatgtgctaatccatgcaggactgagtggtgtgggcacagctgctatccaactcacccggatggctggagctattcctctggtcacagctggctcccagaagaagcttcaaatggcagaaaagcttggagcagctgctggattcaattacaaaaaagaggatttctctgaagcaacgctgaaattcaccaaaggtgctggagttaatcttattctagactgcataggcggatcctactgggagaagaacgtcaactgcctggctcttgatggtcgatgggttctctatggtctgatgggaggaggtgacatcaatgggcccctgttttcaaagctactttttaagcgaggaagtctgatcaccagtttgctgaggtctagggacaataagtacaagcaaatgctggtgaatgctttcacggagcaaattctgcctcacttctccacggagggcccccaacgtctgctgccggttctggacagaatctacccagtgaccgaaatccaggaggcccataagtacatggaggccaacaagaacataggcaagatcgtcctggaactgccccagtgaaggaggatggggcaggacaggacgcggccaccccaggcctttccagagcaaacctggagaagattcacaatagacaggccaagaaacccggtgcttcctccagagccgtttaaagctgatatgaggaaataaagagtgaactgg

SEQ ID NO: 681 - DNA, 2169 bp, Homo sapiens
ggcacgagggtcccgttaccgcctcctgctcctgccgcgcgcacccccggggcttcggctccggcacgggtcgcgcccagctttcctgcacctgaggccgccggccagccgccgccatgggtgcctacctctcccagcccaacacggtgaagtgctccggggacggggtcggcgccccgcgcctgccgctgccctacggcttctccgccatgcaaggctggcgcgtctccatggaggatgctcacaactgtattcctgagctggacagtgagacagccatgttttctgtctacgatggacatggaggggaggaagttgccttgtactgtgccaaatatcttcctgatatcatcaaagatcagaaggcctacaaggaaggcaagctacagaaggctttagaagatgccttcttggctattgacgccaaattgaccactgaagaagtcattaaagagctggcacagattgcagggcgacccactgaggatgaagatgaaaaagaaaaagtagctgatgaagatgatgtggacaatgaggaggctgcactgctgcatgaagaggctaccatgactattgaagagctgctgacacgctacgggcagaactgtcacaagggccctccccacagcaaatctggaggtgggacaggcgaggaaccagggtcccagggcctcaatggggaggcaggacctgaggactcaactagggaaactccttcacaagaaaatggccccacagccaaggcctacacaggcttttcctccaactcggaacgtgggactgaggcaggccaagttggtgagcctggcattcccactggtgaggctgggccttcctgctcttcagcctctgacaagctgcctcgagttgctaagtccaagttctttgaggacagtgaggatgagtcagatgaggcggaggaagaagaggaagacagtgaggaatgcagcgaggaagaggatggctacagcagtgaggaggcagagaatgaggaagatgaggatgacaccgaggaggctgaagaggacgatgaagaagaagaagaagagatgatggtgccagggatggaaggcaaagaggagcctggctctgacagtggtacaacagcggtggtggccctgatacgagggaagcagttgattgtagccaacgcaggagactctcgctgtgtggtatctgaggctggcaaagctttagacatgtcctatgatcacaaaccagaggatgaagtagaactagcacgcatcaagaatgctggtggcaaggtcaccatggatgggcgagtcaacgggggcctcaacctctccagagccattggggaccacttctataagagaaacaagaacctgccacctgaggaacagatgatttcagcccttcctgacatcaaggtgctgactctcactgacgaccatgaattcatggtcattgcctgtgatggcatctggaatgtgatgagcagccaggaagttgtagatttcattcaatcaaagatcagccagcgtgatgaaaatggggagcttcggttattgtcatccattgtggaagagctgctggatcagtgcctggcaccagacacttctggggatggtacagggtgtgacaacatgacctgcatcatcatttgcttcaagccccgaaacacagcagagctccagccagagagtggcaagcgaaaactagaggaggtgctctctactgagggggctgaagaaaatggcaacagcgacaagaagaagaaggccaagcgagactagcagtcatccagacccctgcccacctagactgttttctgagccctccggacctgagactgagttttgtctttttcctttagccttagcagtgggtatgaggtgtgcagggggagctgggtggcttcactccgcccattccaaagagggctctccctccacactgcagccgggagcctctgctgtccttcccagccgcctctgctcctcgggctcatcaccggttctgtgcctgtgctctgttgtgttggagggaaggactggcggttctggtttttactctgtgaactttatttaaggacattcttttttattggcggctccatggccctcggccgcttgcacccgctctctgttgtacactttcaatcaacactttttcagactaaaggccaaaacctaaaaaaaaaaaaaa

SEQ ID NO: 682 - protein, 546 aa, Homo sapiens
MGAYLSQPNTVKCSGDGVGAPRLPLPYGFSAMQGWRVSMEDAHNCIPELDSETAMFSVYDGHGGEEVALYCAKYLPDIIKDQKAYKEGKLQKALEDAFLAIDAKLTTEEVIKELAQIAGRPTEDEDEKEKVADEDDVDNEEAALLHEEATMTIEELLTRYGQNCHKGPPHSKSGGGTGEEPGSQGLNGEAGPEDSTRETPSQENGPTAKAYTGFSSNSERGTEAGQVGEPGIPTGEAGPSCSSASDKLPRVAKSKFFEDSEDESDEAEEEEEDSEECSEEEDGYSSEEAENEEDEDDTEEAEEDDEEEEEEMMVPGMEGKEEPGSDSGTTAVVALIRGKQLIVANAGDSRCVVSEAGKALDMSYDHKPEDEVELARIKNAGGKVTMDGRVNGGLNLSRAIGDHFYKRNKNLPPEEQMISALPDIKVLTLTDDHEFMVIACDGIWNVMSSQEVVDFIQSKISQRDENGELRLLSSIVEELLDQCLAPDTSGDGTGCDNMTCIIICFKPRNTAELQPESGKRKLEEVLSTEGAEENGNSDKKKKAKRD

SEQ ID NO: 683 - DNA, 622 bp, Homo sapiens
ccactgccgctgccgccgcctctccttagtcgccggcatgacgaccgcgtctacctcgcaggtgcgccagaacttgctgagaaattgatgaagctgtagaaccaacgaggtggccgaatcttccttcaggatatcaagaaaccagactgtgcggggagaatgcgatgggagagcgggctgaatgcgatggattacatttggaaaaaattgtgcattttgcattacatttggaaaaaaatgtgaatcagtcactactggaactgcacaaactggccactgacaaaaatgacccccatttgtgtgacttcattgagacacattacctgaatgaacaagtgaaggccatcaaagaattgggtgaccacgtgaccaacatgcacgagatgggagcgcccgaatctggcgtggcagaatacctctttgacaagcacaccctgggagacagtgataatgaaagctaagcctcaggctaatttccccatagccatagggtgacttaccttgtcaccaaggcagcgcatgtatgttggggtttcctttaccttttctataagttgttccaagacacccacttaagttctttgatttgtaccattccttcaaataaataaatttggtaccc

SEQ ID NO: 684 - DNA, 2043 bp, Homo sapiens
ccctatccggacaggtggctcttgccctttagactacagttcccagcatgcccaggcgattgcgtcccagaaccgacgtcccaccgccttcccacatcggatcgcagggctcccaaaatggcgagtgaggctgcggggactcgctgagcagcggagggggagcgtgcagagccgctgcggccctcacagtccggagcccggccgtgccgtgccgtagggaacatgcacttttccattcccgaaaccgagtcccgcagcggggacagcggcggctccgcctacgtggcctataacattcacgtgaatggagtcctgcactgtcgggtgcgctacagccagctcctggggctgcacgagcagcttcggaaggagtatggggccaatgtgcttcctgcattccccccaaagaagcttttctctctgactcctgctgaggtagaacagaggagagagcagttagagaagtacatgcaagctgttcggcaagacccattgcttgggagcagcgagactttcaacagtttcctgcgtcgggcacaacaggagacacagcaggtccccacagaggaagtgtccttggaagtgctgctcagcaacgggcagaaagttctggtcaacgtgctaacttcagatcagactgaggatgtcctggaggctgtagctgcaaagctggatcttccagatgacttgattggatactttagtctattcttagttcgagaaaaagaggatggagccttttcttttgtacggaagttgcaagagtttgagctgccttatgtgtctgtcaccagccttcggagtcaagagtataagattgtgctaaggaagagttattgggactctgcctatgatgacgatgtcatggagaaccgggttggcctgaacctgctttatgctcagacggtatcagatattgagcgtgggtggatcttggtcaccaaggaacagcaccggcaactcaaatctctgcaagagaaagtctccaagaaggagttcctgagactggcccagacgctgcggcactatggctacttgcgctttgatgcctgtgtggctgacttcccagaaaaggactgtcctgtggtggtgagcgcgggcaacagtgagctcagcctgcagctccgcctgcctggccagcaactccgagaaggctccttccgggtcacccgcatgcgatgctggcgggtcacctcctctgtaccattgcccagtggaagcacgagcagcccaggccggggccggggtgaggtgcgcctggaactggcttttgaatacctcatgagcaaggaccggctacagtgggtcaccatcactagcccccaggctatcatgatgagcatctgcttgcagtccatggttgatgaactgatggtgaagaaatctggcggcagtatcaggaagatgctgcgccggcgggtggggggtactctgagacgctcagacagccagcaagcagtgaagtccccaccactgcttgagtcacctgatgccacccgggagtctatggtcaaactctcaagtaagctgagtgccgtgagcttgcggggaattggcagtcccagcacagatgccagtgccagtgatgtccacggcaatttcgccttcgagggcattggagatgaggatctgtaatctccactgcttggatgtctgccctctaccccagaggaatttacagaaacttgccctgtgcctgtgtcccccatgctaggggcggaggggtcttttccttcttctttcctacctaccccttttctcttggccaggggcctcgtatcctacctttccttgtcccctgggctggctgcacagaggattgccccttctcttttcagagctggccctcgatgccaaattagcatttagtattttgcacaaagtctaagggaccatggctgcctgccttggggaggaaccatagctccctctgggccgcttctggcctcttggagccatgggccaaaggccaaggggatgggcagaggtctgtgtttggtctggcccagttccccatcattaaactcagcctgactgctgcct

SEQ ID NO: 685 - protein, 470 aa, Homo sapiens
MHFSIPETESRSGDSGGSAYVAYNIHVNGVLHCRVRYSQLLGLHEQLRKEYGANVLPAFPPKKLFSLTPAEVEQRREQLEKYMQAVRQDPLLGSSETFNSFLRRAQQETQQVPTEEVSLEVLLSNGQKVLVNVLTSDQTEDVLEAVAAKLDLPDDLIGYFSLFLVREKEDGAFSFVRKLQEFELPYVSVTSLRSQEYKIVLRKSYWDSAYDDDVMENRVGLNLLYAQTVSDIERGWILVTKEQHRQLKSLQEKVSKKEFLRLAQTLRHYGYLRFDACVADFPEKDCPVVVSAGNSELSLQLRLPGQQLREGSFRVTRMRCWRVTSSVPLPSGSTSSPGRGRGEVRLELAFEYLMSKDRLQWVTITSPQAIMMSICLQSMVDELMVKKSGGSIRKMLRRRVGGTLRRSDSQQAVKSPPLLESPDATRESMVKLSSKLSAVSLRGIGSPSTDASASDVHGNFAFEGIGDEDL

SEQ ID NO: 686 - DNA, 1660 bp, Homo sapiens
gatggctgctgtggccgtggctgttcgcgaggactcgggatccgggatgaaggcggagcttccccctgggcctggggcagtggggagggaaatgaccaaagaagaaaagctgcagcttcggaaggaaaagaaacagcagaagaagaaacggaaggaagaaaagggggcagaaccagagactggctctgctgtatctgcagcccaatgtcaagtaggcccaaccagagaactgccagaatcgggcattcagttgggcactcctcgggagaaagttccagctggtcggagtaaggccgaacttcgggctgagcgtcgagccaagcaggaggccgagcgggccctgaaacaggcaagaaaaggggaacaaggaggaccacctcctaaggccagccccagcacagctggagaaaccccctcaggagtgaagcgtctccctgagtaccctcaggttgatgacctacttctgagaaggcttgttaaaaaaccagagcgtcaacaggttcctacacgaaaggattatggatccaaagtcagtctcttctctcacctaccccagtacagcagacaaaactctctgacccagtttatgagcatcccatcctctgtgatccacccagccatggtgcgactcggcctgcagtactcccagggcctggtcagtggctccaatgcccggtgtattgccctgcttcgtgccttgcagcaggtgattcaggattacacaacaccgcctaatgaagaactctccagggatctagtgaataaactaaaaccctacatgagcttcctgactcagtgccgtcccctgtcagcgagcatgcacaacgccatcaagttccttaacaaggaaatcaccagtgtgggcagttccaagcgggaagaggaggccaagtcagaacttcgagcagccattgatcggtatgtgcaagagaagattgtgctagcagctcaggcaatttcacgctttgcttaccagaagatcagtaatggagatgtgatcctggtatatggatgctcatctctggtatcacgaattcttcaggaggcttggacagagggccggcggtttcgggtggtagtggtggacagccggccatggctggaaggaaggcacacactacgttctctagtccatgctggtgtcccagcctcctacctgctgattcctgcagcctcctatgtgctcccagaggtttccaaggtgctattgggagctcatgcactcttggccaacgggtctgtgatgtcacgggtagggacagcacagttagccctggtggctcgagcccataatgtaccagtgctggtttgctgtgaaacatacaagttctgtgagcgtgtgcagactgatgcctttgtctctaatgagctagatgaccctgatgatctgcaatgtaagcggggagaacatgttgcgctggctaactggcagaaccacgcatccctacggttgttgaatctagtctatgatgtgactcccccagagcttgtggatctggtgatcacggagctggggatgatcccttgcagttctgtacctgttgttctacgagtcaagagcagtgaccagtgacgggggaaacacagggttaataaatgccatactccctaccctcaaaaaaaaaaaaaaaaaaaaaaaaaaaaaaaaaaaaaaaaaaac

SEQ ID NO: 687 - protein, 523 aa, Homo sapiens
MAAVAVAVREDSGSGMKAELPPGPGAVGREMTKEEKLQLRKEKKQQKKKRKEEKGAEPETGSAVSAAQCQVGPTRELPESGIQLGTPREKVPAGRSKAELRAERRAKQEAERALKQARKGEQGGPPPKASPSTAGETPSGVKRLPEYPQVDDLLLRRLVKKPERQQVPTRKDYGSKVSLFSHLPQYSRQNSLTQFMSIPSSVIHPAMVRLGLQYSQGLVSGSNARCIALLRALQQVIQDYTTPPNEELSRDLVNKLKPYMSFLTQCRPLSASMHNAIKFLNKEITSVGSSKREEEAKSELRAAIDRYVQEKIVLAAQAISRFAYQKISNGDVILVYGCSSLVSRILQEAWTEGRRFRVVVVDSRPWLEGRHTLRSLVHAGVPASYLLIPAASYVLPEVSKVLLGAHALLANGSVMSRVGTAQLALVARAHNVPVLVCCETYKFCERVQTDAFVSNELDDPDDLQCKRGEHVALANWQNHASLRLLNLVYDVTPPELVDLVITELGMIPCSSVPVVLRVKSSDQ

SEQ ID NO: 688 - DNA, 3594 bp, Homo sapiens
aggactttggcgagggggcagccattttggggggtgctgatggatacctgcggggtcggctatgttgccctgggggaggccggccccgtggggaacatgactgtggtagactctcctggacaagaggtgctaaatcagcttgatgtcaagacctcttcagaaatgaccagtgcagaggcttccgtagagatgtcattacctacccctttgcctggatttgaggattctcctgatcagaggaggctccctccagagcaggaaagcctctccagactggaacagccagatctttcttcagagatgtcaaaggtctcaaagcctagggcctcaaagcctggccggaagagaggtggtaggacacgaaaaggccccaaaaggccccaacagcctaatcctccatcagccccactggttcctggtctcttagatcaatccaaccctctgtccacccccatgcctaagaaacgaggtcgaaagtccaaggcagagctgctgctgctgaagttgtcaaaagacctagatcggccagaatctcaatctccaaagaggccccctgaggactttgagaccccttctggggaacgaccccgccgaagggctgcccaagtggcacttctgtatcttcaggaactggctgaagagctctcaacagccctgcctgcccctgtgtcctgtcctgagggccccaaggtgagcagccccaccaaaccgaagaagatccggcagccagcagcctgtccaggtggagaagaggtggatggtgctccacgggatgaagacttttttctccaggttgaggctgaagatgtggaagaaagtgagggcccaagtgagagctcatctgaacctgagcctgtagtgccccgaagcaccccacgaggatctacttcagggaaacagaaaccacactgccgaggaatggctcccaatggcttaccaaatcatatcatggctcctgtttggaagtgcctccatctcaccaaggacttccgagagcagaaacattcatactgggagtttgctgagtggattcctttagcctggaagtggcacttgttatctgagcttgaggccgctccctacctgccccaggaggagaagtctccattgttttctgtacaacgtgaagggctacctgaagatggcaccctctaccgaataaacagatttagctcgatcacagcacatccagagcgctgggatgtgtccttcttcacggggggaccgctctgggctctggactggtgcccagtgccagagggggcaggagcctcgcaatatgtggctcttttctccagccctgacatgaatgagacacacccactgagccagcttcattcgggtcctgggctgctccagctctggggccttgggaccttgcagcaagaaagctgtcctggcaacagggcccactttgtctatgggattgcttgtgacaacggctgcatctgggacctcaagttctgccccagtggagcatgggaacttccaggcacccctcggaaggctcctctcctgccccggttgggtctcttggctctggcctgctcagacgggaaagtactgctattcagtctaccccatccggaggccctgctggctcagcaacccccagatgcagtgaagcctgccatatataaggtacaatgtgtggcaactctgcaggtggggtctatgcaagctacagacccctctgagtgtggtcagtgccttagcctggcctggatgcctaccaggccccaccaacacctagctgctggatattataatggcatggtggttttctggaaccttcccactaactcacccctgcagcggatacggctctctgatggctccttaaagctctaccccttccagtgtttcctagcccatgaccaggctgtgcgtacccttcaatggtgcaaagctaacagccatttccttgtctctgcggggagtgaccggaaaatcaaattctgggaccttcgacgtccttacgaacccataaactctatcaagcgcttcttgagtacagaactggcctggctgcttccctacaatggtgtcactgtggctcaggacaactgctatgcctcttatggactctgtgggattcattatattgacgctggttaccttggtttcaaggcctacttcactgctcctcgaaaaggcaccgtttggagtctttcaggatccgactggcttgggacaatagctgcaggagatatatccggggagctcattgctgctatattaccagatatggcactgaatccaataaatgtcaagcgacctgtagagcgaagatttcctatatataaagcagatctgataccgtatcaggacagtcctgaaggtccagaccattcttctgcttcatctggggtccccaaccctcccaaggctcgaacttacactgaaactgtcaaccatcactacttgctctttcaagacacagatttgggttcattccatgatctgctccgtagagaaccaatgctgcgcatgcaggagggagaggggcattctcaactctgcctggacaggctgcagctggaggctattcataaggtacgtttcagcccaaacctggactcctatggatggctggtatctggggggcagtcagggctggttcgaatccattttgtccgtggactcgcctccccactgggccaccgtatgcagcttgaaagccgagcccacttcaatgctatgttccaaccatcctcccccactagacggcctggcttctctccaaccagccatcgccttctgcccactccctagccttggcccacaccagatccttggagtgaagtcggtcaagaacaaatggcccctatgcacagagccataggaactgggggccttccctggacagtgatcatgccaggcctggacctttaggcctgcctccccaggactccttagatcccactctttctacagacttctgtgatcacagccccctgcgggcaggggggctctccctccaccaactctcaaggctcctcagcctaagactatggctcatgagaaacactcaggcctgacctaggcttgggagtcaaactgctcatattgagcatattgttaagtgggtaaagccaagtaaaggtactgggtgtttttgtgaccacttgtgaatgggtgtatggagaactgaaaagggtatctgcatgaaggctcctgtctgactattccaggatccaatattactgccttctgaaacttcctctttagggtaaccatcatgtatgcccacgagggtgatagtaattcgtgagactgaagttgcttagagtacttctttgaccaaggaataccacagacaccctaccgatagaacagtggctcagatcttacttgctcctgcttacgaagtattcccaatcactggtcatctgaccctacttgaacactcctgaacagtcatgttttttaaaatcttcctttatatcaagtcagagagtatacttctataaatttcactcatggatgttaggaaatctagtcatcttccctgtgattgccctgttaagtatttaaccatagctatcatgtgtttcccaaatcttctctagattaaatatcttcagttacttc

SEQ ID NO: 689 - protein, 911 aa, Homo sapiens
MDTCGVGYVALGEAGPVGNMTVVDSPGQEVLNQLDVKTSSEMTSAEASVEMSLPTPLPGFEDSPDQRRLPPEQESLSRLEQPDLSSEMSKVSKPRASKPGRKRGGRTRKGPKRPQQPNPPSAPLVPGLLDQSNPLSTPMPKKRGRKSKAELLLLKLSKDLDRPESQSPKRPPEDFETPSGERPRRRAAQVALLYLQELAEELSTALPAPVSCPEGPKVSSPTKPKKIRQPAACPGGEEVDGAPRDEDFFLQVEAEDVEESEGPSESSSEPEPVVPRSTPRGSTSGKQKPHCRGMAPNGLPNHIMAPVWKCLHLTKDFREQKHSYWEFAEWIPLAWKWHLLSELEAAPYLPQEEKSPLFSVQREGLPEDGTLYRINRFSSITAHPERWDVSFFTGGPLWALDWCPVPEGAGASQYVALFSSPDMNETHPLSQLHSGPGLLQLWGLGTLQQESCPGNRAHFVYGIACDNGCIWDLKFCPSGAWELPGTPRKAPLLPRLGLLALACSDGKVLLFSLPHPEALLAQQPPDAVKPAIYKVQCVATLQVGSMQATDPSECGQCLSLAWMPTRPHQHLAAGYYNGMVVFWNLPTNSPLQRIRLSDGSLKLYPFQCFLAHDQAVRTLQWCKANSHFLVSAGSDRKIKFWDLRRPYEPINSIKRFLSTELAWLLPYNGVTVAQDNCYASYGLCGIHYIDAGYLGFKAYFTAPRKGTVWSLSGSDWLGTIAAGDISGELIAAILPDMALNPINVKRPVERRFPIYKADLIPYQDSPEGPDHSSASSGVPNPPKARTYTETVNHHYLLFQDTDLGSFHDLLRREPMLRMQEGEGHSQLCLDRLQLEAIHKVRFSPNLDSYGWLVSGGQSGLVRIHFVRGLASPLGHRMQLESRAHFNAMFQPSSPTRRPGFSPTSHRLLPTP

SEQ ID NO: 690 - DNA, 996 bp, Homo sapiens
gagggacggtgggggtgaccccctctcctcttggcttgacaggaagcatggcactctggcgggcataccagcgggccctggccgctcacccgtggaaagtacaggtcctgacagctgggtccctgatgggcctgggtgacattatctcacagcagctggtggagaggcggggtctgcaggaacaccagagaggccggactctgaccatggtgtccctgggctgtggctttgtgggccctgtggtaggaggctggtacaaggttttggatcggttcatccctggcaccaccaaagtggatgcactgaagaagatgttgttggatcaggggggctttgccccgtgttttctaggctgctttctcccactggtaggggcacttaatggactgtcagcccaggacaactgggccaaactacagcgggattatcctgatgcccttatcaccaactactatctatggcctgctgtgcagttagccaacttctacctggtcccccttcattacaggttggccgttgtccaatgtgttgctgttatctggaactcctacctgtcctggaaggcacatcggctctaagcctgcctcactccatcgtttccaccttgcagtgatgcagcttgaccctggaacggtcagacaacctcctcaaagtgggcataccagtttccacggggttgggttgccggtcagagcttaagaggactagcaccctgcaatgcccctcttcactctaaaatgtacactgactgctttagagcccttgataatagtcttattcccaccacatactaggcactccataaatatctgttgaaccttcatgaccttatcaactttacacccatatcccagcaaatgccactcatccccactcttcatagacacatttgttactctaaccctgcctaggcttcttgtagctccagctctttagagactcccggaaccctttatatggtgcctcagtaaatatgttattaaatatgtaatccgg

SEQ ID NO: 691 - protein, 176 aa, Homo sapiens
MALWRAYQRALAAHPWKVQVLTAGSLMGLGDIISQQLVERRGLQEHQRGRTLTMVSLGCGFVGPVVGGWYKVLDRFIPGTTKVDALKKMLLDQGGFAPCFLGCFLPLVGALNGLSAQDNWAKLQRDYPDALITNYYLWPAVQLANFYLVPLHYRLAVVQCVAVIWNSYLSWKAHRL

SEQ ID NO: 692 - DNA, 6972 bp, Homo sapiens
cgcccccgcctctgagctcccttcccatggcggccctagtgttggaggacgggtcggtcctgcggggccagccctttggggccgccgtgtcgactgccggggaagtggtgtttcaaaccggcatggtcggctaccccgaggccctcactgatccctcctacaaggcacagatcttagtgctcacctatcctctgatcggcaactatggcatccccccagatgaaatggatgagttcggtctctgcaagtggtttgaatcctcgggcatccacgtagcagcactggtagtgggagagtgctgtcctactcccagccactggagtgccacccgcaccctgcatgagtggctgcagcagcatggcatccctggcttgcaaggagtagacactcgggagctgaccaagaagttgcgggaacaggggtctctgctggggaagctggtccagaatggaacagaaccttcatccctgccattcttggaccccaatgcccgccccctggtaccagaggtctccattaagactccacgggtattcaatacagggggtgcccctcggatccttgctttggactgtggcctcaagtataatcagatccgatgcctctgccagcgtggggctgaggtcactgtggtaccctgggaccatgcactagacagccaagagtatgagggtctcttcttaagtaatgggcctggtgaccctgcctcctatcccagtgtcgtatccacactgagccgtgttttatctgagcctaatccccgacctgtctttgggatctgcctgggacaccagctattggccttagccattggggccaagacttacaagatgagatatgggaaccgaggccataaccagccctgcttgttggtgggctctgggcgctgctttctgacatcccagaaccatgggtttgctgtggagacagactcactgccagcagactgggctcctctcttcaccaacgccaatgatggttccaatgaaggcattgtgcacaacagcttgcctttcttcagtgtccagtttcacccagagcaccaagctggcccttcagatatggaactgcttttcgatatctttctggaaactgtgaaagaggccacagctgggaaccctgggggccagacagttagagagcggctgactgagcgcctctgtccccctgggattcccactcccggctctggacttccaccaccacgaaaggttctgatcctgggctcagggggcctctccattggccaagctggagaatttgactactcgggctctcaggcaattaaggccctgaaggaggaaaacatccagacgttgctgatcaaccccaatattgccacagtgcagacctcccaggggctggccgacaaggtctattttcttcccataacacctcattatgtaacccaggtgatacgtaatgaacgccccgatggtgtgttactgacttttgggggccagactgctctgaactgtggtgtggagctgaccaaggccggggtgctggctcggtatggggtccgggtcctgggcacaccagtggagaccattgagctgaccgaggatcgacgggcctttgctgccagaatggcagagatcggagagcatgtggccccgagcgaggcagcaaattctcttgaacaggcccaggcagccgctgaacggctggggtaccctgtgctagtgcgtgcagcctttgccctgggtggcctgggctctggctttgcctctaacagggaggagctctctgctctcgtggccccagcttttgcccataccagccaagtgctagtagacaagtctctgaagggatggaaggagattgagtacgaggtggtgagagacgcctatggcaactgtgtcacggtgtgtaacatggagaacttggacccactgggcatccacactggtgagtccatagtggtggcccctagccagacactgaatgacagggagtatcagctcctgaggcagacagctatcaaggtgacccagcacctgggaattgttggggagtgcaatgtgcagtatgccttgaaccctgagtctgagcagtattacatcattgaagtgaatgccaggctctctcgcagctctgccctggccagtaaggccacaggttatccactggcttatgtggcagccaagctagcattgggcatccctttgcctgagctcaggaactctgtgacagggggtacagcagcctttgaacccagcgtggattattgtgtggtgaagattcctcgatgggaccttagcaagttcctgcgagtcagcacaaagattgggagctgcatgaagagcgttggtgaagtcatgggcattgggcgttcatttgaggaggccttccagaaggccctgcgcatggtggatgagaactgtgtgggctttgatcacacagtgaaaccagtcagcgatatggagttggagactccaacagataagcggatttttgtggtggcagctgctttgtgggctggttattcagtggaccgcctgtatgagctcacacgcatcgaccgctggttcctgcaccgaatgaagcgtatcatcgcacatgcccagctgctagaacaacaccgtggacagcctttgccgccagacctgctgcaacaggccaagtgtcttggcttctcagacaaacagattgcccttgcagttctgagcacagagctggctgttcgcaagctgcgtcaggaactggggatctgtccagcagtgaaacagattgacacagttgcagctgagtggccagcccagacaaattacctatacctaacgtattggggcaccacccatgacctcacctttcgaacacctcatgtcctagtccttggctctggcgtctaccgtattggctctagcgttgaatttgactggtgtgctgtaggctgcatccagcagctccgaaagatgggatataagaccatcatggtgaactataacccagagacagtcagcaccgactatgacatgtgtgatcgactctactttgatgagatctcttttgaggtggtgatggacatctatgagctcgagaaccctgaaggtgtgatcctatccatgggtggacagctgcccaacaacatggccatggcgttgcatcggcagcagtgccgggtgctgggcacctcccctgaagccattgactcggctgagaaccgtttcaagttttcccggctccttgacaccattggtatcagccagcctcagtggagggagctcagtgacctcgagtctgctcgccaattctgccagaccgtggggtacccctgtgtggtgcgcccctcctatgtgctgagcggtgctgctatgaatgtggcctacacggatggagacctggagcgcttcctgagcagcgcagcagccgtctccaaagagcatcccgtggtcatctccaagttcatccaggaggctaaggagattgacgtggatgccgtggcctctgatggtgtggtggcagccatcgccatctctgagcatgtggagaatgcaggtgtgcattcaggtgatgcgacgctggtgacccccccacaagatatcactgccaaaaccctggagcggatcaaagccattgtgcatgctgtgggccaggagctacaggtcacaggacccttcaatctgcagctcattgccaaggatgaccagctgaaagttattgaatgcaacgtacgtgtctctcgctccttccccttcgtttccaagacactgggtgtggacctagtagccttggccacgcgggtcatcatgggggaagaagtggaacctgtggggctaatgactggttctggagtcgtgggagtaaaggtgcctcagttctccttctcccgcttggcgggtgctgacgtggtgttgggtgtggaaatgaccagtactggggaggtggccggctttggggagagccgctgtgaggcatacctcaaggccatgctaagcactggctttaagatccccaagaagaatatcctgctgaccattggcagctataagaacaaaagcgagctgctcccaactgtgcggctactggagagcctgggctacagcctctatgccagtctcggcacagctgacttctacactgagcatggcgtcaaggtaacagctgtggactggcactttgaggaggctgtggatggtgagtgcccaccacagcggagcatcctggagcagctagctgagaaaaactttgagctggtgattaacctgtcaatgcgtggagctgggggccggcgtctctcttcctttgtcaccaagggctaccgcacccgacgcttggccgctgacttctccgtgcccctaatcatcgatatcaagtgcaccaaactctttgtggaggccctaggccagatcgggccagcccctcctttgaaggtgcatgttgactgtatgacctcccaaaagcttgtgcgactgccgggattgattgatgtccatgtgcacctgcgggaaccaggtgggacacataaggaggactttgcttcaggcacagccgctgccctggctgggggtatcaccatggtgtgtgccatgcctaatacccggccccccatcattgacgcccctgctctggccctggcccagaagctggcagaggctggcgcccggtgcgactttgcgctattccttggggcctcgtctgaaaatgcaggaaccttgggcaccgtggccgggtctgcagccgggctgaagctttacctcaatgagaccttctctgagctgcggctggacagcgtggtccagtggatggagcatttcgagacatggccctcccacctccccattgtggctcacgcagagcagcaaaccgtggctgctgtcctcatggtggctcagctcactcagcgctcagtgcacatatgtcacgtggcacggaaggaggagatcctgctaattaaagctgcaaaggcacggggcttgccagtgacctgcgaggtggctccccaccacctgttcctaagccatgatgacctggagcgcctggggcctgggaagggggaggtccggcctgagcttggctcccgccaggatgtggaagccctgtgggagaacatggctgtcatcgactgctttgcctcagaccatgctccccataccttggaggagaagtgtgggtccaggcccccacctgggttcccagggttagagaccatgctgccactactcctgacggctgtaagcgagggccggctcagcctggacgacctgctgcagcgattgcaccacaatcctcggcgcatctttcacctgcccccgcaggaggacacctatgtggaggtggatctggagcatgagtggacaattcccagccacatgcccttctccaaggcccactggacaccttttgaagggcagaaagtgaagggcaccgtccgccgtgtggtcctgcgaggggaggttgcctatatcgatgggcaggttctggtacccccgggctatggacaggatgtacggaagtggccacagggggctgttcctcagctcccaccctcagcccctgccactagtgagatgaccacgacacctgaaagaccccgccgtggcatcccagggcttcctgatggccgcttccatctgccgccccgaatccatcgagcctccgacccaggtttgccagctgaggagccaaaggagaagtcctctcggaaggtagccgagccagagctgatgggaacccctgatggcacctgctaccctccaccaccagtaccgagacaggcatctccccagaacctggggacccctggcttgctgcacccccagacctcacccctgctgcactcattagtgggccaacatatcctgtccgtccagcagttcaccaaggatcagatgtctcacctgttcaatgtggcacacacactgcgtatgatggtgcagaaggagcggagcctcgacatcctgaaggggaaggtcatggcctccatgttctatgaagtgagcacacggaccagcagctcctttgcagcagccatggcccggctgggaggtgctgtgctcagcttctcggaagccacatcgtccgtccagaagggcgaatccctggctgactccgtgcagaccatgagctgctatgccgacgtcgtcgtgctccggcacccccagcctggagcagtggagctggccgccaagcactgccggaggccagtgatcaatgctggggatggggtcggagagcaccccacccaggccctgctggacatcttcaccatccgtgaggagctgggaactgtcaatggcatgacgatcacgatggtgggtgacctgaagcacggacgcacagtacattccctggcctgcctgctcacccagtatcgtgtcagcctgcgctacgtggcacctcccagcctgcgcatgccacccactgtgcgggccttcgtggcctcccgcggcaccaagcaggaggaattcgagagcattgaggaggcgctgcctgacactgatgtgctctacatgactcgaatccagaaggaacgatttggctctacccaggagtacgaagcttgctttggtcagttcatcctcactccccacatcatgacccgggccaagaagaagatggtggtgatgcacccgatgccccgtgtcaacgagataagcgtggaagtggactcggatccccgcgcagcctacttccgccaggctgagaacggcatgtacatccgcatggctctgttagccaccgtgctgggccgtttctaggggcctggcttcctcagcctcttctctttaggcccagctgctgggcaaggaattccagtgcctcctacgggggcagcacacttagatattcctggacatccagattgctcacatgtgctgaccacacttcaggctctggactggagctctctggcatgggggtggggcctcagatgctggggcccagtctgccccatcttcattcctgcaccttaaacctgtacagtcatttttctactgacttaataaacagccgagctgtcccttg

SEQ ID NO: 693 - protein, 2225 aa, Homo sapiens
MAALVLEDGSVLRGQPFGAAVSTAGEVVFQTGMVGYPEALTDPSYKAQILVLTYPLIGNYGIPPDEMDEFGLCKWFESSGIHVAALVVGECCPTPSHWSATRTLHEWLQQHGIPGLQGVDTRELTKKLREQGSLLGKLVQNGTEPSSLPFLDPNARPLVPEVSIKTPRVFNTGGAPRILALDCGLKYNQIRCLCQRGAEVTVVPWDHALDSQEYEGLFLSNGPGDPASYPSVVSTLSRVLSEPNPRPVFGICLGHQLLALAIGAKTYKMRYGNRGHNQPCLLVGSGRCFLTSQNHGFAVETDSLPADWAPLFTNANDGSNEGIVHNSLPFFSVQFHPEHQAGPSDMELLFDIFLETVKEATAGNPGGQTVRERLTERLCPPGIPTPGSGLPPPRKVLILGSGGLSIGQAGEFDYSGSQAIKALKEENIQTLLINPNIATVQTSQGLADKVYFLPITPHYVTQVIRNERPDGVLLTFGGQTALNCGVELTKAGVLARYGVRVLGTPVETIELTEDRRAFAARMAEIGEHVAPSEAANSLEQAQAAAERLGYPVLVRAAFALGGLGSGFASNREELSALVAPAFAHTSQVLVDKSLKGWKEIEYEVVRDAYGNCVTVCNMENLDPLGIHTGESIVVAPSQTLNDREYQLLRQTAIKVTQHLGIVGECNVQYALNPESEQYYIIEVNARLSRSSALASKATGYPLAYVAAKLALGIPLPELRNSVTGGTAAFEPSVDYCVVKIPRWDLSKFLRVSTKIGSCMKSVGEVMGIGRSFEEAFQKALRMVDENCVGFDHTVKPVSDMELETPTDKRIFVVAAALWAGYSVDRLYELTRIDRWFLHRMKRIIAHAQLLEQHRGQPLPPDLLQQAKCLGFSDKQIALAVLSTELAVRKLRQELGICPAVKQIDTVAAEWPAQTNYLYLTYWGTTHDLTFRTPHVLVLGSGVYRIGSSVEFDWCAVGCIQQLRKMGYKTIMVNYNPETVSTDYDMCDRLYFDEISFEVVMDIYELENPEGVILSMGGQLPNNMAMALHRQQCRVLGTSPEAIDSAENRFKFSRLLDTIGISQPQWRELSDLESARQFCQTVGYPCVVRPSYVLSGAAMNVAYTDGDLERFLSSAAAVSKEHPVVISKFIQEAKEIDVDAVASDGVVAAIAISEHVENAGVHSGDATLVTPPQDITAKTLERIKAIVHAVGQELQVTGPFNLQLIAKDDQLKVIECNVRVSRSFPFVSKTLGVDLVALATRVIMGEEVEPVGLMTGSGVVGVKVPQFSFSRLAGADVVLGVEMTSTGEVAGFGESRCEAYLKAMLSTGFKIPKKNILLTIGSYKNKSELLPTVRLLESLGYSLYASLGTADFYTEHGVKVTAVDWHFEEAVDGECPPQRSILEQLAEKNFELVINLSMRGAGGRRLSSFVTKGYRTRRLAADFSVPLIIDIKCTKLFVEALGQIGPAPPLKVHVDCMTSQKLVRLPGLIDVHVHLREPGGTHKEDFASGTAAALAGGITMVCAMPNTRPPIIDAPALALAQKLAEAGARCDFALFLGASSENAGTLGTVAGSAAGLKLYLNETFSELRLDSVVQWMEHFETWPSHLPIVAHAEQQTVAAVLMVAQLTQRSVHICHVARKEEILLIKAAKARGLPVTCEVAPHHLFLSHDDLERLGPGKGEVRPELGSRQDVEALWENMAVIDCFASDHAPHTLEEKCGSRPPPGFPGLETMLPLLLTAVSEGRLSLDDLLQRLHHNPRRIFHLPPQEDTYVEVDLEHEWTIPSHMPFSKAHWTPFEGQKVKGTVRRVVLRGEVAYIDGQVLVPPGYGQDVRKWPQGAVPQLPPSAPATSEMTTTPERPRRGIPGLPDGRFHLPPRIHRASDPGLPAEEPKEKSSRKVAEPELMGTPDGTCYPPPPVPRQASPQNLGTPGLLHPQTSPLLHSLVGQHILSVQQFTKDQMSHLFNVAHTLRMMVQKERSLDILKGKVMASMFYEVSTRTSSSFAAAMARLGGAVLSFSEATSSVQKGESLADSVQTMSCYADVVVLRHPQPGAVELAAKHCRRPVINAGDGVGEHPTQALLDIFTIREELGTVNGMTITMVGDLKHGRTVHSLACLLTQYRVSLRYVAPPSLRMPPTVRAFVASRGTKQEEFESIEEALPDTDVLYMTRIQKERFGSTQEYEACFGQFILTPHIMTRAKKKMVVMHPMPRVNEISVEVDSDPRAAYFRQAENGMYIRMALLATVLGRF

SEQ ID NO: 694 - DNA, 1086 bp, Homo sapiens
ggagcaccaagggaacggaaaatggcgcctcacggcccgggtagtcttacgaccctggtgccctgggctgccgccctgctcctcgctctgggcgtggaaagggctctggcgctacccgaggtacagaagcaagtttgaggtcgggctgaagcagggtcactggccagccgtgcgtcgcgctcgccagcggctcccccttctcctcggcgggcctgcggttctgatttcgtccctgacgcttcccgaccctgcccagccagatatgcacccaatgtccagggagcgtgcaaaatttgtcaaaagtggccttttattgtaaaacgacacgagagctaatgctgcatgcccgttgctgcctgaatcagaagggcaccatcttggggctggatctccagaactgttctctggaggaccctggtccaaactttcatcaggcacataccactgtcatcatagacctgcaagcaaaccccctcaaaggtgacttggccaacaccttccgtggctttactcagctccagactctgatactgccacaacatgtcaactgtcctggaggaattaatgcctggaatactatcacctcttatatagacaaccaaatctgtcaagggcaaaagaacctttgcaataacactggggacccagaaatgtgtcctgagaatggatcttgtgtacctgatggtccaggtcttttgcagtgtgtttgtgctgatggtttccatggatacaagtgtatgcgccagggctcgttctcactgcttatgttcttcgggattctgggagccaccactctatccgtctccattctgctttgggcgacccagcgccgaaaagccaagacttcatgaactacataggtcttaccattgacctaagatcaatctgaactatcttagcccagtcagggagctctgcttcctagaaaggcatctttcgccagtggattcgcctcaaggttgaggccgccattggaagatgaaaaattgcactcccttggtgtagacaaataccagttcccattggtgttgttgcctataataaacactttttctttttaaaaaaaaaaaaaaaaaaaaaaaaaaa

SEQ ID NO: 695 - protein, 171 aa, Homo sapiens
MLHARCCLNQKGTILGLDLQNCSLEDPGPNFHQAHTTVIIDLQANPLKGDLANTFRGFTQLQTLILPQHVNCPGGINAWNTITSYIDNQICQGQKNLCNNTGDPEMCPENGSCVPDGPGLLQCVCADGFHGYKCMRQGSFSLLMFFGILGATTLSVSILLWATQRRKAKTS

SEQ ID NO: 696 - DNA, 924 bp, Homo sapiens
ggagcaccaagggaacggaaaatggcgcctcacggcccgggtagtcttacgaccctggtgccctgggctgccgccctgctcctcgctctgggcgtggaaagggctctggcgctacccgagatatgcacccaatgtccagggagcgtgcaaaatttgtcaaaagtggccttttattgtaaaacgacacgagagctaatgctgcatgcccgttgctgcctgaatcagaagggcaccatcttggggctggatctccagaactgttctctggaggaccctggtccaaactttcatcaggcacataccactgtcatcatagacctgcaagcaaaccccctcaaaggtgacttggccaacaccttccgtggctttactcagctccagactctgatactgccacaacatgtcaactgtcctggaggaattaatgcctggaatactatcacctcttatatagacaaccaaatctgtcaagggcaaaagaacctttgcaataacactggggacccagaaatgtgtcctgagaatggatcttgtgtacctgatggtccaggtcttttgcagtgtgtttgtgctgatggtttccatggatacaagtgtatgcgccagggctcgttctcactgcttatgttcttcgggattctgggagccaccactctatccgtctccattctgctttgggcgacccagcgccgaaaagccaagacttcatgaactacataggtcttaccattgacctaagatcaatctgaactatcttagcccagtcagggagctctgcttcctagaaaggcatctttcgccagtggattcgcctcaaggttgaggccgccattggaagatgaaaaattgcactcccttggtgtagacaaataccagttcccattggtgttgttgcctataataaacactttttctttttaaaaa

SEQ ID NO: 697 - protein, 171 aa, Homo sapiens; identical to SEQ ID NO: 695

SEQ ID NO: 698 - DNA, 3162 bp, Homo sapiens
gcgccctagccctctttcggggatactggccgaccccctcttccttttcccctttagtgaaggcctcccccgtcgccgcgcggcttcccggagccgactgcagactccctcagcccggtgttccccgcgtccggacgccgaggtcgcggcttcgcagaaactcgggcccctccatccgccctcagaaaagggagcgatgttgatctcaggaagcacaaagggaccttcctagctctgactgaaccacggagctcaccctggacagtatcactccgtggaggaagactgtgagactgtggctggaagccagattgtagccacacatccgcccctgccctaccccagagccctggagcagcaactggctgcagatcacagacacagtgaggatatgagtgtaggggtgagcacctcagcccctctttccccaacctcgggcacaagcgtgggcatgtctaccttctccatcatggactatgtggtgttcgtcctgctgctggttctctctcttgccattgggctctaccatgcttgtcgtggctggggccggcatactgttggtgagctgctgatggcggaccgcaaaatgggctgccttccggtggcactgtccctgctggccaccttccagtcagccgtggccatcctgggtgtgccgtcagagatctaccgatttgggacccaatattggttcctgggctgctgctactttctggggctgctgatacctgcacacatcttcatccccgttttctaccgcctgcatctcaccagtgcctatgagtacctggagcttcgattcaataaaactgtgcgagtgtgtggaactgtgaccttcatctttcagatggtgatctacatgggagttgtgctctatgctccgtcattggctctcaatgcagtgactggctttgatctgtggctgtccgtgctggccctgggcattgtctgtaccgtctatacagctctgggtgggctgaaggccgtcatctggacagatgtgttccagacactggtcatgttcctcgggcagctggcagttatcatcgtggggtcagccaaggtgggcggcttggggcgtgtgtgggccgtggcttcccagcacggccgcatctctgggtttgagctggatccagacccctttgtgcggcacaccttctggaccttggccttcgggggtgtcttcatgatgctctccttatacggggtgaaccaggctcaggtgcagcggtacctcagttcccgcacggagaaggctgctgtgctctcctgttatgcagtgttccccttccagcaggtgtccctctgcgtgggctgcctcattggcctggtcatgttcgcgtattaccaggagtatcccatgagcattcagcaggctcaggcagccccagaccagttcgtcctgtactttgtgatggatctcctgaagggcctgccaggcctgccagggctcttcattgcctgcctcttcagcggctctctcagcactatatcctctgcttttaattcattggcaactgttacgatggaagacctgattcgaccttggttccctgagttctctgaagcccgggccatcatgctttccagaggccttgcctttggctatgggctgctttgtctaggaatggcctatatttcctcccagatgggacctgtgctgcaggcagcaatcagcatctttggcatggttgggggaccgctgctgggactcttctgccttggaatgttctttccatgtgctaaccctcctggtgctgttgtgggcctgttggctgggctcgtcatggccttctggattggcatcgggagcatcgtgaccagcatgggcttcagcatgccaccctctccctctaatgggtccagcttctccctgcccaccaatctaaccgttgccactgtgaccacactgatgcccttgactaccttctccaagcccacagggctgcagcggttctattccttgtcttacttatggtacagtgctcacaactccaccacagtgattgtggtgggcctgattgtcagtctactcactgggagaatgcgaggccggtccctgaaccctgcaaccatttacccagtgttgccaaagctcctgtccctccttccgttgtcctgtcagaagcggctccactgcaggagctacggccaggaccacctcgacactggcctgtttcctgagaagccgaggaatggtgtgctgggggacagcagagacaaggaggccatggccctggatggcacagcctatcaggggagcagctccacctgcatcctccaggagacctccctgtgatgttgactcaggaccccgcctctgtcctcactgtgccaggccatagccagaggccaccctgtagtacagggatgagtcttggtgtgttctgcagggacaggcctggatgatctagctcataccaaaggaccttgttctgagaggttcttgcctgcaggagaagctgtcacatctcaagcatgtgaggcaccgtttttctcgtcgcttgccaatctgttttttaaaggatcaggctcgtagggagcaggatcatgccagaaatagggatggaagtgcatcctctgggaaaaagataatggcttctgattcaacatagccatagtcctttgaagtaagtggctagaaacagcactctggttataattgccccagggcctgattcaggactgactctccaccataaaactggaagctgcttcccctgtagtccccatttcagtaccagttctgccagccacagtgagcccctattattactttcagattgtctgtgacactcaagcccctctcatttttatctgtctacctccattctgaagagggaggttttggtgtccctggtcctctgggaatagaagatccatttgtctttgtgtagagcaagcacgttttccacctcactgtctccatcctccacctctgagatggacacttaagagacggggcaaatgtggatccaagaaaccagggccatgaccaggtccactgtggagcagccatctatctacctgactcctgagccaggctgccgtggtgtcatttctgtcatccgtgctctgtttccttttggagtttcttctccacattatctttgttcctggggaataaaaactaccattggacctaaaaaaaaaaaaaaaaaa

SEQ ID NO: 699 - protein, 635 aa, Homo sapiens
MSVGVSTSAPLSPTSGTSVGMSTFSIMDYVVFVLLLVLSLAIGLYHACRGWGRHTVGELLMADRKMGCLPVALSLLATFQSAVAILGVPSEIYRFGTQYWFLGCCYFLGLLIPAHIFIPVFYRLHLTSAYEYLELRFNKTVRVCGTVTFIFQMVIYMGVVLYAPSLALNAVTGFDLWLSVLALGIVCTVYTALGGLKAVIWTDVFQTLVMFLGQLAVIIVGSAKVGGLGRVWAVASQHGRISGFELDPDPFVRHTFWTLAFGGVFMMLSLYGVNQAQVQRYLSSRTEKAAVLSCYAVFPFQQVSLCVGCLIGLVMFAYYQEYPMSIQQAQAAPDQFVLYFVMDLLKGLPGLPGLFIACLFSGSLSTISSAFNSLATVTMEDLIRPWFPEFSEARAIMLSRGLAFGYGLLCLGMAYISSQMGPVLQAAISIFGMVGGPLLGLFCLGMFFPCANPPGAVVGLLAGLVMAFWIGIGSIVTSMGFSMPPSPSNGSSFSLPTNLTVATVTTLMPLTTFSKPTGLQRFYSLSYLWYSAHNSTTVIVVGLIVSLLTGRMRGRSLNPATIYPVLPKLLSLLPLSCQKRLHCRSYGQDHLDTGLFPEKPRNGVLGDSRDKEAMALDGTAYQGSSSTCILQETSL

SEQ ID NO: 700 - DNA, 2163 bp, Homo sapiens
gcctgcgcggagggagccgcgagacaggtgcgcatgcgcagtgcgcgtctgcgagaccgacttggacggagccgagctgaggctcggcttcctgctgatggtcagggttttggcaactccccggtgtgagaggggtagggagtgctcccggcggcgacggggccgagttcaccagccgccggggcagtagtcgaaggcccggcgcggcatgtcctgggtgccgcggtgcgggcagtgaacgcgcgccgggcgggatgggccggcgccgggcgccagagctgtaccgggctccgttcccgttgtacgcgcttcaggtcgaccccagcactgggctgctcatcgctgcgggcggaggaggcgccgccaagacaggcataaagaatggcgtgcactttctgcagctagagctgattaatgggcgcttgagtgcctccttgctgcactcccatgacacagagacacgggccaccatgaacttggcactggctggtgacatccttgctgcagggcaggatgcccactgtcagctcctgcgcttccaggcacatcaacagcagggcaacaaggcagagaaggccggttccaaggagcaggggcctcgacaaaggaagggagcagccccagcagagaagaaatgtggagcggaaacccagcacgaggggctagaactcagggtagagaatttgcaggcggtgcagacagactttagctccgatccactgcagaaagttgtgtgcttcaaccacgataataccctgcttgccactggaggaacagatggctacgtccgtgtctggaaggtgcccagcctggagaaggttctggagttcaaagcccacgaaggggagattgaagacctggctttagggcctgatggcaagttggtaaccgtgggccgggaccttaaggcctctgtgtggcagaaggatcagctggtgacacagctgcactggcaagaaaatggacccaccttttccagcacaccttaccgctaccaggcctgcaggtttgggcaggttccagaccagcctgctggcctgcgactcttcacagtgcaaattccccacaagcgcctgcgccagccccctccctgctacctcacagcctgggatggctccaacttcttgccccttcggaccaagtcctgtggccatgaagtcgtctcctgcctcgatgtcagtgaatccggcaccttcctaggcctgggcacagtcactggctctgttgccatctacatagctttctctctccagtgcctctactacgtgagggaggcccatggcattgtggtgacggatgtggcctttctacctgagaagggtcgtggtccagagctccttgggtcccatgaaactgccctgttctctgtggctgtggacagtcgttgccagctgcatctgttgccctcacggcggagtgttcctgtgtggctcctgctcctgctgtgtgtcgggcttattattgtgaccatcctgctgctccagagtgcctttccaggtttcctttagcttccctgcttcctgggaatcaggagcctggacactgccatctctagagcagagtggaggcctggactccctttgctcactccattcgggtccacagctgaggttgccgctgacaagatgaatgggcactgcctgcccttctagtgaaaaggcttggctatggccctgtgtgactccaggtcccaggaaccttgccttcgtcatctgtggatccatccagaacagcggtatctgaagcccaggccatactccctgcctcctttcttctgcctaccagaggctccagagttgagcttgtccttatctagaaacatgtgaagatgcccaagagcctggaggcactgctgtccttcctgcagaaacagtttctcctcctcccctcagccttgtggccagttcctcttcacatgaagcccctggcatttgctggggaagggactggcctggtacttgctgttagggcaggaaggggcaaaaggaagacttgggtagtaatctgggggttcagatgggtagcactaagccagctggcctaaagatgcaataagttcctaggtagtctacccttaccttgaggaatgggaaaatgaacctcagcccattaggcaggaaaagttgatatttaataaacaaggaaagagtgaactgagacccc

SEQ ID NO: 701 - DNA, 1899 bp, Homo sapiens
gtagcctcatggaagagaagcagatcctgtgcgtggggctagtggtgctggacgtcatcagcctggtggacaagtaccctaaggaggactcggagataaggtgtttgtcccagagatggcagcgcggaggcaacgcgtccaactcctgcaccgttctctccctgctcggagccccctgtgccttcatgggctcaatggctcctggccatgttgctgattttgtcctggatgacctccgccgctattctgtggacctacgctacacagtctttcagaccacaggctccgtccccatcgccacggtcatcatcaacgaggccagtggtagccgcaccatcctatactatgacaggagcctgccagatgtgtctgctacagactttgagaaggttgatctgacccagttcaagtggatccacattgagggccggaacgcatcggagcaggtgaagatgctgcagcggatagacgcacacaacaccaggcagcctccagagcagaagatccgggtgtccgtggaggtggagaagccacgagaggagctcttccagctgtttggctacggagacgtggtgtttgtcagcaaagatgtggccaagcacttggggttccagtcagcagaggaagccttgaggggcttgtatggtcgtgtgaggaaaggggctgtgcttgtctgtgcctgggctgaggagggcgccgacgccctgggccctgatggcaaattgctccactcggatgctttcccgccaccccgcgtggtggatacactgggagctggagacaccttcaatgcctccgtcatcttcagcctctcccaggggaggagcgtgcaggaagcactgagattcgggtgccaggtggccggcaagaagtgtggcctgcagggctttgatggcatcgtgtgagagcaggtgccggctcctcacacaccatggagactaccattgcggctgcatcgccttctcccctccatccagcctggcgtccaggttgccctgttcaggggacagatgcaagctgtggggaggactctgcctgtgtcctgtgttccccacagggagaggctctggggggatggctgggggatgcagagcctcagagcaaataaatcttcctcagagccagcttctcctctcaatgtctgaactgctctggctgggcattcctgaggctctgactcttcgatcctccctctttgtgtccattccccaaattaacctctccgcccaggcccagaggaggggctgcctgggctagagcagcgagaagtgccctgggcttgccaccagctctgccctggctggggaggacactcggtgccccacacccagtgaacctgccaaagaaaccgtgagagctcttcggggccctgcgttgtgcagactctattcccacagctcagaagctgggagtccacaccgctgagctgaactgacaggccagtggggggcaggggtgcgcctcctctgccctgcccaccagcctgtgatttgatggggtcttcattgtccagaaatacctcctcccgctgactgccccagagcctgaaagtctcacccttggagcccaccttggaattaagggcgtgcctcagccacaaatgtgacccaggatacagagtgttgctgtcctcagggaggtccgatctggaacacatattggaattggggccaactccaatatagggtgggtaaggccttataatgtaaagagcatataatgtaaagggctttagagtgagacagacctggattcaaatctgccatttaattagctgcatatcaccttagggtacagcacttaacgcaatctgcctcaatttcttcatctgtcaaatggaaccaattctgcttggctacagaattattgtgaggataaaaatcatatataaaaaaaaaa

SEQ ID NO: 702 - protein, 298 aa, Homo sapiens
MEEKQILCVGLVVLDVISLVDKYPKEDSEIRCLSQRWQRGGNASNSCTVLSLLGAPCAFMGSMAPGHVADFVLDDLRRYSVDLRYTVFQTTGSVPIATVIINEASGSRTILYYDRSLPDVSATDFEKVDLTQFKWIHIEGRNASEQVKMLQRIDAHNTRQPPEQKIRVSVEVEKPREELFQLFGYGDVVFVSKDVAKHLGFQSAEEALRGLYGRVRKGAVLVCAWAEEGADALGPDGKLLHSDAFPPPRVVDTLGAGDTFNASVIFSLSQGRSVQEALRFGCQVAGKKCGLQGFDGIV

SEQ ID NO: 703 - DNA, 1899 bp, Homo sapiens
gtagcctcatggaagagaagcagatcctgtgcgtggggctagtggtgctggacgtcatcagcctggtggacaagtaccctaaggaggactcggagataaggtgtttgtcccagagatggcagcgcggaggcaacgcgtccaactcctgcaccgttctctccctgctcggagccccctgtgccttcatgggctcaatggctcctggccatgttgctgacttcctggtggccgacttcaggcggcggggcgtggacgtgtctcaggtggcctggcagagcaagggggacacccccagctcctgctgcatcatcaacaactccaatggcaaccgtaccattgtgctccatgacacgagcctgccagatgtgtctgctacagactttgagaaggttgatctgacccagttcaagtggatccacattgagggccggaacgcatcggagcaggtgaagatgctgcagcggatagacgcacacaacaccaggcagcctccagagcagaagatccgggtgtccgtggaggtggagaagccacgagaggagctcttccagctgtttggctacggagacgtggtgtttgtcagcaaagatgtggccaagcacttggggttccagtcagcagaggaagccttgaggggcttgtatggtcgtgtgaggaaaggggctgtgcttgtctgtgcctgggctgaggagggcgccgacgccctgggccctgatggcaaattgctccactcggatgctttcccgccaccccgcgtggtggatacactgggagctggagacaccttcaatgcctccgtcatcttcagcctctcccaggggaggagcgtgcaggaagcactgagattcgggtgccaggtggccggcaagaagtgtggcctgcagggctttgatggcatcgtgtgagagcaggtgccggctcctcacacaccatggagactaccattgcggctgcatcgccttctcccctccatccagcctggcgtccaggttgccctgttcaggggacagatgcaagctgtggggaggactctgcctgtgtcctgtgttccccacagggagaggctctggggggatggctgggggatgcagagcctcagagcaaataaatcttcctcagagccagcttctcctctcaatgtctgaactgctctggctgggcattcctgaggctctgactcttcgatcctccctctttgtgtccattccccaaattaacctctccgcccaggcccagaggaggggctgcctgggctagagcagcgagaagtgccctgggcttgccaccagctctgccctggctggggaggacactcggtgccccacacccagtgaacctgccaaagaaaccgtgagagctcttcggggccctgcgttgtgcagactctattcccacagctcagaagctgggagtccacaccgctgagctgaactgacaggccagtggggggcaggggtgcgcctcctctgccctgcccaccagcctgtgatttgatggggtcttcattgtccagaaatacctcctcccgctgactgccccagagcctgaaagtctcacccttggagcccaccttggaattaagggcgtgcctcagccacaaatgtgacccaggatacagagtgttgctgtcctcagggaggtccgatctggaacacatattggaattggggccaactccaatatagggtgggtaaggccttataatgtaaagagcatataatgtaaagggctttagagtgagacagacctggattcaaatctgccatttaattagctgcatatcaccttagggtacagcacttaacgcaatctgcctcaatttcttcatctgtcaaatggaaccaattctgcttggctacagaattattgtgaggataaaaatcatatataaaaaaaaaa

SEQ ID NO: 704 - protein, 298 aa, Homo sapiens
MEEKQILCVGLVVLDVISLVDKYPKEDSEIRCLSQRWQRGGNASNSCTVLSLLGAPCAFMGSMAPGHVADFLVADFRRRGVDVSQVAWQSKGDTPSSCCIINNSNGNRTIVLHDTSLPDVSATDFEKVDLTQFKWIHIEGRNASEQVKMLQRIDAHNTRQPPEQKIRVSVEVEKPREELFQLFGYGDVVFVSKDVAKHLGFQSAEEALRGLYGRVRKGAVLVCAWAEEGADALGPDGKLLHSDAFPPPRVVDTLGAGDTFNASVIFSLSQGRSVQEALRFGCQVAGKKCGLQGFDGIV

SEQ ID NO: 705 - DNA, 3431 bp, Homo sapiens
atggccccccgcaccctctggagctgctacctctgctgcctgctgacggcagctgcaggggccgccagctaccctcctcgaggtttcagcctctacacaggttccagtggggccctcagccccggggggccccaggcccagattgccccccggccagccagccgccacaggaactggtgtgcctacgtggtgacccggacagtgagctgtgtccttgaggatggagtggagacatatgtcaagtaccagccttgtgcctggggccagccccagtgtccccaaagcatcatgtaccgccgcttcctccgccctcgctaccgtgtggcctacaagacagtgaccgacatggagtggaggtgctgtcagggttatgggggcgatgactgtgctgagagtcccgctccagcgctggggcctgcgtcttccacaccacggcccctggcccggcctgcccgccccaacctctctggctccagtgcaggcagccccctcagtggactggggggagaaggtcctggggagtcagagaaggtgcagcagctggaggaacaggtgcagagcctgaccaaggagctgcaaggcctgcggggcgtcctgcaaggactgagcgggcgcctggcagaggatgtgcagagggctgtggagacggccttcaacgggaggcagcagccagctgacgcggctgcccgccctggggtgcatgaaaccctcaatgagatccagcaccagctgcagctcctggacacccgcgtctccacccacgaccaggagctgggtcacctcaacaaccatcatggcggcagcagcagcagtgggggcagcagggccccagccccagcctcagcccctccgggccccagtgaggagctgctgcggcagctggagcagcggttgcaggagtcctgctccgtgtgcctggccgggctagatggcttccgccggcagcagcaggaggacagggagcggctgcgagcgatggagaagctgctggcctcggtggaggagcggcaacggcacctcgcagggctggcggtgggccgcaggccccctcaggaatgctgctctccagagctgggccggcgactggcagagctggagcgcaggctggatgtcgtggccggctcagtgacagtgctgagtgggcggcgaggcacagagctgggaggagccgcggggcagggaggccaccccccaggctacaccagcttggcctcccgcctgtctcgcctggaggaccgcttcaactccaccctgggcccttcggaggagcaggaggagagctggcctggggctcctggggggctgagccactggctgcctgctgcccggggccgactagagcagttgggggggctgctggccaatgtgagcggggagctgggggggcggttggatctgttggaggagcaggtggcaggggccatgcaggcatgcgggcagctctgctctggggcccctggggagcaggactctcaagtcagcgagatcctcagtgccttggagcgcagggtgctggacagtgaggggcagctgcggctggtgggctccggcctgcacacggtggaagcagcgggggaggcccggcaggccacgctggagggattacaagaggttgtgggccggctccaggatcgtgtggatgcccaggatgagacagctgcagagttcacactacggctgaatctcactgcggcccggctaggccaactggaggggctgctgcaggcccatggggatgagggctgtggggcctgtggcggagtccaagaggaactaggccgccttcgggatggtgtggagcgctgctcctgccccctgttgcctcctcggggtcctggggctggtccaggtgttgggggcccaagccgtgggcccctggacggcttcagcgtgtttgggggcagctcaggctcagccctgcaggccctgcaaggagagctctctgaggttattctcagcttcagctccctcaatgactcactgaatgagctccagaccactgtggagggccagggcgctgatctggctgacctgggggcaaccaaggaccgtatcatttctgagattaacaggctgcagcaggaggccacagagcatgctacagagagtgaagagcgcttccgaggcctagaggagggacaagcacaggccggccagtgccccagcttagaggggcgattgggccgtcttgagggtgtctgtgaacggttggacactgtggctgggggactgcagggcctgcgcgagggcctttccagacacgtggctgggctctgggctgggctccgggaaaccaacaccaccagccagatgcaggcagccctgctggagaagctggtcgggggacaggcgggcctgggcaggcggctgggtgcccttaacagctccctgcagctcctggaggaccgtctgcaccagctcagcctgaaggacctcactgggcctgcaggagaggctgggcccccagggcctcctgggctgcagggacccccaggccctgctggacctccaggatcaccaggcaaggacgggcaagagggccccatcgggccaccaggtcctcaaggggaacagggagtggagggggcaccagcagcccctgtgccccaagtggcattttcagctgctctgagtttgccccggtctgaaccaggcacggtccccttcgacagagtcctgctcaatgatggaggctattatgatccagagacaggcgtgttcacagcgccactggctggacgctacttgctgagcgcggtgctgactgggcaccggcacgagaaagtggaggccgtgctgtcccgctccaaccagggcgtggcccgcgtagactccggtggctacgagcctgagggcctggagaataagccggtggccgagagccagcccagcccgggcaccctgggcgtcttcagcctcatcctgccgctgcaggccggggacacggtctgcgtcgacctggtcatggggcagctggcgcactcggaggagccgctcaccatcttcagcggggccctgctctatggggacccagagcttgaacacgcgtagactggggtcccgcccgacgtgtctacgtcggctgaagagacagcgggggcggcgggctcctggggtctcgcctgagacggggcacctagccctgggcgagcgccgcacccgggcccgcagcggcaccgcgcccagagcggcctctccccacgcccggggcgcgccggctcagggaggctcggggccgcccatgcagacttttggcctggcgcgatcccccaagaacccctccagggccggcctgcggaggagccgatcctcgcaccctccgctccctccactggccctccaggtcgattccctgggctccaggctcccccgcgcgggcgccgcccaccgccatactaaacgatcgaggaataaagacacttggtttttct

SEQ ID NO: 706 - protein, 1016 aa, Homo sapiens
MAPRTLWSCYLCCLLTAAAGAASYPPRGFSLYTGSSGALSPGGPQAQIAPRPASRHRNWCAYVVTRTVSCVLEDGVETYVKYQPCAWGQPQCPQSIMYRRFLRPRYRVAYKTVTDMEWRCCQGYGGDDCAESPAPALGPASSTPRPLARPARPNLSGSSAGSPLSGLGGEGPGESEKVQQLEEQVQSLTKELQGLRGVLQGLSGRLAEDVQRAVETAFNGRQQPADAAARPGVHETLNEIQHQLQLLDTRVSTHDQELGHLNNHHGGSSSSGGSRAPAPASAPPGPSEELLRQLEQRLQESCSVCLAGLDGFRRQQQEDRERLRAMEKLLASVEERQRHLAGLAVGRRPPQECCSPELGRRLAELERRLDVVAGSVTVLSGRRGTELGGAAGQGGHPPGYTSLASRLSRLEDRFNSTLGPSEEQEESWPGAPGGLSHWLPAARGRLEQLGGLLANVSGELGGRLDLLEEQVAGAMQACGQLCSGAPGEQDSQVSEILSALERRVLDSEGQLRLVGSGLHTVEAAGEARQATLEGLQEVVGRLQDRVDAQDETAAEFTLRLNLTAARLGQLEGLLQAHGDEGCGACGGVQEELGRLRDGVERCSCPLLPPRGPGAGPGVGGPSRGPLDGFSVFGGSSGSALQALQGELSEVILSFSSLNDSLNELQTTVEGQGADLADLGATKDRIISEINRLQQEATEHATESEERFRGLEEGQAQAGQCPSLEGRLGRLEGVCERLDTVAGGLQGLREGLSRHVAGLWAGLRETNTTSQMQAALLEKLVGGQAGLGRRLGALNSSLQLLEDRLHQLSLKDLTGPAGEAGPPGPPGLQGPPGPAGPPGSPGKDGQEGPIGPPGPQGEQGVEGAPAAPVPQVAFSAALSLPRSEPGTVPFDRVLLNDGGYYDPETGVFTAPLAGRYLLSAVLTGHRHEKVEAVLSRSNQGVARVDSGGYEPEGLENKPVAESQPSPGTLGVFSLILPLQAGDTVCVDLVMGQLAHSEEPLTIFSGALLYGDPELEHA

SEQ ID NO: 707 - DNA, 3252 bp, Homo sapiens
ggcacgaggggcaccgcggcgctcgggtgtttttgggggcccgggtggagggcccgggtgccggggcccaaggtgcggcctcgctagcgggagagggagcgggatcaccggcccggagagagctctcagggccagagcggggcaggaggatgctttcccagccccaccatggagctgcgctgtgggggattgctgttcagttctcgctttgattcagggaatctagcccacgtggagaaggtggaatctttgtccagtgatggggaaggggtaggaggtggggcgtcagccctgaccagtggcattgcctcttcccctgactatgaattcaacgtgtggacccgaccagactgtgctgaaacggaatttgagaatgggaacaggtcatggttctacttcagcgtccggggaggaatgccaggaaaactcatcaagatcaacattatgaacatgaacaagcagagcaagctgtattcccagggcatggccccctttgtgcgcacactgcccacccggccacgctgggaacgcattcgagaccggcccacctttgagatgacagagacgcagtttgtgttatcctttgttcatcgtttcgtggagggccgtggggccaccaccttcttcgccttctgctaccccttctcctacagtgactgccaggaactgctaaaccagctagaccagcgctttccggagaaccaccctacccatagcagccccctggataccatctattaccatcgggagctcctttgctattctctggatggacttcgtgtagatctgctgacgatcacttcctgccatgggcttcgagaagatcgagagccccgtctagagcagctatttcctgataccagcacccctcgaccattccgtttcgcaggcaagaggatattcttcttaagcagtagagtacacccaggggagactccatctagctttgtcttcaatggctttctggacttcatcctccgacctgatgatccccgggcccaaaccctccgtcgcctcttcgtctttaagctgattcccatgttgaaccccgatggtgtggtccggggacactaccgcacagactcacgtggagtgaatctgaaccgtcagtacctgaagcctgatgccgtcctgcacccggccatctatggggccaaagctgtgcttctctaccaccatgtgcactctcgtctgaactcccagagttcctctgagcaccagcccagttcctgtctccctcctgatgctcctgtttctgacctggagaaagccaacaatctccaaaatgaagctcagtgtgggcactcagctgacaggcataacgctgaagcctggaaacaaacagagccagcagaacagaagctcaacagtgtgtggattatgccacaacagtctgcggggcttgaagagtcagcccctgataccatcccccccaaagagagtggcgttgcttactatgtggacctgcatggacatgcttccaaaaggggctgcttcatgtacggaaacagctttagtgatgagagcacccaggtggaaaacatgctatatccaaagctcatctccttgaattcagcccacttcgacttccagggctgcaatttctcagagaagaatatgtatgcccgagaccgtagagatggccagtctaaagagggaagcggccgtgttgcaatctacaaagcctcagggataatccacagctacacacttgaatgcaactacaacactggacgctcagtaaacagcatccctgctgcctgccatgacaatgggcgtgccagcccccctcccccgccggctttcccctccagatacactgtggaactatttgagcaggtgggacgagctatggccattgcagccctggacatggcggaatgtaatccgtggccccgaattgtactgtcagagcacagcagccttactaatctacgggcctggatgctgaaacatgtacgcaacagccgaggcctaagcagcactctgaatgtgggtgtcaacaagaagaggggccttcgaactccacccaaaagtcacaatgggttgcctgtctcctgctccgaaaacaccttgagtcgggcacgaagttttagcaccggcacaagtgccggtggtagcagcagcagccaacaaaattctccacagatgaagaattcccccagctttccttttcatggcagtcggcctgcagggctgccaggcctgggctctagtacccaaaaggtcacccaccgggtgctgggccccgtcagagagccccgaagccaggacaggagacggcagcagcagcccctgaaccatcgtcctgcaggcagcctcgctccatccccagctcctactagttctggcccagcctcctcacacaagctgggctcctgtctactgcctgattcattcaacataccagggagcagttgctcactcttgtcctctggagacaaaccagaggctgtcatggtaatcgggaaaggtctgctagggactggagctcggatgccctgcatcaagactcgattgcagacctgtccgaggagagtttccgccaggaggggtcccggattccccaggctaggcccaggttgggccggggctcaccgccgactcgcagagggatgaaaggctcttcaggccccacatcccctaccccccggaccagggagagcagtgagctggagctgggatcctgctctgctacaccagggctgcctcaggccaggcccccacggccccgctctgcccctgccttttctcctatatcctgtagtctatctgactccccatcctggaattgttacagcaggggtcccttgggccaacctgaggtttgttttgtccctaaatctcccccactgactgtttctccccgggtctgataatgcctttatgttcaatcccaggatatagccccaagatggggtaacagtgggaaatatgctagttcccctccaggccgctgattccatgtgacagccgttaagtccttggaatgccagccacgctgtccaaggcattacagagtatcaccttgagacagaacaaaacagggacctgccaccccttccctccctccgcagcacaagattttgggaccacaaaaaaaagtctatatttttatattggggggagggagtagaaaagcaagcccctatactgggccctattcagtggcagcttcttgttccataggattaaggaagactctgaggaaataaaagttgtttggaaaaatccaaaaaaaaaaaaaaaaaa

SEQ ID NO: 708 - protein, 724 aa, Homo sapiens
MNMNKQSKLYSQGMAPFVRTLPTRPRWERIRDRPTFEMTETQFVLSFVHRFVEGRGATTFFAFCYPFSYSDCQELLNQLDQRFPENHPTHSSPLDTIYYHRELLCYSLDGLRVDLLTITSCHGLREDREPRLEQLFPDTSTPRPFRFAGKRIFFLSSRVHPGETPSSFVFNGFLDFILRPDDPRAQTLRRLFVFKLIPMLNPDGVVRGHYRTDSRGVNLNRQYLKPDAVLHPAIYGAKAVLLYHHVHSRLNSQSSSEHQPSSCLPPDAPVSDLEKANNLQNEAQCGHSADRHNAEAWKQTEPAEQKLNSVWIMPQQSAGLEESAPDTIPPKESGVAYYVDLHGHASKRGCFMYGNSFSDESTQVENMLYPKLISLNSAHFDFQGCNFSEKNMYARDRRDGQSKEGSGRVAIYKASGIIHSYTLECNYNTGRSVNSIPAACHDNGRASPPPPPAFPSRYTVELFEQVGRAMAIAALDMAECNPWPRIVLSEHSSLTNLRAWMLKHVRNSRGLSSTLNVGVNKKRGLRTPPKSHNGLPVSCSENTLSRARSFSTGTSAGGSSSSQQNSPQMKNSPSFPFHGSRPAGLPGLGSSTQKVTHRVLGPVREPRSQDRRRQQQPLNHRPAGSLAPSPAPTSSGPASSHKLGSCLLPDSFNIPGSSCSLLSSGDKPEAVMVIGKGLLGTGARMPCIKTRLQTCPRRVSARRGPGFPRLGPGWAGAHRRLAEG

SEQ ID NO: 709 - DNA, 3074 bp, Homo sapiens
cccgccccactctggactcccgcgctgggcgcgctgaggcggcccccgagcgagcgcgcgtgcagccgccgccgccccgagcacccgcagctccggcgccgcggcgagacggagacggaccgagccacgggcccccgcggccgcagcatctcggaggagaacatgcttgccaactcagccagcgtgaggatcctcatcaagggaggcaaggtggtgaacgatgactgcacccacgaggctgacgtctacatcgagaatggcatcatccagcaggtgggccgcgagctcatgatccctggcggggccaaggtgattgatgccacaggaaaactggtgatccctggtggcatcgacaccagcacccacttccaccagaccttcatgaatgccacgtgcgtggacgacttctaccatgggaccaaggcagcactcgtcggaggcaccaccatgatcatcggccacgtcctgcccgacaaggagacctcccttgtggacgcttatgagaagtgccgaggtctggccgaccccaaggtctgctgtgattacgccctccacgtggggatcacctggtgggcacccaaggtgaaagcagaaatggagacactggtgagggagaagggtgtcaactcgttccagatgttcatgacctacaaggacctgtacatgcttcgagacagtgagctgtaccaagtgttgcacgcttgcaaggacattggggcaatcgcccgcgtccatgctgaaaatggggagcttgtggccgagggtgctaaggaggcactggatttggggatcacaggcccagaaggaatcgagatcagccgtccagaggagctggaagctgaagccactcatcgtgttatcaccattgcaaacaggactcactgtccaatctacctggtcaacgtgtccagtatctcggctggtgacgttatcgcagctgctaagatgcaagggaaggttgtgctggcggagaccaccactgcacatgccacgctgacaggcttacactactaccaccaggactggtcccacgcggctgcctatgtcacggtgcctcccctgagactggacaccaacacctcaacctacctcatgagcctgctggccaatgacactctgaacatcgtggcatcagatcaccggcctttcaccacaaagcagaaagctatgggcaaggaagacttcaccaagatcccacatggagtgagtggcgtgcaggaccgcatgagcgtcatctgggagagaggagtggttggaggaaagatggatgagaaccgttttgtggccgttaccagttccaacgcagctaagcttctgaacctgtatccccgcaagggccgcattattcccggagccgatgctgatgtggtggtgtgggacccagaagccacaaagaccatctcagccagcacgcaggtccagggaggagacttcaacctgtatgagaacatgcgctgccacggcgtgccactggtcaccatcagccgggggcgcgtcgtgtatgagaacggcgtcttcatgtgcgccgagggcaccggcaagttctgtcccctgaggtccttcccagacactgtctacaagaagctggtccagagagagaagactttaaaggttagaggagtggaccgcactccctacctgggggatgtcgctgttgtcgtgcaccctgggaaaaaagagatgggaaccccactcgcagacactcctacccggcccgtcacccggcatgggggcatgagggaccttcacgaatccagcttcagcctctctggctctcagatcgatgaccatgttccaaagcgagcttcagctcggatcctcgctcctcccggaggcaggtcgagtggcatttggtaaaggcattgccaagccccccgagtgaggacgcaccgccgccaccagcccgcaactctccagccgaagctgcaggggcaggagaggctgggctgggtggcacaccacccgaggggggccccgggacccacggagccctccctatgtctgcaaagtgattcactgtgcttcgagccaactctaacaggcactttgagatgtgttcctcctgctgtagtcctttctgccttggcctcggcgggcttttctggggcccaggaagcccacactatgcacagagcccaatgcatagagccctggccagcccttcctctcactcctgcctccgctggctttgggaaagcccagactttagtgccctgccccctggctgactggccagttgcccagagcactttagcagatgtggtttcaaagtaaaggcctcctcccccaccccttaggccccgtggtgacatttcccaagtcagacagatgtcagcttcccagccatgcccaggacgtcctatctcccccaacccacctctggccctgtgtaggggcagggatgggggtggctgggactcctggtgcccctcgccagcttctcctgcgccccgcccacaccctcgggggggtcacaggcccagaagggtagctgggcggggctcgaggctggtgccaggcgcgtgtaaatggttttgttttgcacgtttggtttgcgcagtagtttggtttgacttgtttgtgcatcctgtgaaaaataacggtgcttgtgtcactagcatagaatagcgacaggaatagatgtggtccttaggagacgctgcacttgacaccaaccagacagcacagggcaggggtggtggagggggctgggctcacaggcctctcttttccccgcctgcagtcttctgggctgcgggaggccctggccctttccccttcccctcccctccttgtctagtttcccacattccaaaagggggcctgggatgctagccccagagatgccagcccttcaggaagcaggtgtcctttcccctctctgcccctgatcactcccagcactccccttgccttcccctgtcttcacctgccaccacacacacacacacacacacacacacacacacacgcatggcttcctataacttcttcctgctggacagagactcagcgctcctcctgtgtgactggcaagaggcctcatgcctgctgagagagggtcgacgcggccg

SEQ ID NO: 710 - protein, 564 aa, Homo sapiens
MLANSASVRILIKGGKVVNDDCTHEADVYIENGIIQQVGRELMIPGGAKVIDATGKLVIPGGIDTSTHFHQTFMNATCVDDFYHGTKAALVGGTTMIIGHVLPDKETSLVDAYEKCRGLADPKVCCDYALHVGITWWAPKVKAEMETLVREKGVNSFQMFMTYKDLYMLRDSELYQVLHACKDIGAIARVHAENGELVAEGAKEALDLGITGPEGIEISRPEELEAEATHRVITIANRTHCPIYLVNVSSISAGDVIAAAKMQGKVVLAETTTAHATLTGLHYYHQDWSHAAAYVTVPPLRLDTNTSTYLMSLLANDTLNIVASDHRPFTTKQKAMGKEDFTKIPHGVSGVQDRMSVIWERGVVGGKMDENRFVAVTSSNAAKLLNLYPRKGRIIPGADADVVVWDPEATKTISASTQVQGGDFNLYENMRCHGVPLVTISRGRVVYENGVFMCAEGTGKFCPLRSFPDTVYKKLVQREKTLKVRGVDRTPYLGDVAVVVHPGKKEMGTPLADTPTRPVTRHGGMRDLHESSFSLSGSQIDDHVPKRASARILAPPGGRSSGIW

SEQ ID NO: 711 - DNA, 1991 bp, Homo sapiens
cttgctccgagagggagtcctcgcggacgtcagccaagattccagaatgactatcttgacttacccctttaaaaatcttcccactgcatcaaaatgggccctcagattttccataagacctctgagctgttcctcccagctacgagctgccccagctgtccagaccaaaacgaagaagacgttagccaaacccaatataaggaatgttgtggtggtggatggtgttcgcactccatttttgctgtctggcacttcatataaagacctgatgccacatgatttggctagagcagcgcttacgggtttgttgcatcggaccagtgtccctaaggaagtagttgattatatcatctttggtacagttattcaggaagtgaaaacaagcaatgtggctagagaggctgcccttggagctggcttctctgacaagactcctgctcacactgtcaccatggcttgtatctctgccaaccaagccatgaccacaggtgttggcttgattgcttctggccagtgtgatgtgatcgtggcaggtggtgttgagttgatgtccgatgtccctattcgtcactcaaggaaaatgagaaaactgatgcttgatctcaataaggccaaatctatgggccagcgactgtctttaatctctaaattccgatttaatttcctagcacctgagctccctgcggtttctgagttctccaccagtgagaccatgggccactctgcagaccgactggccgctgcctttgctgtttctcggctggaacaggatgaatatgcactgcgctctcacagtctagccaagaaggcacaggatgaaggactcctttctgatgtggtacccttcaaagtaccaggaaaagatacagttaccaaagataatggcatccgtccttcctcactggagcagatggccaaactaaaacctgcattcatcaagccctacggcacagtgacagctgcaaattcttctttcttgactgatggtgcatctgcaatgttaatcatggcggaggaaaaggctctggccatgggttataagccgaaggcatatttgagggattttatgtatgtgtctcaggatccaaaagatcaactattacttggaccaacatatgctactccaaaagttctagaaaaggcaggattgaccatgaatgatattgatgcttttgaatttcatgaagctttctcgggtcagattttggcaaattttaaagccatggattctgattggtttgcagaaaactacatgggtagaaaaaccaaggttggattgcctcctttggagaagtttaataactggggtggatctctgtccctgggacacccatttggagccactggctgcaggttggtcatggctgctgccaacagattacggaaagaaggaggccagtatggcttagtggctgcgtgtgcagctggagggcagggccatgctatgatagtggaagcttatccaaaataatagatccagaagaagtgacctgaagtttctgtgcaacactcacactaggcaatgccatttcaatgcattactaaatgacatttgtagttcctagctcctcttaggaaaacagttcttgtggccttctattaaatagtttgcacttaagccttgccagtgttctgagcttttcaataatcagtttactgctctttcagggatttctaagccaccagaatctcacatgagatgtgtgggtggttgtttttggtctctgttgtcactaaagactaaatgagggtttgcagttgggaaagaggtcaactgagatttggaaatcatctttgtaatatttgcaaattatacttgttcttatctgtgtcctaaagatgtgttctctataaaatacaaaccaacgtgcctaattaattatggaaaaataattcagaatctaaacaccactgaaaacttataaaaaatgtttagatacataaatatggtggtcagcgttaataaagtggagaaatattggaaaaaaaaa

SEQ ID NO: 712 - protein, 474 aa, Homo sapiens
MTILTYPFKNLPTASKWALRFSIRPLSCSSQLRAAPAVQTKTKKTLAKPNIRNVVVVDGVRTPFLLSGTSYKDLMPHDLARAALTGLLHRTSVPKEVVDYIIFGTVIQEVKTSNVAREAALGAGFSDKTPAHTVTMACISANQAMTTGVGLIASGQCDVIVAGGVELMSDVPIRHSRKMRKLMLDLNKAKSMGQRLSLISKFRFNFLAPELPAVSEFSTSETMGHSADRLAAAFAVSRLEQDEYALRSHSLAKKAQDEGLLSDVVPFKVPGKDTVTKDNGIRPSSLEQMAKLKPAFIKPYGTVTAANSSFLTDGASAMLIMAEEKALAMGYKPKAYLRDFMYVSQDPKDQLLLGPTYATPKVLEKAGLTMNDIDAFEFHEAFSGQILANFKAMDSDWFAENYMGRKTKVGLPPLEKFNNWGGSLSLGHPFGATGCRLVMAAANRLRKEGGQYGLVAACAAGGQGHAMIVEAYPK

SEQ ID NO: 713 - DNA, 2972 bp, Homo sapiens
ggcacgaggccactgctgtcctcttcagctcaagatggtggcctgccgggcgattggcatcctcagccgcttttctgccttcaggatcctccgctcccgaggttatatatgccgcaattttacagggtcttctgctttgctgaccagaacccatattaactatggagtcaaaggggatgtggcagttgttcgaattaactctcccaattcaaaggtaaatacactgagtaaagagctacattcagagttctcagaagttatgaatgaaatctgggctagtgatcaaatcagaagtgccgtccttatctcatcaaagccaggctgctttattgcaggtgctgatatcaacatgttagccgcttgcaagacccttcaagaagtaacacagctatcacaagaagcacagagaatagttgagaaacttgaaaagtccacaaagcctattgtggctgccatcaatggatcctgcctgggaggaggacttgaggttgccatttcatgccaatacagaatagcaacaaaagacagaaaaacagtattaggtacccctgaagttttgctgggggccttaccaggagcaggaggcacacaaaggctgcccaaaatggtgggtgtgcctgctgctttggacatgatgctgactggtagaagcattcgtgcagacagggcaaagaaaatgggactggttgaccaactggtggaacccctgggaccaggactaaaacctccagaggaacggacaatagaatacctagaagaagttgcaattacttttgccaaaggactagctgataagaagatctctccaaagagagacaagggattggtggaaaaattgacagcgtatgccatgactattccatttgtcaggcaacaggtttacaaaaaagtggaagaaaaagtgcgaaagcagactaaaggcctttatcctgcacctctgaaaataattgatgtggtaaagactggaattgagcaagggagtgatgccggttatctctgtgaatctcagaaatttggagagcttgtaatgaccaaagaatcaaaggccttgatgggactctaccatggtcaggtcctgtgcaagaagaataaatttggagctccacagaaggatgttaagcatctggctattcttggtgcagggctgatgggagcaggcatcgcccaagtctccgtggataaggggctaaagactatacttaaagatgccaccctcactgcgctagaccgaggacagcaacaagtgttcaaaggattgaatgacaaagtgaagaagaaagctctaacatcatttgaaagggattccatcttcagcaacttgactgggcagcttgattaccaaggttttgaaaaggccgacatggtgattgaagctgtgtttgaggaccttagtcttaagcacagagtgctaaaggaagtagaagcggtgattccagatcactgtatctttgccagtaacacatctgctctcccaatcagtgaaatcgctgctgtcagcaaaagacctgagaaggtgattggcatgcactacttctctcccgtggacaagatgcagctgctggagattatcacgaccgagaaaacttccaaagacaccagtgcttcagctgtagcagttggtctcaagcaggggaaggtcatcattgtggttaaggatggacctggcttctatactaccaggtgtcttgcgcccatgatgtctgaagtcatccgaatcctccaggaaggagttgacccgaagaagctggattccctgaccacaagctttggctttcctgtgggtgccgccacactggtggatgaagttggtgtggatgtagcgaaacatgtggcggaagatctgggcaaagtctttggggagcggtttggaggtggaaacccagaactgctgacacagatggtgtccaagggcttcctaggtcgtaaatctgggaagggcttttacatctatcaggagggtgtgaagaggaaggatttgaattctgacatggatagtattttagcgagtctgaagctgcctcctaagtctgaagtctcatcagacgaagacatccagttccgcctggtgacaagatttgtgaatgaggcagtcatgtgcctgcaagaggggatcttggccacacctgcagagggagacatcggagccgtctttgggcttggcttcccgccttgtctgggagggcctttccgctttgtggatctgtatggcgcccagaagatagtggaccggctcaagaaatatgaagctgcctatggaaaacagttcaccccatgccagctgctagctgaccatgctaacagccctaacaagaagttctaccagtgagcaggcctcatgcctcgctcagtcagtgcactaaccccagctgccggcagtgctggttctccaacagagtggtgtctagatttatcagagtaacgagaagacaaactccggcactgggtttgctccctgattaaagtgccttcagccaagaccatctctccctcctggtgaagtgtgacttcgaattagtttgcacttcctattggaaggtagagcccactgctcattgtataagccccgaggcctagagtggcagccaagagccatctgaagccacctctctgcctgttcctcccaagaggccagggtggccaggggtggtgagggcagttctgcacccagccaaacacataacaataaaaaccaaactctgtgtcagcatctttgcccttctggtttaaacgcctccttcaaaaagcaatctggaagaaagccctgtgctttgggggagtaagaatgtgtgtgcagaattctaggcagcaccttagggagggactgggatgagagaaagtgggacctggtgggctcaaccacacacacctgtctgtgcagatgctttgcccaggcttctcaccacggtgtaccgggatattaaacctctttccccagcaaaaaaaaaaaaaaaaaaaaaaaaaaaaaaaaaaaa

SEQ ID NO: 714 - protein, 763 aa, Homo sapiens
MVACRAIGILSRFSAFRILRSRGYICRNFTGSSALLTRTHINYGVKGDVAVVRINSPNSKVNTLSKELHSEFSEVMNEIWASDQIRSAVLISSKPGCFIAGADINMLAACKTLQEVTQLSQEAQRIVEKLEKSTKPIVAAINGSCLGGGLEVAISCQYRIATKDRKTVLGTPEVLLGALPGAGGTQRLPKMVGVPAALDMMLTGRSIRADRAKKMGLVDQLVEPLGPGLKPPEERTIEYLEEVAITFAKGLADKKISPKRDKGLVEKLTAYAMTIPFVRQQVYKKVEEKVRKQTKGLYPAPLKIIDVVKTGIEQGSDAGYLCESQKFGELVMTKESKALMGLYHGQVLCKKNKFGAPQKDVKHLAILGAGLMGAGIAQVSVDKGLKTILKDATLTALDRGQQQVFKGLNDKVKKKALTSFERDSIFSNLTGQLDYQGFEKADMVIEAVFEDLSLKHRVLKEVEAVIPDHCIFASNTSALPISEIAAVSKRPEKVIGMHYFSPVDKMQLLEIITTEKTSKDTSASAVAVGLKQGKVIIVVKDGPGFYTTRCLAPMMSEVIRILQEGVDPKKLDSLTTSFGFPVGAATLVDEVGVDVAKHVAEDLGKVFGERFGGGNPELLTQMVSKGFLGRKSGKGFYIYQEGVKRKDLNSDMDSILASLKLPPKSEVSSDEDIQFRLVTRFVNEAVMCLQEGILATPAEGDIGAVFGLGFPPCLGGPFRFVDLYGAQKIVDRLKKYEAAYGKQFTPCQLLADHANSPNKKFYQ

SEQ ID NO: 715 - DNA, 748 bp, Homo sapiens
ttctgtttttctctctcattctccagtggcggcggcggggaaggcggaggcagaggcagcagcagccgcgctggctgcaatgaatgatcccccagcttggggggaggactccaggtgagcctctgccctcgggaggcccgggacccccggccgcccacgaccggcagcccacgctatggatccctagaggaaggaggagaagacagctcgccgcccacccccatcccattttcctcttcctttatctcattgttgccgaagctgtttacggcagcgctccctctgctccaggactccctgggggggaatgccaagaccatcatggtagccacactggggccagcttctcacagctacgatgagagcctctccaccttgcgctttgccaaccgagccaagaacatcaagaacaagccccaggtgaacgaggaccccaaggacacactgctgcgggaattccaagaggagattgcccgcctgaaggcccagctggagaagagggggatgctggggaagcggccccggaggaagagcagccgcaggaagaaggccgtgtccgccccgcctgggtaccctgagggcccagtgattgaggcctgggtggcagaagaggaggatgacaacaacaacaaccaccgcccgccccagcccatcctggagtcagccttggagaagaacatggagaattacctgcaggaacagaaggagcggctggaggaggagaaggcagccatccaggatgaccgca

SEQ ID NO: 716 - DNA, 3871 bp, Homo sapiens
gctggaggtggcctcccctccgccccagacaagaagaggccctcagccctcccccggtctcagagagccctgagaggaggcccagtccagagctcttcctccgttcccagtccacttctctagggccagtagcagacaccagccagtatgccgaggaaccagggcttctccgagcccgaatactcggccgagtactcagccgagtactccgtcagcctgccctccgaccctgaccgcggggtgggccggacccatgaaatctcggtccggaactcgggctcctgcctgtgcctgcctcgcttcatgcggctgactttcgtgccggagtccttggagaacctctaccagacctacttcaaaaggcagcgccacgagaccctgctggtgctggtggtctttgcagccctctttgactgctacgtggtggtcatgtgtgctgtggtcttctccagcgacaagctggcttccctcgccgtggctggaattggactggtgttggacatcatcctcttcgtgctctgcaaaaaggggctgctcccggaccgggtcacccgcagagtgctgccctacgtgctgtggctgctcataaccgcccagatcttctcctacctgggcctgaacttcgcgcgtgcccacgcggctagtgacacggtgggctggcaggtcttctttgtcttctccttcttcatcacgctgcccctcagcctcagccccatcgtgatcatctccgtggtctcctgtgtggtgcacacgttggtcctgggggtcaccgtggcccagcagcagcaggaggagctcaaggggatgcagctgctgcgggagatcctggccaacgtcttcctctacctgtgcgccatcgctgtgggcatcatgtcctactacatggctgaccgcaagcaccgcaaggccttcctggaggcccgccagtcgctggaggtgaagatgaacctggaagagcagagccagcagcaggagaacctcatgctttccatcctgcccaagcacgtggctgacgagatgctgaaagacatgaagaaagacgagagccagaaggaccagcagcagttcaacaccatgtacatgtaccgtcacgagaacgtcagcatcctctttgccgacatcgtgggctttacccagctgtcttctgcctgcagtgcccaggagcttgtgaagctgctcaacgagctctttgcccgctttgacaagctggcagctaaataccaccagctgcggattaagatcctgggcgactgctactactgcatctgcggcttgcccgactaccgggaggaccacgccgtctgctccatcctcatggggctggccatggtggaggccatctcgtatgtgcgggagaagaccaagactggggtggacatgcgtgtgggggtgcacacgggcaccgtgctggggggcgtcctgggccagaagcgctggcagtacgacgtgtggtcgactgatgtcactgtagccaacaagatggaggccggcggcatccctgggcgcgtgcacatctcccagagcaccatggactgcctgaaaggggagtttgatgtggagccaggcgatgggggcagccgctgtgattacctagaagagaagggtattgaaacctacctcatcattgcctccaagccagaggtgaagaaaacagccacccagaatggcctcaatggctcggccctgcccaatggagcaccagcttcctcaaagtccagctcccctgccctcattgagaccaaggagcccaacgggagtgcccacagcagtgggtccacgtcggagaagcccgaggagcaggatgcccaggccgacaacccctcattccccaacccacgccggaggctgcgcctgcaggacctggctgaccgagtggtggatgcctctgaagatgagcacgagctcaaccagctgctcaacgaggccctgcttgagcgagagtccgcccaagtgtaaagaagagaaacaccttcctcttgtccatgcggttcatggaccccgagatggaaacccgctactcggtggagaaggagaagcagagtggggctgccttcagctgctcctgcgtcgtcctgctctgcacggccctggtcgagatactcatcgacccctggctaatgacaaactatgtgaccttcatggtgggggagattctgctcctcatcctgaccatctgctccctggctgccatctttccccgggcctttcctaagaagcttgtggccttctcaacttggattgaccggacccgctgggccaggaacacctgggccatgctcgccatcttcatcctggtgatggcaaatgtcgtggacatgctcagctgtctccagtactacacgggacccagcaatgcaacggcagggatggaaacggagggcagctgcctggagaaccccaagtattacaactatgtggccgtgctgtccctcatcgccaccatcatgctggtgcaggtcagccacatggtgaagctcacgctcatgctgctcgtcgcaggcgccgtggccaccatcaacctctatgcctggcgtcccgtctttgatgaatacgaccacaagcgttttcgggagcacgacttacctatggtggccttagagcagatgcaaggattcaaccctgggctcaatggcactgacaggctgcccctggtgccttccaagtactctatgacggtgatggtgttcctcatgatgctcagcttctactacttctcccgccacgtagaaaaactggcacggacacttttcttgtggaagattgaggtccacgaccagaaggaacgtgtctatgagatgcgacgctggaacgaggccttggtcaccaacatgttgcctgagcacgtggcacgccatttcctggggtccaagaagagagatgaggagctgtatagccagacgtatgatgagattggagtcatgtttgcctccctgcccaactttgctgacttctacacagaggagagcatcaacaatggtggtattgagtgtctgcgtttcctcaatgaaatcatctcagattttgactctctcctggacaatcccaagttccgggtgatcaccaagatcaaaaccattggcagcacgtatatggcggcttcaggagtcacccccgatgtcaacaccaatggctttgccagctccaacaaggaagacaagtccgagagagagcgctggcagcacctggctgacctggccgacttcgcgctggccatgaaggatacgctcaccaacatcaacaaccagtccttcaataacttcatgctgcgcataggcatgaacaaaggcggggttctggctggggtcatcggagcccggaaaccacactacgacatctggggcaatacagtcaatgtagccagcaggatggagtccacgggggtcatgggcaacattcaggtatgtccagtggcacagctggcacgtgctcagactcggcatgagaacaaaaccggaacagtgctttcccacgtgcccctgcctcccaccctggccctgaacagtaagtccagaggcagagacgtggggcaagtggaaaagaatctctgcaatagctagcctcagcacaggaagaaacacttccacccatccacaaaatctgggctgaagttctagatgcatatggcctacctttgggtatgaaccttctaataccttgtgatctgtctcagtggcgtctggcagaaaagctccacgaaaggggcaaagggacagaagagcaggcagtggcagtttccaggtaacagtgctgccacccaggtgaccatggccatcctaggagagaagtctctggatgagaggaggcccccagccagtcactccagggttctccttcccacccgctgctcgccacgggtggaagggcttggccc

SEQ ID NO: 717 - DNA, 3005 bp, Homo sapiens
gccgcggcaccagggcgcgcagccgggccggcccgaccccaccggccatacggtggagccatcgaagcccccacccacaggctgacagaggcaccgttcaccagagggctcaacaccgggatctatgtttaagttttaactctcgcctccaaagaccacgataattccttccccaaagcccagcagccccccagccccgcgcagccccagcctgcctcccggcgcccagatgcccgccatgccctccagcggccccggggacaccagcagctctgctgcggagcgggaggaggaccgaaaggacggagaggagcaggaggagccgcgtggcaaggaggagcgccaagagcccagcaccacggcacggaaggtggggcggcctgggaggaagcgcaagcaccccccggtggaaagcggtgacacgccaaaggaccctgcggtgatctccaagtccccatccatggcccaggactcaggcgcctcagagctattacccaatggggacttggagaagcggagtgagccccagccagaggaggggagccctgctggggggcagaagggcggggccccagcagagggagagggtgcagctgagaccctgcctgaagcctcaagagcagtggaaaatggctgctgcacccccaaggagggccgaggagcccctgcagaagcgggcaaagaacagaaggagaccaacatcgaatccatgaaaatggagggctcccggggccggctgcggggtggcttgggctgggagtccagcctccgtcagcggcccatgccgaggctcaccttccaggcgggggacccctactacatcagcaagcgcaagcgggacgagtggctggcacgctggaaaagggaggctgagaagaaagccaaggtcattgcaggaatgaatgctgtggaagaaaaccaggggcccggggagtctcagaaggtggaggaggccagccctcctgctgtgcagcagcccactgaccccgcatcccccactgtggctaccacgcctgagcccgtggggtccgatgctggggacaagaatgccaccaaagcaggcgatgacgagccagagtacgaggacggccggggctttggcattggggagctggtgtgggggaaactgcggggcttctcctggtggccaggccgcattgtgtcttggtggatgacgggccggagccgagcagctgaaggcacccgctgggtcatgtggttcggagacggcaaattctcagtggtgtgtgttgagaagctgatgccgctgagctcgttttgcagtgcgttccaccaggccacgtacaacaagcagcccatgtaccgcaaagccatctacgaggtcctgcaggtggccagcagccgcgcggggaagctgttcccggtgtgccacgacagcgatgagagtgacactgccaaggccgtggaggtgcagaacaagcccatgattgaatgggccctggggggcttccagccttctggccctaagggcctggagccaccagaagaagagaagaatccctacaaagaagtgtacacggacatgtgggtggaacctgaggcagctgcctacgcaccacctccaccagccaaaaagccccggaagagcacagcggagaagcccaaggtcaaggagattattgatgagcgcacaagagagcggctggtgtacgaggtgcggcagaagtgccggaacattgaggacatctgcatctcctgtgggagcctcaatgttaccctggaacaccccctcttcgttggaggaatgtgccaaaactgcaagaactgctttctggagtgtgcgtaccagtacgacgacgacggctaccagtcctactgcaccatctgctgtgggggccgtgaggtgctcatgtgcggaaacaacaactgctgcaggtgcttttgcgtggagtgtgtggacctcttggtggggccgggggctgcccaggcagccattaaggaagacccctggaactgctacatgtgcgggcacaagggtacctacgggctgctgcggcggcgagaggactggccctcccggctccagatgttcttcgctaataaccacgaccaggaatttgaccctccaaaggtttacccacctgtcccagctgagaagaggaagcccatccgggtgctgtctctctttgatggaatcgctacagggctcctggtgctgaaggacttgggcattcaggtggaccgctacattgcctcggaggtgtgtgaggactccatcacggtgggcatggtgcggcaccaggggaagatcatgtacgtcggggacgtccgcagcgtcacacagaagcatatccaggagtggggcccattcgatctggtgattgggggcagtccctgcaatgacctctccatcgtcaaccctgctcgcaagggcctctacgagggcactggccggctcttctttgagttctaccgcctcctgcatgatgcgcggcccaaggagggagatgatcgccccttcttctggctctttgagaatgtggtggccatgggcgttagtgacaagagggacatctcgcgatttctcgagtccaaccctgtgatgattgatgccaaagaagtgtcagctgcacacagggcccgctacttctggggtaaccttcccggtatgaacaggccgttggcatccactgtgaatgataagctggagctgcaggagtgtctggagcatggcaggatagccaagttcagcaaagtgaggaccattactacgaggtcaaactccataaagcagggcaaagaccagcattttcctgtcttcatgaatgagaaagaggacatcttatggtgcactgaaatggaaagggtatttggtttcccagtccactatactgacgtctccaacatgagccgcttggcgaggcagagactgctgggccggtcatggagcgtgccagtcatccgccacctcttcgctccgctgaaggagtattttgcgtgtgtgtaagggacatgggggcaaactgaggtagcgacacaaagtt

SEQ ID NO: 718 - protein, 912 aa, Homo sapiens
MPAMPSSGPGDTSSSAAEREEDRKDGEEQEEPRGKEERQEPSTTARKVGRPGRKRKHPPVESGDTPKDPAVISKSPSMAQDSGASELLPNGDLEKRSEPQPEEGSPAGGQKGGAPAEGEGAAETLPEASRAVENGCCTPKEGRGAPAEAGKEQKETNIESMKMEGSRGRLRGGLGWESSLRQRPMPRLTFQAGDPYYISKRKRDEWLARWKREAEKKAKVIAGMNAVEENQGPGESQKVEEASPPAVQQPTDPASPTVATTPEPVGSDAGDKNATKAGDDEPEYEDGRGFGIGELVWGKLRGFSWWPGRIVSWWMTGRSRAAEGTRWVMWFGDGKFSVVCVEKLMPLSSFCSAFHQATYNKQPMYRKAIYEVLQVASSRAGKLFPVCHDSDESDTAKAVEVQNKPMIEWALGGFQPSGPKGLEPPEEEKNPYKEVYTDMWVEPEAAAYAPPPPAKKPRKSTAEKPKVKEIIDERTRERLVYEVRQKCRNIEDICISCGSLNVTLEHPLFVGGMCQNCKNCFLECAYQYDDDGYQSYCTICCGGREVLMCGNNNCCRCFCVECVDLLVGPGAAQAAIKEDPWNCYMCGHKGTYGLLRRREDWPSRLQMFFANNHDQEFDPPKVYPPVPAEKRKPIRVLSLFDGIATGLLVLKDLGIQVDRYIASEVCEDSITVGMVRHQGKIMYVGDVRSVTQKHIQEWGPFDLVIGGSPCNDLSIVNPARKGLYEGTGRLFFEFYRLLHDARPKEGDDRPFFWLFENVVAMGVSDKRDISRFLESNPVMIDAKEVSAAHRARYFWGNLPGMNRPLASTVNDKLELQECLEHGRIAKFSKVRTITTRSNSIKQGKDQHFPVFMNEKEDILWCTEMERVFGFPVHYTDVSNMSRLARQRLLGRSWSVPVIRHLFAPLKEYFACV

SEQ ID NO: 719 - DNA, 2168 bp, Homo sapiens
ctgaccgccggggggtgcccccgggacgtagcgccgcggagaggaagcggcaaaggggaccatgcggcgcctgactcgtcggctggttctgccagtcttcggggtgctctggatcacggtgctgctgttcttctgggtaaccaagaggaagttggaggtgccgacgggacctgaagtgcagacccctaaggtttggtccttgtttttcaaggtggctgggatgagcccttgggcgcctcaggtgcctgtatcacccactcctccctaccaaagagggcatcttcctacaggaggacaccttgctgtatgtcatttcccatgtctcttgcaagaagctcagttccatttgcagactcaggtctttcttcaagtcagatgcacactgctggtgtattgcacggaccttccacccactagcatcatcatcaccttccacaacgaggcccgctccacgctgctcaggaccatccgcagtgtattaaaccgcacccctacgcatctgatccgggaaatcatattagtggatgacttcagcaatgaccctgatgactgtaaacagctcatcaaattgcccaaggtgaaatgcttgcgcaataatgaacggcaaggtctggtccggtcccggattcggggcgctgacatcgcccagggcaccactctgactttcctcgacagccactgtgaggtgaacagggactggctccagcctctgttgcacagggtcaaagaggactacacgcgggtggtgtgccctgtgatcgatatcattaacctggacaccttcacctacatcgagtctgcctcggagctcagaggggggtttgactggagcctccacttccagtgggagcagctctccccagagcagaaggctcggcgcctggaccccacggagcccatcaggactcctatcatagctggagggctcttcgtgatcgacaaagcttggtttgattacctggggaaatatgatatggacatggacatctggggtggggagaactttgaaatctccttccgagtgtggatgtgcgggggcagcctagagatcgtcccctgcagccgagtggggcacgtcttccggaagaagcacccctacgttttccctgatggaaatgccaacacgtatataaagaacaccaagcggacagctgaagtgtggatggatgaatacaagcaatactattacgctgcccggccattcgccctggagaggcccttcgggaatgttgagagcagattggacctgaggaagaatctgcgctgccagagcttcaagtggtacctggagaatatctaccctgaactcagcatccccaaggagtcctccatccagaagggcaatatccgacagagacagaagtgcctggaatctcaaaggcagaacaaccaagaaaccccaaacctaaagttgagcccctgtgccaaggtcaaaggcgaagatgcaaagtcccaggtatgggccttcacatacacccagcagatcctccaggaggagctgtgcctgtcagtcatcaccttgttccctggcgccccagtggttcttgtcctttgcaagaatggagatgaccgacagcaatggaccaaaactggttcccacatcgagcacatagcatcccacctctgcctcgatacagatatgttcggtgatggcaccgagaacggcaaggaaatcgtcgtcaacccatgtgagtcctcactcatgagccagcactgggacatggtgagctcttgaggacccctgccagaagcagcaagggccatggggtggtgcttccctggaccagaacagactggaaactgggcagcaagcagcctgcaaccacctcagacatcctggactgggaggtggaggcagagccccccaggacaggagcaactgtctcagggaggacagaggaaaacatcacaagccaatggggctcaaagacaaatcccacatgttctcaaggccgttaagttccagtcctggccagtcattccctgattggtatctggagacagaaacctaatgggaagtgtttattgttccttttcctacaaaggaagcagtctctggaggccagaaagaaaagccttctttttcactaggccaggactacattgagagatgaagaatggaggttgtttccaaaagaaataaagagaaacttagaagttgtctctgg

SEQ ID NO: 720 - protein, 557 aa, Homo sapiens
MRRLTRRLVLPVFGVLWITVLLFFWVTKRKLEVPTGPEVQTPKVWSLFFKVAGMSPWAPQVPVSPTPPYQRGHLPTGGHLAVCHFPCLLQEAQFHLQTQVFLQVRCTLLVYCTDLPPTSIIITFHNEARSTLLRTIRSVLNRTPTHLIREIILVDDFSNDPDDCKQLIKLPKVKCLRNNERQGLVRSRIRGADIAQGTTLTFLDSHCEVNRDWLQPLLHRVKEDYTRVVCPVIDIINLDTFTYIESASELRGGFDWSLHFQWEQLSPEQKARRLDPTEPIRTPIIAGGLFVIDKAWFDYLGKYDMDMDIWGGENFEISFRVWMCGGSLEIVPCSRVGHVFRKKHPYVFPDGNANTYIKNTKRTAEVWMDEYKQYYYAARPFALERPFGNVESRLDLRKNLRCQSFKWYLENIYPELSIPKESSIQKGNIRQRQKCLESQRQNNQETPNLKLSPCAKVKGEDAKSQVWAFTYTQQILQEELCLSVITLFPGAPVVLVLCKNGDDRQQWTKTGSHIEHIASHLCLDTDMFGDGTENGKEIVVNPCESSLMSQHWDMVSS

SEQ ID NO: 721 - DNA, 1216 bp, Homo sapiens
ggtgttcactcaacttggatctgtgctgaaaaattgtgacatttcagtacatctggtagagggtacagcttttatcttgcacatgaattttttgatgttcttcctgtgcataaatttcagaaaacaccacagggatggcgagaagtatttgttgacattgatccacaggtttctgataaactgaggtttgttttggcaccttctgccaccccagcagaagccttcatacaacatgacgaaacaagggatcatgttgaagtgtgtcctgatgctggtgttatcatcgaggaactttctcaacgcattgcattaactggaggtgctgcactggttgctgattatggtcatgatggaacaaagacagataccttcagagggttttgcgaccacaagcttcatgatgtcttaattgccccaggaacagcagatctaacagctgatgtggacttcagttatttgcgaagaatggcacagggaaaagtagcctctctgggcccaataaaacaacacacatttttaaaaaatatgggtattgatgtccggctgaaggttcttttagataaatcaaatgagccatcagtgaggcagcagttacttcaaggatatgatatgttaatgaatccaaagaagatgggagagagatttaacttttttgccttgctacctcatcagagacttcaaggtggaagatatcagaggaatgcacgtcagtcaaaaccctttgcatccgttgtagctgggtttagtgaacttgcttggcagtgatatttcagcttggacattttacccttcagtcggcccaagaaatcaaaataaaggaaacacatttcatatactgcaggtaacaaaagtcaaagtattttatcttttcacagcaagaacagtccatgttgtatataatacaaccaacattatagaacttttagggttgtgactggctttggtgcaaatgtgtgctcaagctaataagttattgtgaaactgagtttcctttaacttacaaagctagttgccatatttctattttattttaaaaagtaaacatgcggctgggcgtggtggctcatgcctgtaatcccagcactttgggaggctgaggtgggcatatcacctgaggtcagcagttaaagaccagcctgaccaaaatggagaaaccccatctctactaaaaatacaaaactagccgggtatggtggtacatgcctgtaatcccagc

SEQ ID NO: 722 - protein, 99 aa, Homo sapiens
MAQGKVASLGPIKQHTFLKNMGIDVRLKVLLDKSNEPSVRQQLLQGYDMLMNPKKMGERFNFFALLPHQRLQGGRYQRNARQSKPFASVVAGFSELAWQ

SEQ ID NO: 723 - DNA, 1096 bp, Homo sapiens
cttctctcgccaggcatcctcgtggaagtgacatcgtctttaaaccctgcgtggcaatccctgacgcaccgccgtgatgcccagggaagacagggcgacctggaagtccaactacttccttaagatcatccaactattggatgattatccaaaatgtttcatcgtgggagcagacaatgtgggctccaagcagatgcagcagatccgcatgtcccttcgcgggaaggtcgtggtgctgatgggcaagaacaccatgatgcgcaaggccatccgagggcacctggaaaacaacccagctctggagaaactgctgcctcatatctgggggaatgtgggctttgtgttcaccaaggaggacctcactgagatcagggacatgttgctggccaataaggtgccagctgctgcccgtgctggtgccattgccccatgtgaagtcactgtgccagcccagaacactggtctcgggcccgagaagacctcctttttccaggctttaggtatcaccactaaaatctccaggggcaccattgaaatcctgagtgatgtgcagctgatcaagactggagacaaagtgggagccagcgaagccacgctgctgaacatgctcaacatctcccccttctcctttgggctggtcatccagcaggtattcgacaatggcagcatctacaaccctgaagtgcttgataaaacagaggaaactctgcattctcgcttcctggagggtgtccgcaatgttgccagtgtctgtctgcagactggctacccaactgttgcatcagtaccccattctatcatcaacgggtacaaacgagtcctggccttgtctgtggagacggattacaccttcccacttgctgaaaatgtcaaggccttcttggctgatccatctgcctttgtggctgctgcccctgtggctgctgacaccacagctgctcctgctgctgctgcagccccagctaaggttgaagccaaggaagagtcggaggagtcggacgaggatatgggatttggtctctttgactaatcaccaaaaagcaaccaacttagccagctttatttgcaaaacaaggaaataaaggcttacttcttt

SEQ ID NO: 724 - protein, 317 aa, Homo sapiens
MPREDRATWKSNYFLKIIQLLDDYPKCFIVGADNVGSKQMQQIRMSLRGKVVVLMGKNTMMRKAIRGHLENNPALEKLLPHIWGNVGFVFTKEDLTEIRDMLLANKVPAAARAGAIAPCEVTVPAQNTGLGPEKTSFFQALGITTKISRGTIEILSDVQLIKTGDKVGASEATLLNMLNISPFSFGLVIQQVFDNGSIYNPEVLDKTEETLHSRFLEGVRNVASVCLQTGYPTVASVPHSIINGYKRVLALSVETDYTFPLAENVKAFLADPSAFVAAAPVAADTTAAPAAAAAPAKVEAKEESEESDEDMGFGLFD

SEQ ID NO: 725 - DNA, 714 bp, Homo sapiens
gtctttaaaccctgcgtggcaatccctgacgcaccgccgtgatgcccagggaagacagggcgacctggaagtccaactacttccttaagatcatccaactattggatgattatccaaaatgtttcatcgtgggagcagacaatgtgggctccaagcagatgcagcagatccgcatgtcccttcgcgggaaggtcgtggtgctgatgggcaagaacaccatgatgcgcaaggccatccgagggcacctggaaaacaacccagctctggagaaactgctgcctcatatctgggggaatgtgggctttgtgttcaccaaggaggacctcactgagatcagggacatgttgctggccaataaggtgccagctgctgcccgtgctggtgccattgccccatgtgaagtcactgtgccagcccagaacactggtctcgggcccgagaagacctcctttttccaggctttagagtgatgtgcagctgatcaagactggagacaaagtgggagccagcgaagccacgctgctgaacatgctcaacatctcccccttctcctttgggctggtcatccagcaggtattcgacaatggcagcatctacaaccctgaagtgcttgataaaacagaggaaactctgcattctcgcttcctggagggtgtccgcaatgttgccagtgtctgtctgcagactggctacccaactgttgcatcagtaccc

SEQ ID NO: 726 - DNA, 675 bp, Homo sapiens
ctgcgtggcaatccctgacgcaccgccgtgatgcccagggaagacagggcgacctggaagtccaactacttccttaagatcatccaactattggatgattatccaaaatgtttcatcgtgggagcagacaatgtgggctccaagcagatgcagcagatccgcatgtcccttcgcgggaaggtcgtggtgctgatgggcaagaacaccatgatgcgcaaggccatccgagggcacctggaaaacaacccagctctggagaaactgctgcctcatatctgggggaatgtgggctttgtgttcaccaaggaggacctcactgagatcagggacatgttgctggccaataaggtgccagctgctgcccgtgctggtgccattgccccatgtgaagtcactgtgccagcccagaacactggtctcgggcccgagaagacctcctttttccaggctttaggtatcaccactaaaatctccaggggcaccattgaaatcctgacaggtattcgacaatggcagcatctacaaccctgaagtgcttgataaaacagaggaaactctgcattctcgcttcctggagggtgtccgcaatgttgccagtgtctgtctgcagactggctacccaactgttgcatcagtaccccattctatcatcaacgggtacaaacgagtcctggc

SEQ ID NO: 727 - DNA, 1932 bp, Homo sapiens
cctctagcttagcgagcgctggagtttgaagagcgggcagtggctgcacacgccaaactttccctatggcttcggtgaccagggccgtgtttggagagctgccctcgggaggagggacagtggagaagttccagctgcagtcagacctcttgagagtggacatcatctcctggggctgcacgatcacagccctagaggtcaaagacaggcaggggagagcctcggacgtggtgcttggcttcgccgagttggaaggatacctccaaaagcagccatactttggagcagttattgggagggtggccaaccgaatcgccaaaggaaccttcaaggtggatgggaaggagtatcacctggccattaacaaggaacccaacagtctgcatggaggagtcagagggtttgataaagtgctctggacccctcgggtgctgtcaaatggcgtccagttctcgcgcatcagtccagatggtgaagaaggctaccccggagagttaaaagtctgggtgacatacaccctggatggcggagagctcatagtcaactacagagcacaagccagtcaggccacaccagtcaacctgaccaaccattcttacttcaacctggcaggccaggcttccccaaatataaatgaccatgaagtcaccatagaagcggatacttatttgcctgtggatgaaaccctgattcctacaggagaagttgccccagtgcaaggcactgcattcgacctgagaaagccagtggagcttggaaaacacctgcaggacttccatctcaatggttttgaccacaatttctgtctgaagggatctaaagaaaagcatttttgtgcaagggtgcatcatgctgcaagcgggcgggtactagaagtatacaccacccagcccggggtccagttttacacgggcaacttcctggatggcacattaaagggcaagaatggagctgtctatcccaagcactccggtttctgcctggagactcagaactggcctgatgcagtcaatcagccccgcttccctcctgtgctgctgaggcctggtgaggagtatgaccacaccacctggttcaagttttctgtggcttaaggaagtgtgaagatatgatccagtccagggctaggctcagccacctgtctcctgtccagaaaaaaggtgaagattaagaagctttcagaatgattctatggattaaaatcatacaaatggtggctgttctgagaatcagtctgggtattgatttccttttccagtgactggctccaggccatgtctaatgaccagctcgattccctgtgcagttcagagagcaagtgaacccaaccaacaatgtcgtcatctaagccctgaccctagccagggactcccatgctgctgttggctccatctctccacactgcctctttcttttcaactttttgcccttcctttctttaaagctattctcacattgcttttatttcctcctccttcacctccaaccactgtcagcagcactctggagttttcaaatgtcacattagcctcaccctgcatgctaggagatggacctgtctctatacagcagtagatgattgataagtgaggaaactgaggcttacagaggttgaagaccaacaagctaataaataaaaagttgaggccgggcacggtggctcacgcctgtaatcccagcactttggaaggccgaggcaggcggatcacgaggtcaggagatcgagaccatcctggctaacacggtgaaaccccgtctctacataaaaaattagctgggtgtggtagcacgcacccgtagttccagctacttgggaggctgaagcaggagaatcgcttgaacctgggaggtggaggttgcagtgagccgagatcatgccactgcactgggcaacagagcaaaactcgatctcaaaaaaaaaaaaaaaaaaaa

SEQ ID NO: 728 - protein, 342 aa, Homo sapiens
MASVTRAVFGELPSGGGTVEKFQLQSDLLRVDIISWGCTITALEVKDRQGRASDVVLGFAELEGYLQKQPYFGAVIGRVANRIAKGTFKVDGKEYHLAINKEPNSLHGGVRGFDKVLWTPRVLSNGVQFSRISPDGEEGYPGELKVWVTYTLDGGELIVNYRAQASQATPVNLTNHSYFNLAGQASPNINDHEVTIEADTYLPVDETLIPTGEVAPVQGTAFDLRKPVELGKHLQDFHLNGFDHNFCLKGSKEKHFCARVHHAASGRVLEVYTTQPGVQFYTGNFLDGTLKGKNGAVYPKHSGFCLETQNWPDAVNQPRFPPVLLRPGEEYDHTTWFKFSVA

SEQ ID NO: 729 - DNA, 1469 bp, Homo sapiens
gacttcaggaaaaatcaacccagcaccagcagctaccaaccaccattccatctcttcacttgaacagcattagttaagtccagatgtgggaacccttctcttggaagaagttcctaattgtgtctcagaccggtgtaaacaaaccagccagccgccaccttgctaaacctataagctttttaaaatccaatatattctgccaagaatatgccttgatagttagccctcagcccataggtgttttttgttttttaacagaattatatatgtctgggggtgaaaaaacccttgcattccaaaggtccatactggttacttggtttcattgccaccacttagtggatgttcagtttagaaccattttgtctgctccctctggaagccttgcgcagagcttactttgtaattgttggagaataactgctgaatttttagctgttttgagttgattcgcaccactgcaccacaactcaatatgaaaactatttaacttatttattatcttgtgaaaagtatacaatgaaaattttgttcatactgtatttatcaagtatgatgaaaagcaatagatatatattcttttattatgttaaattatgattgccattattaatcggcaaaatgtggagtgtatgttcttttcacagtaatatatgccttttgtaacttcacttggttattttattgtaaatgagtacaaaattcttaatttaagagattgtatgtaatatttatttcattaatttctttccttgtttacgtaaattttgaaagattgcatgatttcttgacagaaatcgatcttgatgctgtggaagtagtttgaggaacatcctatgagttttcttagaatgtataaaggttgtagcccatccaacttcaaagaaaaaaatgaccacatactttgcaatcaggctgaaatgtggcatgcttttctaattccaactttataaactagcaaaaaagtgtttgcttattccaccagttctactgtgacatactcgagtataaagacatgtagcaataacggggagtggggggggagtctcacagtgcctttggaagggcccgaacttgccttaaatcttcctcaaccaaataagtattttattagtgcttgagagaatctgaatgtaggatgggttcaactgcacaaaaggaaaagatttttaccactttttttatatagatataaagtgaagcaaccgccttagtgctgaaatatgtagtacatgaatatgccttgtttaattacagaaaattccttcctggacagcagatgaatgagcggtagctttagtttgtacgtaggtacagttggagcactatatgtactctctggactactttggacagaagtaggtttttgaatgtaacaagataagtcaacttgagttgtaatatattttggggaatcagctcactacaaattgtgactgtaaacattgtactgtaaatgttttgtagtt

SEQ ID NO: 730 - protein, 121 aa, Homo sapiens [sequence omitted]

SEQ ID NO: 731 - DNA, 1359 bp, Homo sapiens
cctgattctaggctggtcactactccgagcctgtgacgtttgcggcagccaggccgtcgacgatgcccagtgaaactctctgggaaattgcaaaagctgaagtggaaaaaaggggaattaatggaagtgaaggtgatggagctgaaattgcagaaaaatttgttttcttcattggcagtaaaaatgggggaaagactactattattctaaggtgtcttgacagagatgaaccaccaaaaccaaccttagctttggaatatacatatggaagaagagcaaaagggcacaacacaccaaaagatatcgctcacttttgggaactcggtggaggaacctctttattggacttaatcagcatacccatcacaggtgacaccttacggacgttttctcttgttctcgttctggatctttcaaaacctaatgatctctggcccaccatggaaaatctcttgcaagccacaaaaagccatgtagacaaagtgataatgaaactgggaaagacaaatgctaaagcagtttctgaaatgagacagaagatctggaataatatgccgaaggatcatcctgatcatgaattaattgacccatttccggtacctctggtcataattggaagtaaatatgatgtttttcaggattttgagtctgagaagagaaaggtaatatgcaagacacttcgatttgttgcacattattatggagcatcattaatgtttaccagtaaatcagaagctctattactaaaaatacgtggagttatcaaccagttggcatttggcattgacaaaagcaaatcaatatgtgtggatcagaataaaccgctgtttatcacagcaggattggattctttcggtcaaataggatctcctcctgttcctgaaaatgacattggaaagcttcatgcccactcacctatggagttgtggaaaaaagtgtatgaaaagctctttccaccaaagagtattaacacgctgaaagatatcaaggaccctgcgagagatcctcagtatgctgaaaatgaagtcgatgagatgagaattcagaaggatctggaactggaacagtacaaaagaagttcttccaagtcttggaaacaaatcgagcttgattcttgaacctatttcaattattgtatatttatttcttcttttccaaatacaaataagattatactgtgaattaactattgtggcaatatgtgaagaaagttaaactgtataatttgttaaaggacaagctggatttcttggactagtgcatctccctgtatatcttgaagctttttaaaaggaaaaattattgtagaaccacgtgtaattttttttaaaataaaagaatcttctactacctacctct

SEQ ID NO: 732 - protein, 351 aa, Homo sapiens
MPSETLWEIAKAEVEKRGINGSEGDGAEIAEKFVFFIGSKNGGKTTIILRCLDRDEPPKPTLALEYTYGRRAKGHNTPKDIAHFWELGGGTSLLDLISIPITGDTLRTFSLVLVLDLSKPNDLWPTMENLLQATKSHVDKVIMKLGKTNAKAVSEMRQKIWNNMPKDHPDHELIDPFPVPLVIIGSKYDVFQDFESEKRKVICKTLRFVAHYYGASLMFTSKSEALLLKIRGVINQLAFGIDKSKSICVDQNKPLFITAGLDSFGQIGSPPVPENDIGKLHAHSPMELWKKVYEKLFPPKSINTLKDIKDPARDPQYAENEVDEMRIQKDLELEQYKRSSSKSWKQIELDS

SEQ ID NO: 733 - DNA, 5098 bp, Homo sapiens
acatgctcctcctgtccttctggcggagcgtgcttcccgctgcggggacgttcgagcaatggcagccctgctgagatccgcgcgttggttgctgcgtgccggggcggccccgcgcctcccgctctccctgcgcctcctccctggcggcccgggccggctgcatgccgcctcctatctgcccgccgctcgcgccgggcccgtggccggaggactactgagcccagccaggctgtatgccattgctgccaaagaaaaagatattcaagaggagtccactttttcttctaggaagatttccaatcagtttgattgggctctaatgagactagatctttctgttcgaagaactggccgcattccaaagaagcttctacaaaaagtttttaatgatacctgccgctcaggtggcctaggtggtagtcatgccttgcttctactacgtagttgtggttctctcttgcctgaactaaagcttgaagagagaacagaatttgctcataggatatgggacacacttcagaaattaggtgctgtgtatgatgtgagtcactataatgctttacttaaagtctatcttcaaaatgaatataaattctcaccaactgatttcctggcaaaaatggaggaagcaaacattcaaccaaatcgagtgacataccagagattgattgcttcttattgtaatgtaggagatattgaaggtgccagcaagattcttggatttatgaaaactaaggatctcccagttacagaggcagtattcagtgcccttgtgacagggcatgccagagctggtgatatggagaatgcagaaaacattctcacagtgatgagagatgccggaattgagcctggtccagacacatacctcgcattattgaatgcatatgctgagaagggcgacattgaccatgttaagcagactctggagaaggtggagaagtccgagcttcaccttatggaccgtgatttactgcaaattatttttagcttcagtaaagctgggtatcctcagtatgtctcagaaattttggaaaaagttacatgtgaaagaagatatattccagatgcaatgaacctcattttacttttagtcactgaaaaattggaagatgtagcgttgcaaattttactagcatgccccgtatcaaaggaagatggcccaagtgtctttggcagtttctttttacaacactgtgtgactatgaatacgcctgtggagaagctaacagactactgtaagaagttaaaggaagtccagatgcactcctttcctctgcagttcaccctccattgtgctttactcgccaataaaactgatttggcaaaagccttaatgaaggctgtgaaggaggaaggttttcctatcagacctcactatttctggccattgctagttggacgtcggaaggaaaaaaatgttcaaggtataattgaaatcctcaaaggaatgcaagaattgggagtacatcctgatcaggaaacatatacagattatgtgattccatgctttgatagtgtaaactcagcacgagccattttgcaggaaaatggatgtctgtctgatagtgatatgttttctcaagctggattgagaagtgaagcagcaaatgggaacttagactttgtattatcatttttgaaatcaaatacattgcccatctcgctgcagtctataagaagtagcctactgctaggcttcaggaggtctatgaatataaatctttggagcgagataacagaattgttgtacaaggatggacgttattgccaggagcctcgaggaccgacggaagctgttggctattttctttataacttgattgacagcatgagtgactcagaggtacaggccaaggaggagcatttgagacaatacttccatcagctggagaagatgaatgtaaaaattcctgaaaatatctacagaggcattcgtaatctcctggaaagctaccatgttcctgaattgattaaggatgctcacttgttggttgagagtaagaatttagactttcaaaaaactgtgcaacttacatcatctgaattggagtccacacttgaaacactaaaagctgaaaatcaacctataagagatgtcctaaagcaactcatattagtgctttgttcagaagagaatatgcaaaaagcccttgaattgaaagcaaaatatgaatccgacatggttactggtggctatgcagctttaataaatttatgctgtcgacatgataaagtagaagatgccttgaacttgaaagaagaatttgaccgcttagattcatctgctgtccttgacaccggcaagtatgtaggccttgtaagagtattggcaaagcatggcaagctccaagatgctattaacattctgaaggagatgaaagagaaggatgttcttatcaaagatacaacagccttgtcctttttccacatgctaaatggcgcagctttaagaggtgaaattgaaacagtaaaacagttgcatgaagccatcgtgactctagggttagcagaaccatccaccaacataagtttcccattggtcactgtacacttggaaaagggcgacctatctactgctcttgaggtcgccattgactgctatgaaaagtataaagtattaccaaggattcatgatgtcttgtgtaaactggtagagaaaggcgagactgatctaattcagaaagcaatggactttgtgagccaagaacaaggtgaaatggtgatgctctatgatctcttctttgccttcctacaaacaggaaattacaaagaggccaagaagatcattgagactccagggattagagctcgatctgcaaggcttcagtggttttgtgacagatgtgttgcaaataatcaggttgaaactctggaaaaattagtggagctgacacagaagctatttgaatgtgatagagaccagatgtactacaatctgctaaaactgtataaaataaacggtgactggcaaagagctgatgcagtctggaataaaatccaagaagaaaatgttattcctcgtgaaaagacattaagattattagcagaaatccttagagagggtaaccaggaagttccgtttgacgtacctgagttgtggtatgaagatgaaaaacattccctgaattcttcgtcagcctcaaccacagaacctgatttccagaaagatatattgattgcctgccgattgaaccaaaaaaaaggggcatatgatattttcctgaatgcaaaagagcaaaacattgtgtttaatgctgaaacctacagcaatctcattaaattactgatgtcagaagattattttacacaagcaatggaagtgaaagcattcgcggagacccacatcaagggcttcacactgaacgatgctgccaacagccgcctcatcataacgcaagttaggcgggattatttgaaagaggctgtgacaacactgaaaacagtattggatcagcagcagaccccttctaggttagcagtgacccgtgtcatccaggcattggccatgaagggtgatgttgaaaacatagaagtagttcagaagatgttaaatggactcgaagactccattggactttcaaaaatggttttcatcaataacattgctttggctcaaataaagaataataacatagatgccgcaatagaaaacattgaaaatatgcttacttcagagaataaagtcattgaaccccaatacttcggcttggcatacttattcagaaaagtaatagaggagcagttggaaccagcagttgaaaagagtaacatcatggcggagagattggccaatcagtttgcaatttataaacctgtcactgattttttccttcaacttgtggatgcaggcaaggtggatgatgccagagctctcctacagagatgtggtgcaattgctgaacaaaccccgattttgttgttgttcctccttaggaattctaggaaacaaggaaaggcatcaactgtgaaatctgtgttagaattgattcctgaattaaatgaaaaggaagaagcatacaattccctcatgaaaagctatgtctcagagaaagatgtcacatctgctaaagcactgtatgaacatttgactgcaaagaatacaaaattggatgatctgtttctaaagcgttacgcatctttgctgaagtatgctggagagcctgtccctttcattgaaccccctgaaagctttgaattttatgcacagcagctaagaaaattgagggaaaactcttcttgaaataaccaggcgatactttgttttgtatatatttgtgattctgtgtctacatgttattttgaagtatatctgagggaaaaataaatgaaaattttctttatgtacttatgtatgtgtgatgcatgttcaaagtcttattgaccataactctgtgcacttggttattggacatttttggagtttttttctctgggaaaaatcgatagtgttttcttcaatgctgctgctgtgtgaagccatactttttcaggattcttcccctaattggctctttggtttccctgctctgtttcatttatttcattaaaatgttattcctttatttaagattcacttattagtctgctgtttctctgaaaaattttagagctaggtatagtgaccgtgaactttctaacgcataatattctgtgatacagccattccgtacatgtgtgaagtcctgcataactttcgaactttgttaaatgttggcactaggagtcatcagatctaggcttcatcattttccagtgagaagcagagacccaaagggcctgttacttgtgcttggtcaggggactgtctgtcatgcctggaggctcttcggcacacttccccatctttcccttctgccactgtggcttcaagcacctctgttcatagagcgtctctgaaattgagtctcggtcatgacttatcccgaagtagagcaatgtgtttcctctcattgtagtttcaggactttgtcagtacaagctctgccctaggcttgttactttatactcatatcctgaaaagatgtgatttcatctatgaaggggtaaaatattggtttgtatttaattgtttgaaataaaagtgatccctatattg

SEQ ID NO: 734 - DNA, 1053 bp, Homo sapiens
atgggctcaggctacaccaaggccgtgtaccgggtccgcctgcccggcggtgccgcggtggcgctcaaggcggtggactttagcggccacgatctgggcagctgcgtgcgcgagttcggggtacggaggggctgctatcggctggcggcccacaagctgcttaaggagatggtgctgctggagcggctgcggcaccccaacgtgctgcagctctatggctactgctaccaggacagcgaggacatcccagacaccctgaccaccatcacggagctgggcgcccctgtagaaatgatccagctgctgcaaacttcctgggaggatcgattccgaatctgcctgagcctgggccgcctcctccaccacctggcccactccccactgggctccgtcactctgctggacttccgccctcggcagtttgtgctggtggatggggagctcaaagtgacggacctggatgacgcacgtgtggaggagacgccgtgtgcaggcagcaccgactgcatactcgagtttccggccaggaacttcaccctgccctgctcagcccagggctggtgcgagggcatgaacgagaagcggaacctctataatgcctacaggtttttcttcacatacctcctgcctcacagtgccccgccttcactgcgtcctctgctggacagcatcgtcaacgccacaggagagctcgcctggggggtggacgagaccctggcccagctggagaaggtgctgcacctgtaccggagcgggcagtatctgcagaactccacggcaagcagcagtaccgagtaccagtgtatcccagacagcaccatcccccaggaagactaccgctgctggccatcctaccaccacgggagctgcctcctttcagtgttcaacctggctgaggctgtggatgtctgtgagagccatgcccagtgtcgggcctttgtggtcaccaaccagaccacctggacaggtcggcagctggtctttttcaagactggatggagccaagtggtccctgatcccaacaagaccacatatgtgaaggcctctggctga

SEQ ID NO: 735 - protein, 350 aa, Homo sapiens [sequence omitted]

SEQ ID NO: 736 - DNA, 647 bp, Homo sapiens
gctaacatcccagacagacagatgtgaccaggacaaacgtgcaataatgccaaatgttaaaatgtgagtttaccagcctagctatgggactgctggctcctagtccaggaatcatgggggtatgactgcctctccaaccctgtgggctgtaagcaagctcaggctagtctccccactgggggctgtgcccctccctgggacggttccgtgggcagccccatcactgtgttcaatagtgtgagaatgtagctgcgtggggacaatccatcgtggagtgttctctcagcttaggtctggacaggagacttggcgggagatgctccaggatgtgggtgattctgtacctggggaggctatctctgacctcccgacaggggacactcccaggccagcccaggggtcaggggcagaggtgcacacctcagcatgagccaagactggggtcagggagcaggtgtggtttgagccaggacctggggcgggggtggggccggggcctttctgcctcatttgctttcaatgaaagcctcaaagcagccaaaaccaggctttcccccttcctcgagtttgaatatccagaatcttttgtacttcttgttggttaaattgtttatttttgtaaaaaataaaataaaattagttaataa

SEQ ID NO: 737 - protein, 92 aa, Homo sapiens [sequence omitted]

SEQ ID NO: 738 - DNA, 4607 bp, Homo sapiens
agatgactttgggaaattgctgctggctgaggccctcctggagcagtgtttgaaggagaaccatgccaaaataaaagactccatgcctttgctggagaagaatgagccgaagatgagcgaagccaaaaattatctaagcagtatccttaaccatgggaggctctcgccacagtacatgtgtgaggccatgctgatcctgggcaaactgcattacgtggagggctcataccgagatgccatcagcatgtacgcacgggccgggattgatgacatgtccatggagaacaagcccctgtatcagatgcggctgctgtcggaggcttttgtcatcaaaggcctctctctggaacgcctacccaactccatcgcctcccgcttccgcctgacagagagggaggaggaagtgatcacctgttttgagagggcctcctggatcgctcaggtgttcctgcaggaattggagaagaccacaaataacagcacgtcgaggcatctgaaaggctgtcacccgcttgactatgagctcacctacttcctggaagctgccctccagagcgcctatgtgaaaaacctgaagaaggggaacatcgtgaagggcatgagagagctccgggaggtgctgcggactgtggagaccaaagcaactcagaacttcaaagtgatggcggccaagcacctggcgggggtcctgctgcactccctgagtgaggagtgctactggagccccctgtcccaccctctgcctgagttcatgggcaaggaggagagttctttcgccactcaggccctgcggaaacctcacctctatgaaggagacaacctctactgccccaaggacaacatcgaggaagccctcctgctcctcctcatcagcgaatccatggcaactcgagatgtggtgctgagccgggtgccggagcaggaggaggaccggacagtgagcttgcagaatgccgcagccatctatgacctcctgagcatcacgttgggcagaaggggacagtacgtcatgctctcggagtgcctggagcgagccatgaagtttgcgtttggagaatttcacctttggtaccaggtggccctctccatggtggcttgtgggaagtcagcctacgctgtgtccctgctgcgggagtgtgtgaagttgcggccctcggaccccaccgtgcccctgatggccgcgaaggtctgcatcgggtcccttcgctggctagaggaagcagagcactttgccatgatggtgatcagcctcggagaggaagccggggagttcctccccaagggctacctggctctgggtctcacctatagcctgcaggccaccgacgccaccctgaagtccaagcaagatgaattgcaccggaaggcactgcagacgctggagagggctcagcagctggcgcccagtgacccccaggtcatcctctatgtctcgctgcagctggccctcgtccgacagatctccagtgccatggagcagctgcaggaggccctgaaggtacgcaaggatgatgcccacgccctccacctgctggcactgctcttctctgcccagaagcaccaccagcatgccctggatgttgtcaacatggccatcaccgagcaccctgagaacttcaacctgatgttcaccaaggtgaagctggagcaggtgctgaaaggcccagaggaagccctcgtgacctgcagacaagtgctgaggctgtggcagaccctgtacagcttctcccagctgggaggcctagaaaaggatggcagcttcggtgagggcctcaccatgaagaagcagagtggcatgcacctgactttgcctgatgcccatgatgcagactctggctcccggcgggcttcgtccatcgccgcctcccggctggaggaggccatgtcagagctgactatgccctcttcggtcctgaagcagggccccatgcagctgtggaccacgctggaacagatctggctgcaggctgctgagctgttcatggagcagcagcacctcaaggaagcaggtttctgcatccaggaggcggcgggcctcttccccacttctcactcagtactctatatgcggggccggctggctgaggtgaagggcaacctggaggaggccaagcagctgtacaaggaggcgctcacggtgaacccagatggcgtgcgcatcatgcatagcctgggtctgatgctgagtcggctgggccacaagagcttggcccagaaggtgcttcgtgatgccgtggagaggcagagtacgtgccacgaggcgtggcagggcctgggcgaggtgctgcaggcccagggccagaacgaggctgccgttgactgcttcctcaccgcccttgagctggaggccagcagccctgtactgcccttctccatcatccccagagagctctgacgacgctgcagccgcagggagggaggggctggccagagggagaggcagcagggaacgtgggtcagggtggggcaacagtggcatcaggtgcggggcctcagggaaatacatctttagtgaacgcctctgcagctgcagccctcgttctcttggctgggccaagagggccttcctggatttctttgttggtgccttgggaaacagtctgacttgaaccctaagtgcctttggagagttttgtggtgaccagacttgctccccaagagctgggcagcggggagcctcacagctgtccttcaccctcacccatgcctctggcttggagtctgggtggggggttctcactccccactctcagcacagtacagacttctggatctctctcaggtcttgcccagggcggtcacaatgtgaagaaactgcgggcaagtgggaagactatgagatttctgggttcccttctcagacttggagttagtagatgattcctgcattgcccctgcttgccctctgagaccagctgggccccaccttgctctttccccctgctaccaagtgcctttggggtctgaccaggggtactgagcaccggccctaacacttccatctccacccaccccatctccctggcgatgtgctccagcccaagcagcctccgtaggctttagatcctgtggttgctagatccagtcctttctaataccctgagtcaacacattactcctgcaggtcttaggctacaatgcaggtcccttgagggccaccaacatggaggtaggcagtttctaggactgtccccagtacatctcaccacccacagccctttttttgccttgattcgagcctcaccctggccttttggcttcccctgcctgagagagacctgaggaggggacagagcccagcccctctcctgtggctgagcaggcctctgtgtccatgacacctgtcttccgggcctgggggctgtgggtgtatgtcctccctactggcttccccggcccctgctgcatgatgctcttggaactcttctccaaggagtcagtcccccaggcctatcaggggatccttttgtatctgcactttgggttttagtttcaaagctccatcaggtacagcttgcatttcaggatgtgtggaaagctcgggtgagggctgccctggttcatcatagctccaccttcctcggaaggagtgggctgttggagaccccccatccatggcacactagctcagcactgcatttcccgagatgattcccaagacagctggtgcctcctggctttcctgtgccaggccaaggggcaccacagaggaccctggatcctttgcctcttcttggttgaaggatctctatgtatgtgtgtatataaatatagttttttatctatatatataaaatagagatctattttttttctggaattctgttagaaaagtaaagaaaaagcaaatgctgttggtttatctcagggtgcccaaagtggttatagtcaatttttggtactaggaaaggcacccaatgcatttcctgacttttaagcatttccttgttggaagcagcagagggccaggccaagttgctgacagtgactttgcaggttgaataaagaaacccttggaggggaagcaggcttgtctgaagcagcatgtatattcactgggcatgtagctcccacaccagccttgagccaggccctggacaggaggggctgttgcaggatgagggaggccagagaaggcatcgaagccaagacctgggcccacctggggagggatgtgggaaaggaaggatgggagggaggaccctctgggaaaatgtggatttgagctggtgagagtgttgctaaggctgggctaaagcctggagagggtaggaggaggcaagaggggtccaggcagggctgatcctggcctctgacctgtccagggcgacccctgaagcccctgctgcctctgggcattgctgggagaggccaaggcaggactcacgtctgaacagagatcccctcgggcattgctgatgggccaccttcagctgcagggaagaagcctaggagaggaggcatgggagggacctgggccttgttcagattggccacctctgctgagaagtccataccagtacacccctaataagttatgccacataccaacgtactgtggatattataacctgcattaaaacaactctaaagaacgctgctcattt

SEQ ID NO: 739 - protein, 858 aa, Homo sapiens
MAAKGAHGSYLKVESELERCRAEGHWDRMPELVRQLQTLSMPGGGGNRRGSPSAAFTFPDTDDFGKLLLAEALLEQCLKENHAKIKDSMPLLEKNEPKMSEAKNYLSSILNHGRLSPQYMCEAMLILGKLHYVEGSYRDAISMYARAGIDDMSMENKPLYQMRLLSEAFVIKGLSLERLPNSIASRFRLTEREEEVITCFERASWIAQVFLQELEKTTNNSTSRHLKGCHPLDYELTYFLEAALQSAYVKNLKKGNIVKGMRELREVLRTVETKATQNFKVMAAKHLAGVLLHSLSEECYWSPLSHPLPEFMGKEESSFATQALRKPHLYEGDNLYCPKDNIEEALLLLLISESMATRDVVLSRVPEQEEDRTVSLQNAAAIYDLLSITLGRRGQYVMLSECLERAMKFAFGEFHLWYQVALSMVACGKSAYAVSLLRECVKLRPSDPTVPLMAAKVCIGSLRWLEEAEHFAMMVISLGEEAGEFLPKGYLALGLTYSLQATDATLKSKQDELHRKALQTLERAQQLAPSDPQVILYVSLQLALVRQISSAMEQLQEALKVRKDDAHALHLLALLFSAQKHHQHALDVVNMAITEHPENFNLMFTKVKLEQVLKGPEEALVTCRQVLRLWQTLYSFSQLGGLEKDGSFGEGLTMKKQSGMHLTLPDAHDADSGSRRASSIAASRLEEAMSELTMPSSVLKQGPMQLWTTLEQIWLQAAELFMEQQHLKEAGFCIQEAAGLFPTSHSVLYMRGRLAEVKGNLEEAKQLYKEALTVNPDGVRIMHSLGLMLSRLGHKSLAQKVLRDAVERQSTCHEAWQGLGEVLQAQGQNEAAVDCFLTALELEASSPVLPFSIIPREL

SEQ ID NO: 740 - DNA, 1124 bp, Homo sapiens
agtccgagtggagagagcgagctgagtggttgtgtggtcgcgtctcggaaaccggtagcgcttgcagcatggctgaccaactgactgaagagcagattgcagaattcaaagaagctttttcactatttgacaaagatggtgatggaactataacaacaaaggaattgggaactgtaatgagatctcttgggcagaatcccacagaagcagagttacaggacatgattaatgaagtagatgctgatggtaatggcacaattgacttccctgaatttctgacaatgatggcaagaaaaatgaaagacacagacagtgaagaagaaattagagaagcattccgtgtgtttgataaggatggcaatggctatattagtgctgcagaacttcgccatgtgatgacaaaccttggagagaagttaacagatgaagaagttgatgaaatgatcagggaagcagatattgatggtgatggtcaagtaaactatgaagagtttgtacaaatgatgacagcaaagtgaagaccttgtacagaatgtgttaaatttcttgtacaaaattgtttatttgccttttctttgtttgtaacttatctgtaaaaggtttctccctactgtcaaaaaaatatgcatgtatagtaattaggacttcattcctccatgttttcttcccttatcttactgtcattgtcctaaaaccttattttagaaaattgatcaagtaacatgttgcatgtggcttactctggatatatctaagcccttctgcacatctaaacttagatggagttggtcaaatgagggaacatctgggttatgccttttttaaagtagttttctttaggaactgtcagcatgttgttgttgaagtgtggagttgtaactctgcgtggactatggacagtcaacaatatgtacttaaaagttgcactattgcaaaacgggtgtattatccaggtactcgtacactatttttttgtactgctggtcctgtaccagaaacattttcttttattgttacttgctttttaaactttgtttagccacttaaaatctgcttatggcacaatttgcctcaaaatccattccaagttgtatatttgttttccaataaaaaaattacaattt

SEQ ID NO: 741 - DNA, 3145 bp, Homo sapiens
ggcgggaaacagcttagtgggtgtggggtcgcgcattttcttcaaccaggaggtgaggaggtttcgacatggcggtgcagccgaaggagacgctgcagttggagagcgcggccgaggtcggcttcgtgcgcttctttcagggcatgccggagaagccgaccaccacagtgcgccttttcgaccggggcgacttctatacggcgcacggcgaggacgcgctgctggccgcccgggaggtgttcaagacccagggggtgatcaagtacatggggccggcaggagcaaagaatctgcagagtgttgtgcttagtaaaatgaattttgaatcttttgtaaaagatcttcttctggttcgtcagtatagagttgaagtttataagaatagagctggaaataaggcatccaaggagaatgattggtatttggcatataaggcttctcctggcaatctctctcagtttgaagacattctctttggtaacaatgatatgtcagcttccattggtgttgtgggtgttaaaatgtccgcagttgatggccagagacaggttggagttgggtatgtggattccatacagaggaaactaggactgtgtgaattccctgataatgatcagttctccaatcttgaggctctcctcatccagattggaccaaaggaatgtgttttacccggaggagagactgctggagacatggggaaactgagacagataattcaaagaggaggaattctgatcacagaaagaaaaaaagctgacttttccacaaaagacatttatcaggacctcaaccggttgttgaaaggcaaaaagggagagcagatgaatagtgctgtattgccagaaatggagaatcaggttgcagtttcatcactgtctgcggtaatcaagtttttagaactcttatcagatgattccaactttggacagtttgaactgactacttttgacttcagccagtatatgaaattggatattgcagcagtcagagcccttaacctttttcagggttctgttgaagataccactggctctcagtctctggctgccttgctgaataagtgtaaaacccctcaaggacaaagacttgttaaccagtggattaagcagcctctcatggataagaacagaatagaggagagattgaatttagtggaagcttttgtagaagatgcagaattgaggcagactttacaagaagatttacttcgtcgattcccagatcttaaccgacttgccaagaagtttcaaagacaagcagcaaacttacaagattgttaccgactctatcagggtataaatcaactacctaatgttatacaggctctggaaaaacatgaaggaaaacaccagaaattattgttggcagtttttgtgactcctcttactgatcttcgttctgacttctccaagtttcaggaaatgatagaaacaactttagatatggatcaggtggaaaaccatgaattccttgtaaaaccttcatttgatcctaatctcagtgaattaagagaaataatgaatgacttggaaaagaagatgcagtcaacattaataagtgcagccagagatcttggcttggaccctggcaaacagattaaactggattccagtgcacagtttggatattactttcgtgtaacctgtaaggaagaaaaagtccttcgtaacaataaaaactttagtactgtagatatccagaagaatggtgttaaatttaccaacagcaaattgacttctttaaatgaagagtataccaaaaataaaacagaatatgaagaagcccaggatgccattgttaaagaaattgtcaatatttcttcaggctatgtagaaccaatgcagacactcaatgatgtgttagctcagctagatgctgttgtcagctttgctcacgtgtcaaatggagcacctgttccatatgtacgaccagccattttggagaaaggacaaggaagaattatattaaaagcatccaggcatgcttgtgttgaagttcaagatgaaattgcatttattcctaatgacgtatactttgaaaaagataaacagatgttccacatcattactggccccaatatgggaggtaaatcaacatatattcgacaaactggggtgatagtactcatggcccaaattgggtgttttgtgccatgtgagtcagcagaagtgtccattgtggactgcatcttagcccgagtaggggctggtgacagtcaattgaaaggagtctccacgttcatggctgaaatgttggaaactgcttctatcctcaggtctgcaaccaaagattcattaataatcatagatgaattgggaagaggaacttctacctacgatggatttgggttagcatgggctatatcagaatacattgcaacaaagattggtgctttttgcatgtttgcaacccattttcatgaacttactgccttggccaatcagataccaactgttaataatctacatgtcacagcactcaccactgaagagaccttaactatgctttatcaggtgaagaaaggtgtctgtgatcaaagttttgggattcatgttgcagagcttgctaatttccctaagcatgtaatagagtgtgctaaacagaaagccctggaacttgaggagtttcagtatattggagaatcgcaaggatatgatatcatggaaccagcagcaaagaagtgctatctggaaagagagcaaggtgaaaaaattattcaggagttcctgtccaaggtgaaacaaatgccctttactgaaatgtcagaagaaaacatcacaataaagttaaaacagctaaaagctgaagtaatagcaaagaataatagctttgtaaatgaaatcatttcacgaataaaagttactacgtgaaaaatcccagtaatggaatgaaggtaatattgataagctattgtctgtaatagttttatattgttttatattaaccctttttccatagtgttaactgtcagtgcccatgggctatcaacttaataagatatttagtaatattttactttgaggacattttcaaagatttttattttgaaaaatgagagctgtaactgaggactgtttgcaattgacataggcaataataagtgatgtgctgaattttataaataaaatcatgtagtttgtgg

SEQ ID NO: 742 - protein, 934 aa, Homo sapiens [sequence omitted]

SEQ ID NO: 743 - DNA, 615 bp, Homo sapiens
cttttgcgggtggcggcgaacgcggagagcacgccatgaaggcctcgggcacactacgagagtacaaagtagtgggtcgctgcctgcccacccccaaatgccacacaccacccctctaccgcatgcgaatctttgcgcctaatcatgtcgtcgccaagtcccgcttctggtacttcgtatctcagttaaagaagatgaagaagtcttcaggggagattgtctactgtgggcaggtgtttgagaagttccccttgcgggtgaagaacttcgggatctggctgcgctatgactcccggagcggcacccacaacatgtaccgggaataccgggacctgaccaccgcaggcgctgtcacccggtgctaccgagacatgagcgcccggcacggcggccgggcccactccattcagatcatgaaggtggaggagatcgcggccagcaagtgccgccggccggctgtcaagcagttccacgactccaagatcaagttcccgctgccccaccgggtcctgcgccgtcagcacaagccacgcttcaccaccaagaggcccaacaccttcttctaggtgcagggccctcgcccgggtgtgccccaaataaactcaggaacgcccc

SEQ ID NO: 744 - DNA, 4264 bp, Homo sapiens
atttcccgccagcaggagccgcgcggtagatgcggtgcttttaggagctccgtccgacagaacggttgggccttgccggctgtcggtatgtcgcgacagagcaccctgtacagcttcttccccaagtctccggcgctgagtgatgccaacaaggcctcggccagggcctcacgcgaaggcggccgtgccgccgctgcccccggggcctctccttccccaggcggggatgcggcctggagcgaggctgggcctgggcccaggcccttggcgcgatccgcgtcaccgcccaaggcgaagaacctcaacggagggctgcggagatcggtagcgcctgctgcccccaccagttgtgacttctcaccaggagatttggtttgggccaagatggagggttacccctggtggccttgtctggtttacaaccacccctttgatggaacattcatccgcgagaaagggaaatcagtccgtgttcatgtacagttttttgatgacagcccaacaaggggctgggttagcaaaaggcttttaaagccatatacaggttcaaaatcaaaggaagcccagaagggaggtcatttttacagtgcaaagcctgaaatactgagagcaatgcaacgtgcagatgaagccttaaataaagacaagattaagaggcttgaattggcagtttgtgatgagccctcagagccagaagaggaagaagagatggaggtaggcacaacttacgtaacagataagagtgaagaagataatgaaattgagagtgaagaggaagtacagcctaagacacaaggatctaggcgaagtagccgccaaataaaaaaacgaagggtcatatcagattctgagagtgacattggtggctctgatgtggaatttaagccagacactaaggaggaaggaagcagtgatgaaataagcagtggagtgggggatagtgagagtgaaggcctgaacagccctgtcaaagttgctcgaaagcggaagagaatggtgactggaaatggctctcttaaaaggaaaagctctaggaaggaaacgccctcagccaccaaacaagcaactagcatttcatcagaaaccaagaatactttgagagctttctctgcccctcaaaattctgaatcccaagcccacgttagtggaggtggtgatgacagtagtcgccctactgtttggtatcatgaaactttagaatggcttaaggaggaaaagagaagagatgagcacaggaggaggcctgatcaccccgattttgatgcatctacactctatgtgcctgaggatttcctcaattcttgtactcctgggatgaggaagtggtggcagattaagtctcagaactttgatcttgtcatctgttacaaggtggggaaattttatgagctgtaccacatggatgctcttattggagtcagtgaactggggctggtattcatgaaaggcaactgggcccattctggctttcctgaaattgcatttggccgttattcagattccctggtgcagaagggctataaagtagcacgagtggaacagactgagactccagaaatgatggaggcacgatgtagaaagatggcacatatatccaagtatgatagagtggtgaggagggagatctgtaggatcattaccaagggtacacagacttacagtgtgctggaaggtgatccctctgagaactacagtaagtatcttcttagcctcaaagaaaaagaggaagattcttctggccatactcgtgcatatggtgtgtgctttgttgatacttcactgggaaagtttttcataggtcagttttcagatgatcgccattgttcgagatttaggactctagtggcacactatcccccagtacaagttttatttgaaaaaggaaatctctcaaaggaaactaaaacaattctaaagagttcattgtcctgttctcttcaggaaggtctgatacccggctcccagttttgggatgcatccaaaactttgagaactctccttgaggaagaatattttagggaaaagctaagtgatggcattggggtgatgttaccccaggtgcttaaaggtatgacttcagagtctgattccattgggttgacaccaggagagaaaagtgaattggccctctctgctctaggtggttgtgtcttctacctcaaaaaatgccttattgatcaggagcttttatcaatggctaattttgaagaatatattcccttggattctgacacagtcagcactacaagatctggtgctatcttcaccaaagcctatcaacgaatggtgctagatgcagtgacattaaacaacttggagatttttctgaatggaacaaatggttctactgaaggaaccctactagagagggttgatacttgccatactccttttggtaagcggctcctaaagcaatggctttgtgccccactctgtaaccattatgctattaatgatcgtctagatgccatagaagacctcatggttgtgcctgacaaaatctccgaagttgtagagcttctaaagaagcttccagatcttgagaggctactcagtaaaattcataatgttgggtctcccctgaagagtcagaaccacccagacagcagggctataatgtatgaagaaactacatacagcaagaagaagattattgattttctttctgctctggaaggattcaaagtaatgtgtaaaattatagggatcatggaagaagttgctgatggttttaagtctaaaatccttaagcaggtcatctctctgcagacaaaaaatcctgaaggtcgttttcctgatttgactgtagaattgaaccgatgggatacagcctttgaccatgaaaaggctcgaaagactggacttattactcccaaagcaggctttgactctgattatgaccaagctcttgctgacataagagaaaatgaacagagcctcctggaatacctagagaaacagcgcaacagaattggctgtaggaccatagtctattgggggattggtaggaaccgttaccagctggaaattcctgagaatttcaccactcgcaatttgccagaagaatacgagttgaaatctaccaagaagggctgtaaacgatactggaccaaaactattgaaaagaagttggctaatctcataaatgctgaagaacggagggatgtatcattgaaggactgcatgcggcgactgttctataactttgataaaaattacaaggactggcagtctgctgtagagtgtatcgcagtgttggatgttttactgtgcctggctaactatagtcgagggggtgatggtcctatgtgtcgcccagtaattctgttgccggaagataccccccccttcttagagcttaaaggatcacgccatccttgcattacgaagactttttttggagatgattttattcctaatgacattctaataggctgtgaggaagaggagcaggaaaatggcaaagcctattgtgtgcttgttactggaccaaatatggggggcaagtctacgcttatgagacaggctggcttattagctgtaatggcccagatgggttgttacgtccctgctgaagtgtgcaggctcacaccaattgatagagtgtttactagacttggtgcctcagacagaataatgtcaggtgaaagtacattttttgttgaattaagtgaaactgccagcatactcatgcatgcaacagcacattctctggtgcttgtggatgaattaggaagaggtactgcaacatttgatgggacggcaatagcaaatgcagttgttaaagaacttgctgagactataaaatgtcgtacattattttcaactcactaccattcattagtagaagattattctcaaaatgttgctgtgcgcctaggacatatggcatgcatggtagaaaatgaatgtgaagaccccagccaggagactattacgttcctctataaattcattaagggagcttgtcctaaaagctatggctttaatgcagcaaggcttgctaatctcccagaggaagttattcaaaagggacatagaaaagcaagagaatttgagaagatgaatcagtcactacgattatttcgggaagtttgcctggctagtgaaaggtcaactgtagatgctgaagctgtccataaattgctgactttgattaaggaattatagactgactacattggaagctttgagttgacttctgaccaaaggtggtaaattcagacaacattatgatctaataaactttattttttaaaaatga

SEQ ID NO: 745 - protein, 1360 aa, Homo sapiens
MSRQSTLYSFFPKSPALSDANKASARASREGGRAAAAPGASPSPGGDAAWSEAGPGPRPLARSASPPKAKNLNGGLRRSVAPAAPTSCDFSPGDLVWAKMEGYPWWPCLVYNHPFDGTFIREKGKSVRVHVQFFDDSPTRGWVSKRLLKPYTGSKSKEAQKGGHFYSAKPEILRAMQRADEALNKDKIKRLELAVCDEPSEPEEEEEMEVGTTYVTDKSEEDNEIESEEEVQPKTQGSRRSSRQIKKRRVISDSESDIGGSDVEFKPDTKEEGSSDEISSGVGDSESEGLNSPVKVARKRKRMVTGNGSLKRKSSRKETPSATKQATSISSETKNTLRAFSAPQNSESQAHVSGGGDDSSRPTVWYHETLEWLKEEKRRDEHRRRPDHPDFDASTLYVPEDFLNSCTPGMRKWWQIKSQNFDLVICYKVGKFYELYHMDALIGVSELGLVFMKGNWAHSGFPEIAFGRYSDSLVQKGYKVARVEQTETPEMMEARCRKMAHISKYDRVVRREICRIITKGTQTYSVLEGDPSENYSKYLLSLKEKEEDSSGHTRAYGVCFVDTSLGKFFIGQFSDDRHCSRFRTLVAHYPPVQVLFEKGNLSKETKTILKSSLSCSLQEGLIPGSQFWDASKTLRTLLEEEYFREKLSDGIGVMLPQVLKGMTSESDSIGLTPGEKSELALSALGGCVFYLKKCLIDQELLSMANFEEYIPLDSDTVSTTRSGAIFTKAYQRMVLDAVTLNNLEIFLNGTNGSTEGTLLERVDTCHTPFGKRLLKQWLCAPLCNHYAINDRLDAIEDLMVVPDKISEVVELLKKLPDLERLLSKIHNVGSPLKSQNHPDSRAIMYEETTYSKKKIIDFLSALEGFKVMCKIIGIMEEVADGFKSKILKQVISLQTKNPEGRFPDLTVELNRWDTAFDHEKARKTGLITPKAGFDSDYDQALADIRENEQSLLEYLEKQRNRIGCRTIVYWGIGRNRYQLEIPENFTTRNLPEEYELKSTKKGCKRYWTKTIEKKLANLINAEERRDVSLKDCMRRLFYNFDKNYKDWQSAVECIAVLDVLLCLANYSRGGDGPMCRPVILLPEDTPPFLELKGSRHPCITKTFFGDDFIPNDILIGCEEEEQENGKAYCVLVTGPNMGGKSTLMRQAGLLAVMAQMGCYVPAEVCRLTPIDRVFTRLGASDRIMSGESTFFVELSETASILMHATAHSLVLVDELGRGTATFDGTAIANAVVKELAETIKCRTLFSTHYHSLVEDYSQNVAVRLGHMACMVENECEDPSQETITFLYKFIKGACPKSYGFNAARLANLPEEVIQKGHRKAREFEKMNQSLRLFREVCLASERSTVDAEAVHKLLTLIKEL

SEQ ID NO: 746 - DNA, 7561 bp, Homo sapiens
gtgagctgaagcagggcagggcatcaactcacccaggaagtgcaaggggtttggggattttcctttcctagccaagggaaggcatgacagactgtacctggaaaaacaggacactcttgcccaaatactgcactttttgcacagtcttagcaactggcagaccaggagattctctcctgtgcctgattcattgggtcccacacccatagggccttgcttactgccagtgcagcagtctgagattaacaccccatccccgggagaactctaagaaggagctgatgtggaggagcagctgagacagttcaagatgacgaccacagtagccacagactatgacaacattgagatccagcagcagtacagtgatgtcaacaaccgctgggatgtcgacgactgggacaatgagaacagctctgcgcggctttttgagcggtcccgcatcaaggctctggcagatgagcgtgaagccgtgcagaagaagaccttcaccaagtgggtcaattcccaccttgcccgtgtgtcctgccggatcacagacctgtacactgaccttcgagatggacggatgctcatcaagctgctggaggtcctctctggagagaggctgcctaaacccaccaagggacgaatgcgcatccactgcttagagaatgtggacaaggcccttcagttcctgaaggagcagagagtccatcttgagaacatggggtcccatgacatcgtggatggaaaccaccggctgacccttggcctcatctggaccatcatcctgcgcttccagatccaggatatcagtgtggaaactgaagacaacaaagagaagaaatctgccaaggatgcattgctgttgtggtgccagatgaagacagctgggtaccccaatgtcaacattcacaatttcaccactagctggagggacggcatggccttcaatgcactgatacacaaacaccggcctgacctgatagattttgacaaactaaagaaatctaacgcacactacaacctgcagaatgcatttaatctggcagaacagcacctcggcctcactaaactgttggaccccgaagacatcagcgtggaccatcctgatgagaagtccataatcacttatgtggtgacttattaccactacttctctaagatgaaggccttagctgttgaaggaaaacgaattggaaaggtgcttgacaatgctattgaaacagaaaaaatgattgaaaagtatgaatcacttgcctctgaccttctggaatggattgaacaaaccatcatcattctgaacaatcgcaaatttgccaattcactggtcggggttcaacagcagcttcaggcattcaacacttaccgcactgtggagaaaccacccaaatttactgagaaggggaacttggaagtgctgctcttcaccattcagagcaagatgagggccaacaaccagaaggtctacatgccccgggaggggaagctcatctctgacatcaacaaggcctgggaaagactggaaaaagcggaacacgaaagagaactggctttgcggaatgagctcataagacaggagaaactggaacagctcgcccgcagatttgatcgcaaggcagctatgagggagacttggctgagcgaaaaccagcgtctggtgtctcaggacaactttgggtttgaccttcctgcagttgaggccgccacaaaaaagcacgaggccattgagacagacattgccgcatacgaggagcgtgtgcaggctgtggtagccgtggccagggagctcgaggccgagaattaccacgacatcaagcgcatcacagcgaggaaggacaatgtcatccggctctgggaatacctactggaactgctcagggcccggagacagcggctcgagatgaacctggggctgcagaagatattccaggaaatgctctacattatggactggatggatgaaatgaaggtgctagtattgtctcaagactatggcaaacacttacttggtgtggaagacctgttacagaagcacaccctggttgaagcagacattggcatccaggcagagcgggtgagaggtgtcaatgcctccgcccagaagttcgcaacagacggggaaggttacaagccctgtgacccccaggtgatccgagaccgcgtggcccacatggagttctgttatcaagagctttgccagctggcggctgagcgcagggcccgtctggaagagtcccgccgcctctggaagttcttctgggagatggcagaagaggaaggctggatacgggagaaggagaagatcctgtcctcggacgattacgggaaagacctgaccagcgtcatgcgcctgctcagcaagcaccgggcgttcgaggacgagatgagcggccgcagtggccactttgagcaggccatcaaggaaggcgaagacatgatcgcggaggagcacttcgggtcggagaagatccgtgagaggatcatttacatccgggagcagtgggccaacctagagcagctctcggccattcggaagaagcgcctggaggaggcctccctgctgcaccagttccaggcagatgctgatgacattgatgcctggatgctggacatcctcaagattgtctccagcagcgacgtgggccacgatgagtattccacacagtctctggtcaagaaacacaaggacgtggcggaagagatcgccaattacaggcccacccttgacacgctgcacgaacaagccagcgccctcccccaggagcatgccgagtctccagacgtgaggggcaggctgtcgggcatcgaggagcggtataaggaggtggcagagctgacgcggctgcggaagcaggcactccaggacactctggccctgtacaagatgttcagcgaggctgatgcctgtgagctctggatcgacgagaaggagcagtggctcaacaacatgcagatcccagagaagctggaggatctggaggtcatccagcacagatttgagagcctagaaccagaaatgaacaaccaggcttcccgggttgcagtggtgaaccagattgcacgccagctgatgcacagcggccacccaagtgagaaggaaatcaaagcccagcaggacaaactcaacacaaggtggagccagttcagagaactggttgacaggaagaaggatgccctcctgtctgccctgagcatccagaactaccacctcgagtgcaatgaaaccaaatcctggattcgggaaaagaccaaggtcatcgagtccacccaggacctgggcaatgacctggctggcgtcatggccctgcagcgcaagctgaccggcatggagcgggacttggtggccattgaggcaaagctgagtgacctgcagaaggaggcggagaagctggagtccgagcaccccgaccaggcccaggccatcctgtctcggctggccgagatcagcgacgtgtgggaggagatgaagaccaccctgaaaaaccgagaggcctccctgggagaggccagcaagctgcagcagttcctacgggacttggacgacttccagtcctggctctctaggacccagacagcgatcgcctcggaggacatgccaaacaccctgaccgaggctgagaagctgctcacgcagcacgagaacatcaagaatgagatcgacaactacgaggaggactaccagaagatgagggacatgggcgagatggtcacccaggggcagaccgatgcccagtacatgtttctgcggcagcggctgcaggccctggacactggatggaacgagctccacaagatgtgggagaacagacaaaatctcctatcccagtcacatgcctaccagcagttcctcagagacacgaagcaagccgaagcctttcttaacaaccaggagtatgttctggctcacactgaaatgcctaccaccttggaaggagctgaagcagcaattaaaaagcaagaggacttcatgaccaccatggacgccaatgaggagaagatcaatgctgtggtggagactggccggaggctggtgagcgatgggaacatcaactcagatcgcatccaggagaaggtggactctattgatgacagacataggaagaatcgtgagacagccagtgaacttttgatgaggttgaaggacaacagggatctacagaaattcctgcaagattgtcaagagctgtctctctggatcaatgagaagatgctcacagcccaggacatgtcttacgatgaagccagaaatctgcacagtaaatggttgaagcatcaagcatttatggcagaacttgcatccaacaaagaatggcttgacaaaatcgagaaggaaggaatgcagctcatttcagaaaagcctgagacggaagctgtggtgaaggagaaactcactggtttacataaaatgtgggaagtccttgaatccactacccagacaaaggcccagcggctctttgatgcaaacaaggccgaacttttcacccagagctgtgcagatctagacaaatggctgcacggcctggagagtcagattcagtctgatgactatggcaaacacctgaccagtgtcaatatcctgctgaaaaagcaacagatgctggagaatcagatggaagtgcggaagaaggagatcgaagagctccaaagccaagcccaggccctgagtcaggaagggaagagcaccgacgaggtagacagcaagcgcctcaccgtgcagaccaagttcatggagttgctggagcccttgaacgagaggaagcataacctgctggcctccaaagagatccatcagttcaacagggatgtggaggacgagatcttgtgggttggagagaggatgcctttggcaacttccacggatcatggccacaacctccagactgtgcagctgttaataaagaaaaatcagaccctccagaaagaaatccaggggcaccagcctcgcattgacgacatctttgagaggagccaaaacatcgtcactgacagcagcagcctcagcgctgaggccatcagacagaggcttgccgacctgaagcagctgtggggtctcctcattgaggagacagagaaacgccacaggcggctggaggaggcgcacagggcccagcagtactactttgacgctgctgaggccgaagcctggatgagcgagcaggagctgtacatgatgtcagaggagaaggccaaggatgagcagagtgctgtctccatgttgaagaagcaccagatcttagaacaagctgtggaggactatgcagagaccgtgcatcagctctccaagaccagccgggccctggtggccgacagccatcctgaaagtgagcgcattagcatgcggcagtccaaagtggataaactgtacgctggtctgaaagaccttgctgaagagagaagaggcaagctggatgagagacacaggttattccagctcaaccgggaggtggacgacctggagcagtggatcgctgagagggaggtggtcgcagggtcccatgaactgggacaggactatgagcatgtcacgatgttacaagaacgattccgggagtttgcccgagacaccgggaacattgggcaggagcgcgtggacacggtcaatcacctggcagatgagctcatcaactctggacattcagatgccgccaccatcgctgaatggaaggatggcctcaatgaagcctgggccgacctcctggagctcattgacacaagaacacagattcttgccgcttcctatgaactgcacaagttttaccacgatgccaaggagatctttgggcgtatacaggacaaacacaagaaactccctgaggagcttgggagagatcagaacacagtggagaccttacagagaatgcacactacatttgagcatgacatccaggctctgggcacacaggtgaggcagctgcaggaggatgcagcccgcctccaggcggcctatgcgggtgacaaggccgacgatatccagaagcgcgagaacgaggtcctggaagcctggaagtccctcctggacgcctgtgagagccgcagggtgcggctggtggacacaggggacaagttccgcttcttcagcatggtgcgcgacctcatgctctggatggaggatgtcatccggcagatcgaggcccaggagaagccaagggatgtatcatctgttgaactcttaatgaataatcatcaaggcatcaaagctgaaattgatgcacgtaatgacagtttcacaacctgcattgaacttgggaaatccctgttggcgagaaaacactatgcatctgaggagatcaaggaaaaattactgcagttgacggaaaagaggaaagaaatgatcgacaagtgggaagaccgatgggaatggttaagactgattctggaggtccatcagttctcaagagacgccagtgtggccgaggcctggctgcttggacaggagccgtacctatccagccgagagataggccagagcgtggacgaggtggagaagctcatcaagcgccacgaggcatttgaaaagtctgcagcaacctgggatgagaggttctctgccctggaaaggctgactacattggagttactggaagtgcgcagacagcaagaggaagaggagaggaagaggcggccgccttctcccgagccgagcacgaaggtttcagaggaagccgagtcccagcagcagtgggatacttcaaaaggagaacaagtttcccaaaacggtttgccagctgaacagggatctccacggatggcagaaacggtggacacaagcgaaatggtcaacggcgctacagaacaaaggacgagctctaaagagtccagccccatcccctccccgacctctgatcgtaaagccaagactgccctcccagcccagagtgccgccaccttaccagccagaacccaggagacaccttcggcccagatggaaggcttcctcaatcggaaacacgagtgggaggcccacaataagaaagcctcaagcaggtcctggcacaatgtttattgtgtcataaataaccaagaaatgggtttctacaaagatgcaaagactgctgcttctggaattccctaccacagcgaggtccctgtgagtttgaaagaagctgtctgcgaagtggcccttgattacaaaaagaagaaacacgtattcaagctaagactaaatgatggcaatgagtacctcttccaagccaaagacgatgaggaaatgaacacatggatccaggctatctcttccgccatctcctctgataaacacgaggtgtctgccagcacccagagcacgccagcatccagccgcgcgcagaccctccccaccagcgtcgtcaccatcaccagcgagtccagtcccggcaagcgggaaaaggacaaagagaaagacaaagagaagcggttcagcctttttggcaaaaagaaatgaactcctttccttcacctcctgcccttctcttaccttttcagtgaaattccagcatgcaagctcagaaccaacacattactctctgtgcctaatgttcctcaatgtggttgatttatttttttttttaatttatagagcatttcggggggggtgggg

SEQ ID NO: 747 - protein, 2364 aa, Homo sapiens
MTTTVATDYDNIEIQQQYSDVNNRWDVDDWDNENSSARLFERSRIKALADEREAVQKKTFTKWVNSHLARVSCRITDLYTDLRDGRMLIKLLEVLSGERLPKPTKGRMRIHCLENVDKALQFLKEQRVHLENMGSHDIVDGNHRLTLGLIWTIILRFQIQDISVETEDNKEKKSAKDALLLWCQMKTAGYPNVNIHNFTTSWRDGMAFNALIHKHRPDLIDFDKLKKSNAHYNLQNAFNLAEQHLGLTKLLDPEDISVDHPDEKSIITYVVTYYHYFSKMKALAVEGKRIGKVLDNAIETEKMIEKYESLASDLLEWIEQTIIILNNRKFANSLVGVQQQLQAFNTYRTVEKPPKFTEKGNLEVLLFTIQSKMRANNQKVYMPREGKLISDINKAWERLEKAEHERELALRNELIRQEKLEQLARRFDRKAAMRETWLSENQRLVSQDNFGFDLPAVEAATKKHEAIETDIAAYEERVQAVVAVARELEAENYHDIKRITARKDNVIRLWEYLLELLRARRQRLEMNLGLQKIFQEMLYIMDWMDEMKVLVLSQDYGKHLLGVEDLLQKHTLVEADIGIQAERVRGVNASAQKFATDGEGYKPCDPQVIRDRVAHMEFCYQELCQLAAERRARLEESRRLWKFFWEMAEEEGWIREKEKILSSDDYGKDLTSVMRLLSKHRAFEDEMSGRSGHFEQAIKEGEDMIAEEHFGSEKIRERIIYIREQWANLEQLSAIRKKRLEEASLLHQFQADADDIDAWMLDILKIVSSSDVGHDEYSTQSLVKKHKDVAEEIANYRPTLDTLHEQASALPQEHAESPDVRGRLSGIEERYKEVAELTRLRKQALQDTLALYKMFSEADACELWIDEKEQWLNNMQIPEKLEDLEVIQHRFESLEPEMNNQASRVAVVNQIARQLMHSGHPSEKEIKAQQDKLNTRWSQFRELVDRKKDALLSALSIQNYHLECNETKSWIREKTKVIESTQDLGNDLAGVMALQRKLTGMERDLVAIEAKLSDLQKEAEKLESEHPDQAQAILSRLAEISDVWEEMKTTLKNREASLGEASKLQQFLRDLDDFQSWLSRTQTAIASEDMPNTLTEAEKLLTQHENIKNEIDNYEEDYQKMRDMGEMVTQGQTDAQYMFLRQRLQALDTGWNELHKMWENRQNLLSQSHAYQQFLRDTKQAEAFLNNQEYVLAHTEMPTTLEGAEAAIKKQEDFMTTMDANEEKINAVVETGRRLVSDGNINSDRIQEKVDSIDDRHRKNRETASELLMRLKDNRDLQKFLQDCQELSLWINEKMLTAQDMSYDEARNLHSKWLKHQAFMAELASNKEWLDKIEKEGMQLISEKPETEAVVKEKLTGLHKMWEVLESTTQTKAQRLFDANKAELFTQSCADLDKWLHGLESQIQSDDYGKHLTSVNILLKKQQMLENQMEVRKKEIEELQSQAQALSQEGKSTDEVDSKRLTVQTKFMELLEPLNERKHNLLASKEIHQFNRDVEDEILWVGERMPLATSTDHGHNLQTVQLLIKKNQTLQKEIQGHQPRIDDIFERSQNIVTDSSSLSAEAIRQRLADLKQLWGLLIEETEKRHRRLEEAHRAQQYYFDAAEAEAWMSEQELYMMSEEKAKDEQSAVSMLKKHQILEQAVEDYAETVHQLSKTSRALVADSHPESERISMRQSKVDKLYAGLKDLAEERRGKLDERHRLFQLNREVDDLEQWIAEREVVAGSHELGQDYEHVTMLQERFREFARDTGNIGQERVDTVNHLADELINSGHSDAATIAEWKDGLNEAWADLLELIDTRTQILAASYELHKFYHDAKEIFGRIQDKHKKLPEELGRDQNTVETLQRMHTTFEHDIQALGTQVRQLQEDAARLQAAYAGDKADDIQKRENEVLEAWKSLLDACESRRVRLVDTGDKFRFFSMVRDLMLWMEDVIRQIEAQEKPRDVSSVELLMNNHQGIKAEIDARNDSFTTCIELGKSLLARKHYASEEIKEKLLQLTEKRKEMIDKWEDRWEWLRLILEVHQFSRDASVAEAWLLGQEPYLSSREIGQSVDEVEKLIKRHEAFEKSAATWDERFSALERLTTLELLEVRRQQEEEERKRRPPSPEPSTKVSEEAESQQQWDTSKGEQVSQNGLPAEQGSPRMAETVDTSEMVNGATEQRTSSKESSPIPSPTSDRKAKTALPAQSAATLPARTQETPSAQMEGFLNRKHEWEAHNKKASSRSWHNVYCVINNQEMGFYKDAKTAASGIPYHSEVPVSLKEAVCEVALDYKKKKHVFKLRLNDGNEYLFQAKDDEEMNTWIQAISSAISSDKHEVSASTQSTPASSRAQTLPTSVVTITSESSPGKREKDKEKDKEKRFSLFGKKK

SEQ ID NO: 748 - DNA, 412 bp, Homo sapiens
cacaaccgcccgcggctctgagacgcggccccggcggcggcggcagcagctgcagcatcatctccaccctccagccatggaagacgaggaggaagaagaggaggaggaagaggaggacgaggacgaagacctggaggagctggaggtgctggagaggaagcccgccgccgggctgtccgcggccccagtgcccaccgcccctgccgccggcgcgcccctgatggacttcggaaatgacttcgtgccgccggcgccccggggacccctgccggccgctccccccgtcgccccggagcggcagccgtcttgggacccgagcccggtgtcgtcgaccgtgcccgcgccatccccgctgtctgctgccgcagtctcgccctccaagctccctgaggacgacgagcctccggcccgg

SEQ ID NO: 749 - DNA, 551 bp, Homo sapiens
ttcttccttttcgatccgccatctgcggtggagccgccaccaaaatgcagattttcgtgaaaacccttacggggaagaccatcaccctcgaggttgaaccctcggatacgatagaaaatgtaaaggccaagatccaggataaggaaggaattcctcctgatcagcagagactgatctttgctggcaagcagctggaagatggacgtactttgtctgactacaatattcaaaaggagtctactcttcatcttgtgttgagacttcgtggtggtgctaagaaaaggaagaagaagtcttacaccactcccaagaagaataagcacaagagaaagaaggttaagctggctgtcctgaaatattataaggtggatgagaatggcaaaattagtcgccttcgtcgagagtgcccttctgatgaatgtggtgctggggtgtttatggcaagtcactttgacagacattattgtggcaaatgttgtctgacttactgtttcaacaaaccagaagacaagtaactgtatgagttaataaaagacatgaactaacaaaaa

SEQ ID NO: 750 - protein, 156 aa, Homo sapiens
MQIFVKTLTGKTITLEVEPSDTIENVKAKIQDKEGIPPDQQRLIFAGKQLEDGRTLSDYNIQKESTLHLVLRLRGGAKKRKKKSYTTPKKNKHKRKKVKLAVLKYYKVDENGKISRLRRECPSDECGAGVFMASHFDRHYCGKCCLTYCFNKPEDK

SEQ ID NO: 751 - DNA, 2481 bp, Homo sapiens
ggcacgagcagaatccaggggcccggggctgtagattccttgacaaggatatcctagcggcgaaacaacaccgtactgggagtcagaacgtctgggttctagtcttgactgccattaactagcggtatgacattggagaagcttttttgacccttctggatttccgtttccttttctgtaaaatgaggagcttggaagatccggaaaatgaggcccataggaaacaagtgacttgctgagtccagataacactgactgtcagagagaaacatgaaccagaagctactgaagttggagaacttgctacgatttcacactatttataggcaactgcacagtctgtgtcaaagaagagcattaagacagtggaggcatgggttttcatctgcttaccctgtgtggacagctcaactgtgtgcctggccctggccaacagatgtgctcaatggggctgctttatctcagtataggcttctagtaacaaaaaaggaagaaggaccatggaaatctcagttatcttcaacaaaatctaaaaaggtggtagaagtatggattggaatgactattgaggaactggccagggcaatggaaaaaaacacagattatgtatatgaagctttattgaacactgatattgacatagattcactggaagcagactcacatttagatgaagtctggatcaaagaagtgataacgaaggcagggatgaagttaaagtggagtaaattaaaacaggacaaagtcagaaaaaataaagatgctgtaagaaggccccaggcagatccagctttattaaccccaaggtccccagttgttactataatgggccatgttgatcacgggaaaacgacattacttgacaaatttcgaaaaactcaagtggcagcagtggaaactggaggcatcactcagcacattggtgcctttcttgtctctctgccttctggggaaaagataacttttcttgatactccaggacatgctgctttctcagcaatgagagccagaggtgctcaggtcactgacattgtcgtattggttgtagctgcagatgatggagtgatgaaacaaactgtagaatctattcagcatgccaaagatgcacaggttcctattatccttgccgtaaataaatgtgacaaagctgaggctgatcctgagaaagtgaaaaaagagctgctggcttacgatgtggtatgtgaagattatggaggtgatgttcaagcagtgcctgtctccgcacttacgggcgataatctgatggctttggcagaagcaacagttgctcttgcagaaatgttagaattgaaagcagatcccaatggtccagtggaaggaacagtaatagagtctttcacagacaaaggaagaggtcttgttactacagctataattcaaagaggaactttaagaaaaggctctgttctggttgctggaaaatgttgggcaaaagtacgcttaatgtttgatgaaaatggaaaaacaattgatgaggcctatcccagcatgccagtgggaattacaggctggagagaccttccttctgcaggagaagaaattcttgaagtagaatctgagccaagggcacgtgaagttgttgactggaggaaatatgaacaagaacaggagaaaggtcaggaggatctgaaaataatagaagaaaagcgaaaggaacacaaagaagcacatcagaaagcccgtgagaagtatggccatctactgtggaagaagagatcaattctacggtttttagaaagaaaagaacaaatacccttaaagccaaaagagaaaagggaaagagattcaaatgtactttctgtgattattaaaggtgatgttgatggttctgttgaggccattttgaacattatagatacctatgatgcttcacacgagtgtgaactagaattagtacattttggagtgggtgatataagtgcaaatgatgttaaccttgctgaaacatttgatggtgttatatatggctttaatgtgaatgcaggcaatgttatccaacagtcagctgcaaaaaaaggagtaaaaattaaacttcacaaaataatttaccgtcttgttgaagatttgcaagaggaactgagcagcagattaccctgtgctgtggaagagcacccagtaggtgaggcatctatactagctaccttctctgtaacagaagggaagaaaaaagttcctgtggctggctgcagagtccaaaagggacagttagaaaaacaaaaaaaatttaaactaacccgtaatggacatgtaatttggaagggctcattaacctcattgaaacaccataaagatgacatttcaattgtcaaaacgggaatggattgtggtctcagtttagatgaagacaatatggaatttcaagtgggagacagaattgtttgttatgaagaaaagcaaattcaagccaagacttcttgggatccaggattttaaaattacattaaaaatgtaaataactca

SEQ ID NO: 752 - protein, 727 aa, Homo sapiens
MNQKLLKLENLLRFHTIYRQLHSLCQRRALRQWRHGFSSAYPVWTAQLCAWPWPTDVLNGAALSQYRLLVTKKEEGPWKSQLSSTKSKKVVEVWIGMTIEELARAMEKNTDYVYEALLNTDIDIDSLEADSHLDEVWIKEVITKAGMKLKWSKLKQDKVRKNKDAVRRPQADPALLTPRSPVVTIMGHVDHGKTTLLDKFRKTQVAAVETGGITQHIGAFLVSLPSGEKITFLDTPGHAAFSAMRARGAQVTDIVVLVVAADDGVMKQTVESIQHAKDAQVPIILAVNKCDKAEADPEKVKKELLAYDVVCEDYGGDVQAVPVSALTGDNLMALAEATVALAEMLELKADPNGPVEGTVIESFTDKGRGLVTTAIIQRGTLRKGSVLVAGKCWAKVRLMFDENGKTIDEAYPSMPVGITGWRDLPSAGEEILEVESEPRAREVVDWRKYEQEQEKGQEDLKIIEEKRKEHKEAHQKAREKYGHLLWKKRSILRFLERKEQIPLKPKEKRERDSNVLSVIIKGDVDGSVEAILNIIDTYDASHECELELVHFGVGDISANDVNLAETFDGVIYGFNVNAGNVIQQSAAKKGVKIKLHKIIYRLVEDLQEELSSRLPCAVEEHPVGEASILATFSVTEGKKKVPVAGCRVQKGQLEKQKKFKLTRNGHVIWKGSLTSLKHHKDDISIVKTGMDCGLSLDEDNMEFQVGDRIVCYEEKQIQAKTSWDPGF

SEQ ID NO: 753 - DNA, 3271 bp, Homo sapiens
gcgtgccgggtgtcatggcggcctgcaggtactgctgctcgtgcctccggctccggcccctgagcgatggtcctttccttctgccacggcgggatcgggcactcacccagttgcaagtgcgagcactatggagtagcgcagggtctcgagctgtggccgtggacttaggcaacaggaaattagaaatatcttctggaaagctggccagatttgcagatggctctgctgtagtacagtcaggtgacactgcagtaatggtcacagcggtcagtaaaacaaaaccttccccttcccagtttatgcctttggtggttgactacagacaaaaagctgctgcagcaggtagaattcccacaaactatctgagaagagagattggtacttctgataaagaaattctaacaagtcgaataatagatcgttcaattagaccgctctttccagctggctacttctatgatacacaggttctgtgtaatctgttagcagtagatggtgtaaatgagcctgatgtcctagcaattaatggcgcttccgtagccctctcattatcagatattccttggaatggacctgttggggcagtacgaataggaataattgatggagaatatgttgttaacccaacaagaaaagaaatgtcttctagtactttaaatttagtggttgctggagcacctaaaagtcagattgtcatgttggaagcctctgcagagaacattttacagcaggacttttgccatgctatcaaagtgggagtgaaatatacccaacaaataattcagggcattcagcagttggtaaaagaaactggtgttaccaagaggacacctcagaagttatttaccccttcgccagagattgtgaaatatactcataaacttgctatggagagactctatgcagtttttacagattacgagcatgacaaagtttccagagatgaagctgttaacaaaataagattagatacggaggaacaactaaaagaaaaatttccagaagccgatccatatgaaataatagaatccttcaatgttgttgcaaaggaagtttttagaagtattgttttgaatgaatacaaaaggtgcgatggtcgggatttgacttcacttaggaatgtaagttgtgaggtagatatgtttaaaacccttcatggatcagcattatttcaaagaggacaaacacaggtgctttgtaccgttacatttgattcattagaatctggtattaagtcagatcaagttataacagctataaatgggataaaagataaaaatttcatgctgcactacgagtttcctccttatgcaactaatgaaattggcaaagtcactggtttaaatagaagagaacttgggcatggtgctcttgctgagaaagctttgtatcctgttattccccgagattttcctttcaccataagagttacatctgaagtcctagagtcaaatgggtcatcttctatggcatctgcatgtggcggaagtttagcattaatggattcaggggttccaatttcatctgctgttgcaggcgtagcaataggattggtcaccaaaaccgatcctgagaagggtgaaatagaagattatcgtttgctgacagatattttgggaattgaagattacaatggtgacatggacttcaaaatagctggcactaataaaggaataactgcattacaggctgatattaaattacctggaataccaataaaaattgtgatggaggctattcaacaagcttcagtggcaaaaaaggagatattacagatcatgaacaaaactatttcaaaacctcgagcatctagaaaagaaaatggacctgttgtagaaactgttcaggttccattatcaaaacgagcaaaatttgttggacctggtggctataacttaaaaaaacttcaggctgaaacaggtgtaactattagtcaggtggatgaagaaacgttttctgtatttgcaccaacacccagtgctatgcatgaggcaagagacttcattactgaaatctgcaaggatgatcaggagcagcaattagaatttggagcagtatataccgccacaataactgaaatcagagatactggtgtaatggtaaaattatatccaaatatgactgcggtactgcttcataacacacaacttgatcaacgaaagattaaacatcctactgccctaggattagaagttggccaagaaattcaggtgaaatactttggacgtgacccagccgatggaagaatgaggctttctcgaaaagtgcttcagtcgccagctacaaccgtggtcagaactttgaatgacagaagtagtattgtaatgggagaacctatttcacagtcatcatctaattctcagtgatttttttttttaaagagaattctagaattctattttgtctagggtgatgtgctgtagagcaacattttagtagtatcttccattgtgtagatttctatataatataaatacattttaattatttgtactaaaatgctcatttacatgtgccatttttttaattcgagtaacccatatttgtttaattgtatttacattataaatcaagaaatatttattattaaaagtaagtcatttatacatcttagaaaaaattacatagttttgtttttacaattctgaaatatatgaaaaacttagatagaatatgtcatatgttattataacagatctcttcctacatcttatttttcttctttgtatacagtagtgacagtttaccttcagtcatcctacaggtcacctctgtgcccaacaactttacttgcctacaacggttcacaaactggaacaggccatattcaaagccagtgcctatttcttcagaactgttaacagatatagtgagttgagggagctaatctgatacacttttgataatataatgcctttcaaattagttaccaaatcataaacagagtggaataaatataaatgagattctaactaggatgaatgtggtagtaatgatgtatatttttcaaatttacctaaacagaaagattattggctaaggcaggcggatcatgagatcaggagatcgagaccatcctggctaacacggtgaaaccccgtctctactaaaagtgcaaaaattagccgggcgtggtggcgcatgcctgtaatcctagctactcaggaggctgaggcagaagaatcacttcaacccaggaggtggaggttgtagtgagccgagattgcgccattgcactccagctcaggcaacaagagcaaaactccgtctc

SEQ ID NO: 754 - protein, 783 aa, Homo sapiens
MAACRYCCSCLRLRPLSDGPFLLPRRDRALTQLQVRALWSSAGSRAVAVDLGNRKLEISSGKLARFADGSAVVQSGDTAVMVTAVSKTKPSPSQFMPLVVDYRQKAAAAGRIPTNYLRREIGTSDKEILTSRIIDRSIRPLFPAGYFYDTQVLCNLLAVDGVNEPDVLAINGASVALSLSDIPWNGPVGAVRIGIIDGEYVVNPTRKEMSSSTLNLVVAGAPKSQIVMLEASAENILQQDFCHAIKVGVKYTQQIIQGIQQLVKETGVTKRTPQKLFTPSPEIVKYTHKLAMERLYAVFTDYEHDKVSRDEAVNKIRLDTEEQLKEKFPEADPYEIIESFNVVAKEVFRSIVLNEYKRCDGRDLTSLRNVSCEVDMFKTLHGSALFQRGQTQVLCTVTFDSLESGIKSDQVITAINGIKDKNFMLHYEFPPYATNEIGKVTGLNRRELGHGALAEKALYPVIPRDFPFTIRVTSEVLESNGSSSMASACGGSLALMDSGVPISSAVAGVAIGLVTKTDPEKGEIEDYRLLTDILGIEDYNGDMDFKIAGTNKGITALQADIKLPGIPIKIVMEAIQQASVAKKEILQIMNKTISKPRASRKENGPVVETVQVPLSKRAKFVGPGGYNLKKLQAETGVTISQVDEETFSVFAPTPSAMHEARDFITEICKDDQEQQLEFGAVYTATITEIRDTGVMVKLYPNMTAVLLHNTQLDQRKIKHPTALGLEVGQEIQVKYFGRDPADGRMRLSRKVLQSPATTVVRTLNDRSSIVMGEPISQSSSNSQ

SEQ ID NO: 755 - DNA, 1234 bp, Homo sapiens
gacaagatggccacaccggcggtaccagcaagtgctcctccggccacgccagccccagtcccggcggcggtcccagcctctgccccagcctcagttccagcgccaacgccagcaccggctgcggctccggttcccgctgcggctccagcctcatcctcagaccctgcggcagcatcggctacaactgcggctcctggccagaccccggcctcagcgcaagctccagcgcagaccccagcgcccgctctgcctggtcctgctcttccagggcccttccccggcggccgcgtggtcaggctgcacccagtcattttggcctccattgtggacagctacgagagacgcaacgagggtgctgcccgagttatcgggaccctgttgggaactgtcgacaaacactcagtggaggtcaccaattgcttttcagtgccgcacaatgagtcagaagatgaagtggctgttgacatggaatttgctaagaatatgtatgaactgcataaaaaagtttctccaaatgagctcatcctgggctggtacgctacaggccatgacatcacagagcactctgtgctgatccatgagtactacagccgagaggcccccaaccccatccacctcactgtggacacaagtctccagaacggccgcatgagcatcaaagcctatgtcagcactttaatgggtgtccctgggaggaccatgggagtgatgttcacacctctgacagtgaaatacgcatactatgacactgaacgcatcggagttgagctgatcatgaagacctgctttagccccaacagagtgattggactcttaagtgacttgcagcaagtaggaggggcatcagctcgcatccaggatgccctgagtacagtgttgcaatatgcagaggatgtactgtctggaaaggtgtcagctgacaatactgtgggccgcttcctgatgagcctggttaaccgagtaccgaaaatagttcccgatgactttgagaccatgctcaacagcaacatcaatgaccttttgatggtgacctacctggccaacctcacacagtcacagattgccctcaatgaaaaacttgtaaacctgtgaatggaccccaagcagtacacttgctggtctaggtattaaccccaggactcagaagtgaaggagaaatgggttttttgtggtcttgagtcacactgagatagtcagttgtgtgtgactctaataaacggagcctaccttttgt

SEQ ID NO: 756 - protein, 361 aa, Homo sapiens
MATPAVPASAPPATPAPVPAAVPASAPASVPAPTPAPAAAPVPAAAPASSSDPAAASATTAAPGQTPASAQAPAQTPAPALPGPALPGPFPGGRVVRLHPVILASIVDSYERRNEGAARVIGTLLGTVDKHSVEVTNCFSVPHNESEDEVAVDMEFAKNMYELHKKVSPNELILGWYATGHDITEHSVLIHEYYSREAPNPIHLTVDTSLQNGRMSIKAYVSTLMGVPGRTMGVMFTPLTVKYAYYDTERIGVELIMKTCFSPNRVIGLLSDLQQVGGASARIQDALSTVLQYAEDVLSGKVSADNTVGRFLMSLVNRVPKIVPDDFETMLNSNINDLLMVTYLANLTQSQIALNEKLVNL

SEQ ID NO: 757 - DNA, 1710 bp, Homo sapiens
gttggagactcgattgttgatgacagcggaagaatgataacaaaatgccggagcgagatagtgagccgttctccaaccctttggcccctgatggccacgatgtggatgatcctcactccttccaccaatcaaaactcaccaatgaagacttcaggaaacttctcatgacccccagggctgcacctacctctgcaccaccttctaagtcacgtcaccatgagatgccaagggagtacaatgaggatgaagacccagctgcacgaaggaggaaaaagaaaagttattatgctaagctacgccaacaagaaattgagagagagagagagctagcagagaagtaccggggtcgtgccaaggaacggagagatggagtgaacaaagattatgaagaaaccgagcttatcaacaccacagctaactacagggctgttggccccactactaaggcggacaaatcagctgcagagaagagaagacagttgatccaggagtccaaattcttgggtggtgacatggaacacacccatttggtgaaaggcttggattttgctctgcttcaaaaggtacgagctgagattgccagcaaagagaaagaggaagaggaactgatggaaaagccccagaaagaaaccaagaaagatgaggatcctgaaaataaaattgaatttaaaacacgtctgggccgcaatgtttaccgagtgctttttaagaacaagcatataagcggaatgagttgttcctgccgggccgcatggcctatgtggtaggcctggatgatgagtaagctgacacagatatccccaccactcttatccgcagcaaggttgactgccccaccatggaggcccagaccatactgaccacaaatgatattgtcattagcaagcttacccagttgctttcatacctgaggcagggaacccgtaacaagaagcttaagaagaaggataaagggaagctggaagagaagaaacctgctgaggctgacaggagtattttcgaagacattggggattatacaccctccacaatcaagacaccttgggacaaggagcgggagagatatcgggaacgggagcgtgatcaggagacagagaccgtgaccgagagcgagagcgagaacgagatcaggagcgagaacgagatcgggaacgagagagagaagaggaaaagaagagacacagctactttgagaagccaaaagtacatgatgagtccgtggacgttgacaaaggacctgggtcggccaaggagttgatcaagtccatcaatgaaaagtttgctgggtctgctggctgggaaggcacagaatcgctgaaaattgcagaagacaaaaagcagctgagagatttctttggcatgtccaacagttatgcagagtgctatccagccacgatggatgacatggctgtggatagtgatgaggaggtggattatagcaaaatggaccagggtaacaagaagagaaccttaagccgttgggactttgatacccaggaagactacagcgagtatatgaacaacaaagaggctttgcccaaggctgcattccagtatggtatcaaaatgtctgaagggcggaaaaccagacgcttcaaggaaaccaatgacaaagcagcgctcgattgccagtggaagattagtgcaatcattgagaagaggaagaagatggaagctgatggggttgaagtcaaaagaccaaaatactaa

SEQ ID NO: 758 - protein, 240 aa, Homo sapiens [sequence omitted]

SEQ ID NO: 759 - DNA, 1883 bp, Homo sapiens
atgcccgagaatgtggcaccccggagcggggcgactgccggggctgccggcggccgcgggaaaggcgcctatcaggaccgcgacaagccagcccagatccgcttcagcaacatttccgccgccaaagcggttgctgatgctattagaacaagccttggaccaaaaggaatggataaaatgattcaagatggaaaaggtgatgtaaccattacaaatgatggtgctaccattctgaaacaaatgcaagtattacatccagcagccagaatgctggtggagctgtctaaggctcaagatatagaagcaggagatggcaccacatcagtagtcatcattgctggctccctcttagattcttgtaccaagcttcttcagaaagggattcatccaaccatcatttctgagtcattccagaaggccctggaaaagggcattgaaatcttgactgacatgtctcgacctgtggaactgagtgacagagaaactttgttaaatagtgcaaccacttcactgaactcaaaggtggtttctcagtattcaagtctgctttctccaatgagtgtaaatgcagtgatgaaagtgattgacccagccacagccaccagtgtagatcttagagatattaaaatagttaagaagcttggtgggacaattgatgactgtgagttggtggaagggctggttctcacccaaaaagtgtcaaattctggcataaccagagttgaaaaggccaagattgggcttattcagttttgcttatctgctcccaaaacagacatggataatcaaatagtggtttctgactatgcccagatggaccgagtgctgcgagaagagagagcctatattttaaatttagtgaagcaaattaaaaaaacaggatgtaatgtccttctcatacagaaatctattctaagagatgctcttagtgatcttgcattacactttctgaataaaatgaagatcatggtgattaaggatattgaaagagaagacattgaattcatttgtaagacaattggaaccaagccagttgctcatattgaccaatttactgctgacatgctgggttctgctgagttagctgaggaggtcaatttaaatggttctggcaaactgctcaagattacaggctgtgccagccctggaaaaacagttacaattgttgttcgtggttctaacaaactggtgattgaagaagctgagcgctccattcatgatgccctatgtgttattcgttgtttagtgaagaagagggctcttattgcaggaggtggtgctccagaaatagagttggccctagcattaactgaatattcacgaacactgagtggtatggaatcctactgcgttcgtgcttttgcagatgctatggaggtcattccatctacactagctgaaaatgccggcctgaatcccatttctacagtaacagaactaagaaaccggcatgcccagggagaaaaaactgcaggcattaatgtccgaaagggtggtatttccaacattttggaggaactggttgtccagcctctgttggtatcagtcagtgctctgactcttgcaactgaaactgttcggagcattctgaaaatagatgatgtggtaaacactcgataatctggataactgactagcaccattatgatcaccagtattgtggctggaatggaagaagatcaccttggtgttccttgtttggaagattatttcctctgaatttctgggcttggtcttccagttggcatttgcctgaagttgtattgaaacaatttaatgaaaatattaaatatttggtttcaaaaggcagatttatcttctcccaacattctgttatttctgatacttttgaaaaactaataaaaactaataaaagaagcgta

SEQ ID NO: 760 - protein, 539 aa, Homo sapiens
MPENVAPRSGATAGAAGGRGKGAYQDRDKPAQIRFSNISAAKAVADAIRTSLGPKGMDKMIQDGKGDVTITNDGATILKQMQVLHPAARMLVELSKAQDIEAGDGTTSVVIIAGSLLDSCTKLLQKGIHPTIISESFQKALEKGIEILTDMSRPVELSDRETLLNSATTSLNSKVVSQYSSLLSPMSVNAVMKVIDPATATSVDLRDIKIVKKLGGTIDDCELVEGLVLTQKVSNSGITRVEKAKIGLIQFCLSAPKTDMDNQIVVSDYAQMDRVLREERAYILNLVKQIKKTGCNVLLIQKSILRDALSDLALHFLNKMKIMVIKDIEREDIEFICKTIGTKPVAHIDQFTADMLGSAELAEEVNLNGSGKLLKITGCASPGKTVTIVVRGSNKLVIEEAERSIHDALCVIRCLVKKRALIAGGGAPEIELALALTEYSRTLSGMESYCVRAFADAMEVIPSTLAENAGLNPISTVTELRNRHAQGEKTAGINVRKGGISNILEELVVQPLLVSVSALTLATETVRSILKIDDVVNTR

SEQ ID NO: 761 - DNA, 4148 bp, Homo sapiens
aggaaggaaggagcagttggttcaatctctggtaatctatgccagcaattatgacaatgttagcagaccatgcagctcgtcagctgcttgatttcagccaaaaactggatatcaacttattagataatgtggtgaattgcttataccatggagaaggagcccagcaaagaatggctcaagaagtactgacacatttaaaggagcatcctgatgcttggacaagagtcgacacaattttggaattttctcagaatatgaatacgaaatactatggactacaaattttggaaaatgtgataaaaacaaggtggaagattcttccaaggaaccagtgcgaaggaataaaaaaatacgttgttggcctcattatcaagacgtcatctgacccaacttgtgtagagaaagaaaaggtgtatatcggaaaattaaatatgatccttgttcagatactgaaacaagaatggcccaaacattggccaacttttatcagtgatattgttggagcaagtaggaccagcgaaagtctctgtcaaaataatatggtgattcttaaactcttgagtgaagaagtatttgatttctctagtggacagataacccaagtcaaatctaagcatttaaaagacagcatgtgcaatgaattctcacagatatttcaactgtgtcagtttgtaatggaaaattctcaaaatgctccacttgtacatgcaaccttggaaacattgctcagatttctgaactggattcccctgggatatatttttgagaccaaattaatcagcacattgatttataagttcctgaatgttccaatgtttcgaaatgtctctctgaagtgcctcactgagattgctggtgtgagtgtaagccaatatgaagaacaatttgtaacactatttactctgacaatgatgcaactaaagcagatgcttcctttaaataccaatattcgacttgcgtactcaaatggaaaagatgatgaacagaacttcattcaaaatctcagtttgtttctctgcacctttcttaaggaacatgatcaacttatagaaaaaagattaaatctcagggaaactcttatggaggcccttcattatatgttgttggtatctgaagtagaagaaactgaaatctttaaaatttgtcttgaatactggaatcatttggctgctgaactctatagagagagtccattctctacatctgcctctccgttgctttctggaagtcaacattttgatgttcctcccaggagacagctatatttgcccatgttattcaaggtccgtttattaatggttagtcgaatggctaaaccagaggaagtattggttgtagagaatgatcaaggagaagttgtgagagaattcatgaaggatacagattccataaatttgtataagaatatgagggaaacattggtttatcttactcatctggattatgtagatacagaaagaataatgacagagaagcttcacaatcaagtgaatggtacagagtggtcatggaaaaatttgaatacattgtgttgggcaataggctccattagtggagcaatgcatgaagaggacgaaaaacgatttcttgttactgttataaaggatctattaggattatgtgaacagaaaagaggcaaagataataaagctattattgcatcaaatatcatgtacatagtaggtcaatacccacgttttttgagagctcactggaaatttctgaagactgtagttaacaagctgttcgaattcatgcatgagacccatgatggagtccaggatatggcttgtgatactttcattaaaatagcccaaaaatgccgcaggcatttcgttcaggttcaggttggagaagtgatgccatttattgatgaaattttgaacaacattaacactattatttgtgatcttcagcctcaacaggttcatacgttttatgaagctgtggggtacatgattggtgcacaaacagatcaaacagtacaagagcacttgatagaaaagtacatgttactccctaatcaagtgtgggatagtataatccagcaggcaaccaaaaatgtggatatactgaaagatcctgaaacagtcaagcagcttggtagcattttgaaaacaaatgtgagagcctgcaaagctgttggacacccctttgtaattcagcttggaagaatttatttagatatgcttaatgtatacaagtgcctcagtgaaaatatttctgcagctatccaagctaatggtgaaatggttacaaagcaaccattgattagaagtatgcgaactgtaaaaagggaaactttaaagttaatatctggttgggtgagccgatccaatgatccacagatggtcgctgaaaattttgttccccctctgttggatgcagttctcattgattatcagagaaatgtcccagctgctagagaaccagaagtgcttagtactatggccataattgtcaacaagttagggggacatataacagctgaaatacctcaaatatttgatgctgtttttgaatgcacattgaatatgataaataaggactttgaagaatatcctgaacatagaacgaactttttcttactacttcaggctgtcaattctcattgtttcccagcattccttgctattccacctacacagtttaaacttgttttggattccatcatttgggctttcaaacatactatgaggaatgtcgcagatacgggcttacagatactttttacactcttacaaaatgttgcacaagaagaagctgcagctcagagtttttatcaaacttatttttgtgatattctccagcatatcttttctgttgtgacagacacttcacatactgctggtttaacaatgcatgcatcaattcttgcatatatgtttaatttggttgaagaaggaaaaataagtacatcattaaatcctggaaatccagttaacaaccaaatctttcttcaggaatatgtggctaatctccttaagtcggccttccctcacctacaagatgctcaagtaaagctctttgtgacagggcttttcagcttaaatcaagatattcctgctttcaaggaacatttaagagatttcctagttcaaataaaggaatttgcaggtgaagacacttctgatttgtttttggaagagagagaaatagccctacggcaggctgatgaagagaaacataaacgtcaaatgtctgtccctggcatctttaatccacatgagattccagaagaaatgtgtgattaaaatccaaattcatgctgttttttttctctgcaactccgttagcagaggaaaacagcatgtgggtatttgtcgaccaaaatgatgccaatttgtaaattaaaatgtcacctagtggccctttttcttatgtgtttttttgtataagaaattttctgtgaaatatccttccattgtttaagcttttgttttggtcatctttatttagtttgcatgaagttgaaaattaaggcatttttaaaaattttacttcatgcccatttttgtggctgggctggggggaggaggcaaattcaatttgaacatatacttgtaattctaatgcaaaattatacaatttttcctgtaaacaataccaatttttaattagggagcattttccttctagtctatttcagcctagaagaaaagataatgagtaaaacaaattgcgttgtttaaaggattatagtgctgcattgtctgaagttagcacctcttggactgaatcgtttgtctagactacatgtattacaaagtctctttggcaagattgcagcaagatcatgtgcatatcatcccattgtaaagcgacttcaaaaatatgggaacacagttagttatttttacacagttctttttgtttttgtgtgtgtgtgctgtcgcttgtcgacaacagctttttgttttcctcaatgaggagtgttgctcatttgtgagccttcattaactcgaagtgaaatggttaaaaatatttatcctgttagaataggctgcatctttttaacaactcattaaaaaacaaaacaactctggcttttgagatgacttatactaatttacattgtttaccaagctgtagtgctttaagaacactacttaaaaagcaaaataaacttggtttacatttaaaaaaaa

SEQ ID NO: 762 - protein, 1071 aa, Homo sapiens
MPAIMTMLADHAARQLLDFSQKLDINLLDNVVNCLYHGEGAQQRMAQEVLTHLKEHPDAWTRVDTILEFSQNMNTKYYGLQILENVIKTRWKILPRNQCEGIKKYVVGLIIKTSSDPTCVEKEKVYIGKLNMILVQILKQEWPKHWPTFISDIVGASRTSESLCQNNMVILKLLSEEVFDFSSGQITQVKSKHLKDSMCNEFSQIFQLCQFVMENSQNAPLVHATLETLLRFLNWIPLGYIFETKLISTLIYKFLNVPMFRNVSLKCLTEIAGVSVSQYEEQFVTLFTLTMMQLKQMLPLNTNIRLAYSNGKDDEQNFIQNLSLFLCTFLKEHDQLIEKRLNLRETLMEALHYMLLVSEVEETEIFKICLEYWNHLAAELYRESPFSTSASPLLSGSQHFDVPPRRQLYLPMLFKVRLLMVSRMAKPEEVLVVENDQGEVVREFMKDTDSINLYKNMRETLVYLTHLDYVDTERIMTEKLHNQVNGTEWSWKNLNTLCWAIGSISGAMHEEDEKRFLVTVIKDLLGLCEQKRGKDNKAIIASNIMYIVGQYPRFLRAHWKFLKTVVNKLFEFMHETHDGVQDMACDTFIKIAQKCRRHFVQVQVGEVMPFIDEILNNINTIICDLQPQQVHTFYEAVGYMIGAQTDQTVQEHLIEKYMLLPNQVWDSIIQQATKNVDILKDPETVKQLGSILKTNVRACKAVGHPFVIQLGRIYLDMLNVYKCLSENISAAIQANGEMVTKQPLIRSMRTVKRETLKLISGWVSRSNDPQMVAENFVPPLLDAVLIDYQRNVPAAREPEVLSTMAIIVNKLGGHITAEIPQIFDAVFECTLNMINKDFEEYPEHRTNFFLLLQAVNSHCFPAFLAIPPTQFKLVLDSIIWAFKHTMRNVADTGLQILFTLLQNVAQEEAAAQSFYQTYFCDILQHIFSVVTDTSHTAGLTMHASILAYMFNLVEEGKISTSLNPGNPVNNQIFLQEYVANLLKSAFPHLQDAQVKLFVTGLFSLNQDIPAFKEHLRDFLVQIKEFAGEDTSDLFLEEREIALRQADEEKHKRQMSVPGIFNPHEIPEEMCD

SEQ ID NO: 763 - DNA, 907 bp, Homo sapiens
ggcggcggcagcagctgcttgggcgccgtgcggtggtgactgagctacgagcctggcagcaggtgtgcgccgagccccggcctggcccggcccccgcgtgcctcccaggctccgcacccctgatgctgcgcgggtgctgagcccacttcggccaggacgatggttaagtatttcctgggccagagcgtgctccggagttcctgggaccaagtgttcgccgccttctggcagcggtacccgaatccctatagcaaacatgtcttgacggaagacatagtacaccgggaggtgacccctgaccagaaactgctgtcccggcgactcctgaccaagaccaacagaatgccacgctgggccaagcaactatttcctgccaatgttgctcactcggtgtacatcctggaggactctattgtggacccacagaatcagaccatgactaccttcacctggaacatcaaccacgcccggctgatggtggtggaggaacgatgtgtttactgtgtgaactctgacaacagcggctggactgaaatccgccgggaagcctgggtctcctctagcttatttggtgtctccagagctgtccaggaatttggtcttgcccagttcaaaagcaacgtgaccaagactatgaagggttttgaatatatcttgactaagctgcaaggcgaggccccttccaaaacacttgagacagccaaggaagccaaggagaaggcagaggagacggcactggcagctacagagaaggccaaggacctcgccagcaaggcggccaccaagaagcagcagcagcagcaacagtttgtgtagccagcccaccaccaccacagcaacccagacagctaggcttagcccctctgccctccctccattgtactttatcattaaaaatcaacttcca

SEQ ID NO: 764 - DNA, 1268 bp, Homo sapiens
ctgactctctgaggctcattttgcagttgttgaaattgtccccgcagttttcaatcatgtctgaaccaatcagagtccttgtgactggagcagctggtcaaattgcatattcactgctgtacagtattggaaatggatctgtctttggtaaagatcagcctataattcttgtgctgttggatatcacccccatgatgggtgtcctggacggtgtcctaatggaactgcaagactgtgcccttcccctcctgaaagatgtcatcgcaacagataaagaagacgttgccttcaaagacctggatgtggccattcttgtgggctccatgccaagaagggaaggcatggagagaaaagatttactgaaagcaaatgtgaaaatcttcaaatcccagggtgcagccttagataaatacgccaagaagtcagttaaggttattgttgtgggtaatccagccaataccaactgcctgactgcttccaagtcagctccatccatccccaaggagaacttcagttgcttgactcgtttggatcacaaccgagctaaagctcaaattgctcttaaacttggtgtgactgctaatgatgtaaagaatgtcattatctggggaaaccattcctcgactcagtatccagatgtcaaccatgccaaggtgaaattgcaaggaaaggaagttggtgtttatgaagctctgaaagatgacagctggctcaagggagaatttgtcacgactgtgcagcagcgtggcgctgctgtcatcaaggctcgaaaactatccagtgccatgtctgctgcaaaagccatctgtgaccacgtcagggacatctggtttggaaccccagagggagagtttgtgtccatgggtgttatctctgatggcaactcctatggtgttcctgatgatctgctctactcattccctgttgtaatcaagaataagacctggaagtttgttgaaggtctccctattaatgatttctcacgtgagaagatggatcttactgcaaaggaactgacagaagaaaaagaaagtgcttttgaatttctttcctctgcctgactagacaatgatgttactaaatgcttcaaagctgaagaatctaaatgtcgtctttgactcaagtaccaaataataataatgctatacttaaattacttgtgaaaaacaacacattttaaagattacgtgcttcttggtacaggtttgtgaatgacagtttatcgtcatgctgttagtgtgcattctaaataaatatatattcaaatg

SEQ ID NO: 765 - protein, 334 aa, Homo sapiens
MSEPIRVLVTGAAGQIAYSLLYSIGNGSVFGKDQPIILVLLDITPMMGVLDGVLMELQDCALPLLKDVIATDKEDVAFKDLDVAILVGSMPRREGMERKDLLKANVKIFKSQGAALDKYAKKSVKVIVVGNPANTNCLTASKSAPSIPKENFSCLTRLDHNRAKAQIALKLGVTANDVKNVIIWGNHSSTQYPDVNHAKVKLQGKEVGVYEALKDDSWLKGEFVTTVQQRGAAVIKARKLSSAMSAAKAICDHVRDIWFGTPEGEFVSMGVISDGNSYGVPDDLLYSFPVVIKNKTWKFVEGLPINDFSREKMDLTAKELTEEKESAFEFLSSA

SEQ ID NO: 766 - DNA, 1066 bp, Homo sapiens
tcttttaagtatactctctacttattaaaaaaaaaaaaaagtcctttccacgctacctgcagaggggtccatacggcgttgttctggattcccatcgtaacttaaagggaaactttcacaatgtccggagcccttgatgtcctgcaaatgaaggaggaggatgtccttaagttccttgcagcaggaactcacttaggtggcaccaatcttgacttccagatggaacagtacatctataaaaggaaaagtgatggcatctatatcataaatctgaagaggacctgggagaagcttctgctggcagctcgtgctattgttgccattgaaaaccctgctgatgtcagtgttatatcctccaggaatactggccagagggccgtgctaaagtttgctgctgccactggagccactccaattgctggccgcttcactcctggaaccttcgctaaccagatccaggcagccttccgggagccacggcttcttgtggttactgaccccagggctgaccaccagcctctcatggaggcatcttatgttaacctacctaccattgcgctgtgtaacacagattctcctctgcactatgtggacattgccatcccatgcaacaacaagggagctcactcagtgggtttgatgtggtggatgctggctcgggaagttctgcgcatgcgtggcaccatttcctgtgaacacccatgggaggtcatgcctgatctgtacttctacagagatcctgaagagattgaaagagaagagcaggctgctgctgaaaaggcagtgaccaaggaggaatttcagggtgaatggactgctccagctcctgagttcactgttactcagcctgaggttgcagactggtctgaaggtgtacaggtgccctctgtgcctattccctactgaagacgggagcgctcagcctgccacggaagactggtctgcagctcccactgctcaggccactgaatgggtaggagcaaccactgactggtcttaagctgttcttgcataggctcttaagcaacatggaaaaatggttgatggaaaataaacatcagtttct

SEQ ID NO: 767 - protein, 261 aa, Homo sapiens
MSGALDVLQMKEEDVLKFLAAGTHLGGTNLDFQMEQYIYKRKSDGIYIINLKRTWEKLLLAARAIVAIENPADVSVISSRNTGQRAVLKFAAATGATPIAGRFTPGTFANQIQAAFREPRLLVVTDPRADHQPLMEASYVNLPTIALCNTDSPLHYVDIAIPCNNKGAHSVGLMWWMLAREVLRMRGTISCEHPWEVMPDLYFYRDPEEIEREEQAAAEKAVTKEEFQGEWTAPAPEFTVTQPEVADWSEGVQVPSVPIPY

SEQ ID NO: 768 - DNA, 710 bp, Homo sapiens
gcagaggggtccatacggcgttgttctggattcccatcgtaacttaaagggaaactttcacaatgtccggagcccttgatgtcctgcaaatgaaggaggaggatgtccttaagttccttgcagcaggaactcacttaggtggcaccaatcttgacttccagatggaacagtacatctataaaaggaaaagtgatggcatctatatcataaatctgaagaggacctgggagaagcttctggccgcttcactcctggaaccttcgctaaccagatccaggcagccttccgggagccacggcttcttgtggttactgaccccagggctgaccaccagcctctcatggaggcatcttatgttaacctacctaccattgcgctgtgtaacacagattctcctctgcactatgtggacattgccatcccatgcaacaacaagggagctcactcagtgggtttgatgtggtggatgctggctcgggaagttctgcgcatgcgtggcaccatttcctgtgaacacccatgggaggtcatgcctgatctgtacttctacagagatcctgaagagattgaaagagaagagcaggctgctgctgaaaaggcagtgaccaaggaggaatttcagggtgaatggactgctccagctcctgagttcactgttactcagcctgaggttgcagactggtctgaaggtgtacaggtgccctctgtgc

SEQ ID NO: 769 - protein, 130 aa, Homo sapiens
MSGALDVLQMKEEDVLKFLAAGTHLGSTNLDFQMEQYIYKRKSDGIYIINLKRTWEKLLASLLEPSLTRSRQPSGSHGFLWLLIPGLTTSLSQRHLKLTYLPLLCVTQILLCAMWTLPSHATARELTQWV

SEQ ID NO: 770 - DNA, 2747 bp, Homo sapiens
ggcccagctgctgagaggagttgcctgagagtgacctttgcatctgcctgtccagccagcatggaaccaaagcggatcagagagggctaccttgtgaagaaggggagcgtgttcaatacgtggaaacccatgtgggttgtattgttagaagatggaattgaattctataagaagaaaagtgacaacagccccaaaggaatgatcccgctgaaagggagcactctgactagcccttgtcaagactttggcaaaaggatgtttgtgtttaagatcactacgaccaaacagcaggaccacttcttccaggcagccttcctggaggagagagatgcctgggttcgggatatcaagaaggccattaaatgcattgaaggaggccagaaatttgccaggaaatctaccaggaggtccattcgactgccagaaaccattgacttaggtgccttatatttgtccatgaaagacactgaaaaaggaataaaagaactgaatctagagaaggacaagaagatttttaatcactgcttcacaggtaactgcgtcattgattggctggtatccaaccagtctgttaggaatcgccaggaaggcctcatgattgcttcatcgctgctcaatgaggggtatctgcagcctgctggagacatgtccaagagtgcagtggatggaactgctgaaaaccctttcctggacaaccctgatgccttctactactttccagacagtgggttcttctgtgaagagaattccagtgatgatgatgtgattctgaaagaagaattcagaggggtcattatcaagcagggatgtttactgaagcaggggcatagaaggaaaaactggaaagtgaggaagttcatcttgagagaagaccctgcctacctgcactactatgaccctgctggggcagaagatcccctgggagcaattcacttgagaggctgtgtggtgacttcagtggagagcaactcaaatggcaggaagagtgaggaagagaacctttttgagatcatcacagcagatgaagtgcactatttcttgcaagcagccacccccaaggagcgcacagagtggatcagagccatccagatggcctcccgaactgggaagtaaagagactcctgcattcctcctcccctcctgagggaagcccatggacaagctcagtccaggacctgtccacttctgtgacaaatcaacgggaaacagcccaggggtgggaagttttcatttgcaggggggtctgaatgtaactcaccatgtggtgtgcaaggttcccctgcattgtattgctcactgcagcccctctgcccctatccatgacccccaagcagatataacaagctgtgcagcctcagtaggctgcttgccctctccaggcctcagggcctcttctggaaaatgaagaaattcaactagtagattcctgaggtccccctagcttaaaaaaaaaaaaaatctgccccatgattctaacactcgcagtagtgatagtgtatctagttgttctgctggtgtccttccttggctaagtcttggccttcagttatcttcaaatgtaccagaacctgagccaacgcctccctgtgaaactgttgctgatctgtagtacagtaccaggaagaaacctcttttgttctctttagacatcttctacttgctcttggccttgagatcgtgtaacaaaatgaaggagggctctcttctttcttcctcatcctactcaaaaacttcccgagagcagtggtggttttgagggttttgacttctattacttttggcagcctggaaagttgtgtcttctgggaaagagacctggggaggccaggagtagctgagggtcctttctgtgcccttaaaccgcccagaggagccctattccactctggttttaggctgatctgagagggtctccctttgttcctttctggagcatttctctaacgtttattacaattaggagggggaccccacatctgtgagattctgtttcatttgaggtttacagaaaaaaaaaagtggccagatgtgttccccccatgggtgagaggcctgggcaactgcctggtgaatgtgtcttgcggcagctgcagcaagtggaggggctgaactactggccagctcactggatgatgggttaatacaacaactgcactgtaaggactcagagccacacagaacttctgagaggggctgttagcattgcgcagcatcttcagttctccagtaaatgatattgcgttcgtgcctcagctttaagcacaagtagcagcagctcctgcttgagttctgagggcatcatggccctatgattaaccagagtgatctaacctagactaaaattgggaacttatttgcaatttttgaccctgaccactaactagtgattcttctccaaaattgagaaagacagcacccattgaagcagatatgtgtgtgaaagtatatttttcaattccagatttttaattttaaggctccaggaaagaaaggagagtagaacatttttcctcattttatcaaatcctctcttgccctccctcaattcccctgtaacattcctgaagctgttcccactcccagatggttttatcaatagcctagaggtaaagaactgtctttttctctgattctttaataaattatctttatagaatatgcacaagtttttctacactcagtgttaaagtatttattaatgggaagtcaacttaatgttttgaaataaatatatgactctgtttaat

SEQ ID NO: 771 - DNA, 1121 bp, Homo sapiens
ctttccgggagactggagtcgaaggccgtgaggtatttttctaagaaccccggaggagggtgaggagcagagctggccataatggcaggtgaagaaattaatgaagactatccagtagaaattcacgagtatttgtcagcgtttgagaattccattggtgctgtggatgagatgctgaagaccatgatgtctgtttctagaaatgagttgttgcagaagttggatccacttgaacaagcaaaagtggatttggtttctgcatacacattaaattcaatgttttgggtttatttggcaacccaaggagttaatcctaaggaacatccagtaaaacaggaattggaaagaatcagagtatatatgaacagagtcaaggaaataacagacaagaaaaaggctggcaagctggacagaggtgcagcttcaagatttgtaaaaaatgccctctgggaaccaaaatcgaaaaatgcatcaaaagttgccaataaaggaaaaagtaaaagttaactttttggttttgatgtacacatattcaaaaagtacattaatatgtaaattcacagtaaatatgtaaagctaaatactttcctctccaaagatcattatctttattgattagcactgaggattttaacattgtgatatattatatatttataatttaccatctcttgatgagactcttatttctttatataggtcagtcttgcaagtaccattttataagcagctgtgaaatttaagtgaaatgttctttgtaaacatttgtactattttaaatgaataatgaccttatgaagtatgctatctgtaggctgaaattataggtacatctgttttcactatatgatattaagaaagcgtgaaatgacttaaatgttcatttttttctgtatagatactttatcatgttttcatgattttaggaattactgctttgttgatattcaaagtgtgaaactaaaactttatggttgtactttaattcttggcatgttgcctctatgtcccatttaaaataaaatacattctcattaactttagatgggaaataaggttgtatgttgatggatgaattttggcatgatgactgtactctcaataaaggctgaaaatgttgt

SEQ ID NO: 772 - DNA, 752 bp, Homo sapiens
ccttcacttcgccctccagctgctgcagctgcagcccgaccgcgagcgtgccaagcggcttcagcagctagcggagcggtggcggcggccccgctcaggagaccaccagattcccctcttcccgcggcctcgccatggcgacccacggacagacttgcgcgcgtccaatgtgtattcctccatcatatgctgaccttggcaaagctgccagagatattttcaacaaaggatttggttttgggttggtgaaactggatgtgaaaacaaagtcttgcagtggcgtggaattttcaacgtccggttcatctaatacagacactggtaaagttactgggaccctggagaccaaatacaagtggtgtgagtatggtctgactttcacagaaaagtggaacactgataacactctgggaacagaaatcgcaattgaagaccagatttgtcaaggtttgaaactgacatttgatactaccttctcaccaaatcaaagctgacaaggaataactttgcagtgggctacaggactggggacttccagctacacactaatgtcaatgatgggacagaatttggaggatcaatttatcagaaagtttgtgaagatcttgacacttcagtaaaccttgcttggacatcaggtaccaactgcactcgttttggcattgcagctaaatatcagttggatcccactgcttccatttctgcaaaagtcaacaactctagcttaattggagtaggctatactcagactc

SEQ ID NO: 773 - DNA, 1287 bp, Homo sapiens
agctgctgcagctgcagcccgaccgcgagcgtgccaagcggcttcagcagctagcggagcggtggcggcggccccgctcaggagaccaccagattcccctcttcccgcggcctcgccatggcgacccacggacagacttgcgcgcgtccaatgtgtattcctccatcatatgctgaccttggcaaagctgccagagatattttcaacaaaggatttggttttgggttggtgaaactggatgtgaaaacaaagtcttgcagtggcgtggaattttcaacgtccggttcatctaatacagacactggtaaagttactgggaccctggagaccaaatacaagtggtgtgagtatggtctgactttcacagaaaagtggaacactgataacactctgggaacagaaatcgcaattgaagaccagatttgtcaaggtttgaaactgacatttgatactaccttctcaccaaacacaggaaagaaaagtggtaaaatcaagtcttacaagagggagtgtataaaccttggttgtgatgttgactttgattttgctggacctgcaatccatggttcagctgtctttggttatgagggctggcttgctggctaccagatgacctttgacagtgccaaatcaaagctgacaaggaataactttgcagtgggctacaggactggggacttccagctacacactaatgtcaatgatgggacagaatttggaggatcaatttatcagaaagtttgtgaagatcttgacacttcagtaaaccttgcttggacatcaggtaccaactgcactcgttttggcattgcagctaaatatcagttggatcccactgcttccatttctgcaaaagtcaacaactctagcttaattggagtaggctatactcagactctgaggcctggtgtgaagcttacactctctgctctggtagacgggaagagcattaatgctggaggccacaaggttgggctcgccctggagttggaggcttaatccagctgaaagaaacctttgggaatggatatcagaagatttggccttaatatatttccattgtgaccagcagcaggcttttttcccccaagaagatgatcaaaacaaaggatgatctcaacaagagctgtattttaagtatttagacagttctttgttagctggtttctagttgaattggttatctagttaccaatgctgcagtcctgcagtcacctatacattatttaaatgtatttaactgttaaatgcgctacccaccaataatgaaatagacctttatgaaaa

SEQ ID NO: 774 - protein, 293 aa, Homo sapiens [sequence omitted]

SEQ ID NO: 775 - DNA, 615 bp, Homo sapiens
atggtctgactttcacagaaaagtggaacactgataacactctgggaacagaaatcgcaattgaagaccagatttgtcaaggtttgaaactgacatttgatactaccttctcaccaaacacaggaaagaaaagtggtaaaatcaagtcttacaagagggagtgtataaaccttggttgtgatgttgactttgattttgctggacctgcaatccatggttcagctgtctttggttatgagggctggcttgctggctaccagatgacctttgacagtgccaaatcaaagctgacaaggaataactttgcagtgggctacaggactggggacttccagctacacactaatgtcaatgatgggacagaatttggaggatcaatttatcagaaagtttgtgaagatcttgacacttcagtaaaccttgcttggacatcaggtaccaactgcactcgttttggcattgcagctaaatatcagttggatcccactgcttccatttctgctggtgtgaagcttacactctctgctctggtagacgggaagagcattaatgctggaggccacaaggttgggctcgccctggagttggaggcttaatccagctgaaagaaacctt

SEQ ID NO: 776 - DNA, 2679 bp, Homo sapiens
gagaaaacggccgggcggcggtggctgtaggttgtgcggctgcagcggctcttccctgggcggacgatggacagccagggcaggaaggtggtggtgtgcgacaacggcaccgggtttgtgaagtgtggatatgcaggctctaactttccagaacacatcttcccagctttggttggaagacctattatcagatcaaccaccaaagtgggaaacattgaaatcaaggatcttatggttggtgatgaggcaagtgaattacgatcaatgttagaagttaactaccctatggaaaatggcatagtacgaaattgggatgacatgaaacacctgtgggactacacatttggaccagagaaacttaatatagataccagaaattgtaaaatcttactcacagaacctcctatgaacccaaccaaaaacagagagaagattgtagaggtaatgtttgaaacttaccagttttccggtgtatatgtagccatccaggcagttctgactttgtacgctcaaggtttattgactggtgtagtggtagactctggagatggtgtgactcacatttgcccagtatatgaaggcttttctctccctcatcttaccaggagactggatattgctgggagggatataactagatatcttatcaagctacttctgttgcgaggatacgccttcaaccactctgctgattttgaaacggttcgcatgattaaagaaaaactgtgttacgtgggatataatattgagcaagagcagaaactggccttagaaaccacagtattagttgaatcttatacactcccagatggacgtatcatcaaagttgggggagagagatttgaagcaccagaagctttatttcagcctcacttgatcaatgttgaaggagttggtgttgctgaattgctttttaacacaattcaggcagctgacattgataccagatctgaattctacaaacacattgtgctttctggagggtctactatgtatcctggcctgccatcacggttggaacgagaacttaaacagctttacttagaacgagttttgaagggtgatgtggaaaaactttctaaatttaagatccgcattgaagacccaccccgcagaaagcacatggtattcctgggtggtgcagttctagcggatatcatgaaagacaaagacaacttttggatgacccgacaagagtaccaagaaaagggtgtccgtgtgctagagaaacttggtgtgactgttcgataaactccaaagcttgttcccgtcatacccgtaatgctttcttttttcctttattgccaatctttgaactcattcaactccaggacatggaagaggcctctctctgccctttgactggaaaggtcaagttttattctggtgtcttggggaagctttgttaaatttttgttaatgtgggtaaatctgagtttaattcaactgcttccctacatagactagagggctaaggattctgtctgctgctttgtttcttctaagtaggcatttagatcattcctataggcttcctattttcactttactgctctaatgctgctagtcgtagtctttagcacactaggtggtatgcctttattagcataaaacaaaaaaaactttaacaggagcttttacatattactgggatggggggtggttcgggatgggtgggcagctgctgaaccctttagggcatttcctctgtaatgtggcgctttcaactgtactgctgcagctttaagtaccttaaagcttctcctgtgaacttcttagggaaatgttaggttcagaactaaagtgttttgggtgggttttgttgcgggggggagggtaacaatgggtggtcttctgatttttatttttgaggttttgtcaactggagtacgtagaggaactttatttacagtactttgatttggcaggttttcttctacttgtgctctgcctggagctgtttccatatgatataaaaagcaagtgtagtattccattactatgtggcttagggatttatttgttttttaaaatcaaccatgttagctgggattagactccctacagtccttcaatggaaaagtaacatttaaaaatcctttgggtaattcgaattacagatttaaaagagcttaagatctggtgttttgttaatgcttctgtttattccagaagcattaaggtaacccattgccaagtatcattcttgcaaattattcttttatataactgaccagtgcttaataaaacaagcaggtacttacaaataattactggcagtaggttataattggtggtttaaaaataacattggaatacaggacttgttgccaattgggtaattttcattagttgttttgtttgttttgatttgaaacctggaaatacagtaaaatttgactgtttaaaatgttggccaaaaaaatcaagatttaatttttttatttgtactgaaaaactaatcataactgttaattctcagccatctttgaagcttgaaagaagagtctttggtattttgtaaacgttagcagactttcctgccagtgtcagaaaatcctatttatgaatcctgtcggtattccttggtatctgaaaaaaataccaaatagtaccatacatgagttatttctaagtttgaaaaataaaaagaaattgcatcacactaattacaaaata

SEQ ID NO: 777 - DNA, 1629 bp, Homo sapiens
atggagacacttgtacaagtgaatctctttagaaagagagatttacgccaggtacgtggaacacagtctgagcagcactgcacaccgtatcaaatcaggtatcctgtaggaagagtacctggggatgaaatcaacaagttcttagtggaatcttctcatttcttagaatgtaatgtggttggatgtttggaaattggtacgaaaggggagaatcctttcccccaattaggaaaatggggagtgggggcagaggaaatgaagcccaggttcttcatcggatggaagttctctggtcagtgtacacagtttgctcttgagaggactgatggcctgggatatgttattgatggtcctgaaagggatctgcgtttgaataggtcagagaagatgttctggaagtctggagactgggatacgctcccttccctacaggctcattcatccagcgttctggcagtaccctctggtaccgcacagacttcaggggaccttgaacaagctccattttgtctcctggaagctcattccaccaggtttgagtatgagcttcaccactcgctccaccttctccaccaactaccagtccctgggctctgtccaggtgcccagctaagacgctcggccagtcagcagcatgaccagtatctctgcaggggctgggggctctggttcccagatctccatgtccccctccaccagcttctggggtggcatggggtctggggccctggccgtggggatggccagggttctggcaggatggaagacatccagaacaagaaggagaccatgcaaagcctgaatgactgcctggcctcctacctggacagagtgaggagactggataccaagaatcggaagctggagagcaaaatccgggagcacctggagaagaagggaccccaagtcagagactggagccattacttcaagaccgtggaggacctgagggctcagatcttcgcaaatactgtggacaatgcccgcatcgttctgcaagtcgacaatgcccatcttgctgatgactttagagtcaagtatgtgacagagctggccatgcgccagtctatggagagcgacatccatgggctccgcaaggtcattgatgacaccaatgtcactcggctgcagctggaaacagagatcgaggctctcaaggaggagctgctcttcatgaagaagaacgaagaaggggaaataaaaggcctacaagcccagattgccagctctgggttgactgtggaggtagatatccccaaatctcaggaccttgccaagctcatggcagacatctgggcccaatatgatgagctggctcggaagagccaagaggagctgggcaagtactggtctcagcagattgaggagagtatcacagtagtcaccatgcagtccaccgagatggagcagttcaacaggatcctgctgcacctggagtcagagctggcacagacctgggcagagggacagtgccaggcccaggagtacgaggccctgctgagcatcagggtcaagctggaggctgagatcgccacctaccaccacctgctggaagataccaccaccggccggatagtggatggcaaagtggggtctgagaccaacaacaccaaagttctgagacattaa

SEQ ID NO: 778 - protein, 542 aa, Homo sapiens [sequence omitted]

SEQ ID NO: 779 - DNA, 4627 bp, Homo sapiens
cggtccctcgccgcgccgccccgaggggcacttccggcggcggttcacttcctggttgggtggatggagccgggcgggagcgcgcgcgggggaggggcggcgggtcagtctccgcccggcgctcccgggatcagctggcgggcgggcgggagccgagcgcggccccggctctcgctgcagcgccgcctcttctctgcgtcgcaggccggcccggcggccgtgacaatgtcgcggggctggtagcagggcgccggccgccgagccgtctcaagtttaaacttacacgaatcgctttctggaggaggaggggacccgctgcgcgattgacacgcatattcctataggcatcctccctcagcccccacccccacggccggattcgggtggctcctctccgaggtgaaatctgagaagaaatccttggatctcttttcttaaaaaaaaaaaaaaaaaaaaaaaatctagaaaccatcggtattttgctttgctgctccctattcgcaagatgaagaagtttttcgactcccggcgagagcagggcggctctggcctgggctccggctccagcggaggagggggcagcacctcgggcctgggcagtggctacatcggaagagtcttcggcatcgggcgacagcaggtcacagtggacgaggtgttggcggaaggtggatttgctattgtatttctggtgaggacaagcaatgggatgaaatgtgccttgaaacgcatgtttgtcaacaatgagcatgatctccaggtgtgcaagagagaaatccagataatgagggatctttcagggcacaagaatattgtgggttacattgattctagtatcaacaacgtgagtagcggtgatgtatgggaagtgctcattctgatggacttttgtagaggtggccaggtggtaaacctgatgaaccagcgcctgcaaacaggctttacagagaatgaagtgctccagatattttgtgatacctgtgaagctgttgcccgcctgcatcagtgcaaaactcctattatccaccgggacctgaaggttgaaaacatcctcttgcatgaccgaggccactatgtcctgtgtgactttggaagcgccaccaacaaattccagaatccacaaactgagggagtcaatgcagtagaagatgagattaagaaatacacaacgctgtcctatcgagcaccagaaatggtcaacctgtacagtggcaaaatcatcactacgaaggcagacatttgggctcttggatgtttgttgtataaattatgctacttcactttgccatttggggaaagtcaggtggcaatttgtgatggaaacttcacaattcctgataattctcgatattctcaagacatgcactgcctaattaggtatatgttggaaccagaccctgacaaaaggccggatatttaccaggtgtcctacttctcatttaagctactcaagaaagagtgcccaattccaaatgtacagaactctcccattcctgcaaagcttcctgaaccagtgaaagccagtgaggcagctgcaaaaaagacccagccaaaggccagactgacagatcccattcccaccacagagacttcaattgcaccccgccagaggcctaaagctgggcagactcagccgaacccaggaatccttcccatccagccagcgctgacaccccggaagagggccactgttcagcccccacctcaggctgcaggatccagcaatcagcctggccttttagccagtgttccccaaccaaaaccccaagccccacccagccagcctctgccgcaaactcaggccaagcagccacaggctcctcccactccacagcagacgccttctactcaggcccagggtctgcccgctcaggcccaggccacaccccagcaccagcagcaactcttcctcaagcagcaacagcagcagcaacagccaccgccagcacagcagcagccggcaggcacgttttaccagcagcagcaggcccagactcagcagtttcaggcagtacatccagcaacccagaaaccagcaattgctcagttccctgtggtgtcccaaggaggctctcaacagcagctaatgcagaatttctaccagcagcagcagcagcagcaacaacaacagcaacagcaacagctggccacagccctgcatcaacaacagctgatgactcagcaggctgccttgcagcaaaagcccactatggcagcaggacagcagccccagccacagccagctgcagccccacagccagcccctgcccaggagccagcgattcaagccccagtaagacaacagccaaaggttcagacaaccccacctcctgccgtccaggggcagaaagttggatctctcactccaccctcatcccccaaaacccaacgtgctgggcacaggcgtattctcagtgacgtaacccacagtgcagtctttggggtccctgccagcaaatcaacccagctgctccaggcagctgcagctgaggccagtctcaataagtccaagtctgcaaccaccactccatcaggctctcctcggacctctcaacaaaacgtttataatccttcagaagggtctacgtggaatccctttgatgacgataatttctccaaactcacagctgaagaactgctaaacaaggactttgccaagcttggggaaggcaaacatcccgagaagcttggaggctcagctgagagtttgatcccaggctttcaatcaacccaaggtgatgcttttgctacgacctcattttctgctggaactgctgaaaaaaggaagggtgggcagactgtggactctggcctcccgcttctaagcgtgtctgatcctttcattcctcttcaagtacctgatgcaccagaaaaactaattgagggactcaaatctcctgacacttctcttctgctccctgacctcttgcctatgacagatccttttggtagcacttctgatgctgtaattggtaaagtcatcatctctgtttcttcagtcatgcatgatatgtgtgcctgtttcaagaatgacaagtacctagttaaccaatccctggggaatagccctgccaccccagaagccaaggctatttaatctcacttgtatcactccaaatgaagtgttttccttgcttttcgggggtacaacgtctattttttgcctttcttgatatctggagatttctagagtggatctcttatgaatgaggaggaatgtggaaagtttcacatttagttagaagaactttaaaaaattggtttctaactagactacctttactgaacttaatgaaatttagcagattcttcttttttttttttttgtttgagacagagtttcactcttgttgcctaggctggagtgcaatggcaagatctcagctcactgcaacctccatctcccgggttcaagcaattctcctgcctcagcctcccgagtagctgagattacaggcatgcaccaccatgcctggctaatttttatatttttagtagagatagggtttctccatgttggtcaggctggtctcgaactcctgacctcaggtgatccacctgccttggcctcccaaagtgctgggattacaggggtgagccaccatgcccagcccagattcttctttagaaggcccatgtacatccagctgcagtgggacgagcctgggaagcataggaagaccccatccctacaaaaaaaatgttgttagttagccaggtgtgggggtgcacacctgtgctaccagctctttgggaggctgagacggaagatcactttgagccagggggtttgaggctgcagtgagccctgatcatgccactgccctccagcttaagtgacagagacccatcttaaacaaaattaaaaaatttaaaaaggtccatgtatataccaagtatcagtaactgagaaaacattttgcccactggttaagccccataaatagaatccagggcaggggcttggtctgcttcctctctcacattttcctatgttccaacagcaaggcaggcaagatttgcaaaatgtccaaggcccctgtactccaggagggtccaatcatgaggcacctaataatgcctttgggcagaaagtcctagaactcagaagtgccatgaccttgcataggggtaggcctgcagctgaggggtgtcacgtggtgcaaaaggcctcccagctacatcctgggatggggtttgagatggattaatggcctttgcatggcacagaggatgtttgcccccaggtttatcccttaataaaagtgaaattaccagaaaaaattaaggtgcctttcagcccatctcttctgacatggaagaggtttgctgagcggcttatgttctgaatttgtttatgagaactgatcattagtgagactggccacagtatttaaccttgcacatgcatgctcagtgaagcctagacattcagagcagcagaaataaagtaacttatttttctttccaccttgcctgagactggcattttagagacctgttaaaagaaagtcttcacatggctgggtgcagtggctcacacttgtaaccacaggactttgggaggccaaggtgggatagatcgcttgagctcaggagcaagacaccatctcaaaaaatgagaatt

SEQ ID NO: 780 - DNA, 2137 bp, Homo sapiens
gccccaggtgcgcttcccctagagagggattttccggtctcgtgggcagaggaacaaccaggaacttgggctcagtctccaccccacagtggggcggatccgtcccggataagacccgctgtctggccctgagtagggtgtgacctccgcagccgcagaggaggagcgcagcccggcctcgaagaacttctgcttgggtggctgaactctgatcttgacctagagtcatggccatggcaaccaaaggaggtactgtcaaagctgcttcaggattcaatgccatggaagatgcccagaccctgaggaaggccatgaaagggctcggcaccgatgaagacgccattattagcgtccttgcctaccgcaacaccgcccagcgccaggagatcaggacagcctacaagagcaccatcggcagggacttgatagacgacctgaagtcagaactgagtggcaacttcgagcaggtgattgtggggatgatgacgcccacggtgctgtatgacgtgcaagagctgcgaagggccatgaagggagccggcactgatgagggctgcctaattgagatcctggcctcccggacccctgaggagatccggcgcataagccaaacctaccagcagcaatatggacggagccttgaagatgacattcgctctgacacatcgttcatgttccagcgagtgctggtgtctctgtcagctggtgggagggatgaaggaaattatctggacgatgctctcgtgagacaggatgcccaggacctgtatgaggctggagagaagaaatgggggacagatgaggtgaaatttctaactgttctctgttcccggaaccgaaatcacctgttgcatgtgtttgatgaatacaaaaggatatcacagaaggatattgaacagagtattaaatctgaaacatctggtagctttgaagatgctctgctggctatagtaaagtgcatgaggaacaaatctgcatattttgctgaaaagctctataaatcgatgaagggcttgggcaccgatgataacaccctcatcagagtgatggtttctcgagcagaaattgacatgttggatatccgggcacacttcaagagactctatggaaagtctctgtactcgttcatcaagggtgacacatctggagactacaggaaagtactgcttgttctctgtggaggagatgattaaaataaaaatcccagaaggacaggaggattctcaacactttgaatttttttaacttcatttttctacactgctattatcattatctcagaatgcttatttccaattaaaacgcctacagctgcctcctagaatatagactgtctgtattattattcacctataattagtcattatgatgctttaaagctgtacttgcatttcaaagcttataagatataaatggagattttaaagtagaaataaatatgtattccatgtttttaaaagattactttctactttgtgtttcacagacattgaatatattaaattattccatattttcttttcagtgaaaaattttttaaatggaagactgttctaaaatcacttttttccctaatccaatttttagagtggctagtagtttcttcatttgaaattgtaagcatccggtcagtaagaatgcccatccagttttctatatttcatagtcaaagccttgaaagcatctacaaatctctttttttaggttttgtccatagcatcagttgatccttactaagtttttcatgggagacttccttcatcacatcttatgttgaaatcactttctgtagtcaaagtataccaaaaccaatttatctgaactaaattctaaagtatggttatacaaaccatatacatctggttaccaaacataaatgctgaacattccatattattatagttaatgtcttaatccagcttgcaagtgaatggaaaaaaaaataagcttcaaactaggtattctgggaatgatgtaatgctctgaatttagtatgatataaagaaaacttttttgtgctaaaaatactttttaaaatcaattttgttgattgtagtaatttctatttgcactgtgcctttcaactccagaaacattctgaagatgtacttggatttaattaaaaagttcactttgt

SEQ ID NO: 781 - protein, 321 aa, Homo sapiens
MAMATKGGTVKAASGFNAMEDAQTLRKAMKGLGTDEDAIISVLAYRNTAQRQEIRTAYKSTIGRDLIDDLKSELSGNFEQVIVGMMTPTVLYDVQELRRAMKGAGTDEGCLIEILASRTPEEIRRISQTYQQQYGRSLEDDIRSDTSFMFQRVLVSLSAGGRDEGNYLDDALVRQDAQDLYEAGEKKWGTDEVKFLTVLCSRNRNHLLHVFDEYKRISQKDIEQSIKSETSGSFEDALLAIVKCMRNKSAYFAEKLYKSMKGLGTDDNTLIRVMVSRAEIDMLDIRAHFKRLYGKSLYSFIKGDTSGDYRKVLLVLCGGDD

SEQ ID NO: 782 - DNA, 1699 bp, Rabbit
cgccaccgccgcgccctcgcccacccgcccgcccgccgctcccggccccgctcgccccctccgccgccgccgcccgcccctgcgactacgctgcggcctcccgcccgctcccgctcgctcccgcggccctcgctcgcctcgcgccggcagttttgggcctacacctcccctccccccgccagccgccaaagacttgaccacgtaacgagcccaactcccccgaacgccgcccgccgctcgccatggatgccggtgtgactgaaagtggactaaatgtgactctcaccattcggcttcttatgcacggaaaggaagtaggaagcatcattgggaagaaaggggagtcggttaagaggatccgcgaggagagtggcgcgcggatcaacatctcggaggggaattgtccggagagaatcatcactctgaccggccccaccaatgccatctttaaggctttcgctatgatcatcgacaagctggaggaagatatcaacagctccatgaccaacagtaccgcggccagcaggcccccggtcaccctgaggctggtggtgccggccacccagtgcggctccctgattgggaaaggcgggtgtaagatcaaagagatccgcgagagtacgggggcgcaggtccaggtggcgggggatatgctgcccaactccaccgagcgggccatcaccatcgctggcgtgccgcagtctgtcaccgagtgtgtcaagcagatttgcctggtcatgctggagacgctctcccagtctccgcaagggagagtcatgaccattccgtaccagcccatgccggccagctccccagtcatctgcgcgggcggccaagatcggtgcagcgacgctgcgggctacccccatgccacccatgacctggagggaccacctctagatgcctactcgattcaaggacaacacaccatttctccgctcgatctggccaagctgaaccaggtggcaagacaacagtctcactttgccatgatgcacggcgggaccggattcgccggaattgactccagctctccagaggtgaaaggctattgggcaagtttggatgcatctactcaaaccacccatgaactcaccattccaaataacttaattggctgcataatcgggcgccaaggcgccaacattaatgagatccgccagatgtccggggcccagatcaaaattgccaacccagtggaaggctcctctggtaggcaggttactatcactggctctgctgccagtattagtctggcccagtatctaatcaatgccaggctttcctctgagaagggcatggggtgcagctagaacagtgtaggttccctcaataacccctttctgctgttctcccatgatccaactgtgtaatttctggtcagtgattccaggttttaaataatttgtaagtgttcagtttctacacaactttatcatccgctaagaatttaaaaatcacattctctgttcagctgttaatgctgggatccatatttagttttataagcttttccctgtttttagttttgttttgggttttttggctcatgaattttatttctgtttgtcgataagaaatgtaagagtggaatgttaataaatttcagtttagttctgtaatgtcaagaatttaagaattaaaaaacggattggttaaaaaatgcttcatatttgaaaaagctgggaattgctgtctt

SEQ ID NO: 783 - DNA, 557 bp, Homo sapiens
ccaagctgaaccaggtggcaagacaacagtctcactttgccatgatgcacggcgggaccggattcgccggaattgactccagctctccagaggtgaaaggctattgggcaagtttggatgcatctactcaaaccacccatgaactcaccattccaaataacttaattggctgcataatcgggcgccaaggcgccaacattaatgagatccgccagatgtccggggcccagatcaaaattgccaacccagtggaaggctcctctggtaggcaggttactatcactggctctgctgccagtattagtctggcccagtatctaatcaatgccaggctttcctctgagaagggcatggggtgcagctagaacagtgtaggttccctcaataacccctttctgctgttctcccatgatccaactgtgtaatttctggtcagtgattccaggttttaaataatttgtaagtgttcagtttctacacaactttatcatccgctaagaatttaagcttttccctgtttttagttttgttttgggttttttggctcatgaatttta

SEQ ID NO: 784 - DNA, 741 bp, Homo sapiens
cgcagagctcgcgcgtcggtgtggttacagccggcagccacggcacctccttccggccgactagtctccaggtcccgcggtctggcccctggtcacccggcgctgtccctcgttccttgaagatctccagtgctaccttttgttgaacatctcgaatacaccaaaccttctagctgctaatactcagatttatggacaagaagttatcattgaaattaaatggtggcagacatgtccaaggaatattgcggggatttgatccctttatgaaccttgtgatagatgaatgtgtggagatggcgactagtggacaacagaacaatattggaatggtggtaatacgaggaaatagtatcatcatgttagaagccttggaacgagtataaataatggctgttcagcagagaaacccatgtcctctctccatagggcctgttttactatgatgtaaaaattaggtcatgtacattttcatattagactttttgttaaataaacttttgtaatagtcaaaaatgctttctcagatgttctgaatatagaatatcagctctcattccagttttttctaacatgaattttcctggttgacattgatttcaaagggttttatgcattaaagtgaaagaatcttattaaatgtgaaacatggcaaggattccttctgtccatcatctttcaacactgaacagataaagaagttacaaacatgagtgagtttcttctaaaacactaattttc

SEQ ID NO: 785 - DNA, 1786 bp, Homo sapiens
gtacgccgattccatatgggcgccggcgcggagcgccgcggggcagcgcggggtcgccatggctgagctgcagcagctccgggtgcaggaggcgatggagtccatggtgaagagtctggaaagagagaacatccggaagatgcagggtctcatgttccggtgcagcgccagctgttgtgaggacagccaggcctccatgaagcaggtgcaccagtgcatcgagcgctgccatgtgcctctggctcaagcccaggctttggtcaccagtgagctggagaagttccaggaccgcctggcccggtgcaccatgcattgcaatgacaaagccaaagattcaatagatgctgggagtaaggagcttcaggtgaagcagcagctggacagttgtgtgaccaagtgtgtggatgaccacatgcacctcatcccaactatgaccaagaagatgaaggaggctctcttatcaattggaaaataaaagtatttgccagtggccatcaggctgagggcaagaatatattttttataaggaattgggaattttagtcttttaagcaaagtttacgaatgaagaaatgaaggatggccacaagcgtaaggcatatgtcacttgcctctggacactggttattttatgtttcagtccctaaaaaatgaaatggaaaaaagtggtgctaaatcgagtcagagatattacaggagagttttagagcttattatttcctgtggccagtgcttgtcctggcagtaaggctctcccctgtaacaagccagagccctccaaggtaccagactcttcttactacacaggtactaacaggctggcaggttagagttggtggagtctgaggagagatattttctctttgttgccaacatcctgtttaccaaaagtgtcaccccaccatcttccataagctgtgaaacaaaatcaatgaggtcactaacttagaagggaaagaaagttttctgggtctttgttttcttgatttggggtaatttatacaagggcatacaagttgattttaagatgtggaactgggaggtagactagtttggataagaactttgaaatgttccttgtggatccccatttctggtcatcaagatgtggatgtacatttcttaaaattattacatgctgcatctttcagcctggagactgtgcagaaacatgagaggtgatgacacactaattatgggaagcagaattactggctgatggcccctgaggctgtgtgtaacaaaatgacaggacaatcttgcagtaacactttccccttgaagagaagggggttttgattgtgatatatactagtatctaggaatgaacagtaaaagaggagcagttggctacttgattacaacagagtaaatgaagtactggatttgggaaaacctggttttattagaacatatggaatgaaagcctacacctagcattgcctacttagccccctgaattaacagagcccaattgagacaaacccctggcaacaggaaattcaagggagaaaaagtaagcaacttgggctaggatgagctgactcccttagagcaaaggagagacagcccccattaccaaataccatttttgcctggggcttgtgcagctggcagtgttcctgccccagcatggcaccttattgttttgatagcaacttcgttgaattttcaccaacttattacttgaaattataatatagcctgtccgtttgctgtttccaggctgtgatatattttcctagtggtttgactttaaaaataaataaggtttaattttctcccc

SEQ ID NO: 786 - protein, 138 aa, Homo sapiens
MAELQQLRVQEAMESMVKSLERENIRKMQGLMFRCSASCCEDSQASMKQVHQCIERCHVPLAQAQALVTSELEKFQDRLARCTMHCNDKAKDSIDAGSKELQVKQQLDSCVTKCVDDHMHLIPTMTKKMKEALLSIGK

SEQ ID NO: 787 - DNA, 3961 bp, Homo sapiens
cagacccgcccgtggctgcagcagtggtgtcccattttaatgactgcccagattcccacactcagttctgcttccatggaacctgcaggtttttggtgcaggaggacaagccagcatgtgtctgccattctgggtacgttggtgcacgctgtgagcatgcggacctcctggccgtggtggctgccagccagaagaagcaggccatcaccgccttggtggtggtctccatcgtggccctggctgtccttatcatcacatgtgtgctgatacactgctgccaggtccgaaaacactgtgagtggtgccgggccctcatctgccggcacgagaagcccagcgccctcctgaagggaagaaccgcttgctgccactcagaaacagtggtctgaagagcccagaggaggagtttggccaggtggactgtggcagatcaataaagaaaggcttcttcaggacagcactgccagagatgcctgggtgtgccacagaccttcctacttggcctgtaatcacctgtgcagccttttgtgggccttcaaaactctgtcaagaactccgtctgcttggggttattcagtgtgacctagagaagaaatcagcggaccacgatttcaagacttgttaaaaaagaactgcaaagagacggactcctgttcacctaggtgaggtgtgtgcagcagttggtgtctgagtccacatgtgtgcagttgtcttctgccagccatggattccaggctatatatttctttttaatgggccacctccccacaacagaattctgcccaacacaggagatttctatagttattgttttctgtcatttgcctactggggaagaaagtgaaggaggggaaactgtttaatatcacatgaagaccctagctttaagagaagctgtatcctctaaccacgagaccctcaaccagcccaacatcttccatggacacatgacattgaagaccatcccaagctatcgccacccttggagatgatgtcttatttattagatggataatggttttatttttaatctcttaagtcaatgtaaaaagtataaaaccccttcagacttctacattaatgatgtatgtgttgctgactgaaaagctatactgattagaaatgtctggcctcttcaagacagctaaggcttgggaaaagtcttccagggtgcggagatggaaccagaggctgggttactggtaggaataaaggtaggggttcagaaatggtgccattgaagccacaaagccggtaaatgcctcaatacgttctgggagaaaacttagcaaatccatcagcagggatctgtcccctctgttggggagagaggaagagtgtgtgtgtctacacaggataaacccaatacatattgtactgctcagtgattaaatgggttcacttcctcgtgagccctcggtaagtatgtttagaaatagaacattagccacgagccataggcatttcaggccaaatccatgaaagggggaccagtcatttattttccattttgttgcttggttggtttgttgctttatttttaaaaggagaagtttaactttgctatttattttcgagcactaggaaaactattccagtaatttttttttcctcatttccattcaggatgccggctttattaacaaaaactctaacaagtcacctccactatgtgggtcttcctttcccctcaagagaaggagcaattgttcccctgagcatctgggtccatctgacccatggggcctgcctgtgagaaacagtgggtcccttcaaatacatagtggatagctcatccctaggaattttcattaaaatttggaaacagagtaatgaagaaataatatataaactccttatgtgaggaaatgctactaatatctgaaaagtgaaagatttctatgtattaactcttaagtgcacctagcttattacatcgtgaaaggtacatttaaaatatgttaaattggcttgaaattttcagagaattttgtcttcccctaattcttcttccttggtctggaagaacaatttctatgaattttctctttatttttttttataattcagacaattctatgacccgtgtcttcatttttggcactcttatttaacaatgccacacctgaagcacttggatctgttcagagctgaccccctagcaacgtagttgacacagctccaggtttttaaattactaaaataagttcaagtttacatcccttgggccagatatgtgggttgaggcttgactgtagcatcctgcttagagaccaatcaacggacactggtttttagacctctatcaatcagtagttagcatccaagagactttgcagaggcgtaggaatgaggctggacagatggcggaagcagaggttccctgcgaagacttgagatttagtgtctgtgaatgttctagttcctaggtccagcaagtcacacctgccagtgccctcatccttatgcctgtaacacacatgcagtgagaggcctcacatatacgcctccctagaagtgccttccaagtcagtcctttggaaaccagcaggtctgaaaaagaggctgcatcaatgcaagcctggttggaccattgtccatgcctcaggatagaacagcctggcttatttggggatttttcttctagaaatcaaatgactgataagcattggatccctctgccatttaatggcaatggtagtctttggttagctgcaaaaatactccatttcaagttaaaaatgcatcttctaatccatctctgcaagctccctgtgtttccttgccctttagaaaatgaattgttcactacaattagagaatcatttaacatcctgacctggtaagctgccacacacctggcagtggggagcatcgctgtttccaatggctcaggagacaatgaaaagcccccatttaaaaaaataacaaacattttttaaaaggcctccaatactcttatggagcctggatttttcccactgctctacaggctgtgactttttttaagcatcctgacaggaaatgttttcttctacatggaaagatagacagcagccaaccctgatctggaagacagggccccggctggacacacgtggaaccaagccagggatgggctggccattgtgtccccgcaggagagatgggcagaatggccctagagttcttttccctgagaaaggagaaaaagatgggattgccactcacccacccacactggtaagggaggagaatttgtgcttctggagcttctcaagggattgtgttttgcaggtacagaaaactgcctgttatcttcaagccaggttttcgagggcacatgggtcaccagttgctttttcagtcaatttggccgggatggactaatgaggctctaacactgctcaggagacccctgccctctagttggttctgggctttgatctcttccaacctgcccagtcacagaaggaggaatgactcaaatgcccaaaaccaagaacacattgcagaagtaagacaaacatgtatatttttaaatgttctaacataagacctgttctctctagccattgatttaccaggctttctgaaagatctagtggttcacacagagagagagagagtactgaaaaagcaactcctcttcttagtcttaataatttactaaaatggtcaacttttcattatctttattataataaacctgatgcttttttttagaactccttactctgatgtctgtatatgttgcactgaaaaggttaatatttaatgttttaatttattttgtgtggtaagttaattttgatttctgtaatgtgttaatgtgattagcagttattttccttaatatctgaattatacttaaagagtagtgagcaatataagacgcaattgtgtttttcagtaatgtgcattgttattgagttgtactgtaccttatttggaaggatgaaggaatgaatctttttttcct

SEQ ID NO: 788 - DNA, 3938 bp, Homo sapiens
atttcctcccagcctcgtgcgggaaatggctttaattctgacggcagggctgtgagggactagcgggaacccgagccttttgtcaaggaactgcggcgtcggtggccagtcatccccgccgccgcggagccgctgcactgctgggggatctcccagcagctctgacgagcgcgggctgcagcatgggcagaaaacgctgccctgcagattagctgggtggattttttaagcgcaccccaccccccaaacccataaaataacaaaaccaacccgcagtggccgaccggagatagctaagatgccgcgcaggagtttccacctggatgtttgaggttgtgtagatgtggccggcacccttgagagtggagctagggggtgcagactgagcagtgaacagaaggagccttggacagggctgggccagcctcccgagttccaggagcgaattgcaaacccaccgggaaaatgagcgaagagacggtccccgaggctgcctcgccgccgcccccgcaggggcagccttactttgaccgcttctcagaggacgaccccgagtacatgcgccttcgcaaccgggcggcggacctgcggcaggacttcaacctgatggagcagaagaagcgcgtcaccatgatcctgcagagtccctctttcagggaggagctggaaggcctcatccaggagcagatgaagaaggggaacaactcctccaacatctgggccctgcgacagatcgcggacttcatggccagcacctcccacgcagtcttcccgacatcttccatgaatgtctccatgatgacgcctatcaatgacctccacacagctgactccctgaacctggccaaaggggagcggctcatgcggtgcaagatcagcagtgtctaccgactcctggacctctatggctgggcccagctgagtgacacctatgtcacgttgagagtcagcaaggagcaggaccacttcctgatcagccctaagggagtttcttgcagtgaagtcacagcgtccagcctgatcaaggtgaacattctgggagaggtggtggagaagggcagcagctgcttcccagtggacaccacaggcttctgtctgcactcggccatctatgcagcgaggcccgacgtgcgctgcatcatccacctgcacacaccggccacagcagcggtgtcggccatgaagtggggcctcctgcctgtctcccacaatgccctgctggtgggggacatggcctattatgacttcaatggggaaatggagcaggaagccgatcggatcaacctgcagaagtgccttggacccacctgcaagatcctggtgctaagaaaccatggagtggttgctctgggtgacacggtagaggaggcattttacaagatcttccacctgcaggctgcatgtgagatacaggtgtcggctctgtccagtgccgggggagtggagaacctcatcctcctggagcaggagaagcaccggccccatgaggtgggctccgtgcagtgggccgggagcacctttgggcctatgcagaagagtcggctgggggagcatgagtttgaggccctcatgaggatgctggacaacctgggctacagaacaggttacacgtatcgccacccctttgttcaagagaaaaccaaacacaaaagtgaggtggagattccagccacggtcacagccttcgtgtttgaggaggacggtgccccggtgcccgccctgcgacagcatgcccagaagcagcagaaggagaagacccgctggctcaatacgcccaacacctacctgcgggtcaatgtggccgatgaggtccagaggagcatgggcagcccccgacccaagaccacgtggatgaaggctgacgaggtggagaaatccagcagtggcatgccgattcgcatcgaaaacccaaaccaatttgtgcctctctatactgacccccaggaagtactggagatgaggaacaagattcgagaacaaaaccgacaagatgtgaagtcagcggggcctcagtcccagctcctggcgagcgtcattgccgagaagagccgaagcccgtctacagagagccagctgatgtccaagggagacgaggataccaaagacgattcagaggagacggtgcccaaccccttcagccaactcactgaccaggagttggaggagtacaagaaagaggtggagaggaagaaactagaacttgatggagagaaagaaactgccccagaagagcctggctcacctgcaaagtctgcacctgcttctccagtgcagagcccagcgaaggaggcagagacaaagagccctttagtctctccttccaagtctttagaggaaggtactaagaagacagaaacaagcaaagccgccaccacagagcccgaaacaacccagccggaaggggtggtggtcaacgggagggaggaggagcagacggcagaggaaatcctcagcaaaggcctgagccagatgaccaccagtgctgacacggatgttgatacctctaaggacaaaaccgagtcggtcaccagcggccccatgtccccagagggctcaccttccaagtctccctcaaagaagaaaaagaaattccgaaccccctccttcctgaaaaagagcaaaaagaaggagaaagtggagtcctgattcatgacacccttgggctccctcctgcctcctctctctcctccccttcccttctcccatctctgtccctgcaagcacagggctaaggagggatagagtaggaccctggaccacattcggaaggggaacttagagatcacccgaccaacccttcgttttacagttgcccaagagaaatcaggtgacttgcccaaggtcacacagctagttagcggcagagcctgcactcgaattcaggtctcctgacttccagtccagtgctccttctactacacaacactgcctagttgtgggctgcctttgtttggatgctgtccaccaatctgagcctagggcaagaaggccagaaatgggccgtgagctctcacaggctcagactaaatcagaggtcaaggcttcccctgagtaaggtccatttcttcccaggaatccaatctcctgtggatggagctatctctacatttaaaaatctcttctcttttccactttgggtccctgccctgctgctcaaagtgactagccaaattgacccctccaacagaaagtaatctttgttcccaagggctgatggcttagcttgtactaccccaaacattaaccctgagctttcttcatggaacctcttgaatgatggatggaagagctataagaggtggtaggcataggggcaagccatgtaagctgaggattggggatggtttcatcaacataagaggccaggaacttgacccctttgaattgtgcatctcaggcacttcaaaactaaaaccaaatttagcataggaaaaagttgtttaatgctcagggcagaaatttggggaagttgaaatcctctgttggctttgggttgtataaggaggatcaaaacaacagaggaaatgctgactttctagctttgcatgacacctggagcaatgcactgtacctgcctcactcctgtccagtggtcaggtttcccctgaccttccctcacccccagaaacacttgcttacagaccgaaactggcatcttactcttggcaccttgacttgcaccctctgaggttccaactcagtcattctttgtccagcagaggagaatcagaaatgagcccttcaggattaatcctcttgcaccagctctcagagaaatgctgggtatccctgtccttgtccctatctgtccatcctggggcctggtaatggccacagttattgttttaaatgccaacactgtcttctcatgttcttccgtggggcattgattaatgagcatttgttggctcctaaaaattagacaatccattctcttg

SEQ ID NO: 789 - DNA, 1447 bp, Homo sapiens
ggcacgaggcggagaacaggagcatggagggcgggctggggcgtgctgtgtgcttgctgaccggggcctcccgcggcttcggccggacgctggccccgctcctggcctcgctgctgtcgcccggctccgtgcttgtccttagcgcccgcaacgacgaggcactgcgccagctggaggccgagctgggcgccgagcggtctggcctgcgcgtggtgcgggtgcccgccgacctgggcgccgaggccggcttgcagcagctgctcggcgccctgcgcgagctcccccggcccaaggggctgcagcgactgctgcttatcaacaacgcgggctctcttggggatgtgtccaaaggcttcgtggacctgagtgactccactcaagtgaacaactactgggcactgaacttgacctccatgctctgcctgacttccagcgtcctgaaggccttcccggacagtcctggcctcaacagaaccgtggttaacatctcgtccctctgtgccctgcaacctttcaaaggctgggcgctgtactgtgcaggaaaggctgctcgtgatatgctgttccaggtcctggcgctggaggaacctaatgtgagggtgctgaactatgccccaggtcctctggacacagacatgcagcagttggcccgggagacctccgtggacccagacatgcgaaaagggctgcaggagctgaaggcaaaggggaagctggtggattgcaaggtgtcagcccagaaactgctgagcttactggaaaaggacgagttcaagtctggagcccacgtggacttctatgacaaataagcccatgtttttggcttcctgaacctttttgcccccacttttagacataccccagagccctgtggctccccacaccctgccataggggcagtcctgccttacacatagaagcattcatgcctgctgccctgccctcaggcacagccagctgtgagctcccaggtcattggccttaccagttgtcaggagtctgtgctgtgcaccctgggttataaggaggcttaggagagaggttatgggtattggtgtctctatccccaggaatagaacttaaggggtgggaagaacaggaaaagaagctggaacacagaagagaggaggttgtgtctcttgctcatagcaagcctgtgggtagaggaaagagtgatctggtgtcgaataggaggacccatgtagattcgcagatggcctggatgggaggaagggcagacggtacatgtcccagcccacatagatgccccttgctgagggtagcaggaccttctgttgaactttgtgtcctcactctgatgtctccttccttcagaatctaccacccctcccccaggctgggagaaggggctcctgggtgtctgtatacacgccaaaggcagatacaaataaaatacagattgtcctttaaaaaaaaaaaaaaaaaa

SEQ ID NO: 790 - protein, 261 aa, Homo sapiens
MEGGLGRAVCLLTGASRGFGRTLAPLLASLLSPGSVLVLSARNDEALRQLEAELGAERSGLRVVRVPADLGAEAGLQQLLGALRELPRPKGLQRLLLINNAGSLGDVSKGFVDLSDSTQVNNYWALNLTSMLCLTSSVLKAFPDSPGLNRTVVNISSLCALQPFKGWALYCAGKAARDMLFQVLALEEPNVRVLNYAPGPLDTDMQQLARETSVDPDMRKGLQELKAKGKLVDCKVSAQKLLSLLEKDEFKSGAHVDFYDK

SEQ ID NO: 791 - DNA, 764 bp, Homo sapiens
ggagcatggagggcgggctggggcgtgctgtgtgcttgctgaccggggcctcccgcggcttcggccggacgctggccccgctcctggcctcgctgctgtcgcccggctccgtgcttgtccttagcgcccgcaacgacgaggcactgcgccagctggaggccgagctgggcgccgagcggtctggcctgcgcgtggtgcgggtgcccgccgacctgggcgccgaggccggcttgcagcagctgctcggcgccctgcgcgagctcccccggcccaaggggctgcagcgactgctgcttatcaacaacgcgggtaagaccccggggctggagcggactccccatgtgagcgcccacttcctccaccgctggggaatttaagggctactcctaggggtcagataggacgcctagaaatctaaagccctagttgttccagcttgagtagcaagtggaggcgaggtgtacaggaagactcggtgccgtcgggacaacagtctgcccccacttcctggaaaattggccagccgggttttccaaagcgcctgtagaactttcccgagccccttgctctgcgccctctggcggaggcctgagtcagggcttggagtctccaaacaagtaaactctctgcttctccaaaggaccgctagagctttccttcagccccacggcaagggctctcttggggatgtgtccaaaggcttcgtggacctgagtgactccactcaagtgaacaactactgggcactgaacttgacctccatg

SEQ ID NO: 792 - DNA, 1863 bp, Homo sapiens
gttccaaggtttgcggcccggtctcggagaagaggggagagtggagggccgctgaataagcttccaaaatgatgcccacaccagttatcctattgaaagaggggactgatagctcccaaggcatcccccagcttgtgagtaacatcagtgcctgccaggtgattgctgaggctgtaagaactaccctgggtccccgtggcatggacaagcttattgtagatggcagaggcaaagcaacaatttctaatgatggggccacaattctgaaacttcttgatgttgtccatcctgcagcaaagactttggtagacattgccaaatcccaagatgctgaggtgggtgatggcaccacctcagtgaccttgctggctgcagagtttctgaagcaggtgaaaccctatgtggaggaaggtttacacccccagatcatcattcgagctttccgcacagccacccagctggcagttaacaagatcaaagagattgctgtgaccgtgaagaaggcagataaagtggagcagaggaagctgctggaaaagtgtgccatgaccgctctgagctccaagctgatctcccagcagaaagctttctttgctaagatggtggtggatgcagtgatgatgctcgatgatttgctgcagcttaaaatgattggaatcaagaaggtacagggtggagccctcgaggattctcagctggtagctggtgttgcattcaagaagactttctcttacgctgggtttgaaatgcaacccaaaaagtaccacaatcccaagattgcccttttgaatgtcgagctcgagttgaaagctgagaaagacaatgctgagataagagtccacacagttgaggattatcaggcaattgttgatgctgagtggaacattctctatgacaagttagagaagatccatcattctggagccaaagttgtcttgtccaaactccccattggggatgtggccacccagtactttgctgacagggacatgttctgtgctggccgagtacctgaggaggatctgaagaggacaatgatggcctgtggaggctcaatccagaccagtgtgaatgctctgtcagcagatgtgctgggtcgatgccaggtgtttgaagagacccagattggaggcgagaggtacaatttttttactggctgccccaaggccaagacatgcaccttcattctccgtggcggcgccgagcagtttatggaggagacagagcggtccctgcatgatgccatcatgatcgtcaggagggccatcaagaatgattcagtggtggctggtggcggggccattgagatggaactctccaagtacctgcgggattactcaaggactattccaggaaaacagcagctgttgattggggcttatgccaaggccttggagattatcccacgccagctgtgtgacaatgctggctttgatgccacaaacattctcaacaagctgcgggctcggcatgcccaggggggtacatggtatggagtagacatcaacaacgaggacattgctgacaactttgaagctttcgtgtgggagccagctatggtgcggatcaatgcgctgacagcagcctctgaggctgcgtgcctgatcgtgtctgtagatgaaaccatcaagaacccccgctcgactgtggatgctcccacagcagcaggccggggccgtggtcgtggccgcccccactgagaggcaccccacccatcacatggctggctggctgctgggtgcacttaccctccttggcttggttacttcattttacaaggaaggggtagtaattggcccactctcttcttactggaggctatttaaataaaatgtaagacttcaaaaaaaaaaaaaaaaaaaa

SEQ ID NO: 793 - protein, 543 aa, Homo sapiens
MMPTPVILLKEGTDSSQGIPQLVSNISACQVIAEAVRTTLGPRGMDKLIVDGRGKATISNDGATILKLLDVVHPAAKTLVDIAKSQDAEVGDGTTSVTLLAAEFLKQVKPYVEEGLHPQIIIRAFRTATQLAVNKIKEIAVTVKKADKVEQRKLLEKCAMTALSSKLISQQKAFFAKMVVDAVMMLDDLLQLKMIGIKKVQGGALEDSQLVAGVAFKKTFSYAGFEMQPKKYHNPKIALLNVELELKAEKDNAEIRVHTVEDYQAIVDAEWNILYDKLEKIHHSGAKVVLSKLPIGDVATQYFADRDMFCAGRVPEEDLKRTMMACGGSIQTSVNALSADVLGRCQVFEETQIGGERYNFFTGCPKAKTCTFILRGGAEQFMEETERSLHDAIMIVRRAIKNDSVVAGGGAIEMELSKYLRDYSRTIPGKQQLLIGAYAKALEIIPRQLCDNAGFDATNILNKLRARHAQGGTWYGVDINNEDIADNFEAFVWEPAMVRINALTAASEAACLIVSVDETIKNPRSTVDAPTAAGRGRGRGRPH

SEQ ID NO: 794 - DNA, 2154 bp, Homo sapiens
atataaccgcgtggcccgcgcgcgcgcttccctcccggcgcagtcaccggcgcggtctatggctgcgacttctctaatgtctgctttggctgcccggctgctgcagcccgcgcacagctgctcccttcgccttcgccctttccacctcgcggcagttcgaaatgaagctgttgtcatttctggaaggaaactggcccagcagatcaagcaggaagtgcggcaggaggtagaagagtgggtggcctcaggcaacaaacggccacacctgagtgtgatcctggttggcgagaatcctgcaagtcactcctatgtcctcaacaaaaccagggcagctgcagttgtgggaatcaacagtgagacaattatgaaaccagcttcaatttcagaggaagaattgttgaatttaatcaataaactgaataatgatgataatgtagatggcctccttgttcagttgcctcttccagagcatattgatgagagaaggatctgcaatgctgtttctccagacaaggatgttgatggctttcatgtaattaatgtaggacgaatgtgtttggatcagtattccatgttaccggctactccatggggtgtgtgggaaataatcaagcgaactggcattccaaccctagggaagaatgtggttgtggctggaaggtcaaaaaacgttggaatgcccattgcaatgttactgcacacagatggggcgcatgaacgtcccggaggtgatgccactgttacaatatctcatcgatatactcccaaagagcagttgaagaaacatacaattcttgcagatattgtaatatctgctgcaggtattccaaatctgatcacagcagatatgatcaaggaaggagcagcagtcattgatgtgggaataaatagagttcacgatcctgtaactgccaaacccaagttggttggagatgtggattttgaaggagtcagacaaaaagctgggtatatcactccagttcctggaggtgttggccccatgacagtggcaatgctaatgaagaataccattattgctgcaaaaaaggtgctgaggcttgaagagcgagaagtgctgaagtctaaagagcttggggtagccactaattaactactgtgtcttctgtgtcacaaacagcactccaggccagctcaagaagcaaagcaggccaatagaaatgcaatatttttaatttattctactgaaatggtttaaaatgatgccttgtatttattgaaagcttaaatgggtgggtgtttctgcacatacctctgcagtacctcaccagggagcattccagtatcatgcagggtcctgtgatctagccaggagcagccattaacctagtgattaatatgggagacattaccatatggaggatggatgcttcactttgtcaagcacctcagttacacattcgccttttctaggattgcatttcccaagtgctattgcaataacagttgatactcattttaggtaccagaccttttgagttcaactgatcaaaccaaaggaaaagtgttgctagagaaaattggggaaaaggtgaaaaagaaaaaatggtagtaattgagcagaaaaaaattaatttatatatgtattgattggcaaccagatttatctaagtagaactgaattggctaggaaaaaagaaaaactgcatgttaatcattttcctaagctgtccttttgaggcttagtcagtttattgggaaaatgtttaggattattccttgctattagtactcattttatgtatgttacccttcagtaagttctccccattttagttttctaggactgaaaggattcttttctacattatacatgtgtgttgtcatatttggcttttgctatatactttaacttcattgttaaatttttgtattgtatagtttctttggtgtatcttaaaacctatttttgaaaaacaaacttggcttgataatcatttgggcagcttgggtaagtacgcaacttacttttccaccaaagaactgtcagcagctgcctgcttttctgtgatgtatgtatcctgttgacttttccagaaattttttaagagtttgagttactattgaatttaatcagactttctgattaaagggttttctttcttttttaataaaacacatctgtctggtatggta

SEQ ID NO: 795 - protein, 344 aa, Homo sapiens
MSALAARLLQPAHSCSLRLRPFHLAAVRNEAVVISGRKLAQQIKQEVRQEVEEWVASGNKRPHLSVILVGENPASHSYVLNKTRAAAVVGINSETIMKPASISEEELLNLINKLNNDDNVDGLLVQLPLPEHIDERRICNAVSPDKDVDGFHVINVGRMCLDQYSMLPATPWGVWEIIKRTGIPTLGKNVVVAGRSKNVGMPIAMLLHTDGAHERPGGDATVTISHRYTPKEQLKKHTILADIVISAAGIPNLITADMIKEGAAVIDVGINRVHDPVTAKPKLVGDVDFEGVRQKAGYITPVPGGVGPMTVAMLMKNTIIAAKKVLRLEEREVLKSKELGVATN

SEQ ID NO: 796 - DNA, 2225 bp, Homo sapiens
ggaaaatttgtcacagcagccagaggggtttaacaggagtgcagagggataagggcagcttctgccctctgcccaagagctggccacctctttaaagactgagggaacagtgggaggaggaactgtgggacagtgtggtacctatctgtcccccctctggaggggttgacaagggaaagggcaccggggggcacagagatgcaggacagattgcacatcctggaggacctgaatatgctctacattcggcagatggcactcagcctggaggacacggagttgcagaggaagctagaccatgagatccggatgagggaaggggcctgtaagctgctggcagcctgctcccagcgagagcaggctctggaggccaccaagagcctgctagtgtgcaacagccgcatcctcagctacatgggcgagctgcagcggcgcaaggaggcgcaggtgctggggaagacaagccggcggccttctgacagtggcccgcccgctgagcgctccccctgccgcggccgggtctgcatctctgacctccggattccactcatgtggaaggacacagaatatttcaagaacaaaggtgacttgcaccgctgggctgtgttcctgctgctgcagctgggggaacacatccaggacacagagatgatcctagtggacaggaccctcacagacatctcctttcagagcaatgtgctcttcgctgaggcggggccagactttgaactgcggttagagctgtatggggcctgtgtggaagaagagggggccctgactggcggccccaagaggcttgccaccaaactcagcagctccctgggccgctcctcagggaggcgtgtccgggcatcgctggacagtgctgggggttcagggagcagtcccatcttgctccccaccccagttgttggtggtcctcgttaccacctcttggctcacaccacactcaccctggcagcagtgcaagatggattccgcacacatgacctcacccttgccagtcatgaggagaaccctgcctggctgcccctttatggtagcgtgtgttgccgtctggcagctcagcctctctgcatgactcagcccactgcaagtggtaccctcagggtgcagcaagctggggagatgcagaactgggcacaagtgcatggagttctgaaaggcacaaacctcttctgttaccggcaacctgaggatgcagacactggggaagagccgctgcttactattgctgtcaacaaggagactcgagtccgggcaggggagctggaccaggctctaggacggcccttcaccctaagcatcagtaaccagtatggggatgatgaggtgacacacacccttcagacagaaagtcgggaagcactgcagagctggatggaggctctgtggcagcttttctttgacatgagccaatggaagcagtgctgtgatgaaatcatgaaaattgaaactcctgctccccggaaaccaccccaagcactggcaaagcaggggtccttgtaccatgagatggctattgagccgctggatgacatcgcagcggtgacagacatcctgacccagcgggagggcgcaaggctggagacacccccaccctggctggcaatgtttacagaccagcctgccctgcctaacccctgctcgcctgcctcagtggccccagccccagactggacccaccccctgccctgggggagaccccgaaccttttccctggatgctgtccccccagaccactcccctagggctcgctcggttgcccccctcccacctcagcgatccccacggaccagaggcctctgcagcaaaggccaacctcgcacttggctccagtcaccagtgtgagagagaaaggtgctggcataggatctgcccagaagagaaaatgacccatgcgcagttgggctctggatacggcgctgtctatagcaagttggccagtctggcctcctgttcctctgctggacctggggtaggctgcaggggtgggcagaagcccctcttaaattgtggttgccatggtaccgagggactcattcctggggctcgctgggacctccctaaacccttcctggaagaaaactggaaccaactctgccctacctccctgcactaaccagctttgaggatggcactgaagaacccttggagcaaacatacctcccttgtgactcccacatcaaccattaaagttatttaacagcaaaaaaaaaaaaaaa

SEQ ID NO: 797 - protein, 550 aa, Homo sapiens
MQDRLHILEDLNMLYIRQMALSLEDTELQRKLDHEIRMREGACKLLAACSQREQALEATKSLLVCNSRILSYMGELQRRKEAQVLGKTSRRPSDSGPPAERSPCRGRVCISDLRIPLMWKDTEYFKNKGDLHRWAVFLLLQLGEHIQDTEMILVDRTLTDISFQSNVLFAEAGPDFELRLELYGACVEEEGALTGGPKRLATKLSSSLGRSSGRRVRASLDSAGGSGSSPILLPTPVVGGPRYHLLAHTTLTLAAVQDGFRTHDLTLASHEENPAWLPLYGSVCCRLAAQPLCMTQPTASGTLRVQQAGEMQNWAQVHGVLKGTNLFCYRQPEDADTGEEPLLTIAVNKETRVRAGELDQALGRPFTLSISNQYGDDEVTHTLQTESREALQSWMEALWQLFFDMSQWKQCCDEIMKIETPAPRKPPQALAKQGSLYHEMAIEPLDDIAAVTDILTQREGARLETPPPWLAMFTDQPALPNPCSPASVAPAPDWTHPLPWGRPRTFSLDAVPPDHSPRARSVAPLPPQRSPRTRGLCSKGQPRTWLQSPV

SEQ ID NO: 798 - DNA, 2559 bp, Homo sapiens
gactacgtgggtctggagctgactgccgtcctgacacgtcctagagctgcaagtcctgccagagagccaccatgacctctcagcctctcaggctagcagaagagtatggcccaagtcctggggagtctgaactggctgtgaacccctttgatgggcttcccttctcttcccgctactatgagctgctgaagcagcgccaagccttgcccatctgggctgctcgctttaccttcttggagcagttggagagtaaccccactggagtggtgctggtgtctggggagcctggttctggcaagagcacccagatccctcagtggtgtgcagagtttgcgctggccagagggttccagaaaggacaggttactgttactcagccctaccctcttgcagcccgggagcctggctctgcgggttgctgatgagatggacctgaccctgggtcatgaggttggatccagcatcccccaggaggactgcacggggcccaacaccctgctcaggttctgctgggacaggctgcttctgcaggaggtggcctcgacccgaggcactggagcctggggcgtgctggtactagatgaggctcaggagcggtcggtggcatcagattcactccaggggctactgcaagatgccaggctggaaaaacttccgggggacctcagagtggttgtggttactgacccagcccttgaacctaagctccgagctttctggggcaatcctcctattgtgcatatacccagagagcctggtgagagaccttcccccatctactgggacaccatcccacctgatcgggtggaagctgcctgccaagcagtgcttgaattgtgtcggaaggagcttccaggagatgtgctagtgttcctgcccagtgaggaggaaatttccctgtgctgtgaatccttgtccagggaggtagagtccttgcttctccaagggcttccaccacgagtactgccccttcacccagactgtggacgagccgttcaggctgtgtatgaggacatggatgcccgaaaggttgtggtcactcactggctggctgacttctccttctccctcccttccatccaacatgtcatcgactcaggactggagctccgaagtgtttacaatcctaggatccgagcagaattccaagtgttgaggccaatcagcaagtgtcaggcagaggcaagacgattgcgagcaagagggttcccaccaggatcctgcctctgcctgtatcctaagtccttcttagaactagaagctccaccattgccacaacccagggtgtgtgaggagaatctgagctccctggtgttactactaaaaaggagacagattgcagagccaggggagtgtcacttcctggaccagcctgctccagaagcactgatgcaagccctggaagatttagactatctggcagccctggatgatgatggggacctgtcagatctgggtgtcatactatcagaattccctctggcccctgagctggccaaagccctgctggcctcatgcgagtttgactgtgtggacgagatgctcaccctggctgccatgctcacagctgcccctgggtttacccgtcctccactcagtgcagaagaagctgccctgcgtcgggccctggaacacacggatggtgaccacagttctctgatccaggtgtatgaagcctttatacaaagtggagcagatgaggcttggtgccaggctcgaggtctgaattgggcagcattgtgccaagcccataaacttcggggagaactcctagaactcatgcaacgaattgaacttcccttgtccctaccagcctttggctctgagcagaatcgcagagaccttcagaaagcactggtgtcagaatactttctcaaggtggccagagacacagacgggactggaaattaccttctcctaacccataagcatgtggcccagctctcctcatactgctgctaccgaagccgcagagctcctgccagacccccaccatgggtgctctaccacaatttcaccatatccaaagacaactgcctctccattgtttctgagattcaaccacagatgctggtggaattggcccctccatacttcctgagtaacttgcctcccagtgagagcagagaccttctgaaccagctaagggaaggaatggcagattctacagcagggagcaaatcatcctcagcccaggagttcagagatccctgtgtcctgcagtgacctgcctgcctatggaatggagctgggttcatctcatcacattagattatccctcagggtgacaccaaagcacccagacagatttagaagcccaaagtttagggtcaaatgtaaaccctggaacctgagtcccaagaaatggtagactgggaatggaaagaatggggtaaaccacagtctacatagggaaggactctttccttagccttctcttattgattggagagggactgacatgctcctcattctcttaactttgccaaacccattcttgtactcccttgtgatctataaaagatttttctatgatgccaaaaaaaaaaaaaaaaaaaa

SEQ ID NO: 799 - protein, 599 aa, Homo sapiens
MDLTLGHEVGSSIPQEDCTGPNTLLRFCWDRLLLQEVASTRGTGAWGVLVLDEAQERSVASDSLQGLLQDARLEKLPGDLRVVVVTDPALEPKLRAFWGNPPIVHIPREPGERPSPIYWDTIPPDRVEAACQAVLELCRKELPGDVLVFLPSEEEISLCCESLSREVESLLLQGLPPRVLPLHPDCGRAVQAVYEDMDARKVVVTHWLADFSFSLPSIQHVIDSGLELRSVYNPRIRAEFQVLRPISKCQAEARRLRARGFPPGSCLCLYPKSFLELEAPPLPQPRVCEENLSSLVLLLKRRQIAEPGECHFLDQPAPEALMQALEDLDYLAALDDDGDLSDLGVILSEFPLAPELAKALLASCEFDCVDEMLTLAAMLTAAPGFTRPPLSAEEAALRRALEHTDGDHSSLIQVYEAFIQSGADEAWCQARGLNWAALCQAHKLRGELLELMQRIELPLSLPAFGSEQNRRDLQKALVSEYFLKVARDTDGTGNYLLLTHKHVAQLSSYCCYRSRRAPARPPPWVLYHNFTISKDNCLSIVSEIQPQMLVELAPPYFLSNLPPSESRDLLNQLREGMADSTAGSKSSSAQEFRDPCVLQ

SEQ ID NO: 800 - DNA, 1427 bp, Homo sapiens
cgaaaatggcggcggcggcgacggccgggcgctcctgaagcagcagttatggagcttccctcagggccggggccggagcggctctttgactcgcaccggcttccgggtgactgcttcctactgctcgtgctgctgctctacgcgccagtcgggttctgcctcctcgtcctgcgcctctttctcgggatccacgtcttcctggtcagctgcgcgctgccagacagcgtccttcgcagattcgtagtgcggaccatgtgtgcggtgctagggctcgtggcccggcaggaggactccggactccgggatcacagtgtcagggtcctcatttccaaccatgtgacacctttcgaccacaacatagtcaatttgcttaccacctgtagcacccctctactcaatagtccccccagctttgtgtgctggtctcggggcttcatggagatgaatgggcggggggagttggtggagtcactcaagagattctgtgcttccacgaggcttccccccactcctctgctgctattccctgaggaagaggccaccaatggccgggaggggctcctgcgcttcagttcctggccattttctatccaagatgtggtacaacctcttaccctgcaagttcagagacccctggtctctgtgacggtgtcagatgcctcctgggtctcagaactgctgtggtcacttttcgtccctttcacggtgtatcaagtaaggtggcttcgtcctgttcatcgccaactaggggaagcgaatgaggagtttgcactccgtgtacaacagctggtggccaaggaattgggccagacagggacacggctcactccagctgacaaagcagagcacatgaagcgacaaagacaccccagattgcgcccccagtcagcccagtcttctttccctccctcccctggtccttctcctgatgtgcaactggcaactctggctcagagagtcaaggaagttttgccccatgtgccattgggtgtcatccagagagacctggccaagactggctgtgtagacttgactatcactaatctgcttgagggggccgtagctttcatgcctgaagacatcaccaagggaactcagtccctacccacagcctctgcctccaagtttcccagctctggcccggtgacccctcagccaacagccctaacatttgccaagtcttcctgggcccggcaggagagcctgcaggagcgcaagcaagcactatatgaatacgcaagaaggagattcacagagagacgagcccaggaggctgactgagctcaaaggaacaggatggcacccagagccgcaggacggagactgggggcagccctcacccaactcacaacaggctggatgggtgggtggtaaaaagggaaggatgaggctcccccaatgtcacattaaattcatggttttcattc

SEQ ID NO: 801 - DNA, 2326 bp, Homo sapiens
cgtggatcccgagaaagaggcgcaggacgaggaggcagaacccgactggcgcgtagagcagcagcacgagcagtaggaagcagtcacccggaagcctgggggcgagaggcgaagtggtcaggcgccgaaggccgagagcacgcggggatcggtctcttcccgccgggtctcttaccggtgcgagtcaaagagccgctccggccccggccctgagggaagctccataactgctgcttcaggagcgcccggccgtcgccgccgccgccattttcgcgcccggccgcaggggctcttgggaaggcggagtctttgggcatccgcccggggtgaggggacccgaagtcctgaggcgcgccggaagggctagcggtcccagcataccccgcggccccttgggccgtctcacaactcgcgtccggcggagaccacaattcccggcattcgtggggcagggaggagtcggcctcccggaatcctggtcccggcgtgcacttctgaaggacttcaggtaccggcgtgccccgcgtcctactgtccgcctgctcgcgtcctgggtgccgcctctgagtagggcgggcgaggaggcagccaaggcggagctgatggctgcgccgagggcggggcggggtgcaggctggagccttcgggcatggcgggctttggggggcattcgctgggggaggagaccccgtttgacccctgacctccgggccctgctgacgtcaggaacttctgacccccgggcccgagtgacttatgggacccccagtctctgggcccggttgtctgttggggtcactgaaccccgagcatgcctgacgtctgggaccccgggtccccgggcacaactgactgcggtgaccccagataccaggacccgggaggcctcagagaactctggaacccgttcgcgcgcgtggctggcggtggcgctgggcgctgggggggcagtgctgttgttgttgtggggcgggggtcggggtcctccggccgtcctcgccgccgtccctagcccgccgcccgcttctccccggagtcagtacaacttcatcgcagatgtggtggagaagacagcacctgccgtggtctatatcgagatcctggaccggcaccctttcttgggccgcgaggtccctatctcgaacggctcaggattcgtggtggctgccgatgggctcattgtcaccaacgcccatgtggtggctgatcggcgcagagtccgtgtgagactgctaagcggcgacacgtatgaggccgtggtcacagctgtggatcccgtggcagacatcgcaacgctgaggattcagactaaggagcctctccccacgctgcctctgggacgctcagctgatgtccggcaaggggagtttgttgttgccatgggaagtccctttgcactgcagaacacgatcacatccggcattgttagctctgctcagcgtccagccagagacctgggactcccccaaaccaatgtggaatacattcaaactgatgcagctattgattttggaaactctggaggtcccctggttaacctggatggggaggtgattggagtgaacaccatgaaggtcacagctggaatctcctttgccatcccttctgatcgtcttcgagagtttctgcatcgtggggaaaagaagaattcctcctccggaatcagtgggtcccagcggcgctacattggggtgatgatgctgaccctgagtcccagcatccttgctgaactacagcttcgagaaccaagctttcccgatgttcagcatggtgtactcatccataaagtcatcctgggctcccctgcacaccgggctggtctgcggcctggtgatgtgattttggccattggggagcagatggtacaaaatgctgaagatgtttatgaagctgttcgaacccaatcccagttggcagtgcagatccggcggggacgagaaacactgaccttatatgtgacccctgaggtcacagaatgaatagatcaccaagagtatgaggctcctgctctgatttcctccttgcctttctggctgaggttctgagggcaccgagacagagggttaaatgaaccagtgggggcaggtccctccaaccaccagcactgactcctgggctctgaagaatcacagaaacactttttatataaaataaaattatacctagcaacatattatagtaaaaaatgaggtgggagggctggatcttttcccccaccaaaaggctagaggtaaagctgtatccccctaaacttaggggagatactggagctgaccatcctgacctcctattaaagaaaatgagctgctgaaaaaaaaaaaaaaaa

SEQ ID NO: 802 - protein, 458 aa, Homo sapiens
MAAPRAGRGAGWSLRAWRALGGIRWGRRPRLTPDLRALLTSGTSDPRARVTYGTPSLWARLSVGVTEPRACLTSGTPGPRAQLTAVTPDTRTREASENSGTRSRAWLAVALGAGGAVLLLLWGGGRGPPAVLAAVPSPPPASPRSQYNFIADVVEKTAPAVVYIEILDRHPFLGREVPISNGSGFVVAADGLIVTNAHVVADRRRVRVRLLSGDTYEAVVTAVDPVADIATLRIQTKEPLPTLPLGRSADVRQGEFVVAMGSPFALQNTITSGIVSSAQRPARDLGLPQTNVEYIQTDAAIDFGNSGGPLVNLDGEVIGVNTMKVTAGISFAIPSDRLREFLHRGEKKNSSSGISGSQRRYIGVMMLTLSPSILAELQLREPSFPDVQHGVLIHKVILGSPAHRAGLRPGDVILAIGEQMVQNAEDVYEAVRTQSQLAVQIRRGRETLTLYVTPEVTE

SEQ ID NO: 803 - DNA, 453 bp, Homo sapiens
gcaacgcgagtgggagcaccaggatctcgggctcggaacgagactgcacggattgttttaagaaaatggcagacaaaccagacatgggggaaatcgccagcttcgataaggccaagctgaagaaaacggagacgcaggagaagaacaccctgccgaccaaagagaccattgagcaggagaagcggagtgaaatttcctaagatcctggaggatttcctacccccgtcctcttcgagaccccagtcgtgatgtggaggaagagccacctgcaagatggacacgagccacaagctgcactgtgaacctgggcactccgcgccgatgccaccggcctgtgggtctctgaagggacccccccccaatcggactgccaaattctccggtttgccccgggatattatagaaaattatttgtatgaataatgaaaataaaacacacctcgtggcatggca

SEQ ID NO: 804 - protein, 44 aa, Homo sapiens
MADKPDMGEIASFDKAKLKKTETQEKNTLPTKETIEQEKRSEIS

SEQ ID NO: 805 - DNA, 749 bp, Homo sapiens
caccaaatggcggatgacgccggtgcagcgggggggcccagagccctggtggccatgggatagggaaccgcggtggcttccacggaggtttcggcagtggcatccggggccggggtcgcgggagtggacggggccgtgccgaggccgcggagctcgcggaggcaaggccgaggataaggagtggatgcctgtcaccaagctgggccgcttggtcaaggacatgaagatcaagtccctggaggagatctatctcttctccctgcccattaaggaatctgagatcattgatttcttcctgggggactctctcaaggatgaggttttgaagattatgccggtgcagaagcagacccgtgccggccagcgcaccaggttcaaggtgacaggccgctgcggctctgtgctggtgcgcctcatccctgcacccaggggcactggcatcgtctccgcacctgtgcccaagaagctgctcatgatggctggtatcgatgactgctacacctcagcccggggctgcactgccaccctgggcaacttcgccaaggccacctttgatgccatctctaagacctacagctacctgacccccgacctctggaaggagactgtatttaccaagtctccctatcaggaattcactgaccacctcgtcaagacccacaccagagtctcggtgcagcggacccaggcttcagatgtggctacaacatagggtttttatacaagaaaaataaagtgaattaagcctg

SEQ ID NO: 806 - DNA, 1221 bp, Homo sapiens
cgcaggctggaaggaagacgaacctacgaagcagagatctgaagacagcatgtacacagccattccccagagtggctctccattcccaggctcagtgcaggatccaggcctgcatgtgtggcgggtggagaagctgaagccggtgcctgtggcgcaagagaaccagggcgtcttcttctcgggggactcctacctagtgctgcacaatggcccagaagaggtttcccatctgcacctgtggataggccagcagtcatcccgggatgagcagggggcctgtgccgtgctggctgtgcacctcaacacgctgctgggagagcggcctgtgcagcaccgcgaggtgcagggcaatgagtctgacctcttcatgagctacttcccacggggcctcaagtaccaggaaggtggtgtggagtcagcatttcacaagacctccacaggagccccagctgccatcaagaaactctaccaggtgaaggggaagaagaacatccgtgccaccgagcgggcactgaactgggacagcttcaacactggggactgcttcatcctggacctgggccagaacatcttcgcctggtgtggtggaaagtccaacatcctggaacgcaacaaggcgagggacctggccctggccatccgggacagtgagcgacagggcaaggcccaggtggagattgtcactgatggggaggagcctgctgagatgatccaggtcctgggccccaagcctgctctgaaggagggcaaccctgaggaagacctcacagctgacaaggcaaatgcccaggccgcagctctgtataaggtctctgatgccactggacagatgaacctgaccaaggtggctgactccagcccctttgcccttgaactgctgatatctgatgactgctttgtgctggacaacgggctctgtggcaagatctatatctggaaggggcgaaaagcgaatgagaaggagcggcaggcagccctgcaggtggccgagggcttcatctcgcgcatgcagtacgccccgaacactcaggtggagattctgcctcagggccgtgagagtcccatcttcaagcaatttttcaaggactggaaatgagggtgggcgtcttcctgccccatgctcccctgccccccaccacctgcctgcttgcttctctggctgcctggtcagtgcagaggtgccccctgcagatgttcaataaaggagacaagtgctttccc

SEQ ID NO: 807 - protein, 348 aa, Homo sapiens
MYTAIPQSGSPFPGSVQDPGLHVWRVEKLKPVPVAQENQGVFFSGDSYLVLHNGPEEVSHLHLWIGQQSSRDEQGACAVLAVHLNTLLGERPVQHREVQGNESDLFMSYFPRGLKYQEGGVESAFHKTSTGAPAAIKKLYQVKGKKNIRATERALNWDSFNTGDCFILDLGQNIFAWCGGKSNILERNKARDLALAIRDSERQGKAQVEIVTDGEEPAEMIQVLGPKPALKEGNPEEDLTADKANAQAAALYKVSDATGQMNLTKVADSSPFALELLISDDCFVLDNGLCGKIYIWKGRKANEKERQAALQVAEGFISRMQYAPNTQVEILPQGRESPIFKQFFKDWK

SEQ ID NO: 808 - DNA, 2828 bp, Homo sapiens
ggcacgaggcgcccgcctgctacgagtagaacgctgtccgcagcttgcgcatttcgcagccgctgccgcctcgccgctgctccttcgtaaggccacttccgcacaccgacaccaacatgaacggacagctcaacggcttccacgaggcgttcatcgaggagggcacattccttttcacctcagagtcggtcggggaaggccacccagataagatttgtgaccaaatcagtgatgctgtccttgatgcccaccttcagcaggatcctgatgccaaagtagcttgtgaaactgttgctaaaactggaatgatccttcttgctggggaaattacatccagagctgctgttgactaccagaaagtggttcgtgaagctgttaaacacattggatatgatgattcttccaaaggttttgactacaagacttgtaacgtgctggtagccttggagcaacagtcaccagatattgctcaaggtgttcatcttgacagaaatgaagaagacattggtgctggagaccagggcttaatgtttggctatgccactgatgaaactgaggagtgtatgcctttaaccattgtcttggcacacaagctaaatgccaaactggcagaactacgccgtaatggcactttgccttggttacgccctgattctaaaactcaagttactgtgcagtatatgcaggatcgaggtgctgtgcttcccatcagagtccacacaattgttatatctgttcagcatgatgaagaggtttgtcttgatgaaatgagggatgccctaaaggagaaagtcatcaaagcagttgtgcctgcgaaataccttgatgaggatacaatctaccacctacagccaagtggcagatttgttattggtgggcctcagggtgatgctggtttgactggacgcaaaatcattgtggacacttatggcggttggggtgctcatggaggaggtgccttttcaggaaaggattataccaaggtcgaccgttcagctgcttatgctgctcgttgggtggcaaaatcccttgttaaaggaggtctgtgccggagggttcttgttcaggtctcttatgctattggagtttctcatccattatctatctccattttccattatggtacctctcagaagagtgagagagagctattagagattgtgaagaagaatttcgatctccgccctggggtcattgtcagggatctggatctgaagaagccaatttatcagaggactgcagcctatggccactttggtagggacagcttcccatgggaagtgcccaaaaagcttaaatattgaaagtgttagccttttttccccagacttgttggcgtaggctacagagaagccttcaagctctgagggaaagggccctccttcctaaattttcctgtcctctttcagctcctgaccagttgcagtcactctagtcaatgacatgaattttagcttttgtgggggactgtaagttgggcttgctattctgtccctaggtgttttgttcaccattataatgaatttagtgagcataggtgatccatgtaactgcctagaaacaacactgtagtaaataatgctttgaaattgaacctttgtgccctatcacccaacgctccaaagtcataattgcattgactttccccaccagatgctgaaaatgtccttgtgatgtgcacgtaaagtacttgtagttccacttatagcctctgtctggcaatgccacagccctgtcagcatgaatttgtaatgtcttgagctctattatgaatgtgaagccttccccttatcctccctgtaacttgatccatttctaattatgtagctctttgtcagggagtgttccctatccaatcaatcttgcatgtaacgcaagttcccagttggagctccagcctgacatcaaaaaaggcagttaccattaaaccatctccctggtgcttatgctcttaattgccacctctaacagcaccaaatcaaaatctctccactttcagctgtcttttggaggacgtacgtaataaggttttaatttagtaaaccaatcctatgcatggtttcagcactagccaaacctcaccaactcctagttctagaaaaacaggcacttggcagccttgtgatgtcatacagagaagtcacagggcagtacctgagggtctgtaggttgcacactttggtaccagataacttttttttttctttataagaaagcctgagtactccacactgcacaataactcctcccagggttttaactttgttttattttcaaaaccaggtccaatgagctttctgaacagctggtgtagctacagagaaaccagcttccttcagagagcagtgcttttggcggggaggaggaaatcccttcatacttgaacgttttctaattgcttatttattgtattctggggtatggcgtaagtacagagaagccatcacctcagatggcagcttttaaaagattttttttttttctctcaacaccatgattcctttaacaacatgtttccagcattcccaggtaggccaaggtgtcctacagaaaaaccttgggttagacctacagggggtctggctggtgttaacagaagggagggcagagctggtgcggctggccatggagaaagctgacttggctggtgtggtacagagaagccagcttgtttacatgcttattccatgactgcttgccctaagcagaaagtgcctttcaggatctatttttggaggtttattacgtatgtctggttctcaattccaacagtttaatgaagatctaaataaaatgctaggttctaccttaaaaaaaaaaaaaaaaaa

SEQ ID NO: 809 - protein, 395 aa, Homo sapiens
MNGQLNGFHEAFIEEGTFLFTSESVGEGHPDKICDQISDAVLDAHLQQDPDAKVACETVAKTGMILLAGEITSRAAVDYQKVVREAVKHIGYDDSSKGFDYKTCNVLVALEQQSPDIAQGVHLDRNEEDIGAGDQGLMFGYATDETEECMPLTIVLAHKLNAKLAELRRNGTLPWLRPDSKTQVTVQYMQDRGAVLPIRVHTIVISVQHDEEVCLDEMRDALKEKVIKAVVPAKYLDEDTIYHLQPSGRFVIGGPQGDAGLTGRKIIVDTYGGWGAHGGGAFSGKDYTKVDRSAAYAARWVAKSLVKGGLCRRVLVQVSYAIGVSHPLSISIFHYGTSQKSERELLEIVKKNFDLRPGVIVRDLDLKKPIYQRTAAYGHFGRDSFPWEVPKKLKY

SEQ ID NO: 810 - DNA, 2405 bp, Homo sapiens
atgacactctgagcgctccgggaacggacagcccggcggcttcccgaagccggcggcgcagctgcccggggcgagggggagaaagggagagagggagggggagggcgggcgaagcgggagagccagagactcctcggcgctgagcgcggcggcggcccgggcagccccacgcccctgcctcgcgcgccgcccgcgccatgaagcacatcccggtcctcgaggacgggccgtggaagaccgtgtgcgtgaaggagctgaacggccttaagaagctcaagcggaaaggcaaggagccggcgcggcgcgcgaacggctataaaactttccgactggacttggaagcgcccgagccccgcgccgtagccaccaacgggctgcgggacaggacccatcggctgcagccggtcccggtaccggtgccggtgccagtcccagtggcgccggccgttcccccaagagggggcacggacacagccggggagcgcgggggctctcgggcgcccgaggtctccgacgcgcggaaacgctgcttcgccctaggcgcagtggggccaggactccccacgccgccgccgccgccgcctcctgcgccccagagccaggcacctgggggcccagaggcacagcctttccgggagccgggtccgcgtcctcgcatcttgctgtgcgcaccgcccgcgcgccccgcgccgtcagcacccccagcaccgccagcgcccccggagtccactgtgcgccctgcgcccccgacgcgccccggggaaagttcctactcgtcaatttcacacgtaatttacaataaccaccaggattcctccgcgtcgcctaggaaacgaccgggcgaagcgactgccgcctcctccgagatcaaagccctgcagcagacccggaggctcctggcgaacgccagggagcggacgcgggtgcacaccatcagcgcagccttcgaggcgctcaggaagcaggtgccgtgctactcatatgggcagaagctgtccaaactggccatcctgaggatcgcctgtaactacatcctgtccctggcgcggctggctgaccttgactacagtgccgaccacagcaacctcagcttctccgagtgtgtgcagcgctgcacccgcaccctgcaggccgagggacgtgccaagaagcgcaaggagtgactggctgcaggcaagaccaaggccaccactgtgggccctccttccagtcaggcctgaggacaaggtgagctcgctgagtccagcctcgtggtcttctccaagatgccgccagatgcccagcctacagcctctcagggtcggatcggagcacgcctgcctccctctcccctccgccctcacccagccaatccgaggctgcttcgcactttgccctctgcctggtggggaggggagagctcagcccccgactcactcagaccccaaggcccactgtccagctgcagaaattcgttgccaaagattggacagagacaccgaaggaaatggggtggtgaaaccccacagcgaaaagccacaccgttgctctgtgacttttgctcctcctgttgcctgagccccatctcaagccaaagatgagtcagtggttctgctaggaactcatggaatggatgggcatttgatgacccctgggggtcatcttggccctctgacctggtgctctctctccactgggccttgtgctggctgagtgcaagacaagccttaggggctgtgagagggaggctggggtgcctgggcggggctgggagtgggacctgagatccctgcccactctctccccttcattggctgcccaggccactggccccagttctcagtgtcccttgggtccaggctccttgggccctaagcatcaccagaagggagtaagcagggagagaagcaatattactccctcccctacaccagggacttgccccagggcagctacctatgggtctttgcttccccagccagcctctcctcactgtgacccacccccatgggcccccgtcccaggcagccagcaccatgggcaggccctgccatgggcagaaaaagagtttttctcttgttcagcctgcacgtggcctgaggaaggagtagaggctgggttggctggagccgtcctactgggcaagatggcgccccacttggagggcggtggtctgttacagggtgtgcaggggcagagaaggaagggaccaggggactgggccagtatgtggaggatggggcctgcgtgttcaaagccaaggcccgccccttccttgtgctcaaatggccaaagctgttcacgtctgtgctcaaccatctgcttcaaattgaagtaaaagccccaaaatgtcaagaaaaaaaaaaaaaaaaaaaaaaaaaaaaaaaaaaaaaaaaaaaaaaaaaaaaaaaaaaaaaaaaaaaaag

SEQ ID NO: 811 - protein, 321 aa, Homo sapiens
MKHIPVLEDGPWKTVCVKELNGLKKLKRKGKEPARRANGYKTFRLDLEAPEPRAVATNGLRDRTHRLQPVPVPVPVPVPVAPAVPPRGGTDTAGERGGSRAPEVSDARKRCFALGAVGPGLPTPPPPPPPAPQSQAPGGPEAQPFREPGPRPRILLCAPPARPAPSAPPAPPAPPESTVRPAPPTRPGESSYSSISHVIYNNHQDSSASPRKRPGEATAASSEIKALQQTRRLLANARERTRVHTISAAFEALRKQVPCYSYGQKLSKLAILRIACNYILSLARLADLDYSADHSNLSFSECVQRCTRTLQAEGRAKKRKE

SEQ ID NO: 812 - DNA, 2738 bp, Homo sapiens
ggcacgagggatggcggttgtatctgctgttcgctggctgggcctccgcagcaggcttggccagccgctgacgggtcggcgggcgggtttgtgtgaacaggcacgcagctgcagattttattctggtagtgcaaccctctcaaaggttgaaggaactgatgtaacagggattgaagaagtagtaattccaaaaaagaaaacttgggataaagtagccgttcttcaggcacttgcatccacagtaaacagggataccacagctgtgccttatgtgtttcaagatgatccttaccttatgccagcatcatctttggaatctcgttcatttttactggcaaagaaatccggggagaatgtggccaagtttattattaattcataccccaaatattttcagaaggacatagctgaacctcatataccgtgtttaatgcctgagtactttgaacctcagatcaaagacataagtgaagccgccctgaaggaacgaattgagctcagaaaagtcaaagcctctgtggacatgtttgatcagcttttgcaagcaggaaccactgtgtctcttgaaacaacaaatagtctcttggatttattgtgttactatggtgaccaggagccctcaactgattaccattttcaacaaactggacagtcagaagcattggaagaggaaaatgatgagacatctaggaggaaagctggtcatcagtttggagttacatggcgagcaaaaaacaacgctgagagaatcttttctctaatgccagagaaaaatgaacattcctattgcacaatgatccgaggaatggtgaagcaccgagcttatgagcaggcattaaacttgtacactgagttactaaacaacagactccatgctgatgtatacacatttaatgcattgattgaagcaacagtatgtgcgataaatgagaaatttgaggaaaaatggagtaaaatactggagctgctaagacacatggttgcacagaaggtgaaaccaaatcttcagacttttaataccattctgaaatgtctccgaagatttcatgtgtttgcaagatcgccagccttacaggttttacgtgaaatgaaagccattggaatagaaccctcgcttgcaacatatcaccatattattcgcctgtttgatcaacctggagaccctttaaagagatcatccttcatcatttatgatataatgaatgaattaatgggaaagagattttctccaaaggacccggatgatgataagttttttcagtcagccatgagcatatgctcatctctcagagatctagaacttgcctaccaagtacatggccttttaaaaaccggagacaactggaaattcattggacctgatcaacatcgtaatttctattattccaagttcttcgatttgatttgtctaatggaacaaattgatgttaccttgaagtggtatgaggacctgataccttcagcctactttccccactcccaaacaatgatacatcttctccaagcattggatgtggccaatcggctagaagtgattcctaaaatttggaaagatagtaaagaatatggtcatactttccgcagtgacctgagagaagagatcctgatgctcatggcaagggacaagcacccaccagagcttcaggtggcatttgctgactgtgctgctgatatcaaatctgcgtatgaaagccaacccatcagacagactgctcaggattggccagccacctctctcaactgtatagctatcctctttttaagggctgggagaactcaggaagcctggaaaatgttggggcttttcaggaagcataataagattcctagaagtgagttgctgaatgagcttatggacagtgcaaaagtgtctaacagcccttcccaggccattgaagtagtagagctggcaagtgccttcagcttacctatttgtgagggcctcacccagagagtaatgagtgattttgcaatcaaccaggaacaaaaggaagccctaagtaatctaactgcattgaccagtgacagtgatactgacagcagcagtgacagcgacagtgacaccagtgaaggcaaatgaaagtggagattcaggagcagcaatggtctcaccatagctgctggaatcacacctgagaactgagatataccaatatttaacattgttacaaagaagaaaagatacagatttggtgaatttgttactgtgaggtacagtcagtacacagctgacttatgtagatttaagctgctaatatgctacttaaccatctattaatgcaccattaaaggcttagcatttaagtagcaacattgcggttttcagacacatggtgaggtccatggctcttgtcatcaggataagcctgcacacctagagtgtcggtgagctgacctcacgatgctgtcctcgtgcgattgccctctcctgctgctggacttctgcctttgttggcctgatgtgctgctgtgatgctggtccttcatcttaggtgttcatgcagttctaacacagttggggttgggtcaatagtttcccaatttcaggatatttcgatgtcagaaataacgcatcttaggaatgactaaacaagataatggcagtttaggctgcacaactggtaaaatgactgtagataaatgttgtaattagtgtacacgtttgtatttttgttaatatagccgctgccatagttttctaacttgaacagccaaaaaaaaaaaaaaaaaaaaaaaaa

SEQ ID NO: 813 - protein, 367 aa, Homo sapiens [sequence omitted]

SEQ ID NO: 814 - DNA, 2697 bp, Homo sapiens
acgcgggcacgcacacacggaagcacgcctccacttaactcgcgccgccgcggcagctcgagtccaccagcagcgccgtccgcttgaccgagatgctgcgggcctgtcagttatcgggtgtgaccgccgccgcccagagttgtctctgtgggaagtttgtcctccgtccattgcgaccatgccgcagatactctacttcaggcagctctgggttgactactggcaaaattgctggagctggccttttgtttgttggtggaggtattggtggcactatcctatatgccaaatgggattcccatttccgggaaagtgtagagaaaaccataccttactcagacaaactcttcgagatggttcttggtcctgcagcttataatgttccattgccaaagaaatcgattcagtcgggtccactaaaaatctctagtgtatcagaagtaatgaaagaatctaaacagtctgcctcacaactccaaaaacaaaagggagatactccagcttcagcaacagcacctacagaagcggctcaaattatttctgcagcaggtgataccctgtcggtcccagcccctgcagttcagcctgaggaatctttaaaaactgatcaccctgaaattggtgaaggaaaacccacacctgcactttcagaagaagcatcctcatcttctataagggagcgaccacctgaagaagttgcagctcgccttgcacaacaggaaaaacaagaacaagttaaaattgagtctctagccaagagcttagaagatgctctgaggcaaactgcaagtgtcactctgcaggctattgcagctcagaatgctgcggtccaggctgtcaatgcacactccaacatattgaaagccgccatggacaattctgagattgcaggcgagaagaaatctgctcagtggcgcacagtggagggtgcattgaaggaacgcagaaaggcagtagatgaagctgccgatgcccttctcaaagccaaagaagagttagagaagatgaaaagtgtgattgaaaatgcaaagaaaaaagaggttgctggggccaagcctcatataactgctgcagagggtaaacttcacaacatgatagttgatctggataatgtggtcaaaaaggtccaagcagctcagtctgaggctaaggttgtatctcagtatcatgagctggtggtccaagctcgggatgactttaaacgagagctggacagtattactccagaagtccttcctggatggaaaggaatgagtgtttcagacttagctgacaagctctctactgatgatctgaactccctcattgctcatgcacatcgtcgtattgatcagctgaacagagagctggcagaacagaaggccaccgaaaagcagcacatcacgttagccttggagaaacaaaagctggaagaaaagcgggcatttgactctgcagtagcaaaagcattagaacatcacagaagtgaaatacaggctgaacaggacagaaagatagaagaagtcagagatgccatggaaaatgaaatgagaacccagcttcgccgacaggcagctgcccacactgatcacttgcgagatgtccttagggtacaagaacaggaattgaagtctgaatttgagcagaacctgtctgagaaactctctgaacaagaattacaatttcgtcgtctcagtcaagagcaagttgacaactttactctggatataaatactgcctatgccagactcagaggaatcgaacaggctgttcagagccatgcagttgctgaagaggaagccagaaaagcccaccaactctggctttcagtggaggcattaaagtacagcatgaagacctcatctgcagaaacacctactatcccgctgggtagtgcagttgaggccatcaaagccaactgttctgataatgaattcacccaagctttaaccgcagctatccctccagagtccctgacccgtggggtgtacagtgaagagacccttagagcccgtttctatgctgttcaaaaactggcccgaagggtagcaatgattgatgaaaccagaaatagcttgtaccagtacttcctctcctacctacagtccctgctcctattcccacctcagcaactgaagccgcccccagagctctgccctgaggatataaacacatttaaattactgtcatatgcttcctattgcattgagcatggtgatctggagctagcagcaaagtttgtcaatcagctgaagggggaatccagacgagtggcacaggactggctgaaggaagcccgaatgaccctagaaacgaaacagatagtggaaatcctgacagcatatgccagcgccgtaggaataggaaccactcaggtgcagccagagtgaggtttaggaagattttcataaagtcatatttcatgtcaaaggaaatcagcagtgatagatgaagggttcgcagcgagagtcccggacttgtctagaaatgagcaggtttacaagtactgttctaaatgttaacacctgttgcatttatattctttccatttgctatcatgtcagtgaacgccaggagtgctttctttgcaacttgtgtaacattttctgttttttcaggttttactgatgaggcttgtgaggccaatcaaaataatgtttgtgatctctactactgttgattttgccctcggagcaaactgaataaagcaacaagatg

SEQ ID NO: 815 - protein, 758 aa, Homo sapiens
MLRACQLSGVTAAAQSCLCGKFVLRPLRPCRRYSTSGSSGLTTGKIAGAGLLFVGGGIGGTILYAKWDSHFRESVEKTIPYSDKLFEMVLGPAAYNVPLPKKSIQSGPLKISSVSEVMKESKQSASQLQKQKGDTPASATAPTEAAQIISAAGDTLSVPAPAVQPEESLKTDHPEIGEGKPTPALSEEASSSSIRERPPEEVAARLAQQEKQEQVKIESLAKSLEDALRQTASVTLQAIAAQNAAVQAVNAHSNILKAAMDNSEIAGEKKSAQWRTVEGALKERRKAVDEAADALLKAKEELEKMKSVIENAKKKEVAGAKPHITAAEGKLHNMIVDLDNVVKKVQAAQSEAKVVSQYHELVVQARDDFKRELDSITPEVLPGWKGMSVSDLADKLSTDDLNSLIAHAHRRIDQLNRELAEQKATEKQHITLALEKQKLEEKRAFDSAVAKALEHHRSEIQAEQDRKIEEVRDAMENEMRTQLRRQAAAHTDHLRDVLRVQEQELKSEFEQNLSEKLSEQELQFRRLSQEQVDNFTLDINTAYARLRGIEQAVQSHAVAEEEARKAHQLWLSVEALKYSMKTSSAETPTIPLGSAVEAIKANCSDNEFTQALTAAIPPESLTRGVYSEETLRARFYAVQKLARRVAMIDETRNSLYQYFLSYLQSLLLFPPQQLKPPPELCPEDINTFKLLSYASYCIEHGDLELAAKFVNQLKGESRRVAQDWLKEARMTLETKQIVEILTAYASAVGIGTTQVQPE

SEQ ID NO: 816 - DNA, 3175 bp, Homo sapiens
tagtgccgccgctccctactctgggggttgggactacctccttttccgcgggccccgcccaggcggctgcccgtgacctgcctgggcgcggggaactgaaagccggaaggggcaagacgggttcagttcgtcatggggctgtttggaaagacccaggagaagccgcccaaagaactggtcaatgagtggtcattgaagataagaaaggaaatgagagttgttgacaggcaaataagggatatccaaagagaagaagaaaaagtgaaacgatctgtgaaagatgctgccaagaagggccagaaggatgtctgcatagttctggccaaggagatgatcaggtcaaggaaggctgtgagcaagctgtatgcatccaaagcacacatgaactcagtgctcatggggatgaagaaccagctcgcggtcttgcgagtggctggttccctgcagaagagcacagaagtgatgaaggccatgcaaagtcttgtgaagattccagagattcaggccaccatgagggagttgtccaaagaaatgatgaaggctgggatcatagaggagatgttagaggacacttttgaaagcatggacgatcaggaagaaatggaggaagaagcagaaatggaaattgacagaattctctttgaaattacagcaggggccttgggcaaagcacccagtaaagtgactgatgcccttccagagccagaacctccaggagcgatggctgcctcagaggatgaggaggaggaggaagaggctctggaggccatgcagtcccggctggccacactccgcagctaggggctgcctaccccgctgggtgtgcacacactcctctcaagagctgccattttatgtgtctcttgcactacacctctgttgtgaggactaccattttggagaaggttctgtttgtctcttttcattctctgcccaggttttgggatcgcaaagggattgttcttataaaagtggcataaataaatgcatcatttttaggagtatagacagatatatcttattgtggggaggggaaagaaatccatctgctcatgaagcacttctgaaaatataggtgattgcctgaatgtcgaagactctacttttgtctataaaacactatataaatgaattttaataaatttttgctttagcacttggccccattgtagattgccctgtgcagtaaactttcaaggtgtcggctgccccagattgcttcatttgctgggtgtggaaagagttgctatggccaggcatatgggatttggaagctcagcagaagtgacttctgctctgtggttgctgctccccggctttcacagacatggtatggcagccattcttttatctatttaaccaagaggatgctggggaattgtgctgcttgtcctgttggctggtggctgcattatgtcctggggtgtgcatgtgggtctatttagagcttctgtcccttccttcccattgcaagttgcacccagatgagacagctgtagtactaggtctctttcacctctcattgcctgtccctgcttcgagctggttgtcttgtgcgtgggacatgggccttcctatctgtgttttctcaaagtcaggagctgaccaggagcacactaaggtgtggtcatgcatcataaccaacattcactcatctgggacattcttaagatacatttataaatcatttcagcagtagtactttgtatgtgttgagagtttacagagctctttgacatacgcgatcttagtctttacaaataaggaaaacagctcagtttgggaagtatcagagatgggattcaaacccagatcctctggtccaagttgtatgtgcactgaactaatcaggcaggaaaaaagcccagccactgtctcacagattgttttttgtatattgtagcaaaatcctgaaacaatggggtccttccagtctcatcatacaaaatggcaatcttggctgggtgcggtggttcatgcctataatcccagtgctttacaaggctgaggcaggaggctctcttgagaataggagttcaagaccagcctgggcaacatagcaagatcctgtctctccaaaaaaaaaaaaaaaaaaaaaaaaaaatttcatttttgagtccagaggaccctcctattactcttgatttcatcttcagagtgtagttaaaaaattattttaaataattatttttttaaatcagttgtaggttcacagcaaaagtggacaaaaagaaatttctcatatatcccctgccctcacacatgcatagcctcccaccactatcagtatcccacaccagagtggtacatttgttacaatcaataaacctccattgacacatcattatcacccaaagtccatagtttacatgaagattcactctggtgttgtacattgtatgggcttagacaaatgtatgatgatatctacaattatagaatcatacagaatagtttcactgccctaaaacttctctatgcttcacctgttcatccctttcttccctaatcccctggcaaccactttaaaaaaaaaattaggttcagggggtacatgtgcaggtaaactcgtgacaagggggtttgttatacagattatttagtgacccaggtactaagcctagtacccaatagttacttttctggtcctgtcccttttcccaccctccaccctcaggtaggccccagtatgttattcctttgtgtccatgttatttcactcccacttgtgagaacatggaatatttggtttcctgttcctatgttagtttgttaaggataatggcctccagccccatccatgttcctgcaaaggacatgatctttctttggcaaccactttttactgtcgccatagttcttccttttctagaatgtcatattggaatcatatagtatgtagccttttcagactggcttctttcacttaataatatgcaattaaggttcctccatgtcatttcatggcttaatagtgcatttatttttagcactgaataatactccattgtctagatgaatagtttatccattcacctattgaaagacttcttggtggtttccaagttttggcaattatgaataaagctgttgtaaacatctttgtgcaggtttttctatgggcatgtttttaattcatttgaataaataccaagagcttcagtgctggatcata

SEQ ID NO: 817 - DNA, 818 bp, Homo sapiens
caggacacagcatggacatgagggtccccgctcagctcctggggctcctgctgctctggctcccaggtgccaaatgtgacatccagatgacccagtctccttccaccctgtctgcatctgtaggagacagagtcaccatcacttgccgggccagtcagagtattagtagctggttggcctggtatcagcagaaaccagggaaagcccctaagctcctgatctataaggcgtctagtttagaaagtggggtcccatcaaggttcagcggcagtggatctgggacagaattcactctcaccatcagcagcctgcagcctgatgattttgcaacttattactgccaacagtataatagttattctcccacatggacgttcggccaagggaccaaggtggaaatcaaacgaactgtggctgcaccatctgtcttcatcttcccgccatctgatgagcagttgaaatctggaactgcctctgttgtgtgcctgctgaataacttctatcccagagaggccaaagtacagtggaaggtggataacgccctccaatcgggtaactcccaggagagtgtcacagagcaggacagcaaggacagcacctacagcctcagcagcaccctgacgctgagcaaagcagactacgagaaacacaaagtctacgcctgcgaagtcacccatcagggcctgagctcgcccgtcacaaagagcttcaacaggggagagtgttagagggagaagtgcccccacctgctcctcagttccagcctgaccccctcccatcctttggcctctgaccctttttccacaggggacctaccc

SEQ ID NO: 818 - DNA, 2790 bp, Homo sapiens
gcggccgttacggcgctcaggcgtctcgacgcgcgcgatttaaaaccagctcaggagacgccaaggaaagatgggacctcccggcccagcactgccagccacaatgaataactcttcttcagagacgcgaggacacccccacagtgcctcctctccttcagagcgtgtgttcccgatgcccctgcccaggaaggcgcctctcaatattcctggcaccccagtcctcgaagactttcctcagaatgacgatgagaaggagcggctgcagcggaggcgctcgagggtctttgatctgcagttcagcactgactcacctcgcttattggcctccccctccagcaggagtattgacatttcagctactatccccaagtttacaaacacgcagattacggaacattactccacctgtatcaaactgtccactgaaaataaaatcactaccaagaatgcttttggtttgcacttgattgattttatgtcagagattcttaaacagaaagacaccgaaccaaccaactttaaagtggctgcgggtactctggatgccagcaccaagatctatgctgtgcgcgtggatgccgtccatgccgatgtatacagagtccttggggggctgggcaaagatgcaccgtctttggaagaagtagaaggccatgttgctgatggaagtgctactgaaatgggaacaaccaaaaaggctgtaaagccaaagaagaagcacttacacagaactattgagcagaacataaacaacctcaatgtctccgaagcagatcggaagtgtgagattgatcccatgtttcagaagacagcagcctcatttgatgagtgcagcacagcaggggtgtttctgtccactctccactgccaggactacagaagtgaactgctgtttccctctgatgtccagactctctccacgggagaacctctcgagttgccagagttaggttgtgtagaaatgacagatttaaaagcgcccttgcagcagtgtgcagaagatcgccagatctgcccttccctggccgggttccagtttacacagtgggacagtgaaacacataatgagtctgtgtcggccctggtagacaagtttaagaagaatgaccaggtatttgacatcaatgctgaagttgacgagagtgactgtggagacttccccgatgggtccctgggggatgactttgatgccaacgatgaacctgaccacaccgcagttggggatcatgaagagttcaggagctggaaggagccctgccaggttcagagctgccaggaagaaatgatttcccttggggatggagacatcaggaccatgtgcccccttctgtctatgaaacctggagaatattcttatttcagtcctcggaccatgtcgatgtgggctggcccggatcactggcgctttaggcctcgacgcaaacaagatgctccttcccaatcagaaaacaaaaagaagagtacaaaaaaagattttgaaattgactttgaagatgatattgactttgatgtatattttagaaaaacaaaggctgctactattctgaccaagtccactttggagaaccagaattggagagctaccacccttcctacagatttcaactacaatgttgacactctggtccagcttcacctcaaaccaggcaccaggttacttaagatggcccagggccatagggtagagactgagcattatgaagaaattgaagactatgattacaacaaccctaacgacacctccaacttttgccctggattacaggctgctgacagtgatgatgaagatttggatgacttatttgtgggacctgttgggaactctgacctctcaccttatccttgccatccacctaagacagcacaacagaatggtgacactccagaagcccaaggattagacatcacaacatatggggagtcaaacttggtagctgagcctcagaaggtaaataaaattgaaattcactatgccaagactgccaaaaagatggacatgaagaaactgaagcagagcatgtggagtctgctgacagcgctctccggaaaggaggcagatgcagaggcaaaccacagggaagctggaaaagaagcggccctggcagaagtggctgacgagaagatgcttagcgggctcacgaaggacctgcagaggagcctgccccctgtcatggctcagaacctctccatacctctggcttttgcctgtctcctacatttagccaatgaaaagaatctaaaactggaaggaacagaggacctctctgatgttcttgtgaggcaaggagattgagttcactatggagaagtcagcagcaggaggcccatcccttactcagttgccgggacatccccagtctcgggggaagaagatgccatgggcttatacccaggctgtagccaactaccaacgtgcctgtttgtttgttgctctttccttctctccatcatagtctgggtgccagcgccctgaagctccgtgctcaactgattaaactttactgccctatggtgaccatctaggagaggggagggcagagggggtgagggtactattctggattgagaaaacctatatccattctttatatcaatgtatagttttagtctcctaaattgatctgttattttccaaactattctcttgtagaaaattttccagtgggcacttaatggtgcccttgaagaacttcctaatccatgtacataaaatacatcatatgtacacttataaatgtatatagaatgctcaaaaataaaattcttaataatagaactggcaaaata

SEQ ID NO: 819 - protein, 741 aa, Homo sapiens
MGPPGPALPATMNNSSSETRGHPHSASSPSERVFPMPLPRKAPLNIPGTPVLEDFPQNDDEKERLQRRRSRVFDLQFSTDSPRLLASPSSRSIDISATIPKFTNTQITEHYSTCIKLSTENKITTKNAFGLHLIDFMSEILKQKDTEPTNFKVAAGTLDASTKIYAVRVDAVHADVYRVLGGLGKDAPSLEEVEGHVADGSATEMGTTKKAVKPKKKHLHRTIEQNINNLNVSEADRKCEIDPMFQKTAASFDECSTAGVFLSTLHCQDYRSELLFPSDVQTLSTGEPLELPELGCVEMTDLKAPLQQCAEDRQICPSLAGFQFTQWDSETHNESVSALVDKFKKNDQVFDINAEVDESDCGDFPDGSLGDDFDANDEPDHTAVGDHEEFRSWKEPCQVQSCQEEMISLGDGDIRTMCPLLSMKPGEYSYFSPRTMSMWAGPDHWRFRPRRKQDAPSQSENKKKSTKKDFEIDFEDDIDFDVYFRKTKAATILTKSTLENQNWRATTLPTDFNYNVDTLVQLHLKPGTRLLKMAQGHRVETEHYEEIEDYDYNNPNDTSNFCPGLQAADSDDEDLDDLFVGPVGNSDLSPYPCHPPKTAQQNGDTPEAQGLDITTYGESNLVAEPQKVNKIEIHYAKTAKKMDMKKLKQSMWSLLTALSGKEADAEANHREAGKEAALAEVADEKMLSGLTKDLQRSLPPVMAQNLSIPLAFACLLHLANEKNLKLEGTEDLSDVLVRQGD

SEQ ID NO: 820 - DNA, 5936 bp, Homo sapiens
ttccaagaagaaggatttgcaccctcgggatattgatgcattttggctgcagcggcagctcagtcgtttctatgatgatgccatcgtgtcgcagaagaaggcagatgaagtattggagattttgaagacggccagtgatgatcgggaatgtgaaaatcagctggttctgctgcttggtttcaacacctttgatttcattaaagtgttgcggcagcacaggatgatgattttatactgtaccttgctggccagtgcacaaagtgaagctgaaaaggaaaggattatgggaaagatggaagctgacccagagctatccaagttcctctaccagcttcatgaaaccgagaaggaggatctgatccgagaggaaaggtcccggagagagcgagtgcgtcagtctcgaatggacacagatctggaaaccatggatctcgaccagggtggagaggcactggctccacggcaggttctggacttggaggacctggtttttacccaagggagccactttatggccaataaacgctgtcagcttcctgatggatccttccgtcgccagcgtaagggctatgaagaggtgcatgtgcctgctctgaagcccaagccctttggctcagaagaacaactgcttccagtggaaaagctgccaaagtatgcccaggctgggtttgagggcttcaaaacactgaatcggatccagagtaagctctaccgtgctgcccttgagacggatgagaatctgctgctgtgtgctcctactggtgctgggaagaccaacgtggccctgatgtgcatgctccgagagattgggaaacacataaacatggacggcaccatcaatgtggatgacttcaagattatctacattgcccccatgcgctccttggtgcaggagatggtgggcagctttggaaagcgcctggccacttatggcatcactgttgctgaactgactggggaccaccagctgtgcaaagaagagatcagtgccactcagatcatcgtctgcacccccgagaagtgggacatcatcacccgcaagggtggtgagcgcacctacacccagctggtgcggctcatcattctggatgagattcatcttctccacgatgacagaggtcctgtcttagaagctttagtggccagggccatccgaaacattgagatgacccaagaggatgtccgactcattggtctcagtgccaccctacccaactatgaagatgtagccacctttctacgtgttgaccctgccaagggtctcttttactttgacaacagcttccgtccagtgcctctggaacagacatatgtgggtatcacagagaaaaaagctatcaagcgtttccagatcatgaatgaaatcgtctatgaaaaaatcatggaacatgctggaaaaaatcaggtgctggtgtttgtccactcccggaaggagactggaaagacagccagggccatccgggacatgtgcctagaaaaggacactctgggtctgtttctgagggagggctcagcctccacagaagtcctgcgaacagaagctgagcagtgcaagaacctagagctgaaggatcttctgccttatggctttgctattcatcacgcaggcatgaccagggttgaccgaacactcgtggaggatctttttgctgataaacatattcaggttttagtttccacagcaactctagcttggggtgtgaatctccctgcacatacagtcatcatcaaaggcacccaggtgtacagtccagagaaggggcgttggacagaactgggagcactggacattctgcagatgctgggacgtgccggaagaccccagtatgacaccaagggtgaaggcatactcatcacatctcatggggagctacagtactacctgtccctcctcaatcaacaacttcctattgaaagccagatggtttcaaagcttcctgacatgctcaatgcagaaatcgtgctaggaaatgtccagaatgccaaggatgcggtgaactggctgggctatgcctacctctatatccgaatgctgcgatccccaaccctctatggcatctctcatgatgacctcaagggagatcccctgctggaccagcgccgactagatctggttcatacagctgccctgatgctggacaagaacaatctggtcaagtacgacaagaagacgggcaacttccaggtgacagaactgggccgtatagccagccactactacatcaccaatgatacagtgcagacttacaaccagctgctgaagcccaccctgagtgagattgagcttttcagggtcttctcattgtcctctgagttcaagaacatcacagtgagagaggaggagaagctggagctgcagaagttgctggagagggtgcctatccctgtaaaggagagcattgaggaacccagtgctaagatcaacgttcttctgcaagccttcatctcacagctgaaattggagggctttgcactgatggctgacatggtgtatgtcacacagtcggctggccggttgatgcgagcgatatttgaaattgtcctgaaccgaggttgggcacagcttacagacaagaccctgaacctctgcaagatgatcgacaaacgcatgtggcagtccatgtgtcctctgcgccagttccggaaactccctgaggaagtagtgaagaagattgagaagaagaatttcccctttgagcgtctgtacgacctgaatcataatgagattggggagcttatccgcatgccaaagatggggaagaccatccacaaatatgtccatctgtttcccaagttggagttgtcagtgcacctgcagcctatcacacgctccaccctgaaggtggagctgaccatcacgccagacttccagtgggatgaaaaggtgcatggttcatccgaggctttttggattctggtggaggatgtggacagcgaggtgattctgcaccatgagtattttctcctcaaggccaagtacgcccaggacgagcacctcattacattcttcgtgcctgtctttgaaccgctgccccctcagtacttcatccgagtggtgtctgaccgctggctctcttgtgagacccagctgcctgtctccttccggcacctgatcttgccggagaagtacccccctccaaccgaacttttggacctgcagcccttgcccgtgtctgctctgagaaacagtgcctttgagagtctttaccaagataaatttcctttcttcaatcccatccagacccaggtgtttaacactgtatacaacagtgacgacaacgtgtttgtgggggcccccacgggcagcgggaagactatttgtgcagagtttgccatcctgcgaatgctgctgcagagctcggaggggcgctgtgtgtacatcacccccatggaggccctggcagagcaggtatacatggactggtacgagaagttccaggacaggctcaacaagaaggtggtactcctgacaggcgagaccagcacagacctgaagctgctgggcaaagggaacattatcatcagcacccctgagaagtgggacatactttcccggcgatggaagcagcgcaagaacgtgcagaacatcaacctcttcgtggtggatgaggtccaccttatcgggggcgagaatgggcctgtcttagaagtgatctgctcccgaatgcgctacatctcctcccagattgagcggcccattcgcattgtggcactcagctcttcgctctccaatgccaaggatgtggcccactggctgggctgcagtgccacctccaccttcaacttccatcccaatgtgcgtcccgtccccttggagctgcacatccagggcttcaacatcagccatacacaaacccgcctgctctccatggccaagcctgtgtaccatgctatcaccaagcactcgcccaagaagcctgtcattgtctttgtgccgtctcgcaagcagacccgcctcactgccattgacatcctcaccacctgtgcagcagacatccaacggcagaggttcttgcactgcaccgagaaggatctgattccgtacctggagaagctaagtgacagcacgctcaaggaaacgctgctaaatggggtgggctacctgcatgaggggctcagccccatggagcgacgcctggtggagcagctcttcagctcaggggctatccaggtggtggtggcttctcggagtctctgctggggcatgaacgtggctgcccacctggtaatcatcatggatacccagtactacaatggcaagatccacgcctatgtggattaccccatctatgacgtgcttcagatggtgggccacgccaaccgccctttgcaggacgatgaggggcgctgtgtcatcatgtgtcagggctccaagaaggatttcttcaagaagttcttatatgagccattgccagtagaatctcacctggaccactgtatgcatgaccacttcaatgctgagatcgtcaccaagaccattgagaacaagcaggatgctgtggactacctcacctggacctttctgtaccgccgcatgacacagaaccccaattactacaacctgcagggcatctcccatcgtcacttgtcggaccacttgtcagagctggtggagcagaccctgagtgacctggagcagtccaagtgcatcagcatcgaggacgagatggacgtggcgcctctgaacctaggcatgatcgccgcctactattacatcaactacaccaccattgagctcttcagcatgtccctcaatgccaagaccaaggtgcgagggcttatcgagatcatctccaatgcagcagagtatgagaacattcccatccggcaccatgaagacaatctcctgaggcagttggctcagaaggtcccccacaagctgaataaccctaagttcaatgatccgcacgtcaagaccaacctgctcctgcaggctcacttgtctcgcatgcagctgagtgctgagttgcagtcagatacggaggaaatccttagtaaggcaatccggctcatccaggcctgcgtggatgtcctttccagcaatgggtggctcagccctgctctggcagctatggaactggcccagatggtcacccaagccatgtggtccaaggactcatacctgaagcagctgccacacttcacctctgagcatatcaaacgttgcacagacaagggagtggagagtgttttcgacatcatggagatggaggatgaagaacggaacgcgttgcttcagctgactgacagccagattgcagatgtggctcgcttttgtaaccgctaccctaatatcgaactatcttatgaggtggtagataaggacagcatccgcagtggcgggccagttgtggtgctggtgcagctggagcgagaggaggaagtcacaggccctgtcattgcgcctctcttcccgcagaaacgtgaagagggctggtgggtggtgattggagatgccaagtccaatagcctcatctccatcaagaggctgaccttgcagcagaaggccaaggtgaagttggactttgtggccccagccactggtgcccacaactacactctgtacttcatgagtgacgcttacatgggatgtgaccaggagtacaaattcagcgtggatgtgaaagaagctgagacagacagtgattcagattgagtcctgaggcatttacttttgggtaaaggagagttgagcctgaattaggaatgtgtacattgtaggaatcctggttgtggggaccaggtctgtgggcctcaggtctggccagccagggctggtgctgtccccgcctacctccacttcctttcccttgctcactctggatccagtgacagcaggtgtcatgggtcaagcataaatcatatatagcattttcaggcatgttcctggtagttcttttgagtctgacattctaataaaataatttgtagaaacc

SEQ ID NO: 821 - protein, 2136 aa, Homo sapiens
MADVTARSLQYEYKANSNLVLQADRSLIDRTRRDEPTGEVLSLVGKLEGTRMGDKAQRTKPQMQEERRAKRRKRDEDRHDINKMKGYTLLSEGIDEMVGIIYKPKTKETRETYEVLLSFIQAALGDQPRDILCGAADEVLAVLKNEKLRDKERRKEIDLLLGQTDDTRYHVLVNLGKKITDYGGDKEIQNMDDNIDETYGVNVQFESDEEEGDEDVYGEVREEASDDDMEGDEAVVRCTLSANLVASGELMSSKKKDLHPRDIDAFWLQRQLSRFYDDAIVSQKKADEVLEILKTASDDRECENQLVLLLGFNTFDFIKVLRQHRMMILYCTLLASAQSEAEKERIMGKMEADPELSKFLYQLHETEKEDLIREERSRRERVRQSRMDTDLETMDLDQGGEALAPRQVLDLEDLVFTQGSHFMANKRCQLPDGSFRRQRKGYEEVHVPALKPKPFGSEEQLLPVEKLPKYAQAGFEGFKTLNRIQSKLYRAALETDENLLLCAPTGAGKTNVALMCMLREIGKHINMDGTINVDDFKIIYIAPMRSLVQEMVGSFGKRLATYGITVAELTGDHQLCKEEISATQIIVCTPEKWDIITRKGGERTYTQLVRLIILDEIHLLHDDRGPVLEALVARAIRNIEMTQEDVRLIGLSATLPNYEDVATFLRVDPAKGLFYFDNSFRPVPLEQTYVGITEKKAIKRFQIMNEIVYEKIMEHAGKNQVLVFVHSRKETGKTARAIRDMCLEKDTLGLFLREGSASTEVLRTEAEQCKNLELKDLLPYGFAIHHAGMTRVDRTLVEDLFADKHIQVLVSTATLAWGVNLPAHTVIIKGTQVYSPEKGRWTELGALDILQMLGRAGRPQYDTKGEGILITSHGELQYYLSLLNQQLPIESQMVSKLPDMLNAEIVLGNVQNAKDAVNWLGYAYLYIRMLRSPTLYGISHDDLKGDPLLDQRRLDLVHTAALMLDKNNLVKYDKKTGNFQVTELGRIASHYYITNDTVQTYNQLLKPTLSEIELFRVFSLSSEFKNITVREEEKLELQKLLERVPIPVKESIEEPSAKINVLLQAFISQLKLEGFALMADMVYVTQSAGRLMRAIFEIVLNRGWAQLTDKTLNLCKMIDKRMWQSMCPLRQFRKLPEEVVKKIEKKNFPFERLYDLNHNEIGELIRMPKMGKTIHKYVHLFPKLELSVHLQPITRSTLKVELTITPDFQWDEKVHGSSEAFWILVEDVDSEVILHHEYFLLKAKYAQDEHLITFFVPVFEPLPPQYFIRVVSDRWLSCETQLPVSFRHLILPEKYPPPTELLDLQPLPVSALRNSAFESLYQDKFPFFNPIQTQVFNTVYNSDDNVFVGAPTGSGKTICAEFAILRMLLQSSEGRCVYITPMEALAEQVYMDWYEKFQDRLNKKVVLLTGETSTDLKLLGKGNIIISTPEKWDILSRRWKQRKNVQNINLFVVDEVHLIGGENGPVLEVICSRMRYISSQIERPIRIVALSSSLSNAKDVAHWLGCSATSTFNFHPNVRPVPLELHIQGFNISHTQTRLLSMAKPVYHAITKHSPKKPVIVFVPSRKQTRLTAIDILTTCAADIQRQRFLHCTEKDLIPYLEKLSDSTLKETLLNGVGYLHEGLSPMERRLVEQLFSSGAIQVVVASRSLCWGMNVAAHLVIIMDTQYYNGKIHAYVDYPIYDVLQMVGHANRPLQDDEGRCVIMCQGSKKDFFKKFLYEPLPVESHLDHCMHDHFNAEIVTKTIENKQDAVDYLTWTFLYRRMTQNPNYYNLQGISHRHLSDHLSELVEQTLSDLEQSKCISIEDEMDVAPLNLGMIAAYYYINYTTIELFSMSLNAKTKVRGLIEIISNAAEYENIPIRHHEDNLLRQLAQKVPHKLNNPKFNDPHVKTNLLLQAHLSRMQLSAELQSDTEEILSKAIRLIQACVDVLSSNGWLSPALAAMELAQMVTQAMWSKDSYLKQLPHFTSEHIKRCTDKGVESVFDIMEMEDEERNALLQLTDSQIADVARFCNRYPNIELSYEVVDKDSIRSGGPVVVLVQLEREEEVTGPVIAPLFPQKREEGWWVVIGDAKSNSLISIKRLTLQQKAKVKLDFVAPATGAHNYTLYFMSDAYMGCDQEYKFSVDVKEAETDSDSD

SEQ ID NO: 822 - DNA, 1539 bp, Homo sapiens
gtttccatccctcctctggaggcttttgaagtcaccgggagacagatgtgctctgtggcaggcaggggagtgggggtgctcaggcacttgggaggtctgggagctcctcagtgtgaccgctgggacccaccaggactttttcctttgtcagaagcctttggttgctttgctgctctgcatgtgtcactgtggaggggcaatagagcaaggccttacatggcatggtcatttctcgggcccaggaggcttagaggcctgcccctggcgctcaagtattgaaccagaaccatggggtggcactgaagcctcctcaccacatcatgataaataacggggacattcacagagcaggcactgtttcctcagtccatggctgagtacatcaccggtgttttctctcttattcctcccatcaagcctaaaaggaatctctattggagatactgccattagtgttccttttataggtgaggaactgaggcatagagggttccccagttgaaccaactgataaatagtagaacttggattttaattcagtcttgatgccagggataaggctcttactttctaccttaggctatttctaggaaacgcaggagagtgttgaaggggcagagaaagggatccagttcctttctgtcccgcatcctagtccctgagaagcaaagaagaatgtgtggcttcttttgctttgcttttgttgtcatcccacacatctccaggggacctgggctcttgatcttggcctcttcccctttaactgttaagtgggagcaggtaagggggtacagtagggctggcctggagttagaggcttggatgccttagctcctctgtctgcactccagaactgcctgacttcatttcgtatgttgtcctttgttttgacaattgatccatgtcccagtccgtctcttcttccttcttgatacttacactgcttctttctgttggtttccagtgtttaacactgtatacaacagtgacgacaacgtgtttgtgggggcccccacgggcagcgggaagactatttgtgcagagtttgccatcctgcgaatgctgctgcagagctcggaggggcgctgtgtgtacatcacccccatggaggccctggcagagcaggtatgacgtggcgctgtgtcatgtgaatttcccaagaagcatttcatctgtgattccgtatgaaggctttctaagccctgaaatttgcagggtcatttcctcagtttgtgtattaaagaaaagctgccccagccaagcgtggtggctcacgcctgtaatcccagcactttgggaggccgaggcgggcagatctccggagatcaggagttcgagaccagcctggccaacatggtgaaaccctgtctctactaaaaatacagaaattagctgggcgtggtggtgtgcgcctgtaatcccagctacttggaaggctgaggcaggagaatcgcttgaacccgggaggcggaggttgcagtgagccaagttcgcaccactgcactccagcctgggcaacaagagcgagacttcatctca

SEQ ID NO: 823 - DNA, 3360 bp, Homo sapiens
gcggaaggcgcgggagcttgcgtgctgctgggcctgagctgtctgtctcgtttctgtccgcgcgccctgcatcccggccccgggcgcccgctggaggtcgccgaggagccacagggctgactggtctgctgcccgggcccaggagtgcctggtgtagcagtcgcggagccatcccggcgtctgctgccatgaccgactctcccctcagaggagactcttcctcagcggtggctgcagagacagatgagcggcggctcctggccgcgggaccgtgagacgggttcgtggccggccatttagggggacgctgcgaccaccgcctgcgcccctccggactggttccttgggccccggaagctcgcggcgggccctgcgggaggcggcatgctcccgcggaggctgctggccgcctggctggcggggacgcggggcgggggcctgctggcgcttctggccaatcagtgccgcttcgtcacgggcctgcgcgtgcggcgcgcgcagcagatcgcgcagctctacggccgcctctactccgagagctcacgccgcgttctcctcggccgcctctggcgccggctgcacggccgtcctggccatgcctctgccttgatggcggcgttagccggcgtcttcgtttgggacgaggagaggatccaggaggaggagttgcagagatctattaatgagatgaagcggttggaagaaatgtcaaatatgtttcagagctctggagtccagcaccaccctccagaaccaaaagcccaaacagaagggaatgaagattcagagggcaaagagcaacgttgggaaatggtgatggataagaaacactttaagctgtggcggcgcccaattacaggcacccacctttaccagtaccgagtttttggaacctacacagatgtgacacctcggcagttcttcaatgttcagctggacacagagtatagaaaaaaatgggatgccctggtaatcaagctggaggtgattgagagggatgtggttagtggttccgaggttcttcactgggtaacccattttccttatccaatgtactcacgggattatgtttatgttcggcggtatagtgtggatcaggaaaacaacatgatggtgttggtgtcgcgtgctgtggagcatccgagtgtgccagagtctccagaattcgtcagggtcagatcatatgaatcccaaatggttatccgtccccacaagtcatttgatgagaatggctttgactacttactaacatacagtgacaatccccaaacggtgtttcctcgctactgtgttagttggatggtttccagtggcatgccagatttcctggagaagctgcacatggccactctgaaagccaagaatatggagattaaagtaaaggactacatctcagctaagcctctggaaatgagtagtgaagccaaggccaccagccagtcctctgagcgaaagaacgagggcagctgtggccctgctcggattgagtatgcttgacaggctttgggataagaagggacaaggtgcttctagccctgtctcagtccgttatcactctgctgtagaagggggacatgccacatgtattagaaggcatctgctgtaacttccagtgcaagataattcaataactgatgtcccatttcattcagagcccttattgctcttatcaaaacagaagaaggctacatttgtgggagtgttgtcatattctcaggccaactgttttgaaattcggtatctcactgagctaatctggaacaaacctctcacctcaggccagaaggggatgacctccatttgcttctctgagtagtttcctctgctgacattccaaatcccaccatcgattgtgcagcgctttggatttccttcagttctccaggtccacctggaaagtatagttggccagttgagtctctcaaatgaggggctactgggagtgctcttggtaacaatcatgatgtgaatgggtgtgaacgatacttggctatgttaagtgccttgtccgcaccttgcttttatctctagagacatgaagttattattaattttttttttttttaagtagagatggagtttcactctgtttcccaggctggtcttgaactcctgggccatgcctggccagggacatgaatttgtacaaagaaatttccctccctgcctgcacaatatcacccattgactcaccttatccaaagcaagtttcctgtgaatcggccagttcttctatattcattggatcattgcctccttcctaaccttccccatttaccaagaacactgggagactaatccttttagatagtagctttttgatgctcaaaacatcacatttaaatttagtttaaaaattttttaacttttgtgtcaaataggagttgaggaattgagcaggattctaccctagtccgattgtatagaaaacaccattttgattcaggtattatttttcatatttcaggtttgacttgttcttttcagaaggctaaagtcagaggaatgggggctgggccactcccttggagctctcagatctacagacaagctgtgtgaatgcatagatgtaatcttgtctcaaatactaatacagtggagatttggtttatgttaccattaagttcctctaaaaagtttttcttcctctcttcagagccaaaataaaagtgaactacactgttcagataaggtcacaatctgatgctgtcagtttgaccgagctggttttgcttatggtcatgctgcaatttgttagaataatagggatcaagttttaaatcctcctccttcccttttttctggagtcttgagggccagagtttttgtttttgtttttgtttttgttttcctgcttgctactgttttgtggtgttgaaaagtggtttaaacctgagactaacttaaacacttccttgaccttcttgttgcctgttcatttttgtgccaaggaagtagctgccccagtgtatgtcttgccttctccgcgtcattgttggaagaggagagatgcatcgagcagtcccagctgcttttcatttattacttcttctttccaggacctgacagaagtcagggaagagtccctgggttatgtccaaacttagcacctgcaattgttgggatgtggatggatgtgtgcataagagagagagagaatatgtgtgtgtgtgtgtgcgtctgcgagcgcacacacatgcacaagtgcgaaggagttgcggttgctccatgttctgacttagggcaatttgattctgcacttggggtctgtctgtacagttactcatgtcattgtaatgatttcactcctaactgtgacatttttatcaaatgtgtgaataaatacataaagattggtac

SEQ ID NO: 824 - DNA, 5028 bp, Homo sapiens
cgcgcttagggatccggccgtggccgagcgcgcggccgtaagaccgcgggtgactagcatgcagatacccatgctctgactttctgcccctccactgacatggcccaccggggtggggagagggacttccagacttcagctcgacgcatgggcacctcgctgctcttccagctttcagtgcatgaacgggagctggacctggtttttctggatcatagctatgccaagccttggagtgcccacccagatgccagtagtgcccgccccacccgcatgctctttgtcactccccggcggcagcacgaaagtaccattgaatcagacgtcccaatagatgtggagacggtcacatcaacgcctatgccactctatgacaatcagaaggcacgcagcgtgatgaatgagtgtgaacggcatgtcatctttgccaggactgatgcagatgcccctcctccaccagaggactgggaggagcatgtcaacaggactggctggacaatggcccagaacaagctattcaacaagatcctcaaagccctgcagtctgaccggcttgcccgcttggccaacgaaggggcttgtaatgagccagtgctgcgccgtgttgctgtggacaagtgtgcaaggagagtgcggcaggctctggcaagtgtgagctgggataccaagctgatccagtggctgcacaccacccttgtggagaccttgagtctgcccatgctggcagcctacctggatgctttgcagacgctgaaggggaagatcccaaccttgattgaccggatgcttgtgtcatccaacacaaagactggggctgcaggagctgaggccttgtctctcctactgaagaggccctgggaccctgctgtgggtgtgctttctcataacaaaccaagcaaactccctggctctccgctgattctcatcgcctcctctggtccctccagctctgtgtttcccacttcacgccgccaccgcttctggcaatctcagctgtcctgcttgggcaaggtcatccctgtagccacccatctgctgaacaatggcagtggggtaggagttctacagtgtctcgagcatatgattggggcagtgagaagcaaagtgctggagattcacagccatttcccacacaaacccattatcttgattggctggaacacaggagctttggtggcctgtcatgtgtcagtaatggagtatgtcactgcagttgtctgccttgggtttcctctgcttactgtggatggccccagaggggatgtagatgatcccctcttggatatgaagactccagtcctctttgtcattggtcagaattcccttcaatgtcaccctgaagccatggaggacttccgggagaagattcgagctgagaacagcttggtggtggttgggggagctgatgacaatctcagaataagcaaagcaaagaagaaatcagaagggttgactcagagcatggtggacagatgtattcaggatgagattgtggactttctgactggagtgctcactcgtgctgagggtcacatgggctctgaacctcgggatcaggatgctgagaagaagaagaagccccgcgatgtggcccgcagagacttggcctttgaagtccctgagcggggcagtcgacctgcctccccagctgccaagctgcccgcctcaccctcaggctcagaggatctctccagtgtgtccagcagccccacctccagtcccaagaccaaagtgaccacagtgacctctgcccagaagtccagtcagattggaagttctcagctgctgaagagacatgtgcagcggacagaagctgtgctgacccacaaacaagctcaagcacagtttgctgcttttctgaaacaaaatatgctggtgaggaaagctcttcctcctggcacctcctcctgtctctttgttcccatttcatcagaaccaccagaggaaggagagaaagaggatcttagggttcagctgaagcgacaccatccctcgagtccccttcctggcagtaagacctccaaacgaccgaagatcaaggtgtcccttatctcccaaggggacacagctggagggccttgtgctccttcccaaggaagtgctccagaagctgcaggtgggaagcccatcaccatgacactggggcaggcttcagcaggggccaaggagctcacaggacttctcaccacagccaagtccagttcttctgaaggtggagtctcagccagcccagtcccttcagtggtctccagcagcactgcacccagtgccttgcacacactgcagagccgcctggtggccacatctcctggcagctccctcccaggggccacatcagccagcagcctcctccaaggcctcagcttcagcttgcaggatatcagcagcaagacctctggccttccagcaaatccctccccaggaccagccccacaggcttgaaggtccccaccaccattactctgacacttcgtggccagccgagcaggatcactacactgagccctatgggctcaggagcagccccatccgaggagtcctcttcccaggtgctgccctccagctcacagcgcctgcctccagcaccctgaagatgctgtgtgatatgtcctccttaccaagttggtgatggctgcctcatggtgggccctggacaggtgtgtggtcctgctgagctgtccacgtgtcggaagacctgtttaagacagtcatttttgcctctccgccaactgtcttcagagaaaccattaggttaggtgatacggtgccagcaagggaagcaccatcgtccaggatctgcaaatctggttcctgggaaccccagactcctcagcagatctggctgtacatggatcagaaccacttcttcccccgcttaagctgtggtttgacccaagggtcagcatataggactgcctgctgcatttaatgaaggtgtttccttttggaagtctgtgctaccctctgcgcctagttgggaggagacatccatctggtctgggatttcgggagttagaatggaaagctctttgctaaagactggagtcatcctggcctgccaactggtggttcagagccggacgggcttgttttggacatcactgttgccttcactcagcagccacgggagagtgctccccatgcaactccaccttagaaaccacgtcagatactgagtagcttgctgactcctggaaacttctggtttttgttagtatcataatgaaggcaaagagaactaggctgtcatctttcagcctctttgacttactctagatgttgggagcagtggttgccaggtgaaacctgggccctttgtctttttcaccatgctttgggcagtttctgtatccagagagtccgcaggttcagataagctgaagaagagtaatagaacagcaaaggaagtggcttgaaggatgtgctagtaagccctgtggtttgtgcttaggtctctgctctgctacccaaggaactggtggttcagctggagataaaaagaagaatttgccaagtcagagaagaaaccccaaccccggaaaatcctctgtctccagtctctggaggtgaagcagggacaataagctaaggtagtatcttggccatcccaggaaacttgtggcattaggacgatgaaggccatgcttcagtgttttcgtttctatttcatgagactttttgtcttcctgcttacaagtgggaagatgattgacagtgactctactatgcagggctgttggtaccaacctgagccctataggtggcagtccctggagaagtggtcacagaagatggagctctgatcccctgcttacctcttcacaacacttgtgtgcaaagatagttttagatttggtttagaagctatcctccagaacaggctcccatacttagaatgtttctagttaaggtaataaattaggcaacccaagtgtgactccactcaagtgtccttttctgtaggcaggaagggcccacaacatggcttaaaatgtagtccatggttctggcccacagtacagtgtgtatctataccaggtcacctgtgttcaatctgggagccttcctggccagtctgagtggcagccagaagggagctcatagtgtctaggagtctcaggcaaggtaggtcagggtactgtgggcaggggggatgtgtgtgataggagagggtaccctaaaccccataccttccctccctgacctgaaaagctgatctcaacagggattcacacagaattaggctgtgtttttgcattagctggtaggtgactttctcaaaattcttaaattcagaaagtatttagtaaacttgaggaaggtatgaaatctggaggaggcatccaggacccaggggtttgatagctttacaggtaggatcataccacaccaaaagagcagtggacaataagactatatgagctatatgaagcttttaggaatcatttaggacagacagagccctaaacaacccattcatgacttaagttgttggctcagtgtatgctggggacaaagaaaaactaacaagccgacctgcctttatgataaattctagtgtgcttacaagggatgacttcctgaggtgtgatctgtccaccttgaagaactccacaactgaagaaggggagctgtgagaacgtggattgttctacaacttgcacagggtaacagaggaagtggctgaggcctagagtcacgttttccagttcccttcgcaaactatatttcttggaacgcgaaaggaagctttacctatttcatagaagacctggaatccataacctcagaaggcaatattattgatagaaaatgtggaaggatcaggaagttcttagattcttggatgacagatgcatgttgatgccctatggagatgtccttgtgttttgaggtcactgaggtaggaagacctgtctactcttggtttcaccactagaacagtcttgggctggatgggttatagagctgagcggctgtgatggttctgtttttacattaacaaaaacaattaaaaacaccaaaaac

SEQ ID NO: 825 - DNA, 2505 bp, Homo sapiens
cacaccctgcaggacacctcctggcacaacaccaccttctttggggtttttcaagcacagtggggtgacatgtacctgtcggccatctgtgagtaccagttggaagagatccagcgggtgtttgagggcccctataaggagtaccatgaggaagcccagaagtgggaccgctacactgaccctgtacccagccctcggcctggctcgtgcattaacaactggcatcggcgccacggctacaccagctccctggagctacccgacaacatcctcaacttcgtcaagaagcacccgctgatggaggagcaggtggggcctcggtggagccgccccctgctcgtgaagaagggcaccaacttcacccacctggtggccgaccgggttacaggacttgatggagccacctatacagtgctgttcattgacacaggagacggctggctgctcaaggctgtgagcctggggccctgggttcacctgattgaggagctgcagctgtttgaccaggagcccatgagaagcctggtgctatctcagagcaagaagctgctctttgccggctcccgctctcagctggtgcagctgcccgtggccgactgcatgaagtatcgctcctgtgcagactgtgtcctcgcccgggacccctattgcgcctggagcgtcaacaccagccgctgtgtggccgtgggtggccactctggatctctactgatccagcatgtgatgacctcggacacttcaggcatctgcaacctccgtggcagtaagaaagtcaggcccactcccaaaaacatcacggtggtggcgggcacagacctggtgctgccctgccacctctcctccaacttggcccatgcccgctggacctttgggggccgggacctgcctgcggaacagcccgggtccttcctctacgatgcccggctccaggccctggttgtgatggctgcccagccccgccatgccggggcctaccactgcttttcagaggagcagggggcgcggctggctgctgaaggctaccttgtggctgtcgtggcaggcccgtcggtgaccttggaggcccgggcccccctggaaaacctggggctggtgtggctggcggtggtggccctgggggctgtgtgcctggtgctgctgctgctggtgctgtcattgcgccggcggctgcgggaagagctggagaaaggggccaaggctactgagaggaccttggtgtaccccctggagctgcccaaggagcccaccagtccccccttccggccctgtcctgaaccagatgagaaactttgggatcctgtcggttactactattcagatggctcccttaagatagtacctgggcatgcccggtgccagcccggtggggggcccccttcgccacctccaggcatcccaggccagcctctgccttctccaactcggcttcacctggggggtgggcggaactcaaatgccaatggttacgtgcgcttacaactaggaggggaggaccggggagggctcgggcaccccctgcctgagctcgcggatgaactgagacgcaaactgcagcaacgccagccactgcccgactccaaccccgaggagtcatcagtatgaggggaacccccaccgcgtcggcgggaagcgtgggaggtgtagctcctacttttgcacaggcaccagctacctcagggacatggcacgggcacctgctctgtctgggacagatactgcccagcacccacccggccatgaggacctgctctgctcagcacgggcactgccacttggtgtggctcaccagggcaccagcctcgcagaaggcatcttcctcctctctgtgaatcacagacacgcgggaccccagccgccaaaacttttcaaggcagaagtttcaagatgtgtgtttgtctgtatttgcacatgtgtttgtgtgtgtgtgtatgtgtgtgtgcacgcgcgtgcgcgcttgtggcatagccttcctgtttctgtcaagtcttcccttggcctgggtcctcctggtgagtcattggagctatgaaggggaaggggtcgtatcactttgtctctcctacccccactgccccgagtgtcgggcagcgatgtacatatggaggtggggtggacagggtgctgtgccccttcagagggagtgcagggcttggggtgggcctagtcctgctcctagggctgtgaatgttttcagggtggggggagggagatggagcctcctgtgtgtttggggggaagggtgggtggggcctcccacttggccccggggttcagtggtattttatacttgccttcttcctgtacagggctgggaaaggctgtgtgaggggagagaagggagagggtgggcctgctgtggacaatggcatactctcttccagccctaggaggagggctcctaacagtgtaacttattgtgtccccgcgtatttatttgttgtaaatatttgagtatttttatattgacaataaaatggagaaaatgaaaaaaaaaaaaaaaaaaaa

SEQ ID NO: 826 - protein, 510 aa, Homo sapiens
MYLSAICEYQLEEIQRVFEGPYKEYHEEAQKWDRYTDPVPSPRPGSCINNWHRRHGYTSSLELPDNILNFVKKHPLMEEQVGPRWSRPLLVKKGTNFTHLVADRVTGLDGATYTVLFIDTGDGWLLKAVSLGPWVHLIEELQLFDQEPMRSLVLSQSKKLLFAGSRSQLVQLPVADCMKYRSCADCVLARDPYCAWSVNTSRCVAVGGHSGSLLIQHVMTSDTSGICNLRGSKKVRPTPKNITVVAGTDLVLPCHLSSNLAHARWTFGGRDLPAEQPGSFLYDARLQALVVMAAQPRHAGAYHCFSEEQGARLAAEGYLVAVVAGPSVTLEARAPLENLGLVWLAVVALGAVCLVLLLLVLSLRRRLREELEKGAKATERTLVYPLELPKEPTSPPFRPCPEPDEKLWDPVGYYYSDGSLKIVPGHARCQPGGGPPSPPPGIPGQPLPSPTRLHLGGGRNSNANGYVRLQLGGEDRGGLGHPLPELADELRRKLQQRQPLPDSNPEESSV

SEQ ID NO: 827 - DNA, 523 bp, Homo sapiens
cggaagttttgctgctagtcgcggacgcaatggcttcaaggttacttcgcggagctggaacgctggccgcgcaggccctgagggctcgcggccccagtggcgcggccgcgatgcgctccatggcatctggaggtggtgttcccactgatgaagagcaggcgactgggttggagagggagatcatgctggctgcaaagaagggactggacccatacaatgtactggccccaaagggagcttcaggcaccagggaagaccctaatttagtcccctccatctccaacaagagaatagtaggctgcatctgtgaagaggacaataccagcgtcgtctggttttggctgcacaaaggcgaggcccagcgatgcccccgctgtggagcccattacaagctggtgccccagcagctggcacactgagcacctgcactaaattactcaaaatgtgctgtaaagtttcttctttccagtaaagactagccattgcattggctccttctcccataaaaaaaaaaaaaaaaaaa

SEQ ID NO: 828 - protein, 129 aa, Homo sapiens
MASRLLRGAGTLAAQALRARGPSGAAAMRSMASGGGVPTDEEQATGLEREIMLAAKKGLDPYNVLAPKGASGTREDPNLVPSISNKRIVGCICEEDNTSVVWFWLHKGEAQRCPRCGAHYKLVPQQLAH

SEQ ID NO: 829 - DNA, 1494 bp, Homo sapiens
ttgcagccgccggcagctactgcaaggcaaaagccggagtggacgtgtcttttgaaactgctgctctttcacttctcaggcgtcaccgagagctcagcacccaggctgaactctgtaccatttggaagaatggaagctgatgcatctgttgacatgttttccaaagtcctggagcatcagctgcttcagactaccaaactggtggaagaacatttggattctgaaattcaaaaactggatcagatggatgaggatgaattggaacgccttaaagaaaagagactccaggcactaaggaaagctcaacagcagaaacaagaatggctttctaaaggacatggggaatacagagaaatccctagtgaaagagacttttttcaagaagtcaaggagagtgaaaatgtggtttgccatttctacagagactccacattcaggtgtaaaatactagacagacatctggcaatattgtccaagaaacacctcgagaccaaatttttgaagctgaatgtggaaaaagcacctttcctttgtgagagactgcatatcaaagtcattcccacactagcactgctaaaagatgggaaaacacaagattatgttgttgggtttactgacctaggaaatacagatgacttcaccacagaaactttagaatggaggctcggttcttctgacattcttaattacagtggaaatttaatggagccaccatttcagaaccaaaagaaatttggaacaaacttcacaaagctggaaaagaaaactatccgaggaaagaaatatgattcagactctgatgatgattagagctcaataattctttgtaaattgtctttttttttctgcttcagatttaaatgtgtttttaaaattctattaatgtctatacattggtcacctaaatactcatattctcgagttttatacagttgtatcacatcgaaaagtgtctttactgttttctgtgtggccatcatgtttaagttgaggaaaactcagttcttaaattatctgggaagggtctggattctctatttttgagattgactttatcacaatatgattcttacatctttataccatttacaattgtgttttagatctacagagttagaaattcgaaaactattccaggactaattcttaatcggcattatttatacaagaggtcaagtaacatttactagcgcaatactgcacttgtaaatgaattataaacgctcttctggaatatatttaaataaccattaaagaactgcttattcattctggacactgcatgttgatgttgaatcaactgatgccagcagaaagctattttgatttgtgaacatactgccttatttaaagggtcctgattgcttgtattttaagacattcattaaaaagaaaccaggaaacacttttgaaataacagcataaggaacttcactgtctctgctcaataaaatacctgtaactggaaaaaaaaaaaaaaaaaaaaaaaaaaaa

SEQ ID NO: 830 - protein, 226 aa, Homo sapiens
MEADASVDMFSKVLEHQLLQTTKLVEEHLDSEIQKLDQMDEDELERLKEKRLQALRKAQQQKQEWLSKGHGEYREIPSERDFFQEVKESENVVCHFYRDSTFRCKILDRHLAILSKKHLETKFLKLNVEKAPFLCERLHIKVIPTLALLKDGKTQDYVVGFTDLGNTDDFTTETLEWRLGSSDILNYSGNLMEPPFQNQKKFGTNFTKLEKKTIRGKKYDSDSDDD

SEQ ID NO: 831 - DNA, 4168 bp, Homo sapiens
cgcgggtctgtggagagccgggtgcgagcggcggcagcacgaggggaaaagagctgagcggagaccaaagtcagccgggagacagtgggtctgtgagagaccgaatagaggggctggggccacgagcgccattgacaagcaatggggaagaaacagaaaaacaagagcgaagacagcaccaaggatgacattgatcttgatgccttggctgcagaaatagaaggagctggtgctgccaaagaacaggagcctcaaaagtcaaaagggaaaaagaaaaaagagaaaaaaaagcaggactttgatgaagatgatatcctgaaagaactggaagaattgtctttggaagctcaaggcatcaaagctgacagagaaactgttgcagtgaagccaacagaaaacaatgaagaggaattcacctcaaaagataaaaaaaagaaaggacagaagggcaaaaaacagagttttgatgataatgatagcgaagaattggaagataaagattcaaaatcaaaaaagactgcaaaaccgaaagtggaaatgtactctgggagtgatgatgatgatgattttaacaaacttcctaaaaaagctaaagggaaagctcaaaaatcaaataagaagtgggatgggtcagaggaggatgaggataacagtaaaaaaattaaagagcgttcaagaataaattcttctggtgaaagtggtgatgaatcagatgaatttttgcaatctagaaaaggacagaaaaaaaatcagaaaaacaagccaggtcctaacatagaaagtgggaatgaagatgatgacgcctccttcaaaattaagacagtggcccaaaagaaggcagaaaagaaggagcgcgagagaaaaaagcgagatgaagaaaaagcgaaactgcggaagctgaaagaaaaagaagagttagaaacaggtaaaaaggatcagagtaaacaaaaggaatctcaaaggaaatttgaagaagaaactgtaaaatccaaagtgactgttgatactggagtaattcctgcctctgaagagaaagcagagactcccacagctgcagaagatgacaatgaaggagacaaaaagaagaaagataagaagaaaaagaaaggagaaaaggaagaaaaagagaaagagaagaaaaaaggacctagcaaagccactgttaaagctatgcaagaagctctggctaagcttaaagaggaagaagaaagacagaagagagaagaggaagaacgtataaaacggcttgaagaattagaagccaagcgtaaagaagaggaacgattggaacaagaaaaaagagaaaggaaaaagcaaaaagaaaaagaaagaaaagaacgcttgaaaaaagaagggaaacttttaactaaatcccagagagaagccagagccagagccgaagctactcttaaactgctacaagctcagggtgttgaagtgccatcaaaagactctttgccaaagaagaggccaatttatgaagataaaaagaggaaaaaaataccacagcagctagaaagtaaagaagtgtctgaatcaatggaattatgtgctgctgtagaagttatggaacaaggagtaccagaaaaggaagagacaccacctcctgttgaaccagaagaagaagaagatactgaggatgctggattggatgattgggaagctatggccagtgatgaggagacagaaaaagtagaaggaaacaaagttcatatagaagtaaaagaaaaccctgaagaggaggaggaggaggaagaagaggaagaagaagatgaagaaagtgaagaagaggaggaagaggagggagaaagtgaaggcagtgaaggtgatgaggaagatgaaaaggtgtcagatgagaaggattcagggaagacattagataaaaagccaagtaaagaaatgagctcagattctgaatatgactctgatgatgatcggactaaagaagaaagggcttatgacaaagcaaaacggaggattgagaaacggcgacttgaacatagtaaaaatgtaaacaccgaaaagctaagagcccctattatctgcgtacttgggcatgtggacacagggaagacaaaaattctagataagctccgtcacacacatgtacaagatggtgaagcaggtggtatcacacaacaaattggggccaccaatgttcctcttgaagctattaatgaacagactaagatgattaaaaattttgatagagagaatgtacggattccaggaatgctaattattgatactcctgggcatgaatctttcagtaatctgagaaatagaggaagctctctttgtgacattgccattttagttgttgatattatgcatggtttggagccccagacaattgagtctatcaaccttctcaaatctaaaaaatgtcccttcattgttgcactcaataagattgataggttatatgattggaaaaagagtcctgactctgatgtggctgctactttaaagaagcagaaaaagaatacaaaagatgaatttgaggagcgagcaaaggctattattgtagaatttgcacagcagggtttgaatgctgctttgttttatgagaataaagatccccgcacttttgtgtctttggtacctacctctgcacatactggtgatggcatgggaagtctgatctaccttcttgtagagttaactcagaccatgttgagcaagagacttgcacactgtgaagagctgagagcacaggtgatggaggttaaagctctcccggggatgggcaccactatagatgtcatcttgatcaatgggcgtttgaaggaaggagatacaatcattgttcctggagtagaagggcccattgtaactcagattcgaggcctcctgttacctcctcctatgaaggaattacgagtgaagaaccagtatgaaaagcataaagaagtagaagcagctcagggggtaaagattcttggaaaagacctggagaaaacattggctggtttacccctccttgtggcttataaagaagatgaaatccctgttcttaaagatgaattgatccatgagttaaagcagacactaaatgctatcaaattagaagaaaaaggagtctatgtccaggcatctacactgggttctttggaagctctactggaatttctgaaaacatcagaagtgccctatgcaggaattaacattggcccagtgcataaaaaagatgttatgaaggcttcagtgatgttggaacatgaccctcagtatgcagtaattttggccttcgatgtgagaattgaacgagatgcacaagaaatggctgatagtttaggagttagaatttttagtgcagaaattatttatcatttatttgatgcctttacaaaatatagacaagactacaagaaacagaaacaagaagaatttaagcacatagcagtatttccctgcaagataaaaatcctccctcagtacatttttaattctcgagatccgatagtgatgggggtgacggtggaagcaggtcaggtgaaacaggggacacccatgtgtgtcccaagcaaaaattttgttgacatcggaatagtaacaagtattgaaataaaccataaacaagtggatgttgcaaaaaaaggacaagaagtttgtgtaaaaatagaacctatccctggtgagtcacccaaaatgtttggaagacattttgaagctacagatattcttgttagtaagatcagccggcagtccattgatgcactcaaagactggttcagagatgaaatgcagaagagtgactggcagcttattgtggagctgaagaaagtatttgaaatcatctaattttttcacatggagcaggaactggagtaaatgcaatactgtgttgtaatatcccaacaaaaatcagacaaaaaatggaacagacgtatttggacactgatggacttaagtatggaaggaagaaaaataggtgtataaaatgttttccatgagaaaccaagaaacttacactggtttgacagtggtcagttacatgtccccacagttccaatgtgcctgttcactcacctctcccttccccaacccttctctacttggctgctgttttaaagtttgcccttccccaaatttggatttttattacagatctaaagctctttcgattttatactgattaaatcagtactgcagtatttgattaacc

SEQ ID NO: 832 - DNA, 442 bp, Rattus norvegicus
cttcctttccaacttggacgctgcagaatggctcccgcaaagaagggtggcgagaagaaaaagggccgttctgccatcaacgaagtggtaacccgagaatacaccatcaacattcacaagcgcatccatggagtgggcttcaagaagcgtgcacctcgggcactcaaagagattcggaaatttgccatgaaggagatgggaactccagatgtgcgcattgacaccaggctcaacaaagctgtctgggccaaaggaataaggaatgtgccataccgaatccgtgtgcggctgtccagaaaacgtaatgaggatgaagattcaccaaataagctatatactttggttacctatgtacctgttaccactttcaaaaatctacagacagtcaatgtggatgagaactaatcgctgatcgtcagatcaaataaagttataaaattgc

SEQ ID NO: 833 - protein, 125 aa, Rattus norvegicus [sequence omitted]

SEQ ID NO: 834 - DNA, 1533 bp, Homo sapiens
atgcccggcggaggggcgagcgcggcgtctggccggcttctcaccgccgcggagcaaagagggtcccgggaagcggcagggtcggcgtccaggagcggcttcgggggctccggcggcggcagaggcggagcaagcggccccgggtccgggagcggaggccctgggggccccgcgggcaggatgagcttgaccccgaaggagctctcgagcctgctgagcatcatatcggaggaggcgggcggcggcagcaccttcgagggcctgtccaccgccttccaccactacttcagcaaggccgaccacttccgcctgggctcggtgctcgtcatgctgctccagcagcccgacctgctgcctagcgcggcgcagcgcctcacggcgctctacctgctctgggagatgtaccgcaccgagccgctggccgccaaccccttcgccgccagcttcgcgcacctgctcaaccccgcgccgcccgcccgcggcggccaggaacccgaccgccctccgctctcaggatttttacctcctataactccaccagaaaagttttttctttcccagctgatgctggcacccccacgggaactcttcaaaaagacgcctcgccagattgcactgatggacgttggaaacatgggccagtctgtggacattagtgggcttcagttagccttggccgaacgccaatctgaattgccaacgcaaagcaaagcgagcttccccagtattctcagtgacccagacccggattcttctaattctggatttgacagctcagttgcctctcagatcacagaagctttagtcagcggaccaaagccacctattgaaagccattttcgaccagagtttattcgtccaccgcctccactccacatttgtgaggatgaacttgcttggctaaaccccacggagcctgaccacgcgatccagtgggataaatcgatgtgtgttaagaatagcactggtgtggagatcaaacgaataatggccaaagccttcaaaagccccttatcctctccccaacaaacacagctacttggtgagttggaaaaagaccccaaacttgtctaccatattggcctcaccccagccaaacttcctgaccttgtggaaaacaaccctttagtcgctatagaaatgttgctgaaattaatgcagtcaagccagatcactgagtatttctctgtcctggtcaatatggacatgtctttacattcaatggaagttgtaaatcgactaactacagctgttgatctacctcctgaatttattcacctttatatatcaaattgcatctctacttgtgaacagattaaggataaatatatgcagaatcggttggtgcgtcttgtgtgtgtgtttctccaatccttgatccgtaacaaaattattaatgtacaggatttgtttatagaagtgcaggcattctgtattgaattcagtaggatacgagaagctgctggtcttttccggttgttgaagacattggatactggggaaacaccttctgagaccaaaatgtcaaaataa

SEQ ID NO: 835 - protein, 510 aa, Homo sapiens
MPGGGASAASGRLLTAAEQRGSREAAGSASRSGFGGSGGGRGGASGPGSGSGGPGGPAGRMSLTPKELSSLLSIISEEAGGGSTFEGLSTAFHHYFSKADHFRLGSVLVMLLQQPDLLPSAAQRLTALYLLWEMYRTEPLAANPFAASFAHLLNPAPPARGGQEPDRPPLSGFLPPITPPEKFFLSQLMLAPPRELFKKTPRQIALMDVGNMGQSVDISGLQLALAERQSELPTQSKASFPSILSDPDPDSSNSGFDSSVASQITEALVSGPKPPIESHFRPEFIRPPPPLHICEDELAWLNPTEPDHAIQWDKSMCVKNSTGVEIKRIMAKAFKSPLSSPQQTQLLGELEKDPKLVYHIGLTPAKLPDLVENNPLVAIEMLLKLMQSSQITEYFSVLVNMDMSLHSMEVVNRLTTAVDLPPEFIHLYISNCISTCEQIKDKYMQNRLVRLVCVFLQSLIRNKIINVQDLFIEVQAFCIEFSRIREAAGLFRLLKTLDTGETPSETKMSK

SEQ ID NO: 836 - DNA, 1892 bp, Homo sapiens
agggtacgggccgggaccgccgcagcccggggcgggggcacggcaaccgcgaggcctgggggcgcccgccccccgcgccccacgcccggtgccagcgagccgaggcgtgcatctccttatatggtcaaatgacacggcggggtttctcgagggcgggagctgcgcagcgctccactcggccggcagcggagccgcagccaccagccgcccgcgccctccagccccgtccgggagtccccggcccgctgcggtgccgtgagtacctccaaccccctgcgccccggagggaggccgaggggcttagccaccagggctcggaagtgggggccgaatccggtgcgagacccaaggagaggggagcagagccggagttggggagactgtggctgaaaactgtgtcttcctggagactaggctggcattttgactttgggacggagtctcgctttgtcgcccaggctggagtgcagtggcacgatctcagctcactgcaagctctacctcttggttcacgccattctcctgccccagcctcccaagtagctgggactacaggttgctgaaaagccaggagtcaaaatgactgagcgctttgactgccaccattgcaacgaatctctctttggcaagaagtacatcctgcgggaggagagcccctactgcgtggtgtgctttgagaccctgttcgccaacacctgcgaggagtgtgggaagcccatcggctgtgactgcaaggacttgtcttacaaggaccggcactggcatgaagcctgtttccactgctcgcagtgcagaaactcactggtggacaagccctttgctgccaaggaggaccagctgctctgtacagactgctattccaacgagtactcatccaagtgccaggaatgcaagaagaccatcatgccaggtacccgcaagatggagtacaagggcagcagctggcatgagacctgcttcatctgccaccgctgccagcagccaattggaaccaagagtttcatccccaaagacaatcagaatttctgtgtgccctgctatgagaaacaacatgccatgcagtgcgttcagtgcaaaaagcccatcaccacgggaggggtcacttaccgggagcagccctggcacaaggagtgcttcgtgtgcaccgcctgcaggaagcagctgtctgggcagcgcttcacagctcgcgatgactttgcctactgcctgaactgcttctgtgacttgtatgccaagaagtgtgctgggtgcaccaaccccatcagcggacttggtggcacaaaatacatctcctttgaggaacggcagtggcataacgactgctttaactgtaagaagtgctccctctcactggtggggcgtggcttcctcacagagagggacgacatcctgtgccccgactgtgggaaagacatctgaattcaacacagagaagttgctgcttgtgatctcacacacagatttttatgttttctttctcacccaggcaatcttgccttctggtttcttccagccacattgagactttcttctagtgcttttcagtgatactcacgtttgcttaaaccctttagtgctttgtgatagttcagtcccagggaaagagaaaactcgccctaggccctaggtgggaagatggtttgaaatttttgtaatcgagtaaggcacacccaaatgtaaaaatccttttgaatgatgcctttataaatctttctctcactgtctatttaagtgcaattaacatatgtcacgaacttgaaagttttctaaactcaataaggtaatgaccagttgttatttacagctctgtaacctcccgttgcgtcaagtctaaaccaagattatgtgacttgcaataaagttattcagaacagaaaaaaaaaaaaaaaaaa

SEQ ID NO: 837 - protein, 279 aa, Homo sapiens
MTERFDCHHCNESLFGKKYILREESPYCVVCFETLFANTCEECGKPIGCDCKDLSYKDRHWHEACFHCSQCRNSLVDKPFAAKEDQLLCTDCYSNEYSSKCQECKKTIMPGTRKMEYKGSSWHETCFICHRCQQPIGTKSFIPKDNQNFCVPCYEKQHAMQCVQCKKPITTGGVTYREQPWHKECFVCTACRKQLSGQRFTARDDFAYCLNCFCDLYAKKCAGCTNPISGLGGTKYISFEERQWHNDCFNCKKCSLSLVGRGFLTERDDILCPDCGKDI

SEQ ID NO: 838 - DNA, 1044 bp, Homo sapiens
agtcttctggccccgagagggagaggtggggataggaccttcctttagtcccctccgtagtggaacgaaggattctttatggtcatctgtggtgttcatttcgtaaagaagcatctgcagggtaagaaggaaaaacgtccaccttgcaaatatatcccaggcacatgcctcctgagaagtgaccccctcctccctccgcctcccccggcacgtcctggggcttctccagtctcccgctcctgggaccaggcagagatcccggcgtgggcagacccctgccaccgcgcccaggcctcgtccgaaactcgcgcccgagagcccacgccggaggcgacgctcccgataactactgtgctcccaagacccggagggcacgaagaaaggagccctggcaaacaaagggttgctgaaaagccaggagtcaaaatgactgagcgctttgactgccaccattgcaacgaatctctctttggcaagaagtacatcctgcgggaggagagcccctactgcgtggtgtgctttgagaccctgttcgccaacacctgcgaggagtgtgggaagcccatcggctgtgactgcaaggtacctgctgcgggcctctgcgggtccccggcgctcccctaggaaacacgggtttctctgtggtttgtgctgaagccctgatccaccactgaagtctgtctcttgagccccctctgaggggcgtggaccctgcgtgtagcctttcggaagcttcttccctctagcgaatgtgatctctgcccacaagcactgggtgagggccttgccaggacttttgtgcttagtatctctaagtacattttctgtattctagcaattagtgcccttatctaactacccagctgcctaccaatactggaactttcttaagggtggtgctctcttcctcttgtctgtttgccccgtggtgagtaacgtggagcaggtgctgtgctcagtcaatatttgatgaatgaatgtgtacatgagagaaccagagttggttcctggataaatgggcacataaaagcacaaagtccttgg

SEQ ID NO: 839 - DNA, 1264 bp, Homo sapiens
aaggactccatgaaagatgacagaagaagttattgtgatagccaagtgggactacaccgcccagcaggaccaggagctggacatcaagaagaacgagcggctgtggttgctggacgactccaagacgtggtggcgggtgaggaacgcggccaacaggacgggctatgtaccgtccaactacgtggagcggaagaacagcctgaagaagggctccctcgtgaagaacctgaaggacacactaggcctcggcaagacgcgcaggaagaccagcgcgcgggatgcgtcccccacgcccagcacggacgccgagtaccccgccaatggcagcggcgccgaccgcatctacgacctcaacatcccggccttcgtcaagttcgcctatgtggccgagcgggaggatgagttgtccctggtgaaggggtcgcgcgtcaccgtcatggagaagtgcagcgacggttggtggcggggcagctacaacgggcagatcggctggttcccctccaactacgtcttggaggaggtggacgaggcggctgcggagtccccaagcttcctgagcctgcgcaagggcgcctcgctgagcaatggccagggctcccgcgtgctgcatgtggtccagacgctgtaccccttcagctcagtcaccgaggaggagctcaacttcgagaagggggagaccatggaggtgattgagaagccggagaacgaccccgagtggtggaaatgcaaaaatgcccggggccaggtgggcctcgtccccaaaaactacgtggtggtcctcagtgacgggcctgccctgcaccctgcgcacgccccacagataagctacaccgggccctcgtccagcgggcgcttcgcgggcagagagtggtactacgggaacgtgacgcggcaccaggccgagtgcgccctcaacgagcggggcgtggagggcgacttcctcattagggacagcgagtcctcgcccagcgacttctccgtgtcccttaaagcgtcagggaagaacaaacacttcaaggtgcagctcgtggacaatgtctactgcattgggcagcggcgcttccacaccatggacgagctggtggaacactacaaaaaggcgcccatcttcaccagcgagcacggggagaagctctacctcgtcagggccctgcagtgacggcgccccggccccacactcgcctcccgggccccacggtggagctgcccgcccggccttgtggcagaggctcctcccgcggggacggccccgacggcttctctg

SEQ ID NO: 840 - protein, 380 aa, Homo sapiens
MTEEVIVIAKWDYTAQQDQELDIKKNERLWLLDDSKTWWRVRNAANRTGYVPSNYVERKNSLKKGSLVKNLKDTLGLGKTRRKTSARDASPTPSTDAEYPANGSGADRIYDLNIPAFVKFAYVAEREDELSLVKGSRVTVMEKCSDGWWRGSYNGQIGWFPSNYVLEEVDEAAAESPSFLSLRKGASLSNGQGSRVLHVVQTLYPFSSVTEEELNFEKGETMEVIEKPENDPEWWKCKNARGQVGLVPKNYVVVLSDGPALHPAHAPQISYTGPSSSGRFAGREWYYGNVTRHQAECALNERGVEGDFLIRDSESSPSDFSVSLKASGKNKHFKVQLVDNVYCIGQRRFHTMDELVEHYKKAPIFTSEHGEKLYLVRALQ

SEQ ID NO: 841 - DNA, 551 bp, Homo sapiens
tggaaccatgctgcttgaggctctggactgcatcctaccaccaactcgtccaactgacaagcccttgcacctgcctctccaggatgtctacaaaattggtggtattggtagtgttcctgttggccgagtggagactggtgttctcaaacctggtatggtggtcacctttgctccagtcaacgttacaacagaagtaaaatctgtcgaaatgcaccatgaagctttgagtgaagctcttcctggggacaatgtgggcttcaatgtcaagaatgtgtctgtcaaggatgttcgtcatggcaacgttgctggtgacagcaaaaatgacccaccaatggaagcagctggtttcactgctcaggtgattatcctgaaccatccaggccaaataagcactggctatgcccctgtattggattgccacacggctcatattgcatgcaagtttgctgagctgaaggaaaagattgatcaccgttctggtaaaaagctggaagatggccctaaattcttctttgggttgctttgctgttcgtgatatgagacagatagtt

SEQ ID NO: 842 - DNA, 685 bp, Homo sapiens
aaaagccaaaatgggaaaggaaaagactcataccaacattgtcgtcattggacacatagattcgggcaagtccaccactactggccatctgatctacaaaggcggtggcatcgacaaaagaaccattgaaaaatttgagaaggaggctgctgagatgggaaagggctccttcaagtatgcctgggtcttggataaactgaaagctgagtgtgaacatggtatcaccattgatacctccttgtggaaatttgagaccagcaagtactatgtgactatcgttgatgccccaggacacagagacttcatcaaaaacatgattacagagacatctcaggctgactgtgctgtcctgattgttgctgctggtgttggtgaatttgaagctggtatctccaagaatgggcaaacccaagagcatgcccttctggcttacacactgggtgtgaaacaactaattgttggtgttaacaaaatggattctactgagccaccctacagccagaagagatatgaggaaactacaaaattggtggtattggtagtgttcctgttggccgagtggagactggtgttctcaaacctggtatggtggtcacctttgctccagtcaacgttacaacagaagtaaaatctgtcgaaatgcaccatgaagctttgagtgaagctcttcctggggacaatgtgg

SEQ ID NO: 843 - DNA, 2883 bp, Homo sapiens
aacagatcttcatgaatgtcgctatctttgaggatgaagtttttgctggagttaccacacaccaggaactctttccacacagcctgctgagtgtgattgccaacttcatccctttctctgatctcaaccagagtccacggaacatgtaccaatgccagatgggtaagcaaactatgggctttccacttctcacttatcaagaccgatcggataacaaactgtatcgtcttcagactcctcagagtcccttggtgagaccctccatgtatgattattatgacatggataactatccaattgggaccaatgccatcgttgctgtgatttcttacactggctatgatatggaagatgccatgattgtgaataaggcctcttgggaacgaggctttgcccatggaagtgtctacaagtctgagttcatagacctctctgaaaaaattaaacaaggagatagtagcctggtgtttggcatcaaacctggtgacccacgcgttctgcagaagttagatgacgatggattgccgtttataggagcaaaactgcagtacggagatccgtattacagctacctcaacctcaacaccggggaaagttttgtgatgtactataagagtaaagaaaattgtgttgtggataacatcaaagtgtgcagtaatgacactgggagtggaaaattcaagtgtgtttgcatcactatgagagtgcctcggaacccaactatcggagataaatttgccagtcgccatgggcagaagggcattttaagcagattgtggccggctgaggacatgccttttactgagagtgggatggtcccagacattctgttcaatccccatggttttccatcccgcatgaccattgggatgttaattgagagtatggccgggaagtctgcagctttgcatggtctctgccatgatgctacacccttcatcttctcagaggagaactcggccttagaatactttggtgagatgttaaaggctgctggctacaatttctatggcaccgagaggttatatagtggcatcagtgggctagaactggaagcagacatcttcataggagtggtttattatcagcgcttacgccatatggtctcagacaaatttcaagtaaggacaactggagcccgagacagagtcaccaaccagcctattgggggaagaaatgtccagggtggaatccgttttggggagatggaacgggatgcgcttttagctcatggtacatcttttctccttcatgaccgcctcttcaactgctcagatcggtcggtagcccatgtgtgtgaagtgtggcagtttactctctccactgttggagaagccacccccttcttggtctgccatgcgcaacagaaaatacaactgtactctgtgtagtcgcagtgacactatcgatactgtttctgtgccttatgtttttcggtattttgtagctgaactggcagctatgaacatcaaagtgaaactggatgttgtttaacttgatgttgaccttttggattaaggggactatcagattaaagcaaaatgtaattttaattcaatgaagatatcattaccaggttactcttgagatttttcaacggtgttagaactctcaaccaagacctgaaaaccaagtatgcaaggtttctgaatctctctggtagattaactattgacaatgattttctgttatctttgttcaaaaagttcatgtcttctcaaaatatgaaatattgataaatggaagagcatacggtgacaagtctcctttccaaccccaggttccctacaccctgctctcagcaggcagtgagtgtcacacacctgttaatccatcttgagcaggacagtactatacaaatagaatgcaagctgtaatgtaattttatattttcttatagccacgttgaagtaaaaacaaacaggtacagtgttttttaccagctttatagaagtacagttgttacatatttaatgaatacaatttgatgggtctgactatatgcacacacctttgataccatcaccacaatcagggtaataaacatacctgtcatctccacaagtttcctcctgcccctttgttttttgctttttggttgctgttgagtttttgttttgtcttctgtggtaagaacacttaactcaagacctaccctcttaacaaatctttaagtgcacgatatagtattgttaattccaggcaccatgttgtacaacagatctttagaccttacttgtcttgcataactgaagctttatacctgttgaacaactctccatttccctggcccctagcaaccacccttctaccctgtttctatgagtttgactattacagatatctcatatagtgggatcatgcaatatttgtcctgtgactggcttatttcacttagcatagtgaaataagattcatccattttggaagccaggcatggtgctgtgcatctatagtccctgctatttgagaggctgaggtgggaggatcatttgagtgcaggagttcaaggacagcctgggtaatataggaagaccctgtcttgaagaccctgacctcaagtgatccacccacctcggcctccgaaagtgctaggattacaggtgtgagccactgtgcctggcctccggtgagtattttatatttagtctacacttccatacttggcttttttctgcttttatgttgatctgctttcatagcagtgtgtagagtgccacttatgttttctttcttgtgtacagtattttattgtatggatttaccatcccctgtgtatttaagttgttccattctttggccattataacttttttctgcaaatattctggtgacttatctttggccattataaactgttgataataaaaaaaaaaaaaaaaa

SEQ ID NO: 844 - protein, 459 aa, Homo sapiens
MNVAIFEDEVFAGVTTHQELFPHSLLSVIANFIPFSDLNQSPRNMYQCQMGKQTMGFPLLTYQDRSDNKLYRLQTPQSPLVRPSMYDYYDMDNYPIGTNAIVAVISYTGYDMEDAMIVNKASWERGFAHGSVYKSEFIDLSEKIKQGDSSLVFGIKPGDPRVLQKLDDDGLPFIGAKLQYGDPYYSYLNLNTGESFVMYYKSKENCVVDNIKVCSNDTGSGKFKCVCITMRVPRNPTIGDKFASRHGQKGILSRLWPAEDMPFTESGMVPDILFNPHGFPSRMTIGMLIESMAGKSAALHGLCHDATPFIFSEENSALEYFGEMLKAAGYNFYGTERLYSGISGLELEADIFIGVVYYQRLRHMVSDKFQVRTTGARDRVTNQPIGGRNVQGGIRFGEMERDALLAHGTSFLLHDRLFNCSDRSVAHVCEVWQFTLSTVGEATPFLVCHAQQKIQLYSV

SEQ ID NO: 845 - DNA, 3201 bp, Homo sapiens
gagctgtccccggtgccgccgacccgggccgtgtgcccgtggctccagccgctgtcgcctcgatctcctcgtctcccgctccgccctcccttttccctggatgaacttgcgtcctttctcttctccgccatggaattctgctccgtgcttttagccctcctgagccaaagaaaccccagacaacagatgcccatacgcagcgtatagcagtaactccccagctcggtttctgtgccgtagtttacagtatttaattttatataatatatattatttattatagcatttttgatacctcatattctgtttacacatcttgaaaggcgctcagtagttctcttactaaacaaccactactccagagaatggcaacgctgattaccagtactacagctgctaccgccgcttctggtcctttggtggactacctatggatgctcatcctgggcttcattattgcatttgtcttggcattctccgtgggagccaatgatgtagcaaattcttttggtacagctgtgggctcaggtgtagtgaccctgaagcaagcctgcatcctagctagcatctttgaaacagtgggctctgtcttactgggggccaaagtgagcgaaaccatccggaagggcttgattgacgtggagatgtacaactcgactcaagggctgctgatggccggctcagtcagtgctatgtttggttctgctgtgtggcaactcgtggcttcgtttttgaagctccctatttctggaacccattgtattgttggtgcaactattggtttctccctcgtggcaaaggggcaggagggtgtcaagtggtctgaactgataaaaattgtgatgtcttggttcgtgtccccactgctttctggaattatgtctggaattttattcttcctggttcgtgcattcatcctccataaggcagatccagttcctaatggtttgcgagctttgccagttttctatgcctgcacagttggaataaacctcttttccatcatgtatactggagcaccgttgctgggctttgacaaacttcctctgtggggtaccatcctcatctcggtgggatgtgcagttttctgtgcccttatcgtctggttctttgtatgtcccaggatgaagagaaaaattgaacgagaaataaagtgtagtccttctgaaagccccttaatggaaaaaaagaatagcttgaaagaagaccatgaagaaacaaagttgtctgttggtgatattgaaaacaagcatcctgtttctgaggtagggcctgccactgtgcccctccaggctgtggtggaggagagaacagtctcattcaaacttggagatttggaggaagctccagagagagagaggcttcccagcgtggacttgaaagaggaaaccagcatagatagcaccgtgaatggtgcagtgcagttgcctaatgggaaccttgtccagttcagtcaagccgtcagcaaccaaataaactccagtggccactaccagtatcacaccgtgcataaggattccggcctgtacaaagagctactccataaattacatcttgccaaggtgggagattgcatgggagactccggtgacaaacccttaaggcgcaataatagctatacttcctataccatggcaatatgtggcatgcctctggattcattccgtgccaaagaaggtgaacagaagggcgaagaaatggagaagctgacatggcctaatgcagactccaagaagcgaattcgaatggacagttacaccagttactgcaatgctgtgtctgaccttcactcagcatctgagatagacatgagtgtcaaggcagagatgggtctaggtgacagaaaaggaagtaatggctctctagaagaatggtatgaccaggataagcctgaagtctctctcctcttccagttcctgcagatccttacagcctgctttgggtcattcgcccatggtggcaatgacgtaagcaatgccattgggcctctggttgctttatatttggtttatgacacaggagatgtttcttcaaaagtggcaacaccaatatggcttctactctatggtggtgttggtatctgtgttggtctgtgggtttggggaagaagagttatccagaccatggggaaggatctgacaccgatcacaccctctagtggcttcagtattgaactggcatctgccctcactgtggtgattgcatcaaatattggccttcccatcagtacaacacattgtaaagtgggctctgttgtgtctgttggctggctccggtccaagaaggctgttgactggcgtctctttcgtaacatttttatggcctggtttgtcacagtccccatttctggagttatcagtgctgccatcatggcaatcttcagatatgtcatcctcagaatgtgaagctgtttgagattaaaatttgtgtcaatgtttgggaccatcttaggtattcctgctcccctgaagaatgattacagtgttaacagaagactgacaagagtctttttatttgggagccagaggagggaagtgttacttgtgctataactgcttttgtgctaaatatgaattgtctcaaaattagctgtgtaaaatagcccgggttccactggctcctgctgaggtcccctttccttctgggctgtgaattcctgtacatatttctctactttttgtatcaggcttcaattccattatgttttaatgttgtctctgaagatgacttgtgatttttttttcttttttttaaaccatgaagagccgtttgacagagcatgctctgcgttgttggtttcaccagcttctgccctcacatgcacagggatttaacaacaaaaatataactacaacttcccttgtagtctcttatataagtagagtccttggtactctgccctcctgtcagtagtggcaggatctattggcatattcgggagcttcttagagggatgaggttctttgaacacagtgaaaatttaaattagtaacttttttgcaagcagtttattgactgttattgctaagaagaagtaagaaagaaaaagcctgttggcaatcttggttatttctttaagatttctggcagtgtgggatggatgaatgaagtggaatgtgaactttgggcaagttaagtgggacagccttccatgttcatttgtctacctcttaactgaataaaaaagcctacagtttttag

SEQ ID NO: 846 - protein, 679 aa, Homo sapiens
MATLITSTTAATAASGPLVDYLWMLILGFIIAFVLAFSVGANDVANSFGTAVGSGVVTLKQACILASIFETVGSVLLGAKVSETIRKGLIDVEMYNSTQGLLMAGSVSAMFGSAVWQLVASFLKLPISGTHCIVGATIGFSLVAKGQEGVKWSELIKIVMSWFVSPLLSGIMSGILFFLVRAFILHKADPVPNGLRALPVFYACTVGINLFSIMYTGAPLLGFDKLPLWGTILISVGCAVFCALIVWFFVCPRMKRKIEREIKCSPSESPLMEKKNSLKEDHEETKLSVGDIENKHPVSEVGPATVPLQAVVEERTVSFKLGDLEEAPERERLPSVDLKEETSIDSTVNGAVQLPNGNLVQFSQAVSNQINSSGHYQYHTVHKDSGLYKELLHKLHLAKVGDCMGDSGDKPLRRNNSYTSYTMAICGMPLDSFRAKEGEQKGEEMEKLTWPNADSKKRIRMDSYTSYCNAVSDLHSASEIDMSVKAEMGLGDRKGSNGSLEEWYDQDKPEVSLLFQFLQILTACFGSFAHGGNDVSNAIGPLVALYLVYDTGDVSSKVATPIWLLLYGGVGICVGLWVWGRRVIQTMGKDLTPITPSSGFSIELASALTVVIASNIGLPISTTHCKVGSVVSVGWLRSKKAVDWRLFRNIFMAWFVTVPISGVISAAIMAIFRYVILRM

SEQ ID NO: 847 - DNA, 1497 bp, Homo sapiens
accaacctcttcgaggcacaaggcacaacaggctgctctgggattctcttcagccaatcttcattgctcaagtgtctgaagcagccatggcagaagtacctgagctcgccagtgaaatgatggcttattacagtggcaatgaggatgacttgttctttgaagctgatggccctaaacagatgaagtgctccttccaggacctggacctctgccctctggatggcggcatccagctacgaatctccgaccaccactacagcaagggcttcaggcaggccgcgtcagttgttgtggccatggacaagctgaggaagatgctggttccctgcccacagaccttccaggagaatgacctgagcaccttctttcccttcatctttgaagaagaacctatcttcttcgacacatgggataacgaggcttatgtgcacgatgcacctgtacgatcactgaactgcacgctccgggactcacagcaaaaaagcttggtgatgtctggtccatatgaactgaaagctctccacctccagggacaggatatggagcaacaagtggtgttctccatgtcctttgtacaaggagaagaaagtaatgacaaaatacctgtggccttgggcctcaaggaaaagaatctgtacctgtcctgcgtgttgaaagatgataagcccactctacagctggagagtgtagatcccaaaaattacccaaagaagaagatggaaaagcgatttgtcttcaacaagatagaaatcaataacaagctggaatttgagtctgcccagttccccaactggtacatcagcacctctcaagcagaaaacatgcccgtcttcctgggagggaccaaaggcggccaggatataactgacttcaccatgcaatttgtgtcttcctaaagagagctgtacccagagagtcctgtgctgaatgtggactcaatccctagggctggcagaaagggaacagaaaggtttttgagtacggctatagcctggactttcctgttgtctacaccaatgcccaactgcctgccttagggtagtgctaagaggatctcctgtccatcagccaggacagtcagctctctcctttcagggccaatccccagcccttttgttgagccaggcctctctcacctctcctactcacttaaagcccgcctgacagaaaccacggccacatttggttctaagaaaccctctgtcattcgctcccacattctgatgagcaaccgcttccctatttatttatttatttgtttgtttgttttattcattggtctaatttattcaaagggggcaagaagtagcagtgtctgtaaaagagcctagtttttaatagctatggaatcaattcaatttggactggtgtgctctctttaaatcaagtcctttaattaagactgaaaatatataagctcagattatttaaatgggaatatttataaatgagcaaatatcatactgttcaatggttctgaaataaacttctctgaag

SEQ ID NO: 848 - protein, 269 aa, Homo sapiens
MAEVPELASEMMAYYSGNEDDLFFEADGPKQMKCSFQDLDLCPLDGGIQLRISDHHYSKGFRQAASVVVAMDKLRKMLVPCPQTFQENDLSTFFPFIFEEEPIFFDTWDNEAYVHDAPVRSLNCTLRDSQQKSLVMSGPYELKALHLQGQDMEQQVVFSMSFVQGEESNDKIPVALGLKEKNLYLSCVLKDDKPTLQLESVDPKNYPKKKMEKRFVFNKIEINNKLEFESAQFPNWYISTSQAENMPVFLGGTKGGQDITDFTMQFVSS

SEQ ID NO: 849 - DNA, 768 bp, Homo sapiens
aggcaccatgactcctgtgaggatgcagcactccctggcaggtcagacctatgccgtgcccctcatccagccagacctgcggtgagaggaggccgtccagcagatggcagatgccctgcagtacctgcagaaggtctctggagacatcttcagcagtgagagcggccttgctgcggccaaagaacatggaaaagcatgagtggggtgatgtgtgccttaaagcatcagacacttgggcctcgggcatcaggagccagccacagggatgtctggggaaatggcgttccatgagatgcaagcacacaagaatgcacttggcacatctggggaacagcaggcagctgatatcactgggcccaccctgcaccagggaggatggaagcaggtagagcagagccggagccaggtgcaggccattggagagaaggtctccttggcccaggccaagattgagaagatcaagggcagcaagaaggccatcaaggtgttctccagtgccaagtaccctgctccagagcgcctgcaggaatatggctccatcttcacgggcgcccaggaccctggcctgcagagacgcccccgccacaggatccagagcaagcaccgccccctggacgagcgggccctgcaggagaagctgaaggactttcctgtgtgcgtgagcaccaagccggagcccgaggacgatgcagaagagggacttgggggtcttcccagcaacatcagctctgtcagctccttgctgctcttcaacaccacctagaacct

SEQ ID NO: 850 - DNA, 660 bp, Homo sapiens
agcgcgggggaaccggaggctgcaggatggtcaagctgacggcggagctgatcgagcaggcggcgcagtacaccaacgcagtgcgcgaccgggagctggacctccgggggtataaaattcccgtcattgaaaatctaggtgctacgttagaccagtttgatgctattgatttttctgacaatgagatcaggaaactggatggttttcctttgttgagaagactgaaaacattgttagggaacaacaacagaatatgccgtataggtgagggacttgatcaggctctgccctgtctgacagaactcattctcaccaataataggctcgtggaactgggtgatctggaccctctggcatctctcaaatcgctgacttacctaagtatcctaagaaatctggtaaccaataagaagcattacagattgtatgtgatttataaagttccgcaagtcagagtactggatttccagaaagtgaaactaaaagttttaatccaggtgctggtttgccaactgacaaaaagaaaggtgggccatcgccaggggatgtagaaacaatcaagaatgctatagcaaatgcttcaactctggctgaagtggagcggctgaaggggttgctgcagtctggtcagatccctggcagagaacgcaaatcggggcc

SEQ ID NO: 851 - DNA, 3951 bp, Homo sapiens
gatgggctgtgcaaagggcgcggctgctgaggacagggctgtggctggagaacctgctgcttcctgaagccgagccccaccctaaaggaccgagagcacaggccatgggagaggaatcgagtagggatgcagagcctggtggcactgtcctgagagaggaggaggctgggcagggccccggcgctggagaggtgccctgcatatgggacctctcagaggtgcacaagagctgtgtgcccaggtacccctgtctcctctcctcctccagcccccagcctactctcctaatggtctgtgtctttcagggatgagatttactgccagatctgcaagcagctctcggagaacttcaaaacaagcagcctggcccggggctggatcctgctcagcctctgcctcggctgcttcccaccctcagagaggttcatgaagtatctactgaacttcatcggccaagggccggcgacctacggccccttctgtgccgagcgcctgagacgcacctatgccaatggggtgcgtgcggagccccccacctggctggagctgcaggctgtcaagtccaagaagcacatccccatccaagtcatcttggccactggagagagcctaaccgtccccgtggactcagcctccacatctcgggaaatgtgcatgcacatcgctcacaagcagggcctcagcgaccacctgggcttctccctccaggtcgccgtgtacgacaagttctggtccctgggcagcgggcgcgaccacatgatggatgccatcgcccggtgtgagcagatggcccaggagaggggcgagagccagcgccagtcaccctggcgcatctacttccggaaggaattcttcaccccctggcacgactcccgggaggaccctgtcagcaccgagcttatttaccgccaagtcctccgaggagtctggtctggcgagtacagcttcgagaaggaggaagagctggttgagctgctggcccggcactgctacgtgcagctcggcgcctcagcagagagcaaggctgtccaggagctgctgcccagctgcatcccccacaagctgtacaggaccaagcccccagacaggtgggcgagcctcgtcactgccgcctgcgccaaggccccatacactcagaagcaagtcacaccactggccgtgcgagagcaggtggtggacgccgcccgcctgcagtggccgctgctcttctcccggctcttcgaagtcatcacactctcaggcccccgcctgcccaagacgcagctgatcttggctgttaactggaaggggctttgcttcctggaccagcaggagaagatgctgctggaactctctttcccagaggtcatgggtctggccaccaacagggaggcccagggcgggcagaggctgctgctctccacgatgcatgaggagtacgagtttgtgtcacccagcagtgtggccatcgctgagctggtggccctgttcctggagggcctgaaggagaggtccattttcgccatggccctgcaggacaggaaggccacagatgacaccaccctcctggccttcaagaagggggacctgttggtcctcacaaagaagcaggggctgctggcctctgagaactggaccctcggccagaacgacaggacaggcaagacggggctggtgcccatggcctgcctctacaccatccccacggtcactaagccctcggcacagctgctgagcttgcttgccatgtcaccagagaagaggaagctggcggctcaggaggggcagttcacagagccacgtcctgaggagccacccaaggaaaagctgcacaccctggaggagttctcctatgagttcttcagggctccagagaaggacatggtgagcatggccgtgctgcccctggcccgtgcccgtggccacctgtgggcctattcctgcgagccgctgcgacagccgctgctcaagcgagtccacgccaacgtcgacctctgggacatcgcctgccagatctttgtcgccatcctccggtacatgggcgactacccttctcggcaggcctggcccaccctggagctcaccgaccagatcttcacactggccctgcagcacccggccctccaggacgaggtctactgccagatcctgaagcagctgacgcacaactccaacaggcacagcgaagagcggggctggcagctgctgtggctgtgcacgggcctcttcccgcccagcaaggggctgctgccccatgcccagaagtttatagacactcggagggggaagctgctggcccccgactgcagccgccgaatccagaaggtcctgaggacggggccccggaagcagcccccgcaccaggtggaggtggaggccgcagagcagaacgtctcccgcatctgccacaagatctacttccccaatgacaccagtgagatgctggaggtggttgccaacacacgggtgcgggatgtgtgtgacagcattgccaccaggctgcagctggcctcctgggagggctgcagcctcttcatcaagatttcagacaaggtgggccgggctggggctgggcagacggtgggcggacgggcagtgagcgaggccctaggtgctgcctgtgggggcctcagcctaccaggggcacccatgctggaccaggctgcacggccagggctgctgggacagaggtaggtggggtcctggagcagagccagctccacacgccaatagcccacgcacagccgactccagcgcagcacccaggccgtaggcggccactggaccagaacccagcaggttctcaggaggacagtccccggaagccacccaacttccctgtaccttccccttccccaggtcatcagccagaaggagggagacttcttctttgattccttgagggaggtgtctgactgggtgaagaagaacaagccccagaaagaaggggcccccgtgacgctcccctaccaggtgtacttcatgcggaaattgtggctcaacatatctccagggaaggatgtgaatgcagacaccatactccattaccaccaggagctgcccaagtacctgcgcggattccacaagtgttcgcgggaggatgccatccacctggcgggcctcatctacaaggcccagttcaacaacgaccggtcccagctggctagtgtccccaagatcctgagggaactggtgcctgagaacctcacacgcctgatgtcctcggaggagtggaaaaagagcatccttctagcctatgacaagcataaggacaagacagtggaggaggccaaggtggccttcctgaagtggatctgccggtggcccaccttcggatccgccttcttcgaggtgaagcaaacctcggagccttcctacccggacgtcatcctcatcgccatcaaccgacatggggttctgctcatccaccccaagaccaaggacctgctcaccacctatcccttcaccaagatctccagctggagcagcggcagcacctacttccacatggcgctggggagcctgggccgtggcagccgcctgctgtgcgagacctccctgggctataagatggatgacctgctgacctcatatgtgcagcagctcctgagtgccatgaacaagcagcggggctccaaggccccagccctggccagcacctagcagcggatgctggcgtgtctgctcaggcgcccttcccgacctctagcctggcggcaccttcccaggccctctcaacccagggcctgtccttggcgggcagccttccatgctgccccccatacaaagcccactcagccccgcaggcggccccctctgtcctgggcgctgcccagggaggccaaaagacgggcccagaatggggtcgggagtctcggacccccaggctattggtggatgactgactgacaggacacctcccaaccccaccccaccccaccagaatgttcaataaaaactcctggagcagga

SEQ ID NO: 852 - protein, 748 aa, Homo sapiens
MKYLLNFIGQGPATYGPFCAERLRRTYANGVRAEPPTWLELQAVKSKKHIPIQVILATGESLTVPVDSASTSREMCMHIAHKQGLSDHLGFSLQVAVYDKFWSLGSGRDHMMDAIARCEQMAQERGESQRQSPWRIYFRKEFFTPWHDSREDPVSTELIYRQVLRGVWSGEYSFEKEEELVELLARHCYVQLGASAESKAVQELLPSCIPHKLYRTKPPDRWASLVTAACAKAPYTQKQVTPLAVREQVVDAARLQWPLLFSRLFEVITLSGPRLPKTQLILAVNWKGLCFLDQQEKMLLELSFPEVMGLATNREAQGGQRLLLSTMHEEYEFVSPSSVAIAELVALFLEGLKERSIFAMALQDRKATDDTTLLAFKKGDLLVLTKKQGLLASENWTLGQNDRTGKTGLVPMACLYTIPTVTKPSAQLLSLLAMSPEKRKLAAQEGQFTEPRPEEPPKEKLHTLEEFSYEFFRAPEKDMVSMAVLPLARARGHLWAYSCEPLRQPLLKRVHANVDLWDIACQIFVAILRYMGDYPSRQAWPTLELTDQIFTLALQHPALQDEVYCQILKQLTHNSNRHSEERGWQLLWLCTGLFPPSKGLLPHAQKFIDTRRGKLLAPDCSRRIQKVLRTGPRKQPPHQVEVEAAEQNVSRICHKIYFPNDTSEMLEVVANTRVRDVCDSIATRLQLASWEGCSLFIKISDKVGRAGAGQTVGGRAVSEALGAACGGLSLPGAPMLDQAARPGLLGQR

SEQ ID NO: 853 - DNA, 2498 bp, Homo sapiens
aagtgcatgactcaggactgggtgggagggggctgtccctgaggccctggtctcccccagccaagtcctggcagggggatgctgttcttcaggatcccatgacctggggctcttggggagccccagcccggagagtgacctgtggctttgctggggaaaggggcttggagggtacagggcagtgtccaggattgcagtctcaaatccgaggcccacaggggagctgcctctgtgatcgccattaaggctgtggcctggggtctcagggcagcccaggaaccaaaaatagcctgtaacttgtcactttgtaagtcctgccctccagacacacttccctttcttctccccaagcctctcttcccagttagctcccctgacttggagtcacctctaagccttggcccaggcccctctgcagtgagatggagggactcatcccccggagagtggcatctgcaggcccactggctgcctgtggtcaccccctagggttctagcggggctgcctcccattttcctcagagcatccctgccagctggctggttctcactctcctgttttctaggaaaagaaagtggggagagacaggaacagggtccggagcagccccagcagcagcattgaggtggagcaatatgtcggacgccttggccaacgccgtgtgccagcgctgccaggcccgcttctcccccgccgagcgcattgtcaacagcaatggggagctgtaccatgagcactgcttcgtgtgtgcccagtgcttccggcccttccccgaggggctcttctatgagtttgaaggccggaagtactgcgaacacgacttccaaatgctgtttgctccgtgctgtggatcctgcggtgagttcatcattggccgcgtcatcaaggccatgaacaacaactggcacccgggctgcttccgctgcgagctgtgtgatgtggagctggctgacctgggctttgtgaagaatgccggcaggcatctctgccggccttgccacaaccgtgagaaggccaagggcctgggcaagtacatctgccagcggtgccacctggtcatcgacgagcagcccctcatgttcaggagcgacgcctaccaccctgaccacttcaactgcacccactgtgggaaggagctgacagccgaggcccgcgagctgaagggtgagctctactgcctgccctgccatgacaagatgggcgtccccatctgcggggcctgccgccggcccatcgagggccgagtggtcaacgcgctgggcaagcagtggcacgtggagcactttgtctgtgccaagtgtgagaagccattcctggggcaccggcactatgagaagaagggcctggcctactgcgagactcactacaaccagctcttcggggacgtctgctacaactgcagccatgtgattgaaggcgatgtggtgtcggccctcaacaaggcctggtgtgtgagctgcttctcctgctccacctgcaacagcaagctcaccctgaagaacaagtttgtggagttcgacatgaagcccgtgtgtaagaggtgctacgagaagttcccgctggagctgaagaagcggctgaagaagctgtcggagctgacctcccgcaagcccagcccaaggccacagacctcaactctgcctgaaggccctcttgcgcagtgcctctcggcccctccgccttctcccctcctgctgtccatgcttggccccctcgtccccatccacctgtgccctccgcatcttaccctccctttctctttcctcattgccttctcccttcctgttccctcatctctgccttccccatgtctctcctctccttggccgtggcttctgtctgtgaggaggcaggagctggggagtgggagcctatgaccccacgtctgacagccatgtccacctgtgcccacagcttccgcccacagacctccagggacaggagcaaattgcaccacagctccccgcctggcctggccctccccaggcggctcagtggctcatgctgtcctgtgagagcccctgccccagagcggccccactaagcgcatgtggctcctgggctacccacagccagggcagcctgctggagccacagggccagggccatgcagatggaggcctctgggagccacctccaatccctcaccactcactcaaccagtggcacagtgtccttgtgcccacactgagccagcaagtcctgctgtccacacccacaagctacctggagggacaggacccacctccatccttcggaaggccttcctggaatcccaccttggcctccgccctcggttccgccccgcccctctccccccgaccttggggcttgtgtcgagcccttgggtggggccaggaggaggtgatggcgtcagaggaggtgtggtcagaggtgacttgttcccacctccagggaggacgcttcgtcttcggccagcgcagacctggtgtttgtttgttgggctcacgcttgcacaatgaaggcttgttcacac

SEQ ID NO: 854 - DNA, 2070 bp, Homo sapiens
ccgacacccacgggcggagatcacctgctgccccgcagacccctgtcccttcctcccggaccagcagctagaggatgtccaaacggagttggtgggctggatccagaaagcccccaagagagatgctgaaactctcaggctctgactccagccaaagcatgaatggccttgaagtggctcccccaggtctgatcaccaacttctccctggccacggcagagcaatgtggccaggagacgccactggagaacatgctgttcgcctccttctaccttctggattttatcctggctttagttggcaataccctggctctgtggcttttcatccgagaccacaagtccgggaccccggccaacgtgttcctgatgcatctggccgtggccgacttgtcgtgcgtgctggtcctgcccacccgcctggtctaccacttctctgggaaccactggccatttggggaaatcgcatgccgtctcaccggcttcctcttctacctcaacatgtacgccagcatctacttcctcacctgcatcagcgccgaccgtttcctggccattgtgcacccggtcaagtccctcaagctccgcaggcccctctacgcacacctggcctgtgccttcctgtgggtggtggtggctgtggccatggccccgctgctggtgagcccacagaccgtgcagaccaaccacacggtggtctgcctgcagctgtaccgggagaaggcctcccaccatgccctggtgtccctggcagtggccttcaccttcccgttcatcaccacggtcacctgctacctgctgatcatccgcagcctgcggcagggcctgcgtgtggagaagcgcctcaagaccaaggcagtgcgcatgatcgccatagtgctggccatcttcctggtctgcttcgtgccctaccacgtcaaccgctccgtctacgtgctgcactaccgcagccatggggcctcctgcgccacccagcgcatcctggccctggcaaaccgcatcacctcctgcctcaccagcctcaacggggcactcgaccccatcatgtatttcttcgtggctgagaagttccgccacgccctgtgcaacttgctctgtggcaaaaggctcaagggcccgccccccagcttcgaagggaaaaccaacgagagctcgctgagtgccaagtcagagctgtgagcggggggcgccgtccaggccgagcgcagactgtttaggactcagcagacccagcaagaggcatctgccctttccccagccacctccccagcaagcaacctgaaatctcagcagatgcccaccatttctctagatcgcctagtctcaacccataaaaaggaagaactgacaaaggggatccatcggccacccctctgcaggggcttgtgatggctacaatggctcctagacactcaacgacttcatctgtggcagggagagaggaggccggaagaacaacccctgaacaatggaggcctttctttcccgctaggctcccagcctccttcccgctacagaatcgctcatcggcgaggctcagcagaaagaccctgaaggcaggctgcaaatgacccagaagagggacctgggagtcctggtggggacggggagggagtctcaatactcctttgcagcgcaaggtactctgagtcccctctgtagtgcctctgccagacacacactgcctgagttgaagagacacaggccacacatttcaggctggttgccagcggacgtcagcactcacggcctgcggggactcagcacagctctggattctggatctctcctgctgtaaccccacgcacaagcctgcaacccccagagctctttgacaggctcccaggcctcccagtcctggacaagcatgtgcagtcacgggagctcagctcaggccagggctgggctgtgcacctgcctcccactgacccagacccacttcctccagagaggcctctctccgcctgagctatttcccttgctagtgtgcagatatttccctaacatgtccttttttgtatttgtttgtacggaccataaatataactgtagctttaagactaaaaaaaaa

SEQ ID NO: 855 - protein, 367 aa, Homo sapiens
MSKRSWWAGSRKPPREMLKLSGSDSSQSMNGLEVAPPGLITNFSLATAEQCGQETPLENMLFASFYLLDFILALVGNTLALWLFIRDHKSGTPANVFLMHLAVADLSCVLVLPTRLVYHFSGNHWPFGEIACRLTGFLFYLNMYASIYFLTCISADRFLAIVHPVKSLKLRRPLYAHLACAFLWVVVAVAMAPLLVSPQTVQTNHTVVCLQLYREKASHHALVSLAVAFTFPFITTVTCYLLIIRSLRQGLRVEKRLKTKAVRMIAIVLAIFLVCFVPYHVNRSVYVLHYRSHGASCATQRILALANRITSCLTSLNGALDPIMYFFVAEKFRHALCNLLCGKRLKGPPPSFEGKTNESSLSAKSEL

SEQ ID NO: 856 - DNA, 5820 bp, Homo sapiens
ggggaagatggcggctgctcctttggaggagcgggattgagaggatcggggtggggagaccaaacaagagagacatttctggctctgaaggcgaacgcttcgctggccatttaggagctctgctcaaagccagacgtatcctagaaggaaaacatcaccatggctacagaaattggttctcctcctcgttttttccatatgccaaggttccagcaccaggcacctcgacagctgttttataagcgacctgattttgcacaacagcaagcaatgcaacagcttacttttgatggaaaacgaatgagaaaagctgtgaaccgaaaaaccatagactacaatccatctgtaattaagtatttggagaacagaatatggcaaagagaccagagagatatgcgggcaattcagcctgatgcaggttattacaatgatctggtcccacctataggaatgttgaataatcctatgaatgcagtaacaacaaaatttgttcggacatcaacaaataaagtaaagtgtcctgtatttgttgttaggtggactccagaaggaagacgcttggtcactggagcttctagtggggagtttaccctgtggaatggactcactttcaattttgaaacaatattacaggctcacgacagcccagtgagggccatgacgtggtcacataatgacatgtggatgttgacagcagaccacggaggatatgtgaaatattggcagtcgaacatgaacaacgtcaagatgttccaggcacataaggaggcgattagagaggccagtttctcacccacggataataaatttgctacatgctctgatgacggcactgttagaatctgggactttcttcgttgccatgaggaaagaattctccgagggcatggtgctgatgtgaaatgtgtagactggcatccaaccaaagggttagttgtttcaggaagtaaagatagtcaacagccaatcaagttctgggatcccaagactgggcagagtcttgcaacacttcatgcccataaaaacacagtaatggaagtgaaattaaacctcaatggcaattggctactcacagcatcacgtgatcatctctgtaaactttttgatatcagaaacctaaaagaagagcttcaagtcttccgaggtcataagaaagaagccacagctgtggcctggcatcctgttcatgaaggactttttgccagtggagggtctgatggttctttgttattctggcatgttggggtagagaaggaagtgggtgggatggagatggctcacgaagggatgatctggagtctggcttggcatcctcttgggcatattctctgctcaggctcaaatgaccatactagcaaattctggactcgaaaccgaccaggtgataaaatgcgagatcgatataatctaaaccttttacctggaatgtctgaagatggagtagaatatgatgacctcgaacctaatagcctggcagtaattccaggaatgggaataccagaacaactaaaattagctatggaacaagaacagatggggaaagatgaatcaaatgaaattgaaatgacaattccaggtttagattggggaatggaggaagtgatgcaaaaggatcagaaaaaagtacctcagaagaaagttccttatgcaaaacccattcctgctcagttccagcaggcttggatgcaaaataaagttccaattcctgctccaaatgaggtgctgaatgacagaaaagaagacattaaattggaagagaagaaaaaaacacaagcagaaattgagcaagaaatggctacattacaatatactaacccacaacttctggagcaacttaaaattgaaagacttgcacagaaacaagttgagcaaattcagcctcctccctcatctggcacccctctcctcggaccccagccttttccaggacaaggtccaatgtctcagattcctcaaggttttcaacagccccatccatctcagcagatgccaatgaacatggctcaaatggggcctccaggtccacagggacagtttaggcctcctggaccccagggacaaatgggaccacaaggtcctccactgcatcagggaggtggggggccacaaggattcatgggaccacaggggccccagggcccgccccaggggttgccacggcctcaggacatgcatgggccccaaggaatgcagaggcatcctggacctcatggccctttgggacctcaagggccacctggaccacaaggtagttctggtcctcaaggtcatatgggtcctcagggtccacctggcccacagggtcacataggcccccaaggcccgcctggccctcagggtcacttgggcccacaggggcctccgggtactcaaggtatgcagggaccacctggtcccagaggaatgcaagggcctcctcatcctcatgggatccaaggcggaccagggtctcaagggatccaaggtcctgtgtctcagggacctctgatgggattgaatccaagaggaatgcaggggcctccaggcccccgggagaaccagggtcctgctccccaagggatgattatgggccacccgcctcaagagatgagaggacctcaccctccaggtggactactgggacacggccctcaggaaatgagaggtcctcaggagatccgaggcatgcaggggcctccaccccaaggatcaatgctgggacctccccaggaattgcgagggcctccaggctcacaaagtcagcaggggccgccccagggctctttaggacctccaccccagggtggcatgcaaggaccccccggacctcagggacagcagaacccagcaagagggccacatccatctcaagggccaataccattccagcaacagaaaacgcctctgctaggtgatgggccccgggcccccttcaaccaggaaggacagagcacaggccccccacccctgataccaggcctagggcagcagggagcacaaggtcgcattccccctctgaaccccggacaaggacctggccccaacaaagtttcagaagaggagccccgccgaggcatgagggccgtgctccccccagaggaagggatggttttcctggtcctgaagactttggtccagaggagaattttgatgcttctgaggaagcggcccgaggacgagatctcagaggtcgaggtcggggtaccccacgaggaggaaggaagggtttacttcccactcctgacgagttccctcgctttgaaggagggcggaagccagattcctgggatggaaacagagagcctgggccaggtcatgaacattttcgtgatactccccgccctgatcatccccctcacgacggtcattccccagccagcagagaacgctcctcttctctccaaggcatggacatggcatccctacctccccgaaagcgcccctggcatgatggcccaggcacttctgagcacagagagatggaggccccaggaggcccttctgaagaccgaggaggcaaaggccgagggggcccaggacctgctcagagagtgcccaaatctgggcgttccagctccttagacggagagcaccacgatggataccacagagatgaaccttttgggggccctccaggcagtggcaccccttctcgagggggccggagtggcagtaactggggtagagggagtaacatgaactctggcccgccgaggcgaggagcttcacggggtggtggaaggggtcggtagaagctggaactgagtaccctgaggcctctctggacagtatgtaagaacttcttgtggactcaccaagagaaacaaaaggaagcctgcaccattgtagccctgaactcttttctgggcacctgaatcccaggaaccctcaatgaggtcttcaagatgaagagactgctgccagctaccagcctggctggccctgtcctgtccaccctcattgccccaactcccatgttgttttgtgaagataaaagctgggatctttttcttttttttaagtctcacaagacatggggcatctccacaaatttaagttcctgtccatttggaaatttgtttctatgtgtacagtttgtcagagaaaaacaaagtttttgtatgaatacagaatgtgatttacgcaagaattgacagaaaactagttgtgaagtgcttgccttaaggaaacctttggtttccatcgcatcccatctgccaaggaatgcacggttgttgctgatgttcatgagcatattaaccactaggttatctaaattaatctcagctgtgaactttgtgtttttcaacacattctgtcacaccatttttgtgacagaaaaatacttgaaaattattctaatgtagtttgtagtaggttcaaatttttattcagacatgctctgacagatggaaaattgtactctgaagagaaaatgcaatcttctggatgtccaacgagggagcttccccttggaagcatctcctaagaatcacagtttaggtttgaatcgccttgttatgatgaggagaggaacttgatgttagtcagaaataaagtcacatgccctttagataacttgaaatcacacatggagttgataaggaatggaccaaaataggtcctcaaacaattttgcaacacttaattaagttttcctctcttcctcttccatactatgtggaaataccagtgttacggcagggcgtacttctaactcacagtaagccagatagatcttgtccatggcaaattccttgtttaaaataaacataccatttagcccagtttggattggaagccaaaaattcagtttgttatataccccatgatactttctatactgacctttattttggttttacatggaagcttttattaaaaggactgtcctatggccaccttaacatttcattacattggcagcttcagttttggcatcagtcaaatttatttggcaaatttagtggtgctggaagtttctttttttcttttccttttttgacagagtcttgctctgtcacccagccaggagtgcagtggtgcaatcacggctcacttcagctttgaccctgcctcagcctccctagtagctaggactacaggcatatgccaccatgcccagctaattttttgtgtgtgtgttttttgtagagatggagtttcaccactttgtctatgctggtttcaaactcctgggctcaagcggtccacctgctgtggcctcccaaagtgctgggattgcagatctgagccacagtacctggccgctggtgctggaagtttcaatggttgcttagaaaaggcatactgatatagtttaacaggatatgaaaatttaactggttctctatgaatgtaaaaaacagcaaaagctaattgatttctgtggagtgagaaaatgtcagccatatacactgcttttcagtgttagaatctagagactattttttttttaactttgaaattacagcttatttaatcagcgctccaccataaacatgctattaggaggctcaagattgctttaggttatgggtatttcttcactcacccccaactggtatagcttaaagagagagaaactgtaatcaaatttcatgaagctaaaaccggatccagagaccaaacccatatcaagattagactttttttccctgagattctagtggaaaaattttcattattttgggctttaactttagaaacatagtatctcagtaagcagataaccagatcacatttaaaaattttcattttaccttgaagctctactggacttgacagatcacattttgagagtgaattcatttaaacaataaacctctacattatacttat

SEQ ID NO: 857 - DNA, 2769 bp, Homo sapiens
agaacatccagtcacggataaaaatgagctggttcagaaggccaaactggccgagcaggctgagcaatatgatgacatggcagcctgcatgaagtctgtaactaagcaaggagctgaattatccaatgaggagaggaatcttctctcagttgcttataaaaatgttgtaggagcccgtaagtcatcttggagggtcgtctcaagtattgaacaaaaaacggaaggtgctgagaaaaaacagcagatggctcgagaacacagagagaaaattgagacggagctaagagatatctgtaatgatgtattgtctcttttggaaaagttcttgatccccaatgcttcacaagcagagagcaaagtcttctatttgaaaatgaaaggagattactaccgttacttgactgaggttactgctggtgatgacaagatagggattgtggatcagtcacaacaagcataccaagaagcttttgaaatcagcaaaaaagaaatgcaaccaacacatcctgtcagattgggtctggcccttaacttctgtgttctattatgagattctgaactccccagagaaagcctgctgtcttgcaaagaccgcttttgatgaagccattgctgaacttgatacattaagtgaagagtcatacaaagacagcatgctaataatgcaattactgagagacaacttgacattgtggacatcggatacccaaggagacgaagctgaagcaggagaaggaggggaaaattaaccggccttccaacttttgtctgcctcattctaaaatttacacagtagaccatttgtcatccatgctgtcccacaaatagttttttgtttatgatttatgacaggtttatgttacttctatttggatttctatatttcccatgtggtttttatgtttaatattaagggagtagagccagtcaacatttagggaggtatctgttttcatcttgaggtggccaatattgggatgtggaatttttatacaagttataaatgtttggcatagtacttttggtacattgtggcttcacaagggccagtgtaaaactgcttccatgtctaagcaaagaaaactgcctacatattggtttgtcctggtggagaataaaagggatcattgattccagtcagaggtgtagtaattgtgggtacttttaaggtttggagcactttacaaggctgtggtagaaacataccccatggataccacatgttaaaccatgtatatctgtggaatactcagtctcattgtgcacacctttgactacagctgcagaagttttcctttagataaagttgtgacccattttactctggataagggcagaaacagttcacattccattatttgtaaagttacctgctgttagctttcattatttttgctacactcattttatttgtatttaaatgttttaggcaacctaagaacaaatgtaaaagtaaagatgcagtaaaaatgaattgcttggtattcattgcttcatgtatatcaagcacagcagtaaaacaaaaacccatgtatttaacttttttttaggttttttgcttttgtgatttttttttgatacttgcctaacatgcatgtgctgtaaaaatagttaacaaggaaataacttgagatgatggctagctttgtttaatgtcttatgaaatgttcgtggataatccaagcataattgttaagaacacgtgtattaaattcatgtaagtggaataaaagttttatgaatggacttttcaactactttctctacagcttttcgtgtaaattagtcttttggttctgaaatttctctaaaggaaattgtacatttttgaaatttattccttattccctcttggcagctaatgggcttttagtaagtttaaacaaaaaatttatcataacaacaaaaaatactactaatataactactgtttccatgtcccatgatcccgtctcttcctccccaccctgaaaaaaatgagttcctattttttctgggagaggggagattaattggaaaaaaatgttaatatgttccatttaaaattttggtatatggcattttctaacttaagaagccacaatgttcttggcccatcatgacaatgggtagcattaactataagttttgtgcttccaaatcacttttcggtttttaagaatttcttgatactcctacagcctgccttcgattttgatcctttattctgtttgtcaggtgcacaagattaccttccttttttagccatctgtcttgtcaccaaccattcctacttggtggccatgtacttggaaaaaggccgcatgatctttctggctccactcaatgtctaaggcaccctgcttcctttgcttgcatcccacagactatttccctcatcctatttactgcagcaattgtctccttagttgacgagattgtgtttatctccctttaaaaccctacctatcctgaatgatctgtcattgtctgcctttaaaatccttcctctttcttccttctctattctctaaataatgatggggctaaattatacccaaagctcactttacaaaatatttcctcagtactttgcagaaaacaccaaacaaaaatgccattttaaaagaggtgtattttttcttttagaatgttagaatgtaagctcctcaaaagcagggacaatgttttccgtatgttctactgtgcctagtatactgtaaatgctcaataaatactgatgatgggaggcagtgagtcttgatgataagggtgagaaaccgaaatccc

SEQ ID NO: 858 - DNA, 755 bp, Homo sapiens
gatgacatggcagcctgcatgaagtctgtaactaagcaaggagctgaattatccaatgaggagaggaatcttctctcagttgcttataaaaatgttgtaggagcccgtaagtcatcttggagggtcgtctcaagtattgaacaaaaaacggaaggtgctgagaaaaaacagcagatggctcgagaacacagagagaaaattgagacggagctaagagatatctgtaatgatgtattgtctcttttggaaaagttcttgatccccaatgcttcacaagcagagagcaaagtcttctatttgaaaatgaaaggagattactaccgttacttgactgaggttactgctggtgatgacaagatagggattgtggatcagtcacaacaagcataccaagaagcttttgaaatcagcaaaaaagaaatgcaaccaacacatcctgtcagattgggtctggcccttaacttctgtgttctattatgagattctgaactccccagagaaagcctgctgtcttgcaaagaccgcttttgatgaagccattgctgaacttgatacattaagtgaagagtcatacaaagacagcatgctaataatgcaattactgagagacaacttgacaatgtggtttttatgtttaatattaagggagtagagccagtcaacatttagggaggtatctgttttcatcttgaggtggccaatattgggatgtggaatttttatacaagttataaatgtttggcatagtacttttg

SEQ ID NO: 859 - DNA, 3682 bp, Homo sapiens
ttttcggcgccgtggcggaatggcggcttccatctctgaggcgagcgacgctatggatcccacagtggtttgctaagaaggccattttcaactctccactggaggctgctatggcgttccctcacctgcagcagcccagctttctactggctagcctgaaagctgactctataaataagccctttgcacagcagtgccaagacttggttaaagtcattgaggactttccagcaaaggagctgcacaccatcttcccatggctggtagaaagcatttttggcagcctagatggtgtcctcgttggctggaacctccgctgcttacaggggcgcgtgaatcctgtggagtacagcatcgtgatggaatttctcgaccctggtggcccaatgatgaagttggtttataagcttcaagctgaagactataagttcgactttcctgtctcctacttgcctggtcctgtgaaggcgtccatccaggagtgcatcctccctgacagtcctctgtaccacaacaaggtccagttcacccctactgggggccttggtctgaacttggccctgaatccgttcgagtattacatattcttctttgccttgagcctcatcactcagaagccacttcctgtgtccctccacgtccgtacttcagactgtgcctatttcatcctggtggacaggtacctgtcatggttcctgcccaccgaaggcagtgtgcccccaccactctcctccagcccaggggggaccagcccctcaccacctcccaggacaccagccataccctttgcttcctatggcctccaccacactagcctcctaaagcgacacatctctcatcagacgtctgtgaatgcagaccccgcctcccacgagatctggaggtcagaaactctgctccaggtttttgttgaaatgtggcttcatcactattccttggagatgtatcaaaaaatgcagtcccctcatgccaaggagtcgttcacgcctactgaggagcatgtgttggtggtgcgcctgctgctgaagcacctgcacgcctttgccaacagcctgaagccagagcaggcctcaccctccgcccactcccacgccaccagccccctggaggagttcaaacgggctgctgtcccgaggttcgtccagcagaaactctacctcttcttgcagcattgctttggccactggcccctggacgcatcgttcagagctgtcctggagatgtggctgagctacctgcagccgtggcggtacgcgcctgacaagcaggctccgggcagcgactcccagccccggtgtgtgtcggagaaatgggcaccctttgtccaggagaacctgctgatgtacaccaagttgtttgtgggctttctgaaccgcgcgctccgcacagacctggtcagccccaagcacgcgctcatggtgttccgagtggccaaagtctttgcccagcccaacctggctgagatgattcagaaaggtgagcagctattcctggagccagagctggtcatcccccaccgccagcaccgactcttcacggcccccacattcactgggagcttcctgtcaccctggccaccagcggtcactgatgcctccttcaaggtgaagagccacgtctacagcctggagggccaggactgcaagtacaccccgatgtttgggcccgaggcccgcaccctggtcctgcgcctcgctcagctcatcacacaggccaaacacacagccaagtccatctccgaccagtgtgcggagagcccggctggccactccttcctctcatggctgggctttagctccatggacaccaatggctcctacacagccaacgacctggacgagatggggcaagacagtgtccggaagacagatgaatacctggagaaggccctggagtacctgcgccagatattccggctcagcgaagcgcagctcaggcagttcacactcgccttgggcaccacccaggatgagaatggaaaaaagcaactccccgactgcatcgtgggtgaggacggactcatccttacgcccctggggcggtaccagatcatcaatgggctgcgaaggtttgaaattgagtaccagggggacccggagctgcagcccatccggagctatgagatcgccagcttggtccgcacactctttaggctgtcgtctgccatcaaccacagatttgcaggacagatggcggctctgtgttcccgggatgacttcctcggcagcttctgtcgctaccacctcacagaacctgggctggccagcaggcacctgctgagccctgtggggcggaggcaggtggccggccacacccgcggccccaggctcagcctgcgcttcctgggcagttaccggacgctggtctcgctgctgctggccttcttcgtggcctctctgttctgcgtcgggcccctcccatgcacgctgctgctcaccctgggctatgtcctctacgcctctgccatgacactgctgaccgagcgggggaagctgcaccagccctgaaggtgtcagctgccttcagagcaggctggagggatttgccacacagccccacccttgggctgagaggacctgggaagcccctccaggagggaacacggtcatcctcgggcttctggagcggggttcctgcagccgcagaggcatctggaggaaacgcaaccaagaaaggaaggcaggtgggccccagcaaaggagtagctgccagggctcaacagctacgctctgtgacagcgcagagctcagcggcggcctttccctccctccgccaaggactcacggccaagccagctctcggggccttttttccactgcccatttggctactctgctgcaccaagcttgggagccagcctgccaacagccacctgggcctggcctccccactggctggccttgaggttggcagagtgggttgtggcgcttcctctctctgtgtgggaccaggacagtggcttaagtctccactccaggaaagaatcaaagtttctagagttgtgagaaaaccagagagtggctgtcctgattcttcactgtgaggggcgttcttcatgttctcccagctgttccaagactgggccgtagaattccatgtttcaggagcctaagaccctcccagagcccaggggcttcaccgcagaccccaagccattgagcacatcacccaaagcagtggccaacatcgcggacccctgtgccttgtcacagatgggtgctggtcctcaggcgttggggacactgctgggtcgatggggtcggattctgccagtttctgctctgcagccaaagatggtcagaagcattgtcacttcagtaacatcaagtgctcaaagacatggcaaccgttcagtggtacttaagtattcaaaatatacaactacagattctctgacagaaaccagcacggggtcttcaccttcattcaccccacaggcgacatgcgagggagaacagcatctcagtggtgatttccaaaccaagcctttgttttcggtgtggggttttgggggtttgctttaatgtttttgaaattgtaaatgttgggctttgtattttgatgtaaactgagcataatggcattttagggcctgtgaccaaaatgaagcttgtaacgacccatggatctgaataaacatgtccttgcttctgaaaaaaaaaaaaaaaaaaaaaaaaaaaaa

SEQ ID NO: 860 - protein, 798 aa, Homo sapiens
MAFPHLQQPSFLLASLKADSINKPFAQQCQDLVKVIEDFPAKELHTIFPWLVESIFGSLDGVLVGWNLRCLQGRVNPVEYSIVMEFLDPGGPMMKLVYKLQAEDYKFDFPVSYLPGPVKASIQECILPDSPLYHNKVQFTPTGGLGLNLALNPFEYYIFFFALSLITQKPLPVSLHVRTSDCAYFILVDRYLSWFLPTEGSVPPPLSSSPGGTSPSPPPRTPAIPFASYGLHHTSLLKRHISHQTSVNADPASHEIWRSETLLQVFVEMWLHHYSLEMYQKMQSPHAKESFTPTEEHVLVVRLLLKHLHAFANSLKPEQASPSAHSHATSPLEEFKRAAVPRFVQQKLYLFLQHCFGHWPLDASFRAVLEMWLSYLQPWRYAPDKQAPGSDSQPRCVSEKWAPFVQENLLMYTKLFVGFLNRALRTDLVSPKHALMVFRVAKVFAQPNLAEMIQKGEQLFLEPELVIPHRQHRLFTAPTFTGSFLSPWPPAVTDASFKVKSHVYSLEGQDCKYTPMFGPEARTLVLRLAQLITQAKHTAKSISDQCAESPAGHSFLSWLGFSSMDTNGSYTANDLDEMGQDSVRKTDEYLEKALEYLRQIFRLSEAQLRQFTLALGTTQDENGKKQLPDCIVGEDGLILTPLGRYQIINGLRRFEIEYQGDPELQPIRSYEIASLVRTLFRLSSAINHRFAGQMAALCSRDDFLGSFCRYHLTEPGLASRHLLSPVGRRQVAGHTRGPRLSLRFLGSYRTLVSLLLAFFVASLFCVGPLPCTLLLTLGYVLYASAMTLLTERGKLHQP

SEQ ID NO: 861 - DNA, 2055 bp, Homo sapiens
ggcgccgagtagccgggccgggccggagcgcgggcggcggcggaggcagctgcgcccgcgcctcctgccctcccaggccccgcgccccgcgcccgggccccggcgatggtgacacatgcggcggcggcgcgccggcggcaggaccatggttgagcgcgccagcaagttcgtgctggtggtggcgggctcggtgtgcttcatgctcatcttgtaccagtacgcgggcccaggactgagcctgggcgcgcccggcggccgcgcgccgcccgacgacctggacctgttccccacgcccgacccccactacgagaagaagtactacttcccggtccgcgagctggagcgctcgctgcgcttcgacatgaagggcgacgacgtgatcgtcttcctgcacatccagaagacgggcggcaccaccttcggccgccacctcgtgcagaacgtacgcctcgaggtgccgtgcgactgccggcccggccagaagaagtgcacctgctaccggcccaaccgccgcgagacttggctcttctcccgcttctccaccggctggagctgcgggctgcacgccgactggaccgagctcaccaactgcgtgcccggcgtgctggaccgccgcgactccgccgcgctgcgcacgcccaggaagttctactacatcaccctgctacgagaccccgtgtcccgctacctgagcgagtggcggcatgtgcagaggggtgccacgtggaagacgtcgttgcatatgtgtgatgggcgcacgcccacgcctgaggagctgccgccctgctacgagggcacggactggtcgggctgcacgctacaggagttcatggactgcccgtacaacctggccaacaaccgccaggtgcgcatgctggccgacctgagcctggtgggctgctacaacctgtccttcatccccgagggcaagcgggcccagctgctgctcgagagcgccaagaagaacctgcggggcatggccttcttcggcctgaccgagttccagcgcaagacgcagtacctgttcgagcggacgttcaacctcaagttcatccggcccttcatgcagtacaatagcacgcgggcgggcggcgtggaggtggatgaagacaccatccggcgcatcgaggagctcaacgacctggacatgcagctgtacgactacgccaaggacctcttccagcagcgctaccagtacaagcggcagctggagcgcagggagcagcgcctgaggagccgcgaggagcgtctgctgcaccgggccaaggaggcactgccgcgggaggatgccgacgagccgggccgcgtgcccaccgaggactacatgagccacatcattgagaagtggtagtggcggtggtggccacggggaggcctcttggggggtgtgggggataaaacaggacagacgacaggtccacccaagactgtcaagggatgagcatcccaaacctgctccacagaggtagctgcgtcctgaaaaaaaacagagcagggatgtagtggggctgggcagggatgggggcttgagaaatcaacaggtgcagcccagtgggtcagaggaaagcgtgctcgaaggatgccatggtcagggcagggcctccagagcaggtgttgtgcctggagctgctctcctggcctccttggatttatcgcaaaaactgaaggtttgcgcaagagacgaggacagcggaaagtggacctgccaggccgggagtgtgtccctcaccaactatgcacacagcactcgctcttagctcctctgtccgggctactaggagtgagaccagcttctggcaactgccccagctccaggccatcccatagcccctcctcttctggctgcccccaatgccccgaggcctggggagcccccagctcacccatctgtagctccctcaaagtcagggcccaccccatctgaggcagagaagactcgagtccagcccccaggaagcctgctcccctctctggcccatggtcctgcttcatgctttgggtcaggaggccaaagctgatgttcaggccccacccactccctacagtcctcagacc

SEQ ID NO: 862 - DNA, 3200 bp, Homo sapiens
gactgcccgtacaacctggccaacaaccgccaggtgcgcatgctggccgacctgagcctggtgggctgctacaacctgtccttcatccccgagggcaagcgggcccagctgctgctcgagagcgccaagaagaacctgcggggcatggccttcttcggcctgaccgagttccagcgcaagacgcagtacctgttcgagcggacgttcaacctcaagttcatccggcccttcatgcagtacaatagcacgcgggcgggcggcgtggaggtggatgaagacaccatccggcgcatcgaggagctcaacgacctggacatgcagctgtacgactacgccaaggacctcttccagcagcgctaccagtacaagcggcagctggagcgcagggagcagcgcctgaggagccgcgaggagcgtctgctgcaccgggccaaggaggcactgccgcgggaggatgccgacgagccgggccgcgtgcccaccgaggactacatgagccacatcattgagaagtggtagtggcggtggtggccacggggaggcctcttggggggtgtgggggataaaacaggacagacgacaggtccacccaagactgtcaagggatgagcatcccaaacctgctccacagaggtagctgcgtcctgaaaaaaaacagagcagggatgtagtggggctgggcagggatgggggcttgagaaatcaacaggtgcagcccagtgggtcagaggaaagcgtgctcgaaggatgccatggtcagggcagggcctccagagcaggtgttgtgcctggagctgctctcctggcctccttggatttatcgcaaaaactgaaggtttgcgcaagagacgaggacagcggaaagtggacctgccaggccgggagtgtgtccctcaccaactatgcacacagcactcgctcttagctcctctgtccgggctactaggagtgagaccagcttctggcaactgccccagctccaggccatcccatagcccctcctcttctggctgcccccaatgccccgaggcctggggagcccccagctcacccatctgtagctccctcaaagtcagggcccaccccatctgaggcagagaagactcgagtccagcccccaggaagcctgctcccctctctggcccatggtcctgcttcatgctttgggtcaggaggccaaagctgatgttcaggccccacccactccctacagtcctcagaccaaggaggggtttgggtagtaggcccgagctgcattgccggccttcctcgggccaactggcagcccaggagtggggaggctttggccagggatgctgccacttgtgcgtgagtccgcggctggcccttggaggtgaccatccaggcaggcctggctcagactggaagggctggggaccgagggctcccctgcctctgttctcctttctgacccactgggatttgctagcaggctgccccagccccatcaccgaaacacatactcaagagctcaaataccactgctcccaccagcgtacggattaagttcatcaggcttccatcggctggagcatgggaccatagcccctgcccaggagccgtaccctcggaccacagtggctctgtatggccaggaactgggactcgagctttcagattctcaactagccttggcaaaacagctgtaggtggcctccctgacaacagacactcagccctccccaccctggctctccttgcatttccccatgctccccaccccctggcaaaaggctggccatgctctgttcccagcagccgcgcaggtttccccactggctgcaatggccctaccaaaagccatgttgcatatccgttgtaagcacgtgccctgtgccctgtccccattccttatgccctaggaggccaagctggtgtctctaggagggcccacacaggcaccctggatcccccagagagtagattggtgtgctcaggccgcaggctgactcagaggtagggcagtgggctctgcaggccacctggctggggttggtgggggtcctctctcctgccccagcttccactcagccaccacagttgccacaccatggggtggagacgtgggtcaccacgggcttgggagcaagcgccttctgcagcacaggaagccgaagctggggtcaggtgaggtcgctacccctggaggtctggcataagggccccaccctcaggtctcctacactggccccattttactttggggtccaaggacaggatggtcaacagggcagggtggacagcgtgccagcgccgcgcagggccacctccctgggtggatgcatcacactaaggaagtgagtgccaaggggatttagtggtgtggttctttcaaagggaggtcagggtcaatgggaatctgctcggacactcaacatgggggtgggtgcactccttggaggaggaggaacacgttcaggggattgtgaggtcttgcacaagccacgtggggcaccttggcttcccggcaggaggtggacacccagccagaggcctggctcaaggtgacctcaccttcaccatgggcttcctgggtgcgcgggcctgagcgcaggttgttttgtacatattggaatatgtgttaacttatgccccgcatcccaactcacacggaagcacgggtcttgtctcagtctcttcgctgcatttggaaagcagtctcctctcgggccagcgccgggctgaggtgtccagaggcggcggcagctggcagtgccctcagcccccaagtgtccagcctggcacttcccattcaggccacctgctttgggtcaacagttcctttgccagcagcatctcctaaattgtaaggactctgtccaccggggccctcccagggctgtgaggacggaaacaggcagggagtggagctaacagcttagtcaccaggacccccagacctgcaaacgtcccctcctggaaggggaagccaggaacagcagaactgcccacaaaacaaggctgtgaacttttcgggaactggaactgtttaacttgaacccaggattgtttaaagctttatttatttatagcttcttcttaaaaaaaagtgttgaagaaattttttggttattcatacaaaaaaatgagttgatgatggaaaagcaagtcataatcatctaattgtttttgtctaggtcgagaatgaatgttagctgatgaaataaaccctgacaagg

SEQ ID NO: 863 - protein, 159 aa, Homo sapiens
MLADLSLVGCYNLSFIPEGKRAQLLLESAKKNLRGMAFFGLTEFQRKTQYLFERTFNLKFIRPFMQYNSTRAGGVEVDEDTIRRIEELNDLDMQLYDYAKDLFQQRYQYKRQLERREQRLRSREERLLHRAKEALPREDADEPGRVPTEDYMSHIIEKW

SEQ ID NO: 864 - DNA, 2917 bp, Homo sapiens
ggaaaaaagcgacttgtggcggtcgagcgtggcgcaggcgaatcctcggcactaagcaaatatggacctcgcggcggcagcggagccgggcgccggcagccagcacctggaggtccgcgacgaggtggccgagaagtgccagaaactgttcctggacttcttggaggagtttcagagcagcgatggagaaattaaatacttgcaattagcagaggaactgattcgtcctgagagaaacacattggttgtgagttttgtggacctggaacaatttaaccagcaactttccaccaccattcaagaggagttctatagagtttacccttacctgtgtcgggccttgaaaacattcgtcaaagaccgtaaagagatccctcttgccaaggatttttatgttgcattccaagacctgcctaccagacacaagattcgagagctcacctcatccagaattggtttgctcactcgcatcagtgggcaggtggtgcggactcacccagttcacccagagcttgtgagcggaacttttctgtgcttggactgtcagacagtgatcagggatgtagaacagcagttcaaatacacacagccaaacatctgccgaaatccagtttgtgccaacaggaggagattcttactggatacaaataaatcaagatttgttgattttcaaaaggttcgtattcaagagacccaagctgagcttcctcgagggagtatcccccgcagtttagaagtaattttaagggctgaagctgtggaatcagctcaagctggtgacaagtgtgactttacagggacactgattgttgtgcctgacgtctccaagcttagcacaccaggagcacgtgcagaaactaattcccgtgtcagtggtgttgatggatatgagacagaaggcattcgaggactccgggcccttggtgttagggacctttcttataggctggtctttcttgcctgctgtgttgcgccaaccaacccaaggtttggggggaaagagctcagagatgaggaacagacagctgagagcattaagaaccaaatgactgtgaaagaatgggagaaagtgtttgagatgagtcaagataaaaatctataccacaatctttgtaccagcctgttccctactatacatggcaatgatgaagtaaaacggggtgtcctgctgatgctctttggtggcgttccaaagacaacaggagaagggacctctcttcgaggggacataaatgtttgcattgttggtgacccaagtacagctaagagccaatttctcaagcacgtggaggagttcagccccagagctgtctacaccagtggtaaagcgtccagtgctgctggcttaacagcagctgttgtgagagatgaagaatctcatgagtttgtcattgaggctggagctttgatgttggctgataatggtgtgtgttgtattgatgaatttgataagatggacgtgcgggatcaagttgctattcatgaagctatggaacagcagaccatatccatcactaaagcaggagtgaaggctactctgaacgcccggacgtccattttggcagcagcaaacccaatcagtggacactatgacagatcaaaatcattgaaacagaatataaatttgtcagctcccatcatgtcccgattcgatctcttctttatccttgtggatgaatgtaatgaggttacagattatgccattgccaggcgcatagtagatttgcattcaagaattgaggaatcaattgatcgtgtctattccctcgatgatatcagaagatatcttctctttgcaagacagtttaaacccaagatttccaaagagtcagaggacttcattgtggagcaatataaacatctccgccagagagatggttctggagtgaccaagtcttcatggaggattacagtgcgacagcttgagagcatgattcgtctctctgaagctatggctcggatgcactgctgtgatgaggtccaacctaaacatgtgaaggaagctttccggttactgaataaatcaatcatccgtgtggaaacacctgatgtcaatctagatcaagaggaagagatccagatggaggtagatgagggtgctggtggcatcaatggtcatgctgacagccctgctcctgtgaacgggatcaatggctacaatgaagacataaatcaagagtctgctcccaaagcctccttaaggctgggcttctctgagtactgccgaatctctaaccttattgtgcttcacctcagaaaggtggaagaagaagaggacgagtcagcattaaagaggagcgagcttgttaactggtacttgaaggaaatcgaatcagagatagactctgaagaagaacttataaataaaaaaagaatcatagagaaagttattcatcgactcacacactatgatcatgttctaattgagctcacccaggctggattgaaaggctccacagagggaagtgagagctatgaagaagatccctacttggtagttaaccctaactacttgctcgaagattgagatagtgaaagtaactgaccagagctgaggaactgtggcacagcacctcgtggcctggagcctggctggagctctgctagggacagaagtgtttctggaagtgatgcttccaggatttgttttcagaaacaagaattgagttgatggtcctatgtgtcacattcatcacaggtttcataccaacacaggcttcagcacttcctttggtgtgtttcctgtcccagtgaagttggaaccaaataatgtgtagtctctataaccaatacctttgttttcatgtgtaagaaaaggcccattacttttaaggtatgtgctgtcctattgagcaaataactttttttcaattgccagctactgcttttattcatcaaaataaaataacttgttctg

SEQ ID NO: 865 - protein, 821 aa, Homo sapiens
MDLAAAAEPGAGSQHLEVRDEVAEKCQKLFLDFLEEFQSSDGEIKYLQLAEELIRPERNTLVVSFVDLEQFNQQLSTTIQEEFYRVYPYLCRALKTFVKDRKEIPLAKDFYVAFQDLPTRHKIRELTSSRIGLLTRISGQVVRTHPVHPELVSGTFLCLDCQTVIRDVEQQFKYTQPNICRNPVCANRRRFLLDTNKSRFVDFQKVRIQETQAELPRGSIPRSLEVILRAEAVESAQAGDKCDFTGTLIVVPDVSKLSTPGARAETNSRVSGVDGYETEGIRGLRALGVRDLSYRLVFLACCVAPTNPRFGGKELRDEEQTAESIKNQMTVKEWEKVFEMSQDKNLYHNLCTSLFPTIHGNDEVKRGVLLMLFGGVPKTTGEGTSLRGDINVCIVGDPSTAKSQFLKHVEEFSPRAVYTSGKASSAAGLTAAVVRDEESHEFVIEAGALMLADNGVCCIDEFDKMDVRDQVAIHEAMEQQTISITKAGVKATLNARTSILAAANPISGHYDRSKSLKQNINLSAPIMSRFDLFFILVDECNEVTDYAIARRIVDLHSRIEESIDRVYSLDDIRRYLLFARQFKPKISKESEDFIVEQYKHLRQRDGSGVTKSSWRITVRQLESMIRLSEAMARMHCCDEVQPKHVKEAFRLLNKSIIRVETPDVNLDQEEEIQMEVDEGAGGINGHADSPAPVNGINGYNEDINQESAPKASLRLGFSEYCRISNLIVLHLRKVEEEEDESALKRSELVNWYLKEIESEIDSEEELINKKRIIEKVIHRLTHYDHVLIELTQAGLKGSTEGSESYEEDPYLVVNPNYLLED

SEQ ID NO: 866 - DNA, 2327 bp, Homo sapiens
ccgggatctcgagatagccgcagctctcgcgatctttctggagccgcacctccacgcggagtccgagcgcgtgtgctgagaccccagggtcgggagggcggagactgggagggagggagaagcccctttggcctgccttacggaagcctgcgagggagggtggtgtccactgcccagttccgtgtcccgatgcccagcgccagcgccagccgcaagagtcaggagaagccgcgggagatcatggacgcggcggaagattatgctaaagagagatatggaatatcttcaatgatacaatcacaagaaaaaccagatcgagttttggttcgggttagagacttgacaatacaaaaagctgatgaagttgtttgggtacgtgcaagagttcatacaagcagagctaaagggaaacagtgcttcttagtcctacgtcagcagcagtttaatgtccaggctcttgtggcggtgggagaccatgcaagcaagcagatggttaaatttgctgccaacatcaacaaagagagcattgtggatgtagaaggtgttgtgagaaaagtgaatcagaaaattggaagctgtacacagcaagacgttgagttacatgttcagaagatttatgtgatcagtttggctgaaccccgtctgcccctgcagctggatgatgctgttcggcctgaggcagaaggagaagaggaaggaagagctactgttaaccaggatacaagattagacaacagagtcattgatcttaggacatcaactagtcaggcagtcttccgtctccagtctggcatctgccatctcttccgagaaactttaattaacaaaggttttgtggaaatccaaactcctaaaattatttcagctgccagtgaaggaggagccaatgtttttactgtgtcatattttaaaaataatgcatacctggctcagtccccacagctatataagcaaatgtgcatttgtgctgattttgagaaggttttctctattggaccagtattcagagcggaagactctaatacccatagacatctaactgagtttgttggtttggacattgaaatggcttttaattaccattaccacgaagttatggaagaaattgctgacaccatggtacaaatattcaaaggacttcaagaaaggtttcagactgaaattcaaacagtgaataaacagttcccatgtgagccattcaaatttttggagccaactctaagactagaatattgtgaagcattggctatgcttagggaagctggagtcgaaatgggagatgaagacgatctgagcacaccaaatgaaaagctgttgggtcatttggtaaaggaaaagtatgatacagatttttatattcttgataaatatccattggctgtaagacctttctataccatgcctgacccaagaaatcccaaacagtccaactcttacgatatgttcatgagaggagaagaaatattgtcaggagctcaaagaatacatgatcctcaactgctaacagagagagctttacatcatggaattgatttggagaaaattaaggcttacattgattccttccgctttggagcccctcctcatgctggtggaggcattggattggaacgagttactatgctgtttctgggattgcataatgttcgtcagacctccatgttccctcgtgatcccaaacgactcactccttaaattcacactttgccacttaactccagtgtggatgacagagcgagaccctgcctcaaaaaaaaaaaaaaaaaaagaaagccacacttattcttttcagtaacctgctagtgcacaggctgtactttaggtacttaaaatatgcactagaataaatttgcaaggccctaaaatatcactgttatttttggagtaattcagtataggttcgtttaaaagagatttttataacttcagacatgcatcagtaggaaataacttgagaaattcatatggttatgttacaaattcatattctgttactacagtaaacgttaagagttttaaacagttaagattgtacaatttttcttcttttctatattacaagggccccagtgttaatgtcttagattttcagtatttgaacttatttttttaaattctgtcattgagataagaataattcaggtagcatctgaaattttaatgaatgtataattggcatatcatggaaaattaaccagaaagtatcagttcttaaaagttatgcctagaaattatgtaaagctaaactactggttagaaagtattcagtgtaatattgtattaatttgttaaattctaaacttgaatttcaataaaattttaaagct

SEQ ID NO: 867 - DNA, 2964 bp, Homo sapiens
atgacaaagaaaaatgcctgcatgggccttgttttccagattcaatcaaggctcaaagcttttatcttgttcttaatagcaccttgcaccgatagagcccggcaaggctttgcgggccttaattatttccccaagatcgatgagacccctcagccccctgggcagcagcatcccacggcagttttccagatggatgagctgcgtcgaaagctgcagagcagacagggatgcagacaaggtccagcacgcccagcagagcctgcggcctgcgggttcctcgggcggatggcactgcaaaattcagcccttaattcaatcaatatgtgccttcgaggagtttatagtcatggtttggtatggttggtatgtgatgcacacaaagcagagacagctgcatgtagaagggcaggggagcatggaggccccagtacagccaggaggcccctggagcttcaggcagcaggacatgggtctggatctgtagtcagaggggaggtcaggaaagagcttgtacaccagcaaaagattggatcctgtggttctcaaacccttattagtcctggagctgtgtttcaaggaaattctgcagaagaacagcagttcccttgcaaggatgaccccagggcccctggttcccagcagctccaagatgagatggcagaaagggagagggggaaccaaggagagggaaggaggaaatatattcagtgcagctgccccaacgtccctcaaggacaagcacaaaggggtggtgtggacaagcataatgcaattggcccagggacaggccatagaccccacttccaaaccccatttctcctcacagcccagggcctgaagggaacccgctggatgcaaagccgaggtcacccagagatggaggtggacagacagtgtgggatggccctgcaccctgaaactcccaggcactaccttgcattgtcagtttctaattttacacacactggggagaggtctgctgtgggccaggctggccaccagcgctgggtaagtagggactggcctagccacaggcctcaaggatgccgaagtctggtgggggagacaagcatggagagagacagagatggcagaggccaggacaggaagcctctgggcatcctggctgaggacagggtggcacacccagaggagagtgaatcgtggaaatgccgaaagctaaagagaagattcccaccagagatcacagagcagaacatgcaaaagtataaaattgcccaaccaccgtcactcacggacccctttgtccccttctcttcccctccaccccatagaagtttggctgacaaccacgggttcataccacatttccacatatgggaagaatctgtggcccagagtggttacattagagcacctcctcccctgagagccacacaagggcccataccaccttccagttcatggctccacctttgtcctgctctcacaaccttcccagacctggcctatacccacatgttattaaataatcttctagatatgcctttaggatttgctgcaaagacacttgagataaagtatctgtcagaaccaacctgggatgtagccaaagctaaggaatatgtcctgttctgtggagagcagatgatcaataggtggttcccagctaatggagtgactggagcaaggctcataggcctttcagttccatcaaaggaagataagtccccactcattgtccctggaggaaactgtgaggtcttcttatatttgcatgtatgtgccaaagagagacatgtaaaaaccagagcccggagacatagagaagatcattcaaaagcacatgccaagctaaagacaataccagggacaggacctcatcttctgactcttggtccagttctccctccaactcagcaaacagcctttggattccacttgggaaatatggaaactgaacagccagaagaaaccttccctaacactgaaaccagtggtgaatttggtaaacgccctgcagaagatatggaagaggaacaagcatttaaaagatctagaaacactgatgagatggttgaattacccattctgcttcagagcaagaatgctggagcagtgactggaaaaggaggcaagaatattaaggctctccatacagactacaacgccagcatttcagttctagacagcagtggcccccagcatatattgcatatcagtgctgatatcgaaacaattggagaaattctgaagaaaatcatcactaccttggaagagggcccgcagttgccatcacccactgcaaccagccagctcccgctcgaatctgatgctgtggaatacttaaattaccaacaatataaaggaagggactttgactgcgagttgaggctgttgattcatcagagtctagcaggaggaattattggggaatgttgtcctcatttcactgatagagttgttcttattggaggaaaacccaatagggttgtagagtgcataaagatcatccttgatcttatttctgagtctcccatcaaaggacatgcacagccttatgatcccaatttttacgatgaaacctatgattatggtggttttacaatggtgtttgctgacgaccgtggacgcccagggggagacctcatgacctataacagaaaagggagacctggaaaccgttacgacggcgtggttgatttcagtgctgatgaaacttggggctctgcaatagatacatggaacgcatcagaatggcagatggcttatgaaccacagggtggctccagatatgattattcctatgcagggtgtcatggctcatatggtgatcttggtggacctattattactacacaaggagctttgatcaaaattgatgagcctttagaaggatccgaagatcggatcattaccattacaggaacacaggaccagatacagaatgcacagtatttgccgcagaatagtgtgaagcagtattctggaaagtttttctaa

SEQ ID NO: 868 - protein, 987 aa, Homo sapiens
MTKKNACMGLVFQIQSRLKAFILFLIAPCTDRARQGFAGLNYFPKIDETPQPPGQQHPTAVFQMDELRRKLQSRQGCRQGPARPAEPAACGFLGRMALQNSALNSINMCLRGVYSHGLVWLVCDAHKAETAACRRAGEHGGPSTARRPLELQAAGHGSGSVVRGEVRKELVHQQKIGSCGSQTLISPGAVFQGNSAEEQQFPCKDDPRAPGSQQLQDEMAERERGNQGEGRRKYIQCSCPNVPQGQAQRGGVDKHNAIGPGTGHRPHFQTPFLLTAQGLKGTRWMQSRGHPEMEVDRQCGMALHPETPRHYLALSVSNFTHTGERSAVGQAGHQRWVSRDWPSHRPQGCRSLVGETSMERDRDGRGQDRKPLGILAEDRVAHPEESESWKCRKLKRRFPPEITEQNMQKYKIAQPPSLTDPFVPFSSPPPHRSLADNHGFIPHFHIWEESVAQSGYIRAPPPLRATQGPIPPSSSWLHLCPALTTFPDLAYTHMLLNNLLDMPLGFAAKTLEIKYLSEPTWDVAKAKEYVLFCGEQMINRWFPANGVTGARLIGLSVPSKEDKSPLIVPGGNCEVFLYLHVCAKERHVKTRARRHREDHSKAHAKLKTIPGTGPHLLTLGPVLPPTQQTAFGFHLGNMETEQPEETFPNTETSGEFGKRPAEDMEEEQAFKRSRNTDEMVELPILLQSKNAGAVTGKGGKNIKALHTDYNASISVLDSSGPQHILHISADIETIGEILKKIITTLEEGPQLPSPTATSQLPLESDAVEYLNYQQYKGRDFDCELRLLIHQSLAGGIIGECCPHFTDRVVLIGGKPNRVVECIKIILDLISESPIKGHAQPYDPNFYDETYDYGGFTMVFADDRGRPGGDLMTYNRKGRPGNRYDGVVDFSADETWGSAIDTWNASEWQMAYEPQGGSRYDYSYAGCHGSYGDLGGPIITTQGALIKIDEPLEGSEDRIITITGTQDQIQNAQYLPQNSVKQYSGKFF

SEQ ID NO: 869 - DNA, 774 bp, Homo sapiens
atgaagcagttaattacccctgctaaacagcaggaagcatttgagcaaaaactctgctcaccttcctcaatcagaggacatttctgctcatcagtcaagcaggcagaccacaggactctcagacaaaggctgagaggtagactgatgaggaggagactgtcagtgagcacaaaggccttaagattagcgactgaaggctcctggaatgagtatgtggttagagactggaactactcaggagtttccctaggtctgctccaaatagcacaagcaatggatgatgaaggatccatgttaatagcagtggatccacagtgcagattttcaggtgatctgctcccctacgactcactaattggagtcccattggccccccatgtgaccctcttggataaaaatcaaaatggctctcgtcttgtttgtttctcctgtttgcccccagtcagggctggcacagagtggcagctctctgctctccacagggctccccgctccacccagcccgataaagcatgccgactgggctacaaagccaagcaaggttacattatatataggatttgtgttcgccgtgaggagcaagctggacaccactgtggggctctaagagtcctgaattcgtactgggttggtgaagattccacatacaaattttttgaggttatcctcattgatccattccataaagctatcagaagaaatcctgacacccagtggatcaccaaaccagtccacaagcacagggaaatgcgtgggctgacatctgcaggctga

SEQ ID NO: 870 - protein, 257 aa, Homo sapiens
MKQLITPAKQQEAFEQKLCSPSSIRGHFCSSVKQADHRTLRQRLRGRLMRRRLSVSTKALRLATEGSWNEYVVRDWNYSGVSLGLLQIAQAMDDEGSMLIAVDPQCRFSGDLLPYDSLIGVPLAPHVTLLDKNQNGSRLVCFSCLPPVRAGTEWQLSALHRAPRSTQPDKACRLGYKAKQGYIIYRICVRREEQAGHHCGALRVLNSYWVGEDSTYKFFEVILIDPFHKAIRRNPDTQWITKPVHKHREMRGLTSAG

SEQ ID NO: 871 - DNA, 537 bp, Homo sapiens
atgtggggcgacctctggctcctcccgcctgcctctgccaatccgggcactgggacagaggctgagtttgagaaagctgcagaggaggttaggcaccttaagaccaagccatcggatgaggagatgctgttcatctatggccactacaaacaagcaactgtgggcgacataaatacagaacggcccgggatgttggacttcacgggcaaggccaagtgggatgcctggaatgagctgaaagggacttccaaggaagatgccatgaaagcttacatcaacaaagtagaagagctaaagaaaaaatacgggatatgagagactggatttggttactgtgccatgtgtttatcctaaactgagacaatgccttgtttttttctaataccgtggatggtgggaattcgggaaaataaccagttaaaccagctactcaaggctgctcaccatacggctctaacagattaggggctaaaacgattactgactttccttgagtagtttttatctgaaatcaattaaaagtgtatttgttacttt

SEQ ID NO: 872 - protein, 104 aa, Homo sapiens
MWGDLWLLPPASANPGTGTEAEFEKAAEEVRHLKTKPSDEEMLFIYGHYKQATVGDINTERPGMLDFTGKAKWDAWNELKGTSKEDAMKAYINKVEELKKKYGI

SEQ ID NO: 873 - DNA, 686 bp, Homo sapiens
gtttaggggctggtacaaaggatgaattgcacattgttgaagtagaggcaatgaattacaaaggcagtccaattaaagtaacactggcaactttgaaaatgtctgtacagccaaaggattcccttggaggctttgaaatcacaccaccagtggtcttacggttgaagtgtggttcagggccagtgcatattagtggacagcacttagtagctgtggaggaagatgcagagtcagaagatgaagaggaggaggatgtgaaactcttaagtgtatctggaaagcggtcggcccgtggaggtggtagcaagattccacagaaaaaagtaaaagttgctgctgatgaagatgaagatgatgatgatgaggattttgatgatggggaagctgaagaaaaagcgccggtgaagaaatccatacgagatactccagccaaaaatgcacaaaagtcaaatcagaatggaaaagactcaaaaccgtcaacaccaagatcaaaaggacaagactccttcaaaaaaacaggaaaaaacttctaaaacaccgaaaggacctagttccatagaagacattaaagcgaaaatgcaagcaagtatagaaaaagcgcattgaacagtcctgggcactgctggtaaattaagcccaaagatggggagaaaggaaaaggagagacaaatatagtccatactgag

SEQ ID NO: 874 - protein, 160 aa, Homo sapiens
MNYKGSPIKVTLATLKMSVQPKDSLGGFEITPPVVLRLKCGSGPVHISGQHLVAVEEDAESEDEEEEDVKLLSVSGKRSARGGGSKIPQKKVKVAADEDEDDDDEDFDDGEAEEKAPVKKSIRDTPAKNAQKSNQNGKDSKPSTPRSKGQDSFKKTGKNF

SEQ ID NO: 875 - DNA, 1691 bp, Homo sapiens
agcgggtttgcgggagcgccgcgtggttagcgtcggcggcttttggcatggcgactttttctggcccggctgggccaatcctgtcgcttaatccgcaggaagatgtcgagtttcaaaaggaggtggcgcaggttcgcaagcgcataacccagcgaaaaaaacaagaacaacttactcctggagtagtctatgtgcgccacctacctaacctacttgacgaaacccagatcttttcatatttctcccagtttggcactgtgacacggttcaggctgtccagaagtaaaaggactggaaatagcaaaggctatgcatttgtggagtttgagtctgaggatgttgccaaaatagttgctgaaacaatgaacaactacctgtttggtgaaagactcttggagtgtcattttatgccacctgaaaaagtacataaagaactctttaaagactggaatattccatttaagcagccatcatatcaatcagtgaaacggtataatcggaatcggacactaacacaaaagctacggatggaggagcgatttaaaaagaaagaaagattactcaggaagaaattagctaaaaaaggaattgactatgattttccttctttgattttacagaaaacggaaagtatttcaaaaactaatcgtcagacgtctacaaaaggccaggttttacgtaagaagaagaaaaaagtttcaggtactcttgacactcctgagaagactgtggatagccagggccccacaccagtttgtacaccaacatttttggagaggcgaaaatctcaagtggctgaactgaatgatgatgataaagatgatgaaatagttttcaaacagcccatatcctgtgtaaaagaagaaatacaagagactcaaacacctacacattcacggaaaaaaagacgaagaagcagcaatcagtgattttcaatgtattatatttcttttgaaaaatataatatttttatgagagtggactttgtatttcactaggtacaatggaatacaacctttgacaagattttcagaggaaaaatacactgtttggtcaagttaaggaaagcagtgtgtaattttggattgcctgcccttggctgaaatacaggggtgcataccatcttgcagtggcttggctgacattgcctctttgtcctggcctctagttttcttttgatatttcatagctctccttagtttactctgcctggatagaaagttgaccactaactgcaggtttaagtactaaactgcagccttttctgtcgccagcaattaaagaccaccaatcttgtttgtccatctacatggtttgtcggggacatttaactcatggaggtgctttagatttcaacatcagatggttgaagctggaagtttaattatatgtagagtgagaaggcagttccagttttagcacagatttgtttatgtgttcagattttaatagagattcaaaaatgactcatttttaccaataatgttaaattagttttggttgtgctagcatgaattaataaccaccattttataccagtatcatcagtgaagaattgtatttcaagattcaaacaataaccagcaattaaacttttttctacaatgtatttgtttgcgagtaggacttgggagtcattggaaaaaaaaaataataaattttccccttcattaacaaaaaaaaaaaaaaaa

SEQ ID NO: 876 - protein, 293 aa, Homo sapiens
MATFSGPAGPILSLNPQEDVEFQKEVAQVRKRITQRKKQEQLTPGVVYVRHLPNLLDETQIFSYFSQFGTVTRFRLSRSKRTGNSKGYAFVEFESEDVAKIVAETMNNYLFGERLLECHFMPPEKVHKELFKDWNIPFKQPSYQSVKRYNRNRTLTQKLRMEERFKKKERLLRKKLAKKGIDYDFPSLILQKTESISKTNRQTSTKGQVLRKKKKKVSGTLDTPEKTVDSQGPTPVCTPTFLERRKSQVAELNDDDKDDEIVFKQPISCVKEEIQETQTPTHSRKKRRRSSNQ

SEQ ID NO: 877 - DNA, 2792 bp, Homo sapiens
ccgcggcgtccacactcgccgcgcgcgcggcggccgggctggaccttgctggcccgcggcgccatgagccgcagcctggactcggcgcggagcttcctggagcggctggaagcgcggggcggccgggagggggcagtcctcgccggcgagttcagcgacatccaggcctgctcggccgcctggaaggctgacggcgtgtgctccaccgtggccggcagtcggccagagaacgtgaggaagaaccgctacaaagacgtgctgccttatgatcagacgcgagtaatcctctccctgctccaggaagagggacacagcgactacattaatggcaacttcatccggggcgtggatggaagcctggcctacattgccacgcaaggacccttgcctcacaccctgctagacttctggagactggtctgggagtttggggtcaaggtgatcctgatggcctgtcgagagatagagaatgggcggaaaaggtgtgagcggtactgggcccaggagcaggagccactgcagactgggcttttctgcatcactctgataaaggagaagtggctgaatgaggacatcatgctcaggaccctcaaggtcacattccagaaggagtcccgttctgtgtaccagctacagtatatgtcctggccagaccgtggggtccccagcagtcctgaccacatgctcgccatggtggaggaagcccgtcgcctccagggatctggccctgaacccctctgtgtccactgcagtgcgggttgtgggcgaacaggcgtcctgtgcaccgtggattatgtgaggcagctgctcctgacccagatgatcccacctgacttcagtctctttgatgtggtccttaagatgaggaagcagcggcctgcggccgtgcagacagaggagcagtacaggttcctgtaccacacggtggctcagatgttctgctccacactccagaatgccagcccccactaccagaacatcaaagagaattgtgccccactctacgacgatgccctcttcctccggactccccaggcacttctcgccataccccgcccaccaggaggggtcctcaggagcatctctgtgcccgggtccccgggccacgccatggctgacacctacgcggtggtgcagaagcgcggggctccagcgggcgccgggagtgggacgcagacggggacggggacggggacgggggcgcgcagcgcggaggaggcgccgctctacagcaaggtgacgccgcgcgcccagcgacccggggcgcacgcggaggacgcgagggggacgctgcctggccgcgttcctgctgaccaaagtcctgccggatctggcgcctacgaggacgtggcgggtggagctcagaccggtgggctaggtttcaacctgcgcattgggaggccgaagggtccccgggacccgcctgctgagtggacccgggtgtaagtctaacgccagttcctgcctgttgcctcttgtgagctcggactgctgatgccccggtgctgctgagcgccgtgcgcagaatggaaacagtgggcctggatcaaagttaaagtttctcagggtgggaaatgtgggggctttgccccaatgactgtagcattcaaggcttgaggctggaggaggtagctagggtatagtggctggtgaggctgcacagagcagattcaagaaagaagatcaggaaggggcatgacccctgagttatgaaggggagaagggacagatgagcttccggagactgctctcctcaccacacagcactagtccatcctcagcacctgagcctccctcacttggacactcaggggaccacacagagaagtggatggacacttcgccatccaggcagaactaagccaggcataaccacagccaagcagattaaccccaggcagaccgataaaaagacctccagataggcagacagacagatggaccaccaacctggacagacagccaaagcttcagagatacagtccacaggtggacaaagggatccccagccagagagagagagaccagccaacagcttgatagaccagtgcagccagagagaccaccaaacagagcccccaaaagacagacatctctgctagctggacagccaggtggaccccctaagttagattactagacagatataaacagatcccctgctgaacagatacacagagttctcagaccccacccccaccctcaggtgggctggctggctgacagaccttctggccagacagactcctaaccaaccagatggactgccagacaggcagacatcagccacatggaatcctgacatcccagccagccggccagactctcatcttgatgtcttgatggatggaccccagctagtcagacatgatcctccagattgacagacaagtcccccaaatgagtacacatctccagctattcagacagatggacccccagcaaatcaggacctatctaggcagaccccagccagacccccgccagacagactcccaaccagactgaccccttactattcacacagcctgccgagtagctgggactacaggtctaattttttttttttttaagaaatgagtttttgccatgttgcccagactggtcttgaactcccaacctcaagcaatcctcctgcctcagcctcccaaagtgctgagattacaggtgtgagccaccaggctcagccccctaagatttgaaacactttaaatggcccatggtagggttcctgctaggataaaacattaagcggctgttaaaagaaataaaaggaggacacgtctctgtgc

SEQ ID NO: 878 - DNA, 1074 bp, Homo sapiens
tggaagcggcactcaagatgctgcgccgcgaggcccgcctgcgccgcgagtacctgtaccgcaaggcccgggaggaggcgcagcgctcagcccaggagaggaaggagcggctgcggcgcgcgctggaagaaaaccgcctgattcccactgagttacgccgagaggctctggccttacaggggtccctggagtttgatgatgctggaggtgaaggtgtgaccagccacgtggatgatgaataccgatgggcaggagtcgaggatcccaaggttatgatcactacctcccgagaccccagttcccgcctcaagatgtttgcaaaggagctgaagctggtgttcccgggcgcccagcgaatgaaccgaggtcgacatgaagtgggggcactggtgcgagcctgcaaagccaacggcgtcaccgatctgctggtcgttcacgagcatcggggcacacctgtggggctcatcgtcagccacctgccctttggtcctactgcctacttcacgctgtgcaatgtggtcatgcggcatgacatcccagacctgggcaccatgtcggaggccaagccccacctcatcacacacggcttctcctcccgcctgggcaagcgggtctctgacatcctccgatacctatttcccgtgcccaaagatgacagccaccgggtcatcaccttcgcaaaccaggacgactacatatcattccggcaccatgtgtataagaagacagaccaccgcaacgtggagctcactgaggtcgggccccgctttgagctgaagctgtacatgatccgtctgggcacgctggagcaggaggccacagcagacgtggagtggcgctggcacccttacaccaataccgcacgcaagagagtcttcctgagcaccgagtgagcacactcaccactcagtcaggacatggacttggaactcaggatggggctgtcatagacagacccaccagtaggaactgtcacagaatggcctgctgaactgggatgtggaactgtggcgggtggagaggtctgaataaaccgtctgtgtcatggcaaaaaaaaaaaaaaaaaaaaaaaaa

SEQ ID NO: 879 - protein, 291 aa, Homo sapiens
MLRREARLRREYLYRKAREEAQRSAQERKERLRRALEENRLIPTELRREALALQGSLEFDDAGGEGVTSHVDDEYRWAGVEDPKVMITTSRDPSSRLKMFAKELKLVFPGAQRMNRGRHEVGALVRACKANGVTDLLVVHEHRGTPVGLIVSHLPFGPTAYFTLCNVVMRHDIPDLGTMSEAKPHLITHGFSSRLGKRVSDILRYLFPVPKDDSHRVITFANQDDYISFRHHVYKKTDHRNVELTEVGPRFELKLYMIRLGTLEQEATADVEWRWHPYTNTARKRVFLSTE

SEQ ID NO: 880 - DNA, 1113 bp, Homo sapiens
ggcggcggcagcgggttcggttgcgcgtgacgcacggggtgggagcggagcccaggccgggagcaggcgcctctgccagagaccatggggaacgtgttggccgccaggtcgccgcccgcagggccgccaccgccgcctgcgccggccctcgtggagctgccgccacctccgccctcgccgccgggcttcacgctgccgccgctgggaggcggcctgggcgccggcaccagtacgagtcgaggttcggaactgacccccggggctgcaactgccagcgcctcaggggccgccgaggatggggcctgcggctgcctgcccaacccgggcacattcggggagtgccaccggaagtgcaaggagctgtttcccattcagatggagggtgtcaagctcatagtcaacaaagggttgagtaaccatttccaggtgaaccacacagtagccctcagcacaatcagggagtccagctaccacttcggggtcacgtatgtggggacaaagcagctgagtcccacagaggcgttccttgtattggtgggtgacatggacaacagcggcagtctcaacgctcaggtcattcaccagctgggcccccgcctcaggtccaagatggccatccagacccagcagtcgaagtttgtgaactggcaggtggacggggagtatcggggctctgactcacagcagccgtaaccctggggaaacccagacgtcctcgtgggttcaggaatcctcgtagcccactacctccagagcatcacgccttgcctggccctgggcagaatgctggtctaccaccagcagcctggggaggagggcactgtcatgtctctagctgggaaatacacattgaacaactggttggcaacggtaacgttgggccaggcgggcatgcacgcaacatactaccacaaagccagtgaccagctgcaggtgggtgtggagtttgaggccagcacaaggatgcaggacaccagcgtctccttcgggtaccagctggacctgcccaaggccaaaggctctgtggatagcaactggatcgtgtgtgccacgttggagaagaagctcccgcccctgcccctgacactggcccttggggccttcctgaatcac

SEQ ID NO: 881 - DNA, 1637 bp, Homo sapiens
aagaactggcctgtacattttcaaggaattcttgagaggttcttggagagattctgggagccaaacactccattgggatcctagctgttttagagaacaacttgtaatggagccttcatctcttgagctgccggctgacacagtgcagcgcattgcggctgaactcaaatgccacccaacggatgagagggtggctctccacctagatgaggaagataagctgaggcacttcagggagtgcttttatattcccaaaatacaggatctgcctccagttgatttatcattagtgaataaagatgaaaatgccatctatttcttgggaaattctcttggccttcaaccaaaaatggttaaaacatatcttgaagaagaactagataagtgggccaaaatagcagcctatggtcatgaagtggggaagcgtccttggattacaggagatgagagtattgtaggccttatgaaggacattgtaggagccaatgagaaagaaatagccctaatgaatgctttgactgtaaatttacatcttctaatgttatcattttttaagcctacgccaaaacgatataaaattcttctagaagccaaagccttcccttctgatcattatgctattgagtcacaactacaacttcacggacttaacattgaagaaagtatgcggatgataaagccaagagagggggaagaaaccttaagaatagaggatatccttgaagtaattgagaaggaaggagactcaattgcagtgatcctgttcagtggggtgcatttttacactggacagcactttaatattcctgccatcacaaaagctggacaagcgaagggttgttatgttggctttgatctagcacatgcagttggaaatgttgaactctacttacatgactggggagttgattttgcctgctggtgttcctacaagtatttaaatgcaggagcaggaggaattgctggtgccttcattcatgaaaagcatgcccatacgattaaacctgcattagtgggatggtttggccatgaactcagcaccagatttaagatggataacaaactgcagttaatccctggggtctgtggattccgaatttcaaatcctcccattttgttggtctgttccttgcatgctagtttagagatctttaagcaagcgacaatgaaggcattgcggaaaaaatctgttttgctaactggctatctggaatacctgatcaagcataactatggcaaagataaagcagcaaccaagaaaccagttgtgaacataattactccgtctcatgtagaggagcgggggtgccagctaacaataacattttctgttccaaacaaagatgttttccaagaactagaaaaaagaggagtggtttgtgacaagcggaatccaaatggcattcgagtggctccagttcctctctataattctttccatgatgtttataaatttaccaatctgctcacttctatacttgactctgcagaaacaaaaaattagcagtgttttctagaacaacttaagcaaattatactgaaagctgctgtggttatttcagtattattcgatttttaattattgaaagtatgtcaccattgaccacatgtaactaacaataaataatataccttac

SEQ ID NO: 882 - protein, 465 aa, Homo sapiens
MEPSSLELPADTVQRIAAELKCHPTDERVALHLDEEDKLRHFRECFYIPKIQDLPPVDLSLVNKDENAIYFLGNSLGLQPKMVKTYLEEELDKWAKIAAYGHEVGKRPWITGDESIVGLMKDIVGANEKEIALMNALTVNLHLLMLSFFKPTPKRYKILLEAKAFPSDHYAIESQLQLHGLNIEESMRMIKPREGEETLRIEDILEVIEKEGDSIAVILFSGVHFYTGQHFNIPAITKAGQAKGCYVGFDLAHAVGNVELYLHDWGVDFACWCSYKYLNAGAGGIAGAFIHEKHAHTIKPALVGWFGHELSTRFKMDNKLQLIPGVCGFRISNPPILLVCSLHASLEIFKQATMKALRKKSVLLTGYLEYLIKHNYGKDKAATKKPVVNIITPSHVEERGCQLTITFSVPNKDVFQELEKRGVVCDKRNPNGIRVAPVPLYNSFHDVYKFTNLLTSILDSAETKN

SEQ ID NO: 883 - DNA, 2243 bp, Homo sapiens
gtgtacggtccgcagcggcaggtgaagtctagcagaggacgcggccaggcgattcggtgaagcgattcctgcaggcgttggttcccctctttgacctggtaaatgcaggcttttatgcgagaggatttgaatttgttgaaatgagcagtcgtaaatcaaagagtaacagcttaattcacacagagtgcctttcacaggtacaaagaattttacgtgaaagattttgtcgtcagagtccacatagtaacctatttggagtgcaagtacaatacaaacacttaagtgagctgctgaaaagaactgctctccatggagagagtaactctgtccttattatcggaccccgaggatcaggaaaaactatgttaataaatcatgctttgaaagaactcatggaaatagaagaagtgagtgaaaatgtattacaagttcacttaaatggactgctgcagatcaatgacaaaatcgccctaaaggaaatcacaaggcagttaaatctggaaaatgtagttggagataaagtttttggaagctttgctgaaaacctttcatttcttctggaagctttaaaaaaaggtgaccgaactagcagttgcccagtgatcttcatattagatgaatttgatctttttgctcatcataaaaaccaaacacttctctataatctttttgacatttctcagtctgcacagaccccaatagcagttattggtcttacatgtagattggatattttggaactcttagaaaaaagagtgaagtcaagattttctcaccggcagatacacttaatgaattcatttggttttccacagtatgttaaaatatttaaagaacagttatctctacctgcagagtttccagacaaggtttttgctgagaagtggaatgaaaatgttcagtatctctcagaagatagaagtgtgcaagaagtactacagaagcatttcaatatcagcaaaaacctgcggtcattacacatgctattgatgcttgctttaaatcgagtaacagcatcgcacccatttatgactgccgtagatctaatggaagcaagccaactgtgtagcatggactcgaaagcaaatattgtacatggtctatcagtcttggaaatctgtcttataatagcaatgaaacatttaaatgacatctatgaggaagagccatttaattttcaaatggtctataatgagtttcagaagtttgttcaaaggaaagcacattccgtttataattttgaaaaacctgttgtcatgaaggcttttgaacacttgcagcaattagaattaataaagcccatggaaagaacttcaggaaattcacagagagagtaccagctgatgaaactgcttttggataatactcaaattatgaatgctctgcagaaatatcccaactgtcctacagatgtgaggcagtgggcaacatcctcactaagctggttatgaatataaccagtgacttcaactttggcatttcattcatacttctgtagagaacggaaaactattgtccattaacatgatatgctaaacattctataaacattcttgtatttatgtgagacttgcccatctactgtcttggctgtgtcttgccttttaatcatgaacagttacatgatttataatttcactgattgagattactttgtaagtagctgttcagaagaataaaatatgactgttttagggactagaccatgtgcttttttaacacttatatatataatggtctatttgaagagctcacttcaacctaacagctagatgtctttacaaaccttaaaccaaaggagtaaaaaaaacaatggtaagcactgaagtataataagtaacctttggtacagcaggtttgctgcagtgtttttttctgtccacatgcaaattttggattctatcccagacccaggttttctagttcagaagactaaccagcttagtcagaagatggttccatggaagaaaaaggccaaggagtttgaagatttttcttctagacatctcaaaatgtggtactcataccatccacatcagaatcccttgtaggattttctaaaattacagattgttgagcctaccataggtcaaaaggactggaattttccttcttaacaagtatagtcatggcaccacgtaacattttggtcaatgacattgtataaagggtggtctcataagattataccatatttttactgtaccttttctatgtctaaatatacaaatgttttaccattg

SEQ ID NO: 884 - protein, 436 aa, Homo sapiens
MSSRKSKSNSLIHTECLSQVQRILRERFCRQSPHSNLFGVQVQYKHLSELLKRTALHGESNSVLIIGPRGSGKTMLINHALKELMEIEEVSENVLQVHLNGLLQINDKIALKEITRQLNLENVVGDKVFGSFAENLSFLLEALKKGDRTSSCPVIFILDEFDLFAHHKNQTLLYNLFDISQSAQTPIAVIGLTCRLDILELLEKRVKSRFSHRQIHLMNSFGFPQYVKIFKEQLSLPAEFPDKVFAEKWNENVQYLSEDRSVQEVLQKHFNISKNLRSLHMLLMLALNRVTASHPFMTAVDLMEASQLCSMDSKANIVHGLSVLEICLIIAMKHLNDIYEEEPFNFQMVYNEFQKFVQRKAHSVYNFEKPVVMKAFEHLQQLELIKPMERTSGNSQREYQLMKLLLDNTQIMNALQKYPNCPTDVRQWATSSLSWL

SEQ ID NO: 885 - DNA, 1416 bp, Homo sapiens
attcggcaccgcagcgtaggtgctaccaccgctgccgtcgccgccgccattttgatggcaggaagagtccggttctgggacagctggagacagtggtggtgactgaaataactttaccaaaggaaagctattttgcgaactatcttctccagcggagatggccaatgtgctttgtaacagagccagactggtttcctatctcccaggattttgctctttagttaaaagggttgtcaatcccaaagccttttcgactgcaggatcatcaggttcggatgagtctcatgtggctgctgcacctccagatatatgctctcgaacagtgtggcctgatgaaactatgggaccctttggacctcaagatcagaggttccagcttcctgggaacataggttttgattgtcacctcaatgggactgcttcacagaagaaaagcctggttcataaaactttgcctgatgttctagcagaacctttatcaagtgaaagacatgagtttgtgatggcacaatatgtgaatgaatttcagggtaatgatgcacctgttgaacaagaaattaacagtgcagaaacttactttgaaagtgccagagtagagtgtgcaatacaaacatgtccagaattgctgcgaaaagattttgaatcactgtttccagaagtagctaatggcaaactaatgattctgactgtaacacaaaaaactaagaatgatatgactgtttggagtgaagaagtagaaattgaaagagaagtgctcttagaaaagttcatcaatggtgctaaggaaatttgctatgctcttcgagctgagggttattgggctgactttattgacccatcatctggtttggcattttttggaccatatacaaacaacactctttttgaaactgatgaacgctaccgacatttaggattctctgttgatgaccttggatgctgtaaagtgattcgtcatagtctctggggtacccatgtagttgtagggagtatcttcactaatgcaacaccagacagccatattatgaagaaattaagtggaaattagcagaaatatccattcatttgctgtactatttgtatgtaatatttgggttgatctataaacactgtcagactaaagtttttaaaatatacttatttctaagtatttatttcagcatttatgaatttgcaacattggcaagtgatttgggattttaaaattgcaaatgttcatttattcatatcattgaatacacgttgaacacatccacattgtataggatgtggtaattagcttgtaaccagggtatgatctgctattgttatttctcctctttattggaaaaaggcctcagttttaattattttcttcccaaaataaatcacacatttggttacaaaaaaaaaaaaaaaaaaaaaaaaaaaaaaaaa

SEQ ID NO: 886 - protein, 296 aa, Homo sapiens
MANVLCNRARLVSYLPGFCSLVKRVVNPKAFSTAGSSGSDESHVAAAPPDICSRTVWPDETMGPFGPQDQRFQLPGNIGFDCHLNGTASQKKSLVHKTLPDVLAEPLSSERHEFVMAQYVNEFQGNDAPVEQEINSAETYFESARVECAIQTCPELLRKDFESLFPEVANGKLMILTVTQKTKNDMTVWSEEVEIEREVLLEKFINGAKEICYALRAEGYWADFIDPSSGLAFFGPYTNNTLFETDERYRHLGFSVDDLGCCKVIRHSLWGTHVVVGSIFTNATPDSHIMKKLSGN

SEQ ID NO: 887 - DNA, 1402 bp, Homo sapiens
tatcgcaagcagcagtctctggtcccagcccaccccatggcccctcccagtcccagcaccaccagcagtaataacaacagtagcagcagtagcaactcaggatgggatcagctcagcaaaacgaacctctatatccgaggactgcctccccacaccaccgaccaggacctggtgaagctctgtcaaccatatgggaaaatagtctccacaaaggcaattttggataagacaacgaacaaatgcaaaggttatggttttgtcgactttgacagccctgcagcagctcaaaaagctgtgtctgccctgaaggccagtggggttcaagctcaaatggcaaagcaacaggaacaagatcctaccaacctctacatttctaatttgccactctccatggatgagcaagaactagaaaatatgctcaaaccatttggacaagttatttctacaaggatactacgtgattccagtggtacaagtcgtggtgttggctttgctaggatggaatcaacagaaaaatgtgaagctgttattggtcattttaatggaaaatttattaagacaccaccaggagtttctgcccccacagaacctttattgtgtaagtttgctgatggaggacagaaaaagagacagaacccaaacaaatacatccctaatggaagaccatggcatagagaaggagaggtgagacttgctggaatgacacttacttacgacccaactacagctgctatacagaacggattttatccttcaccatacagtattgctacaaaccgaatgatcactcaaacttctattacaccctatattgcatctcctgtatctgcctaccaggtgcaaagtccttcgtggatgcaacctcaaccatatattctacagcaccctggtgccgtgttaactccctcaatggagcacaccatgtcactacagcccgcatcaatgatcagccctctggcccagcagatgagtcatctgtcactaggcagcaccggaacatacatgcctgcaacgtcagctatgcaaggagcctacttgccacagtatgcacatatgcagacgacagcggttcctgttgaggaggcaagtggtcaacagcaggtggctgtcgagacgtctaatgaccattctccatatacctttcaacctaataagtaactgtgagatgtacagaaaggtgttcttacatgaagaagggtgtgaaggctgaacaatcatggatttttctgatcaattgtgctttaggaaattattgacagttttgcacaggttcttgaaaacgttatttataatgaaatcaactaaaactatttttgctataagttctataaggtgcataaaacccttaaattcatctagtagctgttcccccgaacaggtttattttagtaaaaaaaaaaaa

SEQ ID NO: 888 - protein, 373 aa, Homo sapiens
MAPPSPSTTSSNNNSSSSSNSGWDQLSKTNLYIRGLPPHTTDQDLVKLCQPYGKIVSTKAILDKTTNKCKGYGFVDFDSPAAAQKAVSALKASGVQAQMAKQQEQDPTNLYISNLPLSMDEQELENMLKPFGQVISTRILRDSSGTSRGVGFARMESTEKCEAVIGHFNGKFIKTPPGVSAPTEPLLCKFADGGQKKRQNPNKYIPNGRPWHREGEVRLAGMTLTYDPTTAAIQNGFYPSPYSIATNRMITQTSITPYIASPVSAYQVQSPSWMQPQPYILQHPGAVLTPSMEHTMSLQPASMISPLAQQMSHLSLGSTGTYMPATSAMQGAYLPQYAHMQTTAVPVEEASGQQQVAVETSNDHSPYTFQPNK

SEQ ID NO: 889 - DNA, 1679 bp, Homo sapiens
agacttggaaaccccaaagtgtccgcgaccctgcacggcagctcccttccagcttcatgggcaaagtgtggaaacagcagatgtaccctcagtacgccacctactattacccccagtatctgcaagccaagtttggaaggcattcgggaataccaagtgaaaaggaagagtgaagaacagaaaaatgttagtgggatggcaaacactgtgaacattgctgtttctagtgggccagaaaaatcagtctctggtcccagcccaccccatggcccctcccagtcccagcaccaccagcagtaataacaacagtagcagcagtagcaactcaggatgggatcagctcagcaaaacgaacctctatatccgaggactgcctccccacaccaccgaccaggacctggtgaagctctgtcaaccatatgggaaaatagtctccacaaaggcaattttggataagacaacgaacaaatgcaaaggttatggttttgtcgactttgacagccctgcagcagctcaaaaagctgtgtctgccctgaaggccagtggggttcaagctcaaatggcaaagcaacaggaacaagatcctaccaacctctacatttctaatttgccactctccatggatgagcaagaactagaaaatatgctcaaaccatttggacaagttatttctacaaggatactacgtgattccagtggtacaagtcgtggtgttggctttgctaggatggaatcaacagaaaaatgtgaagctgttattggtcattttaatggaaaatttattaagacaccaccaggagtttctgcccccacagaacctttattgtgtaagtttgctgatggaggacagaaaaagagacagaacccaaacaaatacatccctaatggaagaccatggcatagagaaggagaggtgagacttgctggaatgacacttacttacgacccaactacagctgctatacagaacggattttatccttcaccatacagtattgctacaaaccgaatgatcactcaaacttctattacaccctatattgcatctcctgtatctgcctaccaggtggcaaaggaaaccagagaaaacaagtatcggggctctgctatcaaggtgcaaagtccttcgtggatgcaacctcaaccatatattctacagcaccctggtgccgtgttaactccctcaatggagcacaccatgtcactacagcccgcatcaatgatcagccctctggcccagcagatgagtcatctgtcactaggcagcaccggaacatacatgcctgcaacgtcagctatgcaaggagcctacttgccacagtatgcacatatgcagacgacagcggttcctgttgaggaggcaagtggtcaacagcaggtggctgtcgagacgtctaatgaccattctccatatacctttcaacctaataagtaactgtgagatgtacagaaaggtgttcttacatgaagaagggtgtgaaggctgaacaatcatggatttttctgatcaattgtgctttaggaaattattgacagttttgcacaggttcttgaaaacgttatttataatgaaatcaactaaaactatttttgctataagttctataaggtgcataaaacccttaaattcatctagtagctgttcccccgaacaggtttattttagtaaaaaaaaaaaa

SEQ ID NO: 890 - protein, 389 aa, Homo sapiens
MAPPSPSTTSSNNNSSSSSNSGWDQLSKTNLYIRGLPPHTTDQDLVKLCQPYGKIVSTKAILDKTTNKCKGYGFVDFDSPAAAQKAVSALKASGVQAQMAKQQEQDPTNLYISNLPLSMDEQELENMLKPFGQVISTRILRDSSGTSRGVGFARMESTEKCEAVIGHFNGKFIKTPPGVSAPTEPLLCKFADGGQKKRQNPNKYIPNGRPWHREGEVRLAGMTLTYDPTTAAIQNGFYPSPYSIATNRMITQTSITPYIASPVSAYQVAKETRENKYRGSAIKVQSPSWMQPQPYILQHPGAVLTPSMEHTMSLQPASMISPLAQQMSHLSLGSTGTYMPATSAMQGAYLPQYAHMQTTAVPVEEASGQQQVAVETSNDHSPYTFQPNK

SEQ ID NO: 891 - DNA, 2227 bp, Homo sapiens
ggctaatgtaacatactctaccacttggtctgaagcccagcagtatctgatggataatccaacttttgcagaagatgaggagttacaaaatatggacaaagaagatgcattaatttgctttgaagaacacattcgggctttagaaaaggaggaagaagaagaaaaacagaagagtttgctgagagaaaggagacgacagcgaaaaaatagggaatctttccagatatttttagatgaattacatgaacatggacaactgcattctatgtcatcttggatggaattgtatccaactattagttctgatattagattcactaatatgcttggtcagcctggatcaactgcacttgatcttttcaagttttatgttgaggatcttaaagcacgttatcatgacgagaagaagataataaaagacattctaaaggataaaggatttgtagttgaagtaaacactacttttgaagattttgtggcgataatcagttcaactaaaagatcaactacattagatgctggaaatatcaaattggctttcaatattactagaaaaggcagaagcccgtgaacgtgaaagagaaaaagaagaggctcggaagatgaaacgaaaagaatctgcatttaagagtatgttaaaacaagctgctcctccgatagaattggatgctgtctgggaagatatccgtgagagatttgtaaaagagccagcatttgaggacataactctagaatctgaaagaaaacgaatatttaaagattttatgcatgtgcttgagcatgaatgtcagcatcatcattcaaagaacaagaaacattctaagaaatctaaaaaacatcataggaaacgttcccgctctcgatcggggtcagattcagatgatgatgatagccattcaaagaaaaaaagacagcgatcagagtctcgttctgcttcagaacattcttctagtgcagagtctgagagaagttataaaaagtcaaaaaagcataagaagaaaagtaagaagaggagacataaatctgactctccagaatccgatgctgagcgagagaaggataaaaaagaaaaagatcgggaaagtgaaaaagacagaactagacaaagatcagaatcaaaacacaaatcgcctaagaaaaagactggaaaggattctggtaattgggatacttctggcagcgaactgagtgaaggggaattggaaaagcgcagaagaacccttttggagcaactggatgatgatcaataaattataccaaatatatgtttacagtatgatttaaagtctgattcagaccagggactctattttaagttcaactgaaataacactgggttttaattatatcacaggaaaaaaaaagtgcatttaagtattgttatcgtggactttataaaagcaaaggaaattgaaagtaacttttgattctgtatcaagaatcatattttcatacagtcataactgtctttctgtgaccctttcacagggcactgtaggatggattaaaggtggcaatttactgataactgcagatgtctctactttgttctaaaatctaagtcatgaggtgatttgatttactttatagaagctggattttgaagatctaatgaaaaattttttgataatatagtagtacaaaaaaagcaccagcaactgataaaaattgcttttttgtgcgctacccaactggttaaagccaatgtgatcttttatggtgaaactcctaagaaacaggtggttttgctggaaacttggtagacccttaattatagtggtgctaatgagcactactgtaatataaagccaccattattttttatcaaacatctgaatacattttacaaaggctattgtgagggcattattttgagcatctattttgaggtgatgtttaaaaaaactttaacatcaaatcaaattgtaaattaatttaaatatattgccttaaggacctactaaagaatgtgccaccagactttaagtgatagttgcaatatccttgtctaaaaaaaaaaaaaaagttgacttaaacattttctttaacagttgtcttttttttctaaattcagtctttctcttgcttttttttccctgctattgaggaagtattttgccttccctactcactgagaagtattgacttcgtggtacacattctaaagcatttctgatttgaatatttttgtacatttttatcaattattaaaccttctcttctagtg

SEQ ID NO: 892 - protein, 244 aa, Homo sapiens
MLEISNWLSILLEKAEAREREREKEEARKMKRKESAFKSMLKQAAPPIELDAVWEDIRERFVKEPAFEDITLESERKRIFKDFMHVLEHECQHHHSKNKKHSKKSKKHHRKRSRSRSGSDSDDDDSHSKKKRQRSESRSASEHSSSAESERSYKKSKKHKKKSKKRRHKSDSPESDAEREKDKKEKDRESEKDRTRQRSESKHKSPKKKTGKDSGNWDTSGSELSEGELEKRRRTLLEQLDDDQ

SEQ ID NO: 893 - DNA, 2460 bp, Homo sapiens
ccagcacgcggccgctctggcccagggaagtccctgtccttaccttcagcaggagccggttccctgtgtgtgtgtccgctcgccctctgctccgtcctgcggctgcccactgccctcctacggtccaccatggccctgctgcactccggccgcgtcctccccgggatcgccgccgccttccacccgggcctcgccgccgcggcctctgccagagccagctcctggtggacccatgtggaaatgggacctccagatcccattctgggagtcactgaagcctttaagagggacaccaatagcaaaaagatgaatctgggagttggtgcctaccgggatgataacggaaagccttacgtgctgcctagcgtccgcaaggcagaggcccagattgccgcaaaaaatttggacaaggaatacctgcccattgggggactggctgaattttgcaaggcatctgcagaactagccctgggtgagaacagcgaagtcttgaagagtggccggtttgtcactgtgcagaccatttctggaactggagccttaaggatcggagccagttttctgcaaagattttttaagttcagccgagatgtctttctgcccaaaccaacctggggaaaccacacacccatcttcagggatgctggcatgcagctacaaggttatcggtattatgaccccaagacttgcggttttgacttcacaggcgctgtggaggatatttcaaaaataccagagcagagtgttcttcttctgcatgcctgcgcccacaatcccacgggagtggacccgcgtccggaacagtggaaggaaatagcaacagtggtgaagaaaaggaatctctttgcgttctttgacatggcctaccaaggctttgccagtggtgatggtgataaggatgcctgggctgtgcgccacttcatcgaacagggcattaatgtttgtctctgccaatcatatgccaagaacatgggcttatatggtgagcgtgtaggagccttcactatggtctgcaaagatgcggatgaagccaaaagggtagagtcacagttgaagatcttgatccgtcccatgtattccaaccctcccctcaatggggcccggattgctgctgccattctgaacaccccagatttgcgaaaacaatggctgcaagaagtgaaaggcatggctgaccgcatcattggcatgcggactcaactggtctccaacctcaagaaggagggttccacccacaattggcaacacatcaccgaccaaattggcatgttctgtttcacagggctaaagcctgaacaggtggagcggctgatcaaggagttctccatctacatgacaaaagatggccgcatctctgtggcaggggtcacctccagcaacgtgggctaccttgcccatgccattcaccaggtcaccaagtaatgtccctggtgcgaggaaacagagacaacctttctgtcttcagcctctgctattgagagcttcacacagacaatgagagagggtggatggtggtgagtggatcatttctttcagccacagtgtgtaacactcagcatttgaatgtttctcagaaaagaacatgtagtgacacagggcagaggcatccatggctggcgtctggaatattaaaccaaactctccccggtccttttttctccaacttttctcaaagagtttacatgtgcaagaaagtcatcgcaccaaaaaacctgtcaattatgccattgcaatatttcagaagctttaactgaagtgtcaggttcctcgtgagaaacagcacacgttagaggctttgagagaaggcctagttctgtcatgagtagtcggcctcgtgtctgtcctcccatcttggaacaaccttatcaacaggccgcactgcagaaatgatgttttatgaaaaccaatgaggctgctgccactccagcaagggaaataatgcagtttcctgtcttatttaagaaaaagagaaggctctcttttctcccttgtcattgccgttcttttccttacacgcaaagattttttaactattgcagattttcatcccattctactgcttgattgaccatcaactccatcctatcgagatttatttaagaatgaagaacataattttctgctgatgccgtaccctcacccttttcagcaaagaatagtggagagtaggaaactgtactttatctcggcatcctcttgaatgatagtgcaagtttctccagttgggatgttgtctctgcccggttggacctcctccctttgttgaatgtggtgtgcagcctctcatctcacactgtgagtccagcggcgcagggtggtaccaggaaagaggatattctaggctttgcgtgctgctagctgggttcaggcttcacccactggaaagaaccaccatctgctctaaccatgtagacttattgcggcctggtttctctgttacaataaaattactgtagaccc

SEQ ID NO: 894 - DNA, 3445 bp, Homo sapiens
gagtgactccaccgcccggagcagcggtgcaggacgcgcgtctccgccgcccgcggtgacttctgcctgcgctccttctctgaacgctcacttccgaggagacgccgacgatgaagacaccgtggaaggttcttctgggactgctgggtgctgctgcgcttgtcaccatcatcaccgtgcccgtggttctgctgaacaaaggcacagatgatgctacagctgacagtcgcaaaacttacactctaactgattacttaaaaaatacttatagactgaagttatactccttaagatggatttcagatcatgaatatctctacaaacaagaaaataatatcttggtattcaatgctgaatatggaaacagctcagttttcttggagaacagtacatttgatgagtttggacattctatcaatgattattcaatatctcctgatgggcagtttattctcttagaatacaactacgtgaagcaatggaggcattcctacacagcttcatatgacatttatgatttaaataaaaggcagctgattacagaagagaggattccaaacaacacacagtgggtcacatggtcaccagtgggtcataaattggcatatgtttggaacaatgacatttatgttaaaattgaaccaaatttaccaagttacagaatcacatggacggggaaagaagatataatatataatggaataactgactgggtttatgaagaggaagtcttcagtgcctactctgctctgtggtggtctccaaacggcacttttttagcatatgcccaatttaacgacacagaagtcccacttattgaatactccttctactctgatgagtcactgcagtacccaaagactgtacgggttccatatccaaaggcaggagctgtgaatccaactgtaaagttctttgttgtaaatacagactctctcagctcagtcaccaatgcaacttccatacaaatcactgctcctgcttctatgttgataggggatcactacttgtgtgatgtgacatgggcaacacaagaaagaatttctttgcagtggctcaggaggattcagaactattcggtcatggatatttgtgactatgatgaatccagtggaagatggaactgcttagtggcacggcaacacattgaaatgagtactactggctgggttggaagatttaggccttcagaacctcattttacccttgatggtaatagcttctacaagatcatcagcaatgaagaaggttacagacacatttgctatttccaaatagataaaaaagactgcacatttattacaaaaggcacctgggaagtcatcgggatagaagctctaaccagtgattatctatactacattagtaatgaatataaaggaatgccaggaggaaggaatctttataaaatccaacttagtgactatacaaaagtgacatgcctcagttgtgagctgaatccggaaaggtgtcagtactattctgtgtcattcagtaaagaggcgaagtattatcagctgagatgttccggtcctggtctgcccctctatactctacacagcagcgtgaatgataaagggctgagagtcctggaagacaattcagctttggataaaatgctgcagaatgtccagatgccctccaaaaaactggacttcattattttgaatgaaacaaaattttggtatcagatgatcttgcctcctcattttgataaatccaagaaatatcctctactattagatgtgtatgcaggcccatgtagtcaaaaagcagacactgtcttcagactgaactgggccacttaccttgcaagcacagaaaacattatagtagctagctttgatggcagaggaagtggttaccaaggagataagatcatgcatgcaatcaacagaagactgggaacatttgaagttgaagatcaaattgaagcagccagacaattttcaaaaatgggatttgtggacaacaaacgaattgcaatttggggctggtcatatggagggtacgtaacctcaatggtcctgggatcgggaagtggcgtgttcaagtgtggaatagccgtggcgcctgtatcccggtgggagtactatgactcagtgtacacagaacgttacatgggtctcccaactccagaagacaaccttgaccattacagaaattcaacagtcatgagcagagctgaaaattttaaacaagttgagtacctccttattcatggaacagcagatgataacgttcactttcagcagtcagctcagatctccaaagccctggtcgatgttggagtggatttccaggcaatgtggtatactgatgaagaccatggaatagctagcagcacagcacaccaacatatatatacccacatgagccacttcataaaacaatgtttctctttaccttagcacctcaaaataccatgccatttaaagcttattaaaactcatttttgttttcattatctcaaaactgcactgtcaagatgatgatgatctttaaaatacacactcaaatcaagaaacttaaggttacctttgttcccaaatttcatacctatcatcttaagtagggacttctgtcttcacaacagattattaccttacagaagtttgaattatccggtcgggttttattgtttaaaatcatttctgcatcagctgctgaaacaacaaataggaattgtttttatggaggctttgcatagattccctgagcaggattttaatctttttctaactggactggttcaaatgttgttctcttctttaaagggatggcaagatgtgggcagtgatgtcactagggcagggacaggataagagggattagggagagaagatagcagggcatggctgggaacccaagtccaagcataccaacacgagcaggctactgtcagctcccctcggagaagagctgttcacagccagactggcacagttttctgagaaagactattcaaacagtctcaggaaatcaaatatgcaaagcactgacttctaagtaaaaccacagcagttgaaaagactccaaagaaatgtaagggaaactgccagcaacgcaggcccccaggtgccagttatggctataggtgctacaaaaacacagcaagggtgatgggaaagcattgtaaatgtgcttttaaaaaaaaatactgatgttcctagtgaaagaggcagcttgaaactgagatgtgaacacatcagcttgccctgttaaaagatgaaaatatttgtatcacaaatcttaacttgaaggagtccttgcatcaatttttcttatttcatttctttgagtgtcttaattaaaagaatattttaacttccttggactcattttaaaaaatggaacataaaatacaatgttatgtattattattcccattctacatactatggaatttctcccagtcatttaataaatgtgccttcattttttc

SEQ ID NO: 895 - protein, 766 aa, Homo sapiens
MKTPWKVLLGLLGAAALVTIITVPVVLLNKGTDDATADSRKTYTLTDYLKNTYRLKLYSLRWISDHEYLYKQENNILVFNAEYGNSSVFLENSTFDEFGHSINDYSISPDGQFILLEYNYVKQWRHSYTASYDIYDLNKRQLITEERIPNNTQWVTWSPVGHKLAYVWNNDIYVKIEPNLPSYRITWTGKEDIIYNGITDWVYEEEVFSAYSALWWSPNGTFLAYAQFNDTEVPLIEYSFYSDESLQYPKTVRVPYPKAGAVNPTVKFFVVNTDSLSSVTNATSIQITAPASMLIGDHYLCDVTWATQERISLQWLRRIQNYSVMDICDYDESSGRWNCLVARQHIEMSTTGWVGRFRPSEPHFTLDGNSFYKIISNEEGYRHICYFQIDKKDCTFITKGTWEVIGIEALTSDYLYYISNEYKGMPGGRNLYKIQLSDYTKVTCLSCELNPERCQYYSVSFSKEAKYYQLRCSGPGLPLYTLHSSVNDKGLRVLEDNSALDKMLQNVQMPSKKLDFIILNETKFWYQMILPPHFDKSKKYPLLLDVYAGPCSQKADTVFRLNWATYLASTENIIVASFDGRGSGYQGDKIMHAINRRLGTFEVEDQIEAARQFSKMGFVDNKRIAIWGWSYGGYVTSMVLGSGSGVFKCGIAVAPVSRWEYYDSVYTERYMGLPTPEDNLDHYRNSTVMSRAENFKQVEYLLIHGTADDNVHFQQSAQISKALVDVGVDFQAMWYTDEDHGIASSTAHQHIYTHMSHFIKQCFSLP

SEQ ID NO: 896 - DNA, 1376 bp, Homo sapiens
gtttgaaatcggaaagttggcggggctgcgggagctgagcctagagtccggctgttggctagagtgggcgcggatctggtgtggggaaggcggcgggactcaggcctgcctgcgaagcattgtcctacataatggtagaggacgaactggcacttttcgataaaagcataaatgaattttggaataaattcaaaagtacggacacctcctgtcagatggcgggactaagagatacctacaaggattccatcaaagcatttgcagaaaagctgtctgtgaaattaaaggaagaagaacgaatggttgagatgtttctggaatatcaaaatcagatcagcaggcaaaataagctcattcaagaaaaaaaggataacttgttaaaattgattgctgaagtaaaaggcaaaaagcaggaattggaagtactgactgcaaatatccaggatcttaaggaagaatattctaggaagaaggaaactatttctactgctaataaagcgaatgcagagaggttgaaaaggctgcagaaatctgcagacttgtataaagatcgacttggactagaaattcgaaaaatttatggtgagaaattgcagtttattttcactaatattgaccctaagaatcctgagagcccatttatgttttccttacatctcaatgaagcaagggactatgaagtgtcagatagtgcccctcatcttgagggcctagcagaatttcaagagaatgtaaggaagaccaacaatttttcagcttttcttgccaatgttcggaaagcttttactgccacggtttataattaacatacaaatagtgtatataaaaacggtttatttttcttctctattacatatctcttttttttcttgtttttattattactatactttaagttttagggtacatgtgcacaatgtgcaggtttgttacatatgtatacatgtgccatattggtgtgctgcacccattaactcgtcatttcattaggtatatctcctaatgctatccctcccccctcccccaacccacaacagtccccgttgtgtgatgttccccttcctgtgtccatgtgttctcattgttcaattcccacctaggagtgagaatatgtggtgtttggttttttgtcctttcgatagtttgctgagaatgatggtttccagcttcatccatgttcctacaaaggacatgaactcatccttttttatggctgcatagtattccatggtgtatatgtgccacattttcttaatccagtctatcattgttggacatttgggttggttccaagtctttgctattgtgaatagtgccgaaataaacatacgtgtgcatgtgtctccaaaaaaaaaaaaaaaaaaaaaaaaaaaaaa

SEQ ID NO: 897 - protein, 224 aa, Homo sapiens
MVEDELALFDKSINEFWNKFKSTDTSCQMAGLRDTYKDSIKAFAEKLSVKLKEEERMVEMFLEYQNQISRQNKLIQEKKDNLLKLIAEVKGKKQELEVLTANIQDLKEEYSRKKETISTANKANAERLKRLQKSADLYKDRLGLEIRKIYGEKLQFIFTNIDPKNPESPFMFSLHLNEARDYEVSDSAPHLEGLAEFQENVRKTNNFSAFLANVRKAFTATVYN

SEQ ID NO: 898 - DNA, 1667 bp, Homo sapiens
aagcacaggccaccactctgccctggtccacacaagctccggtagcccatggagccctggcctctcctcctgctctttagcctttgctcagctggcctcgtcctgggctccgaacatgagacccgtctggtggcaaagctatttaaagactacagcagcgtggtgcggccagtggaagaccaccgccaggtcgtggaggtcaccgtgggcctgcagctgatacagctcatcaatgtggatgaagtaaatcagatcgtgacaaccaatgtgcgtctgaaacagcaatgggtggattacaacctaaaatggaatccagatgactatggcggtgtgaaaaaaattcacattccttcagaaaagatctggcgcccagaccttgttctctataacaatgcagatggtgactttgctattgtcaagttcaccaaagtgctcctgcagtacactggccacatcacgtggacacctccagccatctttaaaagctactgtgagatcatcgtcacccactttccctttgatgaacagaactgcagcatgaagctgggcacctggacctacgacggctctgtcgtggccatcaacccggaaagcgaccagccagacctgagcaacttcatggagagcggggagtgggtgatcaaggagtcccggggctggaagcactccgtgacctattcctgctgccccgacaccccctacctggacatcacctaccacttcgtcatgcagcgcctgcccctctacttcatcgtcaacgtcatcatcccctgcctgctcttctccttcttaactggcctggtattctacctgcccacagactcaggggagaagatgactctgagcatctctgtcttactgtctttgactgtgttccttctggtcatcgtggagctgatcccctccacgtccagtgctgtgcccttgattggaaaatacatgctgttcaccatggtgttcgtcattgcctccatcatcatcactgtcatcgtcatcaacacacaccaccgctcacccagcacccatgtcatgcccaactgggtgcggaaggtttttatcgacactatcccaaatatcatgtttttctccacaatgaaaagaccatccagagaaaagcaagacaaaaagatttttacagaagacattgatatctctgacatttctggaaagccagggcctccacccatgggcttccactctcccctgatcaaacaccccgaggtgaaaagtgccatcgagggcatcaagtacatcgcagagaccatgaagtcagaccaggagtctaacaatgcggcggcagagtggaagtacgttgcaatggtgatggaccacatactcctcggagtcttcatgcttgtttgcatcatcggaaccctagccgtgtttgcaggtcgactcattgaattaaatcagcaaggatgagcagaaaatgagctgagcttagctctgccctggaacctaccagagcagagaagggcaggagaggaagatttgtctacttgctccactcgcacttatcaaacgtgttatattccatacttattattgatgataagatttacctttatgtaagtttatggccttgaagtgttttcatattgcttctccctttagttctgctgtctccctgaagagtgaaccctctttagtaaatgaaactaatcact

SEQ ID NO: 899 - protein, 457 aa, Homo sapiens
MEPWPLLLLFSLCSAGLVLGSEHETRLVAKLFKDYSSVVRPVEDHRQVVEVTVGLQLIQLINVDEVNQIVTTNVRLKQQWVDYNLKWNPDDYGGVKKIHIPSEKIWRPDLVLYNNADGDFAIVKFTKVLLQYTGHITWTPPAIFKSYCEIIVTHFPFDEQNCSMKLGTWTYDGSVVAINPESDQPDLSNFMESGEWVIKESRGWKHSVTYSCCPDTPYLDITYHFVMQRLPLYFIVNVIIPCLLFSFLTGLVFYLPTDSGEKMTLSISVLLSLTVFLLVIVELIPSTSSAVPLIGKYMLFTMVFVIASIIITVIVINTHHRSPSTHVMPNWVRKVFIDTIPNIMFFSTMKRPSREKQDKKIFTEDIDISDISGKPGPPPMGFHSPLIKHPEVKSAIEGIKYIAETMKSDQESNNAAAEWKYVAMVMDHILLGVFMLVCIIGTLAVFAGRLIELNQQG

SEQ ID NO: 900 - DNA, 1040 bp, Mus musculus
gttcgcagccgccgccgcgccgccgtcgctctccaacgccagcgccgcctctcgctcgccgagctccagccgaaggagaaggggggtaagtaaggaggtctctgtaccatggctcgtacaaagcagactgcccgcaaatcgaccggtggtaaagcacccaggaagcaactggctacaaaagccgctcgcaagagtgcgccctctactggaggggtgaagaaacctcatcgttacaggcctggtactgtggcgctccgtgaaattagacgttatcagaagtccactgaacttctgattcgcaaacttcccttccagcgtctggtgcgagaaattgctcaggactttaaaacagatctgcgcttccagagcgcagctatcggtgctttgcaggaggcaagtgaggcctatctggttggcctttttgaagacaccaacctgtgtgctatccatgccaaacgtgtaacaattatgccaaaagacatccagctagcacgccgcatacgtggagaacgtgcttaagaatccactatgatgggaaacatttcattctcaaaaaaaaaaaaaaaatttctcttcttcctgttattggtagttctgaacgttagatattttttttccatggggtcaaaaggtacctaagtatatgattgcgagtggaaaaataggggacagaaatcaggtattggcagtttttccattttcatttgtgtgtgaatttttaatataaatgcggagacgtaaagcattaatgcaagttaaaatgtttcagtgaacaagtttcagcggttcaactttataataattataaataaacctgttaaatttttctggacaatgccagcatttggatttttttaaaacaagtaaatttcttattgatggcaactaaatggtgtttgtagcatttttatcatacagtagattccatccattcactatacttttctaactgagttgtcctacatgcaagtacatgtttttaatgttgtctgtcttctgtgctgttcctgtaagtttgctattaaaatacattaaactat

SEQ ID NO: 901 - DNA, 540 bp, Rattus norvegicus
cgccgagctccagccgaaggagaaggggggtaagtaaggaggtctctgtaccatggctcgtacaaagcagactgcccgcaaatcgaccggtggtaaagcacccaggaagcaactggctacaaaagccgctcgcaagagtgcgccctctactggaggggtgaagaaacctcatcgttacaggcctggtactgtggcgctccgtgaaattagacgttatcagaagtccactgaacttctgattcgcaaacttcccttccagcgtctggtgcgagaaattgctcaggactttaaaacagatctgcgcttccagagcgcagctatcggtgctttgcaggaggcaagtgaggcctatctggttggcctttttgaagacaccaacctgtgtgctatccatgccaaacgtgtaacaattatgccaaaagacatccagctagcacgccgcatacgtggagaacgtgcttaagaatccactatgatgggaaacatttcattctctccatggggtcaaaaggtacctaagtatatgattgcgagtggaaa

SEQ ID NO: 902 - protein, 136 aa, Rattus norvegicus
MARTKQTARKSTGGKAPRKQLATKAARKSAPSTGGVKKPHRYRPGTVALREIRRYQKSTELLIRKLPFQRLVREIAQDFKTDLRFQSAAIGALQEASEAYLVGLFEDTNLCAIHAKRVTIMPKDIQLARRIRGERA

SEQ ID NO: 903 - DNA, 1759 bp, Homo sapiens
cagccgttgaggggacgggcctgcgttctctcctccttcctccccgcctccagctgccggcaggacctttctctcgctgccgctgggaccccgtgtcatcgcccaggccgagcacgatgccccctaaaaagggaggtgatggaattaaaccacccccaatcattggaagatttggaacctcactgaaaattggtattgttggattgccaaatgttgggaaatctactttcttcaatgtgttaaccaatagtcaggcttcagcagaaaacttcccgttctgcactattgatcctaatgagagcagagtacctgtgccagatgaaaggtttgactttctttgtcaataccacaaaccagcaagcaaaattcctgcctttctaaatgtggtggatattgctggccttgtgaaaggagctcacaatgggcagggcctggggaatgcttttttatctcatattagtgcctgtgatggcatctttcatctaacacgtgcttttgaagatgatgatatcacgcacgttgaaggaagtgtagatcctattcgagatatagaaataatacatgaagagcttcagcttaaagatgaggaaatgattgggcccattatagataaactagaaaaggtggctgtgagaggaggagataaaaaactaaaacctgaatatgatataatgtgcaaagtaaaatcctgggttatagatcaaaagaaacctgttcgcttctatcatgattggaatgacaaagagattgaagtgttgaataaacacttatttttgacttcaaaaccaatggtctacttggttaatctttctgaaaaagactacattagaaagaaaaacaaatggttgataaaaattaaagagtgggtggacaagtatgacccaggtgctttggtcattccttttagtggggccttggaactcaagttgcaagaattgagtgctgaggagagacagaagtatctggaagcgaacatgacacaaagtgctttgccaaagatcattaaggctgggtttgcagcactccaactagaatactttttcactgcaggcccagatgaagtgcgtgcatggaccatcaggaaagggactaaggctcctcaggctgcaggaaagattcacacagattttgaaaagggattcattatggctgaagtaatgaaatacgaagattttaaagaggaaggttctgaaaatgcagtcaaggctgctggaaagtacagacaacaaggcagaaattatattgttgaagatggagatattatcttcttcaaatttaacacacctcaacaaccgaagaagaaataaaatttagttattgctcagataaacatacaacttccaaaaggcatctgatttttaaaaaattaaaatttctgaaaaccaatgcgacaaataaagttggggagatgggaatctttgacaaacaaattatttttatttgttttaaaattaaaatactgtgtacccccccccccccatgaaatgcaggttcactaaatgtgaacagctttgcttttcacgtgattaagaccctactccaaattgtagaagcttttcaggaaccatattactctcatgatacttcattaatctccatcatgtatgccaagcctgacacatttgacagtgaggacaatgtggcttgctcctttttgaatctacagataatgcatgttttacagtactccagatgtctacactcaataaaacatttgacaaaaccaaaaaaaaaaaaaaaaaaaaaaaaaaaaaaaaaa

SEQ ID NO: 904 - protein, 396 aa, Homo sapiens
MPPKKGGDGIKPPPIIGRFGTSLKIGIVGLPNVGKSTFFNVLTNSQASAENFPFCTIDPNESRVPVPDERFDFLCQYHKPASKIPAFLNVVDIAGLVKGAHNGQGLGNAFLSHISACDGIFHLTRAFEDDDITHVEGSVDPIRDIEIIHEELQLKDEEMIGPIIDKLEKVAVRGGDKKLKPEYDIMCKVKSWVIDQKKPVRFYHDWNDKEIEVLNKHLFLTSKPMVYLVNLSEKDYIRKKNKWLIKIKEWVDKYDPGALVIPFSGALELKLQELSAEERQKYLEANMTQSALPKIIKAGFAALQLEYFFTAGPDEVRAWTIRKGTKAPQAAGKIHTDFEKGFIMAEVMKYEDFKEEGSENAVKAAGKYRQQGRNYIVEDGDIIFFKFNTPQQPKKK

SEQ ID NO: 905 - DNA, 2694 bp, Homo sapiens
ctgccagccgcgctgctgctgctcctcctgctgtgggaccgctgaccgcgcggctgctccgctctccccgctccaagcgccgatctgggcacccgccaccagcatggacgctcgccgcgtgccgcagaaagatctcagagtaaagaagaacttaaagaaattcagatatgtgaagttgatttccatggagacctcgtcatcctctgatgacagttgtgacagctttgcttctgataattttgcaaacacgaaacctaaattcaggtcagatatcagtgaagaactggcaagtgttttttatgaggactctgataatgaatctttctgcggcttttcagaaagtgaggtgcaagatgtattagaccattgtggatttttacagaaaccaaggccagatgtcactaacgaactggccggtatttttcatgccgactctgacgatgaatcattttgcggtttctcagagagtgagatacaagatggaatgaggctgcagtcagttcgggaaggctgtaggacccgcagccagtgcaggcactctggacctctcagggtggcgatgaagtttccagcgcggagtaccaggggagcaaccaacaaaaaagcagagtcccgccagccctcagagaattctgtgactgattccaactccgattcagaagatgaaagtggaatgaattttttggagaaaagggctttaaatataaagcaaaacaaagcaatgcttgcaaaactcatgtctgaattagaaagcttccctggctcgttccgtggaagacatcccctcccaggctccgactcacaatcaaggagaccgcgaaggcgtacattcccgggtgttgcttccaggagaaaccctgaacggagagctcgtcctcttaccaggtcaaggtcccggatcctcgggtcccttgacgctctacccatggaggaggaggaggaagaggataagtacatgttggtgagaaagaggaagaccgtggatggctacatgaatgaagatgacctgcccagaagccgtcgctccagatcatccgtgacccttccgcatataattcgcccagtggaagaaattacagaggaggagttggagaacgtctgcagcaattctcgagagaagatatataaccgttcactgggctctacttgtcatcaatgccgtcagaagactattgataccaaaacaaactgcagaaacccagactgctggggcgttcgaggccagttctgtggcccctgccttcgaaaccgttatggtgaagaggtcagggatgctctgctggatccgaactggcattgcccgccttgtcgaggaatctgcaactgcagtttctgccggcagcgagatggacggtgtgcgactggggtccttgtgtatttagccaaatatcatggctttgggaatgtgcatgcctacttgaaaagcctgaaacaggaatttgaaatgcaagcataatatctggaaaatttgctgcctgccttctacttctcaaatctttcttgtaaaagtttccaattttttcactgaaacctgagttaaaaatcttgatgatcagcctgtttcataagaaactccaatcaagttaatcttagcagacatgtgtttctggagcatcacagaaggtatattgctagttacactttgccctcctgcagtttcttctctgctcccaacccccatctcatagcatccccctctatttccaatgctcctctccaaccgcttagtttctgaatttcttttaaattacagttttatgaaagcatattttatttacttggtgttgaaatagccctcataaaacctaagcacttggaaacacaataatagtattaactaactagatctattgaatttcagagaagagccttctaacttgtttacacaaaaacgagtatgatttagcattcatactagttgaaatttttaatagaatcaaggcacaaaagtcttaaaaccatgtggaaaaattaggtaattattgcagattgatgtctctcaatcccatgtattgcgcttatgttacaagttgttgtcacagttgagacttaatttctcctaatttcttctgcccgaagggtaagtggtgcgtccagcttacacaatcataattcaaaggttggtgggcaatgtaatacttaattaaaataatgatggaagagctatctggagattatgagtaagctgatttgaattttcagtataaaactttagtataattgtagtttgcaaagtttatttcagttcacatgtaaggtattgcaaataaattcttggacaattttgtatggaaacttgatattaaaaactagtctgtggttctttgcagtttcttgtaaatttataaaccaggcacaaggttcaagtttagattttaagcacttttataacaatgataagtgcctttttggagatgtaacttttagcagtttgttaacctgacatctctgccagtctagtttctgggcaggtttcctgtgtcagtattccccctcctctttgcattaatcaaggtatttggtagaggtggaatctaagtgtttgtatgtccaatttacttgcatatgtaaaccattgctgtgctattcaatgtttgatgcataattggaccttgaatcgataagtgtaaatacagcttttgatctgtaatgcttttatacaaaagtttattttaataataaaatgtttgttct

SEQ ID NO: 906 - protein, 450 aa, Homo sapiens
MDARRVPQKDLRVKKNLKKFRYVKLISMETSSSSDDSCDSFASDNFANTKPKFRSDISEELASVFYEDSDNESFCGFSESEVQDVLDHCGFLQKPRPDVTNELAGIFHADSDDESFCGFSESEIQDGMRLQSVREGCRTRSQCRHSGPLRVAMKFPARSTRGATNKKAESRQPSENSVTDSNSDSEDESGMNFLEKRALNIKQNKAMLAKLMSELESFPGSFRGRHPLPGSDSQSRRPRRRTFPGVASRRNPERRARPLTRSRSRILGSLDALPMEEEEEEDKYMLVRKRKTVDGYMNEDDLPRSRRSRSSVTLPHIIRPVEEITEEELENVCSNSREKIYNRSLGSTCHQCRQKTIDTKTNCRNPDCWGVRGQFCGPCLRNRYGEEVRDALLDPNWHCPPCRGICNCSFCRQRDGRCATGVLVYLAKYHGFGNVHAYLKSLKQEFEMQA

SEQ ID NO: 907 - DNA, 426 bp, Homo sapiens
gcaagatggcagaagtagagcagaagaagaagcggaccttccgcaagttcacctaccgcggcgtggacctggaccagctgctggacatgtcctacgagcagctggagcagccgatgcagctgtacagtgcgcgccagcggcggcggctgaaccggggcctgcggcggaagcagcactccctgctgaagcgcctgcgcaaggccaagaaggaggcgccgcccatggagaagcaggaagtggtgaagacgcacctgcgggacatgatcatcctacccgagatggtgggcagcatggtgggcgtctacaacggcaagaccttcacctacaagcccgtaaagcacggccggcccggcatcggggccacccactcctcccgcttcatccctctcaagtaatggctcagctaataaaggcgcacatgactcc

SEQ ID NO: 908 - protein, 129 aa, Homo sapiens
MAEVEQKKKRTFRKFTYRGVDLDQLLDMSYEQLEQPMQLYSARQRRRLNRGLRRKQHSLLKRLRKAKKEAPPMEKQEVVKTHLRDMIILPEMVGSMVGVYNGKTFTYKPVKHGRPGIGATHSSRFIPLK

SEQ ID NO: 909 - DNA, 637 bp, Homo sapiens
gctgaaattaaaagtactgagcttaccaagtgttgataaggatgtagaggaactggaactttcatacactgctggtgggaatataaaatggtataaccattttggaatacaacttggcagtttatttgtttgtttaggttgtttttactcaccactatgctaacgaggaacttggcagtttctttaaaagataaacatatatctctggtccgtgcctccaagatgacaaagaaaagaaggaacaacggtcatgccaaaaagggccgcggccacgtgcatcctattcgctgcactaactgtacccgatgcgtgcccaaggacaaggccattaagaaattcgtcattcgaaacgtagtggaggccgcagcagtcagggacatttctgaagtgagcgtcttcaatgcctatgtgcttcccaagctgtatgtgaagctatattactgtgtgagttgtgcaattcacagcaaagtagtcaggaatcgatctcgtgaagcccacaaagaccgaacacccccaccctgatttagacctgtgggtgctgccccacgtcccccaccaaagcccatgtaaggagctgagttcttaaagactgaagacagactattctctggagaaaaataaaatggaaattgtactt

SEQ ID NO: 910 - DNA, 1157 bp, Homo sapiens
cttttatgttagatgaggaaggggatacccaaacagaggaaacccggccttcagaaacaaaagaagtggagccagagccaactgaggacaaagatttggaagctgatgaagaggacactaggaaaaaagatgcttctgatgatctagatgacttgaacttctttaatcaaaagaaaaagaagaaaaaaactaaaaagatatttgatattgatgaagctgaagaaggtgtaaaggatcttaagattgaaagtgatgttcaagaaccaactgaaccagaggatgaccttgacattatgcttggcaataaaaagaagaaaaagaagaatgttaagttcccagatgaggatgaagctctagaagatgaagacaacaaaaaagatgatggtatctcattcagtaatcagacaggccctgcttgggcaggctcagaaagagactacacatacgaggagctgctgaatcgagtgttcaacatcatgagggaaaagaatccagatatggttgctggggagaaaaggaaatttgtcatgaaacctccacaagtcgtccgagtaggaaccaagaaaacttcttttgtcaactttacagatatctgtaaacttggttctatagatggtaataaccaacttgtaatcaaaggaagattccaacagaaacagatagaaaatgtcttgagaagatatatcaaggagtatgtcacttgtcacacatgccgatcaccggacacaatcctgcagaaggacatgcgactctatttcctacagtgcgaaacttgtcattctagatgttctgttgccattatcaaaattggcttccaggctgtcatgggcaagcgagcacagctccgtgccaaagctaactaatttgctaatcactgattttgcaaagcttgttgtggagatgtggctggacaggtttgccatcagagtggatataccattgtattaaaaacaagataaaaaagctgccaagatttttggcgagtggttggttggtctgaagtccttgcaagacgctgatgctcaagctgttgacatactcattgcctactttaacacctgtcagagaaacgtgatatggggtaaggaggtgcttttttaaaatagttcatagacttctgtaaaatgcaagataaattaaagttattataacagtga

SEQ ID NO: 911 - DNA, 1374 bp, Homo sapiens
ggtgggagaggtatcggcaggggcagcgctgccgccggggcctggggctgacccgtctgacttcccgtccgtgccgagcccactcgagccgcagccatgtctggggacgagatgatttttgatcctactatgagcaagaagaaaaagaagaagaagaagccttttatgttagatgaggaaggggatacccaaacagaggaaacccggccttcagaaacaaaagaagtggagccagagccaactgaggacaaagatttggaagctgatgaagaggacactaggaaaaaagatgcttctgatgatctagatgacttgaacttctttaatcaaaagaaaaagaagaaaaaaactaaaaagatatttgatattgatgaagctgaagaaggtgtaaaggatcttaagattgaaagtgatgttcaagaaccaactgaaccagaggatgaccttgacattatgcttggcaataaaaagaagaaaaagaagaatgttaagttcccagatgaggatgaagctctagaagatgaagacaacaaaaaagatgatggtatctcattcagtaatcagacaggccctgcttgggcaggctcagaaagagactacacatacgaggagctgctgaatcgagtgttcaacatcatgagggaaaagaatccagatatggttgctggggagaaaaggaaatttgtcatgaaacctccacaagtcgtccgagtaggaaccaagaaaacttcttttgtcaactttacagatatctgtaaactattacatcgtcaacccaaacatctccttgcatttttattggctgaattgggtacaagtggttctatagatggtaataaccaacttgtaatcaaaggaagattccaacagaaacagatagaaaatgtcttgagaagatatatcaaggagtatgtcacttgtcacacatgccgatcaccggacacaatcctgcagaaggacatgcgactctatttcctacagtgcgaaacttgtcattctagatgttctgttgccattatcaaaattggcttccaggctgtcatgggcaagcgagcacagctccgtgccaaagctaactaatttgctaatcactgattttgcaaagcttgttgtggagatgtggctggacaggtttgccatcagagtggatataccattgtattaaaaacaagataaaaaagctgccaagatttttggcgagtggttggttggtctgaagtccttgcaagacgctgatgctcaagctgttgacatactcattgcctactttaacacctgtcagagaaacgtgatatggggtaaggaggtgcttttttaaaatagttcatagacttctgtaaaatgcaagataaattaaagttattataacagtga

SEQ ID NO: 912 - DNA, 2041 bp, Homo sapiens
cgagttggaagaggcgagtccggtctcaaaatggaggtaaaaccgccgcccggtcgcccccagcccgactccggccgtcgccgtcgccgccggggggaggagggccatgatccaaaggaaccagagcagttgagaaaactgtttattggtggtctgagctttgaaactacagatgatagtttacgagaacattttgagaaatggggcacactcacagattgtgtggtaatgagagacccccaaacaaaacgttccaggggctttggttttgtgacttattcttgtgttgaagaggtggatgcagcaatgtgtgctcgaccacacaaggttgatgggcgtgtagtggaaccaaagagagctgtttctagagaggattctgtaaagcctggtgcccatctaacagtgaagaaaatttttgttggtggtattaaagaagatacagaagaatataatttgagagactactttgaaaagtatggcaagattgaaaccatagaagttatggaagacaggcagagtggaaaaaagagaggatttgcttttgtaacttttgatgatcatgatacagttgataaaattgttgttcagaaataccacactattaatgggcataattgtgaagtgaaaaaggccctttctaaacaagagatgcagtctgctggatcacagagaggtcgtggaggtggatctggcaattttatgggtcgcggagggaactttggaggtggtggaggtaattttggccgtggtggaaactttggtggaagaggtaggctatggtggtggaggtggtggcagcagaggtagttatggaggaggtgatggtggatataatggatttggaggtgatggtggcaactatggcggtggtcctggttatagtagtagagggggctatggtggtggtggaccaggatatggaaaccaaggtggtggatatggtggaggtggaggatatgatggttacaatgaaggaggaaattttggcggtggtaactatggtggtggtgggaactataatgattttggaaattatagtggacaacagcaatcaaattatggacccatgaaagggggcagttttggtggaagaagctcgggcagtccctatggtggtggttatggatctggtggtggaagtggtggatatggtagcagaaggttctaaaaacagcagaaaagggctacagttcttagcaggagagagagcgaggagttgtcaggaaagctgcaggttactttgagacagtcgtcccaaatgcattagaggaactgtaaaaatctgccacagaaggaacgatgatccatagtcagaaaagttactgcagcttaaacaggaaacccttcttgttcaggactgtcatagccacagtttgcaaaaagtgcagctattgattaatgcaatgtagtgtcaattagatgtacattcctgaggtcttttatctgttgtagctttgtctttttctttttcttttcattacatcaggtatattgccctgtaaattgtggtagtggtaccaggaataaaaaattaaggaatttttaacttttcaatatttgtgtagttcagtttttctacattttagtacagaaactttaacaaaatgcagtttcgaaggtgtttccttgtgagttaacaagtaaagaagatcattgttaattactattttgtatgaattttgctaaagttaactgtaaagaaacacctgctgacttgcagtttaaggggaatctattctccccatttccaaaccatgatatgaatgggcgctgacatgtggagagaatagataatttgtgtgtttgcaatgtgtgttttagataaataggattgggtatttaaattagcatttgtgaatttaatagcattaagattaccttcaaatgaaaaaaaatctcaaaatttctatttggtttttgtgcattttcttttaaaatgtaatcatatgattttagtgtgttagacttgctgagtcctagctgtgtttagaacatctctattctacatttaccttggtcaaatttgaactgctgccatagg

SEQ ID NO: 913 - protein, 118 aa, Homo sapiens
MEGHDPKEREQLRKPFIGGLSFETTDDGLREHFEKWVTLTDCVVMRDPQTKCSRGFGFVTYSYIEEVDAAMCAPPHKVDGCVVEPKRAVSREDFVKPGAHLTVKKIFVGGIKIQKNII

SEQ ID NO: 914 - DNA, 385 bp, Homo sapiens
cttcatcctgcgactagcaccgcgtccggcagcgcctgccctacactcgcccgtgccatggcctccgtctccaagctcgcctgcatctactcggccctcattctgcacgacgatgaggtgacagtcacggaggataagatcaatgccctcattaaagcagccggtgtaaatgttgaacctttttggcctggcttgtttgcaaaggccctggccaacgtcaacattgggagcctcatctgcaatgtaggggctggtggacctgctccagctgaggagaagaaagtggaagcaaagaaagaagaatccaaggagtctgatgatgacatgggccttggtctttttgactaaacctcttttataacgtgttcaataaaaagctgaactt

SEQ ID NO: 915 - protein, 96 aa, Homo sapiens
MASVSKLACIYSALILHDDEVTVTEDKINALIKAAGVNVEPFWPGLFAKALANVNIGSLICNVGAGGPAPAEEKKVEAKKEESKESDDDMGLGLFD

SEQ ID NO: 916 - DNA, 1476 bp, Homo sapiens
acggggcctgggcggsaggggcggtggctggagctcggtaaagctcgtgggaccccattgggggaatttgatccaaggaagcggtgattgccgggggaggagaagctcccagatccttgtgtccacttgcagcgggggaggcggagacgcggagcgggccttttggcgtccactgcgcggctgcaccctgccccatcctgccgggatcatggtctgcggcagcccgggagggatgctgctgctgcgggccgggctgcttgccctggctgctctctgcctgctccgggtgcccggggctcgggctgcagcctgtgagcccgtccgcatccccctgtgcaagtccctgccctggaacatgactaagatgcccaaccacctgcaccacagcactcaggccaacgccatcctggccatcgagcagttcgaaggtctgctgggcacccactgcagccccgatctgctcttcttcctctgtgccatgtacgcgcccatctgcaccattgacttccagcacgagcccatcaacccctgtaagtctgtgtgcgagcgggcccggcagggctgtgagcccatactcatcaagtaccgccactcgtggccggagaacctggcctgcgaggagctgccagtgtacgacaggggcgtgtgcatctctcccgaggccatcgttactgcggacggagctgattttcctatggattctagtaacggaaactgtagaggggcaagcagtgaacgctgtaaatgtaagcctattagagctacacagaagacctatttccggaacaattacaactatgtcattcgggctaaagttaaagagataaagactaagtgccatgatgtgactgcagtagtggaggtgaaggagattctaaagtcctctctggtaaacattccacgggacactgtcaacctctataccagctctggctgcctctgccctccacttaatgttaatgaggaatatatcatcatgggctatgaagatgaggaacgttccagattactcttggtggaaggctctatagctgagaagtggaaggatcgactcggtaaaaaagttaagcgctgggatatgaagcttcgtcatcttggactcagtaaaagtgattctagcaatagtgattccactcagagtcagaagtctggcaggaactcgaacccccggcaagcacgcaactaaatcccgaaatacaaaaagtaacacagtggacttcctattaagacttacttgcattgctggactagcaaaggaaaattgcactattgcacatcatattctattgtttactataaaaatcatgtgataactgattattacttctgtttctcttttggtttctgcttctctcttctctcaacccctttgtaatggtttgggggcagactcttaagtatattgtgagttttctatttcactaatcatgagaaaaactgttcttttgcaataataataaattaaacatgctgtta

SEQ ID NO: 917 - protein, 325 aa, Homo sapiens
MVCGSPGGMLLLRAGLLALAALCLLRVPGARAAACEPVRIPLCKSLPWNMTKMPNHLHHSTQANAILAIEQFEGLLGTHCSPDLLFFLCAMYAPICTIDFQHEPINPCKSVCERARQGCEPILIKYRHSWPENLACEELPVYDRGVCISPEAIVTADGADFPMDSSNGNCRGASSERCKCKPIRATQKTYFRNNYNYVIRAKVKEIKTKCHDVTAVVEVKEILKSSLVNIPRDTVNLYTSSGCLCPPLNVNEEYIIMGYEDEERSRLLLVEGSIAEKWKDRLGKKVKRWDMKLRHLGLSKSDSSNSDSTQSQKSGRNSNPRQARN

SEQ ID NO: 918 - DNA, 1206 bp, Homo sapiens
atgtccatcaggacgacccagaagtcctacagggtgtccacttctggcccccgggccttcagcagccatttctacacaagtgggcctggtgcctccatcagctcctcgagcttctcccaagtgggcagcagcagcttccggggtggcctgggaggaggctacggtggggccagtggcatgggaggcatcaccaccgtcactgtcaaccagagcctgctgagcccccttaacctggaggtggacccacacatccaggcagtgcacactcagaagaaggagcagatcaagaccctcaacactaagtttgccaccttcatatacaagagttacatcaacaaccttaggcagcagctggagactctgggccaggaaaagctgaagctggaggcggagcttggcaacatgcaggggctggtggaggacttcaagaacaagtatgaggatgagatcaataagcgtacagagatggagaatgaatttgtcctcatcaagaaggatgtggatgaagcttacctgaacaaggtagagctggagtctcgcctggaagggctgactgacgaaatcaacttcctcaggcagctgtatgaagaggatatcccggagctgcagtcccagatctcagacacgtctgtggtgctgcccatggacaacagccactccctggacatggacagcatcatcaatgaggtcaagcgcagtacgagatcaccaaccgcagccagctggctccaggcagagattgagggtctcaaaggccagagggcttccctggaggccgccatcgcagatgcggagcagcgcggggagttggccgttaaggatgccagcgccaagctgtctgagctggaggccgccctgcagcaaaccaagcaggacgtggagctgatgaacgacaagctggccctggacattgagatcgccacctacaggcagctgctggagggcgaggagagctggctggagtctgggatgcagagcatgagtatccatacaaagaccatcagcagctatgcaggtggtctgagctcggcctatgggggcctcacaagccccggcctcagctgtggactgggctccagctttggctctggcgcgggctccagttccttcagctgcatcagctacaccagggccgtggttgtgaagaagattgagacccgtgatgggacgctggtgtcagagttctctgacgtcctgcccaagtga

SEQ ID NO: 919 - protein, 401 aa, Homo sapiens
MSIRTTQKSYRVSTSGPRAFSSHFYTSGPGASISSSSFSQVGSSSFRGGLGGGYGGASGMGGITTVTVNQSLLSPLNLEVDPHIQAVHTQKKEQIKTLNTKFATFIYKSYINNLRQQLETLGQEKLKLEAELGNMQGLVEDFKNKYEDEINKRTEMENEFVLIKKDVDEAYLNKVELESRLEGLTDEINFLRQLYEEDIPELQSQISDTSVVLPMDNSHSLDMDSIINEVKRSTRSPTAASWLQAEIEGLKGQRASLEAAIADAEQRGELAVKDASAKLSELEAALQQTKQDVELMNDKLALDIEIATYRQLLEGEESWLESGMQSMSIHTKTISSYAGGLSSAYGGLTSPGLSCGLGSSFGSGAGSSSFSCISYTRAVVVKKIETRDGTLVSEFSDVLPK

SEQ ID NO: 920 - DNA, 1632 bp, Homo sapiens
acgcaaccccataaggtagcacgccgttacccgtggggagcgtttccgccatttttgaaaattaattgggaaggtactggttttaagtgtagttgccgacgcaatggcagcctttgcagtggaacctcaggggcccgcgttaggatctgaaccaatgatgctgggttcacccacatctccaaagccaggagttaatgcccagttcttacctggatttttaatgggggatttgccagctccggtgactccacaacctcgatcaattagtggcccttcagtaggagtaatggaaatgagatcacctttacttgcaggtgggtcaccaccacaaccagttgtaccagctcataaagataaaagtggcgctccaccagttagaagtatatatgatgacatttctagcccaggacttggatcaacacctttaacttcaagaagacagccaaacatttcagtaatgcagagtcctcttgttggagttacatctactcctggaacagggcaaagtatgtttagtccagcaagtatcggtcagccacgaaagacgacattatctcctgcccagttggatcctttttatactcaaggagattctttgacttcagaagatcacctcgatgactcttgggtgactgtatttgggtttcctcaagcatctgcttcctacatattactacaatttgcacagtatgggaatatcttaaaacatgtgatgtctaatacaggaaattggatgcatattcgttatcaatctaaactgcaggctcggaaagccttaagcaaagatgggaggatttttggagaatccatcatgattggtgtaaaaccatgtattgacaaaagtgttatggaaagcagtgacagatgtgctttatcatctccatctttagcctttacaccaccaatcaaaactctaggtacaccaacacaacctggaagtactcctaggatttctaccatgagacctcttgctacagcatacaaagcctctactagtgattatcaggttatttctgacagacaaacgccaaaaaaagatgaaagtcttgtatccaaagcaatggagtacatgtttggctggtagtagaacaccaagaaggaggttgctacactaaaacagagttagcagagtgctgctggttccttcggttagttatataactgttcctgcagtattggatagctatctcatacttcttttagaaagaagcctttttcattaaggatacaacctatttgtagctcgcactttaaaagatgcttgagatacattttaaagaaaactaaaaatccctgtaaataggattttgtgctttctgtaacagtgcatgcttcagcacagaaaactcagcattgattattgtaaattaaataactgaaattgtggtgagacgtcatagtcttcatgagaacgtgggggtgaatttcatgaaggggaactatagttatttctaccgacacaaatattataattagcaatttgaattatggtcttttaatttagatagtatttaatattttaattatccttgtttgtatatgtcctgtcacagagtgtcctcttggtgtattctaaaacgagcattcttttaaaaaacctaaagtttcttgataataaacattgtcaatgat

SEQ ID NO: 921 - DNA, 5489 bp, Homo sapiens
ggctgagttttatgacgggcccggtgctgaagggcagggaacaacttgatggtgctactttgaactgcttttcttttctcctttttgcacaaagagtctcatgtctgatatttagacatgatgagctttgtgcaaaaggggagctggctacttctcgctctgcttcatcccactattattttggcacaacaggaagctgttgaaggaggatgttcccatcttggtcagtcctatgcggatagagatgtctggaagccagaaccatgccaaatatgtgtctgtgactcaggatccgttctctgcgatgacataatatgtgacgatcaagaattagactgccccaacccagaaattccatttggagaatgttgtgcagtttgcccacagcctccaactgctcctactcgccctcctaatggtcaaggacctcaaggccccaagggagatccaggccctcctggtattcctgggagaaatggtgaccctggtattccaggacaaccagggtcccctggttctcctggcccccctggaatctgtgaatcatgccctactggtcctcagaactattctccccagtatgattcatatgatgtcaagtctggagtagcagtaggaggactcgcaggctatcctggaccagctggccccccaggccctcccggtccccctggtacatctggtcatcctggttcccctggatctccaggataccaaggaccccctggtgaacctgggcaagctggtccttcaggccctccaggacctcctggtgctataggtccatctggtcctgctggaaaagatggagaatcaggtagacccggacgacctggagagcgaggattgcctggacctccaggtatcaaaggtccagctgggatacctggattccctggtatgaaaggacacagaggcttcgatggacgaaatggagaaaagggtgaaacaggtgctcctggattaaagggtgaaaatggtcttccaggcgaaaatggagctcctggacccatgggtccaagaggggctcctggtgagcgaggacggccaggacttcctggggctgcaggtgctcggggtaatgacggtgctcgaggcagtgatggtcaaccaggccctcctggtcctcctggaactgccggattccctggatcccctggtgctaagggtgaagttggacctgcagggtctcctggttcaaatggtgcccctggacaaagaggagaacctggacctcagggacacgctggtgctcaaggtcctcctggccctcctgggattaatggtagtcctggtggtaaaggcgaaatgggtcccgctggcattcctggagctcctggactgatgggagcccggggtcctccaggaccagccggtgctaatggtgctcctggactgcgaggtggtgcaggtgagcctggtaagaatggtgccaaaggagagcccggaccacgtggtgaacgcggtgaggctggtattccaggtgttccaggagctaaaggcgaagatggcaaggatggatcacctggagaacctggtgcaaatgggcttccaggagctgcaggagaaaggggtgcccctgggttccgaggacctgctggaccaaatggcatcccaggagaaaagggtcctgctggagagcgtggtgctccaggccctgcagggcccagaggagctgctggagaacctggcagagatggcgtccctggaggtccaggaatgaggggcatgcccggaagtccaggaggaccaggaagtgatgggaaaccagggcctcccggaagtcaaggagaaagtggtcgaccaggtcctcctgggccatctggtccccgaggtcagcctggtgtcatgggcttccccggtcctaaaggaaatgatggtgctcctggtaagaatggagaacgaggtggccctggaggacctggccctcagggtcctcctggaaagaatggtgaaactggacctcaaggacccccagggcctactgggcctggtggtgacaaaggagacacaggaccccctggtccacaaggattacaaggcttgcctggtacaggtggtcctccaggagaaaatggaaaacctggggaaccaggtccaaagggtgatgccggtgcacctggagctccaggaggcaagggtgatgctggtgcccctggtgaacgtggacctcctggattggcaggggccccaggacttagaggtggagctggtccccctggtcccgaaggaggaaagggtgctgctggtcctcctgggccacctggtgctgctggtactcctggtctgcaaggaatgcctggagaaagaggaggtcttggaagtcctggtccaaagggtgacaagggtgaaccaggcggcccaggtgctgatggtgtcccagggaaagatggcccaaggggtcctactggtcctattggtcctcctggcccagctggccagcctggagataagggtgaaggtggtgcccccggacttccaggtatagctggacctcgtggtagccctggtgagagaggtgaaactggccctccaggacctgctggtttccctggtgctcctggacagaatggtgaacctggtggtaaaggagaaagaggggctccgggtgagaaaggtgaaggaggccctcctggagttgcaggaccccctggaggttctggacctgctggtcctcctggtccccaaggtgtcaaaggtgaacgtggcagtcctggtggacctggtgctgctggcttccctggtgctcgtggtcttcctggtcctcctggtagtaatggtaacccaggacccccaggtcccagcggttctccaggcaaggatgggcccccaggtcctgcgggtaacactggtgctcctggcagccctggagtgtctggaccaaaaggtgatgctggccaaccaggagagaagggatcgcctggtgcccagggcccaccaggagctccaggcccacttgggattgctgggatcactggagcacggggtcttgcaggaccaccaggcatgccaggtcctaggggaagccctggccctcagggtgtcaagggtgaaagtgggaaaccaggagctaacggtctcagtggagaacgtggtccccctggaccccagggtcttcctggtctggctggtacagctggtgaacctggaagagatggaaaccctggatcagatggtcttccaggccgagatggatctcctggtggcaagggtgatcgtggtgaaaatggctctcctggtgcccctggcgctcctggtcatccaggcccacctggtcctgtcggtccagctggaaagagtggtgacagaggagaaagtggccctgctggccctgctggtgctcccggtcctgctggttcccgaggtgctcctggtcctcaaggcccacgtggtgacaaaggtgaaacaggtgaacgtggagctgctggcatcaaaggacatcgaggattccctggtaatccaggtgccccaggttctccaggccctgctggtcagcagggtgcaatcggcagtccaggacctgcaggccccagaggacctgttggacccagtggacctcctggcaaagatggaaccagtggacatccaggtcccattggaccaccagggcctcgaggtaacagaggtgaaagaggatctgagggctccccaggccacccagggcaaccaggccctcctggacctcctggtgcccctggtccttgctgtggtggtgttggagccgctgccattgctgggattggaggtgaaaaagctggcggttttgccccgtattatggagatgaaccaatggatttcaaaatcaacaccgatgagattatgacttcactcaagtctgttaatggacaaatagaaagcctcattagtcctgatggttctcgtaaaaaccccgctagaaactgcagagacctgaaattctgccatcctgaactcaagagtggagaatactgggttgaccctaaccaaggatgcaaattggatgctatcaaggtattctgtaatatggaaactggggaaacatgcataagtgccaatcctttgaatgttccacggaaacactggtggacagattctagtgctgagaagaaacacgtttggtttggagagtccatggatggtggttttcagtttagctacggcaatcctgaacttcctgaagatgtccttgatgtgcagctggcattccttcgacttctctccagccgagcttcccagaacatcacatatcactgcaaaaatagcattgcatacatggatcaggccagtggaaatgtaaagaaggccctgaagctgatggggtcaaatgaaggtgaattcaaggctgaaggaaatagcaaattcacctacacagttctggaggatggttgcacgaaacacactggggaatggagcaaaacagtctttgaatatcgaacacgcaaggctgtgagactacctattgtagatattgcaccctatgacattggtggtcctgatcaagaatttggtgtggacgttggccctgtttgctttttataaaccaaactctatctgaaatcccaacaaaaaaaatttaactccatatgtgttcctcttgttctaatcttgtcaaccagtgcaagtgaccgacaaaattccagttatttatttccaaaatgtttggaaacagtataatttgacaaagaaaaatgatacttctctttttttgctgttccaccaaatacaattcaaatgctttttgttttatttttttaccaattccaatttcaaaatgtctcaatggtgctataataaataaacttcaacactctttatgataacaacactgtgttatattctttgaatcctagcccatctgcagagcaatgactgtgctcaccagtaaaagataacctttctttctgaaatagtcaaatacgaaattagaaaagccctccctattttaactacctcaactggtcagaaacacagattgtattctatgagtcccagaagatgaaaaaaattttatacgttgataaaacttataaatttcattgattaatctcctggaagattggtttaaaaagaaaagtgtaatgcaagaatttaaagaaatatttttaaagccacaattattttaatattggatatcaactgcttgtaaaggtgctcctcttttttcttgtcattgctggtcaagattactaatatttgggaaggctttaaagacgcatgttatggtgctaatgtactttcacttttaaactctagatcagaattgttgacttgcattcagaacataaatgcacaaaatctgtacatgtctcccatcagaaagattcattggcatgccacagggattctcctccttcatcctgtaaaggtcaacaataaaaaccaaattatggggctgcttttgtcacactagcatagagaatgtgttgaaatttaactttgtaagcttgtatgtggttgttgatcttttttttccttacagacacccataataaaatatcatattaaaattc

SEQ ID NO: 922 - protein, 1466 aa, Homo sapiens
MMSFVQKGSWLLLALLHPTIILAQQEAVEGGCSHLGQSYADRDVWKPEPCQICVCDSGSVLCDDIICDDQELDCPNPEIPFGECCAVCPQPPTAPTRPPNGQGPQGPKGDPGPPGIPGRNGDPGIPGQPGSPGSPGPPGICESCPTGPQNYSPQYDSYDVKSGVAVGGLAGYPGPAGPPGPPGPPGTSGHPGSPGSPGYQGPPGEPGQAGPSGPPGPPGAIGPSGPAGKDGESGRPGRPGERGLPGPPGIKGPAGIPGFPGMKGHRGFDGRNGEKGETGAPGLKGENGLPGENGAPGPMGPRGAPGERGRPGLPGAAGARGNDGARGSDGQPGPPGPPGTAGFPGSPGAKGEVGPAGSPGSNGAPGQRGEPGPQGHAGAQGPPGPPGINGSPGGKGEMGPAGIPGAPGLMGARGPPGPAGANGAPGLRGGAGEPGKNGAKGEPGPRGERGEAGIPGVPGAKGEDGKDGSPGEPGANGLPGAAGERGAPGFRGPAGPNGIPGEKGPAGERGAPGPAGPRGAAGEPGRDGVPGGPGMRGMPGSPGGPGSDGKPGPPGSQGESGRPGPPGPSGPRGQPGVMGFPGPKGNDGAPGKNGERGGPGGPGPQGPPGKNGETGPQGPPGPTGPGGDKGDTGPPGPQGLQGLPGTGGPPGENGKPGEPGPKGDAGAPGAPGGKGDAGAPGERGPPGLAGAPGLRGGAGPPGPEGGKGAAGPPGPPGAAGTPGLQGMPGERGGLGSPGPKGDKGEPGGPGADGVPGKDGPRGPTGPIGPPGPAGQPGDKGEGGAPGLPGIAGPRGSPGERGETGPPGPAGFPGAPGQNGEPGGKGERGAPGEKGEGGPPGVAGPPGGSGPAGPPGPQGVKGERGSPGGPGAAGFPGARGLPGPPGSNGNPGPPGPSGSPGKDGPPGPAGNTGAPGSPGVSGPKGDAGQPGEKGSPGAQGPPGAPGPLGIAGITGARGLAGPPGMPGPRGSPGPQGVKGESGKPGANGLSGERGPPGPQGLPGLAGTAGEPGRDGNPGSDGLPGRDGSPGGKGDRGENGSPGAPGAPGHPGPPGPVGPAGKSGDRGESGPAGPAGAPGPAGSRGAPGPQGPRGDKGETGERGAAGIKGHRGFPGNPGAPGSPGPAGQQGAIGSPGPAGPRGPVGPSGPPGKDGTSGHPGPIGPPGPRGNRGERGSEGSPGHPGQPGPPGPPGAPGPCCGGVGAAAIAGIGGEKAGGFAPYYGDEPMDFKINTDEIMTSLKSVNGQIESLISPDGSRKNPARNCRDLKFCHPELKSGEYWVDPNQGCKLDAIKVFCNMETGETCISANPLNVPRKHWWTDSSAEKKHVWFGESMDGGFQFSYGNPELPEDVLDVQLAFLRLLSSRASQNITYHCKNSIAYMDQASGNVKKALKLMGSNEGEFKAEGNSKFTYTVLEDGCTKHTGEWSKTVFEYRTRKAVRLPIVDIAPYDIGGPDQEFGVDVGPVCFL

SEQ ID NO: 923 - DNA, 3333 bp, Homo sapiens
acgcgtccgagctggctcagggcgtccgctaggctcggacgacctgctgagcctcccaaaccgcttccataaggctttgcctttccaacttcagctacagtgttagctaagtttggaaagaaggaaaaaagaaaatccctgggccccttttcttttgttctttgccaaagtcgtcgttgtagtctttttgcccaaggctgttgtgtttttagaggtgctatctccagttccttgcactcctgttaacaagcacctcagcgagagcagcagcagcgatagcagccgcagaagagccagcggggtcgcctagtgtcatgaccagggcgggagatcacaaccgccagagaggatgctgtggatccttggccgactacctgacctctgcaaaattccttctctaccttggtcattctctctctacttggggagatcggatgtggcactttgcggtgtctgtgtttctggtagagctctatggaaacagcctccttttgacagcagtctacgggctggtggtggcagggtctgttctggtcctgggagccatcatcggtgactgggtggacaagaatgctagacttaaagtggcccagacctcgctggtggtacagaatgtttcagtcatcctgtgtggaatcatcctgatgatggttttcttacataaacatgagcttctgaccatgtaccatggatgggttctcacttcctgctatatcctgatcatcactattgcaaatattgcaaatttggccagtactgctactgcaatcacaatccaaagggattggattgttgttgttgcaggagaagacagaagcaaactagcaaatatgaatgccacaatacgaaggattgaccagttaaccaacatcttagcccccatggctgttggccagattatgacatttggctccccagtcatcggctgtggctttatttcgggatggaacttggtatccatgtgcgtggagtacgtcctgctctggaaggtttaccagaaaaccccagctctagctgtgaaagctggtcttaaagaagaggaaactgaattgaaacagctgaatttacacaaagatactgagccaaaacccctggagggaactcatctaatgggtgtgaaagactctaacatccatgagcttgaacatgagcaagagcctacttgtgcctcccagatggctgagcccttccgtaccttccgagatggatgggtctcctactacaaccagcctgtgtttctggctggcatgggtcttgctttcctttatatgactgtcctgggctttgactgcatcaccacagggtacgcctacactcagggactgagtggttccatcctcagtattttgatgggagcatcagctataactggaataatgggaactgtagcttttacttggctacgtcgaaaatgtggtttggttcggacaggtctgatctcaggattggcacagctttcctgtttgatcttgtgtgtgatctctgtattcatgcctggaagccccctggacttgtccgtttctccttttgaagatatccgatcaaggttcattcaaggagagtcaattacacctaccaagatacctgaaattacaactgaaatatacatgtctaatgggtctaattctgctaatattgtcccggagacaagtcctgaatctgtgcccataatctctgtcagtctgctgtttgcaggcgtcattgctgctagaatcggtctttggtcctttgatttaactgtgacacagttgctgcaagaaaatgtaattgaatctgaaagaggcattataaatggtgtacagaactccatgaactatcttcttgatcttctgcatttcatcatggtcatcctggctccaaatcctgaagcttttggcttgctcgtattgatttcagtctcctttgtggcaatgggccacattatgtatttccgatttgcccaaaatactctgggaaacaagctctttgcttgcggtcctgatgcaaaagaagttaggaaggaaaatcaagcaaatacatctgttgtttgagacagtttaactgttgctatcctgttactagattatatagagcacatgtgcttattttgtactgcagaattccaataaatggctgggtgttttgctctgtttttaccacagctgtgccttgagaactaaaagctgtttaggaaacctaagtcagcagaaattaactgattaatttcccttatgttgaggcatggaaaaaaaattggaaaagaaaaactcagtttaaatacggagactataatgataacactgaattcccctatttctcatgagtagatacaatcttacgtaaaagagtggttagtcacgtgaattcagttatcatttgacagattcttatctgtactagaattcagatatgtcagttttctgcaaaactcactcttgttcaagactagctaatttatttttttgcatcttagttatttttaaaaacaaattcttcaagtatgaagactaaattttgataactaatattatccttattgatcctattgatcttaaggtatttacatgtatgtggaaaaacaaaacacttaactagaattctctaataaggtttatggtttagcttaaagagcacctttgtatttttattatcagatggggcaacatattgtatgaagcatatgtagcacttcacagcatggttatcatgtaagctgcaggtagaagcaaagctgtaaagtagatttatcacacaatgactgcatacagacttcaaatatgtcaatagtttggtcatagaacctagaagccaaaagccacacagaagggcaagaatcccaatttaactcatgttatcatcattagtgatctgtgttgtagaacatgagggtgtaagccttcagcctggcaagttacatgtagaaagcccacacttgtgaaggttttgttttacaaatcacttgatttaacacactcaggtagaatatttttatttttactgttttatacccagaagttatttctacattgttctacagcaagaatattcataaaagtatccctttcaaatgcctttgagaagaatagaagaaaaaaagtttgtatatattttaaaaaattgttttaaaagtcagtttgcaacatgtctgtaccaagatggtactttgccttaaccgtttatatgcactttcatggagactgcaatacgttgctatgagcactttctttatccttggagtttaatcctttgcttcatctttctacagtatgacataatgatttgctatgttgtaaaatctttgtaaaaaatttctatataaaaatattttgaaaatcttaaaaaaaaaaaaaaaaa

SEQ ID NO: 924 - protein, 571 aa, Homo sapiens
MTRAGDHNRQRGCCGSLADYLTSAKFLLYLGHSLSTWGDRMWHFAVSVFLVELYGNSLLLTAVYGLVVAGSVLVLGAIIGDWVDKNARLKVAQTSLVVQNVSVILCGIILMMVFLHKHELLTMYHGWVLTSCYILIITIANIANLASTATAITIQRDWIVVVAGEDRSKLANMNATIRRIDQLTNILAPMAVGQIMTFGSPVIGCGFISGWNLVSMCVEYVLLWKVYQKTPALAVKAGLKEEETELKQLNLHKDTEPKPLEGTHLMGVKDSNIHELEHEQEPTCASQMAEPFRTFRDGWVSYYNQPVFLAGMGLAFLYMTVLGFDCITTGYAYTQGLSGSILSILMGASAITGIMGTVAFTWLRRKCGLVRTGLISGLAQLSCLILCVISVFMPGSPLDLSVSPFEDIRSRFIQGESITPTKIPEITTEIYMSNGSNSANIVPETSPESVPIISVSLLFAGVIAARIGLWSFDLTVTQLLQENVIESERGIINGVQNSMNYLLDLLHFIMVILAPNPEAFGLLVLISVSFVAMGHIMYFRFAQNTLGNKLFACGPDAKEVRKENQANTSVV

SEQ ID NO: 925 - DNA, 1705 bp, Homo sapiens
ttttgtgaagagacgaagactgagcggttgcggccgcgttgccgacctccagcagcagtcggcttctctacgcagaacccgggagtaggagactcagaatcgaatctcttctccctccccttcttgttttcggctttgtgagaaaccttaccatcaaacacaatggccagcaacgttaccaacaagacagatcctcgttccatgaactcccgtgtattcattgggaatctcaacactcttgtggtcaagaaatctgatgtggaggcaatcttttcgaagtatggcaaaattgtgggctgctctgttcataagggctttgccttctttcagtatgttaatgagagaaatgcccgggctgctgtagcaggagaggatggcagaatgattgctggccaggttttagatattaacctggctgcagagccaaaagtgaaccgaggaaaagcaggtgtgaaacgatctgcagcggagatgtacggctcctcttttgacttggattgtgactttcaacgggactattatgataggatgtacagttacccagcacgtgtacctcctcctcctcctattgctcgggctgtagtgccctcgaaacgtcagcgtgtatcaggaaacacttcacaaaggggcataagtggcttcaattctaagagtggacagcggggatcttccaagtctggaaagttgaaaggagatgaccttcaggccattaagagggagctgacccagataaaacaaaaagtggattctttcctggaaaacctggaaaaaattgaaaaggaacagagcaaacaagcagtagagatgaacaatgttaagtcagaagaggagcagagcagcagctccgtgaagaaagatgagactaatgtgaagatggagtctgaggggggtgcagatgactctgctgaggagggggacctactggatgatgatgataatgaagatggggggatgaccagctggagttgatcaaggatgatgaaaaagaggctgaggaaggagaggatgacagagacagcgccaatggcgaggatgactcttaagcacatagtggggtttagaaatcttatcccattatttctttacctaggcgcttgtctaagatcaaatttttcaccagatcctctcccctagtatcttcagcacatgctcactgttttccccatccttgtccttcccatgttcattaattaattcatattgccccgcgcctagtcccattttcacttcctttgacgctcctagtagttttgttaagtcttaccctgtaatttttgcttttaattttgatacctctttatgacttaacaataaaaatgatgtatggtttttatcaactgtctccaaaataatctcttgttatgcagggagtacagttcttttcattcatacataagttcagtagttgcttccctaactgcaaaggcaatctcatttagttgagtagctcttgaaagcagctttgagttagaagtatgtgtgttacacccccacattagtgtgctgtgtggggcagttcaacacaaatgtaacaatgtatttttgtgaatgagagttggcatgtcaaatgcatcctctagaaaaataattagtgttatagtcttaagatttgttttctaaagttgatactgtgggttatttttgtgaacagcctgatgtttgggaccttttttcctcaaaataaacaagtccttattaaaccagg

SEQ ID NO: 926 - DNA, 945 bp, Homo sapiens
gccgacctccagcagcagtcggcttctctacgcagaacccgggagtaggagactcagaatcgaatctcttctccctccccttcttgttttcggctttgtgagaaaccttaccatcaaacacaatggccagcaacgttaccaacaagacagatcctcgttccatgaactcccgtgtattcattgggaatctcaacactcttgtggtcaagaaatctgatgtggaggcaatcttttcgaagtatggcaaaattgtgggctgctctgttcataagggctttgccttctttcagtatgttaatgagagaaatgcccgggctgctgtagcaggagaggatggcagaatgattgctggccaggttttagatattaacctggctgcagagccaaaagtgaaccgaggaaaagcaggtgtgaaacgatctgcagcggagatgaccttcaggccattaagagggagctgacccagataaaacaaaaagtggattctttcctggaaaacctggaaaaaattgaaaaggaacagagcaaacaagcagtagagatgaacaatgttaagtcagaagaggagcagagcagcagctccgtgaagaaagatgagactaatgtgaagatggagtctgaggggggtgcagatgactctgctgaggagggggacctactggatgatgatgataatgaagatggggggatgaccagctggagttgatcaaggatgaggatgactcttaagcacatagtggggtttagaaatcttatcccattatttctttacctaggcgcttgtctaagatcaaatttttcaccagatcctctcccctagtatcttcagcacatgctcactgttttccccatccttgtccttcccatgttcattaattaattcatattgccccgcgcctagtcccattttcacttcctttgacgctcctagtagttttgttaagt

SEQ ID NO: 927 - DNA, 1014 bp, Homo sapiens
gagacgaagactgagcggttgcggccgcgttgccgacctccccttcttgttttcggctttgtgagaaaccttaccatcaaacacaatggccagcaacgttaccaacaagacagatcctcgttccatgaactcccgtgtattcattgggaatctcaacactcttgtggtcaagaaatctgatgtggaggcaatcttttcgaagtatggcaaaattgtgggctgctctgttcataagggctttgccttctttcagtatgttaatgagagaaatgcccgggctgctgtagcaggagaggatggcagaatgattgctggccaggttttagatattaacctggctgcagagccaaaagtgaaccgaggaaaagcaggtgtgaaacgatctgcagcggagatgtacggctcctcttttgacttggattgtgactttcaacgggactattatgataggatgtacagttacccagcacgtgtacctcctcctcctcctattgctcgggctgtagtgccctcgaaacgtcagcgtgtatcaggaaacacttcacaaaggggcataagtggcttcaattctaagagtggacagcggggatcttccaagtctggaaagttgaaaggagatgaccttcaggccattaagagggagctgacccagataaaacaaaaagtggattctttcctggaaaacctggaaaaaattgaaaaggaacagagcaaacaagcactggagttgatcaaggatgatgaaaaagaggctgaggaaggagaggatgacagagacagcgccaatggcgaggatgactcttaagcacatagtggggtttagaaatcttatcccattatttctttacctaggcgcttgtctaagatcaaatttttcaccagatcctctcccctagtatcttcagcacatgctcactgttttccccatccttgtccttcccatgttcattaattaattcatattgccccgcgcctagtcccattttcacttcctttgacgctcctagtagtttt

SEQ ID NO: 928 - DNA, 2795 bp, Homo sapiens
atcttttagagaaatctcgggttgttaaacagccaagaggtgaaagaaacttccatgtgttctatcagctgctctctggtgcctctgaagagctcctcaataaacttaagcttgagagggatttcagcaggtataactacctgagtctggattcggccaaagtgaatggagtggatgatgcagcaaattttagaaccgtgcggaatgccatgcagattgtgggctttatggatcatgaagctgagtctgtcttggcggtggtggcagcagtgttgaaactggggaacattgagttcaagcccgaatctcgagtgaatggtctagatgaaagcaaaatcaaagataaaaatgagttaaaagaaatttgtgaattgaccggcattgatcaatcagttctagaacgagcattcagtttccgaacagttgaggccaaacaggagaaagtttcaactacactgaatgtggctcaggcttattatgcccgtgatgctctggctaaaaacctctacagcaggttgttttcatggttggtaaatcgaatcaatgaaagcattaaggcacaaacaaaagtgagaaagaaggtcatgggtgttctggacatttatggctttgagattttcgaggacaacagctttgagcagttcattattaattattgtaacgaaaagctgcaacaaatcttcattgaacttactcttaaagaagagcaggaggagtatatacgggaggatatagaatggactcacattgactacttcaataatgctatcatttgtgacctaatagaaaataacacaaatggaatcctggccatgctggatgaagagtgcctcagacctggcacagtcactgatgagaccttcttagaaaagctgaaccaagtatgtgccacccaccagcattttgagagcaggatgagcaagtgctctcggttcctcaatgacacgtctctgcctcacagctgcttcaggatccagcattatgctggaaaggtgctgtaccaggtggaaggattcgttgacaaaaacaatgaccttctctatcgagacctgtcccaagccatgtggaaggccagccatgccctcatcaagtctttgttccccgaagggaatcccgccaagatcaacctgaaaaggcctcctacagcaggctcacagttcaaggcatccgtggccactctgatgaaaaacctacagaccaagaacccaaactatattaggtgtatcaaaccgaatgataaaaaagcagcacacatcttcaacgaggctctagtgtgtcatcagatcaggtacctggggcttttggagaacgtccgagtgcggagggcaggctacgccttcaggcaggcctatgaaccttgcctagaaagatacaaaatgctttgtaaacaaacatggcctcattggaaaggaccagccaggtctggtgtggaggtcctatttaatgaattagaaattcccgtggaagaatactcctttggtagatcaaagatattcatccgaaacccaagaacattattcaaattagaagacctgaggaagcaacgcctggaggacttggccactctcattcagaagatatatcgggggtggaaatgccgcacacacttcctgctaatgaaaaaaagccaaattgtgattgccgcctggtacaggagatatgcgcaacaaaagaggtaccagcagacaaagagttccgccttagtaattcagtcttatatccggggttggaaggctcgaaaaattctgcgggaactgaagcatcaaaagcgctgtaaggaagcagtcacgaccattgctgcatattggcatgggacccaggctcgaagggaattgaaacgcttgaaggaggaggctaggcgtaagcatgcagttgctgtcatttgggcttactggcttggactgaaggtacgtagagaatacaggaaattcttcagagccaatgctggaaagaaaatctatgagtttacgcttcagagaattgtgcaaaaatacttcttggaaatgaaaaataagatgccttccttatctccaatagacaagaattggccctcaagaccttacttattcttggattctactcacaaggagctaaaaaggattttccacttgtggaggtgtaaaaaatacagggaccaattcacagaccagcagaaacttatttatgaagagaaactagaagccagtgaactcttcaaagacaagaaggctttatacccatctagtgttgggcaaccattccaaggggcttacctggaaatcaacaagaaccccaagtataagaaactcaaagatgccattgaagaaaagatcatcattgctgaagtcgtgaacaaaattaaccgtgctaatgggaagagtacatctcggattttcctcttaacaaacaataatctccttcttgctgaccaaaagtctggacaaatcaagtcagaggttccattggtggatgtgaccaaggtatcaatgagctcacaaaatgatggcttcttcgccgtccacctcaaagagggctcagaagcagctagtaaaggagactttctcttcagcagtgatcacctgattgaaatggccaccaagctctatcgcacaactctcagccaaaccaaacagaagctcaatattgagatttccgatgagttcctggtacagttcagacaggacaaagtatgtgtgaagtttattaggaaccctgtagtatgatatttaacaatataggcttcaagaagggctggtcctaagagggggcagaaatgaatgaccaggttaaatccctctacatgtggtttctgtttg

SEQ ID NO: 929 - DNA, 1480 bp, Homo sapiens
aggtcagaaatgtgaattccaggatgcctatgttctgttgagtgaaaagaaaatttctagtatccagtccattgtacctgctcttgaaattgccaatgctcaccgtaagcctttggtcataatcgctgaagatgttgatggagaagctctaagtacactcgtcttgaataggctaaaggttggtcttcaggttgtggcagtcaaggctccagggtttggtgacaatagaaagaaccagcttaaagatatggctattgctactggtggtgcagtgtttggagaagagggattgaccctgaatcttgaagacgttcagcctcatgacttaggaaaagttggagaggtcattgtgaccaaagacgatgccatgctcttaaaaggaaaaggtgacaaggctcaaattgaaaaacgtattcaagaaatcattgagcagttagatgtcacaactagtgaatatgaaaaggaaaaactgaatgaacggcttgcaaaactttcagatggagtggctgtgctgaaggttggtgggacaagtgatgttgaagtgaatgaaaagaaagacagagttacagatgcccttaatgctacaagagctgctgttgaagaaggcattgttttgggagggggttgtgccctccttcgatgcattccagccttggactcattgactccagctaatgaagatcaaaaaattggtatagaaattattaaaagaacactcaaaattccagcaatgaccattgctaagaatgcaggtgttgaaggatctttgatagttgagaaaattatgcaaagttcctcagaagttggttatgatgctatggctggagattttgtgaatatggtggaaaaaggaatcattgacccaacaaaggttgtgagaactgctttattggatgctgctggtgtggcctctctgttaactacagcagaagttgtagtcacagaaattcctaaagaagagaaggaccctggaatgggtgcaatgggtggaatgggaggtggtatgggaggtggcatgttctaactcctagactagtgctttacctttattaatgaactgtgacaggaagcccaaggcagtgttcctcaccaataacttcagagaagtcagttggagaaaatgaagaaaaaggctggctgaaaatcactataaccatcagttactggtttcagttgacaaaatatataatggtttactgctgtcattgtccatgcctacagataatttattttgtatttttgaataaaaaacatttgtacattcctgatactgggtacaagagccatgtaccagtgtactgctttcaacttaaatcactgaggcatttttactactattctgttaaaatcaggattttagtgcttgccaccaccagatgagaagttaagcagcctttctgtggagagtgagaataattgtgtacaaagtagagaagtatccaattatgtgacaacctttgtgtaataaaaatttgtttaa

SEQ ID NO: 930 - DNA, 538 bp, Homo sapiens
gctacactagagcagagtacgagtctgaggcggagggagtaatggcaggacaagcgtttagaaagtttcttccactctttgaccgagtattggttgaaaggagtgctgctgaaactgtaaccaaaggaggcattatgcttccagaaaaatctcaaggaaaagtattgcaagcaacagtagtcgctgttggatcgggttctaaaggaaagggtggagagattcaaccagttagcgtgaaagttggagataaagttcttctcccagaatatggaggcaccaaagtagttctagatgacaaggattatttcctatttagagatggtgacattcttggaaagtacgtagactgaaataagtcactattgaaatggcatcaacatgatgctgcccattccactgaagttctgaaatctttcgtcatgtaaataatttccatatttctcttttataataaactaatgataactaatgacatccagtgtctccaaaattgtttccttgtactgatataaacacttccaaataaaaatatgtaaat

SEQ ID NO: 931 - protein, 102 aa, Homo sapiens
MAGQAFRKFLPLFDRVLVERSAAETVTKGGIMLPEKSQGKVLQATVVAVGSGSKGKGGEIQPVSVKVGDKVLLPEYGGTKVVLDDKDYFLFRDGDILGKYVD

SEQ ID NO: 932 - DNA, 718 bp, Homo sapiens
gatttgacccttgagccgtagggagcgcggcattttctggaaagttctggaaccgagcgaggcccgggaactagactaagccggccggagagggctgagcgcgctagcacaccctgcgcggaaatgcttcggttacccacagtctttcgccagatgagaccggtgtccagggtactggctcctcatctcactcgggcttatgccaaagatgtaaaatttggtgcagatgcccgagccttaatgcttcaaggtgtagaccttttagccgatgctgtggccgttacaatggggccaaagggaagaacagtgattattgagcagagttggggaagtcccaaagtaacaaaagatggtgtgactgttgcaaagtcaattgacttaaaagataaatacaaaaacattggagctaaacttgttcaagatgttgccaataacacaaatgaagaagctggggatggcactaccactgctactgtactggcacgctctatagccaaggaaggcttcgagaagattagcaaaggtgctaatccagtggaaatcaggagaggtaggaatgtctgttgtcaccacagtgttctaaacttcagtgtgctttaaggcattgattccttggacctaaggaaagtgttaacttgaggaaattaatccttctctcattcctcctcttggcctggagaaatcttaaactgggttttcctttagcaagcttggctgt

SEQ ID NO: 933 - DNA, 2308 bp, Homo sapiens
tggaaagagtggaacgagaaaacctttcagactattgtgttctgggccagcgtccaatgcatttaccaaatatgaaccagctggcatccctggggaaaaccaacgaacagtctcctcacagccaaattcaccacagtactccaatccgaaaccaagtgcccgcattacagcccatcatgagccctggtcttctttctccccagcttagtccacaacttgtaaggcaacaaatagccatggcccatctgataaaccaacagattgccgttagccggctcctggctcaccagcatcctcaagccatcaaccagcagttcctgaaccatccacccatccccagagcagttaagccagagccaaccaactcttccgtggaagtctctccagatatctaccagcaagtcagagatgagctgaagagggccagtgtgtcccaagctgtctttgcaagagtggcattcaaccgcacacaggtacaattagcattaaacactgtaattaacagtaatactggggacagaattgagataggttataattatttttatctctttaaaaagctttatggatctcaggacatagaattagattaattaataatccttagttaatgaaacgctattaccattgatccatgcatgaccatgattaattaactaattgattaattttgatgaggtaatggacatctttgaacccaacatgcaactcaggaccccaaatgttactaatgacttgggtatgtactctctcatcctctccatttactgtttgcagatgtaaccctgatcttgaattttgtgattatcagtctcttgccattttttaaaacaaattataaaactatgcatgcccagacaatctatttttttcccttggttttgaacgttataaaagaaataaaattatgttttataattttataagtaaagttttatttaaaaatttataaaaatccttcaaaacataaaagttagatttaagatattgataaaatgataatggatagtttacttttatttttaatgtttgagagaattatatgccaattataacactaaatgttgaaaatgtaaacagttaattcacacgtcttatttttattgagggtgcttatatgtaagacattcttttctgctagtagttcttaaactggagtgtgcatcagaatcacctggagggctgtgaaacacagactgctgggcctcatcccatagtttctgattgagtaagtctgaggttggactcagaaatggacatttctaacaagatcccaggtgattatgatggtactgatccggggccgcatgttgagaaaaacttacctagcccttatatgagtaagaacaaagcagatgtgcataatctcggggagctaacgatctagtggtgaaaaccaggtaaccagataattagagtaaaatgtgaagtgttatgagtaatgttggagagtgtaagcaatagttgtggtggaggttcatggtgagctggaggtgaggaatacttccaggagaatgaatatggtaagccttcaagaaaacagtagattaaaatttcagcaccctcgtaaatgcaaggcaggaagctaagctctatgtgggtgcaaagaggaaaaagataatgggcaagcacatatgtaaacaacactctagagtattaggttgtcaatgggttagaccttgaaggattaataaagtacagcaggcaaagatgatgaagaagaagattattattttaaggtaaagacattcataggaaagatgttgagttaaaaaatgcaggaataatttgaagacataaaacaactgatttctgagaaaaaccctgtgaacgtacagaatgtaggaatgctttcatttatctgatacctgttcagagacacatgataacacacgctgtagatggaccttacaaatgaaagaaagcatgctggattgaaacctcaataatttggaaaatacaggaatgtttccaaatttaatgattacttcagaagttaaggggctgggcacagtggctcatgtctgtagtcctagcactttgggaggccaaggtgggcggatcacttgaggtcaggagttcaagaccagcctgggcaagatggtaaaacaccatctctactaaaacagaacaaaacaaaaaaattagctgggcgtggtgatgcgtgcctgtagtctcagctactcaggaggctgaggcagaagaatcccttgaacccaggaggcggaggctgcagtgagccgagatcatgccactgcactccagcctgagtgagagtgaaactccatctcaaaaaaaaaaaaaaaaa

SEQ ID NO: 934 - DNA, 2998 bp, Homo sapiens
gagaggagacaccgccgcagttgccggtacatcggggatttctggctctttcctcttcgccttaaattcgggtgtcttttatgaataatcaaaagcagcaaaagccaacgctatcaggccagcgttttaaaactagaaaaagagatgaaaaagagaggtttgaccctactcagtttcaagactgtattattcaaggcttaactgaaaccggtactgatttggaagcagtagctaagtttcttgatgcttctggagcaaaacttgattaccgtcgatatgcagaaacactctttgacattctggtggctggtggaatgctggccccaggtggtacactggcagatgacatgatgcgtacagatgtctgcgtgtttgcagcccaagaagatctagagaccatgcaagcatttgctcaggtttttaacaagttaatcaggcgctacaaatacctggagaaaggttttgaagatgaagtaaaaaagctgctgctgttcttgaagggtttttcagagtcggagaggaacaagctagctatgttgactggtgttcttctggctaatggaacacttaatgcatccattcttaatagcctttataatgaaaatttggttaaagaaggagtttcagcagcttttgctgtgaagctctttaaatcatggataaatgaaaaagatatcaatgcagtagctgcaagtcttcggaaagtcagcatggataacagactgatggaactctttcctgccaataagcaaagtgttgaacacttcacaaaatattttactgaggcaggcttgaaagagctttcagaatatgttcggaatcagcaaaccatcggagctcgtaaggagctccagaaagaacttcaagaacagatgtcccgtggtgatccatttaaggatataattttatatgtcaaggaggagatgaaaaaaaacaacatcccagagccagttgtcatcggaatagtctggtcaagtgtaatgagcactgtggaatggaacaaaaaagaggagcttgtagcagagcaagccatcaagcacttgaagcaatacagccctctacttgctgcctttactactcaaggtcagtctgagctgactctgttactgaagattcaggagtattgctatgacaacattcatttcatgaaagccttccagaaaatagtggtgcttttttataaagctgaagtcctgagcgaggagcccattttgaagtggtataaagatgcacatgttgcaaaggggaagagtgttttccttgagcaaatgaaaaagtttgtagaatggctcaaaaatgctgaagaagaatctgaatctgaagctgaagaaggtgactgaattttgaaactacaccctcagtaaagcaaacaggagttgtagataaaatgtcatgtctcatgtgtcctggttcttacatcttcctacctccctgtatcaagcatgatataagggctttcatggcaaattttattttaactgtttctatggttgctggaaatgttgggtttagtttctaaaaccatgttttaagtagctacaggagctatagatttgaatctaatgttgcattagtcttttcagttatcttctacctcctgtattttctactgtaataatgtaatttaaggccttccacaatgaacagttcactttattccctgggttttctataaacagttttaaggatatgatttggttaaaaaataatttgttataaaaattctgtttgcaaattaaactggaaaagtatccagagtctcaaaaggcaatgatttgtgagataatatggcatgcccggagccctgctcatcaatgaaaaacccatatgtaataatcgaattcatttaacatgaatcttgagtacgtggaccattgcttgcatgttaactttttgttttgttttgttttgttttgttttgcatttttaactccagatatcctaaagctcaattgtttggtctctggttttcatccttagagaagccatggagaacagacttgaaaagtttaggaaatcataatgtggcagaggtggtgggaagaagaaagttgagctttttccccttgagaaacttctgcatttagtttctatctttccaggcaaaacaaatgggtattcttttcatacaaccattttcaaatgaaccttagaaaagtcttaacatttaaggtattttatgcacagaatacacttagattgataggaaagaactcgtaatggagtttgagtaaagaaaatgactgatgtactaaacccagtaaaaattgttgaaaatgttaaaggtcagcatgttctaattgggaatctagatatagcttagatttcctattggcttagagtatttgctataacaaatgaagtgcaatgacaattatatattcctactcggtcatactggactggcttcgttctcttaatatactcagtaatgactcaagcctctggctattaacataccctagttgccgttttttaattgccatgagccaaatacttcttggtatacaattgatccatttattttaatggctgccttttcattttcatcttttcttgctgctacccatctatgtatgtagtcattggggggaaaatgtagccacattttttatgggaagactttgtgttaaaagtgaacattttgaaggtttttaactggtgaaactagcctggaataatgccaccagagactgagtggaaatcgccccttttgaaggtgccattcttatgagccaaaagtttgtcatttaaaagttcattttgagggaataacatgtaatataatttgaaataaaggtatagtaaccttaaaaagaacattataactgattgttgtgaatggggtgaatttgttaaaatgagtaactttgataaagtttttcatgcacaggcaaaatgtattcactagatttctacgtagtgatctgcttttactttgtaatttgtagttctcaaaagacttttttttaaaaaaataaagtccatacttacactt

SEQ ID NO: 935 - protein, 419 aa, Homo sapiens
MNNQKQQKPTLSGQRFKTRKRDEKERFDPTQFQDCIIQGLTETGTDLEAVAKFLDASGAKLDYRRYAETLFDILVAGGMLAPGGTLADDMMRTDVCVFAAQEDLETMQAFAQVFNKLIRRYKYLEKGFEDEVKKLLLFLKGFSESERNKLAMLTGVLLANGTLNASILNSLYNENLVKEGVSAAFAVKLFKSWINEKDINAVAASLRKVSMDNRLMELFPANKQSVEHFTKYFTEAGLKELSEYVRNQQTIGARKELQKELQEQMSRGDPFKDIILYVKEEMKKNNIPEPVVIGIVWSSVMSTVEWNKKEELVAEQAIKHLKQYSPLLAAFTTQGQSELTLLLKIQEYCYDNIHFMKAFQKIVVLFYKAEVLSEEPILKWYKDAHVAKGKSVFLEQMKKFVEWLKNAEEESESEAEEGD

SEQ ID NO: 936 - DNA, 1435 bp, Homo sapiens
acgcagagaagtttccgggactgaaacttgaactttacctgatttctgtatgttgtcatcttgcgtacgcccagtccccacgacagtccggtttgtagattccctgatctgcaattcttcccgttccttcatggatttgaaggctctcctttcttccttgaatgactttgcatccctctcgtttgctgagagttgggacaatgttggattactggtggaaccaagcccaccacatactgtaaatacactcttcctgaccaatgacctgactgaggaagtgatggaggaggtgctgcaaaagaaggcagacctcattctctcctaccatccgcctatcttccgacccatgaagcgcataacctggaacacatggaaggagcgcctggtgatccgggctctggagaacagagtcggtatctactctcctcatacagcctatgatgctgcgccccagggcgtcaacaactggttggctaaagggcttggagcttgtacctccaggcccatacatccttccaaagctcccaactaccctacagagggaaaccaccgagtagaattcaacgttaactacacccaagacctggacaaagtcatgtctgcagtgaaaggaattgacggtgtttctgtcacttctttttctgctaggactggtaatgaggaacaaacacggattaatctgaattgtactcagaaggctttgatgcaggtggtagattttctttcccggaacaaacaactttatcagaagacggaaattctgtcactggagaagcctttgcttctacatactggaatgggacggttatgcacactggatgaatctgtctccctggcaaccatgattgatcgaataaaaagacacctaaaactatctcatattcgcttagcccttggggtggggagaaccttagagtctcaagtcaaagtcgtggccctgtgtgctggttctgggagcagcgttctgcagggtgttgaggctgacctttacctcacaggtgagatgtcccatcatgatactttggatgctgcttcccaaggaataaatgtcatcctctgtgaacacagcaacactgaacgaggctttctttctgaccttcgagatatgctggattctcacttggagaataagataaatattatcctatcagagactgacagggaccctcttcaggtggtataattgcagaaacatcaggataacacattctacaaatcagctggatgccaacttaaatttgtaacatgagtcagtgggactggtgtgcttccagagagtgtcttcgagggtatcatcatttccggtttgttaatcttattcaccaaatgttctatcgctcgtaaggtaaaactgtaatataactaccatattaaataacaaatgttcattataaactctaggaaagattgaataaaatctgtttacttaacattc

SEQ ID NO: 937 - protein, 377 aa, Homo sapiens
MLSSCVRPVPTTVRFVDSLICNSSRSFMDLKALLSSLNDFASLSFAESWDNVGLLVEPSPPHTVNTLFLTNDLTEEVMEEVLQKKADLILSYHPPIFRPMKRITWNTWKERLVIRALENRVGIYSPHTAYDAAPQGVNNWLAKGLGACTSRPIHPSKAPNYPTEGNHRVEFNVNYTQDLDKVMSAVKGIDGVSVTSFSARTGNEEQTRINLNCTQKALMQVVDFLSRNKQLYQKTEILSLEKPLLLHTGMGRLCTLDESVSLATMIDRIKRHLKLSHIRLALGVGRTLESQVKVVALCAGSGSSVLQGVEADLYLTGEMSHHDTLDAASQGINVILCEHSNTERGFLSDLRDMLDSHLENKINIILSETDRDPLQVV

SEQ ID NO: 938 - DNA, 1735 bp, Homo sapiens
ctcctttctgcccgtggacgccgccgaagaagcatcgttaaagtctctcttcaccctgccgtcatgtctaagtcagagtctcctaaagagcccgaacagctgaggaagctcttcattggagggttgagctttgaaacaaccgatgagagcctgaggagccattttgagcaacggggaacgctcacagactgtgtggtaatgagagatccaaacaccaagtgctccacgggctttgggtttgtcacatatgccactgtgaaggaggtggaggcagctatgaatgcaaggccacagaaggtggatggaagagtcgtggaaccaaagagagctgtctcgagagaagattctcaaagaccaggtgcccacttaactgtgaaaaagatatttgttggtggcattaaagaagacactgaagaacatcacctaagagattattttgaacagtatggaaaaattgaagtgattgaaatcatgactgaccgaggcagtgggaagaaaaggggctttgcctttgtaacctttgatgaccatgactccgtggataagattgtcattcagaaataccacactgtgaatggccacaactgtgaagttagaaaagccctgtcaaagcaagagatgactagtgcttcatctagccaaagaggtcgaagtggttctggaaactttggtggtggtcgtggaggtggtttcagtgggaatgacaactttggtcatggaagaaacttcagtggtcatggtggctttggtggcagccgtggtggtggtggatatgatggcagtggggatggctataatggatttggtaatgatggaagccattttggaggtggtggaagctacaatgattttggcaattacaaaaatcagtcttcaaattttggacccgtgaagggaggaaattttggaggcagaagctctggcccctatggcggtggaggccaatactttgcaaaaccacgaaactaaggtggctatggcggttccagcagtagcagtagctatggcagtggcagaagattttaattaggaaacaaagcttagcaggagaggagagccagagaagtgacagggaagctacaggttacaacagatttgtgaactcagccaagcacagtggtggcagggcctagctgctacaaagaagacatgttttagacaaatactcatgtgtatgggcaaaaaactcgaggactgtatttgtgactaattgtataacaggttattttagtttctgttctgtggaaagtgtaaagcattccaacaaagggttttaatgtagatttttttttttgcacccatgctgttgattgctaaatgtaatagtctgatcgtgacgctgaataaatgtctttttttttaatgtgctgtgtaaagttagtctactctgaagccatcttggtaaatttccccaacagtgtgaagttagaattccttcagggtgatgccaggttctatttggaatttatatacaacctgcttgggtggagaagctattgtcttcggaaaccttggtgtagttgaactgatagttactgttgtgacctgaagttcaccattaaaagggattacccaagcaaaatcatggaattattggttataaaagtgattgttggcacatcctatgcaatatatctaaattgaataatggtaccagataaaattatagatgggaatgaagcttgtgtatcatccattatcatgtgtaatcaataaacgatttaattctctggaa

SEQ ID NO: 939 - protein, 320 aa, Homo sapiens
MSKSESPKEPEQLRKLFIGGLSFETTDESLRSHFEQRGTLTDCVVMRDPNTKCSTGFGFVTYATVKEVEAAMNARPQKVDGRVVEPKRAVSREDSQRPGAHLTVKKIFVGGIKEDTEEHHLRDYFEQYGKIEVIEIMTDRGSGKKRGFAFVTFDDHDSVDKIVIQKYHTVNGHNCEVRKALSKQEMTSASSSQRGRSGSGNFGGGRGGGFSGNDNFGHGRNFSGHGGFGGSRGGGGYDGSGDGYNGFGNDGSHFGGGGSYNDFGNYKNQSSNFGPVKGGNFGGRSSGPYGGGGQYFAKPRNRWLWRFQQVAVAMAVAEDF

SEQ ID NO: 940 - DNA, 598 bp, Mus musculus
gaggcgtagcggaagttactgcagccgcggtgttgtgctgtggggaagggagaaggatttgtaaaccccggagcgaggttctgcttacccgaggccgctgctgtgcggagacccccgggtgaagccaccgtcatcatgtctgaccaggaggcaaaaccttcaactgaggacttgggggataagaaggaaggtgaatatattaaactcaaagtcattggacaggatagcagtgagattcacttcaaagtgaaaatgacaacacatctcaagaaactcaaagaatcatactgtcaaagacagggtgttccaatgaattcactcaggtttctctttgagggtcagagaattgctgataatcatactccaaaagaactgggaatggaggaagaagatgtgattgaagtttatcaggaacaaacggggggtcattcaacagtttagatattctttttattttttttcttttccctcaatccttttttatttttaaaaatagttcttttgtaatgtggtgttcaaaacggaattgttattcattattgtttgttttcattgtgctgatttttggtgatcaagcctcagtccccttcatattacc

SEQ ID NO: 941 - DNA, 1590 bp, Homo sapiens
atgttggtgctgtttgaaacgtctgtgggttacgccatctttaaggttctaaatgagaagaaacttcaagaggttgatagtttatggaaagaatttgaaactccagagaaagcaaacaaaatagtaaagctaaaacattttgagaaatttcaggatacagcagaagcattagcagcattcacagctctgatggagggcaaaatcaataagcagctgaaaaaagttctgaagaaaatagtaaaagaagcccatgaaccgctggcagtagctgatgctaaactaggaggggtcataaaggaaaagctgaatctcagttgtatccatagtcctgttgttaatgaacttatgagaggaattcgttcacaaatggatggattaatccctggggtagaaccacgtgaaatggcagctatgtgtcttggattggctcacagcctgtctcgatatagattgaagtttagcgctgataaagtagacacaatgattgttcaggcaatttccttgttagatgacttggataaagaactaaacaactacattatgcgatgtagagaatggtatggctggcatttccctgaattaggaaaaattatttcagataatttaacatactgcaagtgtttacagaaagttggcgataggaagaactatgcctctgccaagctttctgagttgctgccagaagaagttgaagcagaagtgaaagcagctgcagagatatcaatgggaacagaggtttcagaagaagatatttgcaatattctgcatctttgcacccaggtgattgaaatctctgaatatcgaacccagctctatgaatatctacaaaatcgaatgatggccattgcacccaatgttacagtcatggttggggaattagttggagcacggcttattgctcatgcaggttctcttttaaatttggccaagcatgcagcttctaccgttcagattcttggagctgaaaaggcacttttcagagccctcaaatctagacgggatacccctaagtatggtctcatttatcatgcttcactcgtgggccagacaagtcccaaacacaaaggaaagatttctcgaatgctggcagccaaaaccgttttggctatccgttatgatgcttttggtgaggattcaagttctgcaatgggagttgagaacagagccaaattagaggccaggttgagaactttggaagacagagggataagaaaaataagtggaacaggaaaagcattagcaaaaacagaaaaatatgaacacaaaagtgaagtgaagacttacgatccttctggtgactccacacttccaacctgctctaaaaaacgcaaaatagaacaggtagataaagaggatgaaattactgaaaagaaagccaaaaaagccaagattaaagttaaagttgaagaagaggaagaagaaaaagtggcagaagaagaagaaacatctgtgaagaagaagaagaaaaggggtaaaaagaaacacattaaggaagaaccactttctgaggaagaaccatgtaccagcacagcaattgctagtccagagaaaaagaagaaaaagaaaaaaaagagagagaacgaggattaa

SEQ ID NO: 942 - DNA, 560 bp, Homo sapiens
ggaggccaaggtgcaactttcttcggtcgtcccgaatccgggttcatccaacaccagccgcctccaccatgccgccgaagttcgacggtgccacttctgccctggcccccaagatcggccccctgggtctgtctccaaaaaaggttggtgatgacattgccaaggcaacgggtgactggaagggcctgaggattacagtgaaactgaccattcagaacagacaggcccagattgaggtggtgccttctgcctctgccctgatcatcaaagccctcaaggaaccaccaagagacagaaagaaacagaaaaacattaaacacagtgggaatatcacttttgatgagatcgtcaacattgttcgacagatgcggcaccgatccttagccagagaactctctggaaccattaaagagatcctggggactgcccagtctgtgggctgtaatgttgatggccgccatcctcatgacatcatcgatgacatcaacagtggtgctgtggaatgcccagccagttaagcacaaaggaaaatatttcaataaaggatcatttgacaactg

SEQ ID NO: 943 - protein, 149 aa, Homo sapiens
MPPKFDGATSALAPKIGPLGLSPKKVGDDIAKATGDWKGLRITVKLTIQNRQAQIEVVPSASALIIKALKEPPRDRKKQKNIKHSGNITFDEIVNIVRQMRHRSLARELSGTIKEILGTAQSVGCNVDGRHPHDIIDDINSGAVECPAS

SEQ ID NO: 944 - DNA, 1338 bp, Homo sapiens
atggaagatttgatggacatggacatgagcctcctgaggccccagaactatcttttcggttgtgaactaaaggccgacaaagatgatcactttaaggtggataatgatgaaaatgagaccatcagtttaggggctggtgcaagggatgaattgcacattgttgaagcagaggccatgaatgatgaaggcagtccaattaaagtcacactggcaactttgaaaatgtctgtacagccaactgcttcccttgggggctttgaaatcacaccaccagtggtcttacagttgaagtgtggttcagggccagtgcatattagtagacagtgcttagtagctgtggaggaagatgcagagtcagaagatgaagaggaggaggatgtgaacctcttaagcatatctggaaagcggtctgcctctggaggtggtagcaaggcgcccagctaccgcgcccactggtcagaagtgtggccagcgtctatgcaggccctgggagctcagggtggcttggggtccaggagcatggccgcaggtatggccgggggtctggcaggaatgggaggcatccagaacgagaaggagaccatgcaaagcctgaatgaccgcctggcctcctacctggacagagtgaggagcctggagatgggaaactggaagctggagagcaaaatctgggagcacctggagaagaagggaccccaggtcagagactggggccactacttcaagaccatcgaggaggacctgactcagatcttcacaagtactgtggacaatacctgcatcattctgcagatcgacaatgcccatcttgctgctgatgactttagagtcaagtatgagacagagccggccacgtgccagtctgtggagaacgacatccatgggctccacaaggtcattgatgacaccagtgtcactcagctgcagctagagacagagatcgaggctctcaaggaggagctgctcttcctgaagaagaaccacgaagaggaagtaaaaggcctacaagcccagattgccagctctgttgaccatggaggccttggagatcgacctggactggatgaaaaatctggaggccagcttggagaacagcctgaagggggggtggaggcctgctacaccctgcagatggaacaactcaatgggatcctgctgcacctggagtcagagctggcacagacctgggcagagggacagggccaggcccaggagtaccaggccctgccaaacatcaagcagcaactccacgcaaaccatccaaaagactcccacctgccaacagtggatggcaaagtggtgtctgagaccaatgacaccaaagttctgagacattaa

SEQ ID NO: 945 - protein, 445 aa, Homo sapiens [sequence omitted]

SEQ ID NO: 946 - DNA, 2503 bp, Homo sapiens
gacagtttagcagaacagcctccgcggctccggggagaagcaatatgttaaggatacctgtaagaaaggccttagtaggcctttctaagtctcctaaaggatgtgttcgaacaactgccacagcagcaagcaacttgattgaagtatttgttgatggtcagtctgtcatggtggaaccgggaacgaccgtcctccaagcttgtgagaaggttggcatgcagatccctcgattctgttatcatgaaaggttgtctgttgctggaaactgcaggatgtgccttgttgaaattgagaaagcccctaaggttgtagctgcttgtgccatgccagtaatgaagggttggaatatcctaacaaactcagaaaaatccaaaaaagccagggaaggtgtgatggagttcttattagcaaatcacccattggactgtcctatttgtgaccagggaggtgaatgtgatctgcaggaccagtccatgatgtttggaaatgataggagccgatttttagaggggaagcgtgctgtggaagacaagaacattgggccattggtaaagaccatcatgacaagatgtatacagtgtactcgctgcatcaggtttgcaagtgagattgcaggagtagatgatttgggaacaacaggcagaggaaatgatatgcaagttggcacatacattgaaaagatgttcatgtctgaactgtctgggaatatcattgatatctgccctgtaggtgccctaacctctaagccctatgcctttactgcccggccttgggaaacaagaaagacagaatccattgatgtaatggatgcggttggaagtaatattgtggttagcacaagaactggagaagtgatgaggattttgccacgtatgcatgaggacatcaatgaagagtggatctctgataaaaccagatttgcctatgatgggctaaaacgtcaaagacttaccgagccaatggtcagaaatgaaaaagggcttttaacctatacttcttgggaggatgcgctctctcgcgtagctggaatgttgcagagttttcaaggcaaagatgtggcagcaattgcaggtggcttggtggatgctgaagccctggtagctctcaaagatttgcttaatagagtggactctgacaccttatgcactgaagaggtcttccccactgcaggagctggcacagatttgcgttccaattatcttcttaatactacaattgctggtgtggaagaggcagatgttgttcttctggttggtacaaacccacgttttgaggcaccactgtttaatgctagaattcgaaagagctggctgcataatgacttaaaagtggcccttataggcagtccagtggacctcacttacacatatgaccacctgggagactcccccaaaattcttcaagacattgcttcgggaagccatccatttagccaggtcctaaaggaagctaaaaaaccaatggtggttttaggcagttctgcactccaaagaaatgatggagcagcaattcttgcagctgtttctagcattgcacaaaagattcggatgactagtggtgttactggtgattggaaagttatgaatatccttcataggattgcaagtcaagtagctgctttggaccttggctataagcctggggtggaagcaattcggaagaaccctcccaaggtgctgtttctcctgggagcagatggaggttgtatcacacgacaggatttgccaaaggattgtttcattatttatcaaggacatcatggtgatgttggggctcccatagctgatgttattctcccaggagctgcttacacagagaagtctgctacatatgtcaacactgagggtagagctcagcagactaaggtagcagtgacacctcctggcttggcaagagaagactggaaaattataagagcactctctgagattgctggaatgactcttccatatgatactctggatcaagtaaggaacagattggaagaagtctctcctaatcttgttcgatatgatgatattgaaggggctaattacttccagcaagcaaatgagctctcaaagctagtgaaccagcagcttcttgctgacccacttgttccacctcagctaactataaaagacttctacatgacagattcaattagcagagcctcacagacaatggccaaatgtgtcaaagctgtcacagagggtgcccaggcagtagaggaaccatccatatgctgaagcttctactaggatcccagttttgccgcagataattaatggacaactgtagtgcagtgatcctttacaggtttatttctttgtaaaaaaaaataataataatttgaatcatgtaatatttaaggttatactatgcctatttgaaaatgatattagttatcaactttgcagtttgaaaaacatgtattgtgtgtaaaggttaaataacaaaactatgcagatgctcttaaaagcattgataacctttgtgacgaacataaagagatccttaaatt

SEQ ID NO: 947 - protein, 727 aa, Homo sapiens
MLRIPVRKALVGLSKSPKGCVRTTATAASNLIEVFVDGQSVMVEPGTTVLQACEKVGMQIPRFCYHERLSVAGNCRMCLVEIEKAPKVVAACAMPVMKGWNILTNSEKSKKAREGVMEFLLANHPLDCPICDQGGECDLQDQSMMFGNDRSRFLEGKRAVEDKNIGPLVKTIMTRCIQCTRCIRFASEIAGVDDLGTTGRGNDMQVGTYIEKMFMSELSGNIIDICPVGALTSKPYAFTARPWETRKTESIDVMDAVGSNIVVSTRTGEVMRILPRMHEDINEEWISDKTRFAYDGLKRQRLTEPMVRNEKGLLTYTSWEDALSRVAGMLQSFQGKDVAAIAGGLVDAEALVALKDLLNRVDSDTLCTEEVFPTAGAGTDLRSNYLLNTTIAGVEEADVVLLVGTNPRFEAPLFNARIRKSWLHNDLKVALIGSPVDLTYTYDHLGDSPKILQDIASGSHPFSQVLKEAKKPMVVLGSSALQRNDGAAILAAVSSIAQKIRMTSGVTGDWKVMNILHRIASQVAALDLGYKPGVEAIRKNPPKVLFLLGADGGCITRQDLPKDCFIIYQGHHGDVGAPIADVILPGAAYTEKSATYVNTEGRAQQTKVAVTPPGLAREDWKIIRALSEIAGMTLPYDTLDQVRNRLEEVSPNLVRYDDIEGANYFQQANELSKLVNQQLLADPLVPPQLTIKDFYMTDSISRASQTMAKCVKAVTEGAQAVEEPSIC

SEQ ID NO: 948 - DNA, 821 bp, Homo sapiens
gcctcgaggcgggcgtcttcggtcatctccggcgcttctagggctggttcccgtcatcttcgggagccgtggagctctcggatacagccgacaccatgggtttcggagacctgaaaagccctgccggcctccaggtgctcaacgattacctggcggacaagagctacatcgaggggtatgtgccatcacaagcagatgtggcagtatttgaagccgtgtccagcccaccgcctgccgacttgtgtcatgccctacgttggtataatcacatcaagtcttacgaaaaggaaaaggccagcctgccaggagtgaagaaagctttgggcaaatatggtcctgccgatgtggaagacactacaggaagtggagctacagatagtaaagatgatgatgacattgacctctttggatctgatgatgaggaggaaagtgaagaagcaaagaggctaagggaagaacgtcttgcacaatatgaatcaaagaaagccaaaaaacctgcacttgttgccaagtcttccatcttactagatgtgaaaccttgggatgatgagacagatatggcgaaattagaggagtgcgtcagaagcattcaagcagacggcttagtctggggctcatctaaactagttccagtgggatacggaattaagaaacttcaaatacagtgtgtagttgaagatgataaagttggaacagatatgctggaggagcagatcactgcttttgaggactatgtgcagtccatggatgtggctgctttcaacaagatctaaaatccatcctggatcatggcatttaaataaaagattgaaagattaaaa

SEQ ID NO: 949 - protein, 225 aa, Homo sapiens
MGFGDLKSPAGLQVLNDYLADKSYIEGYVPSQADVAVFEAVSSPPPADLCHALRWYNHIKSYEKEKASLPGVKKALGKYGPADVEDTTGSGATDSKDDDDIDLFGSDDEEESEEAKRLREERLAQYESKKAKKPALVAKSSILLDVKPWDDETDMAKLEECVRSIQADGLVWGSSKLVPVGYGIKKLQIQCVVEDDKVGTDMLEEQITAFEDYVQSMDVAAFNKI

SEQ ID NO: 950 - DNA, 961 bp, Homo sapiens
ggacaatttgtgggccatttaattcagggcccccaattcgtacgtggagaagtgggaatgcaaaagtactttgacctttaaccttcggtccggcgcggtggagggaaacgcctccgtctctatataaggaattttccggtctcttcgggtcctttttcctctcttcagcgtggggcgcccacaatttgcgcgctctctttctgctgctccccagctctcggatacagccgacaccatgggtttcggagacctgaaaagccctgccggcctccaggtgctcaacgattacctggcggacaagagctacatcgaggggtatgtgccatcacaagcagatgtggcagtatttgaagccgtgtccagcccaccgcctgccgacttgtgtcatgccctacgttggtataatcacatcaagtcttacgaaaaggaaaaggccagcctgccaggagtgaagaaagctttgggcaaatatggtcctgccgatgtggaagacactacaggaagtggagctacagatagtaaagatgatgatgacattgacctctttggatctgatgatgaggaggaaagtgaagaagcaaagaggctaagggaagaacgtcttgcacaatatgaatcaaagaaagccaaaaaacctgcacttgttgccaagtcttccatcttactagatgtgaaaccttgggatgatgagacagatatggcgaaattagaggagtgcgtcagaagcattcaagcagacggcttagtctggggctcatctaaactagttccagtgggatacggaattaagaaacttcaaatacagtgtgtagttgaagatgataaagttggaacagatatgctggaggagcagatcactgcttttgaggactatgtgcagtccatggatgtggctgctttcaacaagatctaaaatccatcctggatcatggcatttaaataaaagattgaaagattaaaa

SEQ ID NO: 951 - protein, 225 aa, Homo sapiens; identical to SEQ ID NO: 949

SEQ ID NO: 952 - DNA, 2555 bp, Homo sapiens
gaaggggcggggccaaaactgcgcgcccaatcggggtgacgctctagccttgccggggactcgtgggtaacttgcttttgggagccagcggtatggcgtcgggctgcaagattggcccgtccatcctcaacagcgacctggccaatttaggggccgagtgctccggatgctagactctggggccgattatctgcacctggacgtaatggacgggcattttgttcccaacatcacctttggtcaccctgtggtagaaagccttcgaaagcagctaggccaggaccctttctttgacatgcacatgatggtgtccaagccagaacagtgggtaaagccaatggctgtagcaggagccaatcagtacacctttcatctcgaggctactgagaacccaggggctttgattaaagacattcgggagaatgggatgaaggttggccttgccatcaaaccaggaacctcagttgagtatttggcaccatgggctaatcagatagatatggccttggttatgacagtggaaccggggtttggagggcagaaattcatggaagatatgatgccaaaggttcactggttgaggacccagttcccatctttggatatagaggtcgatggtggagtaggtcctgacactgtccataaatgtgcagaggcaggagctaacatgattgtgtctggcagtgctattatgaggagtgaagaccccagatctgtgatcaatctattaagaaatgtttgctcagaagctgctcagaaacgttctcttgatcggtgaaaccataaggagcccagtgttcctgttcatgaaatctcccttttactggaaaacaggaatattgactaccaaatcacaatgcaattgaagccgtactgcttttttgagcagttattcattccagtgattaaaactgattgtgcagaatattctaagaggtcagaaattggtgtgtataactacatttttagtgatgcaatttattgattagtgagtaagatactgtttttattgagagatttgatttttataaagtaaaaatacggctgcattagggttacaaacagaaaagtgtcttaatgtctaaggagggcatattagctacactacaaaaacaaattttgtctgtacttctgaaaagaattttgttgtttctcagctgttttccaaaagcaaaggaagtctttatggtttttttctatttcatgttattgtgatttgtttataagtttgggtggggtgcataccatattcttggttcttaaaatctatcacttttcaccttacacttgatgtgtgaaaactataaaaacaatgtgtgaaacccaggggttctaaaatacaagcatagattttatcagggtgttttgtcaaagcaggttattcagtgattcctccccaccattcttaagaacgttaaataatgctgttgtgttagctctgagtagaaaggaaaaagtaaaacctctgtttggaggtaatattgggttgaattctgactgcccctttctagctggacctttaacaaatcacccaatcttttttgtgtttctctaaagtcatttatacattaaatgtaattatagcaactgtggggttctgttgagaattaagagctaacactatatatgtaaagtttccagtactagtcccagaatttagaatatgctcaacacaaagtaaacagcattatataagtttatatttttgtgagttataaagtactttgatatattctcattaaatctgtaaatcacctctataagtaagtggtaataataaagcagatatttttgtccccatttaaaaaatgaagaaattaatgcttaatagggtggtaccctggaaaggatctgggaagtggtagaatttctggtctgtacttttacaaatggagcccttgggaggtgggttaggtaaaagaagctttttacttaacgttgtcttatttccagtctaattttacgctgtagcagaaccagatggctgagaaaattctggaactatggatcttgaccccaaggatatattattttattccaagaaagatcaggtaggcgaaaagatgacaggatacagagtcaatccataaactaaatatttataactgttctgaattatacagagtctaaaaatatgtgtcagctacttcattcctgtaaatactcttgctgtgttataaatatggcaagaaataaacatgaccaatatcaatagacttcttgaggctactataagttttgagaaataaggttcaaaaaataagaatgctaacacttaagcacagactagagcttgcttgggtttcttcctgcattacaaggtaaaaatttgttaatgtttgtttttattcagcttgggaaagctttgtgccatgaatacgtcgcatttaataacaagcaacacacggcatatagaaataactttaattaaaaaacttacatagaagattataatatcagacgtgacaaagatttgagtttatttgcctggacaacttgggtttgtctggcttttgttttctttttctttaaaaataaatgtacagtaaaactac

SEQ ID NO: 953 - protein, 203 aa, Homo sapiens [sequence omitted]

SEQ ID NO: 954 - DNA, 7677 bp, Homo sapiens
gaagagcaagaggcaggctcagcaaatggttcagccccagtccccggtggctgtcagtcaaagcaagcccggttgttatgacaatggaaaacactatcagataaatcaacagtgggagcggacctacctaggcaatgcgttggtttgtacttgttatggaggaagccgaggttttaactgcgagagtaaacctgaagctgaagagacttgctttgacaagtacactgggaacacttaccgagtgggtgacacttatgagcgtcctaaagactccatgatctgggactgtacctgcatcggggctgggcgagggagaataagctgtaccatcgcaaaccgctgccatgaagggggtcagtcctacaagattggtgacacctggaggagaccacatgagactggtggttacatgttagagtgtgtgtgtcttggtaatggaaaaggagaatggacctgcaagcccatagctgagaagtgttttgatcatgctgctgggacttcctatgtggtcggagaaacgtgggagaagccctaccaaggctggatgatggtagattgtacttgcctgggagaaggcagcggacgcatcacttgcacttctagaaatagatgcaacgatcaggacacaaggacatcctatagaattggagacacctggagcaagaaggataatcgaggaaacctgctccagtgcatctgcacaggcaacggccgaggagagtggaagtgtgagaggcacacctctgtgcagaccacatcgagcggatctggccccttcaccgatgttcgtgcagctgtttaccaaccgcagcctcacccccagcctcctccctatggccactgtgtcacagacagtggtgtggtctactctgtggggatgcagtggctgaagacacaaggaaataagcaaatgctttgcacgtgcctgggcaacggagtcagctgccaagagacagctgtaacccagacttacggtggcaactcaaatggagagccatgtgtcttaccattcacctacaatggcaggacgttctactcctgcaccacagaagggcgacaggacggacatctttggtgcagcacaacttcgaattatgagcaggaccagaaatactctttctgcacagaccacactgttttggttcagactcgaggaggaaattccaatggtgccttgtgccacttccccttcctatacaacaaccacaattacactgattgcacttctgagggcagaagagacaacatgaagtggtgtgggaccacacagaactatgatgccgaccagaagtttgggttctgccccatggctgcccacgaggaaatctgcacaaccaatgaaggggtcatgtaccgcattggagatcagtgggataagcagcatgacatgggtcacatgatgaggtgcacgtgtgttgggaatggtcgtggggaatggacatgcattgcctactcgcagcttcgagatcagtgcattgttgatgacatcacttacaatgtgaacgacacattccacaagcgtcatgaagaggggcacatgctgaactgtacatgcttcggtcagggtcggggcaggtggaagtgtgatcccgtcgaccaatgccaggattcagagactgggacgttttatcaaattggagattcatgggagaagtatgtgcatggtgtcagataccagtgctactgctatggccgtggcattggggagtggcattgccaacctttacagacctatccaagctcaagtggtcctgtcgaagtatttatcactgagactccgagtcagcccaactcccaccccatccagtggaatgcaccacagccatctcacatttccaagtacattctcaggtggagacctaaaaattctgtaggccgttggaaggaagctaccataccaggccacttaaactcctacaccatcaaaggcctgaagcctggtgtggtatacgagggccagctcatcagcatccagcagtacggccaccaagaagtgactcgctttgacttcaccaccaccagcaccagcacacctgtgaccagcaacaccgtgacaggagagacgactcccttttctcctcttgtggccacttctgaatctgtgaccgaaatcacagccagtagctttgtggtctcctgggtctcagcttccgacaccgtgtcgggattccgggtggaatatgagctgagtgaggagggagatgagccacagtacctggatcttccaagcacagccacttctgtgaacatccctgacctgcttcctggccgaaaatacattgtaaatgtctatcagatatctgaggatggggagcagagtttgatcctgtctacttcacaaacaacagcgcctgatgcccctcctgacacgactgtggaccaagttgatgacacctcaattgttgttcgctggagcagaccccaggctcccatcacagggtacagaatagtctattcgccatcagtagaaggtagcagcacagaactcaaccttcctgaaactgcaaactccgtcaccctcagtgacttgcaacctggtgttcagtataacatcactatctatgctgtggaagaaaatcaagaaagtacacctgttgtcattcaacaagaaaccactggcaccccacgctcagatacagtgccctctcccagggacctgcagtttgtggaagtgacagacgtgaaggtcaccatcatgtggacaccgcctgagagtgcagtgaccggctaccgtgtggatgtgatccccgtcaacctgcctggcgagcacgggcagaggctgcccatcagcaggaacacctttgcagaagtcaccgggctgtcccctggggtcacctattacttcaaagtctttgcagtgagccatgggagggagagcaagcctctgactgctcaacagacaaccaaactggatgctcccactaacctccagtttgtcaatgaaactgattctactgtcctggtgagatggactccacctcgggcccagataacaggataccgactgaccgtgggccttacccgaagaggacagcccaggcagtacaatgtgggtccctctgtctccaagtacccactgaggaatctgcagcctgcatctgagtacaccgtatccctcgtggccataaagggcaaccaagagagccccaaagccactggagtctttaccacactgcagcctgggagctctattccaccttacaacaccgaggtgactgagaccaccattgtgatcacatggacgcctgctccaagaattggttttaagctgggtgtacgaccaagccagggaggagaggcaccacgagaagtgacttcagactcaggaagcatcgttgtgtccggcttgactccaggagtagaatacgtctacaccatccaagtcctgagagatggacaggaaagagatgcgccaattgtaaacaaagtggtgacaccattgtctccaccaacaaacttgcatctggaggcaaaccctgacactggagtgctcacagtctcctgggagaggagcaccaccccagacattactggttatagaattaccacaacccctacaaacggccagcagggaaattctttggaagaagtggtccatgctgatcagagctcctgcacttttgataacctgagtcccggcctggagtacaatgtcagtgtttacactgtcaaggatgacaaggaaagtgtccctatctctgataccatcatcccagctgttcctcctcccactgacctgcgattcaccaacattggtccagacaccatgcgtgtcacctgggctccacccccatccattgatttaaccaacttcctggtgcgttactcacctgtgaaaaatgaggaagatgttgcagagttgtcaatttctccttcagacaatgcagtggtcttaacaaatctcctgcctggtacagaatatgtagtgagtgtctccagtgtctacgaacaacatgagagcacacctcttagaggaagacagaaaacaggtcttgattccccaactggcattgacttttctgatattactgccaactcttttactgtgcactggattgctcctcgagccaccatcactggctacaggatccgccatcatcccgagcacttcagtgggagacctcgagaagatcgggtgccccactctcggaattccatcaccctcaccaacctcactccaggcacagagtatgtggtcagcatcgttgctcttaatggcagagaggaaagtcccttattgattggccaacaatcaacagtttctgatgttccgagggacctggaagttgttgctgcgacccccaccagcctactgatcagctgggatgctcctgctgtcacagtgagatattacaggatcacttacggagagacaggaggaaatagccctgtccaggagttcactgtgcctgggagcaagtctacagctaccatcagcggccttaaacctggagttgattataccatcactgtgtatgctgtcactggccgtggagacagccccgcaagcagcaagccaatttccattaattaccgaacagaaattgacaaaccatcccagatgcaagtgaccgatgttcaggacaacagcattagtgtcaagtggctgccttcaagttcccctgttactggttacagagtaaccaccactcccaaaaatggaccaggaccaacaaaaactaaaactgcaggtccagatcaaacagaaatgactattgaaggcttgcagcccacagtggagtatgtggttagtgtctatgctcagaatccaagcggagagagtcagcctctggttcagactgcagtaaccaacattgatcgccctaaaggactggcattcactgatgtggatgtcgattccatcaaaattgcttgggaaagcccacaggggcaagtttccaggtacagggtgacctactcgagccctgaggatggaatccatgagctattccctgcacctgatggtgaagaagacactgcagagctgcaaggcctcagaccgggttctgagtacacagtcagtgtggttgccttgcacgatgatatggagagccagcccctgattggaacccagtccacagctattcctgcaccaactgacctgaagttcactcaggtcacacccacaagcctgagcgcccagtggacaccacccaatgttcagctcactggatatcgagtgcgggtgacccccaaggagaagaccggaccaatgaaagaaatcaaccttgctcctgacagctcatccgtggttgtatcaggacttatggtggccaccaaatatgaagtgagtgtctatgctcttaaggacactttgacaagcagaccagctcagggagttgtcaccactctggagaatgtcagcccaccaagaagggctcgtgtgacagatgctactgagaccaccatcaccattagctggagaaccaagactgagacgatcactggcttccaagttgatgccgttccagccaatggccagactccaatccagagaaccatcaagccagatgtcagaagctacaccatcacaggtttacaaccaggcactgactacaagatctacctgtacaccttgaatgacaatgctcggagctcccctgtggtcatcgacgcctccactgccattgatgcaccatccaacctgcgtttcctggccaccacacccaattccttgctggtatcatggcagccgccacgtgccaggattaccggctacatcatcaagtatgagaagcctgggtctcctcccagagaagtggtccctcggccccgccctggtgtcacagaggctactattactggcctggaaccgggaaccgaatatacaatttatgtcattgccctgaagaataatcagaagagcgagcccctgattggaaggaaaaagacagacgagcttccccaactggtaacccttccacaccccaatcttcatggaccagagatcttggatgttccttccacagttcaaaagacccctttcgtcacccaccctgggtatgacactggaaatggtattcagcttcctggcacttctggtcagcaacccagtgttgggcaacaaatgatctttgaggaacatggttttaggcggaccacaccgcccacaacggccacccccataaggcataggccaagaccatacccgccgaatgtaggacaagaagctctctctcagacaaccatctcatgggccccattccaggacacttctgagtacatcatttcatgtcatcctgttggcactgatgaagaacccttacagttcagggttcctggaacttctaccagtgccactctgacaggcctcaccagaggtgccacctacaacgtcatagtggaggcactgaaagaccagcagaggcataaggttcgggaagaggttgttaccgtgggcaactctgtcaacgaaggcttgaaccaacctacggatgactcgtgctttgacccctacacagtttcccattatgccgttggagatgagtgggaacgaatgtctgaatcaggctttaaactgttgtgccagtgcttaggctttggaagtggtcatttcagatgtgattcatctagatggtgccatgacaatggtgtgaactacaagattggagagaagtgggaccgtcagggagaaaatggccagatgatgagctgcacatgtcttgggaacggaaaaggagaattcaagtgtgaccctcatgaggcaacgtgttatgatgatgggaagacataccacgtaggagaacagtggcagaaggaatatctcggtgccatttgctcctgcacatgctttggaggccagcggggctggcgctgtgacaactgccgcagacctgggggtgaacccagtcccgaaggcactactggccagtcctacaaccagtattctcagagataccatcagagaacaaacactaatgttaattgcccaattgagtgcttcatgcctttagatgtacaggctgacagagaagattcccgagagtaaatcatctttccaatccagaggaacaagcatgtctctctgccaagatccatctaaactggagtgatgttagcagacccagcttagagttcttctttctttcttaagccctttgctctggaggaagttctccagcttcagctcaactcacagcttctccaagcatcaccctgggagtttcctgagggttttctcataaatgagggctgcacattgcctgttctgcttcgaagtattcaataccgctcagtattttaaatgaagtgattctaagatttggtttgggatcaataggaaagcatatgcagccaaccaagatgcaaatgttttgaaatgatatgaccaaaattttaagtaggaaagtcacccaaacacttctgctttcacttaagtgtctggcccgcaatactgtaggaacaagcatgatcttgttactgtgatattttaaatatccacagtactcactttttccaaatgatcctagtaattgcctagaaatatctttctcttacctgttatttatcaatttttcccagtatttttatacggaaaaaattgtattgaaaacacttagtatgcagttgataagaggaatttggtataattatggtgggtgattattttttatactgtatgtgccaaagctttactactgtggaaagacaactgttttaataaaagatttacattcc

SEQ ID NO: 955 - DNA, 2068 bp, Homo sapiens
cggcagccctcctacctgcgcacgtggtgccgctgctgctgcctcccgctcgccctgaacccagtgcctgcagccatggctcccggccagctcgccttatttagtgtctctgacaaaaccggccttgtggaatttgcaagaaacctgaccgctcttggtttgaatctggtcgcttccggagggactgcaaaagctctcagggatgctggtctggcagtcagagatgtctctgagttgacgggatttcctgaaatgttggggggacgtgtgaaaactttgcatcctgcagtccatgctggaatcctagctcgtaatattccagaagataatgctgacatggccagacttgatttcaatcttataagagttgttgcctgcaatctctatccctttgtaaagacagtggcttctccaggtgtaactgttgaggaggctgtggagcaaattgacattggtggagtaaccttactgagagctgcagccaaaaaccacgctcgagtgacagtggtgtgtgaaccagaggactatgtggtggtgtccacggagatgcagagctccgagagtaaggacacctccttggagactagacgccagttagccttgaaggcattcactcatacggcacaatatgatgaagcaatttcagattatttcaggaaacagtacagcaaaggcgtatctcagatgcccttgagatatggaatgaacccacatcagacccctgcccagctgtacacactgcagcccaagcttcccatcacagttctaaatggagcccctggatttataaacttgtgcgatgctttgaacgcctggcagctggtgaaggaactcaaggaggctttaggtattccagccgctgcctctttcaaacatgtcagcccagcaggtgctgctgttggaattccactcagtgaagatgaggccaaagtctgcatggtttatgatctctataaaaccctcacacccatctcagcggcatatgcaagagcaagaggggctgataggatgtcttcatttggtgattttgttgcattgtccgatgtttgtgatgtaccaactgcaaaaattatttccagagaagtatctgatggtataattgccccaggatatgaagaagaagccttgacaatactttccaaaaagaaaaatggaaactattgtgtccttcagatggaccaatcttacaaaccagatgaaaatgaagttcgaactctctttggtcttcatttaagccagaagagaaataatggtgtcgtcgacaagtcattatttagcaatgttgttaccaaaaataaagatttgccagagtctgccctccgagacctcatcgtagccaccattgctgtcaagtacactcagtctaactctgtgtgctacgccaagaacgggcaggttatcggcattggagcaggacagcagtctcgtatacactgcactcgccttgcaggagataaggcaaactattggtggcttagacaccatccacaagtgctttcgatgaagtttaaaacaggagtgaagagagcagaaatctccaatgccatcgatcaatatgtgactggaaccattggcgaggatgaagatttgataaagtggaaggcactgtttgaggaagtccctgagttactcactgaggcagagaagaaggaatgggttgagaaactgactgaagtttctatcagctctgatgccttcttccctttccgagataacgtagacagagctaaaaggagtggtgtggcgtacattgcggctccctccggttctgctgctgacaaagttgtgattgaggcctgcgacgaactgggaatcatcctcgctcatacgaaccttcggctcttccaccactgattttaccacacactgttttttggcttgcttatgtgtaggtgaacagtcacgcctgaaactttgaggataactttttaaaaaaataaaacagtatctcttaaaacaatgttttgatctacataaacattgtaaaaattttcaatcacgctttttaactttcttaccacaaaaaaatgataagtgggtgaagtgatggttatgttaattagcgtgc

SEQ ID NO: 956 - protein, 592 aa, Homo sapiens
MAPGQLALFSVSDKTGLVEFARNLTALGLNLVASGGTAKALRDAGLAVRDVSELTGFPEMLGGRVKTLHPAVHAGILARNIPEDNADMARLDFNLIRVVACNLYPFVKTVASPGVTVEEAVEQIDIGGVTLLRAAAKNHARVTVVCEPEDYVVVSTEMQSSESKDTSLETRRQLALKAFTHTAQYDEAISDYFRKQYSKGVSQMPLRYGMNPHQTPAQLYTLQPKLPITVLNGAPGFINLCDALNAWQLVKELKEALGIPAAASFKHVSPAGAAVGIPLSEDEAKVCMVYDLYKTLTPISAAYARARGADRMSSFGDFVALSDVCDVPTAKIISREVSDGIIAPGYEEEALTILSKKKNGNYCVLQMDQSYKPDENEVRTLFGLHLSQKRNNGVVDKSLFSNVVTKNKDLPESALRDLIVATIAVKYTQSNSVCYAKNGQVIGIGAGQQSRIHCTRLAGDKANYWWLRHHPQVLSMKFKTGVKRAEISNAIDQYVTGTIGEDEDLIKWKALFEEVPELLTEAEKKEWVEKLTEVSISSDAFFPFRDNVDRAKRSGVAYIAAPSGSAADKVVIEACDELGIILAHTNLRLFHH

SEQ ID NO: 957 - DNA, 702 bp, Homo sapiens
gcagccaattaagccaactgagttcctttccttgtgggggcccagtgtgcaatggctgcacacagcagcttccttggtagtgtacacagcctgttggttgtatgggttgctctgagggaccttggagacaggcctttccaatggatgttcatgtttctgaccttgcgctaccccaatgtaggctccaaacaggcatgcgaggtgcctttggaatgccccagggcactgtggccagggttcacattggccaagttatcatgtccatccgcaccaagctgcagaacaaggagcatgtgattgaggccctgcgcagggccaagttcaagcttcctggccaccagaagatccacatctcaaagaagtggggcttcaccaagttcaatgctgatgaatttgaagacatggtggctgagaagtggctcatcccagatggctgtggggtcaagtacatccccaatcgtggccctctggacaagtggcgggccctgcactcatgagggcttccaatgtgctgcccccctcttaatactcaccaataaattctacttcctgtcaaaaaaatgtcactaatgtaccctaaattttcttttttatttttattttttatttatttatttatttttttgagatggtgtcttgctcttttgcccagactggagtgaagtagcatgatcttggcttactgcaacctccaccccccag

SEQ ID NO: 958 - DNA, 3310 bp, Homo sapiens
ggcgggcgaccaaagcgcctgaggaccggcaacatggtgcggtcggggaataaggcagctgttgtgctgtgtatggacgtgggctttaccatgagtaactccattcctggtatagaatccccatttgaacaagcaaagaaggtgataaccatgtttgtacagcgacaggtgtttgctgagaacaaggatgagattgctttagtcctgtttggtacagatggcactgacaatcccctttctggtggggatcagtatcagaacatcacagtgcacagacatctgatgctaccagattttgatttgctggaggacattgaaagcaaaatccaaccaggttctcaacaggctgacttcctggatgcactaatcgtgagcatggatgtgattcaacatgaaacaataggaaagaagtttgagaagaggcatattgaaatattcactgacctcagcagccgattcagcaaaagtcagctggatattataattcatagcttgaagaaatgtgacatctccctgcaattcttcttgcctttctcacttggcaaggaagatggaagtggggacagaggagatggcccctttcgcttaggtggccatgggccttcctttccactaaaaggaattaccgaacagcaaaaagaaggtcttgagatagtgaaaatggtgatgatatctttagaaggtgaagatgggttggatgaaatttattcattcagtgagagtctgagaaaactgtgcgtcttcaagaaaattgagaggcattccattcactggccctgccgactgaccattggctccaatttgtctataaggattgcagcctataaatcgattctacaggagagagttaaaaagacttggacagttgtggatgcaaaaaccctaaaaaaagaagatatacaaaaagaaacagtttattgcttaaatgatgatgatgaaactgaagttttaaaagaggatattattcaagggttccgctatggaagtgatatagttcctttctctaaagtggatgaggaacaaatgaaatataaatcggaggggaagtgcttctctgttttgggattttgtaaatcttctcaggttcagagaagattcttcatgggaaatcaagttctaaaggtctttgcagcaagagatgatgaggcagctgcagttgcactttcctccctgattcatgctttggatgacttagacatggtggccatagttcgatatgcttatgacaaaagagctaatcctcaagtcggcgtggcttttcctcatatcaagcataactatgagtgtttagtgtatgtgcagctgcctttcatggaagacttgcggcaatacatgttttcatccttgaaaaacagtaagaaatatgctcccaccgaggcacagttgaatgctgttgatgctttgattgactccatgagcttggcaaagaaagatgagaagacagacacccttgaagacttgtttccaaccaccaaaatcccaaatcctcgatttcagagattatttcagtgtctgctgcacagagctttacatccccgggagcctctacccccaattcagcagcatatttggaatatgctgaatcctcccgctgaggtgacaacaaaaagtcagattcctctctctaaaataaagaccctttttcctctgattgaagccaagaaaaaggatcaagtgactgctcaggaaattttccaagacaaccatgaagatggacctacagctaaaaaattaaagactgagcaagggggagcccacttcagcgtctccagtctggctgaaggcagtgtcacctctgttggaagtgtgaatcctgctgaaaacttccgtgttctagtgaaacagaagaaggccagctttgaggaagcgagtaaccagctcataaatcacatcgaacagtttttggatactaatgaaacaccgtattttatgaagagcatagactgcatccgagccttccgggaagaagccattaagttttcagaagagcagcgctttaacaacttcctgaaagcccttcaagagaaagtggaaattaaacaattaaatcatttctgggaaattgttgtccaggatggaattactctgatcaccaaagaggaagcctctggaagttctgtcacagctgaggaagccaaaaagtttctggcccccaaagacaaaccaagtggagacacagcagctgtatttgaagaaggtggtgatgtggacgatttattggacatgatataggtcgtggatgtatggggaatctaagagagctgccatcgctgtgatgctgggagttctaacaaaacaagttggatgcggccattcaaggggagccaaaatctcaagaaattcccagcaggttacctggaggcggatcatctaattctctgtggaatgaatacacacatatatattacaagggataatttagaccccatacaagtttataaagagtcattgttattttctggttggtgtattattttttctgtggtcttactgatctttgtatattacatacatgctttgaagtttctggaaagtagatcttttcttgacctagtatatcagtgacagttgcagcccttgtgatgtgattagtgtctcatgtggaaccatggcatggttattgatgagtttcttaaccctttccagagtcctcctttgcctgatcctccaacagctgtcacaacttgtgttgagcaagcagtagcatttgcttcctcccaacaagcagctgggttaggaaaaccatgggtaaggacggactcacttctctttttagttgaggccttctagttaccacattactctgcctctgtatataggtggttttctttaagtggggtgggaaggggagcacaatttcccttcatactccttttaagcagtgagttatggtggtggtctcatgaagaaaagaccttttggcccaatctctgccatatcagtgaacctttagaaactcaaaaactgagaaatttacttcagtagttagaattatatcacttcactgttctctacttgcaagcctcaaagagagaaagtttcgttatattaaaacacttaggtaacttttcggtctttcccatttctacctaagtcagctttcatctttgtggatggtgtctcctttactaaataagaaaataacaaagcccttattctctttttttcttgtcctcattcttgccttgagttccagttcctctttggtgtacagacttcttggtacccagtcacctctgtcttcagcaccctcataagtcgtcactaatacacagttttgtacatgtaacattaaaggcataaatgactc

SEQ ID NO: 959 - protein, 732 aa, Homo sapiens
MVRSGNKAAVVLCMDVGFTMSNSIPGIESPFEQAKKVITMFVQRQVFAENKDEIALVLFGTDGTDNPLSGGDQYQNITVHRHLMLPDFDLLEDIESKIQPGSQQADFLDALIVSMDVIQHETIGKKFEKRHIEIFTDLSSRFSKSQLDIIIHSLKKCDISLQFFLPFSLGKEDGSGDRGDGPFRLGGHGPSFPLKGITEQQKEGLEIVKMVMISLEGEDGLDEIYSFSESLRKLCVFKKIERHSIHWPCRLTIGSNLSIRIAAYKSILQERVKKTWTVVDAKTLKKEDIQKETVYCLNDDDETEVLKEDIIQGFRYGSDIVPFSKVDEEQMKYKSEGKCFSVLGFCKSSQVQRRFFMGNQVLKVFAARDDEAAAVALSSLIHALDDLDMVAIVRYAYDKRANPQVGVAFPHIKHNYECLVYVQLPFMEDLRQYMFSSLKNSKKYAPTEAQLNAVDALIDSMSLAKKDEKTDTLEDLFPTTKIPNPRFQRLFQCLLHRALHPREPLPPIQQHIWNMLNPPAEVTTKSQIPLSKIKTLFPLIEAKKKDQVTAQEIFQDNHEDGPTAKKLKTEQGGAHFSVSSLAEGSVTSVGSVNPAENFRVLVKQKKASFEEASNQLINHIEQFLDTNETPYFMKSIDCIRAFREEAIKFSEEQRFNNFLKALQEKVEIKQLNHFWEIVVQDGITLITKEEASGSSVTAEEAKKFLAPKDKPSGDTAAVFEEGGDVDDLLDMI

SEQ ID NO: 960 - DNA, 4180 bp, Homo sapiens
ctttttgaggcaagttggatgaacagagaagggaagagaggaagaacgagaggaagagaagggaaggaagtgtttgtgtagaagagagagaaagacgaatagagttaggaaaaggaagacaagcaggtgggcaggaaggacatgcaccgagaccaggcaggggcccaactttcacgtccagccctggcctggggtcgggagaggtgggcgctagaagatgcagcccaggatgtggcaatcaatgacactattggggtttcccaggatggattggtcagggggagaaaggaaaaggcaaaacactccaggacctctcccggatctgtctcctcctctagccagcagtatggacagctggacccctgaacttcctctcctcttacctgggcagagtgttgtctctccccaaatttataaaaactaaaatgcattccattcctctgaaagcaaaacaaattcataattgagtgatattaaatagagaggttttcggaagcagatctgtgaatatgaaatacatgtgcatatttcattccccaggcagacattttttagaaatcaatacatgccccaatattggaaagacttgttcttccacggtgactacagtacatgctgaagcgtgccgtttcagccctcatttaattcaatttgtaagtagcgcagcagcctctgtgggggaggataggctgaaaaaaaaaagtgggctcgtatttatctacaggactccatatagtcatatataggcatataaatctattctttttctttgtttttttctttcttcctttctttcaaaggtttgcattaacttttcaaagtagttcctataggggcattgaggagcttcctcattctgggaaaactgagaaaacccatattctcctaatacaacccgtaatagcatttttgcctgcctcgaggcagagtttcccgtgagcaataaactcagcttttttgtggggcacagtactggatttgacagtgattccccacgtgtgttcatctgcacccaccgagccaggcagaggccagccctccgtggtgcacacagcacgcgcctcagtccatcccattttagtctttaaaccctcaggaagtcacagtctccggacaccacaccacatgagcccaacaggtccacgatggatccaccagtcccaccccagccttttcctttcatctgaacagaatgtgcatttttggaagcctccctcactctccatgctggcagagcaggagggagactgaagtaagagatggcagagggagatggtggcaaaaaggtttagatgcaggagaacagtaagatggatggttccggccagagtcgatgtggggaggaacagagggctgaagggagagggggctgactgttccattctagctttggcacaaagcagcagaaagggggaaaagccaatagaaatttccttagcttccccaccatatgtattttctaggatttgagaggaaagagaggaaaatgggggaatgggttgcaaaatagaaatgagcttaatccaggccgcagagccagggaaggtgagtaactttaggagggtgctagactttagaagccagataggaagaatcagtctaaactggccatgctttggaagggacaagactatgtgctccgctgcccaccttcagcctgcaatgagggactgaggcccacgagtctttccagctcttcctccattctggccagtccctgcatcctccctggggtggaggatggaaggaaagctgggacaagcagggaacgcatgattcagggatgctgtcactcggcagccagattccgaaactcccattctccaatgacttcctcaaccaatgggtggccttgtgactgttctttaaggctgaagatatccaggaaagggggcttggacactggccaaggagaccccttcgtgctgtggacacagctctcttcactctttgctcatggcatgacacagcggagaccgcctccaacaacgaatttggggctacgaagaggaatagcgaaaaagcaaatctgtttcaactgatgggaaccctatagctatagaacttgggggctatctcctatgcccctggacaggacagttggctggggacaggagaagtgctcaatcttcatgagacaaaggggcccgatagggccagcagccacaaggccttgacctgccgagtcagcatgccccatctctctgcacagctgtcccctaaacccaactcacgtttctgtatgtcttaggccagtatcccaaacctcttccacgtcactgttctttccacccattctccctttgcatcttgagcagttatccaactaggatctgccaagtggatactggggtgccactcccctgagaaaagactgagccaggaactacaagctccccccacattcctcccagcctggacctaattcttgagaggggctctctcttcacggactgtgtctggactttgagcaggcttctgccccttgcgttggctctttgctgccagccatcaggtgggggattagagcctggtgtaagtgcgccagactcttccggtttccaaagttcgtgcctgcgaacccaaacctgtgagtctcttctgcatgcaggagtttctcctgggcagctggtcactccccagagaagctgggccttcatggacacatggaactaagcctcccaaatgggagttctggctgagcccagggtggggagatcctgggaagggaggcactggaggaagacggcacctcttcccccatggcagggtgtgagggaggcaggtttggaatggtgcgagtatggcaatctaagcaggggtctggtctctttgactccaggctggcctttggccgactgtctgctcacccagagaccttggactccggactatccatggctccgaatctaagtgctgcccactcccatgctcacacccacagaaggtcttcccatcccctttagattcgtgcctcactccaccagtgaggaagatgcctctgtctttcccacgactgccaggagatagggaagcccagccaggactgaccctccttcctccagcctgccctgacccacctggcaaagcagggcacatggggaggaagagactggaacctttctttgacagccaggcctagacagacaggcctggggacactggccccatgaggggaggaaggcaggcgcacgaggtccagggaggcccttttctgatcatgccccttctctcccaccccatctccccaccaccacctctgtggcctccatggtacccccacagggctggcctcccctagagggtgggcctcaaccacctgctcccgccacgcaccggttagtgagacagggctgccacggcaaccgccaagcccccctcaaggtgggacagtaccccggacccatccactcactcctgagagggctccggcccagaatgggaacctcagagaagagctctaaggagaagaaaccccatagcgtcagagaggatatgtctggcttccaagagaaaggaggctccgttttgcaaagtggaggagggacgagggacaggggtttcaccagccagcaacctgggccttgtactgtctgtgtttttaaaaccactaaagtgcaagaattacattgcactgtttctccactttttattttctcttaggcttttgtttctatttcaaacatactttcttggttttctaatggagtatatagtttagtcatttcacagactctggcctcctctcctgaaatccttttggatggggaaagggaaggtggggagggtccgaggggaaggggaccccagcttccctgtgcccgctcaccccactccaccagtccccggtcgccagccggagtctcctctctaccgccactgtcacaccgtagcccacatggatagcacagttgtcagacaagattccttcagattccgagttgcctaccggttgttttcgttgttgttgttgttgtttttctttttctttttttttttgaagacagcaataaccacagtacatattactgtagttctctatagttttacatacattcataccataactctgttctctcctcttttttgttttcaactttaaaaacaaaaataaacgatgataatctttactggtgaaaaggatggaaaaataaatcaacaaatgcaaccagtttgtgag

SEQ ID NO: 961 - protein, 143 aa, Homo sapiens [sequence omitted]

SEQ ID NO: 962 - DNA, 956 bp, Homo sapiens
cctctgtggcctccatggtacccccacagggctggcctcccctagagggtgggcctcaaccacctgctcccgccacgcaccggttagtgagacagggctgccacggcaaccgccaagcccccctcaaggtgggacagtaccccggacccatccactcactcctgagagggctccggcccagaatgggaacctcagagaagagctctaaggagaagaaaccccatagcgtcagagaggatatgtctggcttccaagagaaaggaggctccgttttgcaaagtggaggagggacgagggacaggggtttcaccagccagcaacctgggccttgtactgtctgtgtttttaaaaccactaaagtgcaagaattacattgcactgtttctccactttttattttctcttaggcttttgtttctatttcaaacatactttcttggttttctaatggagtatatagtttagtcatttcacagactctggcctcctctcctgaaatccttttggatggggaaagggaaggtggggagggtccgaggggaaggggaccccagcttccctgtgcccgctcaccccactccaccagtccccggtcgccagccggagtctcctctctaccgccactgtcacaccgtagcccacatggatagcacagttgtcagacaagattccttcagattccgagttgcctaccggttgttttcgttgttgttgttgttgtttttctttttctttttttttttgaagacagcaataaccacagtacatattactgtagttctctatagttttacatacattcataccataactctgttctctcctcttttttgttttcaactttaaaaacaaaaataaacgatgataatctttactggtgaaaaggatggaaaaataaatcaacaaatgcaaccagtttgtgagaaaaaaaaaaaaaagccgaaaaaaaaaaaaaa

SEQ ID NO: 963 - protein, 130 aa, Homo sapiens [sequence omitted]

SEQ ID NO: 964 - DNA, 1421 bp, Homo sapiens
ggcgagggaggaggaagaagcggaggaggcggctcccgcgctcgcagggccgtgccacctgcccgcccgcccgctcgctcgctcgcccgccgcgccgcgctgccgaccgccagcatgctgccgagagtgggctgccccgcgctgccgctgccgccgccgccgctgctgccgctgctgctgctgctactgggcgcgagtggcggcggcggcggggcgcgcgcggaggtgctgttccgctgcccgccctgcacacccgagcgcctggccgcctgcgggcccccgccggttgcgccgcccgccgcggtggccgcagtggccggaggcgcccgcatgccatgcgcggagctcgtccgggagccgggctgcggctgctgctcggtgtgcgcccggctggagggcgaggcgtgcggcgtctacaccccgcgctgcggccaggggctgcgctgctatccccacccgggctccgagctgcccctgcaggcgctggtcatgggcgagggcacttgtgagaagcgccgggacgccgagtatggcgccagcccggagcaggttgcagacaatggcgatgaccactcagaaggaggcctggtggagaaccacgtggacagcaccatgaacatgttgggcgggggaggcagtgctggccggaagcccctcaagtcgggtatgaaggagctggccgtgttccgggagaaggtcactgagcagcaccggcagatgggcaagggtggcaagcatcaccttggcctggaggagcccaagaagctgcgaccaccccctgccaggactccctgccaacaggaactggaccaggtcctggagcggatctccaccatgcgccttccggatgagcggggccctctggagcacctctactccctgcacatccccaactgtgacaagcatggcctgtacaacctcaaacagtgcaagatgtctctgaacgggcagcgtggggagtgctggtgtgtgaaccccaacaccgggaagctgatccagggagcccccaccatccggggggaccccgagtgtcatctcttctacaatgagcagcaggaggctcgcggggtgcacacccagcggatgcagtagaccgcagccagccggtgcctggcgcccctgccccccgcccctctccaaacaccggcagaaaacggagagtgcttgggtggtgggtgctggaggattttccagttctgacacacgtatttatatttggaaagagaccagcaccgagctcggcacctccccggcctctctcttcccagctgcagatgccacacctgctccttcttgctttccccgggggaggaagggggttgtggtcggggagctggggtacaggtttggggagggggaagagaaatttttatttttgaacccctgtgtcccttttgcataagattaaaggaaggaaaagt

SEQ ID NO: 965 - DNA, 562 bp, Homo sapiens
agcggatctccaccatgcgccttccggatgagcggggccctctggagcacctctactccctgcacatccccaactgtgacaagcatggcctgtacaacctcaaacagtgctggtgtgtgaaccccaacaccgggaagctgatccagggagcccccaccatccggggggaccccgagtgtcatctcttctacaatgagcagcaggaggctcgcggggtgcacacccagcggatgcagtagaccgcagccagccggtgcctggcgcccctgccccccgcccctctccaaacaccggcagaaaacggagagtgcttgggtggtgggtgctggaggattttccagttctgacacacgtatttatatttggaaagagaccagcaccgagctcggcacctccccggcctctctcttcccagctgcagatgccacacctgctccttcttgctttccccgggggaggaagggggttgtggtcggggagctggggtacaggtttggggagggggaagagaaatttttatttttgaacccctgtgtcccttttgcataagattaaaggaagg

SEQ ID NO: 966 - DNA, 392 bp, Rattus norvegicus
cttcctttctgggctcggacctaggtcgcggcgacatggccaaacgtaccaagaaagtcgggatcgtcggtaaatacgggacccgctatggggcctccctccggaaaatggtgaagaaaattgaaatcagccagcacgccaagtacacttgctctttctgtggcaaaaccaagatgaagagacgagctgtggggatctggcactgtggttcctgcatgaagacagtggctggcggtgcctggacgtacaataccacttccgctgtcacggtaaagtccgccatcagaagactgaaggagttgaaagaccagtagacgctcctctactctttgagacatcactggcctataataaatgggttaatttatgtaacaaaaaaaaaaaaaaaaaaa

SEQ ID NO: 967 - protein, 92 aa, Rattus norvegicus [sequence omitted]

SEQ ID NO: 968 - DNA, 2433 bp, Homo sapiens
ccccccgccacctcacacacccccatccgggagacccacgtgcagctgggcccgggctggcgccgcacctcggggtctgcgcgtctccccggcgcgttccgggcgcagccccacgacacggacccctggcggggcggcatccgagaagtcgcaggcggagagggggcgtcctggaggccgggcgcggggacgctgcggcccgcggccacacaaaggaggcggcgggaaggcggggcaaggcgggccgggggcgggggcggcaggaaggggcgggggcccgcgcggcgccgccgataaagcccccgccgccgcggcagccagcttgcgctgtggggctgcccgggctgcgcggcgtctgcaggcgccaccgctgcctctttccggctgtgaccctcctcgccgccgccgcttggctgcgtcctccgactccccgcgccgccgagaccaggctcccgctccggttgcggccgcaccgccctccgcggccgccccctggggatccagcgagcgcggtcgtccttggtggaaggaaccatgaactggcatctccccctcttcctcttggcctctgtgacgctgccttccatctgctcccacttcaatcctctgtctctcgaggaactaggctccaacacggggatccaggttttcaatcagattgtgaagtcgaggcctcatgacaacatcgtgatctctccccatgggattgcgtcggtcctggggatgcttcagctgggggcggacggcaggaccaagaagcagctcgccatggtgatgagatacggcgtaaatggagttggtaaaatattaaagaagatcaacaaggccatcgtctccaagaagaataaagacattgtgacagtggctaacgccgtgtttgttaagaatgcctctgaaattgaagtgccttttgttacaaggaacaaagatgtgttccagtgtgaggtccggaatgtgaactttgaggatccagcctctgcctgtgattccatcaatgcatgggttaaaaatgaaaccagggatatgattgacaatctgctgtccccagatcttattgatggtgtgctcaccagactggtcctcgtcaacgcagtgtatttcaagggtctgtggaaatcacggttccaacccgagaacacaaagaaacgcactttcgtggcagccgacgggaaatcctatcaagtgccaatgctggcccagctctccgtgttccggtgtgggtcgacaagtgcccccaatgatttatggtacaacttcattgaactgccctaccacggggaaagcatcagcatgctgattgcactgccgactgagagctccactccgctgtctgccatcatcccacacatcagcaccaagaccatagacagctggatgagcatcatggtgcccaagagggtgcaggtgatcctgcccaagttcacagctgtagcacaaacagatttgaaggagccgctgaaagttcttggcattactgacatgtttgattcatcaaaggcaaattttgcaaaaataacaaggtcagaaaacctccatgtttctcatatcttgcaaaaagcaaaaattgaagtcagtgaagatggaaccaaagcttcagcagcaacaactgcaattctcattgcaagatcatcgcctccctggtttatagtagacagaccttttctgtttttcatccgacataatcctacaggtgctgtgttattcatggggcagataaacaaaccctgaagagtatacaaaagaaaccatgcaaagcaacgactactttgctacgaagaaagactcctttcctgcatctttcatagttctgttaaatatttttgtacatcgcttctttttcaaaactagttcttaggaacagactcgatgcaagtgtttctgttctgggaggtattggagggaaaaaacaagcaggatggctggaacactgtactgaggaatgaatagaaaggcttccagatgtctaaaagattctttaaactactgaactgttacctaggttaacaaccctgttgagtatttgctgtttgtccagttcaggaatttttgttttgttttgtctatatgtgcggcttttcagaagaaatttaatcagtgtgacagaaaaaaaaatgttttatggtagcttttactttttatgaaaaaaaaattatttgccttttaaattcttttcccccatccccctccaaagtcttgatagcaagcgttattttggtggtagaaacggtgaaatctctagcctctttgtgtttttgttgttgttgttgttgttgttttatataatgcatgtattcactaaaataaaatttaaaaaactcctgtcttgctagacaaggttgctgttgtgcagtgtgcctgtcactactggtctgtactccttggatttgcatttttgtattttgtacaaagtaaaaataaactgttatgagtagt

SEQ ID NO: 969 - protein, 397 aa, Homo sapiens
MNWHLPLFLLASVTLPSICSHFNPLSLEELGSNTGIQVFNQIVKSRPHDNIVISPHGIASVLGMLQLGADGRTKKQLAMVMRYGVNGVGKILKKINKAIVSKKNKDIVTVANAVFVKNASEIEVPFVTRNKDVFQCEVRNVNFEDPASACDSINAWVKNETRDMIDNLLSPDLIDGVLTRLVLVNAVYFKGLWKSRFQPENTKKRTFVAADGKSYQVPMLAQLSVFRCGSTSAPNDLWYNFIELPYHGESISMLIALPTESSTPLSAIIPHISTKTIDSWMSIMVPKRVQVILPKFTAVAQTDLKEPLKVLGITDMFDSSKANFAKITRSENLHVSHILQKAKIEVSEDGTKASAATTAILIARSSPPWFIVDRPFLFFIRHNPTGAVLFMGQINKP

SEQ ID NO: 970 - DNA, 2055 bp, Homo sapiens
atgcgtgctgaaaagagaaaaaagaatgccccagaggaggtcagcaggcttaaaagtattctcaaactagacgatgacgttttaatgaaagatgttcaagagatagcaactgtggtggtacccaaacccaaacattgccaagagaaaatgcaatgtgaggtaaaagatgaaaaagatgacatgaaaatggagactgatattaagagaaacaaaaagactcttctagaccagcatggacagtacccaatatggatgaaccaaaggcaaagaaaaaggctaaaggcaaagcgagagaaaagaaaggagaaaaacaaagcaaaagcagtgaaagtggcaaagggtttggcctgtagtattgtttccataatagtccatttcgcagaaataagaaggagaataaaacttagagaaaaagaggaggccaaaaggggcaaggtagtggctacttgcagaaacctgaaaaatatgtgtgacaaagccgccataataagtgccagccgagctgcagcagcccgtctcaggggcaccgcagcctccccgggccctacggccgcccgccagcaggatggctggaatggccttagtcatgaggcttttagaattgtttcaaggcaggattatgcgtcagaagcaatcaatggagcagctggtggtgtttatttgggtactaccaactcctgtgtggcagttatggaaggtaaacaagcaaaggtgctggagaatgccgaaggtgccagaactaccccttcagttgtggcctttacagcagatgtacagaaagacattaaaaatattccctttaaaattgtctgtgcctccaatggtgatgcctgggttgaggctcatgggaaactgtattctccaagtcagatcggagcatttgtgtcgatgaagatgaaagagactgcagaaaattacttggggcacacagcaaaaaatgctgtgatcgcagtcccagcttatttcaatgacttgcagaggcaggccactaaagatgctggccagatatctggactgaatgtgcttcgggtgattaatgaacccacagctgctgctcttgcctatggtctagacaaatcaaaagacaaagtcattgctgtatatgatttaggtggtggaacttttgatatttctatcctggaatttcagaaaggagtattcgaggtgaaatccacaaatggggacactttcttaggtggggaagactttgaccaggccttgctacagcacattgtgaaggagttcaagagagagacgggggttgatttgaccaaagacaacgtggcatttcagagggtgtgggaagctgctgaaaaggctaaatgtgaactctcctcatctgtgcagactgacatcaatttgccctatcttacaatggattcttctggacccaagcatttgaatacaaagttgacccatgctcaatttgaagggattgtcactgatctaatcaggaggactatcgctccatgccaaaaagctatgcaagatgcagaagtcagcaagagtgatataggagaagtgattcttgtggagcccccaagtaaagctgtcaatcctgatgaggctgtggccattggagctgccattcagggagatgtgttggccggcgatgtcacagatgtgctgctccttgatgtcattcccctgtctctgggtattgaaactctgcgaggtgtctttaccaaacttattaataggaataccactattccaaccaagaagagccaggtattctcaactgctgctgatgggcagacacaagtggaaattaaagtgtgtcagggtgagagagagatggctggagacaacaaactccttggacagtttactttgattggaattccaccagcccctcgtggagttcctcagatcaaagttacatttgacattgatgccaatgggatcatacatgtttcagctaaagataaaggcacaggacatgagcagcagattgtaatccagtcttctggtgggttaagcaaagatgatgttgaaaatatggttaaaaatgcagagaaatatgctaaggaagaccagcgaaggaaggaatga

SEQ ID NO: 971 - DNA, 2159 bp, Homo sapiens
cggagctgtccatcagcaccaaaggccgcgggcgggctcagggcatggggccgcggttctggggcggcccgagccccggctcctgcgccttccccttcctcaggcccagcccgagttcccggacgccgcgggactggagtgccagccggtgttggacgtggagcggcgccgccaccgcgccgacaccattctctccggcccagcagcccccttcctcgcacgacggactttccctggaccccagtcagttggagcctctggcgccccgcaaccccggcccctcgggcctctgcacagcctctttcactcagaagctcaggtcgcctccagcccagcactatgccggggactgtggcaacactgcggttccagctgctgccccctgagccagatgatgccttctggggtgcaccttgtgaacagcccctggagcgcaggtaccaggcactgccggccctcgtctgcatcatgtgctgtttgtttggagtcgtctactgcttcttcggttaccgctgcttcaaggcagtgctctttctcactgggttgctgtttggctcggtggtcatcttcctcctctgctaccgagagcgggtgctagagacacagctgagtgctggggcgagcgcgggcatcgctctgggcatcgggctgctctgcgggctggtggccatgctagtgcgcagcgtgggcctcttcctggtggggctgctgctcggcctgctgctcgcagctgctgccctgctgggctccgcaccctactaccagccaggctccgtgtggggtccactggggctgttgctggggggcggcctgctctgtgccctgctcactctgcgctggccccgcccactcaccaccctggccaccgccgtgactggtgctgcgctgatcgccactgccgctgactacttcgccgagctgctactgctggggcgctacgtggtggagcgactccgggctgctcctgtgcccccactctgctggcgaagctgggccctgctggcactctggcccctgctcagcctgatgggcgttctggtgcagtggagggtgacagctgagggggactcccacacggaagtggtcatcagccggcagcgccgacgcgtgcaactgatgcggattcggcagcaggaagatcgcaaggagaaaaggcggaaaaagagacctcctcgggctcccctcagaggtccccgggctcctcccaggcctgggccaccagaccctgcttatcggcgcaggccagtgcccatcaaacgcttcaatggagacgtcctctccccgagctatatccagagcttccgagaccggcagaccgggagctccctgagctccttcatggcctcacccacagatgcggactatgagtatgggtcccggggacctctgacagcctgctcaggccccccagtgcgggtatagccatatctgtctgtctagactctgcagtcaccagctctgccagctcgaggaggcctgctaggctgccactcagcctcctggctttggctgtccctctccccagcctggagagggctggcctggtcactagaagggaggattgtctcaggcgagtcttggcctgagaggaaagccccctcccaagctcccaagaggctcctgaggaactcggggtgtgaaccccattggggtgtgctcagggttgtgagtgtgttgcccgtgtgtctgtgtgtatgtgtgtgggggtgggcaggcttggaggggacgctgggacccttgccttagatttctgactggtagggtttctccaggctcagccccacctcttcactccctgccaaggtcccatgggccacctcctgcatgtctccgcggaggggctaccttccttcccatcgccctgcctcgcagccagactcatctaagggttcttgtccttgtctatggggcaaactgtagcatccctcaccctggtcccctggcctctgtaaagccaccagcctgagggcagtggcaggagatgggggtgggggggtgctgctctgggctgggttgggaagggagttggggaggggtttaaatgcacggtgcatgtctggtgtctgtcatgccaacctagacacctcatgcttctgtctcccccaccccactctgttttacatcttttataaatgtgccaaactgtgtggcctctgcca

SEQ ID NO: 972 - protein, 360 aa, Homo sapiens
MPGTVATLRFQLLPPEPDDAFWGAPCEQPLERRYQALPALVCIMCCLFGVVYCFFGYRCFKAVLFLTGLLFGSVVIFLLCYRERVLETQLSAGASAGIALGIGLLCGLVAMLVRSVGLFLVGLLLGLLLAAAALLGSAPYYQPGSVWGPLGLLLGGGLLCALLTLRWPRPLTTLATAVTGAALIATAADYFAELLLLGRYVVERLRAAPVPPLCWRSWALLALWPLLSLMGVLVQWRVTAEGDSHTEVVISRQRRRVQLMRIRQQEDRKEKRRKKRPPRAPLRGPRAPPRPGPPDPAYRRRPVPIKRFNGDVLSPSYIQSFRDRQTGSSLSSFMASPTDADYEYGSRGPLTACSGPPVRV

SEQ ID NO: 973 - DNA, 2710 bp, Homo sapiens
cggagcacatgctgagcggagcggctggggctgcgcggcgtggcggagcagcgctcgctccctcgctcactcgctcgctcgcagggacacacgcaggggctgacagctgtgctggtgctgataagggaagccacaaggagacgatcgaggagagagacaagcggcagcagaggcagcagcggcagaggcagcaccagggctgcggagctgctgggagtgggagtgactcccccacctcgggcccccaccctgtccctgtcctcttcccgcttgccctgagtttagaagagcagccgctgccaccactgccactcgggagggcaccagggctgctggctagggagggacagggcagggaggctctggccagtcccagcagccggggacagatgccgatcgagattgtgtgcaaaatcaaatttgctgaggaggatgcgaaacccaaggagaaggaggcaggggatgagcagagcctcctcggggctgttgcccctggagcagccccccgagacctggccacctttgccagcaccagcaccctgcatggactgggccgggcctgtggcccaggcccccacggactgcgcagaaccctgtgggcactggccctactcacctcgctggctgccttcctgtaccaggcggctggcctggcccggggctacctgacccggcctcacctggtggcaatggaccccgctgccccagccccagtggcgggcttcccggctgtcaccctctgcaatatcaaccgcttccggcattcggcactcagcgatgccgacatcttccacctggccaatctgacagggctgccccccaaagaccgggatgggcaccgtgcggctggcctgcgctacccagagcctgacatggtagacatcctcaaccgcactggccaccagctcgccgacatgcttaagagctgcaacttcagtgggcatcactgctccgccagcaacttctctgtggtctatactcgctatgggaagtgttacaccttcaacgcggacccgcggagctcgctgcccagccgggcagggggcatgggcagtggcctggagatcatgctggacatccagcaggaggagtacctgcccatctggagggagacaaatgagacgtcgtttgaggcaggtattcgggtgcagatccacagccaggaggagccgccctacatccaccagctggggttcggggtgtccccaggcttccagacctttgtgtcctgccaggaacagcggctgacctacctgccccagccctggggcaactgccgcgcagagagtgagctcagggagcctgagcttcagggctactcggcctacagtgtgtctgcctgccggctgcgctgtgaaaaggaggccgtgcttcagcgctgccactgccggatggtgcacatgccaggcaatgagaccatctgcccaccaaatatctacatcgagtgtgcagaccacacactggactccctgggtgggggccctgagggcccgtgcttctgccccaccccctgcaacctgacacgctatgggaaagagatctccatggtcaggatccccaacaggggctcagcccggtacctggcgaggaagtacaaccgcaacgagacctacatacgggagaacttcctggtcctagatgtcttctttgaggccctgacctctgaagccatggagcagcgagcagcctatggcctgtcagccctgctgggagacctcgggggacagatgggcctgttcattggggccagcatcctcacgttgctggagatcctcgactacatctatgaggtgtcctgggatcgactgaagcgggtatggaggcgtcccaagacccccctgcggacctccactgggggcatctccactttggggcttcaggagctgaaggaacagagtccctgcccgagcctgggccgagcggagggtgggggggtcagcagtctgctccccaatcaccaccacccccacggtcccccaggaggtctctttgaagattttgcttgctaggacggtgctgtgactgaaaggacccaggagtctgggacccctcctgggatccccagcacattctcctgctcctgggagaggcctgggggcggtgctcactgggagggccaggactcagttcctgctctcatcctcccctgccctgatgtcagctgctttgcacaaaggtccttcttgtccacaccccttatccccaggctggtgccccgggagggctggagaccaggccatgggccctcacggagaggaagggaaggaaggagagggagggggaggatagagcccatcccagccggggagggggagccctctgtacatttgtaaatatttagggaaagccgggtggggggaggggatacagatgtagaaggtgggtagggctacaggggtgggtgatttagggacagccagggtcccagccccaatgtcagcaggatagggagagccccaggactcaggagtgctgggctggtcctacttcctgcccctctccaggcccagctcccctcttggcagggggagaggatggcccagcaggcctggcccagctcccagttccccctgcaccagccccacccctagagtcccttctatagggagggggcaggagaccttccagacttcggctgagcttggagggtgggaagggagccttctcagtcctctctccctccagtctgattttataaagtgctgacgag

SEQ ID NO: 974 - protein, 539 aa, Homo sapiens
MPIEIVCKIKFAEEDAKPKEKEAGDEQSLLGAVAPGAAPRDLATFASTSTLHGLGRACGPGPHGLRRTLWALALLTSLAAFLYQAAGLARGYLTRPHLVAMDPAAPAPVAGFPAVTLCNINRFRHSALSDADIFHLANLTGLPPKDRDGHRAAGLRYPEPDMVDILNRTGHQLADMLKSCNFSGHHCSASNFSVVYTRYGKCYTFNADPRSSLPSRAGGMGSGLEIMLDIQQEEYLPIWRETNETSFEAGIRVQIHSQEEPPYIHQLGFGVSPGFQTFVSCQEQRLTYLPQPWGNCRAESELREPELQGYSAYSVSACRLRCEKEAVLQRCHCRMVHMPGNETICPPNIYIECADHTLDSLGGGPEGPCFCPTPCNLTRYGKEISMVRIPNRGSARYLARKYNRNETYIRENFLVLDVFFEALTSEAMEQRAAYGLSALLGDLGGQMGLFIGASILTLLEILDYIYEVSWDRLKRVWRRPKTPLRTSTGGISTLGLQELKEQSPCPSLGRAEGGGVSSLLPNHHHPHGPPGGLFEDFAC

SEQ ID NO: 975 - DNA, 2240 bp, Homo sapiens
cctcgccgcatccactctccggccggccgcctgcccgccgcctcctccgtgcgcccgccagcctcgcccgcgccgtcaccatgagccaggcctactcgtccagccagcgcgtgtcctcctaccgccgcaccttcggcggggccccgggcttcccactcggctccccgctgagttcgcccgtgttcccgcgggcgggtttcggctctaagggctcctccagctcggtgacgtcccgcgtgtaccaggtgtcgcgcacgtcgggcggggccgggggcctggggtcgctgcgggccagccggctggggaccacccgcacgccctcctcctacggcgcaggcgagctgctggacttctcactggccgacgcggtgaaccaggagtttctgaccacgcgcaccaacgagaaggtggagctgcaggagctcaatgaccgcttcgccaactacatcgagaaggtgcgcttcctggagcagcagaacgcggcgctcgccgccgaagtgaaccggctcaagggccgcgagccgacgcgagtggccgagctctacgaggaggagctgcgggagctgcggcgccaggtggaggtgctcactaaccagcgcgcgcgcgtcgacgtcgagcgcgacaacctgctcgacgacctgcagcggctcaaggccaagctgcaggaggagattcagttgaaggaagaagcagagaacaatttggctgccttccgagcggacgtggatgcagctactctagctcgcattgacctggagcgcagaattgaatctctcaacgaggagatcgcgttccttaagaaagtgcatgaagaggagatccgtgagttgcaggctcagcttcaggaacagcaggtccaggtggagatggacatgtctaagccagacctcactgccgccctcagggacatccgggctcagtatgagaccatcgcggctaagaacatttctgaagctgaggagtggtacaagtcgaaggtgtcagacctgacccaggcagccaacaagaacaacgacgccctgcgccaggccaagcaggagatgatggaataccgacaccagatccagtcctacacctgcgagattgacgccctgaagggcactaacgattccctgatgaggcagatgcgggaattggaggaccgatttgccagtgaggccagtggctaccaggacaacattgcgcgcctggaggaggaaatccggcacctcaaggatgagatggcccgccatctgcgcgagtaccaggacctgctcaacgtgaagatggccctggatgtggagattgccacctaccggaagctgctggagggagaggagagccggatcaatctccccatccagacctactctgccctcaacttccgagaaaccagccctgagcaaaggggttctgaggtccataccaagaagacggtgatgatcaagaccatcgagacacgggatggggaggtcgtcagtgaggccacacagcagcagcatgaagtgctctaaagacagagaccctctgccaccagagaccgtcctcacccctgtcctcactgctccctgaagccagccttcttccatcccaggacaccacacccagcctcagtcctcccctcacagcctctgacccctcctcactggccatccctcgtggtccccaacagcgacatagcccatccctgcctggtcacagggcatgccccggccacctctgcggaccccagctgtgagccttggctgttggcagtgagtgagcctggctcttgtgctggatggagcccaggcgggagcggtggccctgtccctcccacctctgtgacctcaggcactagcctttggctctggagacagccccagagcagggtgttgggatactgcagggccaggactgagccccgcagacctccccagcccctagcccaggagagagaaagccaggcaggtagccagggggactagcccctgtggagactggggggcttgaaattgtccccgtggtctcttactttcctttccccagcccagggtggacttagaaagcaggggctacaagagggaatccccgaaggtgctggaggtgggagcaggagattgagaaggagagaaagtgggtgagatgctggagaagagaggagaggagagaggcagagagcggtctcaggctggtgggaggggcgcccacctccccacgccctcccctcccctgctgcaggggctctggagagaaacaataaagagattcacacacaagcc

SEQ ID NO: 976 - protein, 470 aa, Homo sapiens
MSQAYSSSQRVSSYRRTFGGAPGFPLGSPLSSPVFPRAGFGSKGSSSSVTSRVYQVSRTSGGAGGLGSLRASRLGTTRTPSSYGAGELLDFSLADAVNQEFLTTRTNEKVELQELNDRFANYIEKVRFLEQQNAALAAEVNRLKGREPTRVAELYEEELRELRRQVEVLTNQRARVDVERDNLLDDLQRLKAKLQEEIQLKEEAENNLAAFRADVDAATLARIDLERRIESLNEEIAFLKKVHEEEIRELQAQLQEQQVQVEMDMSKPDLTAALRDIRAQYETIAAKNISEAEEWYKSKVSDLTQAANKNNDALRQAKQEMMEYRHQIQSYTCEIDALKGTNDSLMRQMRELEDRFASEASGYQDNIARLEEEIRHLKDEMARHLREYQDLLNVKMALDVEIATYRKLLEGEESRINLPIQTYSALNFRETSPEQRGSEVHTKKTVMIKTIETRDGEVVSEATQQQHEVL

SEQ ID NO: 977 - DNA, 1696 bp, Homo sapiens
gcacgagggtgatgaaggcctacgagtgcggcgcggcctgaaggggcacgcgggggacctgcaaagctagtgaggggcggggcaggcggcgcggtgggggcgggccgagcccggaggccagatgagcggacacagccccacgcgcggggccatgcaggtggccatgaacggtaaggcccgcaaagaggcggtgcagactgcggctaaggaactcctcaagttcgtgaaccggagtccctctcctttccatgctgtggctgaatgccgcaaccgccttctccaggctggcttcagtgaactcaaggagactgagaaatggaatattaagcccgagagcaagtacttcatgaccaggaactcctccaccatcatagcttttgctgtagggggccagtacgttcctggcaatggcttcagcctcatcggggcccacacggacagcccctgcctccgggtgaaacgtcggtctcgccgcagccaggtgggcttccagcaagtcggtgtggagacctatggtggtgggatctggagcacctggtttgaccgtgacctgactctggctggacgcgtcattgtcaagtgccctacctcaggtcggctggagcagcagctggtgcacgtggagcggcccattcttcgcatcccacacctggccatccatctgcagcgaaatatcaacgagaactttgggcccaacacagagatgcatctagtccccattcttgccacagccatccaggaggagctggagaaggggactcctgagccagggcctctcaatgctgtggatgagcggcaccattcggtcctcatgtccctgctctgtgcccatctggggctgagccccaaggacatagtggagatggagctctgccttgcagacacccagcctgcggtcttgggtggtgcctatgatgagttcatctttgctcctcggctggacaatctgcacagctgcttctgtgccctgcaggccttgatagattcctgtgcaggccctggctccctggccacagagcctcacgtgcgcatggtcacactctatgacaacgaagaggtggggtctgagagtgcacagggagcacagtcactgctgacagagctggtgctgcggcggatctcagcctcgtgccagcacccgacagccttcgaggaagccatacccaagtccttcatgatcagcgcagacatggcccatgctgtgcatcccaactacctggacaagcatgaggagaaccaccggcctttattccacaagggccccgtgatcaaggtgaacagcaagcaacgctatgcttcaaacgcggtgtcagaggccctgatccgagaggtggccaacaaagtcaaggtccccctgcaggatctcatggtccggaatgacaccccctgtggaaccaccattggacctatcttggcttctcggctggggctgcgggtgctggatttaggcagcccccaactggccatgcactctatccgggagatggcctgcaccacaggagtcctccagaccctcaccctcttcaagggcttctttgagctgttcccttctctaagccataatctcttagtggattgagccctcttggaaagacttctctgccatccctttgcacctgagaggggaagttctcagctgagctgaagctggattattaaagtggattgtcactcagaaaaaaaaaaaaaaaaaaaa

SEQ ID NO: 978 - protein, 475 aa, Homo sapiens
MQVAMNGKARKEAVQTAAKELLKFVNRSPSPFHAVAECRNRLLQAGFSELKETEKWNIKPESKYFMTRNSSTIIAFAVGGQYVPGNGFSLIGAHTDSPCLRVKRRSRRSQVGFQQVGVETYGGGIWSTWFDRDLTLAGRVIVKCPTSGRLEQQLVHVERPILRIPHLAIHLQRNINENFGPNTEMHLVPILATAIQEELEKGTPEPGPLNAVDERHHSVLMSLLCAHLGLSPKDIVEMELCLADTQPAVLGGAYDEFIFAPRLDNLHSCFCALQALIDSCAGPGSLATEPHVRMVTLYDNEEVGSESAQGAQSLLTELVLRRISASCQHPTAFEEAIPKSFMISADMAHAVHPNYLDKHEENHRPLFHKGPVIKVNSKQRYASNAVSEALIREVANKVKVPLQDLMVRNDTPCGTTIGPILASRLGLRVLDLGSPQLAMHSIREMACTTGVLQTLTLFKGFFELFPSLSHNLLVD

SEQ ID NO: 979 - DNA, 1148 bp, Homo sapiens
ctttgcattgttcctcatccgcctccttgctcgccgcagccgcctccgccgcgcgcctcctccgccgccgcggactccggcagctttatcgccagagtccctgaactctcgctttctttttaatcccctgcatcggatcaccggcgtgccccaccatgtcagacgcagccgtagacaccagctccgaaatcaccaccaaggacttaaaggagaagaaggaagttgtggaagaggcagaaaatggaagagacgcccctgctaacgggaatgctaatgaggaaaatggggagcaggaggctgacaatgaggtagacgaagaagaggaagaaggtggggaggaagaggaggaggaagaagaaggtgatggtgaggaagaggatggagatgaagatgaggaagctgagtcagctacgggcaagcgggcagctgaagatgatgaggatgacgatgtcgataccaagaagcagaagaccgacgaggatgactagacagcaaaaaaggaaaagttaaactaaaaaaaaaaaggccgccgtgacctattcaccctccacttcccgtctcagaatctaaacgtggtcaccttcgagtagagaggcccgcccgcccaccgtgggcagtgccacccgcagatgacacgcgctctccaccacccaacccaaaccatgagaatttgcaacaggggaggaaaaaagaaccaaaacttccaaggccctgctttttttcttaaaagtactttaaaaaggaaatttgtttgtattttttatttacattttatatttttgtacatattgttagggtcagccatttttaatgatctcggatgaccaaaccagccttcggagcgttctctgtcctacttctgactttacttgtggtgtgaccatgttcattataatctcaaaggagaaaaaaaaccttgtaaaaaaagcaaaaatgacaacagaaaaacaatcttattccgagcattccagtaacttttttgtgtatgtacttagctgtactataagtagttggtttgtatgagatggttaaaaaggccaaagataaaaggtttctttttttttccttttttgtctatgaagttgctgtttattttttttggcctgtttgatgtatgtgtgaaacaatgttgtccaacaataaacagg

SEQ ID NO: 980 - DNA, 3649 bp, Homo sapiens
gcggcaagccccgcctcagcccctctggcaggctcccgccagcgtcgctgcggctccggcccgggagcgagcgcccggagctcggaaagatgcggcgcccgcggcggcctgggggtctcgggggatccgggggtctccggctgctcctctgcctcctgctgctgagcagccgcccggggggctgcagcgccgttagtgcccacggctgtctatttgaccgcaggctctgctctcacctggaagtctgtattcaggatggcttgtttgggcagtgccaggtgggagtggggcaggcccggccccttttgcaagtcacctccccagttctccaacgcttacaaggtgtgctccgacaactcatgtcccaaggattgtcctggcacgatgacctcacccagtatgtgatctctcaggagatggagcgcatccccaggcttcgccccccagagccccgtccaagggacaggtctggcttggcacccaagagacctggtcctgctggagagctgcttttacaggacatccccactggctccgcccctgctgcccagcatcggcttccacaaccaccagtgggcaaaggtggagctggggccagctcctctctgtcccctctgcaggctgagctgctcccgcctctcttggagcacctgctgctgcccccacagcctccccacccttcactgagttacgaacctgccttgctgcagccctacctgttccaccagtttggctcccgtgatggctccagggtctcagagggctccccagggatggtcagtgtcggccccctgcccaaggctgaagcccctgccctcttcagcagaactgcctccaagggcatatttggggaccaccctggccactcctacggggaccttccagggccttcacctgcccagctttttcaagactctgggctgctctatctggcccaggagttgccagcacccagcagggccagggtgccaaggctgccagagcaagggagcagcagccgggcagaggactccccagagggctatgagaaggaaggactaggggatcgtggagagaagcctgcttccccagctgtgcagccagatgcggctctgcagaggctggccgctgtgctggcgggctatggggtagagctgcgtcagctgacccctgagcagctctccacactcctgaccctgctgcagctactgcccaagggtgcaggaagaaatccgggaggggttgtaaatgttggagctgatatcaagaaaacaatggaggggccggtggagggcagagacacagcagagcttccagcccgcacatcccccatgcctggacaccccactgccagccctacctccagtgaagtccagcaggtgccaagccctgtctcctctgagcctcccaaagctgccagaccccctgtgacacctgtcctgctagagaagaaaagcccactgggccagagccagcccacggtggcaggacagccctcagcccgcccagcagcagaggaatatggctacatcgtcactgatcagaagcccctgagcctggctgcaggagtgaagctgctggagatcctggctgagcatgtgcacatgtcctcaggcagcttcatcaacatcagtgtggtgggaccagccctcaccttccgcatccggcacaatgagcagaacctgtctttggctgatgtgacccaacaagcagggctggtgaagtctgaactggaagcacagacagggctccaaatcttgcagacaggagtgggacagagggaggaggcagctgcagtccttccccaaactgcgcacagcacctcacccatgcgctcagtgctgctcactctggtggccctggcaggtgtggctgggctgctggtggctctggctgtggctctgtgtgtgcggcagcatgcgcggcagcaagacaaggagcgcctggcagccctggggcctgagggggcccatggtgacactacctttgagtaccaggacctgtgccgccagcacatggccacgaagtccttgttcaaccgggcagagggtccaccggagccttcacgggtgagcagtgtgtcctcccagttcagcgacgcagcccaggccagccccagctcccacagcagcaccccgtcctggtgcgaggagccggcccaagccaacatggacatctccacgggacacatgattctggcatacatggaggatcacctgcggaaccgggaccgccttgccaaggagtggcaggccctctgtgcctaccaagcagagccaaacacctgtgccaccgcgcagggggagggcaacatcaaaaagaaccggcatcctgacttcctgccctatgaccatgcccgcataaaactgaaggtggagagcagcccttctcggagcgattacatcaacgccagccccattattgagcatgaccctcggatgccagcctacatagccacgcagggcccgctgtcccataccatcgcagacttctggcagatggtgtgggagagcggctgcaccgtcatcgtcatgctgaccccgctggtggaggatggtgtcaagcagtgtgaccgctactggccagatgagggtgcctccctctaccacgtatatgaggtgaacctggtgtcggagcacatctggtgcgaggactttctggtgcggagcttctacctgaagaacgtgcagacccaggagacgcgcacgctcacgcagttccacttcctcagctggccggcagagggcacaccggcctccacgcggcccctgctggacttccgcaggaaggtgaacaagtgctaccggggccgctcctgccccatcatcgtgcactgcagtgatggtgcggggaggaccggcacctacatcctcatcgacatggtcctgaaccgcatggcaaaaggagtgaaggagattgacatcgctgccaccctggagcatgtccgtgaccagcggcctggccttgtccgctctaaggaccagtttgaatttgccctgacagccgtggcggaggaagtgaatgccatcctcaaggccctgccccagtgagaccctggggccccttggcgggcagcccagcctctgtccctctttgcctgtgtgagcatctctgtgtacccactcctcactgccccaccagccacctcttgggcatgctcagcccttcctagaagagtcaggaagggaaagccagaaggggcacgcctgcccagcctcgcatgccagagcctggggcatcccagagcccagggcatcccatgggggtgctgcagccaggaggagaggaaaggacatgggtagcaattctacccagagccttctcctgcctacattccctggcctggctctcctgtagctctcctggggttctgggagttccctgaacatctgtgtgtgtccccctatgctccagtatggaagaatggggtggagggtcgccacacccggctccccctgcttctcagccccgggcctgcctctgactcacacttgggcgctctgccctccctggcctcacgcccagcctcctcccaccaccctcccaccatgcgctgctcaacctctctccttctggcgcaagagaacatttctagaaaaaactacttttgtaccagtgtgaataaagttagtgtgttgtctgtgcagctgcaaaaaaaaaaaaaaaaaaa

SEQ ID NO: 981 - protein, 979 aa, Homo sapiens
MRRPRRPGGLGGSGGLRLLLCLLLLSSRPGGCSAVSAHGCLFDRRLCSHLEVCIQDGLFGQCQVGVGQARPLLQVTSPVLQRLQGVLRQLMSQGLSWHDDLTQYVISQEMERIPRLRPPEPRPRDRSGLAPKRPGPAGELLLQDIPTGSAPAAQHRLPQPPVGKGGAGASSSLSPLQAELLPPLLEHLLLPPQPPHPSLSYEPALLQPYLFHQFGSRDGSRVSEGSPGMVSVGPLPKAEAPALFSRTASKGIFGDHPGHSYGDLPGPSPAQLFQDSGLLYLAQELPAPSRARVPRLPEQGSSSRAEDSPEGYEKEGLGDRGEKPASPAVQPDAALQRLAAVLAGYGVELRQLTPEQLSTLLTLLQLLPKGAGRNPGGVVNVGADIKKTMEGPVEGRDTAELPARTSPMPGHPTASPTSSEVQQVPSPVSSEPPKAARPPVTPVLLEKKSPLGQSQPTVAGQPSARPAAEEYGYIVTDQKPLSLAAGVKLLEILAEHVHMSSGSFINISVVGPALTFRIRHNEQNLSLADVTQQAGLVKSELEAQTGLQILQTGVGQREEAAAVLPQTAHSTSPMRSVLLTLVALAGVAGLLVALAVALCVRQHARQQDKERLAALGPEGAHGDTTFEYQDLCRQHMATKSLFNRAEGPPEPSRVSSVSSQFSDAAQASPSSHSSTPSWCEEPAQANMDISTGHMILAYMEDHLRNRDRLAKEWQALCAYQAEPNTCATAQGEGNIKKNRHPDFLPYDHARIKLKVESSPSRSDYINASPIIEHDPRMPAYIATQGPLSHTIADFWQMVWESGCTVIVMLTPLVEDGVKQCDRYWPDEGASLYHVYEVNLVSEHIWCEDFLVRSFYLKNVQTQETRTLTQFHFLSWPAEGTPASTRPLLDFRRKVNKCYRGRSCPIIVHCSDGAGRTGTYILIDMVLNRMAKGVKEIDIAATLEHVRDQRPGLVRSKDQFEFALTAVAEEVNAILKALPQ

SEQ ID NO: 982 - DNA, 1514 bp, Mus musculus
agttctcactgagacctgtcaccccgactcaacgtgagacgcaccgcccggactcaccatgcgtgaatgcatctcagtccacgtggggcaggcaggtgtccagatgggcaatgcctgctgggagctctattgcttggaacatgggattcagcctgatgggcagatgcccagtgacaagaccattggtggaggggacgactccttcaccaccttcttctgtgaaactggtgctggaaaacacgtaccccgggcagtttttgtggatctggagcctacggtcattgatgagatccgaaatggcccataccgacagctcttccacccagagcagctcatcactgggaaagaggatgctgccaacaactatgcccgtggtcactataccattggcaaggagatcattgacccagtgctggatcggatccgcaagctgtctgaccagtgcacaggacttcagggcttcctggtgttccacagctttggtgggggcactggctctggcttcacctcactcctgatggagcggctctctgttgactatggcaagaaatccaagctggaattctccatctacccagccccccaggtgtctacagccgtggtcgagccctacaactctatcctgaccacccacaccaccctggagcactcagactgtgccttcatggtggacaacgaagcaatctatgacatctgccgccgcaacctagacatcgagcgcccaacctacaccaacctcaatcgcctcattagccaaattgtctcctccatcacagcttctctgcgctttgacggggccctcaatgtggacctgacagagttccagaccaacctggtgccctaccctcgcatccacttccccctggccacctatgcaccagtcatctctgcagaaaaggcataccacgagcagctgtcggtggcagagatcaccaatgcctgctttgagcctgccaaccagatggtaaagtgtgatccccggcacggcaagtacatggcctgctgcctgctgtaccgtggagatgtggtgcccaaggatgtcaacgctgccattgccgccatcaagaccaagcgcagcattcagtttgtggactggtgccccacaggcttcaaggttggtatcaactaccagcctcccactgtggtgcctgggggtgacctggccaaggtgcagcgtgccgtgtgcatgctgagcaacacgaccgccatcgccgaggcctgggcccgcctggaccacaagttcgacctgatgtatgccaagagggcgtttgtgcactggtatgtgggtgagggcatggaggagggtgagttctccgaggcccgtgaggatatggctgccctggagaaggattatgaggaggtgggcatcgactcctatgaggacgaggatgagggagaagaataaagcagctgcctggagcctattcactatgtttattgcaaaatcctttcgaaataaacagtttccttgcacggttaaaaaaaaaaaaaaaaaaaaaaaaaaaaaaaaaaaa

SEQ ID NO: 983 - protein, 448 aa, Mus musculus
MRECISVHVGQAGVQMGNACWELYCLEHGIQPDGQMPSDKTIGGGDDSFTTFFCETGAGKHVPRAVFVDLEPTVIDEIRNGPYRQLFHPEQLITGKEDAANNYARGHYTIGKEIIDPVLDRIRKLSDQCTGLQGFLVFHSFGGGTGSGFTSLLMERLSVDYGKKSKLEFSIYPAPQVSTAVVEPYNSILTTHTTLEHSDCAFMVDNEAIYDICRRNLDIERPTYTNLNRLISQIVSSITASLRFDGALNVDLTEFQTNLVPYPRIHFPLATYAPVISAEKAYHEQLSVAEITNACFEPANQMVKCDPRHGKYMACCLLYRGDVVPKDVNAAIAAIKTKRSIQFVDWCPTGFKVGINYQPPTVVPGGDLAKVQRAVCMLSNTTAIAEAWARLDHKFDLMYAKRAFVHWYVGEGMEEGEFSEAREDMAALEKDYEEVGIDSYEDEDEGEE

SEQ ID NO: 984 - DNA, 2972 bp, Homo sapiens
gggcctgcagttggcaggagggtcccgggcccagagccagcggggccgtgctgagacggcgtacgtgccctgcgtgagtgcgtggcggcggcgcgtgcgctaggggagtgggcggtgaggcctggtccacgtgcgtcccttcccgggacccccgcagcttggcgcccagcggctacgtgagccaaggcacccggatgtccgcgcccctctccgagtgaccagtcccggcctccggtcccgcagtgcccgcagcctcggccggcgtccacgcattgccatggtgactgtgggcaactactgcgaggccgaagggcccgtgggtccggcctggatgcaggatggcctgagtccctgcttcttcttcacgctcgtgccctcgacgcggatggctctggggactctggccttggtgctggctcttccctgcagacgccgggagcggcccgctggtgctgattcgctgtcttggggggccggccctcgcatctctccctacgtgctgcagctgcttctggccacacttcaggcggcgctgcccctggccggcctggctggccgggtgggcactgcccggggggccccactgccaagctatctacttctggcctccgtgctggagagtctggccggcgcctgtggcctgtggctgcttgtcgtggagcggagccaggcacggcagcgtctggcaatgggcatctggatcaagttcaggcacagccctggtctcctgctcctctggactgtggcgtttgcagctgagaacttggccctggtgtcttggaacagcccacagtggtggtgggcaagggcagacttgggccagcaggttcagtttagcctgtgggtgctgcggtatgtggtctctggagggctgtttgtcctgggtctctgggcccctggacttcgtccccagtcctatacattgcaggttcatgaagaggaccaagatgtggaaaggagccaggttcggtcagcagcccaacagtctacctggcgagattttggcaggaagctccgcctcctgagtggctacctgtggcctcgagggagtccagctctgcagctggtggtgctcatctgcctggggctcatgggtttggaacgggcactcaatgtgttggtgcctatattctataggaacattgtgaacttgctgactgagaaggcaccttggaactctctggcctggactgttaccagttacgtcttcctcaagttcctccaggggggtggcactggcagtacaggcttcgtgagcaacctgcgcaccttcctgtggatccgggtgcagcagttcacgtctcggcgggtggagctgctcatcttctcccacctgcacgagctctcactgcgctggcacctggggcgccgcacaggggaggtgctgcggatcgcggatcggggcacatccagtgtcacagggctgctcagctacctggtgttcaatgtcatccccacgctggccgacatcatcattggcatcatctacttcagcatgttcttcaacgcctggtttggcctcattgtgttcctgtgcatgagtctttacctcaccctgaccattgtggtcactgagtggagaaccaagtttcgtcgtgctatgaacacacaggagaacgctacccgggcacgagcagtggactctctgctaaacttcgagacggtgaagtattacaacgccgagagttacgaagtggaacgctatcgagaggccatcatcaaatatcagggtttggagtggaagtcgagcgcttcactggttttactaaatcagacccagaacctggtgattgggctcgggctcctcgccggctccctgctttgcgcatactttgtcactgagcagaagctacaggttggggactatgtgctctttggcacctacattatccagctgtacatgcccctcaattggtttggcacctactacaggatgatccagaccaacttcattgacatggagaacatgtttgacttgctgaaagaggagacagaagtgaaggaccttcctggagcagggccccttcgctttcagaagggccgtattgagtttgagaacgtgcacttcagctatgccgatgggcgggagactctgcaggacgtgtctttcactgtgatgcctggacagacacttgccctggtgggcccatctggggcagggaagagcacaattttgcgcctgctgtttcgcttctacgacatcagctctggctgcatccgaatagatgggcaggacatttcacaggtgacccaggcctctctccggtctcacattggagttgtgccccaagacactgtcctctttaatgacaccatcgccgacaatatccgttacggccgtgtcacagctgggaatgatgaggtggaggctgctgctcaggctgcaggcatccatgatgccattatggctttccctgaagggtacaggacacaggtgggcgagcggggactgaagctgagcggcggggagaagcagcgcgtcgccattgcccgcaccatcctcaaggctccgggcatcattctgctggatgaggcaacgtcagcgctggatacatctaatgagagggccatccaggcttctctggccaaagtctgtgccaaccgcaccaccatcgtagtggcacacaggctctcaactgtggtcaatgctgaccagatcctcgtcatcaaggatggctgcatcgtggagaggggacgacacgaggctctgttgtcccgaggtggggtgtatgctgacatgtggcagctgcagcagggacaggaagaaacctctgaagacactaagcctcagaccatggaacggtgacaaaagtttggccacttccctctcaaagactaacccagaagggaataagatgtgtctcctttccctggcttatttcatcctggtcttggggtatggtgctagctatggtaagggaaagggacctttccgaaaaacatcttttggggaaataaaaatgtggactgtg

SEQ ID NO: 985 - DNA, 601 bp, Homo sapiens
gtgcacttcagctatgccgatgggtgaggccttccttttgcttcctttgcttttccgttcatttgcacactgccttcctgcttctcagtgctctgaatccctgcttttggaaaagagcctgggcaggggaggggcagggcctactagcagctctggtgatggaaggtgcctgctgagcaaccccacctttccttgcaggcgggagactctgcaggacgtgtctttcactgtgatgcctggacagacacttgccctggtgagaggagacccagccacttggcccagatgcctcaagcttccctcattcagtgcccatggtagcttgtgacccaggctgtggagtcagagagcccagtcacgataggcaaccggattgaatggtgcagcctccatggacactggtgacctcttggagagggaacctcaaaagccagtgggcctcggccggctgcggtggcacatgcctgtaatcccagcactttgggaggcttaggtggccagatcacctaaggtgggcccatctggggcagggaagagcacaattttgcgcctgctgtttcgcttctacgacatcagctctggctgcatccgaatagatggg

SEQ ID NO: 986 - DNA, 1977 bp, Homo sapiens
gctgccccggtatccccgtgtggggcaggaagtgggcttccagattcccagtatccccggtagggtctgcttctgctcgctcgggaagggcggtggccgtcccattactcaaccaaccctcaacgcactggtcctcccagttccctcccctcagtgggtaaacaaacacacaccagcgcttgactcgacagactcgaaaacaacatctactcagaaaagttgtttctttcctatctccttaaactttcccacttccacatatcggagcttcttcccacctcggcctactcaagcatgagatcggaggcgggagggcggcgactggcggcgcgatggacctgaccgggctcctgctggacgaagaaggcaccttctccctcgccggcttccaggacttcacgttcctcccaggacaccagaagctgagtgcccggatccgaaggaggctctactatggctgggactgggaagccgactgtagcctggaggagctctccagcccggtggcagacattgctgtcgaactgctccagaaggcagcccccagccctattcgccgactccagaagaaatatgtagctcatgtgtcccgggaggcatgcatctccccatgtgctatgatgctggctctggtgtacattgaacggctccggcaccgaaacccagactacttgcagcatgtgtcatcctctgacttgttcctgatctccatgatggtggccagtaagtacctctatgatgaaggggaggaggaggaggtcttcaacgacgaatggggagctgctgggggtgtggccgtgcccactctcaatgccttggagaggggcttcctgagtgccatggattggcatctctacactgaccctcgggagatctttgaggtgctgagctggttggagagctgtgtggctgagcagcagggacggtggcgaggctggtacacctacacagacctgtgtgtgctgctggagcagccgacctggcagttggccctgggctccctctgccagcggctggtaaagctgtcttgcctgttagctgtggcatatgtgagcagtgtggccctggctgtggcatcggtggccgtaatacatcagtctttggggctgtcctgcatccctacacctgggccgcctgaccttggactgacctcccgttgcctcctggagccctgcataccttctgtgccacaatgcctgccgtctctcgctaatgtctccagctgcctggaaggcagcatggggctgcggtcactctggggcagtcttctggcctcactgactcctccaccattgcctcccccagacccccctgcccctcccactcttcttcataactgccacctttgccagaagctccagagagactccccaacctgccatgcctgcctccaccccaaccgtacagtccccactgcgctgtccagcccctggtaccatacctatggcctggctcccccctggccttggagcccggtgctcctttcacttcctcagcctcagcaatgttcccttttcagtgtcatggagctggctcgcctcaagtctttcgttttcccaggctaggtagggctgtgaggaatgcattaagagggtttgggagtttctgagaacctggaggagcaaagcttgattcagatcctgtctgcctcgctgggtccttggcaggtcccctgtcctcctgggtgggagcttatggggtggtggggcagaaggactgaaggtaattcactcctagatcgcagtggctggctgcttggccaggacagtgatgccgccagggagagcttccgcttggtgaccagggacatgtcccagatggacatagaagcccctctctgcctccctgggattttttagacttttacttttgatttccctaggatggaagagtataggtgggagataagggaagtggggtgagaggagaaaggaaatgttggcatgggcctgtgtgatgtccctgaggcagaagagc

SEQ ID NO: 987 - protein, 410 aa, Homo sapiens
MDLTGLLLDEEGTFSLAGFQDFTFLPGHQKLSARIRRRLYYGWDWEADCSLEELSSPVADIAVELLQKAAPSPIRRLQKKYVAHVSREACISPCAMMLALVYIERLRHRNPDYLQHVSSSDLFLISMMVASKYLYDEGEEEEVFNDEWGAAGGVAVPTLNALERGFLSAMDWHLYTDPREIFEVLSWLESCVAEQQGRWRGWYTYTDLCVLLEQPTWQLALGSLCQRLVKLSCLLAVAYVSSVALAVASVAVIHQSLGLSCIPTPGPPDLGLTSRCLLEPCIPSVPQCLPSLANVSSCLEGSMGLRSLWGSLLASLTPPPLPPPDPPAPPTLLHNCHLCQKLQRDSPTCHACLHPNRTVPTALSSPWYHTYGLAPPWPWSPVLLSLPQPQQCSLFSVMELARLKSFVFPG

SEQ ID NO: 988 - DNA, 1450 bp, Homo sapiens
gaagatatggcggcgtctgcgtctgcagctgcaggggaggaggactgggtccttccctctgaagttgaagtattggagtccatctatctagatgaactacaggtgattaaaggaaatggcagaacttcaccatgggagatctacatcactttgcatcctgccactgcagaggaccaggattcacagtatgtctgcttcactctggtgcttcaggtcccagcagagtatccccatgaggtgccacagatctctatccgaaatccccgaggactttcagatgaacagatccacacgatcttacaggtgctgggccacgtggccaaggctgggctgggcactgccatgctgtatgaactcattgagaaagggaaggaaattctcacagataacaacatccctcatggccagtgtgtcatctgcctctatggtttccaggagaaggaggcctttaccaaaacaccctgttaccactacttccactgccactgccttgctcggtacatccagcacatggagcaagagctgaaggcacaaggacaggagcaggaacaggaacggcagcatgctacaaccaaacagaaggcagtcggtgtgcagtgtccagtgtgcagagagcccctcgtgtatgatcttgcctcactgaaagcagcccctgaaccccaacagcccatggagctgtaccagcccagtgcagagagcttgcgccagcaagaagaacgcaagcggctctaccagaggcagcaggagcgggggggaatcattgaccttgaggctgagcgaaaccgatacttcatcagccttcagcagcctcctgcccctgcggaacctgagtcagctgtagatgtctccaaaggatcccaaccacccagcacccttgcagcagaactatccacctcaccagccgtccaatccactttgccacctcctctgcctgtggcgacccagcacatatgtgagaagattccagggaccaggtcaaatcagcaaaggttgggcgaaacccagaaagctatgctagatccccccaagcccagtcgaggtccctggcgacagcccgaacggaggcacccaaagggaggggagtgccacgcccctaaaggtacccgtgacacccaggaactgccacctcctgaggggcccctcaaggagcccatggacctaaagccagaaccccatagccaaggagttgaaggtcctccacaagagaaggggcctggcagctggcaggggcccccaccccgcaggactcgggactgtgttcgctgggagcgctctaaaggccggacacccggttcttcctaccctcgcctgcctcggggccagtagcataccggcctggtactcggagggagtccctgggcctggaatctaaggatggttcctagcaggacttggtggggggaacagggaattggggatgggagggaggcaataaagatatttggccttc

SEQ ID NO: 989 - protein, 439 aa, Homo sapiens
MAASASAAAGEEDWVLPSEVEVLESIYLDELQVIKGNGRTSPWEIYITLHPATAEDQDSQYVCFTLVLQVPAEYPHEVPQISIRNPRGLSDEQIHTILQVLGHVAKAGLGTAMLYELIEKGKEILTDNNIPHGQCVICLYGFQEKEAFTKTPCYHYFHCHCLARYIQHMEQELKAQGQEQEQERQHATTKQKAVGVQCPVCREPLVYDLASLKAAPEPQQPMELYQPSAESLRQQEERKRLYQRQQERGGIIDLEAERNRYFISLQQPPAPAEPESAVDVSKGSQPPSTLAAELSTSPAVQSTLPPPLPVATQHICEKIPGTRSNQQRLGETQKAMLDPPKPSRGPWRQPERRHPKGGECHAPKGTRDTQELPPPEGPLKEPMDLKPEPHSQGVEGPPQEKGPGSWQGPPPRRTRDCVRWERSKGRTPGSSYPRLPRGQ

SEQ ID NO: 990 - DNA, 3116 bp, Homo sapiens
ggcacgagggccagctgctgtagaagaggggaggaaacaagccagtgcaaggggagcaaaagagaaaaggagccaggctgggcttcctgatcccacagcatcgcagagctcgggaggcacagctcacagacacaggaaacacaggactgctattctgctctcctgcccacggtgatctggtgccagctggtggaacagtgggtgatggcgtccctgctgcaagaccagctgaccactgatcaggacttgctgctgatgcaggaaggcatgccgatgcgcaaggtgaggtccaaaagctggaagaagctaagatacttcagacttcagaatgacggcatgacagtctggcatgcacggcaggccaggggcagtgccaagcccagcttctcaatctctgatgtggagacaatacgtaatggccatgattccgagttgctgcgtagcctggcagaggagctccccctggagcagggcttcaccattgtcttccatggccgccgctccaacctggacctgatggccaacagtgttgaggaggcccagatatggatgcgagggctccagctgttggtggatcttgtcaccagcatggaccatcaggagcgcctggaccaatggctgagcgattggtttcaacgtggagacaaaaatcaggatggtaagatgagtttccaagaagttcagcggttattgcacctaatgaatgtggaaatggaccaagaatatgccttcagtctttttcaggcagcagacacgtcccagtctggaaccctggaaggagaagaattcgtacagttctataaggcattgactaaacgtgctgaggtgcaggaactgtttgaaagtttttcagctgatgggcagaagctgactctgctggaatttttggatttcctccaagaggagcagaaggagagagactgcacctctgagcttgctctggaactcattgaccgctatgaaccttcagacagtggcaaactgcggcatgtgctgagtatggatggcttcctcagctacctctgctctaaggatggagacatcttcaacccagcctgcctccccatctatcaggatatgactcaacccctgaaccactacttcatctgctcttctcataacacctacctagtgggggaccagctttgcggccagagcagcgtcgagggatatatacgggccctgaagcgggggtgccgctgcgtggaggtggatgtatgggatggacctagcggggaacctgtcgtttaccacggacacaccctgacctcccgcatcctgttcaaagatgtcgtggccacagtagcacagtatgccttccagacatcagactacccagtcatcttgtccctggagacccactgcagctgggagcagcagcagaccatggcccgtcatctgactgagatcctgggggagcagctgctgagcaccaccttggatggggtgctgcccactcagctgccctcgcctgaggagcttcggaggaagatcctggtgaaggggaagaagttaacacttgaggaagacctggaatatgaggaagaggaagcagaacctgagttggaagagtcagaattggcgctggagtcccagtttgagactgagcctgagccccaggagcagaaccttcagaataaggacaaaaagaagaaatccaagcccatcttgtgtccagccctctcttccctggttatctacttgaagtctgtctcattccgcagcttcacacattcaaaggagcactaccacttctacgagatatcatctttctctgaaaccaaggccaagcgcctcatcaaggaggctggcaatgagtttgtgcagcacaatacttggcagttaagccgtgtgtatcccagcggcctgaggacagactcttccaactacaacccccaggaactctggaatgcaggctgccagatggtggccatgaatatgcagactgcagggcttgaaatggacatctgtgatgggcatttccgccagaatggcggctgtggctatgtgctgaagccagacttcctgcgtgatatccagagttctttccaccctgagaagcccatcagccctttcaaagcccagactctcttaatccaggtgatcagcggtcagcaactccccaaagtggacaagaccaaagaggggtccattgtggatccactggtgaaagtgcagatctttggcgttcgtctagacacagcacggcaggagaccaactatgtggagaacaatggttttaatccatactgggggcagacactatgtttccgggtgctggtgcctgaacttgccatgctgcgttttgtggtaatggattatgactggaaatcccgaaatgactttattggtcagtacaccctgccttggacctgcatgcaacaaggttaccgccacattcacctgctgtccaaagatggcatcagcctccgcccagcttccatctttgtgtatatctgcatccaggaaggcctggagggggatgagtcctgaggtgggcatttcacgggaagggttggtatgctggctttagacggggagaaacatctggaaggatgctcgagagaacaaatggaggtggtgaaaatcaagctttggattgtgcattcctaggcacaaaattacctcattcttcctaacaagcaatctgggacctgattttccaccttttttctcttttcttcccttcctttgttttcataagcctttggtatctttcctgcccttttcctttgtgtactctatactggagttcccttcttcctcttgctgtaggctcaatcccataccgacatctacaactaatctttcccatcaactctgtgtgaaggcaggttgcaactagaaattcagaggggcttggaatagagaaacctaaagaagcatcatcccctccatccccaacttcctcaaagcccaaagccaagggaaggataaatcaaggctcaaggcttccccagcaaagattagggaaagagacttgaccccaggactgtactacgactcttaagagaacactgcacagcactcaaagtcccccactggactgcttcctccttagccccactggtataaatacatctctctccaatttggcaaaaaaaaaaaaaaaaaaa

SEQ ID NO: 991 - protein, 762 aa, Homo sapiens
MASLLQDQLTTDQDLLLMQEGMPMRKVRSKSWKKLRYFRLQNDGMTVWHARQARGSAKPSFSISDVETIRNGHDSELLRSLAEELPLEQGFTIVFHGRRSNLDLMANSVEEAQIWMRGLQLLVDLVTSMDHQERLDQWLSDWFQRGDKNQDGKMSFQEVQRLLHLMNVEMDQEYAFSLFQAADTSQSGTLEGEEFVQFYKALTKRAEVQELFESFSADGQKLTLLEFLDFLQEEQKERDCTSELALELIDRYEPSDSGKLRHVLSMDGFLSYLCSKDGDIFNPACLPIYQDMTQPLNHYFICSSHNTYLVGDQLCGQSSVEGYIRALKRGCRCVEVDVWDGPSGEPVVYHGHTLTSRILFKDVVATVAQYAFQTSDYPVILSLETHCSWEQQQTMARHLTEILGEQLLSTTLDGVLPTQLPSPEELRRKILVKGKKLTLEEDLEYEEEEAEPELEESELALESQFETEPEPQEQNLQNKDKKKKSKPILCPALSSLVIYLKSVSFRSFTHSKEHYHFYEISSFSETKAKRLIKEAGNEFVQHNTWQLSRVYPSGLRTDSSNYNPQELWNAGCQMVAMNMQTAGLEMDICDGHFRQNGGCGYVLKPDFLRDIQSSFHPEKPISPFKAQTLLIQVISGQQLPKVDKTKEGSIVDPLVKVQIFGVRLDTARQETNYVENNGFNPYWGQTLCFRVLVPELAMLRFVVMDYDWKSRNDFIGQYTLPWTCMQQGYRHIHLLSKDGISLRPASIFVYICIQEGLEGDES

SEQ ID NO: 992 - DNA, 2688 bp, Homo sapiens
ttctcccccaggctcactcaccatgaccaagctgagcgcccaagtcaaaggctctctcaacatcaccaccccggggctgcagatatggaggatcgaggccatgcagatggtgcctgttccttccagcacctttggaagcttcttcgatggtgactgctacatcatcctggctatccacaagacagccagcagcctgtcctatgacatccactactggattggccaggactcatccctggatgagcagggggcagctgccatctacaccacacagatggatgacttcctgaagggccgggctgtgcagcaccgcgaggtccagggcaacgagagcgaggccttccgaggctacttcaagcaaggccttgtgatccggaaagggggcgtggcttctggcatgaagcacgtggagaccaactcctatgacgtccagaggctgctgcatgtcaagggcaagaggaacgtggtagctggagaggtagagatgtcctggaagagtttcaaccgaggggatgttttcctcctggaccttgggaagcttatcatccagtggaatggaccggaaagcacccgtatggagagactcaggggcatgactctggccaaggagatccgagaccaggagcggggagggcgcacctatgtaggcgtggtggacggagagaatgaattggcatccccgaagctgatggaggtgatgaaccacgtgctgggcaagcgcagggagctgaaggcggccgtgcccgacacggtggtggagccggcactcaaggctgcactcaaactgtaccatgtgtctgactccgaggggaatctggtggtgagggaagtcgccacacggccactgacacaggacctgctcagtcacgaggactgttacatcctggaccaggggggcctgaagatctacgtgtggaaagggaagaaagccaatgagcaggagaagaagggagccatgagccatgcgctgaacttcatcaaagccaagcagtacccaccaagcacacaggtggaggtgcagaatgatggggctgagtcggccgtctttcagcagctcttccagaagtggacagcgtccaaccggacctcaggcctaggcaaaacccacactgtgggctccgtggccaaagtggaacaggtgaagttcgatgccacatccatgcatgtcaagcctcaggtggctgcccagcagaagatggtagatgatgggagtggggaagtgcaggtgtggcgcattgagaacctagagctggtacctgtggattccaagtggctaggccacttctatgggggcgactgctacctgctgctctacacctacctcatcggcgagaagcagcattacctgctctacgtttggcagggcagccaggccagccaagatgaaattacagcatcagcttatcaagccgtcatcctggaccagaagtacaatggtgaaccagtccagatccgggtcccaatgggcaaggagccacctcatcttatgtccatcttcaagggacgcatggtggtctaccagggaggcacctcccgaactaacaacttggagaccgggccctccacacggctgttccaggtccagggaactggcgccaacaacaccaaggcctttgaggtcccagcgcgggccaatttcctcaattccaatgatgtctttgtcctcaagacccagtcttgctgctatctatggtgtgggaagggttgtagcggggacgagcgggagatggccaagatggttgctgacaccatctcccggacggagaagcaagtggtggtggaagggcaggagccagccaacttctggatggccctgggtgggaaggccccctatgccaacaccaagagactacaggaagaaaacctggtcatcaccccccggctctttgagtgttccaacaagactgggcgcttcctggccacagagatccctgacttcaatcaggatgacttggaagaggatgatgtgttcctactagatgtctgggaccaggtcttcttctggattgggaaacatgccaacgaggaggagaagaaggccgcagcaaccactgcacaggaatacctcaagacccatcccagcgggcgtgaccctgagacccccatcattgtggtgaagcagggacacgagccccccaccttcacaggctggttcctggcttgggatcccttcaagtggagtaacaccaaatcctatgaggacctgaaggcggagcttggcaactctagggactggagccagatcactgctgaggtcacaagccccaaagtggacgtgttcaatgctaacagcaacctcagttctgggcctctgcccatcttccccctggagcagctagtgaacaagcctgtagaggagctccccgagggtgtggaccccagcaggaaggaggaacacctgtccattgaagatttcactcaggcctttgggatgactccagctgccttctctgctctgcctcgatggaagcaacaaaacctcaagaaagaaaaaggactattttgagaagagtagctgtggttgtaaagcagtaccctaccctgattgtagggtctcattttctcaccgatattagtcctacaccaattgaagtgaaattttgcagatgtgcctatgagcacaaacttctgtggcaaatgccagttttgtttaataatgtacctattccttcagaaagatgatacccc

SEQ ID NO: 993 - DNA, 441 bp, Homo sapiens
tgctccctttttctgtctctgtccatgctgccatgtttctctgctgccaaattgggccccttggccccttccggttctgcttcctgggggcagggttcctgccttggacccccagtctgggaacggtggacatcaagtgccttgcatagagccccctcttccccgcccagctttcccaggggcacagctctaggctgggaggggagaaccagcccctccccctgccccacctcctctccccagggtctaacggttaaggggacccacataccagtgccaagggggatgtcaagtggtgatgtcgttgtgctcccctcccccagagcgggtgggcggggggtgaatatggttggcctgcatcaggtggccttcccatttaagtgccttctctgtgactgagagccctagtgtgatgagaactaaagagaaagccagacccct

SEQ ID NO: 994 - DNA, 1762 bp, Homo sapiens
atggactctgggaggcgtttgggcccagagaagtggatccgccgcttgcgccgcatggagtccgaatcggaaagcggggctgctgctgacacccccccactggagaccctaagcttccatggtgatgaagagattatcgaggtggtagaacttgatcccggtccgccggacccagatgacctggcccaggagatggaagatgtggactttgaggaagaagaggaggaagagggcaacgaagagggctgggttctagaaccccaggaaggggtggtcggcagcatggagggccccgacgatagcgaggtcacctttgcattgcactcagcatctgtgttttgtgtgagcctggaccccaagaccaataccttggcagtgaccgggggtgaagatgacaaagccttcgtatggcggctcagcgatggggagctgctctttgagtgtgcaggccataaagactctgtgacttgtgctggtttcagccatgactccactctagtggccacaggggacatgagtggcctcttgaaagtgtggcaggtggacactaaggaggaggtctggtcctttgaagcgggagacctggagtggatggagtggcatcctcgggcacctgtcctgttggcgggcacagctgacggcaacacctggatgtggaaagtcccgaatggtgactgcaagaccttccagggtcccaactgcccagccacctgtggccgagtcctccctgatgggaagagagctgtggtaggctatgaagatgggaccatcaggatttgggacctgaagcagggaagccctatccatgtactgaaagggactgagggtcaccagggcccactcacctgtgttgctgccaaccaggatggcagcttgatcctaactggctctgtggactgccaggccaagctggtcagtgccaccaccggcaaggtggtgggtgtttttagacctgagactgtggcctcccagcccagcctgggagaaggggaggagagtgagtccaactcggtggagtccttgggcttctgcagtgtgatgcccctggcagctgttggctacctggatgggaccttggccatctatgacctggctacgcagactcttaggcatcagtgtcagcaccagtcgggcatcgtgcagctgctgtgggaggcaggcactgccgtggtatatacctgcagcctggatggcatcgtgcgcctctgggacgcccggaccggccgcctgcttactgactaccggggccacacggctgagatcctggactttgccctcagcaaagatgcctccctggtggtgaccacgtcaggagaccacaaagcgaaagtattttgtgtccaaaggcctgaccgttaatggctgcagcccctgcctgtgtgtctggtgttgaggggacgaagggacccctgcccctgtctgccagcagaggcagtagggcacagagggaagaggagggtggggccctggatgactttccagcctcttcaactgacttgctcccctctccttttcttctctttagagacccagcccagggccctcccacccttgcccagacctggtgggcccttcagagggaggggtggacctgtttctctttcactttcatttgctggtgtgagccatggggtgtgtatttgtatgtggggagtaggtgtttgaggttcccgttctttcccttcccaagtctctgggggtggaaaggaggaagagatactagttaaagattttaaaaatgtaaataaaatatacttcccag

SEQ ID NO: 995 - protein, 452 aa, Homo sapiens
MDSGRRLGPEKWIRRLRRMESESESGAAADTPPLETLSFHGDEEIIEVVELDPGPPDPDDLAQEMEDVDFEEEEEEEGNEEGWVLEPQEGVVGSMEGPDDSEVTFALHSASVFCVSLDPKTNTLAVTGGEDDKAFVWRLSDGELLFECAGHKDSVTCAGFSHDSTLVATGDMSGLLKVWQVDTKEEVWSFEAGDLEWMEWHPRAPVLLAGTADGNTWMWKVPNGDCKTFQGPNCPATCGRVLPDGKRAVVGYEDGTIRIWDLKQGSPIHVLKGTEGHQGPLTCVAANQDGSLILTGSVDCQAKLVSATTGKVVGVFRPETVASQPSLGEGEESESNSVESLGFCSVMPLAAVGYLDGTLAIYDLATQTLRHQCQHQSGIVQLLWEAGTAVVYTCSLDGIVRLWDARTGRLLTDYRGHTAEILDFALSKDASLVVTTSGDHKAKVFCVQRPDR

SEQ ID NO: 996 - DNA, 1198 bp, Homo sapiens
ggcacgagctctccctccgtccttgcctcccttacccaccctcaccggcccttgtttctccttcccctgggggcagccgccgccatgatcctgctggaggtgaacaaccgcatcatcgaggagacgctcgcgctcaagttcgagaacgcggccgccggaaacaaaccggaagcagtagaagtaacatttgcagatttcgatggggtcctctatcatatttcaaatcctaatggagacaaaacaaaagtgatggtcagtatttctttgaaattctacaaggaacttcaggcacatggtgctgatgagttattaaagagggtgtacgggagtttcttggtaaatccagaatcaggatacaatgtctctttgctatatgaccttgaaaatcttccggcatccaaggattccattgtgcatcaagctggcatgttgaagcgaaattgttttgcctctgtctttgaaaaatacttccaattccaagaagagggcaaggaaggagagaacagggcagttatccattatagggatgatgagaccatgtatgttgagtctaaaaaggacagagtcacagtagtcttcagcacagtgtttaaggatgacgacgatgtggtcattggaaaggtgttcatgcaggagttcaaagaaggacgcagagccagccacacagccccacaggtcctctttagccacagggaacctcctctggagctgaaagacacagacgccgctgtgggtgacaacattggctacattacctttgtgctgttccctcgtcacaccaatgccagtgctcgagacaacaccatcaacctgatccacacgttccgggactacctgcactaccacatcaagtgctctaaggcctatattcacacacgtatgcgggcgaaaacgtctgacttcctcaaggtgctgaaccgcgcacgcccagatgccgagaaaaaagaaatgaaaacaatcacggggaagacgttttcatcccgctaatcttgggaataagaggaggaagcggctggcaactgaaggctggaacacttgctactggataatcgtagcttttaatgttgcgcctcttcaggttcttaagggattctccgttttggttccattttgtacacgtttggaaaataatctgcagaaacgagctgtgcttgcaaagacttcatagttcccaagaattaaaaaaaaaaaaaaaaaa

SEQ ID NO: 997 - protein, 300 aa, Homo sapiens
MILLEVNNRIIEETLALKFENAAAGNKPEAVEVTFADFDGVLYHISNPNGDKTKVMVSISLKFYKELQAHGADELLKRVYGSFLVNPESGYNVSLLYDLENLPASKDSIVHQAGMLKRNCFASVFEKYFQFQEEGKEGENRAVIHYRDDETMYVESKKDRVTVVFSTVFKDDDDVVIGKVFMQEFKEGRRASHTAPQVLFSHREPPLELKDTDAAVGDNIGYITFVLFPRHTNASARDNTINLIHTFRDYLHYHIKCSKAYIHTRMRAKTSDFLKVLNRARPDAEKKEMKTITGKTFSSR

SEQ ID NO: 998 - DNA, 974 bp, Homo sapiens
gcggcggcgagaggatgaacaacaagttcgacgctttgaaagatgatgacagtggggaccatgatcagaatgaagaaaacagcacacagaaagatggtgagaaggaaaaaacggaacgagacaagaatcagagcagtagcaagagaaaggctgttgtccctggaccggcagagcatcccctgcagtacaactacactttttggtactccaggagaacccccggccgtcccacgagctcacagagctatgaacagaatatcaaacagattggcacctttgcctctgtggagcagttctggaggttttatagccacatggtacgtcctggggacctgacaggccacagtgacttccatctcttcaaagaaggaattaaacccatgtgggaggatgatgcaaataaaaatggtggcaagtggattattcggctgcggaagggcttggcctcccgttgctgggagaatctcattttggccatgctgggggaacagttcatggttggggaggagatctgtggggctgtggtgtctgtccgctttcaggaagacattatttcaatatggaataagactgccagtgaccaagcaaccacagcccgaatccgggacacacttcggcgagtgcttaacctacctcccaacaccattatggaatacaaaactcacaccgacagcatcaaaatgccaggcaggctgggcccccaaaggctcctttttcaaaacctctggaagccgcggttgaatgtgccatgaccctctccctctctggatggcaccatcattgaagctggcgtcatcggagtctgttgttctgttggcgtgctacctggaagatccttctgtggtggacaagaggaattggaagagcattttatgttttaagaacaggctgacacgcagcagctacaacaacagctgagatcacttaataaatggtgctaaactcaaaaaaaaaaaaaaaaaaaaaaaaaaaaa

SEQ ID NO: 999 - protein, 245 aa, Homo sapiens
MNNKFDALKDDDSGDHDQNEENSTQKDGEKEKTERDKNQSSSKRKAVVPGPAEHPLQYNYTFWYSRRTPGRPTSSQSYEQNIKQIGTFASVEQFWRFYSHMVRPGDLTGHSDFHLFKEGIKPMWEDDANKNGGKWIIRLRKGLASRCWENLILAMLGEQFMVGEEICGAVVSVRFQEDIISIWNKTASDQATTARIRDTLRRVLNLPPNTIMEYKTHTDSIKMPGRLGPQRLLFQNLWKPRLNVP

SEQ ID NO: 1000 - DNA, 1898 bp, Homo sapiens
ggcacgaggagagcctcgagcctgcgaggagcgcgccgcccgccagctccctgcgtcccgtcccgcgtccccgcgttcccgcgtcctgcgatccgccgccatggccagtgaggagctggcgtgcaagctggagcgccggctgcggcgcgaggaggccgaggagagtggcccccagctggctcccctcggcgccccagccccggagcccaagcccgagcccgagcctcccgcccgtgcgcccacggccagcgccgacgcggagctgagcgcccagctgagccggcggctggacatcaacgagggcgctgcgcggccccggcgctgcagggtcttcaacccctacacggagttcccggagttcagccgccgcctcatcaaggacctggagagcatgttcaaactgtatgacgctgggcgggatggcttcatcgacctgatggagctgaagctgatgatggagaagctgggggccccccagacccacctgggcctgaagagcatgatcaaggaggtggatgaggacttcgatggcaagctcagcttccgggagttcctgctcattttccacaaggccgcggcaggggagctgcaggaggacagtgggctgatggcgctggcaaagctttctgagatcgatgtggccctggagggtgtcaaaggtgccaagaacttctttgaagccaaggtccaagccttgtcatcggccagtaagtttgaagcagagttgaaagctgagcaagatgagcggaagcgggaggaggaggagaggcggctccgccaggcagccttccagaaactcaaggccaacttcaatacatagtcctgctgaccttgccctctgcccacagctgtgcctcacagatgccccgagaagagatgactaggcatcttcatcactgctgtcggtcccctccctgagccagcatctccatccaccaccccgtgccagctcccgtgccagccttcattcctcccagtgtccaagcccctccaggagggtcctggggtgggccagatgcctgcccacctctgtctcctgcctctgctcctctgcccttcttatagccagaacttgtatcttctcagcaaccttcactttgtccttgtccctttaccattccccatcaaagagtagtctgctatatcaatttgtgtagatatgtctgtctttttgggtcctcagagaaaatgcccattttctcggagaattctctgcactcctctctgcttcacattcaacttccctgttctcatctttggtaggattctgccagttgcttttgcatcttctgttcctgggtaatggtgggtcttaatggaggctgggtggaccactgcccgtccactcttcaacaggaggaacagcatgccaccacagtaacacacattagagaaaggacagaggtctgctccttcctgccacctttctcctggccccttagcattcccccagtccctccctcttcaccttgctccgtctatgtcttcccagctcagccttttccccactcttaaatactgtactacttcactgtaagaacgaaagaatagttaggataccaatgagtaaaagggttcctgttcactctgactctgtgcaaattgtattacagtagaccgctgacgttcccaagtgacagatccagggcctttcaaacatccccaaagtcatggccatactcaccattagccagtttctaacatctgtttcagggtatccagctgtagatgttcttatcccccatacttgtgagttattggggttgctcacaaatactaggggtttttgttgtatttttaacaaatatatcctaatgtcatatttattctcttttgtaactgctgtctttacaataaagaaatcatctgcctttctaaaaaaaaaaaaaaaaaaaaaa

SEQ ID NO: 1001 - protein, 239 aa, Homo sapiens
MASEELACKLERRLRREEAEESGPQLAPLGAPAPEPKPEPEPPARAPTASADAELSAQLSRRLDINEGAARPRRCRVFNPYTEFPEFSRRLIKDLESMFKLYDAGRDGFIDLMELKLMMEKLGAPQTHLGLKSMIKEVDEDFDGKLSFREFLLIFHKAAAGELQEDSGLMALAKLSEIDVALEGVKGAKNFFEAKVQALSSASKFEAELKAEQDERKREEEERRLRQAAFQKLKANFNT

SEQ ID NO: 1002 - DNA, 444 bp, Homo sapiens
atggtcccctgctggaaccatggcaacatcacccgctccaaggcggaggagctgctttccaggacaggcaaggacgggagcttcctcgtgcgtgccagcgagtccatctcccgggcatacgcgctctgcgtgctgtatcggaattgcgtttacacttacagaattctgcccaatgaagatgataaattcactgttcagaaatctgaacctgacttcagccgatactggcagagaaagggtgtaaacgatgaggaaggaagtgcacgcgcaggatgcagtagtagacagggagctggactcaaggtgtggggagaccacaggcaagtccctggaggcaaaaatcctccagaagttgtcaagagggagagcgtggtgagcagaacgcccctcaggaagacagcttatgaggatggaaggaattgcttcgaggagcgatgtgattga

SEQ ID NO: 1003 - protein, 147 aa, Homo sapiens
MVPCWNHGNITRSKAEELLSRTGKDGSFLVRASESISRAYALCVLYRNCVYTYRILPNEDDKFTVQKSEPDFSRYWQRKGVNDEEGSARAGCSSRQGAGLKVWGDHRQVPGGKNPPEVVKRESVVSRTPLRKTAYEDGRNCFEERCD

SEQ ID NO: 1004 - DNA, 2527 bp, Homo sapiens
cttcgggtgtacgtgctccgggatcttcagcacccgcggccgccatcgccgtcgcttggcttcttctggactcatctgcgccacttgtccgcttcacactccgccgccatcatggtgaagctcgcgaaggcaggtaaaaatcaaggtgaccccaagaaaatggctcctcctccaaaggaggtagaagaagatagtgaagatgaggaaatgtcagaagatgaagaagatgatagcagtggagaagaggtcgtcatacctcagaagaaaggcaagaaggctgctgcaacctcagcaaagaaggtggtcgtttccccaacaaaaaaggttgcagttgccacaccagccaagaaagcagctgtcactccaggcaaaaaggcagcagcaacacctgccaagaagacagttacaccagccaaagcagttaccacacctggcaagaagggagccacaccaggcaaagcattggtagcaactcctggtaagaagggtgctgccatcccagccaagggggcaaagaatggcaagaatgccaagaaggaagacagtgatgaagaggaggatgatgacagtgaggaggatgaggaggatgacgaggacgaggatgaggatgaagatgaaattgaaccagcagcgatgaaagcagcagctgctgcccctgcctcagaggatgaggacgatgaggatgacgaagatgatgaggatgacgatgacgatgaggaagatgactctgaagaagaagctatggagactacaccagccaaaggaaagaaagctgcaaaagttgttcctgtgaaagccaagaacgtggctgaggatgaagatgaagaagaggatgatgaggacgaggatgacgacgacgacgaagatgatgaagatgatgatgatgaagatgatgaggaggaggaagaagaggaggaggaagagcctgtcaaagaagcacctggaaaacgaaagaaggaaatggccaaacagaaagcagctcctgaagccaagaaacagaaagtggaaggcacagaaccgactacggctttcaatctctttgttggaaacctaaactttaacaaatctgctcctgaattaaaaactggtatcagcgatgtttttgctaaaaatgatcttgctgttgtggatgtcagaattggtatgactaggaaatttggttatgtggattttgaatctgctgaagacctggagaaagcgttggaactcactggtttgaaagtctttggcaatgaaattaaactagagaaaccaaaaggaaaagacagtaagaaagagcgagatgcgagaacacttttggctaaaaatctcccttacaaagtcactcaggatgaattgaaagaagtgtttgaagatgctgcggagatcagattagtcagcaaggatgggaaaagtaaagggattgcttatattgaatttaagacagaagctgatgcagagaaaacctttgaagaaaagcagggaacagagatcgatgggcgatctatttccctgtactatactggagagaaaggtcaaaatcaagactatagaggtggaaagaatagcacttggagtggtgaatcaaaaactctggttttaagcaacctctcctacagtgcaacagaagaaactcttcaggaagtatttgagaaagcaacttttatcaaagtaccccagaaccaaaatggcaaatctaaagggtatgcatttatagagtttgcttcattcgaagacgctaaagaagctttaaattcctgtaataaaagggaaattgagggcagagcaatcaggctggagttgcaaggacccaggggatcacctaatgccagaagccagccatccaaaactctgtttgtcaaaggcctgtctgaggataccactgaagagacattaaaggagtcatttgacggctccgttcgggcaaggatagttactgaccgggaaactgggtcctccaaagggtttggttttgtagacttcaacagtgaggaggatgccaaagctgccaaggaggccatggaagacggtgaaattgatggaaataaagttaccttggactgggccaaacctaagggtgaaggtggcttcgggggtcgtggtggaggcagaggcggctttggaggacgaggtggtggtagaggaggccgaggaggatttggtggcagaggccggggaggctttggagggcgaggaggcttccgaggaggcagaggaggaggaggtgaccacaagccacaaggaaagaagacgaagtttgaatagcttctgtccctctgctttcccttttccatttgaaagaaaggactctggggtttttactgttacctgatcaatgacagagccttctgaggacattccaagacagtatacagtcctgtggtctccttggaaatccgtctagttaacatttcaagggcaataccgtgttggttttgactggatattcatataaactttttaaagagttgagtgatagagctaacccttatctgtaagttttgaatttatattgtttcatcccatgtacaaaaccattttttcctac

SEQ ID NO: 1005 - protein, 710 aa, Homo sapiens
MVKLAKAGKNQGDPKKMAPPPKEVEEDSEDEEMSEDEEDDSSGEEVVIPQKKGKKAAATSAKKVVVSPTKKVAVATPAKKAAVTPGKKAAATPAKKTVTPAKAVTTPGKKGATPGKALVATPGKKGAAIPAKGAKNGKNAKKEDSDEEEDDDSEEDEEDDEDEDEDEDEIEPAAMKAAAAAPASEDEDDEDDEDDEDDDDDEEDDSEEEAMETTPAKGKKAAKVVPVKAKNVAEDEDEEEDDEDEDDDDDEDDEDDDDEDDEEEEEEEEEEPVKEAPGKRKKEMAKQKAAPEAKKQKVEGTEPTTAFNLFVGNLNFNKSAPELKTGISDVFAKNDLAVVDVRIGMTRKFGYVDFESAEDLEKALELTGLKVFGNEIKLEKPKGKDSKKERDARTLLAKNLPYKVTQDELKEVFEDAAEIRLVSKDGKSKGIAYIEFKTEADAEKTFEEKQGTEIDGRSISLYYTGEKGQNQDYRGGKNSTWSGESKTLVLSNLSYSATEETLQEVFEKATFIKVPQNQNGKSKGYAFIEFASFEDAKEALNSCNKREIEGRAIRLELQGPRGSPNARSQPSKTLFVKGLSEDTTEETLKESFDGSVRARIVTDRETGSSKGFGFVDFNSEEDAKAAKEAMEDGEIDGNKVTLDWAKPKGEGGFGGRGGGRGGFGGRGGGRGGRGGFGGRGRGGFGGRGGFRGGRGGGGDHKPQGKKTKFE

SEQ ID NO: 1006 - DNA, 3179 bp, Homo sapiens
tgaactgagcggcccctgagctgacagatacactgcgcagctggaacggcgagcgagccgacgggcgagtgaggggcgcagccatgatcacctcggccgctggaattatttctcttctggatgaagatgaaccacagcttaaggaatttgcactacacaaattgaatgcagttgttaatgacttctgggcagaaatttccgagtccgtagacaaaatagaggttttatacgaagatgaaggtttccggagtcggcagtttgcagccttagtggcatctaaagtattttatcacctgggggcttttgaggagtctctgaattatgctcttggagcaggggacctcttcaatgtcaatgataactctgaatatgtggaaactattatagcaaaatgcattgatcactacaccaaacaatgtgtggaaaatgcagatttgcctgaaggagaaaaaaaaccaattgaccagagattggaaggcatcgtaaataaaatgttccagcgatgtctagatgatcacaagtataaacaggctattggcattgctctggagacacgaagactggacgtctttgaaaagaccatactggagtcgaatgatgtcccaggaatgttagcttatagccttaagctctgcatgtctttaatgcagaataaacagtttcggaataaagtactaagagttctagttaaaatctacatgaacttggagaaacctgatttcatcaatgtttgtcagtgcttaattttcttagatgatcctcaggctgtgagtgatatcttagagaaactggtaaaggaagacaacctcctgatggcatatcagatttgttttgatttgtatgaaagtgctagccagcagtttttgtcatctgtaatccagaatcttcgaactgttggcacccctattgcttctgtgcctggatccactaatacgggtactgttccgggatcagagaaagacagtgactcgatggaaacagaagaaaagacaagcagtgcatttgtaggaaagacaccagaagccagtccagagcctaaggaccagactttgaaaatgattaaaattttaagtggtgaaatggctattgagttacatctgcagttcttaatacgaaacaataatacagacctcatgattctaaaaaacacaaaggatgcagtacggaattctgtatgtcatactgcaaccgttatagcaaactcttttatgcactgtgggacaaccagtgaccagtttcttagagataatttggaatggttagccagagccactaactgggcaaaatttactgctacagccagtttgggtgtaattcataagggtcatgaaaaagaagcattacagttaatggcaacataccttcccaaggatacttctccaggatcagcctatcaggaaggtggaggtctctatgcactaggtcttattcatgccaatcatggtggtgatataattgactatctgcttaatcagcttaagaacgccagcaatgatatcgttagacacggtggcagtctgggccttggtttggcagccatgggaactgcacgtcaagatgtttatgatttgctaaaaacaaacctttatcaggatgatgcagtaacaggggaagcagctggcctggccctaggtttggttatgttgggctctaaaaatgctcaggctattgaggacatggttggttatgcacaagaaactcaacatgagaagattctgcgtggtcttgcagttggcatagctttagtaatgtatgggaggatggaagaggctgatgctctcattgaatctctctgtcgtgacaaggacccaattcttcgaaggtctggaatgtatactgtagccatggcttattgtggctctggtaacaacaaagcaattcgacgcctgctacatgttgctgtaagtgatgttaatgatgatgtcaggagggcagcagtagaatcacttgggttcattctattcagaacccctgaacagtgcccaagtgttgtctctttgttgtcagagagttacaaccctcatgtgcgctacggagctgcaatggccttggggatatgctgtgctggtacaggaaacaaggaagccattaatttgctagaaccaatgacaaacgaccccgtgaactacgtgaggcaaggggcactcatagcttcagctctcatcatgatccagcagactgaaatcacttgtccaaaggtgaatcagttcagacagctgtattccaaagtcatcaatgataagcatgatgatgtcatggccaagtttggcgctattctggcccagggcatactggatgcaggtggtcataatgtcacaatctccttgcagtccaggactgggcatactcatatgccttctgtggttggcgtccttgtatttacccagttttggttctggtttcctctttcacacttcctgtcattggcttatacccctacctgtgtcattggccttaacaaggacttaaagatgccgaaagttcagtataaatcgaactgtaaaccatccacatttgcatatcctgcccctctggaagtaccaaaagaaaaagaaaaggaaaaggtttctactgctgtattatctataactgccaaggctaaaaagaaggaaaaagaaaaggaaaaaaaggaggaggagaaaatggaagtggatgaggcagagaaaaaggaggaaaaagagaagaaaaaagaacctgagccaaacttccagttattggataacccagcccgagttatgcctgcccagcttaaggtcctaaccatgccggagacctgtagataccagcctttcaaaccactctctattggaggcatcatcattctgaaggataccagtgaagacattgaggagctggtggaacctgtggcagcacatggcccaaaaatcgaggaggaggaacaagagccagaacccccagaaccatttgagtatattgatgattaagggccagaggatctcacttgcttatctgaagaagattgtccaggctcatattgggaatgcttatgaggaaattcatgccgagacctgctattcaatgcatgtatcgttgcctctgcactgacctgaagaaccctgtctccaagtctttggttgaagagaagatatatgactgttgagtgtgctctttcacagaacttggttttcaaataaatataagatctccagatggacaag

SEQ ID NO: 1007 - DNA, 2198 bp, Homo sapiens
ctgcaagccgccggagccgggcaaccagtggaaggagcctgggagaggccaggcctccccggactgctagcctgcttttcctggggtccctggagccggaggaagaaccaggatgttgctgcctgcagaagctcagctcaggaagacttccaggaacctgaggaggagctgccactaacagccatatttcccaatggagactgtgatgaccttggaagggggtcaaaagcctgtgatggagtcgtacacactcctgctgagcccaccggagactcaagatgaaggctggacccttgcgctgtccctggctctaacctacagactggggcctggctccgtcttactggcccccaggtctccatggagactgcagaaacccccgcctgctggaggcctgccacactcacagttaccagctagacagtggggcttactaagacaagcaggacctaaaacagtgtctcccctgggaacctactccccacccagcatttgctaagtctgatcacagggaggttattttgtctctctgtctcggtttctctgagccactgagacagatggctgtccgctttgaggctctgcagagctgtggcaccccatggtgtgtctgcagtgttctgggcacatgcatgggcacccatcgttgagagtgcagctgggaagaactctgaaccagaagtcatcagagctgaggcatggccttgaacatgtcactcagtctctggggcttctgtttcacaaatgcatgagggggccaccagcccagtggctttaaaccaggggcaggttgtccctccaggcagcattggaaatgtgtgtgtgttgagggggtcacagtgactgtgggggcacccctggcatctagtgggcatcccacaatgtgcagaacagtctctgacagcaaagaattggtccattcaatgccaattgtagtacctttgagacattctggctgagccaatgccttctccctgtcagagtcccccagagcagagagggtcaggcttccctggaccttggctcccagagcaagccaaaataaagactacactgttgccttgggggcttgtcgggccagggccaagacggtctgcgtgctgcagggccaggacagaaatagccacacatgccggtgagaacaaagagcctctttctttctcatgttgacatcgactttctgtgccaagtcctttgggtataaggatgctagggaattcctataggcaccaaacagaaggaaagctaggggcttggactactgggtataggacttgctctagctctcaggtcctagcccaagctcaatgcaaacacagcccctccgggctctctgtttctgtgaggttctggaatcccttcctctgtgtccgtgagtctgacagaatcgatgatgttcccttagagctgggaaatccatgtgtttattcacggagggaactcaccattacctcccttgtcttctttgcctgccttggagaaatccagagtcttcggaatggcaaaggcagctcctggatttccctggaggggaggcactagctgagggaagtagctcccttcattcatgatgcacagtttacgcagcagacacacaactgcgcctactatttgctcggtgccctgcaaggtgctgcctaactttgatttgttatttcagctctctccaggatagtgccaaatggtgcaatgggaaacctgttttgctggggggctctagatcactggctccagaactcccggctgccagggtagcccctacccccagccccttgctcctggacagcagtgggtctcacctttagcctctgcccccagttctggtctgacccaacagaggggctctatgatattaagaaggggcccttcctgctctgtgcctcaacctattctccataatagggagtctaatcctattccttccctgcctgatgaggatggtgtgaggatgaggaggacggcatctcatttggggctttttggcagtgggcctcattttaatcctgcagggctgcctgccagtggatctatccagctgcttccttgtagccaagaatgagttcaatgaattgtgattcactgattttattgattttgttttaaaacagggagactggtatttttgaagctgctatcattttctatttctttattaatttctttgtaatcatcttattaaagttttcttatttagtggg

SEQ ID NO: 1008 - protein, 101 aa, Homo sapiens [sequence omitted]

SEQ ID NO: 1009 - DNA, 2065 bp, Homo sapiens
gggacgcgagcgggatccaaacttccggtgcctgcagagctcggagcggcggaggcagagaccgaggctgcaccggcagaggctgcggggcggacgcgcgggccggcgcagccatggtgaagattagcttccagcccgccgtggctggcatcaagggcgacaaggctgacaaggcgtcggcgtcggcccctgcgccggcctcggccaccgagatcctgctgacgccggctagggaggagcagcccccacaacatcgatccaagagggggggctcagtgggcggcgtgtgctacctgtcgatgggcatggtcgtgctgctcatgggcctcgtgttcgcctctgtctacatctacagatacttcttccttgcgcagctggcccgagataacttcttccgctgtggtgtgctgtatgaggactccctgtcctcccaggtccggactcagatggagctggaagaggatgtgaaaatctacctcgacgagaactacgagcgcatcaacgtgcctgtgccccagtttggcggcggtgaccctgcagacatcatccatgacttccagcggggtctgactgcgtaccatgatatctccctggacaagtgctatgtcatcgaactcaacaccaccattgtgctgccccctcgcaacttctgggagctcctcatgaacgtgaagagggggacctacctgccgcagacgtacatcatccaggaggagatggtggtcacggagcatgtcagtgacaaggaggccctggggtccttcatctaccacctgtgcaacgggaaagacacctaccggctccggcgccgggcaacgcggaggcggatcaacaagcgtggggccaagaactgcaatgccatccgccacttcgagaacaccttcgtggtggagacgctcatctgcggggtggtgtgaggccctcctcccccagaaccccctgccgtgttcctcttttcttctttccggctgctctctggccctcctccttccccctgcttagcttgtactttggacgcgtttctatagaggtgacatgtctctccattcctctccaaccctgcccacctccctgtaccagagctgtgatctctcggtggggggcccatctctgctgacctgggtgtggcggagggagaggcgatgctgcaaagtgttttctgtgtcccactgtcttgaagctgggcctgccaaagcctgggcccacagctgcaccggcagcccaaggggaaggaccggttgggggagccgggcatgtgaggccctgggcaaggggatggggctgtgggggcggggcggcatgggcttcagaagtatctgcacaattagaaaagtcctcagaagctttttcttggagggtacactttcttcactgtccctattcctagacctggggcttgagctgaggatgggacgatgtgcccagggagggacccaccagagcacaagagaaggtggctacctgggggtgtcccagggactctgtcagtgccttcagcccaccagcaggagcttggagtttggggagtggggatgagtccgtcaagcacaactgttctctgagtggaaccaaagaagcaaggagctaggacccccagtcctgccccccaggagcacaagcagggtcccctcagtcaaggcagtgggatgggcggctgaggaacggggcaggcaaggtcactgctcagtcacgtccacgggggacgagccgtgggttctgctgagtaggtggagctcattgctttctccaagcttggaactgttttgaaagataacacagagggaaagggagagccacctggtacttgtccaccctgcctcctctgttctgaaattccatccccctcagcttaggggaatgcacctttttccctttccttctcacttttgcatgtttttactgatcattcgatatgctaaccgttctcagccctgagccttggagaggagggctgtaacgccttcagtcagtctctggggatgaaactcttaaatgctttgtatattttctcaattagatctcttttcagaagtgtctatagaacaataaaaatcttttacttctg

SEQ ID NO: 1010 - protein, 267 aa, Homo sapiens
MVKISFQPAVAGIKGDKADKASASAPAPASATEILLTPAREEQPPQHRSKRGGSVGGVCYLSMGMVVLLMGLVFASVYIYRYFFLAQLARDNFFRCGVLYEDSLSSQVRTQMELEEDVKIYLDENYERINVPVPQFGGGDPADIIHDFQRGLTAYHDISLDKCYVIELNTTIVLPPRNFWELLMNVKRGTYLPQTYIIQEEMVVTEHVSDKEALGSFIYHLCNGKDTYRLRRRATRRRINKRGAKNCNAIRHFENTFVVETLICGVV

SEQ ID NO: 1011 - DNA, 744 bp, Homo sapiens
gatcaccaccatcgaggcagtgaagtgcaagatccaggttctgcagcagcaggcagatgatgcagaggagcgagctgagcacctccagcgagaagttgagggagaaaggcaggcccgggaagagaggtatgaaggttgttgaaaatcgggccttaaaagatgaagaaaagatggaactccaggaaatctaactccaagaagctaagcacattgcagaagaggcagataggaagtatgaagaggtggctcataagttggtgatcattgaaggagacttggaaggcacggaggaacgagctgagctgggagagtcccgttgccaagagatggatgagcagattagactgatggaccagaacctgaagtgtctgagtgctgctgaagaaatgtactctcaaaaagaagacaaatatgaggaagagatcaagattcttactgataaactcaaggaggcagagaccagtgctgagtttgctgagagatcggtagccaagctggaaaagacaattgatgacttggaagataaactgaaacgcaccaaagaggagcacctctgtacacaaaggatgctggaccagactctgattgacctgaatgagatgtagaacgccccagtcccaccctgctgctgctcctccctcttctcagagaatccagctgggctagaggctgagcacctttggaaacaacatttaagggaatgtgagcacaatgcataatgtctttaaaaagcatgttgtgatg

SEQ ID NO: 1012 - DNA, 2359 bp, Homo sapiens
gttttgcctgctagcatctccctgtaactctcccaatcttgaggagtgatccctgtcccagcccctggaaaggggcaggaacgacaaactcaaagtccaggatgttcaccatgacaagagccatggaagaggctctttttcagcacttcatgcaccagaagctggggatcgcctatgccatacacaagccatttcccttctttgaaggcctcctagacaactccatcatcactaagagaatgtacatggaatctctggaagcctgtagaaatttgatccctgtatccagagtggtgcacaacattctcacccaactggagaggacttttaacctgtctcttctggtgacattgttcagtcaaattaacctgcgtgaatatcccaatctggtgacgatttacagaagcttcaaacgtgttggtgcttcctatgaacggcagagcagagacacaccaatcctacttgaagccccaactggcctagcagaaggaagctccctccataccccactggcgctgcccccaccacaaccccctcaaccaagctgttcaccctgtgcgccaagagtcagtgagcctggaacatcctcccagcaaagcgatgagatcctgagtgagtcgcccagcccatctgaccctgtcctgcctctccctgcactcatccaggaaggaagaagcacttcagtgaccaatgacaagttaacatccaaaatgaatgcggaagaagactcagaagagatgcccagcctcctcactagcactgtgcaagtggccagtgacaacctgatcccccaaataagagataaagaagaccctcaagagatgccccactctcccttgggctctatgccagagataagagataattctccagaaccaaatgacccagaagagccccaggaggtgtccagcacaccttcagacaagaaaggaaagaaaagaaaaagatgtatctggtcaactccaaaaaggagacataagaaaaaaagcctcccaagagggacagcctcatctagacacggaatccaaaagaagctcaaaagggtggatcaggttcctcaaaagaaagatgactcaacttgtaactccacggtagagacaagggcccaaaaggcgagaactgaatgtgcccgaaagtcgagatcagaggagatcattgatggcacttcagaaatgaatgaaggaaagaggtcccagaagacgcctagtacaccacgaagggtcacacaaggggcagcctcacctgggcatggcatccaagagaagctccaagtggtggataaggtgactcaaaggaaagacgactcaacctggaactcagaggtcatgatgagggtccaaaaggcaagaactaaatgtgcccgaaagtccagatcgaaagaaaagaaaaaggagaaagatatctgttcaagctcaaaaaggagatttcagaaaaatattcaccgaagaggaaaacccaaaagtgacactgtggattttcactgttctaagctccccgtgacctgtggtgaggcgaaagggattttatataagaagaaaatgaaacacggatcctcagtgaagtgcattcggaatgaggatggaacttggttaacaccaaatgaatttgaagtcgaaggaaaaggaaggaacgcaaagaactggaaacggaatatacgttgtgaaggaatgaccctaggagagctgctgaagcggaaaaactcggatgaatgcgaggtgtgctgtcaagggggacaacttctctgctgcggtacttgtccacgagtcttccatgaggactgtcacatcccccctgtggaagccaagaggatgctgtggagttgcaccttctgcaggatgaagaggtcttcaggaagccaacagtgccatcatgtatctaagaccctggagaggcagatgcagcctcaggaccagctgattcgagattacggtgagccctttcaggaagcaatgtggttggacctggttaaggaaaggctgattacggaaatgtacacggtggcatggtttgtgcgagacatgcgcctgatgtttcgcaaccataaaacattttacaaggcttctgactttggccaggtaggacttgacttagaggcagaatttgaaaaagatctcaaagacgtgctcggttttcatgaagccaatgacggcggtttctggactcttccttgaccctgttctgtaaagactgaagcatccccacctcaggattcagctgatgggaccctggcttggactgttgattgccagtgagtctgggatgtaattggctgccctcaggacccaaacccagacacttcataggattatcacaccctccatctttattctttctttttacctttaaaagtctatatcta

SEQ ID NO: 1013 - protein, 689 aa, Homo sapiens
MFTMTRAMEEALFQHFMHQKLGIAYAIHKPFPFFEGLLDNSIITKRMYMESLEACRNLIPVSRVVHNILTQLERTFNLSLLVTLFSQINLREYPNLVTIYRSFKRVGASYERQSRDTPILLEAPTGLAEGSSLHTPLALPPPQPPQPSCSPCAPRVSEPGTSSQQSDEILSESPSPSDPVLPLPALIQEGRSTSVTNDKLTSKMNAEEDSEEMPSLLTSTVQVASDNLIPQIRDKEDPQEMPHSPLGSMPEIRDNSPEPNDPEEPQEVSSTPSDKKGKKRKRCIWSTPKRRHKKKSLPRGTASSRHGIQKKLKRVDQVPQKKDDSTCNSTVETRAQKARTECARKSRSEEIIDGTSEMNEGKRSQKTPSTPRRVTQGAASPGHGIQEKLQVVDKVTQRKDDSTWNSEVMMRVQKARTKCARKSRSKEKKKEKDICSSSKRRFQKNIHRRGKPKSDTVDFHCSKLPVTCGEAKGILYKKKMKHGSSVKCIRNEDGTWLTPNEFEVEGKGRNAKNWKRNIRCEGMTLGELLKRKNSDECEVCCQGGQLLCCGTCPRVFHEDCHIPPVEAKRMLWSCTFCRMKRSSGSQQCHHVSKTLERQMQPQDQLIRDYGEPFQEAMWLDLVKERLITEMYTVAWFVRDMRLMFRNHKTFYKASDFGQVGLDLEAEFEKDLKDVLGFHEANDGGFWTLP

SEQ ID NO: 1014 - DNA, 1962 bp, Homo sapiens
gttttgcctgctagcatctccctgtaactctcccaatcttgaggagtgatccctgtcccagcccctggaaaggggcaggaacgacaaactcaaagtccaggatgttcaccatgacaagagccatggaagaggctctttttcagcacttcatgcaccagaagctggggatcgcctatgccatacacaagccatttcccttctttgaaggcctcctagacaactccatcatcactaagagaatgtacatggaatctctggaagcctgtagaaatttgatccctgtatccagagtggtgcacaacattctcacccaactggagaggacttttaacctgtctcttctggtgacattgttcagtcaaattaacctgcgtgaatatcccaatctggtgacgatttacagaagcttcaaacgtgttggtgcttcctatgaacggcagagcagagacacaccaatcctacttgaagccccaactggcctagcagaaggaagctccctccataccccactggcgctgcccccaccacaaccccctcaaccaagctgttcaccctgtgcgccaagagtcagtgagcctggaacatcctcccagcaaagcgatgagatcctgagtgagtcgcccagcccatctgaccctgtcctgcctctccctgcactcatccaggaaggaagaagcacttcagtgaccaatgacaagttaacatccaaaatgaatgcggaagaagactcagaagagatgcccagcctcctcactagcactgtgcaagtggccagtgacaacctgatcccccaaataagagataaagaagaccctcaagagatgccccactctcccttgggctctatgccagagataagagataattctccagaaccaaatgacccagaagagccccaggaggtgtccagcacaccttcagacaagaaaggaaagaaaagaaaaagatgtatctggtcaactccaaaaaggagacataagaaaaaaagcctcccaagagggacagcctcatctagacacggaatccaaaagaagctcaaaagggtggatcaggttcctcaaaagaaagatgactcaacttgtaactccacggtagagacaagggcccaaaaggcgagaactgaatgtgcccgaaagtcgagatcagaggagatcattgatggcacttcagaaatgaatgaaggaaagaggtcccagaagacgcctagtacaccacgaagggtcacacaaggggcagcctcacctgggcatggcatccaagagaagctccaagtggtggataaggtgactcaaaggaaagacgactcaacctggaactcagaggtcatgatgagggtccaaaaggcaagaactaaatgtgcccgaaagtccagatcgaaagaaaagaaaaaggagaaagatatctgttcaagctcaaaaaggagatttcagaaaaatattcaccgaagaggaaaacccaaaagtgacactgtggattttcactgttctaagctccccgtgacctgtggtgaggcgaaagggattttatataagaagaaaatgaaacacggatcctcagtgaagtgcattcggaatgaggatggaacttggttaacaccaaatgaatttgaagtcgaaggaaaaggaaggaacgcaaagaactggaaacggaatatacgttgtgaaggaatgaccctaggagagctgctgaagagtggacttttgctctgtcctccaagaataaatctcaagagagagttaaatagcaagtgaatttctactaccctctcagtcaccatgttgcagactttccctgtctggaggctcaccttagagcttctgagtttccaagctctgagtcacctccacatttgggcatggcatcttcaaaacaattaatttgcatagttaatttgggatggggaagcaaatgactctaaaataaaaattaaatgaaaaagctcaaaaaaaaaaaaaaaaaaaa

SEQ ID NO: 1015 - protein, 549 aa, Homo sapiens
MFTMTRAMEEALFQHFMHQKLGIAYAIHKPFPFFEGLLDNSIITKRMYMESLEACRNLIPVSRVVHNILTQLERTFNLSLLVTLFSQINLREYPNLVTIYRSFKRVGASYERQSRDTPILLEAPTGLAEGSSLHTPLALPPPQPPQPSCSPCAPRVSEPGTSSQQSDEILSESPSPSDPVLPLPALIQEGRSTSVTNDKLTSKMNAEEDSEEMPSLLTSTVQVASDNLIPQIRDKEDPQEMPHSPLGSMPEIRDNSPEPNDPEEPQEVSSTPSDKKGKKRKRCIWSTPKRRHKKKSLPRGTASSRHGIQKKLKRVDQVPQKKDDSTCNSTVETRAQKARTECARKSRSEEIIDGTSEMNEGKRSQKTPSTPRRVTQGAASPGHGIQEKLQVVDKVTQRKDDSTWNSEVMMRVQKARTKCARKSRSKEKKKEKDICSSSKRRFQKNIHRRGKPKSDTVDFHCSKLPVTCGEAKGILYKKKMKHGSSVKCIRNEDGTWLTPNEFEVEGKGRNAKNWKRNIRCEGMTLGELLKSGLLLCPPRINLKRELNSK

SEQ ID NO: 1016 - DNA, 2431 bp, Homo sapiens
gttttgcctgctagcatctccctgtaactctcccaatcttgaggagtgatccctgtcccagcccctggaaaggggcaggaacgacaaactcaaagtccaggatgttcaccatgacaagagccatggaagaggctctttttcagcacttcatgcaccagaagctggggatcgcctatgccatacacaagccatttcccttctttgaaggcctcctagacaactccatcatcactaagagaatgtacatggaatctctggaagcctgtagaaatttgatccctgtatccagagtggtgcacaacattctcacccaactggagaggacttttaacctgtctcttctggtgacattgttcagtcaaattaacctgcgtgaatatcccaatctggtgacgatttacagaagcttcaaacgtgttggtgcttcctatgaacggcagagcagagacacaccaatcctacttgaagccccaactggcctagcagaaggaagctccctccataccccactggcgctgcccccaccacaaccccctcaaccaagctgttcaccctgtgcgccaagagtcagtgagcctggaacatcctcccagcaaagcgatgagatcctgagtgagtcgcccagcccatctgaccctgtcctgcctctccctgcactcatccaggaaggaagaagcacttcagtgaccaatgacaagttaacatccaaaatgaatgcggaagaagactcagaagagatgcccagcctcctcactagcactgtgcaagtggccagtgacaacctgatcccccaaataagagataaagaagaccctcaagagatgccccactctcccttgggctctatgccagagataagagataattctccagaaccaaatgacccagaagagccccaggaggtgtccagcacaccttcagacaagaaaggaaagaaaagaaaaagatgtatctggtcaactccaaaaaggagacataagaaaaaaagcctcccaagagggacagcctcatctagacacggaatccaaaagaagctcaaaagggtggatcaggttcctcaaaagaaagatgactcaacttgtaactccacggtagagacaagggcccaaaaggcgagaactgaatgtgcccgaaagtcgagatcagaggagatcattgatggcacttcagaaatgaatgaaggaaagaggtcccagaagacgcctagtacaccacgaagggtcacacaaggggcagcctcacctgggcatggcatccaagagaagctccaagtggtggataaggtgactcaaaggaaagacgactcaacctggaactcagaggtcatgatgagggtccaaaaggcaagaactaaatgtgcccgaaagtccagatcgaaagaaaagaaaaaggagaaagatatctgttcaagctcaaaaaggagatttcagaaaaatattcaccgaagaggaaaacccaaaagtgacactgtggattttcactgttctaagctccccgtgacctgtggtgaggcgaaagggattttatataagaagaaaatgaaacacggatcctcagtgaagtgcattcggaatgaggatggaacttggttaacaccaaatgaatttgaagtcgaaggaaaaggaaggaacgcaaagaactggaaacggaatatacgttgtgaaggaatgaccctaggagagctgctgaagcggaaaaactcggatgaatgcgaggtgtgctgtcaagggggacaacttctctgctgcggtacttgtccacgagtcttccatgaggactgtcacatcccccctgtggaagccaagaggatgctgtggagttgcaccttctgcaggatgaagaggtcttcaggaagccaacagtgccatcatgtatctaagaccctggagaggcagatgcagcctcaggaccagctgaaatgtgagttcctcctcttgaaggcctactgtcatccacaaagctccttttttacgggcatcccatttaatattcgagattacggtgagccctttcaggaagcaatgtggttggacctggttaaggaaaggctgattacggaaatgtacacggtggcatggtttgtgcgagacatgcgcctgatgtttcgcaaccataaaacattttacaaggcttctgactttggccaggtaggacttgacttagaggcagaatttgaaaaagatctcaaagacgtgctcggttttcatgaagccaatgacggcggtttctggactcttccttgaccctgttctgtaaagactgaagcatccccacctcaggattcagctgatgggaccctggcttggactgttgattgccagtgagtctgggatgtaattggctgccctcaggacccaaacccagacacttcataggattatcacaccctccatctttattctttctttttacctttaaaagtctatatcta

SEQ ID NO: 1017 - protein, 713 aa, Homo sapiens
MFTMTRAMEEALFQHFMHQKLGIAYAIHKPFPFFEGLLDNSIITKRMYMESLEACRNLIPVSRVVHNILTQLERTFNLSLLVTLFSQINLREYPNLVTIYRSFKRVGASYERQSRDTPILLEAPTGLAEGSSLHTPLALPPPQPPQPSCSPCAPRVSEPGTSSQQSDEILSESPSPSDPVLPLPALIQEGRSTSVTNDKLTSKMNAEEDSEEMPSLLTSTVQVASDNLIPQIRDKEDPQEMPHSPLGSMPEIRDNSPEPNDPEEPQEVSSTPSDKKGKKRKRCIWSTPKRRHKKKSLPRGTASSRHGIQKKLKRVDQVPQKKDDSTCNSTVETRAQKARTECARKSRSEEIIDGTSEMNEGKRSQKTPSTPRRVTQGAASPGHGIQEKLQVVDKVTQRKDDSTWNSEVMMRVQKARTKCARKSRSKEKKKEKDICSSSKRRFQKNIHRRGKPKSDTVDFHCSKLPVTCGEAKGILYKKKMKHGSSVKCIRNEDGTWLTPNEFEVEGKGRNAKNWKRNIRCEGMTLGELLKRKNSDECEVCCQGGQLLCCGTCPRVFHEDCHIPPVEAKRMLWSCTFCRMKRSSGSQQCHHVSKTLERQMQPQDQLKCEFLLLKAYCHPQSSFFTGIPFNIRDYGEPFQEAMWLDLVKERLITEMYTVAWFVRDMRLMFRNHKTFYKASDFGQVGLDLEAEFEKDLKDVLGFHEANDGGFWTLP

SEQ ID NO: 1018 - DNA, 2461 bp, Homo sapiens
atgctgggtacgctgcgcgccatggagggcgaggacgtggaagacgaccagctgctgcagaagctcagggccagtcgccgccgcttccagaggcgcatgcagcggctgatagagaagtacaaccagcccttcgaggacaccccggtggtgcaaatggccacgctgacctacgagacgccacagggattgagaatttggggtggaagactaataaaggaaagaaacaaaggagagatccaggactcctccatgaagcccgcggacaggacagatggctccgtgcaagctgcagcctggggtcctgagcttccctcgcaccgcacagtcctgggagccgattcaaaaagcggtgaggtcgatgccacgtcagaccaggaagagtcagttgcttgggccttagcacctgcagtgcctcaaagccctttgaaaaatgaattaagaaggaaatacttgacccaagtggatatactgctacaaggtgcagagtattttgagtgtgcaggtaacagagctggaagggatgtacgtgtgactccgctgccttcactggcctcacctgccgtgcctgcccccggatactgcagtcgtatctccggaaagagtcctggtgacccagcgaaaccagcttcatctcccagagaatgggatcctttgcatccttcctccacagacatggccttagtacctagaaatgacagcctctccctacaagagaccagtagcagcagcttcttaagcagccagccctttgaagatgatgacatttgcaatgtgaccatcagtgacctgtacgcagggatgctgcactccatgagccggctgttgagcacaaagccatcaagcatcatctccaccaaaacgttcatcatgcaaaactggaactgcaggaggaggcacagatataagagcaggatgaacaaaacatattgcaaaggagccagacgttctcagaggagctccaaggagaacttcataccctgctctgagcctgtgaaagggacaggggcattaagagattgcaagaacgtattagatgtttcttgccgtaagacaggtttaaaattggaaaaagcttttcttgaagtcaacagaccccaaatccataagttagatccaagttggaaggagcgcaaagtgacaccctcgaagtattcttccttgatttacttcgactccagtgcaacatataatcttgatgaggaaaatagatttaggacattaaaatggttaatttctcctgtaaaaatagtttccagaccaacaatacgacagggccatggagagaaccgtcagagggagattgaaatccgatttgatcagcttcatcgggaatattgcctgagtcccaggaaccagcctcgccggatgtgcctcccggactcctgggccatgaacatgtacagagggggtcctgcgagtcctggtggccttcagggcttagaaacccgcaggctgagtttaccttccagcaaagcaaaagcaaaaagtttaagtgaggcttttgaaaacctaggcaaaagatctctggaagcaggtaggtgcctgcccaagagcgattcatcttcatcacttccaaagaccaaccccacacacagcgcaactcgcccgcagcagacatctgaccttcacgttcagggaaatagttctggaatatttagaaagtcagtgtcacccagcaaaactctttcagtcccagataaagaagtgccaggccacggaaggaatcgttacgatgaaattaaagaagaatttgacaagcttcatcaaaagtattgcctcaaatctcctgggcagatgacagtgcctttatgtattggagtgtctacagataaagcaagtatggaagttcgatatcaaacagaaggcttcttaggaaaattaaatccagaccctcacttccagggtttccagaagttgccatcatcacccctggggtgcagaaaaagtctactgggctcaactgcaattgaggctccttcatctacatgtgttgctcgtgccatcacgagggatggcacgagggaccatcagttccctgcaaaaagacccaggctatcagaaccccagggctccggacgccagggcaattccctgggtgcctcagatggggtggacaacaccgtcagaccgggagaccagggcagctcttcacagcccaactcagaagagagaggagagaacacgtcttacaggatggaagagaaaagtgatttcatgctagaaaaattggaaactaaaagtgtgtagctaggttatttcggagtgttatttatcttcccacttgctctctgtttgtatttttgttttgtttttgattcttgagactgtgaggacttggttgacttctctgcccttaaagtaaatattagtgaaattggttccatcagagataacctcgagttcttggtgtagaaattatgtgaataaagttgctcaattagaaaaaaaaaaaaaaaaaaaa

SEQ ID NO: 1019 - protein, 482 aa, Homo sapiens
MLHSMSRLLSTKPSSIISTKTFIMQNWNCRRRHRYKSRMNKTYCKGARRSQRSSKENFIPCSEPVKGTGALRDCKNVLDVSCRKTGLKLEKAFLEVNRPQIHKLDPSWKERKVTPSKYSSLIYFDSSATYNLDEENRFRTLKWLISPVKIVSRPTIRQGHGENRQREIEIRFDQLHREYCLSPRNQPRRMCLPDSWAMNMYRGGPASPGGLQGLETRRLSLPSSKAKAKSLSEAFENLGKRSLEAGRCLPKSDSSSSLPKTNPTHSATRPQQTSDLHVQGNSSGIFRKSVSPSKTLSVPDKEVPGHGRNRYDEIKEEFDKLHQKYCLKSPGQMTVPLCIGVSTDKASMEVRYQTEGFLGKLNPDPHFQGFQKLPSSPLGCRKSLLGSTAIEAPSSTCVARAITRDGTRDHQFPAKRPRLSEPQGSGRQGNSLGASDGVDNTVRPGDQGSSSQPNSEERGENTSYRMEEKSDFMLEKLETKSV

SEQ ID NO: 1020 - DNA, 1775 bp, Homo sapiens
aagaccgtcccggatggcctcggggactgccagtgtgtggaggtgagctccgggattgccggcattcccgcttctgctggttgcttcatgctgcaggctgcggccgtcagccctcgctcgcattggtggcgctgaggtgccggggcagcaagtgacatgtcgtcgggcctccgcgccgctgacttcccccgctggaagcgccacatctcggagcaactgaggcgccgggaccggctgcagagacaggcgttcgaggagatcatcctgcagtataacaaattgctggaaaagtcagatcttcattcagtgttggcccagaaactacaggctgaaaagcatgacgtaccaaacaggcacgagataagtcccggacatgatggcacatggaatgacaatcagctacaagaaatggcccaactgaggattaagcaccaagaggaactgactgaattacacaagaaacgtggggagttagctcaactggtgattgacctgaataaccaaatgcagcggaaggacagggagatgcagaaagagcttgcagaagcagcaaaggaacctctaccagtcgaacaggatgatgacattgaggtcattgtggatgaaacttctgatcacacagaagagacctctcctgtgcgagccatcagcagagcagccactaagcgactctcgcagcctgctggaggccttctggattctgtcactaatatctttgggagacgctctgtctcttccttcccagtcccccaggacaatgtggatactcatcctggttctggtaaagaagtgagggtaccagctactgccttgtgtgtcttcgatgcacatgatggggaagtcaacgctgtgcagttcagtccaggttcccggttactggccactggaggcatggaccgcagggttaagctttgggaagtatttggagaaaaatgtgagttcaagggttccctatctggcagtaatgcaggaattacaagcattgaatttgatagtgctggatcttacctcttagcagcttcaaatgattttgcaagccgaatctggactgtggatgattatcgattacgggtaagacccagttaagaaagttagtgcaatctccaaacttcatgtggtgttatcaaggcacaaactggcaggtgcttaattaggggactttgttttcccaaaaatcatgcttgattcaccctgcccttcctttcctccttggggaaatctgtgtttccactttatactctttgtccaaaactcagtttcaaaatatttgcaatgggaccctcacatttgcatgaaaaccttggaatactcttcataaggactaaatactttggtagatagcaattttggcttaatggcacagaacttagcaacagcatgtgaattgtgattcctgtgggctctaaaacctaattacctaaagtgggatatagaagtacaaatggatgtatcatagggataagacaattctgaaacaaaaactccaagctgagaaagaggggacaggtgtcagagcagggagaaatgattggatgttgaggaaagctgcatttgaaccaaaacttgccaagaattctcttggcatctgacagagagaccaaaacttggttgtatcatttttgattggggcagggggcggagggcgaagcatgtaacttaatttgcagacattttttttccccataagcctgaaggaatcatcacataagcttattaaatacaagctattgaaagatataatggaggatgaatttggcattagtaggcattttact

SEQ ID NO: 1021 - protein, 309 aa, Homo sapiens
MSSGLRAADFPRWKRHISEQLRRRDRLQRQAFEEIILQYNKLLEKSDLHSVLAQKLQAEKHDVPNRHEISPGHDGTWNDNQLQEMAQLRIKHQEELTELHKKRGELAQLVIDLNNQMQRKDREMQKELAEAAKEPLPVEQDDDIEVIVDETSDHTEETSPVRAISRAATKRLSQPAGGLLDSVTNIFGRRSVSSFPVPQDNVDTHPGSGKEVRVPATALCVFDAHDGEVNAVQFSPGSRLLATGGMDRRVKLWEVFGEKCEFKGSLSGSNAGITSIEFDSAGSYLLAASNDFASRIWTVDDYRLRVRPS

SEQ ID NO: 1022 - DNA, 3628 bp, Homo sapiens
aagagagaaggcttctgccagctcctgcagcagatgaagaacaagcactcagagcagccggagcccgacatgatcaccatcttcatcggcacctggaacatgggtaacgccccccctcccaagaagatcacgtcctggtttctctccaaggggcagggaaagacgcgggacgactctgcggactacatcccccatgacatttacgtgatcggcacccaagaggaccccctgagtgagaaggagtggctggagatcctcaaacactccctgcaagaaatcaccagtgtgacttttaaaacagtcgccatccacacgctctggaacatccgcatcgtggtgctggccaagcctgagcacgagaaccggatcagccacatctgtactgacaacgtgaagacaggcattgcaaacacactggggaacaagggagccgtgggggtgtcgttcatgttcaatggaacctccttagggttcgtcaacagccacttgacttcaggaagtgaaaagaaactcaggcgaaaccaaaactatatgaacattctccggttcctggccctgggcgacaagaagctgagtccctttaacatcactcaccgcttcacgcacctcttctggtttggggatcttaactaccgtgtggatctgcctacctgggaggcagaaaccatcatccagaaaatcaagcagcagcagtacgcagacctcctgtcccacgaccagctgctcacagagaggagggagcagaaggtcttcctacacttcgaggaggaagaaatcacgtttgccccaacctaccgttttgagagactgactcgggacaaatacgcctacaccaagcagaaagcgacagggatgaagtacaacttgccttcctggtgtgaccgagtcctctggaagtcttatcccctggtgcacgtggtgtgtcagtcttatggcagtaccagcgacatcatgacgagtgaccacagccctgtctttgccacatttgaggcaggagtcacttcccagtttgtctccaagaacggtcccgggactgttgacagccaaggacagattgagtttctcaggtgctatgccacattgaagaccaagtcccagaccaaattctacctggagttccactcgagctgcttggagagttttgtcaagagtcaggaaggagaaaatgaagaaggaagtgagggggagctggtggtgaagtttggtgagactcttccaaagctgaagcccattatctctgaccctgagtacctgctagaccagcacatcctcatcagcatcaagtcctctgacagcgacgaatcctatggcgagggctgcattgcccttcggttagaggccacagaaacgcagctgcccatctacacgcctctcacccaccatggggagttgacaggccacttccagggggagatcaagctgcagacctctcagggcaagacgagggagaagctctatgactttgtgaagacggagcgtgatgaatccagtgggccaaagaccctgaagagcctcaccagccacgaccccatgaagcagtgggaagtcactagcagggcccctccgtgcagtggctccagcatcactgaaatcatcaaccccaactacatgggagtggggccctttgggccaccaatgcccctgcacgtgaagcagaccttgtcccctgaccagcagcccacagcctggagctacgaccagccgcccaaggactccccgctggggccctgcaggggagaaagtcctccgacacctcccggccagccgcccatatcacccaagaagtttttaccctcaacagcaaaccggggtctccctcccaggacacaggagtcaaggcccagtgacctggggaagaacgcaggggacacgctgcctcaggaggacctgccgctgacgaagcccgagatgtttgagaaccccctgtatgggtccctgagttccttccctaagcctgctcccaggaaggaccaggaatcccccaaaatgccgcggaaggaacccccgccctgcccggaacccggcatcttgtcgcccagcatcgtgctcaccaaagcccaggaggctgatcgcggcgaggggcccggcaagcaggtgcccgcgccccggctgcgctccttcacgtgctcatcctctgccgagggcagggcggccggcggggacaagagccaagggaagcccaagaccccggtcagctcccaggccccggtgccggccaagaggcccatcaagccttccagatcggaaatcaaccagcagaccccgcccaccccgacgccgcggccgccgctgccagtcaagagcccggcggtgctgcacctccagcactccaagggccgcgactaccgcgacaacaccgagctcccgcatcacggcaagcaccggccggaggaggggccaccagggcctctaggcaggactgccatgcagtgaagccctcagtgagctgccactgagtcgggagcccagaggaacggcgtgaagccactggaccctctcccgggacctcctgctggctcctcctgcccagcttcctatgcaaggctttgtgttttcaggaaagggcctagcttctgtgtggcccacagagttcactgcctgtgagacttagcaccaagtgctgaggctggaagaaaaacgcacaccagacgggcaacaaacagtctgggtccccagctcgctcttggtacttgggaccccagtgcctcgttgagggcgccattctgaagaaaggaactgcagcgccgatttgagggtggagatatagataataataatattaataataataatggccacatggatcgaacactcatgatgtgccaagtgctgtgctaagtgctttacgaacattcgtcatatcaggatgacctcgagagctgaggctctagccacctaaaaccacgtgcccaaacccaccagtttaaaacggtgtgtgttcggaggggtgaaagcattaagaagcccagtgccctcctggagtgagacaagggctcggccttaaggagctgaagagtctgggtagcttgtttagggtacaagaagcctgttctgtccagcttcagtgacacaagctgctttagctaaagtcccgcgggttccggcatggctaggctgagagcagggatctacctggcttctcagttctttggttggaaggagcaggaaatcagctcctattctccagtggagagatctggcctcagcttgggctagagatgccaaggcctgtgccaggttccctgtgccctcctcgaggtgggcagccatcaccagccacagttaagccaagccccccaacatgtattccatcgtgctggtagaagagtctttgctgttgctcccgaaagccgtgctctccagcctggctgccagggagggtgggcctcttggttccaggctcttgaaatagtgcagccttttcttcctatctctgtggctttcagctctgcttccttggttattaggagaatagatgggtgatgtctttccttatgttgctttttcaacatagcagaattaatgtagggagctaaatccagtggtgtgtgtgaatgcagaagggaatgcaccccacattcccatgatggaagtctgcgtaaccaataaattgtgcctttctcactca

SEQ ID NO: 1023 - protein, 799 aa, Homo sapiens [sequence omitted]

SEQ ID NO: 1024 - DNA, 800 bp, Homo sapiens
cgagcggactcgactcggcaccgctgtgcaccatggcccgggccctgtgccgcctcccgcggcgcggcctctggctgctcctggcccatcacctcttcatgaccactgcctgccaggaggctaactacggtgccctcctccgggagctctgcctcacccagttccaggtagacatggaggccgtcggggagacgctgtggtgtgactggggcaggaccatcaggagctacagggagctggccgactgcacctggcacatggcggagaagctgggctgcttctggcccaatgcagaggtggacaggttcttcctggcagtgcatggccgctacttcaggagctgccccatctcaggcagggccgtgcgggacccgcccggcagcatcctctaccccttcatcgtggtccccatcacggtgaccctgctggtgacggcactggtggtctggcagagcaagcgcactgagggcattgtgtaggcggggcccaggctgcccgcgggtgcacccaggctgcagggtgaggccaggcaggcctgggtaggggcagcttctggagccttgggacagagcaggcccacaatgccccccttcttccagccaagaagagctcacaggagtccagagtagccgaggctctggtattaacctggaagcccccctggctggaggccaccgccaccctaggaagggggcagggacgtgaccttgacttacctctggaaagggtcccagcctagactgcttaccccatagccacatttgtggatgagtggtttgtgattaaaagggatgttcttg

SEQ ID NO: 1025 - protein, 148 aa, Homo sapiens
MARALCRLPRRGLWLLLAHHLFMTTACQEANYGALLRELCLTQFQVDMEAVGETLWCDWGRTIRSYRELADCTWHMAEKLGCFWPNAEVDRFFLAVHGRYFRSCPISGRAVRDPPGSILYPFIVVPITVTLLVTALVVWQSKRTEGIV

SEQ ID NO: 1026 - DNA, 3656 bp, Homo sapiens
ggcacgaggccgctccccggcgggctggctcctggccccggaagcgcgagcgttcacttagcggcgagtggctccgtctccgcggacagagcgcgcgccccctggcccggcccgcgaggggctcccggcgcggtccccgagcatttcccgccgggtggagcgggccgagcccggcaggatgaccagccccgcggccgctcaaagccgggagatcgactgtttgagcccggaagcgcagaagctggcggaagcccggctcgctgcaaaacgggcggcccgcgcggaggctcgcgagatccgcatgaaggagctggagcggcagcagaaggaggaagacagtgagcgctactctcgtagatccagaagaaacacatcggcttctgatgaagacgagcgcatgtcagtgggtagtcgtggaagcctgagggtagaagagagaccagaaaaagattttactgagaaggggtctcgtaacatgccgggcctgtctgcagccacgctggcctctctgggtgggacttcctctcggagaggcagcggagacacctccttctccatcgacaccgaggcatccatcagggaaatcaaggactctctagcagaagttgaagagaaatataagaaggctatggtttccaatgctcagctagacaatgaaaagacaaacttcatgtaccaggttgataccctaaaagatatgttgctggagcttgaagaacagctggctgaatctaggcggcagtacgaagagaaaaacaaagaatttgaaagggaaaaacacgcccacagtatactgcaatttcagtttgctgaagtcaaggaggccctgaagcaaagagaggaaatgctcgagaaacatggaataatcctaaattcagaaatagctaccaatggagagacttccgacaccctcaataatgttggataccaaggtcctaccaagatgacaaaagaagagttaaatgccctcaagtctacaggggatgggaccctaggaagagccagtgaagtggaggtgaaaaatgaaatcgtggcgaatgtggggaaaagagaaatcttgcacaatactgagaaagaacaacacacagaggacacagtgaaggactgtgtggacatagaggtattccctgctggtgagaataccgaggaccagaaatcctctgaagacactgccccattcctaggaaccttagcaggtgctacctatgaagaacaggttcaaagccaaattcttgagagcagttctctccctgaaaacacagtacaggttgagtcaaatgaggtcatgggtgcaccagatgacaggaccagaactccccttgagccatccaactgttggagtgacttagatggtgggaaccacacagagaatgtgggagaggcagcagtgactcaggttgaagagcaggcaggcacagtggcctcgtgtcctttagggcatagtgatgacacagtttatcatgatgacaaatgtatggtagaggtcccccaagagttagagacaagcacagggcatagtttagagaaagaattcaccaaccaggaagcagctgagcccaaggaggttccagcgcacagtacagaagtaggtagggatcacaacgaagaagagggtgaagaaacaggattaagggacgagaaaccaatcaagacagaagttcctggttctccagcaggaactgagggcaactgtcaggaagcgacaggtccaagtacagtagacactcaaaatgaacccttagatatgaaagagcccgatgaagaaaagagtgaccaacagggagaggcattggactcatcgcagaagaagacaaagaacaagaaaaagaaaaacaagaagaaaaaatccccagtacccgtagaaacccttaaagatgttaaaaaagagttaacgtatcagaacacagatttaagtgaaattaaggaagaagagcaggtaaagtctactgacagaaagtcagcagtggaagcccaaaacgaggtgactgaaaatccaaaacagaaaattgcagcagaaagcagtgaaaatgttgattgtccggagaatcctaaaattaagttggatggaaaacttgaccaagaaggtgatgatgtacaaacagcagctgaggaggtactagctgatggagacacattagattttgaggatgacaccgttcaatcatcaggcccgagggctggtggtgaagaattagatgaaggtgttgcaaaagataatgctaaaatagatggtgccactcaaagcagtcctgcagaaccaaagagcgaagacgcagatcgctgcaccctgcccgaacatgaaagtccctcacaggacattagtgatgcctgtgaagcagaaagtacagagaggtgtgagatgtcagaacatccaagtcagaccgtcaggaaagctttagacagcaatagcctagagaacgatgacttgtcggcaccaggaagagagccagggcacttcaatccagaaagcagagaagataccagaggagggaatgagaagggcaaaagcaaagaagactgtaccatgtcctaagctgaggcaggcggcaggcgcggtgcacaggaagtctcagtgtgaaggggtcttttctctccactgccaatgtaagtagaatgttctaaattcatagagaggcactgtatgacaattaccaggtgctctactgctttaagttatagactgttacttgtagatttccatgtaatcattgaggttatcacccagattagaaagacatatttgttatcagtgtacgttctaattgagagcattccagtagtatcaaacaataatgtctactgtttatagtccacttaataaaaatagaggcatttactatttgccttaggctgataggaatgtgggttttcttgaccaaatatatcagcatctaattgaaatgaccaaatagcattcttagacttctgtattatgaatataattgatatttaaattaatgtcttgttcacatatgtgtactttcatatttgattttaaaatgtacattataacctgtatggtattttatttaaaggagataaacagccaaatagcaaataggtcactgaatgataagatttgcaccttagaacaataatcattttaaggataacaagtaaatgtctgaaagcatgaggggctttatttgcctttacctcatatgagtctttgatcttgaaccgatacttttggatctcattgttgatatacctgaatttactttgtaagagattttaacttcacttcatgctgatgatgtatcaaattcattttatagaaagatttaaagtttttttctggaagtgatatatgtcaaattacatttcctactgcagtatttgagcagggacagtcattttttaaatgtttttggccgggcgtggtggctcatgcctgtaatctcagtacattgggaggccaaggcaggtggatcacctgaggtcaagagttcgaggccagcctggccaacatggtgaaaccctgtctctactaaaaatacaaaaaattggccgggcgtgatggtgggcgcctgtaatcccagccactccagaggctgaggcaggagaatcgcttgaacctgcgaggcagagattgcagtgagccaagatcaagccattgtactccagcctggacaacaagagcgaaactctgtcta

SEQ ID NO: 1027 - protein, 784 aa, Homo sapiens
MTSPAAAQSREIDCLSPEAQKLAEARLAAKRAARAEAREIRMKELERQQKEEDSERYSRRSRRNTSASDEDERMSVGSRGSLRVEERPEKDFTEKGSRNMPGLSAATLASLGGTSSRRGSGDTSFSIDTEASIREIKDSLAEVEEKYKKAMVSNAQLDNEKTNFMYQVDTLKDMLLELEEQLAESRRQYEEKNKEFEREKHAHSILQFQFAEVKEALKQREEMLEKHGIILNSEIATNGETSDTLNNVGYQGPTKMTKEELNALKSTGDGTLGRASEVEVKNEIVANVGKREILHNTEKEQHTEDTVKDCVDIEVFPAGENTEDQKSSEDTAPFLGTLAGATYEEQVQSQILESSSLPENTVQVESNEVMGAPDDRTRTPLEPSNCWSDLDGGNHTENVGEAAVTQVEEQAGTVASCPLGHSDDTVYHDDKCMVEVPQELETSTGHSLEKEFTNQEAAEPKEVPAHSTEVGRDHNEEEGEETGLRDEKPIKTEVPGSPAGTEGNCQEATGPSTVDTQNEPLDMKEPDEEKSDQQGEALDSSQKKTKNKKKKNKKKKSPVPVETLKDVKKELTYQNTDLSEIKEEEQVKSTDRKSAVEAQNEVTENPKQKIAAESSENVDCPENPKIKLDGKLDQEGDDVQTAAEEVLADGDTLDFEDDTVQSSGPRAGGEELDEGVAKDNAKIDGATQSSPAEPKSEDADRCTLPEHESPSQDISDACEAESTERCEMSEHPSQTVRKALDSNSLENDDLSAPGREPGHFNPESREDTRGGNEKGKSKEDCTMS

SEQ ID NO: 1028 - DNA, 10533 bp, Homo sapiens
cagtttggagctcagtcttccaccaaaggccgttcagttctcctgggctccagcctcctgcaaggactgcaagagttttcctccgcagctctgagtctccacttttttggtggagaaaggctgcaaaaagaaaaagagacgcagtgagtgggaaaagtatgcatcctattcaaacctaattgaatcgaggagcccagggacacacgccttcaggtttgctcaggggttcatatttggtgcttagacaaattcaaaatgaggaaacatcggcacttgcccttagtggccgtcttttgcctctttctctcaggctttcctacaactcatgcccagcagcagcaagcagatgtcaaaaatggtgcggctgctgatataatatttctagtggattcctcttggaccattggagaggaacatttccaacttgttcgagagtttctatatgatgttgtaaaatccttagctgtgggagaaaatgatttccattttgctctggtccagttcaacggaaacccacataccgagttcctgttaaatacgtatcgtactaaacaagaagtcctttctcatatttccaacatgtcttatattgggggaaccaatcagactggaaaaggattagaatacataatgcaaagccacctcaccaaggctgctggaagccgggccggtgacggagtccctcaggttatcgtagtgttaactgatggacactcgaaggatggccttgctctgccctcagcggaacttaagtctgctgatgttaacgtgtttgcaattggagttgaggatgcagatgaaggagcgttaaaagaaatagcaagtgaaccgctcaatatgcatatgttcaacctagagaattttacctcacttcatgacatagtaggaaacttagtgtcctgtgtgcattcatccgtgagtccagaaagggctggggacacggaaacccttaaagacatcacagcacaagactctgctgacattattttccttattgatggatcaaacaacaccggaagtgtcaatttcgcagtcattctcgacttccttgtaaatctccttgagaaactcccaattggaactcagcagatccgagtgggggtggtccagtttagcgatgagcccagaaccatgttctccttggacacctactccaccaaggcccaggttctgggtgcagtgaaagccctcgggtttgctggtggggagttggccaatatcggcctcgcccttgatttcgtggtggagaaccacttcacccgggcagggggcagccgcgtggaggaaggggttccccaggtgctggtcctcataagtgccgggccttctagtgacgagattcgctacggggtggtagcactgaagcaggctagcgtgttctcattcggccttggagcccaggccgcctccagggcagagcttcagcacatagctaccgatgacaacttggtgtttactgtcccggaattccgtagctttggggacctccaggagaaattactgccgtacattgttggcgtggcccaaaggcacattgtcttgaaaccgccaaccattgtcacacaagtcattgaagtcaacaagagagacatagtcttcctggtggatggctcatctgcactgggactggccaacttcaatgccatccgagacttcattgctaaagtcatccagaggctggaaatcggacaggatcttatccaggtggcagtggcccagtatgcagacactgtgaggcctgaattttatttcaatacccatccaacaaaaagggaagtcataaccgctgtgcggaaaatgaagcccctggacggctcggccctgtacacgggctctgctctagactttgttcgtaacaacctattcacgagttcagccggctaccgggctgccgaggggattcctaagcttttggtgctgatcacaggtggtaagtccctagatgaaatcagccagcctgcccaggagctgaagagaagcagcataatggcctttgccattgggaacaagggtgccgatcaggctgagctggaagagatcgctttcgactcctccctggtgttcatcccagctgagttccgagccgccccattgcaaggcatgctgcctggcttgctggcacctctcaggaccctctctggaacccctgaagttcactcaaacaaaagggatatcatctttcttttggatggatcagccaacgttggaaaaaccaatttcccttatgtgcgcgactttgtaatgaacctagttaacagccttgatattggaaatgacaatattcgtgttggtttagtgcaatttagtgacactcctgtaacggagttctctttaaacacataccagaccaagtcagatatccttggtcatctgaggcagctgcagctccagggaggttcgggcctgaacacaggctcagccctaagctatgtctatgccaaccacttcacggaagctggcggcagcaggatccgtgaacacgtgccgcagctcctgcttctgctcacagctgggcagtctgaggactcctatttgcaagctgccaacgccttgacacgcgcgggcatcctgactttttgtgtgggagctagccaggcgaataaggcagagcttgagcagattgcttttaacccaagcctggtgtatctcatggatgatttcagctccctgccagctttgcctcagcagctgattcagcccctaaccacatatgttagtggaggtgtggaggaagtaccactcgctcagccagagagcaagcgagacattctgttcctctttgacggctcagccaatcttgtgggccagttccctgttgtccgtgactttctctacaagattatcgatgagctcaatgtgaagccagaggggacccgaattgcggtggctcagtacagcgatgatgtcaaggtggagtcccgttttgatgagcaccagagtaagcctgagatcctgaatcttgtgaagagaatgaagatcaagacgggcaaagccctcaacctgggctacgcgctggactatgcacagaggtacatttttgtgaagtctgctggcagccggatcgaggatggagtgcttcagttcctggtgctgctggtcgcaggaaggtcatctgaccgtgtggatgggccagcaagtaacctgaagcagagtggggttgtgcctttcatcttccaagccaagaacgcagaccctgctgagttagagcagatcgtgctgtctccagcgtttatcctggctgcagagtcgcttcccaagattggagatcttcatccacagatagtgaatctcttaaaatcagtgcacaacggagcaccagcaccagtttcaggtgaaaaggacgtggtgtttctgcttgatggctctgagggcgtcaggagcggtttccctctgttgaaagagtttgtccagagagtggtggaaagcctggatgtgggccaggaccgggtccgcgtggccgtggtgcagtacagcgaccggaccaggcccgagttctacctgaattcatacatgaacaagcaggacgtcgtcaacgctgtccgccagctgaccctgctgggagggccgacccccaacaccggggccgccctggagtttgtcctgaggaacatcctggtcagctctgcgggaagcaggataacagaaggtgtgccccagctgctgatcgtcctcacggccgacaggtctggggatgatgtgcggaacccctccgtggtcgtgaagaggggtggggctgtgcccattggcattggcatcgggaacgctgacatcacagagatgcagaccatctccttcatcccggactttgccgtggccattcccacctttcgccagctggggaccgtccaacaggtcatctctgagagggtgacccagctcacccgcgaggagctgagcaggctgcagccggtgttgcagcctctaccgagcccaggtgttggtggcaagagggacgtggtctttctcatcgatgggtcccaaagtgccgggcctgagttccagtacgttcgcaccctcatagagaggctggttgactacctggacgtgggctttgacaccacccgggtggctgtcatccagttcagcgatgaccccaaggtggagttcctgctgaacgcccattccagcaaggatgaagtgcagaacgcggtgcagcggctgaggcccaagggagggcggcagatcaacgtgggcaatgccctggagtacgtgtccaggaacatcttcaagaggcccctggggagccgcattgaagagggcgtcccgcagttcctggtcctcatctcgtctggaaagtctgacgatgaggtggacgacccggcggtggagctcaagcagtttggcgtggcccctttcacgatcgccaggaacgcagaccaggaggagctggtgaagatctcgctgagccccgaatatgtgttctcggtgagcaccttccgggagctgcccagcctggagcagaaactgctgacgcccatcacgaccctgacctcagagcagatccagaagctcttagccagcactcgctatccacctccagcagttgagagtgatgctgcagacatcgtctttctgatcgacagctctgagggagttaggccagatggctttgcacatattcgagattttgttagcaggattgttcgaagactcaacatcggccccagtaaagtgagagttggggtcgtgcagttcagcaatgatgtcttcccagaattctatctgaaaacctacagatcccaggccccggtgctggacgccatacggcgcctgaggctcagagggggttccccactgaacactggcaaggctctcgaatttgtggcaagaaacctctttgttaagtctgcggggagtcgcatagaagacggggtgccccaacacctggtcctggtcctgggtggaaaatcccaggacgatgtgtccaggttcgcccaggtgatccgttcctcgggcattgtgagtttaggggtaggagaccggaacatcgacagaacagagctgcagaccatcaccaatgaccccagactggtcttcacagtgcgagagttcagagagcttcccaacatagaagaaagaatcatgaactcgtttggaccctccgcagccactcctgcacctccaggggtggacacccctcctccttcacggccagagaagaagaaagcagacattgtgttcctgttggatggttccatcaacttcaggagggacagtttccaggaagtgcttcgttttgtgtctgaaatagtggacacagtttatgaagatggcgactccatccaagtggggcttgtccagtacaactctgaccccactgacgaattcttcctgaaggacttctctaccaagaggcagattattgacgccatcaacaaagtggtctacaaagggggaagacacgccaacactaaggtgggccttgagcacctgcgggtaaaccactttgtgcctgaggcaggcagccgcctggaccagcgggtccctcagattgcctttgtgatcacgggaggaaagtcggtggaagatgcacaggatgtgagcctggccctcacccagaggggggtcaaagtgtttgctgttggagtgaggaatatcgactcggaggaggttggaaagatagcgtccaacagcgccacagcgttccgcgtgggcaacgtccaggagctgtccgaactgagcgagcaagttttggaaactttgcatgatgcgatgcatgaaaccctttgccctggtgtaactgatgctgccaaagcttgtaatctggatgtgattctggggtttgatggttctagagaccagaatgtttttgtggcccagaagggcttcgagtccaaggtggacgccatcttgaacagaatcagccagatgcacagggtcagctgcagcggtggccgctcgcccaccgtgcgtgtgtcagtggtggccaacacgccctcgggcccggtggaggcctttgactttgacgagtaccagccagagatgctcgagaagttccggaacatgcgcagccagcacccctacgtcctcacggaggacaccctgaaggtctacctgaacaagttcagacagtcctcgccggacagcgtgaaggtggtcattcattttactgatggagcagacggagatctggctgatttacacagagcatctgagaacctccgccaagaaggagtccgtgccttgatcctggtgggccttgaacgagtggtcaacttggagcggctaatgcatctggagtttgggcgagggtttatgtatgacaggcccctgaggcttaacttgctggacttggattatgaactagcggagcagcttgacaacattgccgagaaagcttgctgtggggttccctgcaagtgctctgggcagaggggagaccgcgggcccatcggcagcatcgggccaaagggtattcctggagaagacggctaccgaggctatcctggtgatgagggtggacccggtgagcgtggtccgcctggtgtgaacggcactcaaggtttccagggctgcccgggccagagaggagtaaagggctctcggggattcccaggagagaagggcgaagtaggagaaattggactggatggtctggatggtgaagatggagacaaaggattacctggttcttctggagagaaagggaatcctggaagaaggggtgataaaggacctcgaggagagaaaggagaaagaggagatgttgggattcgaggggacccgggtaacccaggacaagacagccaggagagaggacccaaaggagaaaccggtgacctcggccccatgggtgtcccagggagagatggagtacctggaggacctggagaaactgggaagaatggtggctttggccgaaggggaccccccggagctaagggcaacaagggcggtcctggccagccgggctttgagggagagcaggggaccagaggtgcacagggcccagctggtcctgctggtcctccagggctgataggagaacaaggcatttctggacctcggggaagcggaggtgccgctggtgctcctggagaacgaggcagaaccggtccactgggaagaaagggtgagcccggagagccaggaccaaaaggaggaatcgggaaccggggccctcgtggggagacgggagatgacgggagagacggagttggcagtgaaggacgcagaggcaaaaaaggagaaagaggatttcctggatacccaggaccaaagggtaacccaggtgaacctgggctaaatggaacaacaggacccaaaggcatcagaggccgaaggggaaattcgggacctccagggatagttggacagaagggagaccctggctacccaggaccagctggcaacaggggcgactccatcgatcaatgtgccctcatccaaagcatcaaagataaatgcccttgctgttacgggcccctggagtgccccgtcttcccaacagaactagcctttgctttagacacctctgagggagtcaaccaagacactttcggccggatgcgagatgtggtcttgagtattgtgaatgacctgaccattgctgagagcaactgcccacggggggcccgggtggctgtggtcacctacaacaacgaggtgaccacggagatccggtttgctgactccaagaggaagtcggtcctcctggacaagattaagaaccttcaggtggctctgacatccaaacagcagagtctggagactgccatgtcgtttgtggccaggaacacatttaagcgtgtgaggaatggattcctaatgaggaaagtggctgttttcttcagcaacacacccacaagagcatccccacagctcagagaggctgtgctcaagctctcagatgcggggatcacccccttgttccttacaaggcaggaagaccggcagctcatcaacgctttgcagatcaataacacagcagtggggcatgcgcttgtcctgcctgcagggagagacctcacagacttcctggagaatgtcctcacgtgtcatgtttgcttggacatctgcaacatcgacccatcctgtggatttggcagttggaggccttccttcagggacaggagagcggcagggagcgatgtggacatcgacatggctttcatcttagacagcgctgagaccaccaccctgttccagttcaatgagatgaagaagtacatagcgtacctggtcagacaactggacatgagcccagatcccaaggcctcccagcacttcgccagagtggcagttgtgcagcacgcgccctctgagtccgtggacaatgccagcatgccacctgtgaaggtggaattctccctgactgactatggctccaaggagaagctggtggacttcctcagcaggggaatgacacagttgcagggaaccagggccttaggcagtgccattgaatacaccatagagaatgtctttgaaagtgccccaaacccacgggacctgaaaattgtggtcctgatgctgacgggcgaggtgccggagcagcagctggaggaggcccagagagtcatcctgcaggccaaatgcaagggctacttcttcgtggtcctgggcattggcaggaaggtgaacatcaaggaggtatacaccttcgccagtgagccaaacgacgtcttcttcaaattagtggacaagtccaccgagctcaacgaggagcctttgatgcgcttcgggaggctgttgccatccttcgtcagcagtgaaaatgctttttacttgtccccagatatcaggaaacagtgtgattggttccaaggggaccaacccacaaagaaccttgtgaagtttggtcacaaacaagtaaatgttccgaataacgttacttcaagtcctacatccaacccagtgacgacaacgaagccggtgactacgacgaagccggtgaccaccacaacaaagcctgtaaccaccacaacaaagcctgtgactattataaatcagccatctgtgaagccagccgctgcaaagccggcccctgcgaaacctgtggctgccaagcctgtggccacaaagacggccactgttagacccccagtggcggtgaagccagcaacggcagcgaagcctgtagcagcaaagccagcagctgtaagaccccccgctgctgctgcaaaaccagtggcgaccaagcctgaggtccctaggccacaggcagccaaaccagctgccaccaagccagccaccactaagcccatggttaagatgtcccgtgaagtccaggtgtttgagataacagagaacagcgccaaactccactgggagaggcctgagccccccggtccttatttttatgacctcaccgtcacctcagcccatgatcagtccctggttctgaagcagaacctcacggtcacggaccgcgtcattggaggcctgctcgctgggcagacataccatgtggctgtggtctgctacctgaggtctcaggtcagagccacctaccatggaagtttcagtacaaagaaatctcagcccccacctccacagccagcaaggtcagcttctagttcaaccatcaatctaatggtgagcacagaaccattggctctcactgaaacagatatatgcaagttgccgaaagacgaaggaacttgcagggatttcatattaaaatggtactatgatccaaacaccaaaagctgtgcaagattctggtatggaggttgtggtggaaacgaaaacaaatttggatcacagaaagaatgtgaaaaggtttgcgctcctgtgctcgccaaacccggagtcatcagtgtgatgggaacctaagcgtgggtggccaacatcatatacctcttgaagaagaaggagtcagccatcgccaacttgtctctgtagaagctccgggtgtagattcccttgcactgtatcatttcatgctttgatttacactcgaactcgggagggaacatcctgctgcatgacctatcagtatggtgctaatgtgtctgtggaccctcgctctctgtctccaggcagttctctcgaatactttgaatgttgtgtaacagttagccactgctggtgtttatgtgaacattcctatcaatccaaattccctctggagtttcatgttatgcctgttgcaggcaaatgtaaagtctagaaaataatgcaaatgtcacggctactctatatacttttgcttggttcattttttttcccttttagttaagcatgactttagatgggaagcctgtgtatcgtggagaaacaagagaccaactttttcattccctgcccccaatttcccagactagatttcaagctaattttctttttctgaagcctctaacaaatgatctagttcagaaggaagcaaaatcccttaatctatgtgcaccgttgggaccaatgccttaattaaagaatttaaaaaagttgtaatagagaatatttttggcattcctctaatgttgtgtgttttttttttttgtgtgctggagggaggggatttaattttaattttaaaatgtttaggaaatttatacaaagaaactttttaataaagtatattgaaagttt

SEQ ID NO: 1029 - DNA, 1350 bp, Homo sapiens
agcccagcgaggcctgtgctgtgaggggctgtgctgtgccaggggaggccccgcacccgggaagcccagaggagagtgtgcactcacggagccctcctggcagggccgcgtctctggagcagcagacccgtgtccctctgggaggtcaactgcggcctcacagctgggcctgtcccagcacagcccttgttggagggcgcacccccgtgtcctcagcaccccagtgttgagtgccttgacctgcagaggggagcctgtgctggtcccgggcgtctgtgtggctcctgggtgcccatctgcacccctggccctgctctgggcttcagtggagccgtgccaccgtgggagtgtccagggtcctgacgtagccctgagacgtggccagctccctggcctgctgcccgcacagtgggcccttgtctctgctctgggtcaggcgaggcagccacccatgatgagctctgcagccttcccaaggtggctgagcatgggggtccctcgtaccccttcacggacagtgctcttcgagcgggagaggacgggcctgacctaccgcgtgccctcgttgctccccgtgccccccgggcccaccctgctggcctttgtggagcagcggctcagccctgacgactcccacgcccaccgcctggtgctgaggaggggcacgctggccgggggctccgtgcggtggggtgccctgcacgtgctggggacagcagccctggcggagcaccggtccatgaacccctgccctgtgcacgatgctggcacgggcaccgtcttcctcttcttcatcgcggtgctgggccacacgcctgaggccgtgcagatcgccacgggaaggaacgccgcgcgcctctgctgtgtggccagccgtgacgccggcctctcgtggggcagcgcccgggacctcaccgaggaggccatcggtggtgccgtgcaggactgggccacattcgctgtgggtcccggccacggcgtgcagctgccctcaggccgcctgctggtacccgcctacacctaccgcgtggaccgccgagagtgttttggcaagatctgccggaccagccctcactccttcgccttctacagcgatgaccacggccgcacctggcgctgtggaggcctcgtgcccaacctgcgctcaggcgagtgccagctggcggcggtggacggtgggcaggccggcagcttcctctactgcaatgcccggagcccactgggcagccgtgtgcaggcgctcagcactgacgagggcacctccttcctgcccgcagagcgcgtggcttccctgcccgagactgcctggggctgccagggcagcatcgtgggcttcccagcccccgcccc

SEQ ID NO: 1030 - DNA, 1299 bp, Homo sapiens
gaattggcagccaacatggcggcggaacgcggcgcggggcagcaacagtcgcaggagatgatggaggttgacaggcgggtcgagtctgaagaatccggcgatgaagaagggaagaaacacagcagtggcatcgtggccgacctcagtgaacagagcctgaaggatggggaggagcggggggaggaggacccagaagaagaacatgagctgcctgtggacatggaaaccatcaacctggacagagatgcagaggatgttgatttgaatcactatcgcatagggaagattgaaggatttgaggtactgaagaaagtgaagactctctgcctccgccaaaatttaattaaatgcattgagaatctggaggagctacagagtcttcgagagctggatctttacgacaaccagatcaagaagattgagaatctggaggcgctaacagagctggagattctagatatttcttttaatctgctgagaaacatcgaaggggttgacaagttgacacgactgaaaaaactcttcttggtcaacaataaaatcagtaaaattgagaacttaagcaacttacatcaactacagatgctagagctgggatctaaccgcatccgggcaatcgaaaatatcgacaccttaaccaacctggagagtttgtttttggggaaaaacaaaattactaaacttcagaacctggatgcgctcaccaacctgacagtcctcagtatgcagagcaaccggctgaccaagatcgagggtctgcagaacctggtgaacctgcgggagctgtaccttagccacaatggcatcgaggtcatcgagggcctggagaacaataacaaactcacgatgttggacattgcatcaaatagaatcaaaaagattgaaaatatcagccatctaacagagctgcaagagttctggatgaacgacaatctccttgagagctggagcgacctcgacgagctgaagggagccaggagcctggagacagtgtacctggagcggaaccccttgcagaaggacccccagtaccggcggaaggtcatgctcgccctcccctccgtgcggcagatcgatgccacgttcgtcaggttctgagtccttcttggctcctcatgtggtccctctcctcggaagaactgcccagccacgggtttttaacccacctgttgctcctgaggtcgtcactatatcaacagtcacaaacccaatggcaataaaggcactgacgatagctggcgcgcgcgacgccacacaccattttcagatgccgttgcaattaaatcttgccacactgtc

SEQ ID NO: 1031 - protein, 360 aa, Homo sapiens
MAAERGAGQQQSQEMMEVDRRVESEESGDEEGKKHSSGIVADLSEQSLKDGEERGEEDPEEEHELPVDMETINLDRDAEDVDLNHYRIGKIEGFEVLKKVKTLCLRQNLIKCIENLEELQSLRELDLYDNQIKKIENLEALTELEILDISFNLLRNIEGVDKLTRLKKLFLVNNKISKIENLSNLHQLQMLELGSNRIRAIENIDTLTNLESLFLGKNKITKLQNLDALTNLTVLSMQSNRLTKIEGLQNLVNLRELYLSHNGIEVIEGLENNNKLTMLDIASNRIKKIENISHLTELQEFWMNDNLLESWSDLDELKGARSLETVYLERNPLQKDPQYRRKVMLALPSVRQIDATFVRF

SEQ ID NO: 1032 - DNA, 4295 bp, Homo sapiens
caaaagctggcaggctgacagaggcggcctcaggacggaccttctggctactgaccgttttgctgtggttttcccggattgtgtgtaggtgtgagatcaaccatgagttccgttgcagttttgacccaagagagttttgctgaacaccgaagtgggctggttccgcaacaaatcaaagttgccactctaaattcagaagaggagagcgaccctccaacctacaaggatgccttccctccacttcctgagaaagctgcttgcctggaaagtgcccaggaaccctctggagcctgggggaacaagatccgacccatcaaggcttctgtcatcactcaggtgttccatgtacccctggaggagagaaaatacaaggatatgaaccagtttggagaaggtgaacaagcaaaaatctgccttgagatcatgcagagaactggtgctcacttggagctgtctttggccaaagaccaaggcctctccatcatggtgtcaggaaagctggatgctgtcatgaaagctcggaaggacattgttgctagactgcagactcaggcctcagcaactgttgccattcccaaagaacaccatcgctttgttattggcaaaaatggagagaaactgcaagacttggagctaaaaactgcaaccaaaatccagatcccacgcccagatgaccccagcaatcagatcaagatcactggcaccaaagagggcatcgagaaagctcgccatgaagtcttactcatctctgccgagcaggacaaacgtgctgtggagaggctagaagtagaaaaggcattccaccccttcatcgctgggccgtataatagactggttggcgagatcatgcaggagacaggcacgcgcatcaacatccccccacccagcgtgaaccggacagagattgtcttcactggagagaaggaacagttggctcaggctgtggctcgcatcaagaagatttatgaggagaagaaaaagaagactacaaccattgcagtggaagtgaagaaatcccaacacaagtatgtcattgggcccaagggcaattcattgcaggagatccttgagagaactggagtttccgttgagatcccaccctcagacagcatctctgagactgtaatacttcgaggcgaacctgaaaagttaggtcaggcgttgactgaagtctatgccaaggccaatagcttcaccgtctcctctgtcgccgccccttcctggcttcaccgtttcatcattggcaagaaagggcagaacctggccaaaatcactcagcagatgccaaaggttcacatcgagttcacagagggcgaagacaagatcaccctggagggccctacagaggatgtcaatgtggcccaggaacagatagaaggcatggtcaaagatttgattaaccggatggactatgtggagatcaacatcgaccacaagttccacaggcacctcattgggaagagcggtgccaacataaacagaatcaaagaccagtacaaggtgtccgtgcgcatccctcctgacagtgagaagagcaatttgatccgcatcgagggggacccacagggcgtgcagcaggccaagcgagagctgctggagcttgcatctcgcatggaaaatgagcgtaccaaggatctaatcattgagcaaagatttcatcgcacaatcattgggcagaagggtgaacggatccgtgaaattcgtgacaaattcccagaggtcatcattaactttccagacccagcacaaaaaagtgacattgtccagctcagaggacctaagaatgaggtggaaaaatgcacaaaatacatgcagaagatggtggcagatctggtggaaaatagctattcaatttctgttccgatcttcaaacagtttcacaagaatatcattgggaaaggaggcgcaaacattaaaaagattcgtgaagaaagcaacaccaaaatcgaccttccagcagagaatagcaattcagagaccattatcatcacaggcaagcgagccaactgcgaagctgcccggagcaggattctgtctattcagaaagacctggccaacatagccgaggtagaggtctccatccctgccaagctgcacaactccctcattggcaccaagggccgtctgatccgctccatcatggaggagtgcggcggggtccacattcactttcccgtggaaggttcaggaagcgacaccgttgttatcaggggcccttcctcggatgtggagaaggccaagaagcagctcctgcatctggcggaggagaagcaaaccaagagtttcactgttgacatccgcgccaagccagaataccacaaattcctcatcggcaaggggggcggcaaaattcgcaaggtgcgcgacagcactggagcacgtgtcatcttccctgcggctgaggacaaggaccaggacctgatcaccatcattggaaaggaggacgccgtccgagaggcacagaaggagctggaggccttgatccaaaacctggataatgtggtggaagactccatgctggtggaccccaagcaccaccgccacttcgtcatccgcagaggccaggtcttgcgggagattgctgaagagtatggcggggtgatggtcagcttcccacgctctggcacacagagcgacaaagtcaccctcaagggcgccaaggactgtgtggaggcagccaagaaacgcattcaggagatcattgaggacctggaagctcaggtgacattagaatgtgctataccccagaaattccatcgatctgtcatgggccccaaaggttccagaatccagcagattactcgggatttcagtgttcaaattaaattcccagacagagaggagaacgcagttcacagtacagagccagttgtccaggagaatggggacgaagctggggaggggagagaggctaaagattgtgaccccggctctccaaggaggtgtgacatcatcatcatctctggccggaaagaaaagtgtgaggctgccaaggaagctctggaggcattggttcctgtcaccattgaagtagaggtgccctttgaccttcaccgttacgttattgggcagaaaggaagtgggatccgcaagatgatggatgagtttgaggtgaacatacatgtcccggcacctgagctgcagtctgacatcatcgccatcacgggcctcgctgcaaatttggaccgggccaaggctggactgctggagcgtgtgaaggagctacaggccgagcaggaggaccgggctttaaggagttttaagctgagtgtcactgtagaccccaaataccatcccaagattatcgggagaaagggggcagtaattacccaaatccggttggagcatgacgtgaacatccagtttcctgataaggacgatgggaaccagccccaggaccaaattaccatcacagggtacgaaaagaacacagaagctgccagggatgctatactgagaattgtgggtgaacttgagcagatggtttctgaggacgtcccgctggaccaccgcgttcacgcccgcatcattggtgcccgcggcaaagccattcgcaaaatcatggacgaattcaaggtggacattcgcttcccacagagcggagccccagaccccaactgcgtcactgtgacggggctcccagagaatgtggaggaagccatcgaccacatcctcaatctggaggaggaatacctagctgacgtggtggacagtgaggcgctgcaggtatacatgaaacccccagcacacgaagaggccaaggcaccttccagaggctttgtggtgcgggacgcaccctggaccgccagcagcagtgagaaggctcctgacatgagcagctctgaggaatttcccagctttggggctcaggtggctcccaagaccctcccttggggccccaaacgataatgatcaaaaagaacagaaccctctccagcctgctgacccaaacccaaccacacaatggtttgtctcaatctgacccagcggctggaccctccgtaaattgttgacgctcttcccccttcccgaggtcccgcagggagcctagcgcctggctgtgtgtgcggccgctcctccaggcctggccgtgcccgctcaggacctgctccactgtttaacactaaaccaaggtcatgagcattcgtgctaagataacagactccagctcctggtccacccggcatgtcagtcagcactctggccttcatcacgagagctccgcagccgtggctaggattccacttcctgtgtcatgacctcaggaaataaacgtccttgactttataaaagcc

SEQ ID NO: 1033 - protein, 1268 aa, Homo sapiens
MSSVAVLTQESFAEHRSGLVPQQIKVATLNSEEESDPPTYKDAFPPLPEKAACLESAQEPAGAWGNKIRPIKASVITQVFHVPLEERKYKDMNQFGEGEQAKICLEIMQRTGAHLELSLAKDQGLSIMVSGKLDAVMKARKDIVARLQTQASATVAIPKEHHRFVIGKNGEKLQDLELKTATKIQIPRPDDPSNQIKITGTKEGIEKARHEVLLISAEQDKRAVERLEVEKAFHPFIAGPYNRLVGEIMQETGTRINIPPPSVNRTEIVFTGEKEQLAQAVARIKKIYEEKKKKTTTIAVEVKKSQHKYVIGPKGNSLQEILERTGVSVEIPPSDSISETVILRGEPEKLGQALTEVYAKANSFTVSSVAAPSWLHRFIIGKKGQNLAKITQQMPKVHIEFTEGEDKITLEGPTEDVNVAQEQIEGMVKDLINRMDYVEINIDHKFHRHLIGKSGANINRIKDQYKVSVRIPPDSEKSNLIRIEGDPQGVQQAKRELLELASRMENERTKDLIIEQRFHRTIIGQKGERIREIRDKFPEVIINFPDPAQKSDIVQLRGPKNEVEKCTKYMQKMVADLVENSYSISVPIFKQFHKNIIGKGGANIKKIREESNTKIDLPAENSNSETIIITGKRANCEAARSRILSIQKDLANIAEVEVSIPAKLHNSLIGTKGRLIRSIMEECGGVHIHFPVEGSGSDTVVIRGPSSDVEKAKKQLLHLAEEKQTKSFTVDIRAKPEYHKFLIGKGGGKIRKVRDSTGARVIFPAAEDKDQDLITIIGKEDAVREAQKELEALIQNLDNVVEDSMLVDPKHHRHFVIRRGQVLREIAEEYGGVMVSFPRSGTQSDKVTLKGAKDCVEAAKKRIQEIIEDLEAQVTLECAIPQKFHRSVMGPKGSRIQQITRDFSVQIKFPDREENAVHSTEPVVQENGDEAGEGREAKDCDPGSPRRCDIIIISGRKEKCEAAKEALEALVPVTIEVEVPFDLHRYVIGQKGSGIRKMMDEFEVNIHVPAPELQSDIIAITGLAANLDRAKAGLLERVKELQAEQEDRALRSFKLSVTVDPKYHPKIIGRKGAVITQIRLEHDVNIQFPDKDDGNQPQDQITITGYEKNTEAARDAILRIVGELEQMVSEDVPLDHRVHARIIGARGKAIRKIMDEFKVDIRFPQSGAPDPNCVTVTGLPENVEEAIDHILNLEEEYLADVVDSEALQVYMKPPAHEEAKAPSRGFVVRDAPWTASSSEKAPDMSSSEEFPSFGAQVAPKTLPWGPKR

SEQ ID NO: 1034 - DNA, 3433 bp, Homo sapiens
cccagctcggtgctgccgccatcttcttggaggacaggaggagaggcgaaggctccccctccccgtgatcgctccgcactcccgccaccacctgccctcccgcgaccgcctctctcctcctcagtgggcacttgtctccttctaacaaacggccttccccccactccagttacccaccgcaaggcgaagattctcattacctgttccactcttataagcataagaaaaccgagctcataagacgaagcttcacaaaagatgtctaagcaacagccaactcagtttataaatccagaaacacctggctatgttggatttgcaaacctccccaatcaagttcaccgaaaatcagtgaaaaaaggttttgagttcacactgatggtggtcggtgaatcaggtctaggaaaatcgactctcataaacagcctattcctaactgatctgtacccagaaagagtcatacctggagcagcagaaaaaattgaaagaactgtccagattgaggcttcaactgttgaaattgaagagcgaggggtcaagctacgcctgacagtggtagatacccctggctatggtgacgctatcaactgcagagattgttttaagacaattatctcctatattgatgagcaatttgagaggtacctgcatgacgagagcggcttgaacaggcggcacatcattgataatagggtgcattgttgcttttactttatttcaccttttggacatggacttaagcccttagatgtggcgtttatgaaggcaatacacaacaaggtgaatattgtgcctgtcattgcaaaagctgacactctcaccctgaaggaacgggagcggctgaagaaaaggattctggatgaaattgaagaacataacatcaaaatctatcacttacctgatgcagaatcagatgaagatgaagattttaaagagcagactagacttctcaaggctagcatcccattctctgtggttggatccaatcagttgattgaagccaaaggaaagaaggtcagaggccgcctctacccctggggtgttgtggaagtggagaacccagagcacaatgactttctgaagctgagaaccatgctcatcacccacatgcaggatctccaggaggtgacccaggaccttcattatgaaaacttccgttctgagagactcaagagaggcggcaggaaagtggagaatgaggacatgaataaagaccagatcttgctggaaaaagaagctgagctccgccgcatgcaagagatgattgcaaggatgcaggcgcagatgcagatgcagatgcagggcggggatggcgatggcggggctctcgggcaccacgtgtaaggtgatgtgcacatatcaagaagtcagagaaaacactttcctggataaaaaagaaaacattccagatgcatgatccagctgtgtgttttcaatccttgggagggtgccatccacattttaacagtacctgtgcctgagaatttaatttttaaaagactttgatgtgtttttgtatgaagtacttttaacgtatgtatttcattgctgtgtcacactctgtgttttgtgaggtgaatgtcttccttttctttctccctaaccactaatgttagaattgatttccaagaatcggcatgtatacttaatactgaatttctttgatttaactgacttaacaactgactaaccattgatgagcactcctgatttttatctagaacattcagatttaccataatgttccttagtggtagaggtgtgtgcctagtgatgtagaaagatacactgacttggtgcaaggccatctgcttaccacatcacaccacttggagatctttgcttccttgcttttatgtttgtacacaacacctaaaaccagttttgctgctataattctatactgttgattcgtctgcgattttatctgttaaccaaataaaacataatagaatttcctaatgagatatatctttatacttaaacagcttttttagaggtgagttttaaagaagtctcttaattctgatgctaggttgtttttaaaaccactatgcaaagaactcaccacaagccaccttttgtagtgttctccactaatactggttatcctgtgctacagagaaaatcaaagcagtcataagctccagttttccgtattgcaaataagactcttacctacaaaatgagattccagtgaactaatttggtttttactcaaccaaattaaaaatttttttaaggaaaattagcagttggtctattcagaatcaaacctttttatattttatactgcactttagtgtattttctgtcactgtaggtatagaagatctgcctcccctgtggaaattggggtctgttggtgggcttgcccctgaagcctggcttgggttgaaaagtgttcccgccctaaggccttggtgccctgaacctctgatgcctaccgggttctcctgatttgagtttcctttaaatactccctttttgagtaattttctgatgggaggaaagtagcagtcatcatctttttgtgtgcaggctgtctcatttatttttagccattgtcgtttcattcattttgtgtaatataaaccgtgtgtcatgtcaaagtgaaagacatttcaaatctgtagcataggctagtgggcaggtccgcacagtcgaagccacacctggtctgttttctgtgcactgtagccttagtgtcacctttcttcttgtgtctccttatggtacactccagcggttgccttttttatcatttctactgaagttgggaaattcaaccccagaaattgacagatgaaaggagacaatggttgtgtagggagatggagaaaatgcttaatctgaggatgagacagggttttttcatttttgtgggggctagaaaaaacataaaatgaggcagttaaataataatagttaatgaaggtgtgctacagaaaataatctggtgttcttgctaactttgcccttcactgttgcttaattgtgaacagccaaaagctatatgttatggcttattgtgtgaaggtaactaagaagtggtgttccatgacttcagagtacatccatgcggagtccattatttgagtttgacatttaataactttgctggaaaatctgtaaaaaagaaaaacaagtttgctagtgactaagccccgcatatgtgagtgaaagtacttcaggcacgctgcctcctggtaacagctatgcagggagggaggacccacactgctacacttctgatcccctttggttttactacccaaatctaaatagatacttttgataatagataactgctcttttactaagacatagtctctacctatagaaatgtattttgaaaacacttattttacacagcaattttgtatccatttaaactaaccttttatcaataaagcactattgtttagatatt

SEQ ID NO: 1035 - protein, 361 aa, Homo sapiens
MSKQQPTQFINPETPGYVGFANLPNQVHRKSVKKGFEFTLMVVGESGLGKSTLINSLFLTDLYPERVIPGAAEKIERTVQIEASTVEIEERGVKLRLTVVDTPGYGDAINCRDCFKTIISYIDEQFERYLHDESGLNRRHIIDNRVHCCFYFISPFGHGLKPLDVAFMKAIHNKVNIVPVIAKADTLTLKERERLKKRILDEIEEHNIKIYHLPDAESDEDEDFKEQTRLLKASIPFSVVGSNQLIEAKGKKVRGRLYPWGVVEVENPEHNDFLKLRTMLITHMQDLQEVTQDLHYENFRSERLKRGGRKVENEDMNKDQILLEKEAELRRMQEMIARMQAQMQMQMQGGDGDGGALGHHV

SEQ ID NO: 1036 - DNA, 1974 bp, Homo sapiens
caccgagcgcccctggtgtccctcgcagtggactgacgccgcaggggcgagctagccggctccgcgcctctccgcgggatccagacgcctcctggggctgctggcggagggtctgaggcggcgcggccatggctcacctccggggatttgccaaccagcactctcgagtggaccctgaggagctcttcaccaagctcgaccgcattggcaagggctcgtttggggaggtctacaagggcatcgataaccacacaaaggaggtggtggccatcaagatcatcgacctggaggaggccgaggatgagatcgaggacatccagcaggagatcactgtcctcagtcagtgcgacagcccctacatcacccgctactttggctcctacctaaagagcaccaagctatggatcatcatggagtacctgggcggcggctcagcactggacttgcttaaaccaggtcccctggaggagacatacattgccacgatcctgcgggagattctgaagggcctggattatctgcactccgaacgcaagatccaccgagacatcaaagctgccaacgtgctactctcggagcagggtgacgtgaagctggcggactttggggtagcagggcagctcacagacacgcagattaagaggaacacattcgtgggcacccccttctggatggcacctgaggtcatcaagcagtcggcctacgacttcaaggctgacatctggtccctggggatcacagccatcgagctggccaagggggagcctccaaactctgacctccaccccatgcgcgtcctgttcctgattcccaagaacagcccacccacactggagggccagcacagcaagcccttcaaggagttcgtggaggcctgcctcaacaaagacccccgattccggcccacggccaaggagctcctgaagcacaagttcatcacacgctacaccaagaagacctccttcctcacggagctcatcgaccgctataagcgctggaagtcagaggggcatggcgaggagtccagctctgaggactctgacattgatggcgaggcggaggacggggagcagggccccatctggacgttcccccctaccatccggccgagtccacacagcaagcttcacaaggggacggccctgcacagttcacagaagcctgcggagcccgtcaagaggcagccgaggtcccagtgcctgtccacgctggtccggcccgtcttcggagagctcaaagagaagcacaagcagagcggcgggagcgtgggtgcgctggaggagctggagaacgccttcagcctggccgaggagtcctgccccggcatctcagacaagctgatggtgcacctggtggagcgagtgcagaggttttcacacaacagaaaccacctgacatccacccgctgaagcgcactgctgttcagataggggacggaaggtcgtttgtttttgttctgagctccataagaactgtgctgacttggaaggtgccctgtgctatgtcgtgcctgcagggacacgtcggatcccgtgggcctcacatgccaggtcaccaggtcaccgtctccttccacccctgcagtgtgctgttgtgcacgtcagggacgctgttctctatgcccactgccctcctccctctcctggcccagcagtattgctcacgggggctccagccgccggcgtggccctcatgagctacgcctgggtcttctgcagactcatgcagccctatggccgctcagaccaaggcgcagagcaactatcagggcagctctgcctcctcctcccatgaggtggggagaggcaacagggcagcccccagaggagtgtcctggccgctgtcctcccggggcccatgatggccatagatttgccttgtggtgttggatcaggtactgtgtctgctcataagtacttgtgtcatccagaatgttttgttttttaagaaaattgaattacttgtttcctgaaa

SEQ ID NO: 1037 - DNA, 1988 bp, Homo sapiens
ggcacgaggccaatcccatgcctgggggagagacagcggctcaggagtgggggagcacgggccttctacaccacatgggaaggctctggcatgaggttttcctttgggaaggttgtttgggcccctgaagttccatctccgagagtggtgtgcagggcaggccagggcccatgctggctgcagtctttgtggctgcctgcctgggccagcctgtttgggagctgggactgtgggctcgccttttcgtacctgggctcaggtgcggtgtggccaccgccaccctcatcccctgcctgggaggctctcccaggggctgatgggggggttctgtgagggagaatcagggctcgggaagccacgcctgggaaggcaggacacaggacacagcagctttctttggaaatctcccaggtgaggattcacatcccaaaataaaattcagaagccaggtggcctgtgctccccatgggtgacctctggaggcagtggaccaagatgcagcaaggagaggatgcagaacagcttcttgcagaagcacctgctccggcatccagcgctgcctggaggcaggaaggagaggcagggcaggacacgctggtctgagatgagggggagccccatgggccccaggcaggctagaggaggcacaggccctgccacggccaactcaggtcagccagcctgaggctgtggcctccaaagggtctgggcgcaccccccaggtcgcaggtgtctgaggccagccaacctgcagagcactcgcggcgtgggtgggctgagtggaggtgcctgggagctgcctaaattcagaagcctccactgccatggagactgcctggctgtgtcctctcagccaggtgccgtgttggccttggctaggacccagagccacactgcagcctccgccgactccctccttccgggcctgctctagtgaggagtgcctaagccaggacccagaaactcagagttgatggtgagaggaggccgcctgagtcaggacacctggcttcttgaaaagttcgctctgccagaaaccacctagggaccacgttagctgccttccttgagctccccaggagtcggtttccacatctgtgaggtggagggctggtgtggaggtgctcatggggtgcggtgcttgggagacagccaggcccagggtggctgctgcttcctgctaagtgggggaggtgagacagatctggaaagccgtctccctcagatggtttcatttaatgctttatactgccgagtctgggggcttgttttggtttgggggcagccatcctccaccagaaagggggagctccttccgctgcggctccagatagatggggatgccgggctccaggccgaccagcacttgggatctgatgggacacggccagtgcctaggggtgccaagtccaaggcctcccactgggagtcatcgctgagaagatgccaatgtttcatccaccggctgcacaggcacaaactcccccacccaggacggctgtgatgaggtggccctccctgtcaaccctggtccctggagtccccagcacctggggccctggtggggctgatgtcacaggtgtttactgtgctgctgcactggtcctatgccagcctcacccatgtggggaccacggaaggcacactcccttacccccggtgccgggccgtgcggtcccccagacggacagcagctgtggcgacctgcgtttctccctgggcctgtgcttcctgtagttagtccgtcccctggttcccctgtggctcagaggccgcgtccctggcttgtacatatgtgattgctgtgggcacaccccagaccccatgtcatagctgccgtcccgacgtcacgacgcctgtcccgatgtcttacacccgagtgttagccctaggctcctgtactgtgcgtgcacttgaggctctgtccaattaagaaataaatgtggctcttactcaacacaaaaaaaaaaaaaaaaaaaaaaaaaaaa

SEQ ID NO: 1038 - protein, 77 aa, Homo sapiens
MRWPSLSTLVPGVPSTWGPGGADVTGVYCAAALVLCQPHPCGDHGRHTPLPPVPGRAVPQTDSSCGDLRFSLGLCFL

SEQ ID NO: 1039 - DNA, 471 bp, Homo sapiens
atggaggaacggcgggctccgagccgcgccccggagtccgcgaaacttccgagcgggcgccccctgaaggacctgacccgcttcgtggatttcaacatcaaagggcgcgacgtgatcgtgttcctccacatccagaagacggggggcaccactttcggccggcacctggtgaagaacatccggctggagcagccttgtagctgcaaagcgggtcagaagaagtgcacctgccaccggcctggcaagaaggagacgtggctcttctcccgcttctccaccggctggagctgcgggctgcacgccgactggacggagctcaccaactgcgtgccggccatcatggagaagaaggactgtccccgcaaccacagccacaccagtcctgacccagagcgaccccgcgctccctgcccctgccgatggtttcctggcgtcttcagcggttggcgccgtggctttggggagggatga

SEQ ID NO: 1040 - DNA, 393 bp, Homo sapiens
atgctaactagttacgcgacccccgagcggtcggcgtcccccaacttcttagagggacaagtggcgttcagccacccgagattgagcaataacaggtctgtgatgcccttagatgtccggggctgcacgcgcgctacactgactggctcagcgtgtgcctaccctacgccggcaggcgcgggtaacccgttgaaccccattcgtgatggggatcggggattgcaattattccccatgaacgaggaattcccagtaagtgcgggtcataagcttgcgttgattaagtccctgccctttgtacacaccgcccgtcgctactaccgattggatggtttagtgaggccctcggatcggccccgccggggtcggcccacggccctggcggagcgctga

SEQ ID NO: 1041 - DNA, 1380 bp, Homo sapiens
gcggcaacagcggggccgatgtgtagttggtgactgcctctccagatgctgaggtgcctgtatcattggcacaggccagtgctgaaccgtaggtggagtaggctgtgccttccgaagcagtatctattcacaatgaagttgcagtctcccgaattccagtcacttttcacagaaggactgaagagtctgacagaattatttgtcaaagagaatcacgaattaagaatagcaggaggagcagtgagggatttattaaatggagtaaagcctcaggatatagattttgccaccactgctacccctactcaaatgaaggagatgtttcagtcggctgggattcggatgataaacaacagaggagaaaagcacggaacaattactgccaggcttcatgaagaaaattttgagattactacactacggattgatgtcaccactgatggaagacatgctgaggtagaatttacaactgactggcagaaagatgcggaacgcagagatctcactataaattctatgtttttaggttttgatggcactttatttgactactttaatggttatgaagatttaaaaaataagaaagttagatttgttggacatgctaaacagagaatacaagaggattatcttagaattttaagatacttcaggttttatgggagaattgtagacaaacctggtgaccatgatcctgagactttggaagcaattgcagaaaatgcaaaaggcttggctggaatatcaggagaaaggatttgggtggaactgaaaaaaattcttgttggtaaccatgtaaatcatttgattcaccttatctatgatcttgatgtggctccttatataggtttacctgctaatgcaagtttagaagaatttgacaaagtcagtaaaaatgttgatggtttttcaccaaagccagtgactcttttggcctcattattcaaagtacaagatgatgtcacaaaattggatttgaggttgaagatcgcaaaagaggagaaaaaccttggcttatttatagttaaaaataggaaagatttaattaaagcaacagatagttcagacccattgaaaccctatcaagacttcattatagattctagggaacctgatgcaactactcgtgtatgtgaactactgaagtaccaaggagagcactgtctcctaaaggaaatgcagcagtggtccattcctccatttcctgtaagtggccatgacatcagaaaagtgggcatttcttcaggaaaagaaattggggctctattacaacagttgcgagaacagtggaaaaaaagtggttaccaaatggaaaaagatgaacttctgagttacataaagaagacctaaaactgatggctactaaaaagcagagcattt

SEQ ID NO: 1042 - DNA, 2919 bp, Homo sapiens
ggacaccgggccatgcacgcccccaactgaagctgcatctcaaagccgaagattccagcagcccaggggatttcaaagagctcagactcagaggaacatctgcggagagacccccgaagccctctccagggcagtcctcatccagacgctccgctagtgcagacaggagcgcgcagtggccccggctcgccgcgccatggagcggatccccagcgcgcaaccaccccccgcctgcctgcccaaagcaccgggactggagcacggagacctaccagggatgtaccctgcccacatgtaccaagtgtacaagtcaagacggggaataaagcggagcgaggacagcaaggagacctacaaattgccgcaccggctcatcgagaaaaagagacgtgaccggattaacgagtgcatcgcccagctgaaggatctcctacccgaacatctcaaacttacaactttgggtcacttggaaaaagcagtggttcttgaacttaccttgaagcatgtgaaagcactaacaaacctaattgatcagcagcagcagaaaatcattgccctgcagagtggtttacaagctggtgagctgtcagggagaaatgtcgaaacaggtcaagagatgttctgctcaggtttccagacatgtgcccgggaggtgcttcagtatctggccaagcacgagaacactcgggacctgaagtcttcgcagcttgtcacccacctccaccgggtggtctcggagctgctgcagggtggtacctccaggaagccatcagacccagctcccaaagtgatggacttcaaggaaaaacccagctctccggccaaaggttcggaaggtcctgggaaaaactgcgtgccagtcatccagcggactttcgctcactcgagtggggagcagagcggcagcgacacggacacagacagtggctatggaggagaatcggagaagggcgacttgcgcagtgagcagccgtgcttcaaaagtgaccacggacgcaggttcacgatgggagaaaggatcggcgcaattaagcaagagtccgaagaaccccccacaaaaaagaaccggatgcagctttcggatgatgaaggccatttcactagcagtgacctgatcagctccccgttcctgggcccacacccacaccagcctcctttctgcctgcccttctacctgatcccaccttcagcgactgcctacctgcccatgctggagaagtgctggtatcccacctcagtgccagtgctatacccaggcctcaacgcctctgccgcagccctctctagcttcatgaacccagacaagatctcggctcccttgctcatgccccagagactcccttctcccttgccagctcatccgtccgtcgactcttctgtcttgctccaagctctgaagccaatcccccctttaaacttagaaaccaaagactaaactctctaggggatcctgctgctttgctttccttcctcgctacttcctaaaaagcaacaaaaaagtttttgtgaatgctgcaagattgttgcattgtgtatactgagataatctgaggcatggagagcagattcagggtgtgtgtgtgtgtgtgtgtgtgtgtatgtgcgtgtgcgtgcacatgtgtgcctgcgtgttggtataggactttaaagctccttttggcatagggaagtcacgaaggattgcttgacatcaggagacttgggggggattgtagcagacgtctgggcttttccccacccagagaatagcccccttcgatacacatcagctggattttcaaaagcttcaaagtcttggtctgtgagtcactcttcagtttgggagctgggtctgtggctttgatcagaaggtactttcaaaagagggctttccagggctcagctcccaaccagctgttaggaccccacccttttgcctttattgtcgacgtgactcaccagacgtcggggagagagagcagtcagaccgagctttctgctaacatggggaggtagcaggcactggcatagcacggtagtggtttggggaggtttccgcaggtctgctccccacccctgcctcggaagaataaagagaatgtagttccctactcaggctttcgtagtgattagcttactaaggaactgaaaatgggccccttgtacaagctgagctgccccggagggagggaggagttccctgggcttctggcacctgtttctaggcctaaccattagtacttactgtgcagggaaccaaaccaaggtctgagaaatgcggacaccccgagcgagcaccccaaagtgcacaaagctgagtaaaaagctgcccccttcaaacagaactagactcagttttcaattccatcctaaaactccttttaaccaagcttagcttctcaaaggcctaaccaagccttggcaccgccagatcctttctgtaggctaattcctcttgcccaacggcatatggagtgtccttattgctaaaaaggattccgtctccttcaaagaagttttatttttggtccagagtacttgttttcccgatgtgtccagccagctccgcagcagcttttcaaaatgcactatgcctgattgctgatcgtgttttaactttttcttttcctgtttttattttggtattaagtcgttgcctttatttgtaaagctgttataaatatatattatataaatatattaaaaaggaaaatgtttcagatgtttatttgtataattacttgattcacacagtgagaaaaaatgaatgtattcctgtttttgaagagaagaataattttttttttctctagggagaggtacagtgtttatattttggagccttcctgaaggtgtaaaattgtaaatatttttatctatgagtaaatgttaagtagttgttttaaaatacttaataaaataattcttttcctgtggaag

SEQ ID NO: 1043 - DNA, 2897 bp, Homo sapiens
gcggcttccggcggcgtgacctgaccgcaagaggccaatggagtgtgggagctgaaagggtcttcgctggcggccggtaactggcggcggttgggaacggccgagtgtggctcttctggtgtttcagcttggggagagaggggtggccttcctcttgcagttgaggccggcgccgagccggacttcaggcggatctcgtggcggagcccatcttgctccctctcccaggcctttacccgctccctaggattcccgggccctgtaggtgggagttgggagacgacagtactgcttttaaagagacagtgttagggatcttggaagcacagccaacatgtgtgacattgaagaagccactaaccaactcctagatgtgaaccttcatgagaaccagaagtctgtacaagtgacagaaagtgacctcggaagtgaatctgagcttctagtcactattggagccactgtacctactggctttgagcaaacagctgcagatgaagtcagagagaaacttgggtcatcatgcaaaatcagcagagaccgtggcaagatatattttgtcatttcagtggaaagtctggcacaggttcattgtctgagatcagttgataacttatttgtggtggttcaggagtttcaagattaccagttcaaacaaacaaaggaagaagttctaaaggattttgaagacttggctggaaaactcccatggtcaaaccccttaaaagtgtggaaaattaatgccagttttaaaaagaaaaaagcaaagcgcaaaaagataaatcagaattcaagtaaagagaagattaataatggacaagaagtcaaaatcgatcagagaaatgttaaaaaagagttcactagccatgctttagattctcatatcttagattattatgaaaatccagccatcaaagaggatgtatcaacattaataggtgatgatttggcatcttgcaaagatgagactgatgaaagctcaaaagaagaaactgagcctcaagtgctgaagtttagagtcacatgcaacagggcaggagagaaacattgctttacctcaaatgaggctgcaagagattttgggggtgctgttcaagattattttaagtggaaggccgacatgaccaactttgatgtggaggttcttttgaacatccatgataatgaagtcattgtgggcattgcattgactgaagagagtctccaccgaagaaatataacacattttggacctacaactcttagatcaactcttgcctatgggatgctcaggctctgtgatcctctaccttatgatataatagtcgatccaatgtgtggaactggggcaataccaatagagggggccactgaatggtctgactgtttccatattgctggtgataataatccactggctgtgaatagagcagcaaataacattgcatctttattgaccaagagccaaattaaagaaggcaaaccctcctggggcttgcccatagatgctgttcagtgggatatctgcaatctgccgttgagaactggctctgtggatattattgtaacagatttgccatttggaaaaaggatgggatccaagaagagaaactggaacctttatccagcttgcctacgcgagatgagccgtgtctgcacacctaccacaggccgagctgtactacttactcaagacacaaaatgctttaccaaggcgttatctggaatgcaacacgtatggcgaaaggtggatacagtctgggtgaacgttggtggtcttcgtgctgcagtttacgttctgatacgtacacctcaagcttttgttcatccttcagaacaagacggagaaagaggaactctttggcaatgcaaagaatgaagatgactaatagtacttgtacttcccaccactggaaatgttagcataaaagaacttggagaggaaaaaagtattaacaaaactgcagtctgcactctttaaacctgtttaaggctcttcatcctggttagcaaaaggtgtgaatgtaatgtgatggaatttaaaagttttatgagaccaggcacagtggctcacgactgtaattccagcagtttaggaagccgaagtgtgcagatcacctgaggtccggagaccagcctggccaacatggtgaaaccctgtctctactagaaatacaaaaattagccaggtgtggtggcgggcgcctgtaatcccaactactcaggaggctgaggctagagaatcacttgaacccagcaggcggaggttgcggtgagtcgagatcacgccattgcactccagcctgtgcgacaagagcgaaactctgtctcaaaaagattttataagaaagcagagcttttccttgaagctcttttgaagtggtagcttaattagtattttgttgaaaatactttaaagatgcctagtgaaaagcctactaaagtgctgtgagattggggtttagaacattttattttcaggctttatggcctattttccattgtgtcaagtgcaaaactaccctggcccaaaggaagggcagagaacataattacatcttaggccacatttcattctttgcagctttgctaatccagttgctcaagttctttacctcaacctgaaggaatgaagcattattacattttgtgaatggtgttcagcctataagacgaagtctcacaagacctataggaaagtttaccatctgcctaaatattaaaatatccatctgttattcacattaatacacagaatgaaaatagaggtctaggaattatcaaaggtactgcaaaaatactgtatagaacttatttgtaaatagcacatacattgatagatggggtgtgggaccaacaaaccaaattaaaagaaattgtttttctttcagtacactaaggtgtgtgttttcaaaacc

SEQ ID NO: 1044 - protein, 507 aa, Homo sapiens
MCDIEEATNQLLDVNLHENQKSVQVTESDLGSESELLVTIGATVPTGFEQTAADEVREKLGSSCKISRDRGKIYFVISVESLAQVHCLRSVDNLFVVVQEFQDYQFKQTKEEVLKDFEDLAGKLPWSNPLKVWKINASFKKKKAKRKKINQNSSKEKINNGQEVKIDQRNVKKEFTSHALDSHILDYYENPAIKEDVSTLIGDDLASCKDETDESSKEETEPQVLKFRVTCNRAGEKHCFTSNEAARDFGGAVQDYFKWKADMTNFDVEVLLNIHDNEVIVGIALTEESLHRRNITHFGPTTLRSTLAYGMLRLCDPLPYDIIVDPMCGTGAIPIEGATEWSDCFHIAGDNNPLAVNRAANNIASLLTKSQIKEGKPSWGLPIDAVQWDICNLPLRTGSVDIIVTDLPFGKRMGSKKRNWNLYPACLREMSRVCTPTTGRAVLLTQDTKCFTKALSGMQHVWRKVDTVWVNVGGLRAAVYVLIRTPQAFVHPSEQDGERGTLWQCKE

SEQ ID NO: 1045 - DNA, 2103 bp, Homo sapiens
gcaggcaggtgccatgggcccgcttgaggcacactgaggggacgcggggctgggccatggccggcgctcgggccgccgccgccgctgcctcggcggggtcctcggcctcttcaggcaaccagccgcctcaggagctggggcttggggagctgctggaggagttctcccggactcagtaccgggccaaggatggcagcgggaccggcggctctaaggttgagcgcattgagaagagatgtctggagctgtttggccgagactactgtttcagcgtgattccaaacacgaatggggatatctgtggccactatccccggcacatcgtgttcctggagtatgagagttctgagaaggagaaagacacgtttgagagtaccgtacaggtgagcaagttgcaagacctcatccaccgcagcaagatggcccggtgcagaggacggtttgtctgcccagtaatcctgttcaagggcaagcacatttgcaggtcggccacactggctggatggggagagctgtatggacgctcaggctacaactattttttctcagggggtgcagatgatgcctgggcagatgtggaggacgtcacggaggaggactgtgctcttcgaagtggtgacacgcatctttttgataaggtcagaggctatgacatcaagctgcttcgatacctgtcagtcaaatacatctgtgacctgatggtggagaacaagaaggtgaagtttggcatgaatgtaacctcctctgagaaggtggacaaagcccagcgctatgccgacttcactctcctctccatcccgtatccaggctgtgaatttttcaaggaatataaagatcgggattacatggcagaagggctcatatttaactggaagcaggactacgttgatgccccattgagcatccccgacttcctgactcactctctgaacattgactggagccagtatcagtgttgggatctggtgcaacaaacacaaaactacctgaagctgctgctttccttagttaacagtgatgatgacagcgggctgctggtacactgtatctcaggctgggatcggacccccctcttcatctccctcctgcgcctttccttgtgggctgatgggctcatccacacgtccctgaagcccactgagatcctctacctcactgtggcctatgactggttcctcttcgggcacatgttggtagatcggctcagcaaaggggaggagattttcttcttctgcttcaattttttgaagcatattacctccgaggagttctctgctctgaagacccagaggaggaagagtttgccagcccgggatggaggcttcaccctggaagacatctgcatgctgagacgaaaggaccgtggcagcaccaccagccttggcagcgacttctccctggtcatggagagttccccaggagccactgggagcttcacctatgaggccgtggagctggtcccagcaggagcgccaactcaggcagcttggcttgcagccctgagtgatcgagagactcggctgcaggaggtgcgctcagccttcttggctgcgtacagcagcacagtggggcttcgggcagtagcccccagtccttccggtgccatcgggggcctgctggagcaatttgcccgtggtgttggactccggagcatcagcagcaatgccttgtgaagaagccagcccatgacattttcctgctcctctctcagctgagcccttagcagagaatcaaagccatgcctggccgaaggggtacttccaggtcaggggaaatttcagtcccccatctccatcatgaacatggcagccccaaagctgagcaaggccaaagacagggttttccaacccccagcctcttgactggtgaccaccaccccttcttgtcactgtctcccacccaccccatctttgctgggattcccatcaactctcagaactgtgtggggtttccctggggccttgtggaagccatgacttcacaaagaccctacctgtcagttcttgtttctggggaggagggatcacctgcactgagaatgaggcagtttgacacagatcacaaaataaaatcaaagtctttttgaaaaaaaaaaaaaaaaaa

SEQ ID NO: 1046 - protein, 417 aa, Homo sapiens
MARCRGRFVCPVILFKGKHICRSATLAGWGELYGRSGYNYFFSGGADDAWADVEDVTEEDCALRSGDTHLFDKVRGYDIKLLRYLSVKYICDLMVENKKVKFGMNVTSSEKVDKAQRYADFTLLSIPYPGCEFFKEYKDRDYMAEGLIFNWKQDYVDAPLSIPDFLTHSLNIDWSQYQCWDLVQQTQNYLKLLLSLVNSDDDSGLLVHCISGWDRTPLFISLLRLSLWADGLIHTSLKPTEILYLTVAYDWFLFGHMLVDRLSKGEEIFFFCFNFLKHITSEEFSALKTQRRKSLPARDGGFTLEDICMLRRKDRGSTTSLGSDFSLVMESSPGATGSFTYEAVELVPAGAPTQAAWLAALSDRETRLQEVRSAFLAAYSSTVGLRAVAPSPSGAIGGLLEQFARGVGLRSISSNAL

SEQ ID NO: 1047 - DNA, 4325 bp, Homo sapiens
ccggactcgaggtggccgatgtgacagcatgggggtggactttgatgtgaagactttctgccacaacttgcgggcgactaagccaccatacgagtgcccggtggagacctgccgaaaggtctacaagagttacagtggtattgagtaccacctgtaccactatgaccacgacaacccaccacccccacaacaaactccactccgcaagcacaagaaaaaggggcgccagtcacgcccagccaacaagcagtcacccagcccctcagaggtctcacagtcaccaggccgtgaggtgatgagctatgcacaggcccagcgcatggtggaggtggacttgcatggccgcgtccaccgcatcagcatctttgacaacctggatgtggtgtcagaggatgaggaagcccccgaggaggcccctgagaatggcagcaacaaggagaacactgagacaccagctgctactcccaagtcaggcaaacataagaacaaggagaagcgcaaggactccaaccatcaccaccaccacaatgtttctgcgagcaccactcccaagctgccagaggtggtctatcgggagctggaacaggacacccctgatgccccaccccggccaacttcctattaccggtacatcgagaagtctgcagaggagctggacgaggaagtagagtatgacatggacgaggaggactacatctggctggatatcatgaatgagcgtcggaagacagagggtgtaagtcccatcccgcaggagatctttgagtacctaatggaccgactggagaaggagtcgtactttgagagtcataataaaggcgaccctaatgcgctagtggacgaggatgctgtttgctgtatctgcaatgatggtgagtgccagaacagcaatgtcatcctcttctgtgacatgtgcaacctggccgtgcaccaggagtgctacggtgtcccctatatccctgagggccagtggctgtgccgccgttgcctgcagtcaccctctcgtgctgtggattgtgccctgtgccccaacaagggcggtgccttcaagcagacagatgacgggcgctgggcccatgtggtgtgtgccttgtggatccctgaggtctgcttcgccaacacggtcttcctagagcctattgacagcattgagcacatcccaccagctcgctggaagctcacctgctacatttgcaaacaacggggctcaggggcctgcatccagtgccacaaggccaactgttacacagctttccatgtgacatgcgcccagcaggctggcctttacatgaagatggagcctgtgcgggagacaggcgccaacggcacctctttcagtgtccgcaagacagcctactgcgacatccacacgcctccaggttcagcacgccgactgcctgccctgtcccacagcgagggtgaggaggatgaagatgaggaggaggatgagggtaagggctggagctcagagaaagtcaagaaggccaaggccaagtcccggatcaaaatgaagaaggcacggaagatcctggcagagaagcgggcagcagcacctgtggtgtcagtgccctgcatcccaccacacaggcttagtaaaatcaccaaccgcctgaccatccaaaggaagagccagttcatgcagaggctgcacagctactggacactgaagcggcagtcacggaatggggtcccattgctacgtcgcctgcagacacacctgcaatctcagaggaactgtgaccaagttgggagagattctgaggataagaactgggcccttaaagaacagctcaagtcctggcagcggctccggcatgacttggagcgagctcggctgctcgtggaattgatccgcaagcgggaaaaactcaaaagggagacgatcaaggttcagcagattgccatggagatgcagctgactcctttcctcatcctccttcgcaaaaccttggagcagctccaagagaaggacacaggcaacatcttcagcgagccggtccctctgtctgaggtacctgactacctagaccacatcaaaaagcccatggactttttcaccatgaagcagaacttggaggcttaccgctacctgaattttgatgattttgaggaggacttcaacctcatcgtcagcaactgcctcaagtataacgccaaggacaccatcttctaccgggcagcagtgcggcttcgtgagcagggtggtgctgtgctccgccaggcccggcgccaggcagaaaaaatgggcattgactttgagacgggcatgcatatcccccacagcctggctggagatgaggccacacaccacactgaagatgcagccgaggaagagcggctggtcttgctggagaaccagaagcacctgccagtggaagaacagctaaagctgcttctggagcggctggacgaagtgaatgccagcaagcagagtgtgggccgctcacggcgtgcaaagatgatcaagaaagagatgacggcactgcggcggaagcttgcccatcagcgagagacgggacgtgatggccctgagcggcatggcccctcgagccggggtagtctgacaccccacccggcagcctgtgacaaggatgggcagacagatagtgcggcagaggagagcagcagccaggagacaagcaaaggcctgggtcccaacatgtcctcaacccccgcacatgaggtgggcaggagaacctcagttctgttctccaaaaagaacccgaagacagctggaccgcccaagaggccgggccggccccccaaaaaccgggagagccagatgacccccagccacggaggcagtcctgtggggcccccccagctccccatcatgagttccctgcgtcagcgcaagcggggtaggagcccccggcccagttcgagctcagacagcgacagtgataagtccacagaagaccccccaatggacttaccagccaatggcttcagcggtggaaaccaaccagtgaagaagagtttcttggtataccgtaatgactgcagccttccccggagcagctcagactctgagtccagcagcagtagcagtagcagcgctgcttcagaccggaccagcacaacgccctcaaaacaaggccggggcaaaccctccttctctcggggcactttcccagaggacagcagtgaggatacctcaggcactgagaatgaggcctactccgtgggcactggccgcggcgtgggccacagcatggtaaggaagagtctgggccggggagctggctggctgtcagaggatgaggactccccgctggatgctctggacctcgtgtgggccaaatgccgaggctatccatcatacccagctctgatcattgatccaaagatgccccgagaaggtatgttccaccatggggttcccatccctgtgcccccactggaggtgctgaaacttggggagcagatgacccaggaagcccgagagcatctctacctcgtcctcttctttgacaacaaacgaacctggcagtggctgcccaggaccaagctggttcctctgggtgtgaaccaggacctagacaaggagaagatgctggagggccgcaagtccaacatccgcaagtcagtacagatcgcctaccacagggctctgcagcaccgcagcaaggtgcaaggcgagcagagcagtgagaccagcgatagtgattgatactgctcaacacagcccaacctatagtgccctgtgacttctctcctcccctttgctcactgtcctggagtggcaccggcctctgcactgactcatttctggtcttggggccagtctcaggggaagctgggtgggggaggtccctcctgccctaagtgcagctggactgtacagaacactccaagggccaatggcagttcagcgcaaggagagggagggcccacaggtcagaaaaagctccagagacctcacagcattgtagggcggggtggtgggccaaagttaggacactgcgtaaaacaggccatcccaccacctctacctgctcatgccaggagaatccataactgcctagaggcctggggcccctaccggtcgtgaggtgagtgggcatctgtccagcctggaagaggggcactaggtgactccctcccctgctgttgtaaatactgtaattatcggagaatttaaattattctcatttgtaactgcgtttccgggtcgcgccagagtcatttggtactaaaaaaaaaaaaaaaaaagactgggggctgtccccatttcccttctctttcccatagattcccccacctttcaaactggtttgtatttatttcaaaggaagaaaatatattgattcttagaaaataaa

SEQ ID NO: 1048 - protein, 1214 aa, Homo sapiens
MGVDFDVKTFCHNLRATKPPYECPVETCRKVYKSYSGIEYHLYHYDHDNPPPPQQTPLRKHKKKGRQSRPANKQSPSPSEVSQSPGREVMSYAQAQRMVEVDLHGRVHRISIFDNLDVVSEDEEAPEEAPENGSNKENTETPAATPKSGKHKNKEKRKDSNHHHHHNVSASTTPKLPEVVYRELEQDTPDAPPRPTSYYRYIEKSAEELDEEVEYDMDEEDYIWLDIMNERRKTEGVSPIPQEIFEYLMDRLEKESYFESHNKGDPNALVDEDAVCCICNDGECQNSNVILFCDMCNLAVHQECYGVPYIPEGQWLCRRCLQSPSRAVDCALCPNKGGAFKQTDDGRWAHVVCALWIPEVCFANTVFLEPIDSIEHIPPARWKLTCYICKQRGSGACIQCHKANCYTAFHVTCAQQAGLYMKMEPVRETGANGTSFSVRKTAYCDIHTPPGSARRLPALSHSEGEEDEDEEEDEGKGWSSEKVKKAKAKSRIKMKKARKILAEKRAAAPVVSVPCIPPHRLSKITNRLTIQRKSQFMQRLHSYWTLKRQSRNGVPLLRRLQTHLQSQRNCDQVGRDSEDKNWALKEQLKSWQRLRHDLERARLLVELIRKREKLKRETIKVQQIAMEMQLTPFLILLRKTLEQLQEKDTGNIFSEPVPLSEVPDYLDHIKKPMDFFTMKQNLEAYRYLNFDDFEEDFNLIVSNCLKYNAKDTIFYRAAVRLREQGGAVLRQARRQAEKMGIDFETGMHIPHSLAGDEATHHTEDAAEEERLVLLENQKHLPVEEQLKLLLERLDEVNASKQSVGRSRRAKMIKKEMTALRRKLAHQRETGRDGPERHGPSSRGSLTPHPAACDKDGQTDSAAEESSSQETSKGLGPNMSSTPAHEVGRRTSVLFSKKNPKTAGPPKRPGRPPKNRESQMTPSHGGSPVGPPQLPIMSSLRQRKRGRSPRPSSSSDSDSDKSTEDPPMDLPANGFSGGNQPVKKSFLVYRNDCSLPRSSSDSESSSSSSSSAASDRTSTTPSKQGRGKPSFSRGTFPEDSSEDTSGTENEAYSVGTGRGVGHSMVRKSLGRGAGWLSEDEDSPLDALDLVWAKCRGYPSYPALIIDPKMPREGMFHHGVPIPVPPLEVLKLGEQMTQEAREHLYLVLFFDNKRTWQWLPRTKLVPLGVNQDLDKEKMLEGRKSNIRKSVQIAYHRALQHRSKVQGEQSSETSDSD

SEQ ID NO: 1049 - DNA, 2245 bp, Homo sapiens
gtacccccatcctttctctcgcccctcctacccgcagctcctggcgctcggcggggctaactgcagcgcggagatctcggccgccaagctccgcctcccgccccgggctgtgccccggggctcgcctgaggccgaccacccgcaccccacctctagcggctttgctcgaggcccaccttcttcccacccccggcaaactccagtaggctcgccctcgctgactccccgcccccgcgtcaactgcaaggggcccgcccatagccagttccggggcggttgctcacatcgaccggaactccccgccccctcccgcggcccctggggccgtaggaggccgcagcgaggaggtagagggggcgggggtcgcactagggtgtccctagagaacgaggactctgaaggcgggacatttgggcgacccccgggcggggccagccattaaacagtcccacttctgtgccagacactgaactgggctcttgacgggcatcatctcttaatcctcagaacatcccagggagctccacaggatccccatatcctgggccatgagtgagttgaaagactgccccttgcagttccacgacttcaagtctgtggatcacctgaaggtctgtccccgctacacggcagtgctggcacgctctgaggatgatggcatcggcatcgaggagctggacaccctgcagctggagctggagaccctgctgtcttctgccagccggcgcctgcgtgtgcttgaggccgaaacccagatcctcaccgactggcaggataagaaaggtgacagacgattcctgaagctgggtcgagaccatgaacttggagctccccccaaacatgggaagcccaagaagcagaaactggaagggaaggcaggacatgggccgggccctggcccaggacggcccaaatccaaaaaccttcagcccaagatccaggaatatgaattcactgatgaccctatcgacgtgccacggatccccaaaaatgatgcccccaacaggttctgggcttcagtggagccctactgtgctgacatcaccagcgaggaggtccgcacacttgaggagttactgaagcccccagaagatgaggctgagcattacaagatcccacccctggggaagcactactcccagcgctgggcccaggaggacctgctggaggagcagaaggatggggcccgggcagcggctgtggctgacaagaagaaaggcctcatggggccactgaccgaactggacactaaagatgtggatgccctgctgaagaagtctgaggcccagcatgaacagccggaagatggatgcccctttggtgccctgacgcagcgcctcctgcaggccctggtggaggaaaatattatttcccctatggaggattctcctattcctgacatgtctgggaaagaatcaggggctgacggggcaagcacctcccctcgcaatcagaacaagcccttcagtgtgccgcatactaagtccctggagagccgcatcaaggaggagctaattgcccagggccttttggagtctgaggaccgccccgcagaggactccgaggatgaggtccttgctgagcttcgcaaacggcaggctgagctgaaggcacttagtgcccacaaccgcaccaagaagcacgacctgctgaggctggcaaaggaggaggtgagccggcaggagctgaggcagcgggtgcgcatggctgacaacgaggtcatggacgcctttcgcaagatcatggctgcccggcagaagaagcggactcccaccaagaaagaaaaggaccaggcctggaagactctgaaggagcgtgagagcatcctgaagctgctggatgggtagccctcacccctgcctcaggctgattatctggcctaggggaggggaagggaggcccacttccttctttgggcacaggaaacattggcctgtggctgtccctcaaatggcggcagtctctagagggccgtggcccttcccctgaggtcttttggcctagctctgtacaaccaggacacaggaagccctgctgggctagcctgaggcctagtctctgcttggtccccgagatggggttggaggggacttcgtttctgggtcttcctcttcccctctttaccatcccccactccctaatcccctacccctgtctccccttcaaggacttctcccttgtggttttgtaaagtgcaaacttaagaataaagtgactgctgtggtttttcaaaaaaaaaaaaaaa

SEQ ID NO: 1050 - protein, 432 aa, Homo sapiens
MSELKDCPLQFHDFKSVDHLKVCPRYTAVLARSEDDGIGIEELDTLQLELETLLSSASRRLRVLEAETQILTDWQDKKGDRRFLKLGRDHELGAPPKHGKPKKQKLEGKAGHGPGPGPGRPKSKNLQPKIQEYEFTDDPIDVPRIPKNDAPNRFWASVEPYCADITSEEVRTLEELLKPPEDEAEHYKIPPLGKHYSQRWAQEDLLEEQKDGARAAAVADKKKGLMGPLTELDTKDVDALLKKSEAQHEQPEDGCPFGALTQRLLQALVEENIISPMEDSPIPDMSGKESGADGASTSPRNQNKPFSVPHTKSLESRIKEELIAQGLLESEDRPAEDSEDEVLAELRKRQAELKALSAHNRTKKHDLLRLAKEEVSRQELRQRVRMADNEVMDAFRKIMAARQKKRTPTKKEKDQAWKTLKERESILKLLDG

SEQ ID NO: 1051 - DNA, 2571 bp, Homo sapiens
gtacccccatcctttctctcgcccctcctacccgcagctcctggcgctcggcggggctaactgcagcgcggagatctcggccgccaagctccgcctcccgccccgggctgtgccccggggctcgcctgaggccgaccacccgcaccccacctctagcggctttgctcgaggcccaccttcttcccacccccggcaaactccagtaggctcgccctcgctgactccccgcccccgcgtcaactgcaaggggcccgcccatagccagttccggggcggttgctcacatcgaccggaactccccgccccctcccgcggcccctggggccgtaggaggccgcagcgaggaggtagagggggcgggggtcgcactagggtgtccctagagaacgaggactctgaaggcgggacatttgggcgacccccgggcggggccagccattaaacagtcccacttctgtgccagacactgaactgggctcttgacgggcatcatctcttaatcctcagaacatcccagggagctccacaggatccccatatcctgggccatgagtgagttgaaagactgccccttgcagttccacgacttcaagtctgtggatcacctgaaggtctgtccccgctacacggcagtgctggcacgctctgaggatgatggcatcggcatcgaggagctggacaccctgcagctggagctggagaccctgctgtcttctgccagccggcgcctgcgtgtgcttgaggccgaaacccagatcctcaccgactggcaggataagaaaggtgacagacgattcctgaagctgggtcgagaccatgaacttggagctccccccaaacatgggaagcccaagaagcagaaactggaagggaaggcaggacatgggccgggccctggcccaggacggcccaaatccaaaaaccttcagcccaagatccaggaatatgaattcactgatgaccctatcgacgtgccacggatccccaaaaatgatgcccccaacaggttctgggcttcagtggagccctactgtgctgacatcaccagcgaggaggtccgcacacttgaggagttactgaagcccccagaagatgaggctgagcattacaagatcccacccctggggaagcactactcccagcgctgggcccaggaggacctgctggaggagcagaaggatggggcccgggcagcggctgtggctgacaagaagaaaggcctcatggggccactgaccgaactggacactaaagatgtggatgccctgctgaagaagtctgaggcccagcatgaacagccggaagatggatgcccctttggtgccctgacgcagcgcctcctgcaggccctggtggaggaaaatattatttcccctatggaggattctcctattcctgacatgtctgggaaagaatcaggggctgacggggcaagcacctcccctcgcaatcagaacaagcccttcagtgtgccgcatactaagtccctggagagccgcatcaaggaggagctaattgcccagggccttttggagtctgaggaccgccccgcagaggactccgaggatgaggtccttgctgagcttcgcaaacggcaggctgagctgaaggcacttagtgcccacaaccgcaccaagaagcacgacctgctgaggtgagcgttagcaggatgcacagtcccgggggtggccttggaggctgtggccacggctagtcacctttcaggggttttacaacaggctttccaatcctggctggcctctaaatcacctggagagcctcgaaaaaaacagcagtggccagtccaccgggtatgtcccaaacaaattctgattccacagagtggggctcaggcatctgtgactgaccgattgatttgatttgtttttgttttgtttttttttgagagggagtctcgcactgtcacccaggctggagtgcagtggcatgatctcggctcactgcaagctccgcctcccaggttcatgccattctcctgcctcagcctcctgagtagctgatactacaggcacccaccaccacgcccagctaatttttttgtatttttagtagagacggggtttcaccgtgttagccaggatggtctcgatctcctgacctcgtgatccacccgcctcggcctcccaaagtgccgggattacaggcgtgagccactgcgcctggcctagtttggttttttaattatggtaaaggcataatataaaatgtatctccatgggaggctgaggcaggagaatcagttgaacctgggaggcggaggttgcagtgagctgagactgcaccattgcattccagcctgggcaacaagagtgaaactgcatctcaaaaaaaaaaagaaaaaaaatttacgcttcttaaccatttttaagtgtacagtttagtagtgttacccatattcacattgttgtgtgatttattttttgtcttttcatgcttcttttctttttatccccaaagttttgttattaaaaatttgatacacacagaaaatctgaaagaatcatacaataaacatcagtatattctccacctaaaaaaaaaaaaaaaaaa

SEQ ID NO: 1052 - protein, 369 aa, Homo sapiens
MSELKDCPLQFHDFKSVDHLKVCPRYTAVLARSEDDGIGIEELDTLQLELETLLSSASRRLRVLEAETQILTDWQDKKGDRRFLKLGRDHELGAPPKHGKPKKQKLEGKAGHGPGPGPGRPKSKNLQPKIQEYEFTDDPIDVPRIPKNDAPNRFWASVEPYCADITSEEVRTLEELLKPPEDEAEHYKIPPLGKHYSQRWAQEDLLEEQKDGARAAAVADKKKGLMGPLTELDTKDVDALLKKSEAQHEQPEDGCPFGALTQRLLQALVEENIISPMEDSPIPDMSGKESGADGASTSPRNQNKPFSVPHTKSLESRIKEELIAQGLLESEDRPAEDSEDEVLAELRKRQAELKALSAHNRTKKHDLLR

SEQ ID NO: 1053 - DNA, 2165 bp, Homo sapiens
gtacccccatcctttctctcgcccctcctacccgcagctcctggcgctcggcggggctaactgcagcgcggagatctcggccgccaagctccgcctcccgccccgggctgtgccccggggctcgcctgaggccgaccacccgcaccccacctctagcggctttgctcgaggcccaccttcttcccacccccggcaaactccagtaggctcgccctcgctgactccccgcccccgcgtcaactgcaaggggcccgcccatagccagttccggggcggttgctcacatcgaccggaactccccgccccctcccgcggcccctggggccgtaggaggccgcagcgaggaggtagagggggcgggggtcgcactagggtgtccctagagaacgaggactctgaaggcgggacatttgggcgacccccgggcggggccagccattaaacagtcccacttctgtgccagacactgaactgggctcttgacgggcatcatctcttaatcctcagaacatcccagggagctccacaggatccccatatcctgggccatgagtgagttgaaagactgccccttgcagttccacgacttcaagtctgtggatcacctgaaggtctgtccccgctacacggcagtgctggcacgctctgaggatgatggcatcggcatcgaggagctggacaccctgcagctggagctggagaccctgctgtcttctgccagccggcgcctgcgtgtgcttgaggccgaaacccagatcctcaccgactggcaggataagaaaggtgacagacgattcctgaagctgggtcgagaccatgaacttggagctccccccaaacatgggaagcccaagaagcagaaactggaagggaaggcaggacatgggccgggccctggcccaggacggcccaaatccaaaaaccttcagcccaagatccaggaatatgaattcactgatgaccctatcgacgtgccacggatccccaaaaatgatgcccccaacaggttctgggcttcagtggagccctactgtgctgacatcaccagcgaggaggtccgcacacttgaggagttactgaagcccccagaagatgaggctgagcattacaagatcccacccctggggaagcactactcccagcgctgggcccaggaggacctgctggaggagcagaaggatggggcccgggcagcggctgtggctgacaagaagaaaggcctcatggggccactgaccgaactggacactaaagatgtggatgccctgctgaagaagtctgaggcccagcatgaacagccggaagatggatgcccctttggtgccctgacgcagcgcctcctgcaggccctggtggaggaaaatattatttcccctatggaggattctcctattcctgacatgtctgggaaagaatcaggggctgacggggcaagcacctcccctcgcaatcagaacaagcccttcagtgtgccgcatactaagtccctggagagccgcatcaaggaggagctaattgcccagggccttttggagtctgaggaccgccccgcagaggactccgaggatgaggtccttgctgagcttcgcaaacggcaggctgagctgaaggcacttagtgcccacaaccgcaccaagaagcacgacctgctgaggtgagcgttagcaggatgcacagtcccgggggtggccttggaggctgtggccacggctagtcacctttcaggggttttacaacaggctttccaatcctggctggcctctaaatcacctggagagcctcgaaaaaaacagcagtggccagtccaccgggtatgtcccaaacaaattctgattccacagagtggggctcaggcatctgtgactgaccgattgatttgatttgtttttgttttgtttttttttgagagggagtctcgcctgggcaacaagagtgaaactgcatctcaaaaaaaaaaagaaaaaaaatttacgcttcttaaccatttttaagtgtacagtttagtagtgttacccatattcacattgttgtgtgatttattttttgtcttttcatgcttcttttctttttatccccaaagttttgttattaaaaatttgatacacacagaaaatctgaaagaatcatacaataaacatcagtatattctccacctaaaaaaaaaa

SEQ ID NO: 1054 - protein, 369 aa, Homo sapiens; identical to SEQ ID NO: 1052

SEQ ID NO: 1055 - DNA, 820 bp, Homo sapiens
cagccagcgcccgcgatgactgccactctccgcccctacctgagtgccgtgcgggccacattgcaggctgccctctgcctggagaacttctcctcccaggttgtggaacgacacaacaagccggaagtggaagtcaggagtagcaaagagctcctgttacaacctgtgaccatcagcaggaatgagaaggaaaaggttctgattgagggctccatcaactctgtccgggtcagcattgctgtgaaacaggctgatgagatcgagaagattttgtgccacaagttcatgcgcttcatgatgatgcgagcagagaacttctttatccttcgaaggaagcctgtggaggggtatgatatcagctttctgatcaccaacttccacacagagcagatgtacaaacacaagttggtggactttgtgatccacttcatggaggagattgacaaggagatcagtgagatgaagctgtcagtcaatgcccgtgcccgcattgtggctgaagagttccttaagaatttttaaaccatctggctggatctcgtggccttccccctcagactacccatgtctccacgaaggcgtcctggagtcactccccgagcagcgcggcggcggcagggagttgggttggggtgggcatttgatgcgggaggtgggtggtgtgcttgctagctgggcaagaaagcagcagtggacctgccccaaggccacacgtgcctggtcaggctggcttctgatgttcagtcccctgggccgggacagattttttttaacgtcttgaaacttaaactctgtgcttgtaaaaaaaaaaaaaaaaaaa

SEQ ID NO: 1056 - protein, 168 aa, Homo sapiens
MTATLRPYLSAVRATLQAALCLENFSSQVVERHNKPEVEVRSSKELLLQPVTISRNEKEKVLIEGSINSVRVSIAVKQADEIEKILCHKFMRFMMMRAENFFILRRKPVEGYDISFLITNFHTEQMYKHKLVDFVIHFMEEIDKEISEMKLSVNARARIVAEEFLKNF

SEQ ID NO: 1057 - DNA, 2553 bp, Homo sapiens
gcctgcctcttccagagagactcccccattgctgtctcttgtgtgtgtcatgcacaaggaaggcttggttgtgtgccaggataaggggcacaagggcctcgggtgtggccagagaccccatgcttaagcttttatggtataggtcaggctgcaggggtttgagggcctcagttgtatatcagaatcttcagagcactgcgatgttcaggggtgagtcaggtctgtagatgtgcacggggtcttctgaagggtcagtttctgtaatcactttcaggtgtgtcagggccttgtgcagtaacagtgcacacagaagttagtgtttctgtgggctaagggttgtagctctgtatcaggattctgggagtgggtctggatttctggtgtgtggacttaagaagctgtgtcagacttgggggaggggcgttcatgtataactgggttcacataggccaagactcccaggtgcattttaggcagagcctcaggtgtgttagaggtcccaggggcagagaggctataggtgctgtcagaggccttggggacatttagggcagagcctcgagtgacaggtcctgggacagtgggagccaagggcaagtgctagagttgcagtgaatttagagcaaagcctcagctaagtgacacatcccagggcagtaggggatctatctaggttcgtgctgggcctcaggtaagtgacaggccttaggacaatgggggctgtggcatgcgtcaggttacctgccttgatatgggatcgtgacaggcccctccctatgtgcaggagacaagcagcccaagaaacaggagaaaaacccagtgttggtgtccccagagtttgtggatgaagctctgtgtgcgtgcgaggagtaccttagcaacttggcccacatggacatcgacaaggacctggaggccccgctgtacctcacccccgagggctggtccctcttcctccagcgctactaccaagtggtccacgaaggggcagaactcaggcacctcgacactcaggtccagcgctgtgaggacatcctgcagcagctgcaggccgtggtaccccagatagacatggaaggggatcgcaacatctggatcgtgaagccaggagccaagtcccgcggacgaggcatcatgtgcatggaccacctggaggagatgctgaagctggtgaacggcaaccccgtggtgatgaaggacggcaagtgggtggtgcagaagtatattgagcggcccctcctcatctttggcaccaagtttgacctcagacagtggttcctggtaactgactggaacccacttaccgtgtggttctaccgcgacagctatatccgcttttccacgcagcccttctccctgaagaacctggacaactcagtgcacctgtgcaacaactccatccagaagcacctggagaactcatgccatcggcatccactgcttccgccagacaacatgtggtctagccagaggttccaggcccacctgcaggagatgggtgccccaaatgcttggtccaccatcatcgtgcctggcatgaaggatgctgtgatccacgcacttcagacctcccaggacaccgtgcagtgtcggaaggccagctttgagctctatggcgctgacttcgtgttcggggaggacttccagccctggctgattgagatcaacgccagccccacgatggcaccctccacagcagtcactgcccggctctgtgctggcgtgcaagctgacaccctgcgcgtggtcattgaccggatgctggaccgcaactgtgacacaggagcctttgagctcatctataagcagcccgtcaccacttccccagcctccacaccaaggcccagctgccttctccccatgtactccgacaccagggccaggtcctcagacgacagcacagcaagctggtgggcactaaggccctgtcgaccacaggcaaggccttgaggactctacccacggctaaggtcttcatttccctcccaccgaaccttgatttcaaggtggcacccagcatcctgaagccaagaaaggtgggcctcgacctgtgactcacacccagtggacagtgctgagcacggggtcagggctggagggcacaggcagagggcagctcccaggctggctggcaccccaagggaagagctggtctccctcagaagccccttcctccacagacttctgatcatctccctcttctcccctcctttcacaccgaggctcctgctctcctgtgcctccgaggcccccagctggaagtgccttgttgcctctgccctttgaagtcggaacaattcctagcacctgtcggaaggtcaaggccaaaggcaaattcaaggccagactgtgacaaacccagggctgaggcctgccccatgaagaggctgagccccctgaaacccctgccccttgttggtacattccagaggcgcaggggcctgggggatatgaagctagggaagcccctgcttcgattccccactgcccttgtcctggatccaacaccaaataaaaagaaacaagtgaagtaaaaaaaaaaaaaaaaaaaaa

SEQ ID NO: 1058 - protein, 352 aa, Homo sapiens
MDIDKDLEAPLYLTPEGWSLFLQRYYQVVHEGAELRHLDTQVQRCEDILQQLQAVVPQIDMEGDRNIWIVKPGAKSRGRGIMCMDHLEEMLKLVNGNPVVMKDGKWVVQKYIERPLLIFGTKFDLRQWFLVTDWNPLTVWFYRDSYIRFSTQPFSLKNLDNSVHLCNNSIQKHLENSCHRHPLLPPDNMWSSQRFQAHLQEMGAPNAWSTIIVPGMKDAVIHALQTSQDTVQCRKASFELYGADFVFGEDFQPWLIEINASPTMAPSTAVTARLCAGVQADTLRVVIDRMLDRNCDTGAFELIYKQPVTTSPASTPRPSCLLPMYSDTRARSSDDSTASWWALRPCRPQARP

SEQ ID NO: 1059 - DNA, 1168 bp, Homo sapiens
gtcctggctcgggagatggacggccgccgtgttttgggccggttctggagtggctggcggcggggcctgggtgtccgcccagtgcccgaggacgcaggctttggcaccgaagcccggcatcagaggcaaccccgcggctcctgccaacggtcggggcccctcggggaccagcccttcgcggggctgctgccaaaaaacctcagtcgggaggagctggttgatgcgctgcgggcagccgtggtggaccggaaaggaaaaccaggagagctgacgttgttctcagtgctgccagagctgagccagtccctagggctcagggagcaggagcttcaggttgtccgagcatctgggaaagaaagctctgggcttgtactcctctccagctgtccccagacagctagtcgcctccagaagtacttcacccatgcacggagagcccaaaggcccacagccacctactgtgctgtcactgatgggatcccagctgcttctgaggggaagatccaggctgccctgaaactggaacacattgatggggtcaatctcacagttccagtgaaggccccatcccgaaaggacatcctggaaggtgtcaagaagactctcagtcactttcgtgtggtagccacaggctctggctgtgccctggtccagctgcagccactgacagtgttctccagtcaactacaggtgcacatggtactacagctctgccctgtgcttggggaccacatgtactctgcccgtgtgggcactgtcctgggccagcgatttctgctgccagctgagaacaacaagccccaaagacaggtcctggatgaagccctcctcagacgcctccacctgaccccctcccaggctgcccagctgcccttgcacctccacctacatcggctccttctcccaggcaccagggccagggacacccctgttgagctcctggcaccactgcccccttatttctccaggaccctacagtgcctggggctccgcttacaatagtcctccctctgttcctgaccccctcacacacactggaaagtgagggtgggggctctgcagtcagacaaacctaagatcacatcctggacaggccacttgcttgctgtgtggcattgggcaagtaactttacctctctggacttgtgataataaaagttcctacctc

SEQ ID NO: 1060 - DNA, 1091 bp, Homo sapiens
atagggtcagtgggccgcttggcggtgtcgttgcggtaccaggtccgcgtgaggggttcgggggttctgggcaggcacaatggcgtctcgagcaggcccgcgagcggccggcaccgacggcagcgactttcagcaccgggagcgcgtcgccatgcactaccagatgagtgtgactctcaagtatgaaatcaagaagctgatctacgtacatctggtcatatggctgctgctggttgctaagatgagcgtgggacacctgaggctcttgtcacatgatcaggtggccatgccctatcagtgggaatacccgtatttgctgagcattttgccctctctcttgggccttctctcctttccccgcaacaacattagctacctggtgctctccatgatcagcatgggactcttttccatcgctccactcatttatggcagcatggagatgttccctgctgcacagcagctctaccgccatggcaaggcctaccgtttcctctttggtttttctgccgtttccatcatgtacctggtgttggtgttggcagtgcaagtgcatgcctggcagttgtactacagcaagaagctcctagactcttggttcaccagcacacaggagaagaagcataaatgaagcctctttggggtgaagcctggacatcccatcgaatgaaaggacactagtacagcggttccaaaatcccttctggtgattttagcagctgtgatgttggtacctggtgcagaccaggccaaagttctggaaagctccttttgccatctgctgaggtggcaaaactataatttattcctggttggctagaactgggtgaccaacagctatgaaacaaatttcagctgtttgaagttgaactttgaggtttttctttaagaatgagcttcgtccttgcctctactcggtcattctccccatttccatccattaccccttagccattgagactaaaggaaatagggaataaatcaaattacttcatctctaggtcacgggtcaggaaacatttgggcagctgctcccttggcaggctgtggtctcctctgcaaagcattttaattaaaaacctcaataaaga

SEQ ID NO: 1061 - protein, 183 aa, Homo sapiens
MASRAGPRAAGTDGSDFQHRERVAMHYQMSVTLKYEIKKLIYVHLVIWLLLVAKMSVGHLRLLSHDQVAMPYQWEYPYLLSILPSLLGLLSFPRNNISYLVLSMISMGLFSIAPLIYGSMEMFPAAQQLYRHGKAYRFLFGFSAVSIMYLVLVLAVQVHAWQLYYSKKLLDSWFTSTQEKKHK

SEQ ID NO: 1062 - DNA, 2396 bp, Homo sapiens
ggaagttgagcggcggcaagaaataatggcggcagctacgggggatcctggactctctaaactgcagtttgccccttttagtagtgccttggatgttgggttttggcatgagttgacccagaagaagctgaacgagtatcggctggatgaagctcccaaggacattaagggttattactacaatggtgactctgctgggctgccagctcgcttaacattggagttcagtgcttttgacatgagtgctcccaccccagcccgttgctgcccagctattggaacactgtataacaccaacacactcgagtctttcaagactgcagataagaagctccttttggaacaagcagcaaatgagatatgggaatccataaaatcaggcactgctcttgaaaaccctgtactcctcaacaagttcctcctcttgacatttgcagatctaaagaagtaccacttctactattggttttgctatcctgccctctgtcttccagagagtttacctctcattcaggggccagtgggtttggatcaaaggttttcactaaaacagattgaagcactagagtgtgcatatgataatctttgtcaaacagaaggagtcacagctcttccttacttcttaatcaagtatgatgagaacatggtgctggtttccttgcttaaacactacagtgatttcttccaaggtcaaaggacgaagataacaattggtgtatatgatccctgtaacttagcccagtaccctggatggcctttgaggaattttttggtcctagcagcccacagatggagtagcagtttccagtctgttgaagttgtttgcttccgtgaccgtaccatgcagggggcgagagacgttgcccacagcatcatcttcgaagtgaagcttccagaaatggcatttagcccagattgtcctaaagcagttggatgggaaaagaaccagaaaggaggcatgggaccaaggatggtgaacctcagtgaatgtatggaccctaaaaggttagctgagtcatcagtggatctaaatctcaaactgatgtgttggagattggttcctactttagacttggacaaggttgtgtctgtcaaatgtctgctgcttggagccggcaccttgggttgcaatgtagctaggacgttgatgggttggggcgtgagacacatcacatttgtggacaatgccaagatctcctactccaatcctgtgaggcagcctctctatgagtttgaagattgcctagggggtggtaagcccaaggctctggcagcagcggaccggctccagaaaatattccccggtgtgaatgccagaggattcaacatgagcatacctatgcctgggcatccagtgaacttctccagtgtcactctggagcaagcccgcagagatgtggagcaactggagcagctcatcgaaagccatgatgtcgtcttcctattgatggacaccagggagagccggtggcttcctgccgtcattgctgcaagcaagagaaagctggtcatcaatgctgctttgggatttgacacatttgttgtcatgagacatggtctgaagaaaccaaagcagcaaggagctggggacttgtgtccaaaccaccctgtggcatctgctgacctcctgggctcatcgctttttgccaacatccctggttacaagcttggctgctacttctgcaatgatgtggtggccccaggagattcaaccagagaccggaccttggaccagcagtgcactgtgagtcgtccaggactggccgtgattgcaggagccctggccgtggaattgatggtatctgttttgcagcatccagaagggggctatgccattgccagcagcagtgacgatcggatgaatgagcctccaacctctcttgggcttgtgcctcaccagatccggggatttctttcacggtttgataatgtccttcccgtcagcctggcatttgacaaatgtacagcttgttcttccaaagttcttgatcaatatgaacgagaaggatttaacttcctagccaaggtgtttaattcttcacattccttcttagaagacttgactggtcttacattgctgcatcaagaaacccaagctgctgagatctgggacatgagcgatgatgagaccatctgagatggccccgctgtggggctgacttctccctggccgcctgctgaggagctctccatcgccagagcaggactgctgaccccaggcctggtgattctgggcccctcctccataccccgaggtctgggattcccccctctgctgcccaggagtggccagtgttcggcgttgctcgggattcaagataccaccagttcagagctaaataataaccttggccttggccttgctattgacctgggaaaaaaaaaaaaaaaaaaaa

SEQ ID NO: 1063 - protein, 703 aa, Homo sapiens
MAAATGDPGLSKLQFAPFSSALDVGFWHELTQKKLNEYRLDEAPKDIKGYYYNGDSAGLPARLTLEFSAFDMSAPTPARCCPAIGTLYNTNTLESFKTADKKLLLEQAANEIWESIKSGTALENPVLLNKFLLLTFADLKKYHFYYWFCYPALCLPESLPLIQGPVGLDQRFSLKQIEALECAYDNLCQTEGVTALPYFLIKYDENMVLVSLLKHYSDFFQGQRTKITIGVYDPCNLAQYPGWPLRNFLVLAAHRWSSSFQSVEVVCFRDRTMQGARDVAHSIIFEVKLPEMAFSPDCPKAVGWEKNQKGGMGPRMVNLSECMDPKRLAESSVDLNLKLMCWRLVPTLDLDKVVSVKCLLLGAGTLGCNVARTLMGWGVRHITFVDNAKISYSNPVRQPLYEFEDCLGGGKPKALAAADRLQKIFPGVNARGFNMSIPMPGHPVNFSSVTLEQARRDVEQLEQLIESHDVVFLLMDTRESRWLPAVIAASKRKLVINAALGFDTFVVMRHGLKKPKQQGAGDLCPNHPVASADLLGSSLFANIPGYKLGCYFCNDVVAPGDSTRDRTLDQQCTVSRPGLAVIAGALAVELMVSVLQHPEGGYAIASSSDDRMNEPPTSLGLVPHQIRGFLSRFDNVLPVSLAFDKCTACSSKVLDQYEREGFNFLAKVFNSSHSFLEDLTGLTLLHQETQAAEIWDMSDDETI

SEQ ID NO: 1064 - DNA, 521 bp, Homo sapiens
tcttcctcggcgctgcctacggaggtggcagccatctccttctcggcatcatggccgccctcagaccccttgtgaagcccaagatcgtcaaaaagagaaccaagaagttcatccggcaccagtcagaccgatatgtcaaaattaagcgtaactggcggaaacccagaggcattgacaacagggttcgtagaagattcaagggccagatcttgatgcccaacattggttatggaagcaacaaaaaaacaaagcacatgctgcccagtggcttccggaagttcctggtccacaacgtcaaggagctggaagtgctgctgatgtgcaacaaatcttactgtgccgagatcgctcacaatgtttcctccaagaaccgcaaagccatcgtggaaagagctgcccaactggccatcagagtcaccaaccccaatgccaggctgcgcagtgaagaaaatgagtaggcagctcatgtgcacgttttctgtttaaataaatgtaaaaactgccatctggcatcttccttc

SEQ ID NO: 1065 - protein, 135 aa, Homo sapiens [sequence omitted]

SEQ ID NO: 1066 - DNA, 2570 bp, Homo sapiens
tcggaggagccagccgaaatcctgccgcctgcccgggacgaggaggaggaggaggaagaggggatggagcaggggctggaggaggaagaagaggtggatccccggatccagggagaactggagaagttaaatcagtccacggatgatatcaacagacgggagactgaacttgaggatgctcgtcagaagttccgctctgttctggttgaagcaacggtgaaactggatgaactggtgaagaaaattggcaaagctgtggaagactccaagccctactgggaggcacggagggtggcgaggcaggctcagctggaagctcagaaagccacgcaggacttccagagggccacagaggtgctccgtgccgccaaggagaccatctccctggccgagcagcggctgctggaggatgacaagcggcagttcgactccgcctggcaggagatgctgaatcacgccactcagagggtcatggaggcggagcagaccaagaccaggagcgagctggtgcataaggagacggcagccaggtacaatgccgccatgggccgcatgcgacagctggagaagaaactcaagagagccatcaacaagtccaagccttattttgaactcaaggcaaagtactatgtgcagctcgagcaactgaaaaagactgtggatgacctgcaggccaaactgaccctggcaaaaggcgagtacaagatggccctgaagaacctggagatgatctcagatgagatccacgagcggcggcgctccagtgccatggggcctcggggatgcggtgttggtgctgagggcagcagcacatctgtggaggatctgccagggagcaaacctgagcctgatgccatttctgtggcctcggaggcctttgaagatgacagctgtagcaactttgtgtctgaagatgactcggaaacccagtccgtgtccagctttagttcaggaccaacaagcccgtctgagatgcctgaccagttccctgcggttgtgaggcctggcagcctggatctgcccagccctgtgtccctgtcagagtttgggatgatgttcccagtgttgggccctcgaagtgaatgcagcggggcctcctcccctgaatgtgaagtagaacgaggagacagggcagaaggggcagagaataaaacaagtgacaaagccaacaacaaccggggcctcagcagtagcagtggcagtggtggcagcagtaagagccaaagcagcacctcccctgagggccaggccttggagaaccggatgaagcagctctccctacagtgctcaaagggaagagatggaattattgctgacataaaaatggtgcagattggctgattcatcctgggccctggccgatgtgcatatcaacatttatacatggaactggagaacattgtgccaataatcatttaatatatgccaaatcttacacgtctactctaaactgctctaatgaagtttcagtgaccttgagggctaaagattgttcttctgggtaagagctcttgggctggtttttcagagcagagttcttgttgtgggtagactgtgactaggttcacagcctttgtggaacattccgtataacggcattgtggaagcaataactagttcctatgaaagaaccagagctgggaagatggctgggaagccaggccaaagtgggggcaacagcttgcttctctttctcttctcaccctcagtttgtatgggaaaatggagatgtcctctccactttatcccacgatatctaaatgaaaaagaaagaaaacccacacacaaagcaaaaactcaagtattaagagcacatatttttgacccagtggaggcttaaaaaaaaaaaaatccaagaacacaattcattttcaccacctctggtgttcagagggggcttttaaaaaagcgtgtatgctgggatacccattaaaaccattttctagaaggctaccatgagctgcactttttggggtgggaaaggtgaatgccagtggggatgcggggggatgagggtaggagggacttatagaaggggatttgtggctgtgggggagaaggttctacagcataagccttatcctgccagccaaggggatttattctaagagaagtgcatgtgaagaatggttgccactgttattagattgacaagatgttaatttctctgtaggttgtaactttaaaaataaatgaaattatttaagggttatgctgcactagtattccttagaggaaacagttctttaaagttaggaaagggagtaggcaggcatgtgttggcaaaggctgttaatagtagttaagtgttaagactgcttttctttaacgttttcatggtaatgcatatttagagcactgtatttttgtcttgttaagaaaatttagcatttctaaaagaaaaaagcaaccctctttcaaactgttaattctgtcacagcctgtatattttagtcatttgtaaatctcttcatacaatagtgacttcttttttgactgatacagtatcttaattacaaggttattttgtacttgtcttaatacactaagtgtaataaaaacggcttgag

SEQ ID NO: 1067 - protein, 425 aa, Homo sapiens
MEQGLEEEEEVDPRIQGELEKLNQSTDDINRRETELEDARQKFRSVLVEATVKLDELVKKIGKAVEDSKPYWEARRVARQAQLEAQKATQDFQRATEVLRAAKETISLAEQRLLEDDKRQFDSAWQEMLNHATQRVMEAEQTKTRSELVHKETAARYNAAMGRMRQLEKKLKRAINKSKPYFELKAKYYVQLEQLKKTVDDLQAKLTLAKGEYKMALKNLEMISDEIHERRRSSAMGPRGCGVGAEGSSTSVEDLPGSKPEPDAISVASEAFEDDSCSNFVSEDDSETQSVSSFSSGPTSPSEMPDQFPAVVRPGSLDLPSPVSLSEFGMMFPVLGPRSECSGASSPECEVERGDRAEGAENKTSDKANNNRGLSSSSGSGGSSKSQSSTSPEGQALENRMKQLSLQCSKGRDGIIADIKMVQIG

SEQ ID NO: 1068 - DNA, 1935 bp, Homo sapiens
catggcaaaagaactcccggataatccgaattcgtggtcctcagaattggtttagggttgtttcgcggttcttcccgtattctgcctccgaggcccagtggggctggctgtggggtgagtgcgcctggccctagccctgcagccccctgtgctgtttgaggcgtgaaactcacctcaggaaatgtatctgatccattagcgtggattcatattatttggtgatggagaatcttcagctgtgttaagtgttaccgtcagtttcagagatggcttctttgcaaaggaaagggctgcaggcaaggattctcacctctgaagaagaggagaaactgaaaagagaccaaactttggtgtctgattttaaacagcagaaattggaacaagaggctcagaaaaattgggatcttttttacaaaagaaatagcactaatttcttcaaagacagacactggaccaccagagagtttgaggagctaagatcatgtagagagtttgaagatcaaaagttaacaatgcttgaagctggctgtggggttggaaactgtttattcccacttttagaagaagatccgaatatctttgcctatgcctgtgatttttctccaagagccattgaatatgttaagcaaaatcctttatatgatacagaaagatgcaaggtattccagtgtgatctgactaaagatgatcttctggatcatgtaccgccagagtctgtggatgttgttatgttgatatttgtgctgtcagctgttcatcctgataagatgcaccttgtcttacaaaacatttacaaggtattaaaaccaggcaaaagtgtcttgtttcgtgactacggactgtatgatcatgccatgcttaggtttaaagccagcagcaaacttggagaaaacttttatgttagacaagatgggaccagatcatatttttttactgatgacttcctggctcagctctttatggacacaggttatgaagaagtggtaaacgagtatgtgtttcgagagacggtgaataaaaaagaaggcctgtgtgtgccaagagttttccttcagagcaaatttctaaagcctcctaagaacccatctcctgtggtcctgggcctggatcctaagtcctgacctttcatgaggttggcatttataccttcccttgaagaggaaaatttaaaatcactctttcgtctgggtgcggtggctcatgcctgtaatcccagcacttcgggaggccgaggttgggggatcatctgaggtcaggagtttgagaccagcctggccaacatggtgagaccccatctctactaaaaatacaaaaaaattagctgggcatagtggcgagtgcctgtaatcccagctactcaggaggctgaggcaagagaatcgcttgaacccaagaggcggagactgcagtgagccaagatcatgccattgcactccagcctgggcgacagagtgagaccctgtttcataaataaataaaatcactctttttactttatatattttttgagacaggatcttgtggtacgcaggctggagtgcagtggtgtgtgatcacagctcattgtagcctcgacctcccctgggctcaagcagtcttcctgcctcagcctcctgagtagctaggactacaggtgtaagccaccatgcctggcccttaattttttttaatgagcatgtacagtagtcccgctttatccatggtttcacttaccacaatttcaattacctgttttcaactgcagtcagttacttttcttaagatattttgagggttataggctcatgcctataaccccagcactttgagaggccaaggccagcagatcccttgagcccaggagttcaagaccagtgtgggcaacatggtgaaactctgtctctacagaaaatacaaaaattagccaaatgtggtggcatgtgcctgtagtcccag

SEQ ID NO: 1069 - protein, 284 aa, Homo sapiens
MASLQRKGLQARILTSEEEEKLKRDQTLVSDFKQQKLEQEAQKNWDLFYKRNSTNFFKDRHWTTREFEELRSCREFEDQKLTMLEAGCGVGNCLFPLLEEDPNIFAYACDFSPRAIEYVKQNPLYDTERCKVFQCDLTKDDLLDHVPPESVDVVMLIFVLSAVHPDKMHLVLQNIYKVLKPGKSVLFRDYGLYDHAMLRFKASSKLGENFYVRQDGTRSYFFTDDFLAQLFMDTGYEEVVNEYVFRETVNKKEGLCVPRVFLQSKFLKPPKNPSPVVLGLDPKS

SEQ ID NO: 1070 - DNA, 5689 bp, Homo sapiens
gacaatgaaaagcgaaccccattgcacgccgcagcttaccttggagatgcagaaatcattgaacttcttattttatctggagctagagttaatgccaaagacagcaaatggttgacacctttacacagagcagttgcatcttgtagtgaggaagcagttcaggtacttttgaagcattctgcagatgttaatgctcgagacaaaaattggcaaacccctttacatatagctgctgctaataaagctgtaaagtgtgctgaagctttggtacctcttctgagtaatgtaaacgtatctgatcgagcagggaggactgcattacatcatgcagctttcagtggacatggtgagatggtcaaactactcttgtctagaggtgccaatattaatgcttttgacaagaaagataggcgtgctatccattgggcagcatatatgggtcacattgaagtagtgaaattgcttgtgtcgcatggagctgaagtgacatgcaaggataaaaagtcttatacacctcttcatgcagcagcctctagtggaatgatcagcgtagtcaagtaccttctagatcttggagttgatatgaatgaaccaaatgcctatggaaatacacctcttcatgtagcctgctataatggacaagatgttgtagtgaatgaacttatagactgtggtgctattgtgaatcaaaagaatgaaaaaggatttactcctttgcactttgctgctgcatcaacacatggagcattgtgtttagagcttctagttggcaatggggccgatgtcaatatgaagagtaaagatgggaaaaccccactacacatgactgctctccacggtagattctcccgatcacaaaccattatccagagtggagctgtaatcgactgtgaggataagaatggaaatacccctttgcacatagcagcacggtatggccatgagctgctgatcaacactcttattacaagtggtgctgacactgcaaagcgtggcatacatggaatgttccccctccatttggcagccttaagcggcttttcagattgctgcagaaaacttctttcttcaggatttgatatagataccccagatgattttggcaggacttgtctacatgcagctgcagctggagggaatttggagtgcctaaaccttctgctgaatactggtgcagactttaataaaaaggacaaatttgggagatctccactgcactacgctgctgccaactgcaattaccagtgcctgtttgctcttgtgggatcaggagcaagtgtgaatgaccttgatgaaagaggctgcacacccctgcactatgcagctacatcagacacagatggcaagtgcctggaatacttattaagaaacgatgcaaatccagggatccgtgataagcaaggatacaacgcagttcattattcagctgcttatggtcaccgtctatgtcttcagctgattgcaagtgaaactcctctagatgttttaatggaaacctcaggaacagacatgctgagtgattcagataatagagcaacaataagccctttacacttggctgcctatcatggtcaccatcaagcactggaagtgttggtacagtctttgttagatcttgatgtcagaaatagtagtggaagaacacccctagatcttgcagcttttaagggccatgttgaatgtgtggatgtactcattaatcagggagcctcaatcttagtaaaagattacattttgaagaggacacctattcatgcagcagcaacaaatggtcattcagaatgcttacggctattaataggaaatgcagaaccacagaatgcagtggatattcaagatggaaatggacagacgcctctgatgctatctgttctcaacgggcacacagactgtgtttactcattgctgaacaaaggagcaaatgtagatgccaaagataagtggggaaggacagcgttgcatagaggggcagttacaggccatgaagaatgtgtagatgcattacttcaacatggtgctaagtgcttacttcgggatagcaggggccggacgcctatacacctgtctgctgcctgtggacacattggtgttcttggagcccttttgcagtcagcagcatctatggatgcaaatccagccacagcagacaatcatggatatacggcacttcactgggcttgctacaatggtcacgagacatgtgtagaactgcttttagaacaggaagttttccagaaaacggaaggaaatgcttttagtccattgcattgtgccgtgataaatgacaacgaaggtgctgctgagatgttaattgatacattaggtgccagcattgtgaacgccacagattcaaaaggaagaactcctctccatgcagccgccttcacagaccatgtagagtgtttacagctgctgctcagccataatgctcaagtcaattctgtggactctacagggaaaacacctcttatgatggctgcagaaaatggacaaacaaatacagttgagatgctggttagcagtgctagtgcagaactgactttacaagataacagtaaaaatactgccctccatttggcttgtagcaagggtcatgaaactagtgccttgttaatactggaaaagataacagatagaaacctcatcaatgcaaccaacgcagccttgcaaacacctctgcatgttgctgcccgaaatgggctaacaatggtggttcaggaacttttgggaaaaggagcaagtgtgcttgcagtagatgaaaatggctataccccagctttggcctgtgctcccaataaggatgtggctgattgcctggctctcattttggccaccatgatgcctgtctcatcaagtagtcctttatcatccttaacattcaatgccattaaccgttataccaacacctcaaaaacagtcagctttgaagctttgcccatcatgaggaatgaacctagctcctattgcagtttcaataacattggaggggaacaggagtacttatacactgacgtggatgagctcaacgactccgattctgagacctactgagaggctgaggaggagggagttctcacagtaaagcttcaaactgtgctttttcaggaaaaaggcactttgatattcacgtagaaattcaacctaagaggaaagatcccacagtgagccaatgttaagagatctgatggcattaggaggaagagttttaaaggcaagttttacaaaaggaacttctagaatcttgaaatagacctgactgaggaaaacacattgatgtcagaattctttgtggaattgtttaatttggttttgcagtgccaggaacaattggggacactgtgcactctaacctgcttacacaagcaacactattgtaacagaagaaataaagacactagatttaaattttatcaataaaattacaactaaatttaaaggcaataaaagtttggtacagtaggcattatgtgcacagcaaattgcaaaaggaccaaataactgaaaggtttttttaataaaatgccattttgtggaaactggagtagattaaatgaaacattacctaaaccaaactgcaatatttctggaaatgaagctgagatttggttttaaatgttgagtttttttgggttttgttttttttttaagaaaacatctgaaagccttccaatgctgtattaaaccatgagagaaagcagatgtatttttacatttttttcttttacagaactatttcaaatttccaatttttatactattagaattaaaaaccagctgactgggtgcaatacgggtgaaaatacttgtgacatagacattgagatggattggggtcaggctgttgccctgttttgaatggtttgggtttaaaatagtactatttttgtttgaaaatgtaaagaatttcctagaaaaaaattcatgaaatcaaaaagtagactatttcaccctattgcagctaagtggtcctggggcatggagtcttcaacctctctatgaatggcacaccttagtcacttatgttacttttgtgtccccaccatgggttgggggattttttgtttattctgatctatgagttttgaaaaagtgaataatcaaaaggaaaataattccttgttgttcataaattaagcatcactaaagtctcttgaaaggcatttctgtattgggcaagatttaaaatactaaagccttaggtcctattcatatttaaagtagcatgtttgtaacctgttactatttggagagagaagcagttgcctgccaaattgaagactacctttcaaatagcaaaagagagagagaaggctgatatttcggcttttaaataaagatttgtgtggttctgcttttactgtaactgtcactttcccagtgaaaatgatttcatatacattgagggtcttacaggtatgggtaaagttctataaattgcaacaaaatgatacccaatttcattttatcctttttgtattgtgaaactggaaactttatgacattgtaaattatcagctggtttttctgaatataaagtgtgaaaacacagaacagtattttgatctatttgataattttgtgggttttttgaagaattaatgagcatgtacatagaaatagtgactgcttgaatactgtatttacttgcactctttcagtacatcaagattcctgtatattttagagtataataaaacacagatgtgagttgtatttaatgaataatgtatttgtatctgtgcatattatctacaaatctataaagtttctagggcattgactactagattttaagcattttttctaaaatatttacagaaattataaatctaatcccccatcttttctttataatataaagaagtcataatgaacccttcctaattattagtagtaggaaggtgaatatgcattttaatgacagtggactacattttctattgtaccttttgaaaaaaaaaaaaatcaagcagattctaaaagtatacatatgtgtgctttctctttccttttaggaattctcttctgaattccctgagggaattttctagaatctcagaattgaaagagacctgaggttcatccagtctctaacctcttaacaaatgcaggagtcccttctacaagggtgatctttccaccttgaacacttccaagtgactctacctcaccaagcagtccattcagttgttgagcagctctaactgttagaaaggtcttccttagatggagttgaagcctccctcccggtaacttctgtctttgggcctgggtctgtcctccaagagaaccctgagaatgttggaaggatgaatctcgcacattctgccatgtcttctcttttacaggctgtttgacttctctgctgaagtgatttccagaaggactcatttgacacactattagatttaccacatctaatgaaatccaaggtgtagctataaagtgacaagctgtttttaatttatcacatacaccagaacttctatcctgcatcacttatatgtaaatgatgctgttaccaaaaacattaaggtagttcttgcgaatgccaccccactaagaaaactatttcattacttttgtaatccatctgtgagagtctgccccccagcttaaccacttcctttggtctgcacccaatgaagggaaaccccaaagtactgtctcaaatggtatttgaactacg

SEQ ID NO: 1071 - protein, 899 aa, Homo sapiens
MVKLLLSRGANINAFDKKDRRAIHWAAYMGHIEVVKLLVSHGAEVTCKDKKSYTPLHAAASSGMISVVKYLLDLGVDMNEPNAYGNTPLHVACYNGQDVVVNELIDCGAIVNQKNEKGFTPLHFAAASTHGALCLELLVGNGADVNMKSKDGKTPLHMTALHGRFSRSQTIIQSGAVIDCEDKNGNTPLHIAARYGHELLINTLITSGADTAKRGIHGMFPLHLAALSGFSDCCRKLLSSGFDIDTPDDFGRTCLHAAAAGGNLECLNLLLNTGADFNKKDKFGRSPLHYAAANCNYQCLFALVGSGASVNDLDERGCTPLHYAATSDTDGKCLEYLLRNDANPGIRDKQGYNAVHYSAAYGHRLCLQLIASETPLDVLMETSGTDMLSDSDNRATISPLHLAAYHGHHQALEVLVQSLLDLDVRNSSGRTPLDLAAFKGHVECVDVLINQGASILVKDYILKRTPIHAAATNGHSECLRLLIGNAEPQNAVDIQDGNGQTPLMLSVLNGHTDCVYSLLNKGANVDAKDKWGRTALHRGAVTGHEECVDALLQHGAKCLLRDSRGRTPIHLSAACGHIGVLGALLQSAASMDANPATADNHGYTALHWACYNGHETCVELLLEQEVFQKTEGNAFSPLHCAVINDNEGAAEMLIDTLGASIVNATDSKGRTPLHAAAFTDHVECLQLLLSHNAQVNSVDSTGKTPLMMAAENGQTNTVEMLVSSASAELTLQDNSKNTALHLACSKGHETSALLILEKITDRNLINATNAALQTPLHVAARNGLTMVVQELLGKGASVLAVDENGYTPALACAPNKDVADCLALILATMMPVSSSSPLSSLTFNAINRYTNTSKTVSFEALPIMRNEPSSYCSFNNIGGEQEYLYTDVDELNDSDSETY

SEQ ID NO: 1072 - DNA, 3269 bp, Homo sapiens
cttcctgacagcacacaaccttgattaggaggggctgggagggaggatcgatgagcccctgacccctgggttctgaggctgccagggtcgcttgcagctcggccgcgtggaggtgaccgggcggaactccgagggggcgcggggagagctgggcgggcccaccgctccagcggctgctgtcaggggccgcgaggctttccctgaagatgcagcgtagcatattttgcacatgagttcagaggaagaggaagtgtagccggcggacgcgcggcggcggcggcgggggcgcgtcggggctggagccggagcgcgccgggcgctgggcgcagcgagcgagagcgcggcggccgcgggctccggcgagggacagacgcaccgatcgccggagggacagacacacgaccacgcggcgccaccgcccacgcctccacccaccggcgcccaagtcctccccgcgccgcctcctctgtatggcacaaactttcctcccgggacggaacacgctgcctcagggagcccgcgaccgcgccttctcctccgccggtcccatacgctgctgaaatgggttgcggattgaacaagttagagaaacgtgatgaaaaacggcctgggaatatttattcaactttgaagaggcctcaggtggaaaccaagatagatgtgtcctatgaataccgcttcctggagttcacgactctgagtgctgcggagctccctgggtcctcagcagtgaggctggcctccctgcgtgacctgcccgcccagctcctggagctgtaccagcagggcttctcgctggcggccctgcaccccttcgtgcagcccacccatgagcgggagaagacgcccctggagcacatctttagagccatcctgatcaagaaaaccgacagatctcagaaaactgatcttcacaatgaaggctacatcttggaattagattgctgttcctccttagaccacccgacagaccagaaactcatcccagagttcattaagaagatccaggaggctgcaagccagggcctgaaattcgttggtgttatacctcagtaccattcctctgtgaactcggcaggcagcagtgctccggtgtctactgccaacagcaccgaggatgccagagatgcaaaaaacgcacgtggggatcacgcgtcactggagaatgagaaaccggggactggggatgtgtgcagtgctccggctgggagaaaccaaagcccagagcccagctcaggccccagaggggaggtgcccctcgccaagcagcccagctcaccctccggagagggagatggtggagaactttcaccacagggggtgagcaagacactggatggaccggagagcaaccccttggaggtgcatgaagagccactctcagggaaaatggagatcttcacccttttcaacaaaccgaagagccatcagaagtgccggcaatactaccctgtcaccattcctctccatgtctccaagaatggccagacagtgagcggtttggacgccaactggttagagcacatgagcgaccacttccggaaaggaggcatgctggtgaacgcagtcttctaccttggaatagtgaatgattccttacatggcttgacagatggagtattcatctttgaagctgtttccacagaagatagcaaaaccatacagggctatgatgctattgtggttgaacaatggacagtcctggaaggtgtcgaagtgcagacagactacgtgcccctgctgaactcgctggcggcctatggctggcagctcacctgtgtgctaccaactcccgtcgtcaagactaccagcgaggggagtgtatccaccaagcagattgtctttcttcagagaccttgtctacctcagaaaatcaagaagaaggaatcgaagtttcagtggcgattctccagagaagaaatgcacaacaggcagatgaggaaatcaaaaggtaaactcagtgccagagacaaacaacaagcagaagaaaatgagaagaacttagaagaccagtcttccaaagctggagacatgggaaactgtgtttcaggacagcagcaggagggtggagtctccgaggagatgaagggccctgtccaagaggacaagggagaacagctgtcccctggtggcctgctgtgtggggtgggtgtggagggtgaggctgtgcagaatggtcctgccagccacagcagggccctggtggggatttgcactgggcactccaatcctggagaggatgccagggacggggatgctgaggaagtcagagagcttggtacggttgaagaaaactgagtcttgggcaatttgtgctaaaactaggtgagttgccaaacccaaggcatcttaccaacagctggtttgggggctggtttccctggtgttgtgtgttacctaccctttggcttggcttgacctctccttgtgagctcacctgagccctcccagggccaggttcctgacagtgttggtttttgcacatccactggaaaggtgtcattaatgacccagtgttagaatgcaagaggtcaggttattctagccctcatggctgaaggcccagtcctggctccaccactcctccagccagagggtctggaccatccagtgcctgtcctcgccacagggcctccagggagcattcgggtcaaatccatggacaccctgggctacaaaccaaggctgctgttcatcccacatcgtgtggggcagtgtccatcccctgcagctacttggtgacttaacaactccaggagccctgtcagctgccctcctccacctaaaccccttcgactcttctgctttgacaaagaaaatgacattggggaggggaggtgctccgcctcccagcttttctcaaaatagtcctatagatactggtaatctggaaatgaagaagtaattctgtctctgcacctacttttgcagaatgttcaaggaagtattctgtgttagtattaatgccaaaaagttgtttttaaaggttttgtactcagcacatcatacaaaccacattacttctgtcacttcagggcatcgggactggctggcgcccttgttatgtgctattttaatcagtgtaacattggtcaagttgttacccatgtatgctgtgtttatcatgtgtatatcgtccagaaagtattaaggctttaggtagatgcaactggcgaaccttggagagggaatgctgattgtcttgaccaaacccacagcctgtctcttctcttgtttagttacttacggcaataaatcatctatgagtt

SEQ ID NO: 1073 - protein, 578 aa, Homo sapiens
MGCGLNKLEKRDEKRPGNIYSTLKRPQVETKIDVSYEYRFLEFTTLSAAELPGSSAVRLASLRDLPAQLLELYQQGFSLAALHPFVQPTHEREKTPLEHIFRAILIKKTDRSQKTDLHNEGYILELDCCSSLDHPTDQKLIPEFIKKIQEAASQGLKFVGVIPQYHSSVNSAGSSAPVSTANSTEDARDAKNARGDHASLENEKPGTGDVCSAPAGRNQSPEPSSGPRGEVPLAKQPSSPSGEGDGGELSPQGVSKTLDGPESNPLEVHEEPLSGKMEIFTLFNKPKSHQKCRQYYPVTIPLHVSKNGQTVSGLDANWLEHMSDHFRKGGMLVNAVFYLGIVNDSLHGLTDGVFIFEAVSTEDSKTIQGYDAIVVEQWTVLEGVEVQTDYVPLLNSLAAYGWQLTCVLPTPVVKTTSEGSVSTKQIVFLQRPCLPQKIKKKESKFQWRFSREEMHNRQMRKSKGKLSARDKQQAEENEKNLEDQSSKAGDMGNCVSGQQQEGGVSEEMKGPVQEDKGEQLSPGGLLCGVGVEGEAVQNGPASHSRALVGICTGHSNPGEDARDGDAEEVRELGTVEEN

SEQ ID NO: 1074 - DNA, 3169 bp, Homo sapiens
gcaatagcactagagtgcatctatacctgtgaacgaaatgatcaactctgtctttgctatgacctactagaatgtctgccagaaagaggatatggtgataagacagaggcaaccacaaagcttcatgacatggtagaccaactggaacaaattctcagtgtgtcagagcttttggaaaaacatggactcgagaaaccaatttcatttgttaaaaacactcaatctagctcagaagaggcacgcaagctgatggttagattgacgaggcacactggccggaagcagcctcctgtcagtgagtctcattggagaacgttgctgcaagacatgttaactatgcagcagaatgtatacacatgtctagattctgatgcctgctatgagatatttacagaaagccttctgtgctctagtcgccttgaaaacatccacctggctggacagatgatgcactgcagtgcttgttcagaaaatcctccagctggtatagcccataaagggaaaccccactacagggtcagctacgaaaagagtattgacttggttttggctgccagcagagagtacttcaattcttctaccaacctcactgatagctgcatggatctagccaggtgctgcttacaactgataacagacagaccccctgccattcaagaggagctagatcttatccaagccgttggatgtcttgaagaatttggggtaaagatcctgcctttgcaagtgcgattgtgccctgatcggatcagtctcatcaaggagtgtatttcccagtcccccacatgctataaacaatccaccaagcttctgggccttgctgagctgctgagggttgcaggtgagaacccagaagaaagcggggacaggttctaatccttttagtggagcaggcacttcgcttccatgactacaaagcagccagtatgcattgtcaggagctgatggccacaggttatcctaaaagttgggatgtttgtagccagttaggacaatcagaaggttaccaggacttggccactcgtcaagagctcatggcttttgctttgacacattgccctcctagcagcattgaacttcttttggcagctagcagctctctgcagacagaaattctttatcaaagagtgaatttccagatccatcatgaaggaggggaaaatatcagtgcttcaccattaactagtaaagcagtacaagaggatgaagtaggtgttccaggtagcaattcagctgacctattgcgctggaccactgctaccaccatgaaagtcctttccaacaccacaaccaccaccaaagcggtgctgcaggccgtcagtgatgggcagtggtggaagaagtctttaacttaccttcgaccccttcaggggcaaaaatgtggtggtgcatatcaaatcggaactacagccaatgaagatctagagaaacaagggtgtcatcctttttatgaatctgtcatctcaaatccttttgtcgctgagtctgaagggacctatgacacctatcagcatgttccagtggaaagctttgcagaagtattgctgagaactggaaaattggcagaggctaaaaataaaggagaagtatttccaacaactgaagttctcttgcaactagcaagtgaagccttgccaaatgacatgaccttggctcttgcttaccttcttgccttaccacaagtgttagatgctaaccggtgctttgaaaagcagtccccctctgcattatctctccagctggcagcgtattactatagcctccagatctatgcccgattggccccatgtttcagggacaagtgccatcctctttacagggctgatcccaaagaactaatcaagatggtcaccaggcatgtgactcgacatgagcacgaagcctggcctgaagaccttatttcactgaccaagcagttacactgctacaatgaacgtctcctggatttcactcaggcgcagatccttcagggccttcggaagggtgtggacgtgcagcggtttactgcagatgaccagtataaaagggaaactatccttggtctggcagaaactctagaggaaagcgtctacagcattgctatttctctggcacaacgttacagtgtctcccgctgggaagtttttatgacccatttggagttcctcttcacggacagtggtttgtccacactagaaattgaaaatagagcccaagaccttcatctctttgagactttgaagactgatccagaagcctttcaccagcacatggtcaagtatatttaccctactattggtggctttgatcacgaaaggctgcagtattatttcactcttctggaaaactgtggctgtgcagatttggggaactgtgccattaaaccagaaacccacattcgactgctgaagaagtttaaggttgttgcatcaggtcttaattacaaaaagctgacagatgaaaacatgagtcctcttgaagcattggagccagttctttcaagtcaaaatatcttgtctatttccaaacttgttcccaaaatccctgaaaaggatggacagatgctttccccaagctctctgtacaccatctggttacagaagttgttctggactggagaccctcatctcattaaacaagtcccaggctcttcaccggagtggcttcatgcctatgatgtctgcatgaagtactttgatcgtctccacccaggtgacctcatcactgtggtagatgcagttacattttctccaaaagctgtgaccaagctgtctgtggaagcccgtaaagagatgactagaaaggctattaagacagtcaaacattttattgagaagccaaggaaaagaaactcagaagacgaagctcaagaagctaaggattctaaagttacctatgcagatactttgaatcatctggagaaatcacttgcccacctggaaaccctgagccacagcttcatcctttctctgaagaatagtgagcaggaaacactgcaaaaatacagtcacctctatgatctgtcccgatcagaaaaagagaaacttcatgatgaagctgtggctatttgtttagatggtcagcctctagcaatgattcagcagctgctagaggtggcagttggccctcttgacatctcacccaaggatatagtgcagagtgcaatcatgaaaataatttctgcattgag

SEQ ID NO: 1075 - DNA, 1120 bp, Homo sapiens
gcagtacattgagctccatagagacagcgccggggcaagtgagagccggacgggcactgggcgactctgtgcctcgctgaggaaaaataactaaacatgggcaaaggagatcctaagaagccgagaggcaaaatgtcatcatatgcattttttgtgcaaacttgtcgggaggagcataagaagaagcacccagatgcttcagtcaacttctcagagttttctaagaagcccgttatgaaagagaaatgaaaacctatatccctcccaaaggggagacaaaaaagaagttcaaggatcccaatgcacccaagaggcttccttcggccttcttcctcttctgctctgagtatcgcccaaaaatcaaaggagaacatcctggcctgtccattggtgatgttgcgaagaaactgggagagatgtggaataacactgctgcagatgacaagcagccttatgaaaagaaggctgcgaagctgaaggaaaaatacgaaaaggatattgctgcatatcgagctaaaggaaagcctgatgcagcaaaaaagggagttgtcaaggctgaaaaaagcaagaaaaagaaggaagaggaggaagatgaggaagatgaagaggatgaggaggaggaggaagatgaagaagatgaagaagaagatgatgatgatgaataagttggttgtagcgcagttttttttcttgtctataaagcatttaacccccctgtacacaattcactctttttaaagaaaaaaattgaaatgtaaggcggtgtaagatttgtttttaaactgtacagtgtctttttttgtatagttaacacactaccgaatgtgtctttagatagccctgtcctggtggtattttcaatagccactaactttgcctggtacagtatgggggttgtaaattggcatggaaatttaaagcaggttcttgttggtgcccagcacaaattagttatatatggggatggtagttttttcatcttcagttgtctctgatgcagcttatacgaaataattgttgttctgttaactgaataccactctgtaattgcaaaaaaaaaaagttgcagctgttttgttgacattctgaatgcttctaagtaaatacaatttttttatta

SEQ ID NO: 1076 - DNA, 2018 bp, Rattus norvegicus
cctttccgtctggcggcagccatcaggtaagccaagatgggtgcatacaagtacatccaggagctatggagaaagaagcagtctgatgtcatgcgctttcttctgagggtccgctgctggcagtaccgccagctctctgctctccacagggctccccgccccacccggcctgataaagcgcgccgactgggctacaaggccaagcaaggttacgttatatataggattcgtgttcgccgtggtggccgaaaacgcccagttcctaagggtgcaacttacggcaagcctgtccatcatggtgttaaccagctaaagtttgctcgaagccttcagtccgttgcagaggagcgagctggacgccactgtggggctctgagagtcctgaattcttactgggttggtgaagattccacatacaaattttttgaggttatcctcattgatccattccataaagctatcagaagaaatcctgacacccagtggatcaccaaaccagtccacaagcacagggagatgcgtgggctgacatctgcaggccgaaagagccgtggccttggaaagggccacaagttccaccacactattggtggctctcgccgggcagcttggagaaggcgcaatactctccagctccaccgttaccgctaatataagtaaagtttgtaaaattcatacttaataaacaatttaggacagtcatgtctgcttacaggtgttatttgtctgttaaaactagtctgcagatgtttcttgaatgctttgtcaaattaagaaagttaaagtgcaataatgtttgaagacaataagtggtggtgtatcttgtttctaataagataaacttttttgtctttgctttatcttattagggagttgtatgtcagtgtataaaacatactgtgtggtataacaggcttaataaattctttaaaaggagagaactgaaactagccctgtagatttgtctggtgcatgtgatgaaacctgcagctttatcggagtgatggcaatgctctgctggtttattttcaagtggctgcgttttttttagtttggcaggtgtagactttttaagttgggctttagaaaatctgggttagcctgaagaaaattgcctcagcctccacagtaccattttaaattcacataaaaggtgaaagctcctggttcagtgccatggcttcatggcattcagtgattagtggtaatggtaaacactggtgtgttttgaagttgaatgtgcgataaaattattagccttaagattggtaagctagcaatgaatgctagggtgggaagctggtgagccagtggccattagataaatacctttcaagtgtgagcttagacgtcaaccctaaaatacttaaccgtaatgctaattgtgatcattatgaatcccttcagtcacattagggggaaagtagttggctataagtacgtcattcttagtccagtcagtcttaaaaacatcttgggttacccactctgtccactcccataggctacagaaaaagtcacaagcgcatggtttccaaccatatgtgttttctgcagttatttctcttgttctggccaaacaaccctaaaaatccttaccattccacaaagttggaccatcacttgtgcacccactttgactatgagtataccaccacattgcatttctgtttgcaccatgtcttccaggagactagactactgttgtccagggtcaatttgagtgtaaagaaaatgtagacaaggaattgcccaattttaaattctgactttgctgacttaatttaaatgctcgttctgaaccaattttctcctatcttctctaggggtttcaaaagactcagttaattgatttccaggaagtactcatagcaagttcataaaagttcttgagacctaaatttcttcacaaaaaaagaaaagatcttaagtcatacattttaattgtgtagaggttgttcaactgaaggaataaatgtctattaaactaaaaaaaaaaaaaaaaaaaaaaaaaaaaa

SEQ ID NO: 1077 - protein, 204 aa, Rattus norvegicus [sequence omitted]

SEQ ID NO: 1078 - DNA, 3129 bp, Homo sapiens
gtgacagaagtagtaggaagtgagctgttcagaggcaggagggtctattctttgccaaaggggggaccagaattcccccatgcgagctgtttgaggactgggatgccgagaacgcgagcgatccgagcagggtttgtctgggcaccgtcggggtaggatccggaacgcattcggaaggctttttgcaagcatttacttggaaggagaacttgggatctttctgggaaccccccgccccggctggattggccgagcaagcctggaaaatggtaaatgatcatttggatcaattacaggcttttagctggcttgtctgtcataattcatgattcggggctgggaaaaagaccaacagcctacgtgccaaaaaaggggcagagtttgatggagttgggtggacttttctatgccatttgcctccacacctagaggataagcacttttgcagacattcagtgcaagggagatcatgtttgactgtatggatgttctgtcagtgagtcctgggcaaatcctggatttctacactgcgagtccgtcttcctgcatgctccaggagaaagctctcaaagcatgcttcagtggattgacccaaaccgaatggcagcatcggcacactgctcaatcaattgaaacacagagcaccagctctgaggaactcgtcccaagccccccatctccacttcctccccctcgagtgtacaaaccctgcttcgtctgccaggacaaatcatcagggtaccactatggggtcagcgcctgtgagggatgtaagggctttttccgcagaagtattcagaagaatatgatttacacttgtcaccgagataagaactgtgttattaataaagtcaccaggaatcgatgccaatactgtcgactccagaagtgctttgaagtgggaatgtccaaagaatctgtcaggaatgacaggaacaagaaaaagaaggagacttcgaagcaagaatgcacagagagctatgaaatgacagctgagttggacgatctcacagagaagatccgaaaagctcaccaggaaactttcccttcactctgccagctgggtaaatacaccacgaattccagtgctgaccatcgagtccgactggacctgggcctctgggacaaattcagtgaactggccaccaagtgcattattaagatcgtggagtttgctaaacgtctgcctggtttcactggcttgaccatcgcagaccaaattaccctgctgaaggccgcctgcctggacatcctgattcttagaatttgcaccaggtataccccagaacaagacaccatgactttctcagacggccttaccctaaatcgaactcagatgcacaatgctggatttggtcctctgactgaccttgtgttcacctttgccaaccagctcctgcctttggaaatggatgacacagaaacaggccttctcagtgccatctgcttaatctgtggagaccgccaggaccttgaggaaccgacaaaagtagataagctacaagaaccattgctggaagcactaaaaatttatatcagaaaaagacgacccagcaagcctcacatgtttccaaagatcttaatgaaaatcacagatctccgtagcatcagtgctaaaggtgcagagcgtgtaattaccttgaaaatggaaattcctggatcaatgccacctctcattcaagaaatgctggagaattctgaaggacatgaacccttgaccccaagttcaagtgggaacacagcagagcacagtcctagcatctcacccagctcagtggaaaacagtggggtcagtcagtcaccactcgtgcaataagacattttctagctacttcaaacattccccagtaccttcagttccaggatttaaaatgcaagaaaaaacatttttactgctgcttagtttttggactgaaaagatattaaaactcaagaaggaccaagaagttttcatatgtatcaatatatatactcctcactgtgtaacttacctagaaatacaaacttttccaattttaaaaaatcagccatttcatgcaaccagaaactagttaaaagcttctattttcctctttgaacactcaagattgcatggcaaagacccagtcaaaatgatttacccctggttaagtttctgaagactttgtacatacagaagtatggctctgttctttctatactgtatgtttggtgctttccttttgtcttgcatactcaaaataaccatgacaccaaggttatgaaatagactactgtacacgtctacctaggttcaaaaagataactgtcttgctttcatggaatagtcaagacatcaaggtaaggaaacaggactattgacaggactattgtacagtatgacaagataaggctgaagatattctactttagttagtatggaagcttgtctttgctctttctgatgctctcaaactgcatcttttatttcatgttgcccagtaaaagtatacaaattccctgcactagcagaagagaattctgtatcagtgtaactgccagttcagttaatcaaatgtcatttgttcaattgttaatgtcactttaaattaaaagtggtttattacttgtttaatgacataactacacagttagttaaaaaaaatttttttacagtaatgatagcctccaaggcagaaacacttttcagtgttaagtttttgtttacttgttcacaagccattagggaaatttcatgggataattagcaggctggtctaccacctggaccatgtaactctagtgtccttcctgattcatgcctgatattgggatttttttttccagccttcttgatgccaaggggctaattaatattaacaactcccaaagaaacaggcatagaatctgcctcctttgaccttgttcaatcactatgaagcagagtgaaagctgtggtagagtggttaacagatacaagtgtcagtttcttagttctcatttaagcactagtggaattttttttttttgatatattagcaagtctgtgatgtactttcactggctctgtttgtacattgagattgtttgtttaacaatgctttctatgttcatatactgtttacctttttccatggagtctcctggcaaagaataaaatatatttatttt

SEQ ID NO: 1079 - DNA, 5189 bp, Homo sapiens
atggccaagtcgggtggctgcggcgcgggagccggcgtgggcggcggcaacggggcactgacctgggtgaacaatgctgcaaaaaaagaagagtcagaaactgccaacaaaaatgattcttcaaagaagttgtctgttgagagagtgtatcagaagaagacacaacttgaacacattcttcttcgtcctgatacatatattgggtcagtggagccattgacgcagttcatgtgggtgtatgatgaagatgtaggaatgaattgcagggaggttacctttgtgccaggtttatacaagatctttgatgaaattttggttaatgctgctgacaataaacagagggataagaacatgacttgtattaaagtttctattgatcctgaatctaacattataagcatttggaataatgggaaaggcattccagtagtagaacacaaggtagagaaagtttatgttcctgctttaatttttggacagcttttaacatccagtaactatgatgatgatgagaaaaaagttacaggtggtcgtaatggttatggtgcaaaactttgtaatattttcagtacaaagtttacagtagaaacagcttgcaaagaatacaaacacagttttaagcagacatggatgaataatatgatgaagacttctgaagccaaaattaaacattttgatggtgaagattacacatgcataacattccaaccagatctgtccaaatttaagatggaaaaacttgacaaggatattgtggccctcatgactagaagggcatatgatttggctggttcgtgtagaggggtcaaggtcatgtttaatggaaagaaattgcctgtaaatggatttcgcagttatgtagatctttatgtgaaagacaaattggatgaaactggggtggccctgaaagttattcatgagcttgcaaatgaaagatgggatgtttgtctcacattgagtgaaaaaggattccagcaaatcagctttgtaaatagtattgcaactacaaaaggtggacggcacgtggattatgtggtagatcaagttgttggtaaactgattgaagtagttaagaaaaagaacaaagctggtgtatcagtgaaaccatttcaagtaaaaaaccatatatgggtttttattaattgccttattgaaaatccaacttttgattctcagactaaggaaaacatgactctgcagcccaaaagttttgggtctaaatgccagctgtcagaaaaattttttaaagcagcctctaattgtggcattgtagaaagtatcctgaactgggtgaaatttaaggctcagactcagctgaataagaagtgttcatcagtaaaatacagtaaaatcaaaggtattcccaaactggatgatgctaatgatgctggtggtaaacattccctggagtgtacactgatattaacagagggagactctgccaaatcactggctgtgtctggattaggtgtgattggacgagacagatacggagtttttccactcaggggcaaaattcttaatgtacgggaagcttctcataaacagatcatggaaaatgctgaaataaataatattattaaaatagttggtctacaatataagaaaagttacgatgatgcagaatctctgaaaaccttacgctatggaaagattatgattatgaccgatcaggatcaagatggttctcacataaaaggcctgcttattaatttcatccatcacaattggccatcacttttgaagcatggttttcttgaagagttcattactcctattgtaaaggcaagcaaaaataagcaggaactttccttctacagtattcctgaatttgacgaatggaaaaaacatatagaaaaccagaaagcctggaaaataaagtactataaaggattgggtactagtacagctaaagaagcaaaggaatattttgctgatatggaaaggcatcgcatcttgtttagatatgctggtcctgaagatgatgctgccattaccttggcatttagtaagaagaagattgatgacagaaaagaatggttaacaaattttatggaagaccggagacagcgtaggctacatggcttaccagagcaatttttatatggtactgcaacaaagcatttgacttataatgatttcatcaacaaggaattgattctcttctcaaactcagacaatgaaagatctataccatctcttgttgatggctttaaacctggccagcggaaagttttatttacctgtttcaagaggaatgataaacgtgaagtaaaagttgcccagttggctggctctgttgctgagatgtcggcttatcatcatggagaacaagcattgatgatgactattgtgaatttggctcagaactttgtgggaagtaacaacattaacttgcttcagcctattggtcagtttggaactcggcttcatggtggcaaagatgctgcaagccctcgttatattttcacaatgttaagcactttagcaaggctactttttcctgctgtggatgacaacctccttaagttcctttatgatgataatcaacgtgtagagcctgagtggtatattcctataattcccatggttttaataaatggtgctgagggcattggtactggatgggcttgtaaactacccaactatgatgctagggaaattgtgaacaatgtcagacgaatgctagatggcctggatcctcatcccatgcttccaaactacaaaaactttaaaggcacgattcaagaacttggtcaaaaccagtatgcagtcagtggtgaaatatttgtagtggacagaaacacagtagaaattacagagcttccagttagaacttggacacaggtatataaagaacaggttttagaacctatgctaaatggaacagataaaacaccagcattaatttctgattataaagaatatcatactgacacaactgtgaaatttgtggtgaaaatgactgaagagaaactagcacaagcagaagctgctggactgcataaagtttttaaacttcaaactactcttacttgtaattccatggtactttttgatcatatgggatgtctgaagaaatatgaaactgtgcaagacattctgaaagaattctttgatttacgattaagttattacggtttacgtaaggagtggcttgtgggaatgttgggagcagaatctacaaagcttaacaatcaagcccgtttcattttagagaagatacaagggaaaattactatagagaataggtcaaagaaagatttgattcaaatgttagtccagagaggttatgaatctgacccagtgaaagcctggaaagaagcacaagaaaaggcagcagaagaggatgaaacacaaaaccagcatgatgatagttcctccgattcaggaactccttcaggcccagattttaattatattttaaatatgtctctgtggtctcttactaaagaaaaagttgaagaactgattaaacagagagatgcaaaagggcgagaggtcaatgatcttaaaagaaaatctccttcagatctttggaaagaggatttagcggcatttgttgaagaactggataaagtggaatctcaagaacgagaagatgttctggctggaatgtctggaaaagcaattaaaggtaaagttggcaaacctaaggtgaagaaactccagttggaagagacaatgccctcaccttatggcagaagaataattcctgaaattacagctatgaaggcagatgccagcaaaaagttgctgaagaagaagaagggtgatcttgatactgcagcagtaaaagtggaatttgatgaagaattcagtggagcaccagtagaaggtgcaggagaagaggcattgactccatcagttcctataaataaaggtcccaaacctaagagggagaagaaggagcctggtaccagagtgagaaaaacacctacatcatctggtaaacctagtgcaaagaaagtgaagaaacggaatccttggtcagatgatgaatccaagtcagaaagtgatttggaagaaacagaacctgtggttattccaagagattctttgcttaggagagcagcagccgaaagacctaaatacacatttgatttctcagaagaagaggatgatgatgctgatgatgatgatgatgacaataatgatttagaggaattgaaagttaaagcatctcccataacaaatgatggggaagatgaatttgttccttcagatgggttagataaagatgaatatacattttcaccaggcaaatcaaaagccactccagaaaaatctttgcatgacaaaaaaagtcaggattttggaaatctcttctcatttccttcatattctcagaagtcagaagatgattcagctaaatttgacagtaatgaagaagattctgcttctgttttttcaccatcatttggtctgaaacagacagataaagttccaagtaaaacggtagctgctaaaaagggaaaaccgtcttcagatacagtccctaagcccaagagagccccaaaacagaagaaagtagtagaggctgtaaactctgactcggattcagaatttggcattccaaagaagactacaacaccaaaaggtaaaggccgaggggcaaagaaaaggaaagcatctggctctgaaaatgaaggcgattataaccctggcaggaaaacatccaaaacaacaagcaagaaaccgaagaagacatcttttgatcaggattcagatgtggacatcttcccctcagacttccctactgagccaccttctctgccacgaaccggtcgggctaggaaagaagtaaaatattttgcagagtctgatgaagaagaagatgatgttgattttgcaatgtttaattaagtgcccaaagagcacaaacatttttcaacaaatatcttgtgttgtccttttgtcttctctgtctcagacttttgtacatctggcttattttaatgtgatgatgtaattgacggttttttattattgtggtaggccttttaacattttgttcttacacatacagttttatgctcttttttactcattgaaatgtcacgtactgtctgattggcttgtagaattgttatagactgccgtgcattagcacagattttaattgtcatggttacaaactacagacctgctttttgaaatgaaatttaaacattaaaaatggaactgtg

SEQ ID NO: 1080 - protein, 1621 aa, Homo sapiens
MAKSGGCGAGAGVGGGNGALTWVNNAAKKEESETANKNDSSKKLSVERVYQKKTQLEHILLRPDTYIGSVEPLTQFMWVYDEDVGMNCREVTFVPGLYKIFDEILVNAADNKQRDKNMTCIKVSIDPESNIISIWNNGKGIPVVEHKVEKVYVPALIFGQLLTSSNYDDDEKKVTGGRNGYGAKLCNIFSTKFTVETACKEYKHSFKQTWMNNMMKTSEAKIKHFDGEDYTCITFQPDLSKFKMEKLDKDIVALMTRRAYDLAGSCRGVKVMFNGKKLPVNGFRSYVDLYVKDKLDETGVALKVIHELANERWDVCLTLSEKGFQQISFVNSIATTKGGRHVDYVVDQVVGKLIEVVKKKNKAGVSVKPFQVKNHIWVFINCLIENPTFDSQTKENMTLQPKSFGSKCQLSEKFFKAASNCGIVESILNWVKFKAQTQLNKKCSSVKYSKIKGIPKLDDANDAGGKHSLECTLILTEGDSAKSLAVSGLGVIGRDRYGVFPLRGKILNVREASHKQIMENAEINNIIKIVGLQYKKSYDDAESLKTLRYGKIMIMTDQDQDGSHIKGLLINFIHHNWPSLLKHGFLEEFITPIVKASKNKQELSFYSIPEFDEWKKHIENQKAWKIKYYKGLGTSTAKEAKEYFADMERHRILFRYAGPEDDAAITLAFSKKKIDDRKEWLTNFMEDRRQRRLHGLPEQFLYGTATKHLTYNDFINKELILFSNSDNERSIPSLVDGFKPGQRKVLFTCFKRNDKREVKVAQLAGSVAEMSAYHHGEQALMMTIVNLAQNFVGSNNINLLQPIGQFGTRLHGGKDAASPRYIFTMLSTLARLLFPAVDDNLLKFLYDDNQRVEPEWYIPIIPMVLINGAEGIGTGWACKLPNYDAREIVNNVRRMLDGLDPHPMLPNYKNFKGTIQELGQNQYAVSGEIFVVDRNTVEITELPVRTWTQVYKEQVLEPMLNGTDKTPALISDYKEYHTDTTVKFVVKMTEEKLAQAEAAGLHKVFKLQTTLTCNSMVLFDHMGCLKKYETVQDILKEFFDLRLSYYGLRKEWLVGMLGAESTKLNNQARFILEKIQGKITIENRSKKDLIQMLVQRGYESDPVKAWKEAQEKAAEEDETQNQHDDSSSDSGTPSGPDFNYILNMSLWSLTKEKVEELIKQRDAKGREVNDLKRKSPSDLWKEDLAAFVEELDKVESQEREDVLAGMSGKAIKGKVGKPKVKKLQLEETMPSPYGRRIIPEITAMKADASKKLLKKKKGDLDTAAVKVEFDEEFSGAPVEGAGEEALTPSVPINKGPKPKREKKEPGTRVRKTPTSSGKPSAKKVKKRNPWSDDESKSESDLEETEPVVIPRDSLLRRAAAERPKYTFDFSEEEDDDADDDDDDNNDLEELKVKASPITNDGEDEFVPSDGLDKDEYTFSPGKSKATPEKSLHDKKSQDFGNLFSFPSYSQKSEDDSAKFDSNEEDSASVFSPSFGLKQTDKVPSKTVAAKKGKPSSDTVPKPKRAPKQKKVVEAVNSDSDSEFGIPKKTTTPKGKGRGAKKRKASGSENEGDYNPGRKTSKTTSKKPKKTSFDQDSDVDIFPSDFPTEPPSLPRTGRARKEVKYFAESDEEEDDVDFAMFN

SEQ ID NO: 1081 - DNA, 1904 bp, Homo sapiens
gagaaggcccaggaagtgacggccgcctcccggctaccggggacttctggagtccgagaagtcaacggcgcggttgctgcggccgccgcgctccccggcccgaggcgatggagaacggagcggtgtacagccccactacggaggaggacccgggccccgccagaggcccccggagcggcctcgctgcctactttttcatgggccggctcccattgctccggcgcgttctcaagggcttgcagctgttgctgtctctgctggccttcatctgtgaagaagttgtatcacaatgtactttatgtggaggactttatttttttgagtttgtaagctgcagtgcctttcttctgagtctccttatactgattgtgtattgcactccattttatgagagagttgataccacaaaagtaaaatcatcggatttttatattactttgggaacaggatgtgtgtttttgttggcatccatcatttttgtttccacacatgacaggacttcagctgagattgctgcaattgtgtttggatttatagcaagttttatgttcctacttgactttatcactatgctgtatgaaaaacgacaggagtcccagctgagaaaacctgaaaataccactagggctgaagccctcactgagccacttaatgcctaaagactctggggagcagatgttacctaaggtagtgaccctgcattgtggtgcctgagccctggcagaagctcttgtaaaatttgttaattgtttaaaccacttcttttggagagcaaggggaaggtcaagaaggcagttttatcaatattgtgtcagtcaccacaaagtaggccagataagttaaaaaaaatttttttttaaataataattgaaacttatctcaaatggagattttggtgggaggaggagaaaacaattgtttttaaatcacacagctcaacggttgataaatgattctgtcattctgttacaggtcattcttttactaggcttagcttccaaattatgctttatagctgtataaacatcgtgattatattcatctacttagaaattgttttatttttaaattaatttgcttagctgtttgttttgatgcttagattatgttctgttaatgggaatttaacatatttaagaaaccaatatttaaaatgttggtctaggtttttttccttaacatatattaccaggctttactgtatttcactcagccttaaatgttataatatttttggataacggttattaattctttgagaccttcgtatagcctataaaatgtatgggagatgttggtattttatgtgtataaaagcaacaatatcagcaacttcgtgtttatactgcaccttggttgttgatgtcaagtaaaaaaaagattgttttgtaacacataaaaaaatggaagaaactgataccacacctaaggaccaaagataagaaagactttttgcccaagacagtgaaagtaattataaaaacaagctttgaccacttaccaagtatctgaagagatgagttcatactatgatttagaaagtggttcgattcccctgttggcatatgattatttttactaaaattaatacagctctgtgggtcttccttagtgttttctttgaagccaatctgttttttttaggacaccagcctttggtttttcatctgttcgagatgcctcttctctgtctccttatcagatagaaatggagtcatgtgctgctgcttcatctagcagaggttggcctctggctctgacactttttgtcagttgtctttaggtggtcctgaatcttgggcccttttgattgtgaatactgtgtagcaggatcttgagagtccttgttcttacataggcattgctctagtttgtctttggcaaaaaaaaaaaaaaaaaaaaaa

SEQ ID NO: 1082 - protein, 183 aa, Homo sapiens
MENGAVYSPTTEEDPGPARGPRSGLAAYFFMGRLPLLRRVLKGLQLLLSLLAFICEEVVSQCTLCGGLYFFEFVSCSAFLLSLLILIVYCTPFYERVDTTKVKSSDFYITLGTGCVFLLASIIFVSTHDRTSAEIAAIVFGFIASFMFLLDFITMLYEKRQESQLRKPENTTRAEALTEPLNA

SEQ ID NO: 1083 - DNA, 426 bp, Homo sapiens
atggatgctgtgtgctatggtgaagctgtttcttcccagcagcagggagagaaaaaggagaagaggaaacacaagaagaaatgcgtggtgcagagcctcaattcctacttcatggatgtgaaatgcccaggatgctataaaatcactacagcagtttctaattcctgcaattttccccttaatggctctccggatgttgccactgattatggtgccgttcatggctcttcagcaggtgctgggcataggcaccaggaagccctgtttaatagtgtgtctgcctttcctttacatgctccctcgggtgaagcaaggcagatggagaaggctttagcagacagcgtgggcatgtttccaagccctcaggctgctgagcaacaatgccgatgccagcaccaacaggctgaggtggcttcttcattttag

SEQ ID NO: 1084 - protein, 141 aa, Homo sapiens [sequence omitted]

SEQ ID NO: 1085 - DNA, 1220 bp, Homo sapiens
gctaaaggtgatgtggccgccctcaaccgacgcatccagctcgttgaggagaagttggacagggctcaggaaagactggccacggccccgcagaagctggaggaggcagaaaaagctgcagatgagagtgagagaggaatgaaggtgatagaaaaccgggccatgaaggatgaggagaagatggaaattcaggagctgcagctcaaagaggccaagcacattgcggaagaggctgaccgcaaatactgggaggtagctcgtaagctggtcttcctggagggtgagctggagagggcagaggagcgtgtggaggtgtctgaactaaaatgtggtgaccttgaagaagaactcaagaatgttactaacaatctgaaatctctggaggctgcgtctgaaaagtattctgaaaaggaggacaaatgtgaagaagaaattaaacttctgtgtgacaaactgaaagaggctgagacccgtgctgaatttgcagagagaacggttgcaaaactggaaaagacaattgatgacctggaagagaaacttgcccaggccaaagaagagaacgtgggcttacatcagacactggatcagacactaaacgagcttaactgtatataagcaaaacagaagagtcttgttccaacagaaactccggagctccgtgggtctttctcttctcttgtaagaagttccttttgttattgccatcttcgctttgctggaaatgtcaagcaaattatgaatacatgaccaaatattttgtattggagaagctttgagcacgagttaaatctcatgccttccctttttttgtcaaatggcaccaactttttcagctctcttattttttccttaagttgcatttattcctaaggtaggcagggtatttcctagtaagcatagtttcttaagacagaggccatttggttcctgggagaataggcagccccacactttgaagaacacagaccccagtatctagtcgtggatatgattaaaacgctgaagaccacaaccttttgggtcaactgttggtcaaactataggagagaccagggaccaccccactcctatttattcagcaccacactacccaggaaatacactagcaaattgtgcaatggaataaaatccacactttactttagattcttgcaactgtatcatatgtaatagtatcactttttctacattttggtcaaataaatttttacataaactac

SEQ ID NO: 1086 - DNA, 2248 bp, Homo sapiens
agctcatccacacttccaatcactttccggagtgcttcccctccctccggcccgtgctggtcccgacggcgggcctgggtctcgcgcgcgtattgctgggtaacgggccttctcccgcgtcggcccggcccctcctgcctcggctcgtccctccttccagaacgtcccgggctcctgccgagtcagaagaaatgggactccctccgcgacgtgcccggagcagctcccttcgctgtggaagcggcggtgtcttcgaagaaaccggaagcccgtggtgacccctggcgacccggtttgttttcggtccgtttccaaacactaaggaatcgaaactcggcggccttgggggcggccctacgtagcctggcttctggttgtcatggatgcactggtagaagatgatatctgtattctgaatcatgaaaaagcccataagagagatacagtgaccccagtttcaatatattcaggagatgaatctgttgcttcccattttgctcttgtcactgcatatgaagacatcaaaaaacgacttaaggattcagagaaagagaactctttgttaaagaagagaataagatttttggaagaaaagctaatagctcgatttgaagaagaaacaagttccgtgggacgagaacaagtaaataaggcctatcatgcatatcgagaggtttgcattgatagagataatttgaagagcaaactggacaaaatgaataaagacaactctgaatctttgaaagtattgaatgagcagctacaatctaaagaagtagaactcctccagctgaggacagaggtggaaactcagcaggtgatgaggaatttaaatccaccttcatcaaactgggaggtggaaaagttgagctgtgacctgaagatccatggtttggaacaagagctggaactgatgaggaaagaatgtagcgatctcaaaatagaactacagaaagccaaacaaacggatccatatcaggaagacaatctgaagagcagagatctccaaaaactaagcatttcaagtgataatatgcagcatgcatactgggaactgaagagagaaatgtctaatttacatctggtgactcaagtacaagctgaactactaagaaaactgaaaacctcaactgcaatcaagaaagcctgtgcccctgtaggatgcagtgaagaccttggaagagacagcacaaaactgcacttgatgaattttactgcaacatacacaagacatccccctctcttaccaaatggcaaagctctttgtcataccacatcttcccctttaccaggagatgtaaaggttttatcagagaaagcaatcctccaatcatggacagacaatgagagatccattcctaatgatggtacatgctttcaggaacacagttcttatggcagaaattctctggaagacaattcctgggtatttccaagtcctcctaaatcaagtgagacagcatttggggaaactaaaactaaaactttgcctttacccaaccttccaccactgcattacttggatcaacataatcagaactgcctttataagaattaatttggaagagattcacgatttcaccatgaggacacttatctctttcagtggtcctcccaagaaattatttaacaaactgaaaggagattttgattaaaattttgcagaggtcttcagtatctatatttgaacacactgtacaatagtacaaaaaccaacatagttggttttctagtatgaaagagcaccctctagctccatattctaagaatctgaaatatgctactatactaattaataagtaaacttaaggtgtttaaaaaactctgccttctatattaattgtaaaattttgcctctcagaagaatggaattggagattgtagacgtggttttacaaaatgtgaaatgtctaaatatctgttcataaaaataaaaggaaaacatgtttcttcaaattgcataatggaacaaatggcaatgtgagtaggttacatttctgttgttataatgcgtaaagatattgaaaatataatgaaataaaagcatcttaggttataccatctttatatgctattgcgtttcaatatttaagatttaaagtgattttttggtcacagtgttttgttgataaaatttttttagaattgaagtttgaattctaagacttgaaacaacctgatcattgaagccaactttgtcccagcacattccttaagtcctaattgggaaaaaaaaaaaaaaaaaaaa

SEQ ID NO: 1087 - protein, 392 aa, Homo sapiens
MDALVEDDICILNHEKAHKRDTVTPVSIYSGDESVASHFALVTAYEDIKKRLKDSEKENSLLKKRIRFLEEKLIARFEEETSSVGREQVNKAYHAYREVCIDRDNLKSKLDKMNKDNSESLKVLNEQLQSKEVELLQLRTEVETQQVMRNLNPPSSNWEVEKLSCDLKIHGLEQELELMRKECSDLKIELQKAKQTDPYQEDNLKSRDLQKLSISSDNMQHAYWELKREMSNLHLVTQVQAELLRKLKTSTAIKKACAPVGCSEDLGRDSTKLHLMNFTATYTRHPPLLPNGKALCHTTSSPLPGDVKVLSEKAILQSWTDNERSIPNDGTCFQEHSSYGRNSLEDNSWVFPSPPKSSETAFGETKTKTLPLPNLPPLHYLDQHNQNCLYKN

SEQ ID NO: 1088 - DNA, 2268 bp, Homo sapiens
gcgatggagccggggcgccggggggccgcggcgctgctagcgctgctgtgcgtggcctgcgcgctgcgcgccgggcgcgcccaatacgaacgctacagcttccgcagcttcccacgggacgagctgatgccgctcgagtcggcctaccggcacgcgctggacaagtacagcggcgagcactgggccgagagcgtgggctacctggagatcagcctgcggctgcaccgcttgctgcgcgacagcgaggccttctgccaccgcaactgcagcgccgcgccgcagcccgagcccgccgccggcctcgccagctatcccgagctgcgcctcttcgggggcctgctgcgccgcgcgcactgcctcaagcgctgcaagcagggcctgccagccttccgccagtcccagcccagccgcgaggtgctggcggacttccagcgccgcgagccctacaagttcctgcagttcgcttacttcaaggcaaataatctccccaaagccatcgccgctgctcacacctttctactgaagcatcctgatgacgaaatgatgaagaggaacatggcatattataagagcctgcctggtgccgaggactacattaaagacctggaaaccaagtcatatgaaagcctgttcatccgagcagtgcgggcatacaacggtgagaactggagaacatccatcacagacatggagctggcccttcccgacttcttcaaagccttttacgagtgtctcgcagcctgcgagggttccagggagatcaaggacttcaaggatttctacctttccatagcagatcattatgtagaagttctggaatgcaaaatacagtgtgaagagaacctcaccccagttataggaggctatccggttgagaaatttgtggctaccatgtatcattacttgcagtttgcctattataagttgaacgacctgaagaatgcagccccctgtgcagtcagctatctgctctttgatcagaatgacaaggtcatgcagcagaacctggtgtattaccagtaccacagggacacttggggcctctcggatgagcacttccagcccagacctgaagcagttcagttctttaatgtgaccacactccagaaggagctgtatgactttgctaaggaaaatataatggatgatgatgagggagaagttgtggaatatgtggatgacctcttggaactggaggagaccagctagcccacagcaaccaaagagacttcctcttggcgttcaggaaacacagattctttgtccttttcccaacagcccaggctgttgatacctcagagccttctctttactctccaaagtgaaagggaagcccccgtctctctaactgcatgtcatcaggggtgagcctgcctttcctatcttcacacctgccacctcatgttcacacctatctttctcaccttttttttgagatggagtctcgctctcttgcccaggctggagtgcaatggcacgttctcagctcactgcaacctccgcctcttgggttcaagcaattctgctgcatcagcctcccgagtacctgggattacaggcatgtgccaccacgcccggctaattttgtatttttagtagagacggggttttgccatgttggccaggctggtctcgaactcttgacttcagatgatccatctgccttggcctcccacagtgctgggattacaggcgtgagccaccatgcccggcctctttctcacctttacacctgtcttcttatcctcacatctgttttcacaccttcatccctgtcttcctcatgttcacacttgtcttccccatgttcatagctgcctttcttaccattttggtttgaagggcagtcttctctggcttgtttttttgtttttcccagaaaatcagtattattttttaaataagaaaaacattcctagaagatgataattgtgaaaacctcctttggcttatttgcttttccagattttagtctcctttctccccatccgggaaagatggtggaagacataggctaaatttctccagcctcacaatggtcttcacttggtctgacttgtaccaattctagcacccactgaaaaacaagttgagtagagagtgtagagtgcagaaatgtggcttttgccccactttgcatctccaaaattacaacggttggccgatcccatttgaggacaatgcttagttataagtctccgagttggaaaaggaagaaagccagagctgtctagtttcattcattctttcagtaaatatttattgagt

SEQ ID NO: 1089 - DNA, 2409 bp, Homo sapiens
gaattcgggcgcgaagcggccggcctgggcgccgactgcagagccgggaggctggtggtcatgccggggttcctggttcgcatcctccttctgctgctggttctgctgcttctgggccctacgcgcggcttgcgcaatgccacccagaggatgtttgaaattgactatagccgggactccttcctcaaggatggccagccatttcgctacatctcaggaagcattcactactcccgtgtgccccgcttctactggaaggaccggctgctgaagatgaagatggctgggctgaacgccatccagacgtatgtgccctggaactttcatgagccctggccaggacagtaccagttttctgaggaccatgatgtggaatattttcttcggctggctcatgagctgggactgctggttatcctgaggcccgggccctacatctgtgcagagtgggaaatgggaggattacctgcttggctgctagagaaagagtctattcttctccgctcctccgacccagattacctggcagctgtggacaagtggttgggagtccttctgcccaagatgaagcctctcctctatcagaatggagggccagttataacagtgcaggttgaaaatgaatatggcagctactttgcctgtgattttgactacctgcgcttcctgcagaagcgctttcgccaccatctgggggatgatgtggttctgtttaccactgatggagcacataaaacattcctgaaatgtggggccctgcagggcctctacaccacggtggactttggaacaggcagcaacatcacagatgctttcctaagccagaggaagtgtgagcccaaaggacccttgatcaattctgaattctatactggctggctagatcactggggccaacctcactccacaatcaagaccgaagcagtggcttcctccctctatgatatacttgcccgtggggcgagtgtgaacttgtacatgtttataggtgggaccaattttgcctattggaatggggccaactcaccctatgcagcacagcccaccagctacgactatgatgccccactgagtgaggctggggacctcactgagaagtattttgctctgcgaaacatcatccagaagtttgaaaaagtaccagaaggtcctatccctccatctacaccaaagtttgcatatggaaaggtcactttggaaaagttaaagacagtgggagcagctctggacattctgtgtccctctgggcccatcaaaagcctttatcccttgacatttatccaggtgaaacagcattatgggtttgtgctgtaccggacaacacttcctcaagattgcagcaacccagcacctctctcttcacccctcaatggagtccacgatcgagcatatgttgctgtggatgggatcccccagggagtccttgagcgaaacaatgtgatcactctgaacataacagggaaagctggagccactctggaccttctggtagagaacatgggacgtgtgaactatggtgcatatatcaacgattttaagggtttggtttctaacctgactctcagttccaatatcctcacggactggacgatctttccactggacactgaggatgcagtgcgcagccacctggggggctggggacaccgtgacagtggccaccatgatgaagcctgggcccacaactcatccaactacacgctcccggccttttatatggggaacttctccattcccagtgggatcccagacttgccccaggacacctttatccagtttcctggatggaccaagggccaggtctggattaatggctttaaccttggccgctattggccagcccggggccctcagttgaccttgtttgtgccccagcacatcctgatgacctcggccccaaacaccatcaccgtgctggaactggagtgggcaccctgcagcagtgatgatccagaactatgtgctgtgacgttcgtggacaggccagttattggctcatctgtgacctacgatcatccctccaaacctgttgaaaaaagactcatgcccccacccccgcaaaaaaacaaagattcatggctggaccatgtatgatgatgaaagcctgtgtctttgagggattctaccctgaacatacctcacagatcctccctgtcatgccacatttcactgattggaatgtggaaatggaaaaggaatttaggatgtgcattttcacctgaggtttccctgcatccctgcagtgccaaagccccaccttcagggaccacctggaatgtgtgaggggctgacagcacagtaacgtgcatacatatctgcagggctggaatggaagctttaaaggtggtagtgatttttattttggaagaatcatgttacctttttgttaaataaaatttgcccgaattc

SEQ ID NO: 1090 - protein, 677 aa, Homo sapiens
MPGFLVRILLLLLVLLLLGPTRGLRNATQRMFEIDYSRDSFLKDGQPFRYISGSIHYSRVPRFYWKDRLLKMKMAGLNAIQTYVPWNFHEPWPGQYQFSEDHDVEYFLRLAHELGLLVILRPGPYICAEWEMGGLPAWLLEKESILLRSSDPDYLAAVDKWLGVLLPKMKPLLYQNGGPVITVQVENEYGSYFACDFDYLRFLQKRFRHHLGDDVVLFTTDGAHKTFLKCGALQGLYTTVDFGTGSNITDAFLSQRKCEPKGPLINSEFYTGWLDHWGQPHSTIKTEAVASSLYDILARGASVNLYMFIGGTNFAYWNGANSPYAAQPTSYDYDAPLSEAGDLTEKYFALRNIIQKFEKVPEGPIPPSTPKFAYGKVTLEKLKTVGAALDILCPSGPIKSLYPLTFIQVKQHYGFVLYRTTLPQDCSNPAPLSSPLNGVHDRAYVAVDGIPQGVLERNNVITLNITGKAGATLDLLVENMGRVNYGAYINDFKGLVSNLTLSSNILTDWTIFPLDTEDAVRSHLGGWGHRDSGHHDEAWAHNSSNYTLPAFYMGNFSIPSGIPDLPQDTFIQFPGWTKGQVWINGFNLGRYWPARGPQLTLFVPQHILMTSAPNTITVLELEWAPCSSDDPELCAVTFVDRPVIGSSVTYDHPSKPVEKRLMPPPPQKNKDSWLDHV

SEQ ID NO: 1091 - DNA, 3213 bp, Homo sapiens
cgcaggcggagcgcaagtctgtcagccagtcagtccgccagtccgccagcccagtacctctctctcctcggccctcgtaagctgtccgcggtctgtttggcccgaacggcggcggaggcgctgatcatggcgacattcatctcggtgcagctgaaaaagacctcagaggtggacctggccaagccgctggtgaagttcatccagcagacttacccaagcggcggggaagagcaggcccagtactgccgcgcggcggaggagctcagcaagctgcgccgcgccgcagtcggtcgtccgctggacaagcacgagggcgcgctcgagacgctcctgagatattatgatcagatttgttctattgaacccaaattcccattttctgaaaatcagatctgcttgacatttacctggaaggatgctttcgataaaggttcactttttggaggctctgtaaaactggctcttgcaagcttaggatatgaaaagagctgtgtgttgttcaattgtgcagccttagctagccaaattgcagcagaacagaacctggataatgatgaaggattgaaaatcgctgctaaacattaccagtttgctagtggtgcctttttacatattaaagagacggttttatctgccttaagtcgagagccgaccgtggacatatctccagatactgttgggaccctcagtcttattatgctggcacaggctcaagaagtattttttttaaaagccacaagagataaaatgaaagatgccatcatagctaaattggctaatcaggctgcagattattttggtgatgctttcaaacagtgtcaatacaaagatactctccccaaggaggtgttccctgtcttggctgcaaagcactgtatcatgcaggccaatgctgagtaccatcagtctatcctggcaaaacagcagaagaaatttggagaagaaattgcaaggttacagcatgcagcagaactgattaaaacagtggcatctcgctatgatgaatatgttaatgtgaaggatttttctgacaaaatcaatcgtgcccttgctgcagcaaagaaggataatgacttcatttatcatgatcgagttccagaccttaaagatctagatcctattggcaaagccacacttgtgaaatctaccccggtcaatgtacccatcagtcagaaatttactgatctgtttgagaagatggttcccgtgtcagtacagcagtctttggctgcctataatcagaggaaagccgatttggttaacagatcaattgctcagatgagagaagccaccactttggcaaatggggtgctagcttcccttaatcttccagcagcaattgaagatgtgtctggagacactgtacctcagtctatattgactaaatccagatctgtgattgaacagggaggcatccagactgttgatcagttgattaaagaactgcctgaattactgcaacgaaatagagaaatcctagatgagtcattaaggttgttggatgaagaagaagcaaccgataatgatttaagagcaaaatttaaggaacgttggcaaaggacaccatccaatgaactgtataagcctttaagagcagagggaaccaacttcagaacagttttagataaagctgtgcaggcagatggacaagtgaaagaatgttaccagtctcatcgtgacaccatcgtgcttttgtgtaagccagagcctgagctgaatgctgccatcccttctgctaatccagcaaagaccatgcagggcagtgaggttgtaaatgtcttaaaatccttattgtcaaatcttgatgaagtaaagaaggaaagagagggtctggagaatgacttgaaatctgtgaattttgacatgacaagcaagtttttgacagccctggctcaagatggtgtgataaatgaagaagctctttctgttactgaactagatcgagtctatggaggtcttacaactaaagtccaagaatctctaaagaaacaggagggacttcttaaaaatattcaggtctcacatcaggaattttcaaaaatgaaacaatctaataatgaagctaacttaagagaagaagttttgaagaatttagctactgcatatgacaactttgttgaacttgtagctaatttgaaggaaggcacaaagttttacaatgagttgactgaaatcctggtcaggttccagaacaaatgcagtgatatagtttttgcacggaagacagaaagagatgaactcttaaaggacttgcaacaaagcattgccagagaacctagtgctccttcaattcctacacctgcgtatcagtcctcaccagcaggaggacatgcaccaactcctccaactccagcgccaagaaccatgccgcctactaagccccagcccccagccaggcctccaccacctgtgcttccagcaaatcgagctccttctgctactgctccatctccagtgggggctgggactgctgcgccagctccatcacaaacgcctggctcagctcctcctccacaggcgcagggaccaccctatcccacctatccaggatatcctgggtattgccaaatgcccatgcccatgggctataatccttatgcgtatggccagtataatatgccatatccaccagtgtatcaccagagtcctggacaggctccatacccgggaccccagcagccttcataccccttccctcagcccccacagcagtcttactatccacagcagtaatatgtctgctcagcagctcagctgattcagatcagagggaaagaaataccaaccctgcaataagtgtactaaactctacgctctggttaatgtaatgtactctcctggactgaatgcagtgtataatttctgtctacagctagaagctgtgccccagttccacatttgattacacatgtgagatttgctgctgttgcagtataaacactaggtataataggatttgaaattgcattacagttcataaaaattgaaaatgagaaattaaacctgcaagtgaaacatttgaaacgattatactttctacataagacatggttgggacatcagatacttacaaagatggtttaagtatggatactagagaaaattaagttttctttctctttggtttattgatttggtttaatttccattatgctattttgcataatcaaggcactgtaaatcttataattttaaaataaattacttaagaac

SEQ ID NO: 1092 - protein, 868 aa, Homo sapiens
MATFISVQLKKTSEVDLAKPLVKFIQQTYPSGGEEQAQYCRAAEELSKLRRAAVGRPLDKHEGALETLLRYYDQICSIEPKFPFSENQICLTFTWKDAFDKGSLFGGSVKLALASLGYEKSCVLFNCAALASQIAAEQNLDNDEGLKIAAKHYQFASGAFLHIKETVLSALSREPTVDISPDTVGTLSLIMLAQAQEVFFLKATRDKMKDAIIAKLANQAADYFGDAFKQCQYKDTLPKEVFPVLAAKHCIMQANAEYHQSILAKQQKKFGEEIARLQHAAELIKTVASRYDEYVNVKDFSDKINRALAAAKKDNDFIYHDRVPDLKDLDPIGKATLVKSTPVNVPISQKFTDLFEKMVPVSVQQSLAAYNQRKADLVNRSIAQMREATTLANGVLASLNLPAAIEDVSGDTVPQSILTKSRSVIEQGGIQTVDQLIKELPELLQRNREILDESLRLLDEEEATDNDLRAKFKERWQRTPSNELYKPLRAEGTNFRTVLDKAVQADGQVKECYQSHRDTIVLLCKPEPELNAAIPSANPAKTMQGSEVVNVLKSLLSNLDEVKKEREGLENDLKSVNFDMTSKFLTALAQDGVINEEALSVTELDRVYGGLTTKVQESLKKQEGLLKNIQVSHQEFSKMKQSNNEANLREEVLKNLATAYDNFVELVANLKEGTKFYNELTEILVRFQNKCSDIVFARKTERDELLKDLQQSIAREPSAPSIPTPAYQSSPAGGHAPTPPTPAPRTMPPTKPQPPARPPPPVLPANRAPSATAPSPVGAGTAAPAPSQTPGSAPPPQAQGPPYPTYPGYPGYCQMPMPMGYNPYAYGQYNMPYPPVYHQSPGQAPYPGPQQPSYPFPQPPQQSYYPQQ

SEQ ID NO: 1093 - DNA, 4519 bp, Homo sapiens
ttggcccgtgcgtggggctggggtggagggcgggacagaggggctgggcccaggcaaagcttctgtcgctgctgctgcggaggccgaggacaggacgtgggctgggccgggcagtgccggactcggaggagcaggaggcgaggtccgccggagctctgaacccccgctgctctgccgcgcggtgaccccgcgccccggcgccgtccgacccgtggctgttccgagacgattggtgggggcgcggcggcggcggcggcggctgttgggggtggggagacgcgcggcgaggagacgagcgaggtcagcgagtttgagggaggaccgcgagccgctgccgccgtcatgtccgaagactcgagcgccctgccctggtccatcaacagggacgattacgagctgcaggaggtgatcgggagtggagcaactgctgtagtccaagcagcttattgtgcccctaaaaaggagaaagtggcaatcaaacggataaaccttgagaaatgtcaaactagcatggatgaactcctgaaagaaattcaagccatgagtcaatgccatcatcctaatattgtatcttactacacatcttttgtggtaaaagatgagctgtggcttgtcatgaagctgctaagtggaggttctgttctggatattattaagcacattgtggcaaaaggggaacacaaaagtggagtcctagatgaatctaccattgctacgatactccgagaagtactggaagggctggaatatctgcataaaaatggacagatccacagagatgtgaaagctggaaacattcttcttggagaagatggctcagtacagattgcagactttggggttagtgcttttttagcaactggtggtgatattacccgaaataaagtgagaaagacctttgttggcaccccttgttggatggcacctgaagttatggaacaggtccgtggttatgatttcaaagctgatatttggagttttggaattacagcaattgaattggctacaggggcggctccttatcataaatatccaccaatgaaggttttaatgctgacactgcagaacgatcctccttctttggaaactggtgttcaagataaagaaatgctgaaaaaatatggaaaatcatttagaaaaatgatttcattgtgccttcaaaaagatccagaaaaaagaccaacagcagcagaactattaaggcacaaatttttccagaaagcaaagaataaagaatttcttcaagaaaaaacattgcagagagcaccaaccatttctgaaagagcaaaaaaggttcggagagtaccaggttccagtgggcgtcttcataagacagaggatggaggctgggagtggagtgatgatgaatttgatgaagaaagtgaggaagggaaagcagcaatttcacaactcaggtctccccgagtgaaagaatcaatatcaaattctgagctctttccaacaactgatcctgtgggtactttgctccaagttccagaacagatctctgctcatctacctcagccagctgggcagattgctacacagccaactcaagtctctctcccacccaccgcagagccagcaaaaacagctcaggctttgtcttcaggatcaggttcacaagaaaccaagatcccaatcagtctagtactaagattaaggaattccaaaaaagaactaaatgatattcgatttgaatttactcctgggagagatacagcagagggtgtctctcaggaactcatttctgctggcctggtcgacggaagggatttagtaatagtggcagctaatttgcagaaaattgtggaagaacctcagtcaaatcgatctgtcactttcaaactggcatctggtgtcgaaggctcagatattcctgatgatggtaaactgataggatttgcccagctcagcatcagctaaaccacaaccctggaagaggcggcctaaggagattccacacatgcgtatctctgttgcttctattggcctaaacccactactgccaaagaacccagcaacaaacctcccggctaggagctttagaagtctttatgttcttcctgccatcattcctccttttcccacagggaaagaaaagttggatcactagtggccagcatccccagagttccgttagtaaacttacttcatatgtcccctgtcttcctccatctgagaagtggcccatgtgcttcaaggcccaggagggagatctgtcagctcattcttgccttactccaatgatggcccaggtggaaaagtagcagctgtatcgggcttcctcatcctgcctgttcccccacacctgccaggatatggacatcttgggatatctctttaccactgaagtagaattgattgttcagctggagcccagagaatttaatttaatgttttttctttgtacctgatgtgaattctagcaacctttgttaggaaaaagcacagcctcagatggaggcagcctaaactgtgttcttgttttgttcatggtgtttctaagcgttttgctgaagctgctctcaggcacccccttcttcattgctctctccagaaagggttgctagccttaacttcagctggtgcaaaacatctgactgtagccgaacttcagccatcagatccttcaaagtggaactttggattgtttttacagacaacatcgagtaatggcttgtaaatgtgaattttgccagaggtggtttttgaacaggaaaatcataattcatatcattggagaagtatttattttcaaatatcaaattgaagaaaaactcaatcctcccatgaaaatcagttcgcctggcctccaagtcgtgaggaaatgggtatgcaaggctgagatttctacagcaataaaggagacacacactgggccagagaggcctgccttctgcctgctctcctgcactgaccctttggagggggtctctgtgtgctgaagctaactcaagatggaaagtgaaaccacatgtgccgtgacctttaggttttatgagtagacagtgttcatttgattttctacagaaataatataaattattctttaggtttaaaaaagagcactcataatgcaatatgtgaataatcagtgaggttgatttttcttttttcctaccgtttcatagtctttgtctaactgctagtaaccctaccgagttttatatatgagtgggatactcaatctggccttaaaaagatacacaaagatgggctgtgggtccctggaaagggggagagttgccctttacagaatcactcgagccctttccagcactgttggtctgatgaacaaggttgttttaccttattttctcttggaacatatctgaaaaccttccccacaaataacttgtcacaccttttgtttcattctgagtctttagttttagtcatgggctttcttcacctgctctaggtgcaaaggcatgttgggaaagagatggatgttggggaggaagagaggagatggatttcagttgggagttaggaggagagtaggtgagatgatcagacaccggagttcaacgtcccagcagtcttggtaaaaggagggagcctgctgagccaggagggagaaaagaagattgaccagcttgctagaaaaatacttagcttttctttttctttttttgtggaggggggacggagaggaacaaggatggggaggtaggaatgaggtatagaaaagagatagcatcttctttggcacaagaatagtggcttaccgcttaccttagagttttgttttttttttttcaaacccatcaaaatctacttatttatgaatccaaggggtggcagcatcactctgttctagcattctttgtggagatggtctggtgcctagctgggagtgagcagcagcccatcccctgttcactttctctagcccatcattacctgtgaactgcagtggggcagtcatggcaaatagaattgggctggggtttctccttcttttcagttcattgtttgccctgctaggaattagaagacagacaccatgtcccaggacagtgttacttcttctgcatgatgtgtggtagactccctttgctggcttgtgcagtgatactgagaaaatacatgaacagaaactgcccaggtggaacagcacgtaacctagtgagtgactgtactcctttctaggaatgctgattcagagtgcacctctttgactaggtcccaggatccccttgtccctggagtagggactaactatagcacaaagtaatatgtgccaatgctatttgtgaaatgtttggtctttctaaacgactaaaggatttgttgggtttttgcttaagttttgaaccaaatcctagagccagctgataatatttaataatctggaggagagaataatgatgtaccaataagtggagattcctccttatgatgtatgctaggttatggaagatgtaaaatattcaactttttcctcctttttttggactttgtattttactgcatgttttcttcatttttaatcaataaagagtaaattgtc

SEQ ID NO: 1094 - protein, 527 aa, Homo sapiens
MSEDSSALPWSINRDDYELQEVIGSGATAVVQAAYCAPKKEKVAIKRINLEKCQTSMDELLKEIQAMSQCHHPNIVSYYTSFVVKDELWLVMKLLSGGSVLDIIKHIVAKGEHKSGVLDESTIATILREVLEGLEYLHKNGQIHRDVKAGNILLGEDGSVQIADFGVSAFLATGGDITRNKVRKTFVGTPCWMAPEVMEQVRGYDFKADIWSFGITAIELATGAAPYHKYPPMKVLMLTLQNDPPSLETGVQDKEMLKKYGKSFRKMISLCLQKDPEKRPTAAELLRHKFFQKAKNKEFLQEKTLQRAPTISERAKKVRRVPGSSGRLHKTEDGGWEWSDDEFDEESEEGKAAISQLRSPRVKESISNSELFPTTDPVGTLLQVPEQISAHLPQPAGQIATQPTQVSLPPTAEPAKTAQALSSGSGSQETKIPISLVLRLRNSKKELNDIRFEFTPGRDTAEGVSQELISAGLVDGRDLVIVAANLQKIVEEPQSNRSVTFKLASGVEGSDIPDDGKLIGFAQLSIS

SEQ ID NO: 1095 - DNA, 2678 bp, Homo sapiens
atgcgacccgaccgcgctgaggctccaggaccgcccgccatggctgcaggaggtcccggcgcggggtctgcggccccggtctcctccacatcctcccttcccctggctgctctcaacatgcgagtgcggcgccgcctgtctctgttcttgaacgtgcggacacaggtggcggccgactggaccgcgctggcggaggagatggactttgagtacttggagatccggcaactggagacacaagcggaccccactggcaggctgctggacgcctggcagggacgccctggcgcctctgtaggccgactgctcgagctgcttaccaagctgggccgcgacgacgtgctgctggagctgggacccagcattgaggaggattgccaaaagtatatcttgaagcagcagcaggaggaggctgagaagcctttacaggtggccgctgtagacagcagtgtcccacggacagcagagctggcgggcatcaccacacttgatgaccccctggggcatatgcctgagcgtttcgatgccttcatctgctattgccccagcgacatccagtttgtgcaggagatgatccggcaactggaacagacaaactatcgactgaagttgtgtgtgtctgaccgcgatgtcctgcctggcacctgtgtctggtctattgctagtgagctcatcgaaaagaggtgccgccggatggtggtggttgtctctgatgattacctgcagagcaaggaatgtgacttccagaccaaatttgcactcagcctctctccaggtgcccatcagaagcgactgatccccatcaagtacaaggcaatgaagaaagagttccccagcatcctgaggttcatcactgtctgcgactacaccaacccctgcaccaaatcttggttctggactcgccttgccaaggccttgtccctgccctgaagactgttctgaggccctgggtgtgtgtgtatctgtctgcctgtccatgtacttctgccctgcctcctcctttcgttgtaggaggaatctgtgctctacttacctctcaattcctggagatgccaacttcacagacacgtctgcagcagctggacatcacatttcatgtcctgcatggaaccagtggctgtgagtggcatgtccacttgctggattatcagccaggacactatagaacaggaccagctgagactaagaaggaccagcagagccagctcagctctgagccattcacacatcttcaccctcagtttcctcacttgaggagtgggatggggagaacagagagtagctgtgtttgaatccctgtaggaaatggtgaagcatagctctgggtctcctgggggagaccaggcttggctgcgggagagctggctgttgctggactacatgctggccactgctgtgaccacgacactgctggggcagcttcttccacagtgatgcctactgatgcttcagtgcctctgcacaccgcccattccacttcctccttccccacagggcaggtggggaagcagtttggcccagcccaaggagaccccatcttgagccttatttcctaatgggtccacctctcatctgcatctttcacacctcccagcttctgcccaaccttcagcagtgacaagtccccaagagactcgcctgagcagcttgggctgcttttcatttccacctgtcaggatgcctgtggtcatgctctcagctccacctggcatgagaagggatcctggcctctggcatattcatcaagtatgagttctggggatgagtcactgtaatgatgtgagcagggagccttcctccctgggccacctgcagagagctttcccaccaactttgtaccttgattgccttacaaagttatttgtttacaaacagcgaccatataaaagcctcctgccccaaagcttgtgggcacatgggcacatacagactcacatacagacacacacatatatgtacagacatgtactctcacacacacaggcaccagcatacacacgtttttctaggtacagctcccaggaacagctaggtgggaaagtcccatcactgagggagcctaaccatgtccctgaacaaaaattgggcactcatctattccttttctcttgtgtccctactcattgaaaccaaactctggaaaggacccaatgtaccagtatttatacctctaatgaagcacagagagaggaagagagctgcttaaactcacacaacaatgaactgcagacacagctgttctctccctctctccttcccagagcaatttatactttaccctcaggctgtcctctggggagaaggtgccatggtcttaggtgtctgtgccccaggacagaccctaggaccctaaatccaatagaaaatgcatatctttgctccactttcagccaggctggagcaaggtaccttttcttaggatcttgggagggaatggatgcccctctctgcatgatcttgttgaggcatttagctgccatgcacctgtccccctttaatactgggcattttaaagccatctcaagaggcatcttctacatgttttgtacgcattaaaataatttcaaagatatctgagaaaagccgatatttgccattcttcctatatcctggaatatatcttgcatcctgagtttataataataaataatattctaccttggaaaaaaaaaaaaaaa

SEQ ID NO: 1096 - protein, 296 aa, Homo sapiens
MAAGGPGAGSAAPVSSTSSLPLAALNMRVRRRLSLFLNVRTQVAADWTALAEEMDFEYLEIRQLETQADPTGRLLDAWQGRPGASVGRLLELLTKLGRDDVLLELGPSIEEDCQKYILKQQQEEAEKPLQVAAVDSSVPRTAELAGITTLDDPLGHMPERFDAFICYCPSDIQFVQEMIRQLEQTNYRLKLCVSDRDVLPGTCVWSIASELIEKRCRRMVVVVSDDYLQSKECDFQTKFALSLSPGAHQKRLIPIKYKAMKKEFPSILRFITVCDYTNPCTKSWFWTRLAKALSLP

SEQ ID NO: 1097 - DNA, 1695 bp, Homo sapiens
atgtggttctgcgcgtgtgcggacggctgtctgttaactccgcggtcagttcccggactggtggctggtctgcagggttgacctgcgcaatgcagaggctgcaggtagtgctgggccacctgaggggtccggccgattccggctggatgccgcaggccgcgccttgcctgagcggtgccccgcaggcctcggccgcggacgtggtggtggtgcacgggcggcgcacggccatctgccgggcgggccgcggcggcttcaaggacaccacccccgacgagcttctctcggcagtcatgaccgcggttctcaaggacgtgaatctgaggccggaacagctgggggacatctgtgtcggaaatgtgctgcagcctggggccggggcaatcatggcccgaatcgcccagtttctgagtgacatcccggagactgtgcctttgtccactgtcaatagacagtgttcgtcggggctacaggcagtggccagcatagcaggtggcatcagaaatgggtcttatgacattggcatggcctgtggggtggagtccatgtccctggctgacagagggaaccctggaaatattacttcgcgcttgatggagaaggagaaggccagagattgcctgattcctatggggataacctctgagaatgtggctgagcggtttggcatttcacgggagaagcaggatacctttgccctggcttcccagcagaaggcagcaagagcccagagcaagggctgtttccaagctgagattgtgcctgtgaccaccacggtccatgatgacaagggcaccaagaggagcatcactgtgacccaggatgagggtatccgccccagcaccaccatggagggcctggccaaactgaagcctgccttcaagaaagatggttctaccacagctggaaactctagccaggtgagtgatggggcagctgccatcctgctggcccggaggtccaaggcagaagagttgggccttcccatccttggggtcctgaggtcttatgcagtggttggggtcccacctgacatcatgggcattggacctgcctatgccatcccagtagctttgcaaaaagcagggctgacagtgagtgacgtggacatcttcgagatcaatgaggcctttgcaagccaggctgcctactgtgtggagaagctacgactcccccctgagaaggtgaaccccctggggggtgcagtggccttagggcacccactgggctgcactggggcacgacaggtcatcacgctgctcaatgagctgaagcgccgtgggaagagggcatacggagtggtgtccatgtgcatcgggactggaatgggagccgctgccgtctttgaataccctgggaactgagtgaggtcccaggctggaggcgctacgcagacagtcctgctgctctagcagcaaggcagtaacaccacaaaagcaaaaccacatgggaaaactcagcactggtggtggtggcagtggacagatcaaggcacttcaactcatttggaaaatgtgaacactgatgacatggtataggagtgggtggggtgttgagccacccatcagaccctctttagctgtgcaagataaaagcagcctgggtcacccaggccacaaggccatggttaattcttaaggcaaggcaaatccatggatgagaagtgcaatgggcatagtaaaagtgcatgaattt

SEQ ID NO: 1098 - protein, 424 aa, Homo sapiens
MQRLQVVLGHLRGPADSGWMPQAAPCLSGAPQASAADVVVVHGRRTAICRAGRGGFKDTTPDELLSAVMTAVLKDVNLRPEQLGDICVGNVLQPGAGAIMARIAQFLSDIPETVPLSTVNRQCSSGLQAVASIAGGIRNGSYDIGMACGVESMSLADRGNPGNITSRLMEKEKARDCLIPMGITSENVAERFGISREKQDTFALASQQKAARAQSKGCFQAEIVPVTTTVHDDKGTKRSITVTQDEGIRPSTTMEGLAKLKPAFKKDGSTTAGNSSQVSDGAAAILLARRSKAEELGLPILGVLRSYAVVGVPPDIMGIGPAYAIPVALQKAGLTVSDVDIFEINEAFASQAAYCVEKLRLPPEKVNPLGGAVALGHPLGCTGARQVITLLNELKRRGKRAYGVVSMCIGTGMGAAAVFEYPGN

SEQ ID NO: 1099 - DNA, 2963 bp, Homo sapiens
gttcctccgggagcccaacaccgttcccgcgcggccacgatgatccctccgagcagcccccgcgaggacggcgtggacgggctgcccaaggaggcggtgggcgccgagcaaccgccctctcctgcatccaccagcagccaggaatccaagctccagaaactaaaacgatcactttctttcaagaccaagagtttacggagcaaaagtgctgacaacttcttccagcgaaccaacagcgaagacatgaaactgcaagcacacatggtggctgagatcagccccagctccagcccactccctgctccaggaagcctgacgtccacacccgccagggctggtctgcatccaggtggcaaggctcatgcctttcaggaatacatcttcaagaagcccactttctgtgatgtctgcaaccacatgatagtgggaacaaatgctaagcatggactgcgctgcaaagcctgtaagatgagcatccaccacaagtgcacagatggcctggcaccccagcggtgcatgggcaagctgccaaaggggtttcggcgttactacagctcccccttgctcattcatgaacagtttggctgcattaaagaagttatgcccattgcctgtggcaataaggtggaccctgtctacgagaccctccgcttcggcacctccctggcccagaggacaaagaagggcagctccggcagtggctctgactcacctcacagaacctctacttcagatcttgtggaggttcctgaggaagccaatgggccaggaggcgggtatgacctaaggaaacgcagcaacagcgtgtttacatatccagaaaatggcactgatgatttcagagatccagcgaagaacataaaccaccagggatctctttccaaagacccattacagatgaacacctatgttgccttgtacaaatttgtaccacaggagaatgaagatttggaaatgaggccaggagacataattactcttttagaggattccaatgaagactggtggaaagggaaaattcaagacagaattggcttctttccagccaactttgttcagagactacaacaaaatgagaagatttttagatgtgttagaaccttcattgggtgtaaggaacaggggcagataacactgaaagagaatcagatctgcgtgagttctgaagaagaacaagatggttttatcagagtcctcagtggaaaaaagaaaggcctcatcccccttgatgtactagaaaacatctgattgctggctcctcctccgtttgcagtaggcaagctctgctgcgatgcctctgcctcatctcacactgcgtcaacccaaaggagctgccgcactgacccagccccccaggaaacagtgagacaagaatcaagtatctgagactgtggagtaatagccacaaaacagagggcccactgcacagcatatccaggctgccacaggtggggacgaggctgagagagtcagcaggcagagccagatgccatgcttggcagcagcagtaggactataaaccacagctgtcccccaggatcccactcctttcctgtctgtgtggtgtaagttaacacactggagtgtgctccagtttgcagggtagcccagtgcaaggttcagatccatgtagctaagtattatcctgcttccagacctatgtcaccagtaccaatcagtcagtgtcatcacatttcaggccccaagcaatctctgtgcaaagcatcagaaagacctgcttcccagcccccagcattccagtgctctccaggcttcctctctttgtgattgtgctgtccagagtgtccagcttgttctttctttctcttcagtcctctgagtacatctggtggtgtgcattagatgtgagggctatgttgacatggcatcacctccaaagacctgacctgcctaaagactgatgacaggccatccttcctgctgttctaggtactggcctgggtgacagagcaggacatgagacatagatacagtggggaggagaagtggggaaaggtggagcagagagttcttacttattgaagattatacagccctttcggttatgaagtccctgcttgaaggcaatggacctggggaagagactatcacaaaaagtctccattttcattttacatcctctctattggaggcagcacttttccctcatgctgtcctataggactccactttgaaggttgtgcctacgttgcagggaactaggaacatggaggggaaccaacaacagcatcttagaagaaatgtagccaaattggagtccattcttctttagggcagtatatgaaatcctagcagatgtaaaatggaaaagaatcctaatgcttcttccttcagaaagtagaggaactaggggcccaattagcatcatctaggggaatctctattactctgtacttatactaatgtttacaagaatgcaatatactgtgatgccttcctactcaagcctcctagcattcaaacttccatcctattagtcattaacgtggttaaacttcaattcacaatcaccttggaatcaatgtcagtttgatttattttgttacagagcaataaaatcattagaacaatggtttttaaaagacttaagtggatgcatcctatgcatgtaagcattatttcccaaaccaaagcatcattcatctccatttatttcttttgttcccgctcagtgtgaagttgggaactgagaggggatggctgctggtttcacagaagtttggatgccttactcttatcttaaagccagcatccagaatttcctccctctctgatgccacatgcaaaaccaggtgtacgatgtcaagatggattctttgagagccagggtagatcatatgactgcctttctgtaaaattggatgcctagtacaaatgctctttgcctctaattcagtattccatttaataaaaacaatacagtggctggaaaggagcatcag

SEQ ID NO: 1100 - protein, 402 aa, Homo sapiens
MIPPSSPREDGVDGLPKEAVGAEQPPSPASTSSQESKLQKLKRSLSFKTKSLRSKSADNFFQRTNSEDMKLQAHMVAEISPSSSPLPAPGSLTSTPARAGLHPGGKAHAFQEYIFKKPTFCDVCNHMIVGTNAKHGLRCKACKMSIHHKCTDGLAPQRCMGKLPKGFRRYYSSPLLIHEQFGCIKEVMPIACGNKVDPVYETLRFGTSLAQRTKKGSSGSGSDSPHRTSTSDLVEVPEEANGPGGGYDLRKRSNSVFTYPENGTDDFRDPAKNINHQGSLSKDPLQMNTYVALYKFVPQENEDLEMRPGDIITLLEDSNEDWWKGKIQDRIGFFPANFVQRLQQNEKIFRCVRTFIGCKEQGQITLKENQICVSSEEEQDGFIRVLSGKKKGLIPLDVLENI

SEQ ID NO: 1101 - DNA, 2615 bp, Homo sapiens
gccgcgggcttcgtttgtgaggaagggggcctaggcccgggcctgcggtggtgggggttgctgcgcgccgggggtcgctcctgctgtgtcttccgctccagcttcgcccacttccccttgccagcggggtgggcgcggagaagacctgccggagccatggaggacgaagtggtccgctttgccaagaagatggacaagatggtgcagaagaagaacgcggctggagcattggatttgctaaaggagcttaagaatattcctatgaccctggaattactgcagtccacaagaatcggaatgtcagttaatgctattcgcaagcagagtacagatgaggaagttacatctttggcaaagtctctcatcaaatcctggaaaaaattattagatgggccatcaactgagaaagaccttgacgaaaagaagaaagaacctgcaattacatcgcagaacagccctgaggcaagagaagaaagtacttccagcggcaatgtaagcaacagaaaggatgagacaaatgctcgagatacttatgtttcatcctttcctcgggcaccaagcacttctgattctgtgcagttgaagtgtagggagatgcttgctgcagctcttcgaacaggggatgactacattgcaattggagctgatgaggaagaattaggatctcaaattgaagaagctatatatcaagaaataaggaatacagacatgaaatacaaaaatagagtacgaagtaggatatcaaatcttaaagatgcaaaaaatccaaatttaaggaaaaatgtcctctgtgggaatattcctcctgacttatttgctagaatgacagcagaggaaatggctagtgatgagctgaaagagatgtggaaaaacttgaccaaagaagccatcagagagcatcagatggccaagactggtgggacccagactgacttgttcacatgtggcaaatgtaaaaagaagaattgcacttacacacaggtacaaacccgtagtgctgatgaaccagtgacaacatttgttgtctgtaatgaatgtggaaatcgatggaagttctgttgagttggaagaattggcaaaatatctggaccattaagaaaacggattttgtaactagctttaaactaggccaagcaactagttttcctgcaaatcaaatttttaaagcaacttgagttagactttgtttttgacctaacatcccttccttaaatgccttctgtagtttcagatcagtagggagaccatataataattgtatggtacctgtttcaaaacatattttttctgtttttataagtaagttgatattaattaaactcttggcaatatttcttctttcttaaaggaaaatacaccttaactttttttcttttacactgtgaaacatacacagtagaaattctgttactctctgttattaatacataaatgaaaatacttttttttccatattggcatgtagctacaaatattaaaggaggagaaaaggtaatataattttaggtttaccaaatatggtgtgtattcaaataatacttgaccagcttatctaaaatgtacataattttgaggtagcttatgaatttgattttaattattatgttcacaagcttggaatattagatattattttgcatctgtaactaaccgtgatcatcatctcttgtaatttcttgtacatgtatattacttgttcttaatagatttttggaaacaagactttattgagatcagtttggttttcctgttaatttacctgtttgactttataatgtgttttagttttgcagaagaacactgttgtagtttagaaggcttttcataaatcccctcataggcaaagatgagaacttcccactatttttttcccctcttaggaagacatactggaaagaaaatgtttagcatcttagtgtagtatagctattgtaaacagttcatgactagattttgattcggaaatctatactgaccaaggattaatcttaaggactgtataattcattaaagcggtggtctttccatgtggagactgatagaaaataattttgtcccaagtcttatttgctgactttttctgtcaatgagtgagattgttgaacaaactgaatatatgggctatagcaagtagctttacagtacagatcttacaattaagttttgcttttgttaaagtgtgtaccattttttctgtttggagtaagacaaaaattgttttgacataggttccctagggtacacttgctctagcatactttaaaggccactgttgcaaagtctacattttatgctgaatctgcattctgtcaggcacccgtagaaagacctcagtacatgctttgcactctcctttgctccctttttccaatttcttattgcatatcattttgttgtaatacagaaagcagcatttttaaatgtccatgttaagaattggcccactggtaccgactcacctctattttgtcagttcatagttgaagattttgttttatttcaaaaacaaagtacatttttgaaataatgtttcagaataaaataatctcacttttaaattaagtgatccattttaaaatttgtaattcaataaagttttttttgttgttaaacat

SEQ ID NO: 1102 - protein, 301 aa, Homo sapiens
MEDEVVRFAKKMDKMVQKKNAAGALDLLKELKNIPMTLELLQSTRIGMSVNAIRKQSTDEEVTSLAKSLIKSWKKLLDGPSTEKDLDEKKKEPAITSQNSPEAREESTSSGNVSNRKDETNARDTYVSSFPRAPSTSDSVQLKCREMLAAALRTGDDYIAIGADEEELGSQIEEAIYQEIRNTDMKYKNRVRSRISNLKDAKNPNLRKNVLCGNIPPDLFARMTAEEMASDELKEMWKNLTKEAIREHQMAKTGGTQTDLFTCGKCKKKNCTYTQVQTRSADEPVTTFVVCNECGNRWKFC

SEQ ID NO: 1103 - DNA, 2384 bp, Homo sapiens
aggtcccaccgctcctaccagcagcctgacccaggatggctctactccccagccttcaatccctggacctgggtttggaattaggagacttccgtcgagggtcaattgtgcgggatcctggccattccatacaaaatctcacgactggcaaaagagagggggacccctcgagcagaggtcagatatcacaagggacccgggtttttccaccccgccctcattcccagcgtggggtctcagatgagtgggaaaacctcaaatatggatcagaaatcatgcaagttcggactctggccttaggagaaaactcttaacggagatggaatgtcacgagggatccagccacccccatccactcattgactggatgaagttttgcgatgggaaaatccaggtcaggagttacggacgacctgcaccgcccggagctccttctgggtccggagtttgggaaaagtgcgggttaggggttaaaggtcacggaagaacttccccactccccccgcctctttcgtccgcgggccggttcaagaggtattcggaaccaggggaggagagcggcggccatcgtacctgagcaggagccagcgcctgctggagctgctgctgctcctcgctgatcttttgcttcagtttcttgaacatggcgcagcgtacgtacggtcctgagtgtcaacgaaacctgaagggcgagagcccggggagtcccggccgcgacggctacggcgacttctttacaccagggacagcgggggccgggcctcgccgtctcctccttgaggctgtgggcaagtccggacactcgtcctgagggtgtcggcgtcgccgccgccgcgtctctttcttccgggtgccactggctggcctcggccccccatccagccccgggagccgcggcggcgacgacaacggcagcaggtgaactgtgcgccaagggcgcttgcgcggcctacgtggagctcacagaggctaactacggagcaccggatgggacaagcacaatgtcgggtcccgcacatgcgcgctcggccggtcgcttccgaactcgctgcactggaggacgcaaggttcggtcctgcctgatttcgttgcgtgcggagaccgccgtcgcggctcagaaccggagcgtgggctagtctgaacactaccctgactctcacctgggctttggccctgcgaaatcagacggggagagtgctgcttctatcgatggcagcagggccgacgggcccaccgcaaagaacacagggatgagcgtcaaggatgggagaaggggagatccagagaacctgacgcgggccctaattgatagtgttcttttctttagtagctgtagctaggattctgtgtcttcggtgccagaggggcccgcttcccttccctgaactcttccagcgtcgggaagtccctgataccaggcgccaggggtccaaatgttttatgccaatactgtaaaacctcaagtgtttggacacctgctttattcttttcttcaccgaaatcgtgtatttcacgaattcattcaaaaacctttatcaggccttggagatgttaaaagaatttacagcctagtggaagacacagattcctaattagtccaaatttactcctaacacctgcaatcatcctacaagatcttaatgtttatgtgcctcatttatctaaaaccctgaactttggctgcctgtgaatcctcaggtccatttcagcaacccacttttgcatgctgtacctttgatatcatctgaaactgcttacattgtctccggtatcagaatctaacagtatatgctgatctccacgttctagcaaattttgtttaccagcaataataggagcaacctgctctcgagagtccatattctgatccctaaatgtattagagccacagtggggcctggaacactgccttaacacctgggctaagtcctcttatatctcgtagtgaacaccttatgtatgtaaggtgtccccagcccccgggccacaaacgggtaccagcccatggcctgttaggaaccgggctacacagcaagaagtgaatctctggcaagccagggaagcttaatctgtatttacagctgctccccatggttcacattatcgtctgagctccacctcctgtcagatcagctgtggcatgagattctcataggagctggaactactgtgaactaggcatgagagggatctaggttatgctccttatgagaatctaatgcctgatgatctgtcactgtctcccatcacccccagatgggaccatctagttgcaggaaaataagctcagggctcccaccgattctacattatggtgagttgtgtaattgtttcattatatattacaatgcaataataatagaaataaagggcacaataaatat

SEQ ID NO: 1104 - protein, 92 aa, Homo sapiens [sequence omitted]

SEQ ID NO: 1105 - DNA, 633 bp, Homo sapiens
ctcttccggttctaggtgcttcgggagccgcggcttaaggtgtagacatggcgaagtccaagaaccacaccacacacaaccagtcccgaaaatggcacagaaatggtatcaagaaaccccgatcacaaagatacgaatctcttaagggggtggaccccaagttcctgaggaacatgcactttgccaagaagcacaacaagaagggcctaaagaagatgcaggccaacaatgccaaggccatgagtgcacgtgccgaggctatcaaggccctcgtaaagcccaaggaggttaagcccaagatcccaaagggtgtcagccgcaagctcgatcgacttgcctacattgcccatcccaagcttgggaagcgtgctcgtgcccgtattgccaaggggctcaggctgtgccggccaaaggccaaggccaaggatcaaaccaaggcccaggctgcagctccaccttcagttccagctcaggctcccaaaggtgcccaggcccctacaaaggcttcagagtagatatctctgccaacatgaggacagaaggactggtgtgaccccctacccccgcccctgggctaccatctgcatggggctggtcctcctgtgctatttgtacaaataaacctgaggcagg

SEQ ID NO: 1106 - DNA, 341 bp, Homo sapiens
attgccacatggtccacattgcatgcaagattgctgagctgaaggaaaagattgattgccgttctggtaaaaagccagaagattgccctaaattcttgaagtctgatgatgctgccatcattgacatggttcctggcaagcccatgtgtgttgagagcttctcagaactgtttgtttcaattggccatttaagtttagtagtaaaagactggttaatgataacaatgcatcataaaaccttcagatggaaaggagaatgttttgtggaccactttggttttcttttttgcatctggcagttttaagttattagtttttaaaatcagtactttttaatggaa

SEQ ID NO: 1107 - protein, 98 aa, Homo sapiens
MVHIACKIAELKEKIDCRSGKKPEDCPKFLKSDDAAIIDMVPGKPMCVESFSELFVSIGHLSLVVKDWLMITMHHKTFRWKGECFVDHFGFLFCIWQF

SEQ ID NO: 1108 - DNA, 1039 bp, Homo sapiens
tgcctgtcttttccgtgctacctgcagaggggtccatacggcgttgttctggattcccgtcgtaacttaaagggaaactttcacaatgtccggagcccttgatgtcctgcaaatgaaggaggaggatgtccttaagttccttgcagcaggaacccacttaggtggcaccaatcttgacttccagatggaacagtacatctataaaaggaaaagtgatggcatctatatcataaatctcaagaggacctgggagaagcttctgctggcagctcgtgcaattgttgccattgaaaaccctgctgatgtcagtgttatatcctccaggaatactggccagagggctgtgctgaagtttgctgctgccactggagccactccaattgctggccgcttcactcctggaaccttcactaaccagatccaggcagccttccgggagccacggcttcttgtggttactgaccccagggctgaccaccagcctctcacggaggcatcttatgttaacctacctaccattgcgctgtgtaacacagattctcctctgcgctatgtggacattgccatcccatgcaacaacaagggagctcactcagtgggtttaatgtggtggatgctggctcgggaagttctgcgcatgcgtggcaccatttcccgtgaacacccatgggaggtcatgcctgatctgtacttctacagagatcctgaagagattgaaaaagaagagcaggctgctgctgagaaggcagtgaccaaggaggaatttcagggtgaatggactgctcccgctcctgagttcactgctactcagcctgaggttgcagactggtctgaaggtgtacaggtgccctctgtgcctattcagcaattccctactgaagactggagcgctcagcctgccacggaagactggtctgcagctcccactgctcaggccactgaatgggtaggagcaaccactgactggtcttaagctgttcttgcataggctcttaagcagcatggaaaaatggttgatggaaaataaacatcagtttct

SEQ ID NO: 1109 - protein, 295 aa, Homo sapiens [sequence omitted]

SEQ ID NO: 1110 - DNA, 843 bp, Homo sapiens
gggcgggtcttcttccttctcgcctaacgccgccaacatggtgttcaggcgcttcgtggaggttggccgggtggcctatgtctcctttggacctcatgccggaaaattggtcgcgattgtagatgttattgatcagaacagggctttggtcgatggaccttgcactcaagtgaggagacaggccatgcctttcaagtgcatgcagctcactgatttcatcctcaagtttccgcacagtgcccaccagaagtatgtccgacaagcctggcagaaggcagacatcaatacaaaatgggcagccacacgatgggccaagaagattgaagccagagaaaggaaagccaagatgacagattttgatcgttttaaagttatgaaggcaaagaaaatgaggaacagaataatcaagaatgaagttaagaagcttcaaaaggcagctctcctgaaagcttctcccaaaaaagcacctggtactaagggtactgctgctgctgctgctgctgctgctgctgctgctaaagttccagcaaaaaagatcaccgccgcgagtaaaaaggctccagcccagaaggttcctgcccagaaagccacaggccagaaagcagcgcctgctccaaaagctcagaagggtcaaaaagctccagcccagaaagcacctgctccaaaggcatctggcaagaaagcataagtggcaatcataaaaagtaataaaggttctttttgacctgttgacaaatgtatttaagcctttggatttaaagcctgttgaggctagagttaggaggcagattgatagtaggattataataaacattaaataatcaaaaaaaaaaaaaaaaaaaa

SEQ ID NO: 1111 - protein, 216 aa, Homo sapiens
MVFRRFVEVGRVAYVSFGPHAGKLVAIVDVIDQNRALVDGPCTQVRRQAMPFKCMQLTDFILKFPHSAHQKYVRQAWQKADINTKWAATRWAKKIEARERKAKMTDFDRFKVMKAKKMRNRIIKNEVKKLQKAALLKASPKKAPGTKGTAAAAAAAAAAAKVPAKKITAASKKAPAQKVPAQKATGQKAAPAPKAQKGQKAPAQKAPAPKASGKKA

SEQ ID NO: 1112 - DNA, 2611 bp, Homo sapiens
gactcctaggggcttgcagactagtgggagagaaagaacatcgcagcagccaggcagaaccaggacaggtgaggtgcaggctggctttcctctcgcagcgcggtgtggagtcctgtcctgcctcagggcttttcggagcctggatcctcaaggaacaagtagacctggccgcggggagtggggagggaaggggtgtctattgggcaacagggcggggcaaagccctgaataaaggggcgcagggcaggcgcaagtggcagagccttcgtttgccaagtcgcctccagaccgcagacatgaaacttgtcttcctcgtcctgctgttcctcggggccctcggactgtgtctggctggccgtaggaggagtgttcagtggtgcgccgtatcccaacccgaggccacaaaatgcttccaatggcaaaggaatatgagaaaagtgcgtggccctcctgtcagctgcataaagagagactcccccatccagtgtatccaggccattgcggaaaacagggccgatgctgtgacccttgatggtggtttcatatacgaggcaggcctggccccctacaaactgcgacctgtagcggcggaagtctacgggaccgaaagacagccacgaactcactattatgccgtggctgtggtgaagaagggcggcagctttcagctgaacgaactgcaaggtctgaagtcctgccacacaggccttcgcaggaccgctggatggaatgtccctatagggacacttcgtccattcttgaattggacgggtccacctgagcccattgaggcagctgtggccaggttcttctcagccagctgtgttcccggtgcagataaaggacagttccccaacctgtgtcgcctgtgtgcggggacaggggaaaacaaatgtgccttctcctcccaggaaccgtacttcagctactctggtgccttcaagtgtctgagagacggggctggagacgtggcttttatcagagagagcacagtgtttgaggacctgtcagacgaggctgaaagggacgagtatgagttactctgcccagacaacactcggaagccagtggacaagttcaaagactgccatctggcccgggtcccttctcatgccgttgtggcacgaagtgtgaatggcaaggaggatgccatctggaatcttctccgccaggcacaggaaaagtttggaaaggacaagtcaccgaaattccagctctttggctcccctagtgggcagaaagatctgctgttcaaggactctgccattgggttttcgagggtgcccccgaggatagattctgggctgtaccttggctccggctacttcactgccatccagaacttgaggaaaagtgaggaggaagtggctgcccggcgtgcgcgggtcgtgtggtgtgcggtgggcgagcaggagctgcgcaagtgtaaccagtggagtggcttgagcgaaggcagcgtgacctgctcctcggcctccaccacagaggactgcatcgccctggtgctgaaaggagaagctgatgccatgagtttggatggaggatatgtgtacactgcaggcaaatgtggtttggtgcctgtcctggcagagaactacaaatcccaacaaagcagtgaccctgatcctaactgtgtggatagacctgtggaaggatatcttgctgtggcggtggttaggagatcagacactagccttacctggaactctgtgaaaggcaagaagtcctgccacaccgccgtggacaggactgcaggctggaatatccccatgggcctgctcttcaaccagacgggctcctgcaaatttgatgaatatttcagtcaaagctgtgcccctgggtctgacccgagatctaatctctgtgctctgtgtattggcgacgagcagggtgagaataagtgcgtgcccaacagcaacgagagatactacggctacactggggctttccggtgcctggctgagaatgctggagacgttgcatttgtgaaagatgtcactgtcttgcagaacactgatggaaataacaatgacgcatgggctaaggatttgaagctggcagactttgcgctgctgtgcctcgatggcaaacggaagcctgtgactgaggctagaagctgccatcttgccatggccccgaatcatgccgtggtgtctcggatggataaggtggaacgcctgaaacaggtgttgctccaccaacaggctaaatttgggagaaatggatctgactgcccggacaagttttgcttattccagtctgaaaccaaaaaccttctgttcaatgacaacactgagtgtctggccagactccatggcaaaacaacatatgaaaaatatttgggaccacagtatgtcgcaggcattactaatctgaaaaagtgctcaacctcccccctcctggaagcctgtgaattcctcaggaagtaaaaccgaagaagatggcccagctccccaagaaagcctcagccattcactgcccccagctcttctccccaggtgtgttggggccttggcctcccctgctgaaggtggggattgcccatccatctgcttacaattccctgctgtcgtcttagcaagaagtaaaatgagaaattttgttgatattc

SEQ ID NO: 1113 - DNA, 3384 bp, Homo sapiens
gcttctaaacaacctaccctccttccccattttctgtggtccaactaccctcggcgatcccaggcttggcggggcaccgcctggcctctcccgttcctttaggctgccgccgctgcctgccgccatggcagagttgggcctaaatgagcaccatcaaaatgaagttattaattatatgcgttttgctcgttcaaagagaggcttgagactcaaaactgtagattcctgcttccaagacctcaaggagagcaggctggtggaggacaccttcaccatagatgaagtctctgaagtcctcaatggattacaagctgtggttcatagtgaggtggaatctgagctcatcaacactgcctataccaatgtgttacttctgcgacagctgtttgcacaagctgagaagtggtatcttaagctacagacagacatctctgaacttgaaaaccgagaattattagaacaagttgcagaatttgaaaaagcagagattacatcttcaaacaaaaagcccatcttagatgtcacaaagccaaaacttgctccacttaatgaaggtggaacagcagaactcctaaacaaggaaattttaagacttcaagaagagaatgagaaattgaagtcaaggttgaagaccattgaaatacaggctacaaatgcactggatgaaaagtcaaaactagaaaaagcactgcaagatttacagcttgatcaaggaaatcaaaaggattttataaaggcccaagacttaagtaacttagaaaacactgtcgctgccttaaagagtgagtttcagaagacacttaatgacaagacagaaaaccagaagtcactggaggagaatctggcgacagccaagcacgatctactcagggttcaggagcagctgcacatggctgaaaaggaattagaaaagaaatttcagcaaacagcagcttatcgaaacatgaaagagattcttaccaagaagaatgaccaaatcaaagatctgaggaaaagactggcacaatatgaacctgaagattaaaactgaagatttcctctggaagctaccacatgcaaacatacaagcagtctcacctcaggcatgtattttgaaaagcattttgtcatatcccctctccttatttttctaatatttagactttgaatatttagaactagagttcctattttcagctagttgaaaacagagaaaacctagtgattctgtctggtcatcccacacacctctctactgagtgctccagagtcttagctcacatgcactgagaattctttacagcaaagaagagatttttagagtgggaagaagaggcttatccttctgcattagtataaagagtctgtatttttaataaatgttaaataagctaacaatgtttgtacttatgcattccccatgggtaaaaataaataatagcattgttaaagatagttattaccaaaaaaagagagttattacaaataaatatgtctctttatttttaaaaatgaaatcttaattcatttactctatttgatgataaactataaattcattgaaaatgtgaattctattatgggtagcctttttaccaattataaggaaaatttacagcagtgaacatgaacattcacttagcttcctcagtctctccatcttaaagatcatttatcagaggaggttcagcattttttgcagcataacttttcatgagtctgtattactaatggataagtcaaatccatcctgcacttctacagtttagaaagtatctggactcagaataaatgtaatatttatacttgtttccagaatgttattttacattttatgttcaataagaacactttttaaaagacgtatattcaacataaaatcagctatcagacttcagattagactttatttatgtgggtctataataattgtattttcaagaggttttcactatatttgtattggcctggttttctcagacgattttggacaaatcattagaaactgggcatcatatccacagttatgtaaggcagtgatatactataaggataaacaaagtcaagtccataaagcaataatccctcagaaggaaagtccttacttttcacatattaatatttagtaatttttcctgcttctaaaagtgagagtatcacaccctaaatgaacactgtctactaagagacatcattccatttccacaaatgaagattttattccaagaaacgagtttactgattggagcatagggcttgttgttatttttattcaagcttttagtaatagccttgaatttattatttttcttataggctttttgttaaaatagtgaaggaacaaatgttaaagggtaagataatttccctgcaaaaggacacagaaggcagtcttaagaagatgaatggatgagagaagggagagaataaaatgcaataacgagccagcatttactatgtattttctcctcacctgtctctccatatttaggtcacttaccagtttctgtgcccttttggagcttttgttgagggcttcattctcaccctgtatttctttagccctaaattgacactctctccaaaaatccattccattgtctgtggaccaagatgttctatgtaattcagaagcagaactcttggctaaagggctagtgtggccttcagaaaccattcaattattttctccctacacctttgtcagtttgaaaccagtgaggaaaaaaggtatgttgataagaaacctatattgctaggtagaatttgtacttgttttcttggtagcagttttgaaatattctgtacagtacgttcctattgtttaataataaattcaaaaatatttctaaaaccttaaaaccaactatgccaagcattaagataaacaaatatgatgttctttgacgtaaatcaacgtgatgattctttcacatgtaaacacattttagtgtttctggtttgtcatttttgttgttgttgttgttgttgttatttactctataccctttagcaaaatacagttttaaatttttattgtttttagtagtttcccaactttaagacttatctaatttaactgagaaagaaagcctttttcatatatatatatattggatttctaaggatggtggtttgagccttgattagacttttgatgtgctaagccagacaggcagtctgtacattgatggccatcacaatgcagctttggtttaatttaattcaggcctgctgctgagttatgcacagactttttgttgaccaaaataaaatataaagggttttcttctgtttgacatttgtgttcattttttctctttatgtattacattttaacctatattaaataaatgtttaaatgataatttgcttatgtcttataaaactcagcataagaaaaat

SEQ ID NO: 1114 - protein, 299 aa, Homo sapiens
MAELGLNEHHQNEVINYMRFARSKRGLRLKTVDSCFQDLKESRLVEDTFTIDEVSEVLNGLQAVVHSEVESELINTAYTNVLLLRQLFAQAEKWYLKLQTDISELENRELLEQVAEFEKAEITSSNKKPILDVTKPKLAPLNEGGTAELLNKEILRLQEENEKLKSRLKTIEIQATNALDEKSKLEKALQDLQLDQGNQKDFIKAQDLSNLENTVAALKSEFQKTLNDKTENQKSLEENLATAKHDLLRVQEQLHMAEKELEKKFQQTAAYRNMKEILTKKNDQIKDLRKRLAQYEPED

SEQ ID NO: 1115 - DNA, 1047 bp, Homo sapiens
agatgacgtgcggctcgtggggcagctcggcagcatggcgtccgtgacgctgagcgaggcggagaaggtgtacatcgtgcatggcgtccaggaagacctccgtgtggatggccgtggctgtgaggactaccgatgtgtcgaagtggaaactgatgtggtgtccaacactagtgggtccgccagggtcaagctgggtcacacagacatcttggtgggagtgaaagcagaaatggggacgccgaagctggagaaaccaaatgaaggctacttggagttctttgttgactgttcagccagtgctacccctgaatttgaaggtagaggaggtgatgaccttggcaccgagatcgctaacaccctctatcggatatttaacaataaaagcagtgtcgacttaaagaccctctgcattagtcctcgggagcactgctgggttctctatgtggatgtgctgcttctggaatgtggtggaaatttgtttgatgccatttccattgctgtaaaggctgctctcttcaatacaaggataccaagggttcgagttttggaggatgaagaggggtcgaaggacattgaattgtcagatgacccttatgactgcatacgactaagtgtggagaatgtcccctgcattgtcactctgtgcaagattggctatcggcatgtggtggatgctactcttcaggaggaggcctgctcgctggccagcttgctggtgtcggtgaccagcaagggagttgtgacgtgcatgaggaaagtggggaagggcagcctggacccagagagcatcttcgagatgatggagactggcaagcgtgtgggcaaggtactgcatgcctccttgcagagtgttgtgcacaaggaagaaagcctggggcccaagagacagaaagttggattcctgggatgatttgcacatcaactgctcaactgtggattgttttttacttttccttttaaaccggttcgtatatatttttcttcgctgttacgaatttacagcagcatttgtacatgtaaaattaaaggctattttctggtctggtt

SEQ ID NO: 1116 - protein, 291 aa, Homo sapiens [sequence omitted]

SEQ ID NO: 1117 - DNA, 1088 bp, Homo sapiens
caccgtgcccaagagaaaggctgaaggggatgctaaaggagataaagccaaggtgaaggatgaaccacagagaagatccatgaggttttctgctaaacctgctcctccaaagccagagcccaagcctaaaaaggcccctgcaaagaagggagagaagatacccaaagggaaaaagggaaaagctgatgctggcgaggaggggaataaccctgcagaaaacggagatgccaaaacagaccaggcacagaaagctgaaggtgctggaggtgccaagtgaagcatgtgcattttttataactgtgtacttttgatgactgtacagcttgaaatactatttttatcaagttttataaaaatgcagaattttgttttacttttttttttaaagctatgctattagcacacagaacacttcagtgttgttttagggagaaggggcatatgtcactaatagaatgtcccaaaagctggattgatgtggggaaaacacctttcccttctagctttgagagacttcctcttggctcccaggaggagggattccctgactttgacacagatggtcaccttggcacaaaagccttgtaggatggaaaaacaaatttgtttttatgtcctcttctccctttccatccttcagcatagacttaactcccttaagcccagacatctgttgggacctgacccccagtcattggttaccagtgtgtcaggcaatctggactttccagtgatgccactgagatggcacctgtcaaaacagcggtggttccatttctagactgtggatcttcagataaattctgccattttcatttcacttcctgaaactcagggtcggcttgtgaaaagctgttaaacaacatgctaaatgtgaaatgtcaaccctcactctaaactttccctgttcagagcatcagacgaaaacttcattgggttttatagtggctttcagatttttggtagtcaattgaagaagggagtttaaaatttgttgtatactgttcatgattgtctgcccatgtcctgcctgaaataccatgattgtttatggaaagtatctttaataaagctggatacagtttggc

SEQ ID NO: 1118 - protein, 90 aa, Homo sapiens
VPKRKAEGDAKGDKAKVKDEPQRRSMRFSAKPAPPKPEPKPKKAPAKKGEKIPKGKKGKADAGEEGNNPAENGDAKTDQAQKAEGAGGAK

SEQ ID NO: 1119 - DNA, 3355 bp, Homo sapiens
aagcctctcggtctgtggcagcagcgttggcccggccccgggagcggagagcgaggggaggcggagacggaggaaggtctgaggagcagcttcagtccccgccgagccgccaccgcaggtcgaggacggtcggactcccgcggcgggaggagcctgttcccctgagggtatttgaagtataccatacaactgttttgaaaatccagcgtggacaatggctactcaagctgatttgatggagttggacatggccatggaaccagacagaaaagcggctgttagtcactggcagcaacagtcttacctggactctggaatccattctggtgccactaccacagctccttctctgagtggtaaaggcaatcctgaggaagaggatgtggatacctcccaagtcctgtatgagtgggaacagggattttctcagtccttcactcaagaacaagtagctgatattgatggacagtatgcaatgactcgagctcagagggtacgagctgctatgttccctgagacattagatgagggcatgcagatcccatctacacagtttgatgctgctcatcccactaatgtccagcgtttggctgaaccatcacagatgctgaaacatgcagttgtaaacttgattaactatcaagatgatgcagaacttgccacacgtgcaatccctgaactgacaaaactgctaaatgacgaggaccaggtggtggttaataaggctgcagttatggtccatcagctttctaaaaaggaagcttccagacacgctatcatgcgttctcctcagatggtgtctgctattgtacgtaccatgcagaatacaaatgatgtagaaacagctcgttgtaccgctgggaccttgcataacctttcccatcatcgtgagggcttactggccatctttaagtctggaggcattcctgccctggtgaaaatgcttggttcaccagtggattctgtgttgttttatgccattacaactctccacaaccttttattacatcaagaaggagctaaaatggcagtgcgtttagctggtgggctgcagaaaatggttgccttgctcaacaaaacaaatgttaaattcttggctattacgacagactgccttcaaattttagcttatggcaaccaagaaagcaagctcatcatactggctagtggtggaccccaagctttagtaaatataatgaggacctatacttacgaaaaactactgtggaccacaagcagagtgctgaaggtgctatctgtctgctctagtaataagccggctattgtagaagctggtggaatgcaagctttaggacttcacctgacagatccaagtcaacgtcttgttcagaactgtctttggactctcaggaatctttcagatgctgcaactaaacaggaagggatggaaggtctccttgggactcttgttcagcttctgggttcagatgatataaatgtggtcacctgtgcagctggaattctttctaacctcacttgcaataattataagaacaagatgatggtctgccaagtgggtggtatagaggctcttgtgcgtactgtccttcgggctggtgacagggaagacatcactgagcctgccatctgtgctcttcgtcatctgaccagccgacaccaagaagcagagatggcccagaatgcagttcgccttcactatggactaccagttgtggttaagctcttacacccaccatcccactggcctctgataaaggctactgttggattgattcgaaatcttgccctttgtcccgcaaatcatgcacctttgcgtgagcagggtgccattccacgactagttcagttgcttgttcgtgcacatcaggatacccagcgccgtacgtccatgggtgggacacagcagcaatttgtggagggggtccgcatggaagaaatagttgaaggttgtaccggagcccttcacatcctagctcgggatgttcacaaccgaattgttatcagaggactaaataccattccattgtttgtgcagctgctttattctcccattgaaaacatccaaagagtagctgcaggggtcctctgtgaacttgctcaggacaaggaagctgcagaagctattgaagctgagggagccacagctcctctgacagagttacttcactctaggaatgaaggtgtggcgacatatgcagctgctgttttgttccgaatgtctgaggacaagccacaagattacaagaaacggctttcagttgagctgaccagctctctcttcagaacagagccaatggcttggaatgagactgctgatcttggacttgatattggtgcccagggagaaccccttggatatcgccaggatgatcctagctatcgttcttttcactctggtggatatggccaggatgccttgggtatggaccccatgatggaacatgagatgggtggccaccaccctggtgctgactatccagttgatgggctgccagatctggggcatgcccaggacctcatggatgggctgcctccaggtgacagcaatcagctggcctggtttgatactgacctgtaaatcatcctttagctgtattgtctgaacttgcattgtgattggcctgtagagttgctgagagggctcgaggggtgggctggtatctcagaaagtgcctgacacactaaccaagctgagtttcctatgggaacaattgaagtaaactttttgttctggtcctttttggtcgaggagtaacaatacaaatggattttgggagtgactcaagaagtgaagaatgcacaagaatggatcacaagatggaatttatcaaaccctagccttgcttgttaaatttttttttttttttttttaagaatatctgtaatggtactgactttgcttgctttgaagtagctctttttttttttttttttttttttttgcagtaactgttttttaagtctctcgtagtgttaagttatagtgaatactgctacagcaatttctaatttttaagaattgagtaatggtgtagaacactaattcataatcactctaattaattgtaatctgaataaagtgtaacaattgtgtagcctttttgtataaaatagacaaatagaaaatggtccaattagtttcctttttaatatgcttaaaataagcaggtggatctatttcatgtttttgatcaaaaactatttgggatatgtatgggtagggtaaatcagtaagaggtgttatttggaaccttgttttggacagtttaccagttgccttttatcccaaagttgttgtaacctgctgtgatacgatgcttcaagagaaaatgcggttataaaaaatggttcagaattaaacttttaattcatt

SEQ ID NO: 1120 - DNA, 852 bp, Homo sapiens
gggactgcgagccagggactcgggccgcggggcgggaagaagtggggcagcgcttggccaggccgaaaggactttgggggtgggggctgggagtccgtgtctcgaatgagggaggagaggtggagttgccggggctcaggcccggcctcgagcatgggcggatgagaggagtcgggagccgaggcctagggtccttcgggtgaggggagacggagccagcgaggagatggagcagaagcttgtggaggagattcttcaagcaatcactatgtcaacagacacaggtgtttcccttccttcatatgaggaagatcagggatcaaaactcattcgaaaagctaaagaggcaccattcgtacccgttggaatagcgggttttgcagcaattgttgcatatggattatataaactgaagagcaggggaaatactaaaatgtccattcatctgatccacatgcgtgtggcagcccaaggctttgttgtaggagcaatgactgttggtatgggctattccatgtatcgggaattctgggcctttagttagatgtcttattattaaagttacctattattgttggaaataaactaatttgtatgggtttagatggtaacatggcattttgaatattggcttcctttcttgcaggcttgatttgcttggtgaccgaattactagtgactagtttactaactaggtcattcaaggaagtcaagttaacttaaacatgtcacctaaatgcacttgatggtgttgaaatgtccaccttcttaaatttttaagatgaacttagttctaaagaagataacaggccaatcctgaaggtactccctgtttgctgcagaatgtcagat

SEQ ID NO: 1121 - DNA, 706 bp, Homo sapiens
tggtgctgaccagccacttacccacaggagccacatccaactcggctctcagctgaggaagcagcccatcgccttgcacgcctggacactaactcacctagcatcttccagcacctggacgaactcaaggcattcttcgcagaggttgtcagtgatggtgtacccctggtgctagccctggtcccccaccggcagccccactccttcatcacccagggttccccagacctgttggtgactgtgagtgccagtgggctgctgggcacccacagctggttgccctatgaccgcaacataagcaactacttcagcttcagcaaagaccccaccatgggcagccacaagacgcagcgactgctgagtggcccgtgggtgccaggcagtggtgtgagtggacaagcactggcagtggccccggatggaaagctgctattcagcggtggccactgggatggcagcctgcgggtgactgcactaccccgtggcaagctgttgagccagctcagctgccaccttgatgtagtaacctgccttgcactggacacctgtggcatctacctcatctcaggctcccgggacaccacgtgcatggtgtggcggctcctgcatcaggtgtgcctcgtgggcagctctgtggggcccccgtagcccagacctgcagcccatccgtccctcagtggccttccagtcctgtcctcctctagtc

SEQ ID NO: 1122 - DNA, 4619 bp, Homo sapiens
agttgcagcggccggggaagatggtggaggacggcgcggaggagctggaggatctggtgcacttctccgtgtctgagttgcctagtcgcggctacggcgtcatggaggagatccggcggcagggcaagctgtgcgacgtgaccctcaagattggggaccacaaattcagtgcccaccggattgtcttagcagcctcgatcccgtatttccatgctatgtttacaaatgacatgatggagtgcaagcaggatgagattgtaatgcaaggaatggacccaagtgccctggaggctctgatcaactttgcctacaacggcaaccttgccattgaccagcaaaatgtccagtcattgctgatgggggcgagcttcctgcagctgcagagcatcaaagacgcctgctgcacattccttcgagaacggcttcacccaaaaaactgcctgggtgtgcgccagtttgctgagacaatgatgtgtgctgtgctgtacgacgctgccaacagcttcatccaccagcactttgtggaggtgtccatgtcagaagagttcctggccctgcccttggaagacgtgcttgagctggtgtctcgggatgagctgaatgtcaaatctgaggagcaggtctttgaagctgcattggcctgggtcagatacgaccgggagcagaggggtccctacctgcctgagctgctgtccaatatccgcctgcccctctgtcggccccagttcctttcagacagagtacagcaggatgacctggtgcgttgctgccacaaatgcagggacctggtagacgaagcaaaggactaccacctcatgccagagcgccggccccacctgccagctttcagaacccggccacgctgctgcacatccatcgctggacttatctacgctgtagggggcctcaactcagcaggtgattccctgaatgtggtggaagtgttcgaccccattgccaattgctgggagagatgccgtcccatgacaacagcccgcagccgcgttggcgtggctgtggtgaacgggcttctctatgccatcggaggatatgacggccagctacggctgagcactgtggaggcctacaacccggagacagacacatggaccagagtggggagcatgaatagcaagagaagtgccatggggacagtcgtgctggatgggcagatctacgtctgtgggggctacgatggcaactcttccctcagctccgtggagacctactcacctgagacggacaaatggacagtggtgacctcgatgagctcgaatcgcagtgctgctggggttacagtctttgagggcaggatatatgtgtcaggcggccatgatggtttgcagatcttcagcagtgtggaacactacaaccaccacacagccacctggcaccctgcagctggcatgctcaacaagcgctgccggcacggagccgcctccctggggagcaagatgtttgtctgcgggggctacgatggctctggcttcctcagcattgccgagatgtacagctctgtggcagaccagtggtgcctgattgtccccatgcacacgcgcaggagccgggtctccctggtggccagctgtgggcgcctctacgctgttgggggctacgacggacagtcaaacctaagctcagtggagatgtatgacccagagacagactgctggacattcatggcccccatggcgtgccatgagggaggggtcggtgtgggctgcatccctctcctcaccatctaaggcagaggatgggatgtggtggggcagggatctggtacagacataggcgcttccttccaggaacagtccctcaggagaggcagtggaccagaagagatggcgaaacgtgagctcgccggaggtacagtttttccaggtgcttaagccctcccccactgtgccacccttgtgaccttcaggcttgggtcatcaagatgcacagcatggaacacaagctcctctggatcctgcagctggtgacatggaactgttttctggtccacatgaacacaggctccatccaggcccagctcctacccaccgcctctctgtgggccagctgttcacagaaggccttccatctgatgctccccatcgcctgcttgctctccagccgagtctggccaatttgccatggggaggctgcagtgtccaagcctgctggaaactgggatgtagctggggacgaaaggacagacccaagcgttctccctgcctgagatggtgtggccacagcagtggaaggctgcacacaggcacattccttcttccacagtggggcaccaaggattctgtcctcattgctgggtaagcagggagaagagaagttttccccatgtctaattttgggatttcagtgaggccttttgatctgtccaggagaacagaagggaaaaaaagatacttgaaagaaactgaaggaaatttaaacaaagaaacacttgaaagaaactggaaagaaaaataatttttttatgtgaacaaattttgcaagaagaaaaaagcataaaagacactaacggcaaatctatgtttaaatggaaaatcgtctaactggagaagggcggtatccaccccacattcggatcccagggtcctgaggcctcgcattgagctgggggttccctctgagccccagtgtgtgtggaatcagtgcactcttgactgggcctgtagtaaggtgctcatggggtttgtcttctcacccaccatcagaggacttttaaaatcataggcgtagagagttaggctatctgctgaattactgccactcttcttggtgggggctcctagctgtggctgggggctccaggcgcccctgtgattacctcctactgccaccatggcgctcattcagattccccactctcactaacattgcttccttttttgaccagcaggaaacagcaggtctggccagattctcacttgcccatcaatctcgttcttggatgatttccctcattgtgatgcttctggggcacgttgaccatatgcacctctagaacctaaccagggcttccttctaccagctgtgggcgggcttggtctggtaaccttgtctgctctgccattccactgctcctccatccactcgccaatcccaagagtctggcctccctccagccctgggcagactgaccagcaaggtggacctttacattcaagcacagctggcttttatgacataaagaactaaaggccgaaagaatctcttgctgctgcaaagaacagattttatatttcttcctctaatcttggcaaatgacctttaccttttggaaagatttcatattgcttcctcctccctggataggacctaatgtagcacagcgggactcaaagaggaggacattttctcttgccagtgcactgggcagtggggctgtccttcaactgctgctgccaaaattggttttctaaaattcttccagtagagactaaaagaagattcaattcctgtaacccaagactgagtcttagggctccagtctccacctgcttggtttcctatcctttgctgcctgcctggggtggcctggaagcctgttcagaaaggcacaatgtggagcctggggtgtctcccccaccccaggaccgtcaggtttaccagtgtgtgcaatcgccatgtattcagagggaagtacctttgttacctacaacttaggagctaggcctctgctacaagcacttgaaaatgatatttttatttttaacgtctcaacaatctgatatcggatgtcgtttaacctgggctcgtggtagggctccagcatttctccctccttcctggtttgcctgtaggggtagactcggaaggtgggtggggtgtgcatttcctgttaggagtgtatcagtgcttgtcttattataagcccctttcttttgtgaatttgaagtagcaccaacaagcctggattgtgaaggtattaagaatcggtctgtgggctactgagtgggtccttaggatactggcccagattttgccactgggtatggcagatcattttctaccatggcctgctgctcttgtagtggacttcctgagtccaatcccacctcctggtgtagaatttacactgctgcacctgaggtcgatgtttcaaagtaagatcaagccagtgttttgatctgggctctgagcacaagtcaggaaacaccaacatattcacactctcccagtaggttcctcagtccgatggtgaatggctattcgtaaatggctggtctggctctttggtgttggagcctttccaatagccccatgaaaagaagcatcacccaaggatattgtaaaaaggatgtaacaaggagatagggtagacattgtactcagtgggccttggggcctagcccagctctgagcagaggactgtggcattcactgtccttgagtgtttcaccttcttggataacacacgggccttctcttctggatttcatcagagattacagccagatgggggctgaagaccatcctcttgaccacagaggtgtgactgtgggaattcctcccaatttatggtttcccagaaaatcttagttccttttatttatagaatgcatgtcttttgtgttaagaaaccaaagagaaataaagagaacactcctaat

SEQ ID NO: 1123 - DNA, 4227 bp, Homo sapiens
agagagggagggcgccacgcaccggactgcgggccgagagcgcgcacgccgcgctccgcccctgctgccgcccccgtcgccgccgccgccgccgccgcagcttgggaggtgctgccaccacaggtacctgcacatgttgttctttgtcagtgctgtcaagtgtgtgccagggtgatccatggtcactttccgggatggcagcaaggtgacttcggctgaggatgaccctgactgaaaggctgcgtgagaagatatctcgggccttctacaaccatgggctcctctgtgcatcctatcccatccccatcatcctcttcacagggttctgcatcttagcctgctgctacccactgctgaaactccccttgccaggaacaggacctgtggaattcaccacccctgtgaaggattactcgcccccacctgtggactctgaccgcaaacaaggagagcctactgagcagcctgagtggtatgtgggtgccccggtggcttatgtccagcagatatttgtgaagtcctcagtgtttccctggcacaagaacctcctggcagtagatgtatttcgttcacctttgtcccgggcattccaactggtggaggagatccggaaccacgtgctgagagacagctctgggatcaggagcttggaggagttgtgtctgcaagtgaccgacctgctgccaggccttaggaagctcaggaacctactccctgagcatggatgcctgctgctgtcccctgggaacttctggcagaatgactgggaacgcttccatgctgatcctgacatcattgggaccatccaccagcacgagcctaaaaccctgcagacttcagccacactcaaagacttgttatttggtgttcctgggaagtacagcggggtgagcctctacaccaggaagaggatggtctcctacaccatcaccctggtcttccagcactaccatgccaagttcctgggcagcctgcgtgcccgcctgatgcttctgcaccccagccccaactgcagccttcgggcggagagcctggtccacgtgcacttcaaggaggagattggtgtcgctgagctcatcccccttgtgaccacctacatcatcttgtttgcctacatctacttctccacgcggaagatcgacatggtcaagtccaagtgggggctggccctggctgccgtggtcacagtgctcagctcgctgctcatgtctgtgggactctgcacactcttcggcctgacgcccaccctcaatggcggcgagattttcccctaccttgtggtggttattgggttagagaatgtgttggtgctcaccaagtctgtggtctcaaccccggtagacctggaggtgaagctgcggatcgcccaaggcctaagcagcgagagctggtccatcatgaagaacatggccacggagctgggcatcatcctcatcggctacttcaccctagtgcccgccatccaggagttctgtctctttgctgtcgtggggctggtgtctgacttcttccttcagatgctgtttttcaccactgtcctgtccattgacattcgccggatggagctagcagacctgaacaagcgactgccccctgaggcctgcctgccctcagccaagccagtgggacagccaacgcgctacgagcggcagctggctgtgaggccgtccacaccccacaccatcacgttgcagccgtcttccttccgaaacctgcggctccccaagaggctgcgtgttgtctacttcctggcccgcacccgcctggcacagcgcctcatcatggctggcaccgttgtctggattggcatcctggtatacacagacccagcagggctgcgcaactacctcgctgcccaggtgacggaacagagcccattgggtgagggagccctggctcccatgcccgtgcctagtggcatgctgccccccagccacccggaccctgccttctccatcttcccacctgatgcccctaagctacctgagaaccagacgtcgccaggcgagtcacctgagcgtggaggtccagcagaggttgtccatgacagcccagtcccagaggtaacctgggggcctgaggatgaggaactttggaggaaattgtccttccgccactggccgacgctcttcagctattacaacatcacactggccaagaggtacatcagcctgctgcccgtcatcccagtcacgctccgcctgaacccgagggaggctctggagggccggcaccctcaggacggccgcagtgcctggcccccaccggggcccatacctgctgggcactgggaagcaggacccaagggcccaggtggggtgcaggcccatggagacgtcacgctgtacaaggtggcggcgctgggcctggccaccggcatcgtcttggtgctgctgctgctctgcctctaccgcgtgctatgcccgcgcaactacgggcagctgggtggtgggcccgggcggcggaggcgcggggagctgccctgcgacgactacggctatgcgccacccgagacggagatcgtgccgcttgtgctgcgcggccacctcatggacatcgagtgcctggccagcgacggcatgctgctggtgagctgctgcctggcaggccacgtctgcgtgtgggacgcgcagaccggggattgcctaacgcgcattccgcgcccagggcagcgccgggacagtggcgtgggcagcgggcttgaggctcaggagagctgggaacgactttcagatggtgggaaggctggtccagaggagcctggggacagccctcccctgagacaccgcccccggggccctccgccgccttccctcttcggggaccagcctgacctcacctgcttaattgacaccaacttttcagcgcagcctcggtcctcacagcccactcagcccgagccccggcaccgggcggtctgtggccgctctcgggactccccaggctatgacttcagctgcctggtgcagcgggtgtaccaggaggaggggctggcggccgtctgcacaccagccctgcgcccaccctcgcctgggccggtgctgtcccaggcccctgaggacgagggtggctcccccgagaaaggctccccttccctcgcctgggcccccagtgccgagggttccatctggagcttggagctgcagggcaacctcatcgtggtggggcggagcagcggccggctggaggtgtgggacgccattgaaggggtgctgtgctgcagcagcgaggaggtctcctcaggcattaccgctctggtgttcttggacaaaaggattgtggctgcacggctcaacggttcccttgatttcttctccttggagacccacactgccctcagccccctgcagtttagagggaccccagggcggggcagttcccctgcctctccagtgtacagcagcagcgacacagtggcctgtcacctgacccacacagtgccctgtgcacaccaaaaacccatcacagccctgaaagccgctgctgggcgcttggtgactgggagccaagaccacacactgagagtgttccgtctggaggactcgtgctgcctcttcacccttcagggccactcaggggccatcacgaccgtgtacattgaccagaccatggtgctggccagtggaggacaagatggggccatctgcctgtgggatgtactgactggcagccgggtcagccatgtgtttgctcaccgtggggatgtcacctcccttacctgtaccacctcctgtgtcatcagcagtggcctggatgacctcatcagcatctgggaccgcagcacaggcatcaagttctactccattcagcaggacctgggctgtggtgcaagcttgggtgtcatctcagacaacctgctggtgactggcggccagggctgtgtctccttttgggacctaaactacggggacctgttacagacagtctacctggggaagaacagtgaggcccagcctgcccgccagatcctggtgctggacaacgctgccattgtctgcaactttggcagtgagctcagcctggtgtatgtgccctctgtgctggagaagctggactgagcgcagggcctccttgcccaggcaggaggctggggtgctgtgtgggggccaatgcactgaacctggacttgggggaaagagccgagtatcttccagccgctgcctcctgactgtaataatattaaacttttttaaaaaaccatatcatcatctgtcaggcactttggga

SEQ ID NO: 1124 - protein, 1278 aa, Homo sapiens
MTLTERLREKISRAFYNHGLLCASYPIPIILFTGFCILACCYPLLKLPLPGTGPVEFTTPVKDYSPPPVDSDRKQGEPTEQPEWYVGAPVAYVQQIFVKSSVFPWHKNLLAVDVFRSPLSRAFQLVEEIRNHVLRDSSGIRSLEELCLQVTDLLPGLRKLRNLLPEHGCLLLSPGNFWQNDWERFHADPDIIGTIHQHEPKTLQTSATLKDLLFGVPGKYSGVSLYTRKRMVSYTITLVFQHYHAKFLGSLRARLMLLHPSPNCSLRAESLVHVHFKEEIGVAELIPLVTTYIILFAYIYFSTRKIDMVKSKWGLALAAVVTVLSSLLMSVGLCTLFGLTPTLNGGEIFPYLVVVIGLENVLVLTKSVVSTPVDLEVKLRIAQGLSSESWSIMKNMATELGIILIGYFTLVPAIQEFCLFAVVGLVSDFFLQMLFFTTVLSIDIRRMELADLNKRLPPEACLPSAKPVGQPTRYERQLAVRPSTPHTITLQPSSFRNLRLPKRLRVVYFLARTRLAQRLIMAGTVVWIGILVYTDPAGLRNYLAAQVTEQSPLGEGALAPMPVPSGMLPPSHPDPAFSIFPPDAPKLPENQTSPGESPERGGPAEVVHDSPVPEVTWGPEDEELWRKLSFRHWPTLFSYYNITLAKRYISLLPVIPVTLRLNPREALEGRHPQDGRSAWPPPGPIPAGHWEAGPKGPGGVQAHGDVTLYKVAALGLATGIVLVLLLLCLYRVLCPRNYGQLGGGPGRRRRGELPCDDYGYAPPETEIVPLVLRGHLMDIECLASDGMLLVSCCLAGHVCVWDAQTGDCLTRIPRPGQRRDSGVGSGLEAQESWERLSDGGKAGPEEPGDSPPLRHRPRGPPPPSLFGDQPDLTCLIDTNFSAQPRSSQPTQPEPRHRAVCGRSRDSPGYDFSCLVQRVYQEEGLAAVCTPALRPPSPGPVLSQAPEDEGGSPEKGSPSLAWAPSAEGSIWSLELQGNLIVVGRSSGRLEVWDAIEGVLCCSSEEVSSGITALVFLDKRIVAARLNGSLDFFSLETHTALSPLQFRGTPGRGSSPASPVYSSSDTVACHLTHTVPCAHQKPITALKAAAGRLVTGSQDHTLRVFRLEDSCCLFTLQGHSGAITTVYIDQTMVLASGGQDGAICLWDVLTGSRVSHVFAHRGDVTSLTCTTSCVISSGLDDLISIWDRSTGIKFYSIQQDLGCGASLGVISDNLLVTGGQGCVSFWDLNYGDLLQTVYLGKNSEAQPARQILVLDNAAIVCNFGSELSLVYVPSVLEKLD

SEQ ID NO: 1125 - DNA, 1574 bp, Homo sapiens
gttctcttcgcccggtccctgccgcgcacaggcctcggggtcggcgggagcacgatggcggccgctaggagactcatggcgctggccgccggcatctctccgcgcctgcagccgctgggtccccgcgctgctgggcgacagggtcgctcgcgcggcttctcttcaagctgcgcccaccccgaccacaccaaggaagccgccgaggccgagtcagggatggcccccggcgggcctggggaaggcgacggaagcttggtgaacgcttctagggacctattaaaagagttcccacagcccaaaaatcttctcaacagtgtgattggaagagccctcggcatctcacatgcaaaagacaaactagtctacgtgcacacaaatggaccgaagaaaaagaaagtcacactgcacataaaatggcccaagagcgtggaggtagaaggctatggcagcaagaagatcgatgctgagcggcaggctgcagctgcagcctgccagctgttcaagggttggggtctgctaggtccccggaatgagttgtttgacgcagccaaataccgagtgctagctgatcgctttggctcccctgccgacagctggtggcgtccggaacccaccatgccccctacttcctggcggcagctgaatccagagagtattcgaccagggggacctgggggcctatcccgctctttaggccgggaagaagaggaggacgaggaggaagagctagaagaagggaccatagatgttaccgacttcttgtccatgacccagcaggattcccacgctccactcagggactcaagggggagttcctttgagatgacagatgacgacagtgccattagggctctgacccagtttccacttcccaagaaccttctggccaaggtgattcagattgcaacgtcatcctccacagctaagaacctcatgcagttccatactgtgggcaccaagaccaagctgtctacactcaccctgctctggccctgccccatgacctttgttgccaaagggcgccgcaaagcagaggctgagaataaggcggcagccttggcctgcaagaaactgaagagcctgggcctggtggacaggaacaacgaaccgcttacacacggttacggagccgatggctgacgtatttcatggcagtcaagtccaatggcagcgtcttcgtccgggactcctctcaggtgcacccgctagctgtgctgctgctgaccgacggggacgtgcacatccgtgatgacgggcgccgggccaccatctcactgagcgacagtgacctgctgcggctggagggtgactcgcgtaccgtgcggctgctgaaggagctgcggcgggccctgggccgcatggtggagcggagcctgcgcagcgagctggctgcacttccccccagcgtacaggaggagcacgggcagctgcttgcgctactggcagagctgctgcgaggaccctgtggcagctttgatgtgcgcaagacagctgacgactgagccctgcttctgctggggctgtgtacagagtgcaaatgtttatttaaaataaagttctatttatcccttgtg

SEQ ID NO: 1126 - protein, 361 aa, Homo sapiens
MAAARRLMALAAGISPRLQPLGPRAAGRQGRSRGFSSSCAHPDHTKEAAEAESGMAPGGPGEGDGSLVNASRDLLKEFPQPKNLLNSVIGRALGISHAKDKLVYVHTNGPKKKKVTLHIKWPKSVEVEGYGSKKIDAERQAAAAACQLFKGWGLLGPRNELFDAAKYRVLADRFGSPADSWWRPEPTMPPTSWRQLNPESIRPGGPGGLSRSLGREEEEDEEEELEEGTIDVTDFLSMTQQDSHAPLRDSRGSSFEMTDDDSAIRALTQFPLPKNLLAKVIQIATSSSTAKNLMQFHTVGTKTKLSTLTLLWPCPMTFVAKGRRKAEAENKAAALACKKLKSLGLVDRNNEPLTHGYGADG

SEQ ID NO: 1127 - DNA, 2414 bp, Homo sapiens
cgaaaggccggcctggctgcgacagcctgggtaagaggtgtaggtcggcttggttttctgctacccggagctgggcaagcgggtgggagaacagcgaagacagcgtgagcctgggccgttgcctcgaggctctcgcccggcttctcttgccgacccgccacgtttgtttggatttaatcttcaggttgccggcgcccgcccgcccgctggcctcgcggtgtgagagggaagcacccgtgcctgtggctggtggctggcgcctggagggtccgcacacccgcccggccgcgccgcttgcccgcggcagccgcgtccctgaaccgcggagtcgtgtttgtgtttgacccgcgggcgccggtggcgcgcggccgaggccggtgtcggcggggcggggcggtcgcggcggaggcagaggaagagggagcgggagctctgcgaggccgggcgccgccatggaactgggcccggagcccccgcaccgccgccgcctgctcttcgcctgcagcccccctcccgcgtcgcagcccgtcgtgaaggcgctatttggcgcttcagccgccgggggactgtcgcctgtcaccaacctgaccgtcactatggaccagctgcagggtctgggcagtgattatgagcaaccactggaggtgaagaacaacagtaatctgcagagaatgggctcctccgagtcaacagattcaggtttctgtctagattctcctgggccattggacagtaaagaaaaccttgaaaatcctatgagaagaatacattccctacctcagaagctgttgggatgtagtccagctctgaagaggagccattctgattctcttgaccatgacatctttcagctcatcgacccagatgagaacaaggaaaatgaagcctttgagtttaagaagccagtaagacctgtatctcgtggctgcctgcactctcatggactccaggagggtaaagatctcttcacacagaggcagaactctgccccagctcggatgctttcctcaaatgaaagagatagcagtgaaccagggaatttcattcctctttttacaccccagtcacctgtgacagccactttgtctgatgaggatgatggcttcgtggaccttctcgatggagagaatctgaagaatgaggaggagaccccctcgtgcatggcaagcctctggacagctcctctcgtcatgagaactacaaaccttgacaaccgatgcaagctgtttgactccccttccctgtgtagctccagcactcggtcagtgttgaagagaccagaacgatctcaagaggagtctccacctggaagtacaaagaggaggaagagcatgtctggggccagccccaaagagtcaactaatccagagaaggcccatgagactcttcatcagtctttatccctggcatcttcccccaaaggaaccattgagaacattttggacaatgacccaagggaccttataggagacttctccaagggttatctctttcatacagttgctgggaaacatcaggatttaaaatacatctctccagaaattatggcatctgttttgaatggcaagtttgccaacctcattaaagagtttgttatcatcgactgtcgatacccatatgaatacgagggaggccacatcaagggtgcagtgaacttgcacatggaagaagaggttgaagacttcttattgaagaagcccattgtacctactgatggcaagcgtgtcattgttgtgtttcactgcgagttttcttctgagagaggtccccgcatgtgccggtatgtgagagagagagatcgcctgggtaatgaataccccaaactccactaccctgagctgtatgtcctgaaggggggatacaaggagttctttatgaaatgccagtcttactgtgagccccctagctaccggcccatgcaccacgaggactttaaagaagacctgaagaagttccgcaccaagagccggacctgggcaggggagaagagcaagagggagatgtacagtcgtctgaagaagctctgagggcggcaggaccagccagcagcagcccaagcttccctccatccccctttaccctctttgctgcagagaaacttaagcaaaggggacagctgtgtgacatttggagagggggcctgggacttccatgccttaaacctacctcccacactcccaaggttggagcccagggcatcttgctggctacgcctcttctgtccctgttagacgtcctccgtccatatcagaactgtgccacaatgcagttctgagcaccgtgtcaagctgctctgagccacagtgggatgaaccagccggggccttatcgggctccagccatctcatgaggggagaggagacggaggggagtagagaagttacacagaaatgctgctggccaaatagcaaaga

SEQ ID NO: 1128 - DNA, 615 bp, Homo sapiens
gaattccggccatgaagacccaaaggaatggccactccctggggcggtggtcactggtgctcctgctgctgggcctggtgatgcctctggccatcattgcccaggtcctcagctacaaggaagctgtccttcgtgctatagatggcatcaaccagcggtcctcggatgctaacctctaccgcctcctggacctggaccccaggcccacgatggatggggacccagacacgccaaagcctgtgagcttcacagtgaaggagacagtgtgccccaggacgacacagcagtcaccagaggattgtgacttcaagaaggacgggctggtgaagcggtgtatggggacagtgaccctcaaccaggccaggggctcctttgacatcagttgtgataaggataacaagagatttgccctgctgggtgatttcttccggaaatctaaagagaagattggcaaagagtttaaaagaattgtccagagaatcaaggattttttgcggaatcttgtacccaggacagagtcctagtgtgtgccctaccctggctcaggcttctgggctctgagaaataaactatgagagcaatttcaaaaaaaaaaaaaaaaaaaaaccggaattc

SEQ ID NO: 1129 - protein, 170 aa, Homo sapiens
MKTQRNGHSLGRWSLVLLLLGLVMPLAIIAQVLSYKEAVLRAIDGINQRSSDANLYRLLDLDPRPTMDGDPDTPKPVSFTVKETVCPRTTQQSPEDCDFKKDGLVKRCMGTVTLNQARGSFDISCDKDNKRFALLGDFFRKSKEKIGKEFKRIVQRIKDFLRNLVPRTES

SEQ ID NO: 1130 - DNA, 2374 bp, Homo sapiens
cgtgcgtgcgcgcgcagatgtgggccccgcgggagcagctactgggctggactgcggaagctctgcctgccaaggattctgcctggccctgggaagagaagcctagatatctggttccagtggcagatggggcactggccagaggggttaggaggatttggactctccttgggagtcgctgtgatacggccttcaattatagttgtctttccttcttggatttccaccacttccctgaaaccacgagctggaagctgagaccagctggtcactgctgggcctgctaggagcccacacggaagctgcccacagccagacaccagagcctcaaaggccgccatcttgaaaaaccaaccctgacctccacaatgattgattttcaaatgttgaaccagctttgcagaactataataaacccaagtgtgataccctgtctcaagtattgtggtgatcaaataggaccagtgactttcgaggatgtggctgtgcttttcactgaggcagagtggaagagactgagccttgagcagaggaacctatacaaagaagtgatgctggaaaatctcaggaatctggtctcattggaatcaaagccagaagtccatacctgcccttcttgccctctggcctttggcagtcagcagttcctcagccaagatgagctacacaatcatcctattccaggtttccatgcaggaaatcaactccacccaggaaatccctgcccagaggatcagccacagtcacaacatccttctgataaaaatcacaggggggctgaagcagaagatcaacgagtggaaggaggcgtcagacccttgttttggagtacaaatgaaaggggggctttagtgggtttctctagcctgttccagagaccaccaataagctcttggggaggcaacagaatattagagatacagctcagtccagcccagaatgcaagctctgaggaagtagacagaatttccaagagggcagaaaccccagggtttggagcagtcacgtttggggagtgtgcactagcttttaaccagaagtcaaacctgttcagacagaaggcagtcacagcagaaaaatcttcagacaaaaggcagtcacaggtgtgcagggagtgtgggcgaggctttagcaggaagtcacagctcatcatacaccagaggacacacacaggagaaaagccttatgtctgcggagagtgtgggcgaggctttatagttgagtcagtcctccgcaaccacctgagtacacactccggggagaaaccttatgtgtgcagccattgtgggcgaggctttagctgcaagccatacctcatcagacatcagaggacacacacaagggagaaatcgtttatgtgcacagtgtgtgggcgaggctttcgtgaaaagtcagagctcattaagcaccagaggtgtcaagtgacggtccccttggaggaatggtctttgcatctgactacttccttctgcaactgtgttcttccattagcttccatgacactctcctgctttatttttttctacatctctagcctttgctgtttcctctcctaccccacctttagattttactcagagttcagtctccagccctacaatctgagggacacctttaccaggtccccttcctaaccctccagtcccaaatccaagattctttaaccacactctaaaagttcttcagactcaggacttaaacatagccacgccaccttggccttcaatgacagggatctagcaatgctgcatcatcagccttccaataccaggtttaagggtattttaaacacagctcctcttaaatcctccaatctcagtacccagtgttttagccatgctcgggtggctaaattacatccaggaatggtgccagggcctttagccatttgtctctcctcacactccagggcccatatggcccaggttctgacagtttgccttactcccttgggctggggctagccctacctgataccctgtgtcaatgagtgtaccttggagagctatccactcaggccccagtgcctctatttgctaagggactctgccacagaaaagaaggggagagatgttcatgtaacctcaaaatacttaggcttggttttgatgctagagaggaaaaaggacttggagagagagaaggaatggctggtccagaggcttttgtccactccctctcactggaagtggttgatctccagggaatccccaaggttagcctgcttaggggaagggctaggggtacctggaatgtaggatctcccccatgcctggcctaccaccctaatgtgtctggaattggtgggttcttggtcttgctgacttcaagaatgaagccgtggaccctcacggtgagtgttacaattcttaaa

SEQ ID NO: 1131 - DNA, 1670 bp, Homo sapiens
cagcgtgcctgccagtgtagagccggtggagcagctgggctcggcgctgaggtttcgccctggctacaacgaccccatgtcagggttcggagcgaccttggccgttggcctgaccatctttgtgctgtctgtcgtcactatcatcatctgcttcacctgctcctgctgctgcctttacaagacgtgccgccgaccacgtccctccaagtgtgccgcccagctaccctggaccaagctaccagggctaccacaccatgccgcctcagccagggatgccagcagcaccctacccaatgcagtacccaccaccttacccagcccagcccatgggcccaccggcctaccacgagaccctggctggaggagcagccgcgccctaccccgccagccagcctccttacaacccggcctacatggatgccccgaaggcggccctctgagcattccctggcctctctggctgccacttggttatgttgtgtgtgtgcgtgagtggtgtgcaggcgcggttccttacgccccatgtgtgctgtgtgtgtccaggcacggttccttacgccccatgtgtgctgtgtgtgtcctgcctgtatatgtggcttcctctgatgctgacaaggtggggaacaatccttgccagagtgggctgggaccagactttgttctcttcctcacctgaaattatgcttcctaaaatctcaagccaaactcaaagaatggggtggtggggggcaccctgtgaggtggcccctgagaggtgggggcctctccagggcacatctggagttcttctccagcttaccctagggtgaccaagtagggcctgtcacaccagggtggcgcagctttctgtgtgatgcagatgtgtcctggtttcggcagcgtagccagctgctgcttgaggccatggctcgtccccggagttgggggtacccgttgcagagccagggacatgatgcaggcgaagcttgggatctggccaagttggactttgatcctttgggcagatgtcccattgctccctggagcctgtcatgcctgttggggatcaggcagcctcctgatgccagaacacctcaggcagagccctactcagctgtacctgtctgcctggactgtcccctgtccccgcatctcccctgggaccagctggagggccacatgcacacacagcctagctgcccccagggagctctgctgcccttgctggccctgcccttcccacaggtgagcagggctcctgtccaccagcacactcagttctcttccctgcagtgttttcattttattttagccaaacattttgcctgttttctgtttcaaacatgatagttgatatgagactgaaacccctgggttgtggagggaaattggctcagagatggacaacctggcaactgtgagtccctgcttcccgacaccagcctcatggaatatgcaacaactcctgtaccccagtccacggtgttctggcagcagggacacctgggccaatgggccatctggaccaaaggtggggtgtggggccctggatggcagctctggcccagacatgaatacctcgtgttcctcctccctctattactgtttcaccagagctgtcttagctcaaatctgttgtgtttctgagtctagggtctgtacacttgtttataataaatgcaatcgtttgg

SEQ ID NO: 1132 - DNA, 11965 bp, Homo sapiens
agcgaaccatcggggcggccgggagccatgttggagcggcgggaggcggcagcagcgtcggggatgctgtggtgggggcggaaaaagccagggccgcacgccggaggggctccggccgcggagtagatggtgcccagagggcggcgggggtgcggagagacaggcggaggggcgggggcccggggcggcggcaggggcccgggagggggcccgagcggcggggccagcccaaggcccggaccggggcggggggcggtggaggccgtgcagggaggcgggagatgatggcgaggcggccgccgtggcggggcctcggggaacggtcgacccccatactcctgctccttctcctctctttgttccccctcagccaggaggagctggggggcggtgggcaccagggctgggacccaggcttagctgccactacggggccaagggcgcatatcggtggcggagccttagctctttgtccggagtcttccggggtccgggaggatggggggcctggcctgggggtcagggagcctatcttcgtggggctccgagggagaaggcaaagcgcccggaatagtcgagggccccctgagcagccgaatgaggagctggggattgaacacggcgtccagccattgggcagccgcgaacgagagacaggacagggaccagggtctgtgttatactggcgcccagaggtctcctcttgcgggcggacaggacctttgcaaagaggtagtctgtcaccaggggctctgtcctcaggggtcccgggctcggggaacagctcgcccctcccttcagactttttgattcggcaccacggtcccaagccggtgtcctcccagcggaacgctgggacaggctcccgcaaaagagtgggcaccgcgcgctgctgtggggaattatgggcaacagggagcaagggtcagggcgagagagccacgacatccggagcagaaaggacagccccccggcggaactgtcttccaggggcctcgggatctggccccgagctggattcagcaccacgcacggcgaggacagctcctgcatcaggttcagcaccccgcgagtctcggacagctcccgagccggcgcccaagcgcatgcgctcccggggtctcttccgctgccgcttcctcccgcagcgccccgggccgcgtcccccgggactcccggcccgtcctgaagccaggaaagtaacctcggcgaaccgggcacgctttcgtcgcgccgcaaaccgccacccgcagtttccgcagtacaactaccagacgctggtgccggagaatgaggcagcaggcaccgcggtgctacgcgtggttgctcaggacccggacgccggcgaggccgggcgcctagtctactcgctggcggcactcatgaacagccgctcgctggagctgttcagcatcgacccgcagagcggccttatccgtacggcggcagctctggaccgcgagagcatggagcgtcactacctgcgtgtgaccgcgcaggaccacgggtcgccgcgcctctcggccaccacgatggtggccgtgacagtagccgaccgcaacgaccactcgccggtttttgagcaagcgcagtaccgggagacccttcgcgagaatgtggaggagggctaccctatcctgcagctgcgtgccactgacggcgacgcgccccccaacgccaacctgcgctaccgcttcgtggggccgccagctgcgcgcgctgcagctgccgccgccttcgagattgatccacgctccggcctcatcagcaccagcggccgagtggaccgcgagcacatggaaagctatgagctggtggtggaagccagcgaccagggccaggaacccgggccgcgctcggccactgtgcgcgtacacataactgtgctagacgagaacgacaatgctcctcagttcagcgagaagcgctacgtggcgcaggtgcgcgaggatgtgcgcccccacacagtcgtgctgcgcgtcacggccactgaccgggacaaggacgccaacggattggtgcactacaacatcatcagtggcaatagccgtggacactttgccatcgacagcctcactggcgagatccaggtggtggcacctctggacttcgaggcagagagagagtatgccttgcgcatcagggcgcaggatgctggccggccaccgctgtccaacaacacgggcctggccagcatccaggtggtggacatcaatgaccacattcctatttttgtcagcacgcccttccaagtttctgtcttggaaaatgctcccttgggtcactcagtcatccacattcaggcagtcgatgcagaccatggggagaatgccagattggagtactccctaactggtgtggcacctgatactccttttgtgataaacagcgccactggctgggtctctgtgagtggtcccctggaccgtgagtctgtggagcattacttctttggtgtggaggctcgagaccatggctcacccccactctctgcctcagccagtgtcaccgtgactgtgctggacgttaatgacaatcggcctgagttcacaatgaaggagtaccacctacgactgaatgaggatgcagctgtgggcaccagtgtggtcagcgtgaccgcagtagaccgtgatgccaacagtgccatcagctaccagatcacaggcggcaacacccggaatcgctttgccatcagcacccaggggggtgtgggtctggtgactctggctctgccactggactacaagcaggaacgctacttcaagctggtactaactgcatctgaccgtgcccttcatgatcactgctatgtgcacatcaacatcacagatgccaacactcatcggccggtctttcaaagtgcccactactcagtgagtgtgaatgaagatcggccaatgggtagcaccatagtggtcatcagtgcctctgatgatgacgtgggtgagaatgctcgtatcacctatctcctggaggacaacctgccccagttccgcattgatgcagactcaggagccattacattacaggccccattagactatgaggaccaggtgacctacaccctggctatcacagctcgggacaatggcatcccacagaaggcagacactacttatgtggaggtgatggtcaatgacgtgaatgacaatgctccacaatttgtggcctcccactatacagggctggtctctgaggatgccccacctttcaccagtgtcctgcagatctcagccactgaccgggatgctcatgccaatggccgggtccagtacactttccagaatggtgaagatggggatggagattttaccattgagcccacctctggaattgtccgtacagtaaggcggctagaccgggaggcagtatcagtgtatgagttgactgcctacgcagtggacagaggtgtgcccccactccggactccagtcagtatccaggtgatggtgcaggatgtgaacgacaatgcacctgtcttcccagctgaggagtttgaggtgcgggtgaaagagaatagcattgtgggctcagtggtggcccagatcactgcagtggaccctgacgaaggccccaatgcccatataatgtaccagatcgtggaggggaacatccctgagctgttccaaatggacatcttctctggagaactgacggcactcattgacctagactatgaggctcgccaagaatatgtgattgtggtgcaggccacatctgctcctttggtcagccgggccactgtgcacgtccgcctggttgaccagaatgacaacagccctgtgctcaacaacttccagatcctcttcaacaactatgtatccaaccgttcagacaccttcccgtcgggcattattgggcgcatcccagcttatgaccccgatgtctccgaccacctcttctactcctttgagcgtggcaatgagctgcagctgctggtagtcaaccagaccagtggggagctgcgactcagccgaaagctagacaataaccgcccactggtggcctccatgttggtgactgtcacagatggcctgcacagcgtgacggcgcagtgtgtgctgcgcgtggtcatcatcacggaggagttgctggccaacagcctgaccgtgcgccttgagaacatgtggcaggagcgcttcctgtcaccgctgctgggccgcttcctcgagggcgtggctgcggtgctcgctacgcccgctgaggacgtcttcatcttcaacatccagaacgacacagacgtagggggcaccgtgctcaatgtgagtttctcggcgctagctccacgtggggccggggcgggcgctgcagggccctggttcagctccgaggagctgcaggagcagttgtacgtgcgccgggcggcgctggcggctcgctccctgctcgacgtactgcccttcgacgacaacgtgtgcctgcgagagccctgtgagaactacatgaaatgcgtgtccgtgctccgctttgactcgtccgcgcccttcctggcctcggcctccacgctgttccgacccatccagcccatcgctggcctgcgctgccgctgcccgcccggattcacgggagacttttgcgagaccgagctcgacctctgctactccaacccatgtcgcaacggcggagcctgcgcgcggcgcgagggaggctacacgtgcgtctgccgcccgcgcttcaccggagaggactgcgagctggacaccgaggccggccgctgcgtgccgggcgtctgccgcaacgggggcacctgcaccgacgcgcccaacggcggctttcgctgccagtgcccggcaggcggcgccttcgagggcccgcgctgcgaggtggctgcgcgctccttcccgcccagttcgttcgtcatgtttcgcggcctgcggcagcgattccaccttacgctgtccctctcgttcgcgacagtgcagcagagcgggctgctcttctacaacgggcgcctgaacgagaagcacgacttcctggccctggaactcgtggctggccaagtgcggctcacatattccacgggtgaatccaacaccgtggtcagccccacagttccagggggcttgagtgacgggcaatggcatacagtgcatctgagatactacaacaagccccggacagatgccctagggggtgcacagggcccctccaaggacaaggtggctgtgctaagcgtggatgattgtgatgtggccgtggctctgcagtttggtgctgagattggcaactactcatgcgcggctgctggtgtgcaaacaagctccaagaagtccctggacctgacgggccctcttcttctgggaggtgtccccaacctccccgagaacttccccgtatcccataaggacttcatcggctgtatgcgggacctgcacattgatggccgccgagtggacatggcggcttttgtcgcaaataatggcaccatggcaggctgccaagccaagctacacttttgtgactcaggcccctgcaagaacagtggcttctgctcggagcgctggggcagcttcagctgcgactgccctgtgggcttcggcggcaaagactgtcagcttactatggcccatccccaccatttccgtggcaacggcacactgagctggaactttggaagtgacatggctgtgtctgtgccatggtacctggggctggcatttcggacacgggcaacgcagggggtcctgatgcaagtgcaggctgggccacacagcacgctcctttgccagctagatcgggggttactgtctgtgacagtgaccaggggctcgggccgtgcttcccatctccttctggaccaggtgactgtcagtgatggccggtggcacgatctgcggctggagttgcaggaggaaccaggtggccggcggggccaccatgtccttatggtctcactggactttagcctcttccaggacaccatggcggtggggagtgagctgcagggcctgaaggtaaagcagctccacgtgggaggcctgccccccggcagtgcagaggaggctcctcagggtctggttggctgcatccagggggtgtggctcggctccacaccctctggctccccggccctgctaccccccagccaccgagtgaatgcggagcctggctgtgttgtgaccaacgcctgtgcctctgggccctgcccacctcacgcagactgccgggacctctggcagaccttttcttgcacctgccagccaggttactacggcccaggctgtgtggatgcctgcctcctgaacccctgtcagaaccagggatcatgccggcacctgccaggagccccccatggctatacctgtgactgtgtgggtggctatttcgggcaccactgtgagcacaggatggaccagcagtgcccacggggctggtgggggagcccaacctgtggcccctgcaactgtgatgttcacaaaggttttgatcccaactgcaacaagacaaatgggcagtgtcactgcaaggagttccactaccgaccgcggggcagtgactcttgcctcccatgtgactgctaccctgtgggctccacctcgcgctcatgtgcaccccacagcgggcagtgcccctgtcgcccaggagcccttggccgccagtgcaacagctgtgacagtcccttcgcagaggtgacagccagcggctgccgggtgctctatgatgcctgccctaagtccctgagatctggtgtgtggtggccccagacaaagtttggcgtcctggccacagtgccctgtccccggggggccctgggtgctgctgtgcggctgtgtgatgaggcccagggttggctggagcccgacctcttcaactgtacctcccctgcctttcgagagctcagtctgctgctggatggcctagagctgaacaagacggcactggataccatggaggccaagaagctggctcagcggctacgggaggtgactggccacactgaccactattttagccaagatgttcgagtcactgcccgcctgctggcccacctgctggccttcgagagccatcagcagggcttcgggctgacagccacacaggatgcccacttcaatgagaatctgctgtgggccggctctgcactgcttgccccagagacaggggacttgtgggcggcgctggggcagcgggcccctgggggctccccaggcagcgcgggactggtgaggcacctggaggagtatgcagccacactcgcaaggaatatggaactcacatacctgaatcccatggggctggtgacgcctaatatcatgctcagcattgaccgcatggagcaccccagttctccccggggggcccgtcgctaccctcgctaccatagcaacctctttcgaggccaggatgcctgggatcctcacacccatgtgctgctgccttcccagtccccacggccatccccatctgaagttctgcccacaagcagcagcatagaaaactccaccacctcaagtgtggtccccccaccagccccgccagagccagagcctgggatctccattatcattctcctcgtttaccgcaccttagggggactgctccctgcccagttccaggcagaacgccgaggtgccaggcttcctcagaaccccgtcatgaactccccggtggtcagcgtggctgtgttccacggacgcaacttcctaaggggaatcctggagtcccccatcagcctagagtttcgcctgctacagacagcgaatcggagcaaggcgatctgtgtgcagtgggacccacctggcctggcggagcagcatggtgtgtggacagcacgggactgcgagctggtgcacaggaatgggtcccacgcacggtgtcgctgcagccggacagggacctttggggtcctcatggatgcctctccccgtgagaggctggagggcgacctggagctgctggctgtgttcacccacgtggtcgtggctgtgtctgtggctgcgctggtgctgactgcagccatcctgctgagcctgcgcagcctcaagtccaatgtgcgtgggatccatgccaatgtggcagccgccctgggggtggcagagctcctcttcctgctggggattcacaggacccacaatcagctggtgtgcactgcagtcgccatcctcctgcactacttcttcctcagcaccttcgcgtggctcttcgtgcaggggctgcacctctaccgcatgcaggttgagccacgcaacgtggaccgcggcgccatgcgcttctaccatgccctgggctggggcgtccctgctgtgctgctgggccttgctgtgggcctggaccctgagggctatgggaaccctgacttctgctggatctcagtccacgagcccctcatctggagctttgctggccctgttgtcctggtcatagtgatgaacgggaccatgtttctcctcgctgcccgcacatcctgctccacagggcagagggaggccaagaagacctctgcactgacccttcgcagctccttcctgctgcttctgctggtcagtgcctcctggctctttgggctcctggcagtcaaccacagcatcctagccttccactacctccatgctggactctgcggcctccagggcctggcggtgctgctgctcttctgtgtcctaaatgcagatgctcgggctgcctggatgccagcctgtctgggcaggaaggcagcgcctgaggaggcaaggccagcacctgggctgggacctggggcctacaacaacacggctctctttgaggagagtggcctcatccgcatcactctgggcgcctccaccgtctcctctgtgagcagtgcccgctccggccggacccaggaccaggacagccagcggggccgcagctacctcagggacaatgtcctggttcgacatggctcagccgctgaccacactgaccacagcctccaggctcatgctggccccactgacctggacgtggccatgttccatcgagatgctggcgcagactccgactctgacagtgacctgtccttggaggaggagaggagtctctccattccatcttcagaaagcgaggacaatggccggacgcgggggcgcttccaacggccactctgccgagcagcccagagtgagaggctcctcacccaccccaaagatgtggatggcaatgacctcctgtcctactggccagccctgggggagtgcgaggcagccccctgtgctctgcagacttggggctctgaaaggcgcctggggctggacaccagcaaggatgcagctaacaacaaccagccagacccggccctgaccagtggggatgagacttctctgggccgggcccagcgccagaggaaaggcatcctgaagaaccggttgcaatacccactggtgccacagacccgaggtgcccctgagctgtcctggtgccgtgcagccaccttgggccaccgtgcagtgccagctgcctcttacggtcgcatctatgctggcgggggcacgggcagcctttcacagccagccagccgctactcttctagagaacagctggacctgctcctccggcggcaactgagccgtgagcgactagaggaagcccctgcccctgttctacgtcccctgagccggccagggtcccaggaatgcatggatgctgcaccaggccgactggagcccaaagatcggggcagcaccctgccacggaggcagccacctcgggactaccctggcgccatggctggccgcttcgggtcacgggatgcgctcgacttaggggcacctcgagagtggttgagcacgctgcctccgccccgccgcacccgggaccttgacccacagcccccacctctgcccctgtctccccagcggcaactctcaagggaccccctcttgccatcccggccgctggactctctgtctaggagctcgaactctcgggagcagctggaccaggtgcctagccggcacccctcacgagaagcccttgggccactcccgcagctgctcagagctagggaggactcggtcagtggccccagccatggcccctccacagaacagttggacattctttcctccatccttgcctctttcaactcctcggccctctcctctgtgcaatcttcaagcacacccttgggccctcacaccactgccacaccttctgccacagcctctgtgcttgggccctccacgccacgttctgccacgtctcacagcatctcggagctgtcgccagactcagaagttcccagaagtgagggtcactcctgaggggatgacggcgtggacgaggaacagctgagggcgacagaggatctaggctaacaggagagactccaggagtgggggcagatcccaaggcagcctcctgctccccagtggtgggtgccccagctctacctggtgtggcagggctgaggctccatgtgcatctgtgagcatgcgtgtgacaggtgcagagacgggggactggagggagacttttatacgttttgtacctttgtaaccagagagatgcttatgttatttttcagcttttctgtctcctggggggtttgaggctgggctgggagggggagggagatagagggagagatgcagtttgaccccatttgggtcctgagcaaaccctatgctcatctctctctccttcctggggtggactcagatgggtgggacacatgccttcctccccctattccacccccaagttgatctgagtatcgtcaggggcccaaagtacagaattgttctttgctttttattgaatgctccaaaggccaaacttctggggctgggggttggtcttggaaacaggggtcctctgacttcctcatgggggcttgctcataccgcccctcctggtggatgtgtgtgtttattatgtggagtccctgccacttactgccttatgacctaggactgatgctgtggggtgctggtggagcagctgatgtcgtgtttacagagcaaggcttccctgtctcccacggggaggggctcgggcctctagtcagacattcctgcagagggtcggtggaggggtcattcacctgcccctgcagcaagcaaaagttgtctgtggtgccatttgattccctgacactgccccctgcttgaattgattccgaagggtagggtgggaaggtgagcaaagggagcagaaacaagggaattcaagacccagaatgtaggtgccactgcctcctatgtttacaggatcctccgtggccctaggcacctgggctgcaggaagtgactccgttccactcctcctttattcccttaaaaagggaaaaatgactgttacgaccctgttcacaaaactcttacttttgctattttgtctgctgtccagaactgaagactttaaaattttgttactgtttacaagtccagattcaaaaaatgtttttactttgtttacaactcaaaactttgagttttacactttgtttacagtagataattttttttcctttgtttccaagtgaaaggtagggaaagtgggagagggacttggaggacccacctgtgaggaccctgacctggccatcttgaggggttttctaacccccaggtctcccaggccgaaggtcagccttgagtcccgtttaacagcagatccagaagaccttgagagtaggcgtcctctaaccacgggggagagtggctgtgcagggctggggggtggtctgtgcagacacctcctcacccaccaccccatgcatactcttgggaagcagcttcctgggagattagaaattctacttccctgactggagctaaatcccaccagccaggacccaaactctccttaccgagaaggaccccagctcttgaagggctgagtggcctgctgggggtgggagggtgtctttactatgtcctaggtttcgtagatgcccctctctggggttcccctcctccagcccagcggccctctttcctgtctgtgtaaattgttccgtgaagccgcgctctgttttgggaataaacttctatagaaaacaaaa

SEQ ID NO: 1133 - protein, 3312 aa, Homo sapiens
MMARRPPWRGLGERSTPILLLLLLSLFPLSQEELGGGGHQGWDPGLAATTGPRAHIGGGALALCPESSGVREDGGPGLGVREPIFVGLRGRRQSARNSRGPPEQPNEELGIEHGVQPLGSRERETGQGPGSVLYWRPEVSSCGRTGPLQRGSLSPGALSSGVPGSGNSSPLPSDFLIRHHGPKPVSSQRNAGTGSRKRVGTARCCGELWATGSKGQGERATTSGAERTAPRRNCLPGASGSGPELDSAPRTARTAPASGSAPRESRTAPEPAPKRMRSRGLFRCRFLPQRPGPRPPGLPARPEARKVTSANRARFRRAANRHPQFPQYNYQTLVPENEAAGTAVLRVVAQDPDAGEAGRLVYSLAALMNSRSLELFSIDPQSGLIRTAAALDRESMERHYLRVTAQDHGSPRLSATTMVAVTVADRNDHSPVFEQAQYRETLRENVEEGYPILQLRATDGDAPPNANLRYRFVGPPAARAAAAAAFEIDPRSGLISTSGRVDREHMESYELVVEASDQGQEPGPRSATVRVHITVLDENDNAPQFSEKRYVAQVREDVRPHTVVLRVTATDRDKDANGLVHYNIISGNSRGHFAIDSLTGEIQVVAPLDFEAEREYALRIRAQDAGRPPLSNNTGLASIQVVDINDHIPIFVSTPFQVSVLENAPLGHSVIHIQAVDADHGENARLEYSLTGVAPDTPFVINSATGWVSVSGPLDRESVEHYFFGVEARDHGSPPLSASASVTVTVLDVNDNRPEFTMKEYHLRLNEDAAVGTSVVSVTAVDRDANSAISYQITGGNTRNRFAISTQGGVGLVTLALPLDYKQERYFKLVLTASDRALHDHCYVHINITDANTHRPVFQSAHYSVSVNEDRPMGSTIVVISASDDDVGENARITYLLEDNLPQFRIDADSGAITLQAPLDYEDQVTYTLAITARDNGIPQKADTTYVEVMVNDVNDNAPQFVASHYTGLVSEDAPPFTSVLQISATDRDAHANGRVQYTFQNGEDGDGDFTIEPTSGIVRTVRRLDREAVSVYELTAYAVDRGVPPLRTPVSIQVMVQDVNDNAPVFPAEEFEVRVKENSIVGSVVAQITAVDPDEGPNAHIMYQIVEGNIPELFQMDIFSGELTALIDLDYEARQEYVIVVQATSAPLVSRATVHVRLVDQNDNSPVLNNFQILFNNYVSNRSDTFPSGIIGRIPAYDPDVSDHLFYSFERGNELQLLVVNQTSGELRLSRKLDNNRPLVASMLVTVTDGLHSVTAQCVLRVVIITEELLANSLTVRLENMWQERFLSPLLGRFLEGVAAVLATPAEDVFIFNIQNDTDVGGTVLNVSFSALAPRGAGAGAAGPWFSSEELQEQLYVRRAALAARSLLDVLPFDDNVCLREPCENYMKCVSVLRFDSSAPFLASASTLFRPIQPIAGLRCRCPPGFTGDFCETELDLCYSNPCRNGGACARREGGYTCVCRPRFTGEDCELDTEAGRCVPGVCRNGGTCTDAPNGGFRCQCPAGGAFEGPRCEVAARSFPPSSFVMFRGLRQRFHLTLSLSFATVQQSGLLFYNGRLNEKHDFLALELVAGQVRLTYSTGESNTVVSPTVPGGLSDGQWHTVHLRYYNKPRTDALGGAQGPSKDKVAVLSVDDCDVAVALQFGAEIGNYSCAAAGVQTSSKKSLDLTGPLLLGGVPNLPENFPVSHKDFIGCMRDLHIDGRRVDMAAFVANNGTMAGCQAKLHFCDSGPCKNSGFCSERWGSFSCDCPVGFGGKDCQLTMAHPHHFRGNGTLSWNFGSDMAVSVPWYLGLAFRTRATQGVLMQVQAGPHSTLLCQLDRGLLSVTVTRGSGRASHLLLDQVTVSDGRWHDLRLELQEEPGGRRGHHVLMVSLDFSLFQDTMAVGSELQGLKVKQLHVGGLPPGSAEEAPQGLVGCIQGVWLGSTPSGSPALLPPSHRVNAEPGCVVTNACASGPCPPHADCRDLWQTFSCTCQPGYYGPGCVDACLLNPCQNQGSCRHLPGAPHGYTCDCVGGYFGHHCEHRMDQQCPRGWWGSPTCGPCNCDVHKGFDPNCNKTNGQCHCKEFHYRPRGSDSCLPCDCYPVGSTSRSCAPHSGQCPCRPGALGRQCNSCDSPFAEVTASGCRVLYDACPKSLRSGVWWPQTKFGVLATVPCPRGALGAAVRLCDEAQGWLEPDLFNCTSPAFRELSLLLDGLELNKTALDTMEAKKLAQRLREVTGHTDHYFSQDVRVTARLLAHLLAFESHQQGFGLTATQDAHFNENLLWAGSALLAPETGDLWAALGQRAPGGSPGSAGLVRHLEEYAATLARNMELTYLNPMGLVTPNIMLSIDRMEHPSSPRGARRYPRYHSNLFRGQDAWDPHTHVLLPSQSPRPSPSEVLPTSSSIENSTTSSVVPPPAPPEPEPGISIIILLVYRTLGGLLPAQFQAERRGARLPQNPVMNSPVVSVAVFHGRNFLRGILESPISLEFRLLQTANRSKAICVQWDPPGLAEQHGVWTARDCELVHRNGSHARCRCSRTGTFGVLMDASPRERLEGDLELLAVFTHVVVAVSVAALVLTAAILLSLRSLKSNVRGIHANVAAALGVAELLFLLGIHRTHNQLVCTAVAILLHYFFLSTFAWLFVQGLHLYRMQVEPRNVDRGAMRFYHALGWGVPAVLLGLAVGLDPEGYGNPDFCWISVHEPLIWSFAGPVVLVIVMNGTMFLLAARTSCSTGQREAKKTSALTLRSSFLLLLLVSASWLFGLLAVNHSILAFHYLHAGLCGLQGLAVLLLFCVLNADARAAWMPACLGRKAAPEEARPAPGLGPGAYNNTALFEESGLIRITLGASTVSSVSSARSGRTQDQDSQRGRSYLRDNVLVRHGSAADHTDHSLQAHAGPTDLDVAMFHRDAGADSDSDSDLSLEEERSLSIPSSESEDNGRTRGRFQRPLCRAAQSERLLTHPKDVDGNDLLSYWPALGECEAAPCALQTWGSERRLGLDTSKDAANNNQPDPALTSGDETSLGRAQRQRKGILKNRLQYPLVPQTRGAPELSWCRAATLGHRAVPAASYGRIYAGGGTGSLSQPASRYSSREQLDLLLRRQLSRERLEEAPAPVLRPLSRPGSQECMDAAPGRLEPKDRGSTLPRRQPPRDYPGAMAGRFGSRDALDLGAPREWLSTLPPPRRTRDLDPQPPPLPLSPQRQLSRDPLLPSRPLDSLSRSSNSREQLDQVPSRHPSREALGPLPQLLRAREDSVSGPSHGPSTEQLDILSSILASFNSSALSSVQSSSTPLGPHTTATPSATASVLGPSTPRSATSHSISELSPDSEVPRSEGHS

SEQ ID NO: 1134 - DNA, 1985 bp, Homo sapiens
tactgactttcagcaccaacttgtggtcccaggtaagtttccacgctggtactttagccctgggctcgaacctgcggacacgctgtggctgcaactccccgcccgccagacctcagtacgcagcgcggctggtgagaaacataatgcactctgacttccacgcgtggaatggggagatggactgcacggcgggcggacctgctcgggctgatggacggcaggtggactgatgtgcgcagggactggcggcagcgcggtcagagccagtcagccaaagccaggccagcacaatagactgtcccggttcccgccaggaggcggccgagcaccaactgtacggtactgcgcctgcgccgcgaccgccaacgcgcccagtctacgcttgcgcggcgcaacagggccgactgcagctggaagatggcggcgtccgtggtctgtcgggccgctaccgccggggcacaagtgctattgcgcgcccgccgctcgccggccctgctgcggacgccagccttgcggagtacggcaaccttcgctcaggcgctccagttcgtgccggagacgcaggttagcctgctggacaacggcctgcgtgtggcctccgagcagtcctctcagcccacttgcacggtgggagtgtggattgatgttggcagccgttttgagactgagaagaataatggggcaggctactttttggagcatctggctttcaagggaacaaagaatcggcctggcagtgccctggagaaggaggtggagagcatgggggcccatcttaatgcctacagcacccgggagcacacagcttactacatcaaggcgctgtccaaggatctgccgaaagctgtggagctcctgggtgacattgtgcagaactgtagtctggaagactcacagattgagaaggaacgtgatgtgatcctgcgggagatgcaggagaatgatgcatctatgcgagatgtggtctttaactacctgcatgccacagcattccagggcacacctctagcccaggctgtggaggggcccagtgagaatgtcaggaagctgtctcgtgcagacttgaccgagtacctcagcacacattacaaggcccctcgaatggtgctggcagcagctggaggagtggagcaccagcaactgttagacctcgcccagaagcacctcggtggcatcccatggacatatgcagaggacgctgtgcccactcttactccatgccgcttcactggcagtgagatccgccaccgtgatgatgctctaccttttgcccacgtggccattgcagtagagggtcctggctgggccagcccggacagtgtggccttgcaagtggccaatgccatcatcggccactatgactgcacttatggtggtggcgtgcacctgtccagcccactggcttcaggtgctgtggccaacaagctatgccagagtttccagaccttcagcatctgctatgcagagacgggcttgctgggtgcacactttgtctgtgaccgaatgaaaatcgatgacatgatgttcgtcctgcaagggcagtggatgcgcctgtgtaccagtgccacggagagtgaggtggcccggggcaaaaacatcctcagaaatgccctggtatctcatctagatggcactactcctgtgtgtgaggacatcggacgcagcctcctgacctatggccgccgcatccccctggctgaatgggaaagccggattgcggaggtggatgccagtgtggtacgtgagatctgctccaagtacatctatgaccagtgcccagcagtggctggatatggccccattgagcagctcccagactacaaccggatccgtagcggcatgttctggctgcgcttctaggcgggaagcctatgtaagcaagagggcagggccggggtttgtggtcccccccccaccacaaacacagcacttcggctcctctaacctgtgccacaggtgaccaccaataaaatcctctgctgaga

SEQ ID NO: 1135 - protein, 480 aa, Homo sapiens
MAASVVCRAATAGAQVLLRARRSPALLRTPALRSTATFAQALQFVPETQVSLLDNGLRVASEQSSQPTCTVGVWIDVGSRFETEKNNGAGYFLEHLAFKGTKNRPGSALEKEVESMGAHLNAYSTREHTAYYIKALSKDLPKAVELLGDIVQNCSLEDSQIEKERDVILREMQENDASMRDVVFNYLHATAFQGTPLAQAVEGPSENVRKLSRADLTEYLSTHYKAPRMVLAAAGGVEHQQLLDLAQKHLGGIPWTYAEDAVPTLTPCRFTGSEIRHRDDALPFAHVAIAVEGPGWASPDSVALQVANAIIGHYDCTYGGGVHLSSPLASGAVANKLCQSFQTFSICYAETGLLGAHFVCDRMKIDDMMFVLQGQWMRLCTSATESEVARGKNILRNALVSHLDGTTPVCEDIGRSLLTYGRRIPLAEWESRIAEVDASVVREICSKYIYDQCPAVAGYGPIEQLPDYNRIRSGMFWLRF

SEQ ID NO: 1136 - DNA, 2423 bp, Homo sapiens
tccgactcatcccggccccgggatggcgtccccacgggaattgacacagaaccccctgaagaagatctggatgccatacagcaatgggcggcccgctctgcacgcttgccagcgcggtgtgtgcatgaccaactgcccaactctcattgtcatggtgggcctgcccgccaggggcaagacctacatctccaagaagctgactcgatacctgaactggattggtgtgcccactcgggagttcaatgttggccagtatcgccgggacgtggtcaagacctacaaatcttttgaattttttctccccgacaatgaagagggcctgaaaatcaggaagcagtgtgccctggcagccctccgtgacgtccggcggttccttagtgaggaggggggacatgtggcggtttttgatgccacaaacaccacccgagaacggagagcgaccatctttaattttggagaacagaatggctacaagaccttttttgtcgagtccatctgtgtggatcctgaggtcatagctgccaacatcgtgcaagtgaaactgggcagccctgactatgtcaaccgcgacagtgatgaggctacggaggacttcatgaggcgcattgagtgctatgagaactcctacgagtcgctagatgaggacctggatagggacctgtcctatatcaagatcatggatgtgggccagagctacgtggtgaaccgtgtggctgaccacatccagagccgcatcgtatattacctcatgaacatccacgtgaccccccgctccatctacctctgccggcacggggagagcgagctcaacctcaagggccggattggcggggacccaggactgtcccctcggggcagggagtttgccaagagtctagcccagttcatcagtgaccaaaatatcaaggatctgaaggtctggacaagccagatgaagaggacaatccagacggctgaggcactgggtgtgccctatgaacagtggaaggtcctcaacgagatcgatgcgggcgtctgtgaggaaatgacctacgaggaaattcaggataattatccactggagttcgccctgcgggaccaggacaagtaccggtaccggtaccctaaaggggagtcctacgaggacctggtccagagactggagcctgtcatcatggagctggagaggcaagagaatgtgctggtcatctgccaccaggctgtgatgcgctgcctgctggcctacttcctcgacaaggcagcagaacagctgccctacctcaagtgtccgctgcacacagtcctgaagctgactcctgtggcatatggttgtaaagtggagtccatattcctgaacgtggctgctgtgaacacgcaccgggacaggcctcagaacgtggacatctcaagacctccagaggaagcccttgtcacggtgcctgctcaccagtgaccatgttcatccactgtgaccactaggcaggcactgctctctgcagagggggtcattccaggccctccagtgtgtgtgatagtcaccatgccatgcagggatattcttgaagccacacatggctggcggaacccagagcccccaccccagcccacctggctctttgttgacagtcggcgacaaggttgtgcgtggctcctgacctgctgctaagagtcacttgaccagactgcatctgcatgggctgcgcggaggttgcccagccccagtttcttccggcgcagctcttaggtgttcactctcgccagctcagttggctttgtgaagtgtgaaaccctacaatgtgaaaggaaagtgcttgctgtgatgttcctactgtggcccagctgcccagcatggacctggtgactctccacagggcctctaccatcctctctgtggccacttcctgagccagaggccaggtcttcatggggccctgagcttctgctgcctctggtgagagggagagcccttcccatccttacccaccaggaactagagccccaaccacagcagatgcttcctgggcagccactggccaggccgttgtatccatgtcacccttagttgtgggcattcatgaaagcaatgcgcttgcttcagcacattgggatgcacagaaacgtgagggcaggggggcagttgtggtcgcccctccccagttgtgcatgtacccggctacttaggtatgcttaggggagctggtggccaggggtgccccttcaggcctgctctcacagtgaaaccacttcaagacagggcaggaagttaccttcctggtgcacacaccgaagtgctcgagggagaggctgccgccccctctccccttccctggctgtggacactggcagccaatggggaggcggcctctcccctgttgctgcccgtgtccacacaggaatgtacactggtggcagaaacatgcatttgccataaataattcagaaac

SEQ ID NO: 1137 - DNA, 1647 bp, Homo sapiens
agcaatggctgccatccggaagaaactggtgattgttggtgatggagcctgtggaaagacatgcttgctcatagtcttcagcaaggaccagttcccagaggtgtatgtgcccacagtgtttgagaactatgtggcagatatcgaggtggatggaaagcaggtagagttggctttgtgggacacagctgggcaggaagattatgatcgcctgaggcccctctcctacccagataccgatgttatactgatgtgtttttccatcgacagccctgatagtttagaaaacatcccagaaaagtggaccccagaagtcaagcatttctgtcccaacgtgcccatcatcctggttgggaataagaaggatcttcggaatgatgagcacacaaggcgggagctagccaagatgaagcaggagccggtgaaacctgaagaaggcagagatatggcaaacaggattggcgcttttgggtacatggagtgttcagcaaagaccaaagatggagtgagagaggtttttgaaatggctacgagagctgctctgcaagctagacgtgggaagaaaaaatctgggtgccttgtcttgtgaaaccttgctgcaagcacagcccttatgcggttaattttgaagtgctgtttattaatcttagtgtatgattactggcctttttcatttatctataatttacctaagattacaaatcagaagtcatcttgctaccagtatttagaagccaactatgattattaacgatgtccaacccgtctggcccaccagggtccttttgacactgctctaacagccctcctctgcactcccacctgacacaccaggcgctaattcaaggaatttcttaacttcttgcttctttctagaaagagaaacagttggtaacttttgtgaattaggctgtaactactttataactaacatgtcctgcctattatctgtcagctgcaaggtactctggtgagtcaccacttcagggctttactccgtaacagattttgttggcatagctctggggtgggcagttttttgaaaatgggctcaaccagaaaagcccaagttcatgcagctgtggcagagttacagttctgtggtttcatgttagttaccttatagttactgtgtaattagtgccacttaatgtatgttaccaaaaataaatatatctaccccagactagatgtagtattttttgtataattggatttcctaatactgtcatcctcaaagaaagtgtattggttttttaaaaaagaaagtgtatttggaaataaagtcagatggaaaattcattttttaaattcccgttttgtcactttttctgataaaagatggccatattaccccttttcggccccatgtatctcagtaccccatggagctgggctaagtaaataggaattggtttcacgcctgaggcaattagacactttggaagatggcataacctgtctcacctggacttaagcatctggctctaattcacagtgctcttttctcctcactgtatccaggttccctcccagaggagccaccagttctcatgggtggcactcagtctctcttctctccagctgactaaactttttttctgtaccagttaatttttccaactactaatagaataaaggcagttttct

SEQ ID NO: 1138 - protein, 193 aa, Homo sapiens
MAAIRKKLVIVGDGACGKTCLLIVFSKDQFPEVYVPTVFENYVADIEVDGKQVELALWDTAGQEDYDRLRPLSYPDTDVILMCFSIDSPDSLENIPEKWTPEVKHFCPNVPIILVGNKKDLRNDEHTRRELAKMKQEPVKPEEGRDMANRIGAFGYMECSAKTKDGVREVFEMATRAALQARRGKKKSGCLVL

SEQ ID NO: 1139 - DNA, 1140 bp, Homo sapiens
tgagccccagctaagcgctgcccttgagtatgtgcggagtcaccccttggaccccatcgacactgtggacttcgagcgggaatgtggcgtgggtgtcattgtgaccccagagcagattgaggaggctgtggaggctgctattaacaggcaccggccccagctcctggtggaacgttaccatttcaacatggggctgctgatgggagaggctcgggctgtgctgaagtgggcagatggcaaaatgatcaagaatgaagtggacatgcaggtcctccaccttctgggccccaagttggaggctgatctggagaagaagttcaaggtggcaaaagctcggctagaagaaacagaccggaggacggcaaaggatgtggtggagaatggcgagactgctgaccagaccctgtctctgatggagcagctccggggggaggcccttaagttccacaagcctggtgagaactacaagaccccaggctatgtggtcactccacacaccatgaatctactaaagcagcacctggagattactggtgggcaggtacgtacccggttcccgccagaacccaatggaatcctgcatattggacatgccaaagccatcaatttcaactttggctatgccaaggccaacaatggcatctgttttctgcgttttgatgacaccaaccctgagaaggaggaagcaaagttcttcacggccatctgtgacatggtagcctggctaggctacacaccttacaaagtcacatatgcgtctgactattttgaccagctatatgcgtgggctgtggagctcatccgcaggggtctggcttatgtgtgccaccagcgaggagaggagctcaaaggccataatactctgccttcaccctggagagaccgtcccatggaggagtcactgctgctctttgaggcaatgcgcaagggcaagttttcagagggcgaggccacactacggatgaagctggtgatggaggatggcaagatggaccctgtagcctatcgagtcaagtatacaccacaccaccgcacaggggacaaatggtgcatctatcccacctacgactacacacactgcctctgtgactccatcgagcacatcactcactcactctgcaccaaggaattccaggcccg

SEQ ID NO: 1140 - DNA, 5805 bp, Homo sapiens
  unsure 543: unknown base
  unsure 544: unknown base
  unsure 545: unknown base
  unsure 546: unknown base
  unsure 547: unknown base
  unsure 548: unknown base
  unsure 549: unknown base
  unsure 550: unknown base
  unsure 551: unknown base
  unsure 552: unknown base
  unsure 553: unknown base
  unsure 554: unknown base
  unsure 555: unknown base
  unsure 556: unknown base
  unsure 557: unknown base
  unsure 558: unknown base
  unsure 559: unknown base
  unsure 560: unknown base
  unsure 561: unknown base
  unsure 562: unknown base
  unsure 563: unknown base
  unsure 564: unknown base
  unsure 565: unknown base
  unsure 566: unknown base
  unsure 567: unknown base
  unsure 568: unknown base
  unsure 569: unknown base
  unsure 570: unknown base
  unsure 571: unknown base
  unsure 572: unknown base
  unsure 573: unknown base
  unsure 574: unknown base
  unsure 575: unknown base
  unsure 576: unknown base
  unsure 577: unknown base
  unsure 578: unknown base
  unsure 579: unknown base
  unsure 580: unknown base
  unsure 581: unknown base
  unsure 582: unknown base
  unsure 583: unknown base
  unsure 584: unknown base
  unsure 585: unknown base
  unsure 586: unknown base
  unsure 587: unknown base
  unsure 588: unknown base
  unsure 589: unknown base
  unsure 590: unknown base
  unsure 591: unknown base
  unsure 592: unknown base
  unsure 593: unknown base
  unsure 594: unknown base
  unsure 595: unknown base
  unsure 596: unknown base
  unsure 597: unknown base
  unsure 598: unknown base
  unsure 599: unknown base
  unsure 600: unknown base
  unsure 601: unknown base
  unsure 602: unknown base
  unsure 603: unknown base
  unsure 604: unknown base
  unsure 605: unknown base
  unsure 606: unknown base
  unsure 607: unknown base
  unsure 608: unknown base
  unsure 609: unknown base
  unsure 610: unknown base
  unsure 611: unknown base
  unsure 612: unknown base
  unsure 613: unknown base
  unsure 614: unknown base
  unsure 615: unknown base
  unsure 616: unknown base
  unsure 617: unknown base
  unsure 618: unknown base
  unsure 619: unknown base
  unsure 620: unknown base
  unsure 621: unknown base
  unsure 622: unknown base
  unsure 623: unknown base
  unsure 624: unknown base
  unsure 625: unknown base
  unsure 626: unknown base
  unsure 627: unknown base
  unsure 628: unknown base
  unsure 629: unknown base
  unsure 630: unknown base
  unsure 631: unknown base
  unsure 632: unknown base
  unsure 633: unknown base
  unsure 634: unknown base
  unsure 635: unknown base
  unsure 636: unknown base
  unsure 637: unknown base
  unsure 638: unknown base
  unsure 639: unknown base
  unsure 640: unknown base
  unsure 641: unknown base
  unsure 642: unknown base
gaaggcagtttccggagggaaggggtagggttggggtgggggcgctctccgcccggtgttgcgctccttcccagaatccgctccggcctttccttcctgccgcgattcccaactttgctcaaagtcgctggactctaagctgtcggagggaccgctggacagacctgggaactgacagagggcctggagggaaacaggccaaagacccacaggcagagttgacacggaaccccaaagcaaggaggagggctcgggcccgagaccgttcacctccccttatccctgttcccctcttcaggatggagctgacctcaagggaaagagggaggggacagcctctgccctgggaacttcgactgggcctactgctaagcggtgagagggcctggtgggggctgggggttgtggaatgtgatggtagtccctgggagttgcccttggggcacatgaggtggagccactggataggaactccacggaactgactgagctactgtccccagtgctggctgccacactggcacaggcccctgcccccgatgnnnnnnnnnnnnnnnnnnnnnnnnnnnnnnnnnnnnnnnnnnnnnnnnnnnnnnnnnnnnnnnnnnnnnnnnnnnnnnnnnnnnnnnnnnnnnnnnnnnncaccacagcggcgggcagcctggtggcagtcagagaatggtatccctgcggtcaccatccagctggacctggaggctgagtttcatttcacacacctcattatgaccttcaagacatttcgccctgctgccatgctggtggaacgctcagcagactttggccgcacctggcatgtgtaccgatatttctcctatgactgtggggctgacttcccaggagtcccactagcacccccacggcactgggatgatgtagtctgtgagtcccgctactcagagattgagccatccactgaaggcgaggtcatctatcgtgtgctggaccctgccatccctatcccagacccctacagctcacggattcagaacctgttgaagatcaccaacctacgggtgaacctgactcgtctacacacgttgggagacaacctactcgacccacggagggagatccgagagaagtactactatgccctctatgagctggttgtacgtggcaactgcttctgctacggacacgcctcagagtgtgcacccgccccaggggcaccagcccatgctgagggcatggtgcacggagcttgcatctgcaaacacaacacacgtggcctcaactgcgagcagtgtcaggatttctatcgtgacctgccctggcgtccggctgaggacggccatagtcatgcctgtaggaagtgtgagtgccatgggcacacccacagctgccacttcgacatggccgtatacctggcatctggcaatgtgagtggaggtgtgtgtgatggatgtcagcataacacagctgggcgccactgtgagctctgtcggcccttcttctaccgtgacccaaccaaggacctgcgggatccggctgtgtgccgctcctgtgattgtgaccccatgggttctcaagacggtggtcgctgtgattcccatgatgaccctgcactgggactggtctccggccagtgtcgctgcaaagaacatgtggtgggcactcgctgccagcaatgccgtgatggcttctttgggctcagcatcagtgaccgtctgggctgccggcgtatgtcaatgtaatgcacggggcacagtgcctgggagcactccttgtgaccccaacagtggatcctgttactgcaaacgtctagtgactggacgtggatgtgaccgctgcctgcctggccactggggcctgagccacgacctgctcggctgccgcccctgtgactgcgacgtgggtggtgctttggatccccagtgtgatgagggcacaggtcaatgccactgccgccagcacatggttgggcgacgctgtgagcaggtgcaacctggctacttccggcccttcctggaccacctaatttgggaggctgaggacacccgagggcaggtgctcgatgtggtggagcgcctggtgacccccggggaaactccatcctggactggctcaggcttcgtgcggctacaggaaggtcagaccctggagttcctggtggcctctgtgccgaaggctatggactatgacctgctgctgcgcttagagccccaggtccctgagcaatgggcagagttggaactgattgtgcagcgtccagggcctgtgcctgcccacagcctgtgtgggcatttggtgcccaaggatgatcgcatccaagggactctgcaaccacatgccaggtacttgatatttcctaatcctgtctgccttgagcctggtatctcctacaagctgcatctgaagctggtacggacagggggaagtgcccagcctgagactccctactctggacctggcctgctcattgactcgctggtgctgctgccccgtgtcctggtgctagagatgtttagtgggggtgatgctgctgccctggagcgccaggccacctttgaacgctaccaatgccatgaggagggtctggtgcccagcaagacttctccctctgaggcctgcgcacccctcctcatcagcctgtccaccctcatctacaatggtgccctgccatgtcagtgcaaccctcaaggttcactgagttctgagtgcaaccctcatggtggtcagtgcctgtgcaagcctggagtggttgggcgccgctgtgacctctgtgcccctggctactatggctttggccccacaggctgtcaagcctgccagtgcagccacgagggggcactcagcagtctctgtgaaaagaccagtgggcaatgtctctgtcgaactggtgcctttgggcttcgctgtgaccgctgccagcgtggccagtggggattccctagctgccggccatgtgtctgcaatgggcatgcagatgagtgcaacacccacacaggcgcttgcctgggctgccgtgatcacacagggggtgagcactgtgaaaggtgcattgctggtttccacggggacccacggctgccatatgggggccagtgccggccctgtccctgtcctgaaggccctgggagccaacggcactttgctacttcttgccaccaggatgaatattcccagcagattgtgtgccactgccgggcaggctatacggggctgcgatgtgaagcttgtgcccctgggcactttggggacccatcaaggccaggtggccggtgccaactgtgtgagtgcagtgggaacattgacccaatggatcctgatgcctgtgacccccacacggggcaatgcctgcgctgtttacaccacacagagggtccacactgtgcccactgcaagcctggcttccatgggcaggctgcccgacagagctgtcaccgctgcacatgcaacctgctgggcacaaatccgcagcagtgcccatctcctgaccagtgccactgtgatccaagcagtgggcagtgcccatgcctccccaatgtccagggccctagctgtgaccgctgtgcccccaacttctggaacctcaccagtggccatggttgccagccttgtgcctgccacccaagccgggccagaggccccacctgcaacgagttcacagggcagtgccactgccgtgccggctttggagggcggacttgttctgagtgccaagagctccactggggagaccctgggttgcagtgccatgcctgtgattgtgactctcgtggaatagatacacctcagtgtcaccgcttcacaggtcactgcagctgccgcccaggggtgtctggtgtgcgctgtgaccagtgtgcccgtggcttctcaggaatctttcctgcctgccatccctgccatgcatgcttcggggattgggaccgagtggtgcaggacttggcagcccgtacacagcgcctagagcagcgggcgcaggagttgcaacagacgggtgtgctgggtgcctttgagagcagcttctggcacatgcaggagaagctgggcattgtgcagggcatcgtaggtgcccgcaacacctcagccgcctccactgcacagcttgtggaggccacagaggagctgcggcgtgaaattggggaggccactgagcacctgactcagctcgaggcagacctgacagatgtgcaagatgagaacttcaatgccaaccatgcactaagtggtctggagcgagataggcttgcacttaatctcacactgcggcagctcgaccagcatcttgacttgctcaaacattcaaacttcctgggtgcctatgacagcatccggcatgcccatagccagtctgcagaggcagaacgtcgtgccaatacctcagccctggcagtacctagccctgtgagcaactcggcaagtgctcggcatcggacagaggcactgatggatgctcagaaggaggacttcaacagcaaacacatggccaaccagcgggcacttggcaagctctctgcccatacccacaccctgagcctgacagacataaatgagctggtgtgtggggcaccaggggatgcaccctgtgctacaagcccttgtgggggtgccggctgtcgagatgaggatgggcagccgcgctgtgggggcctcagctgcaatggggcagcggctacagcagacctagcactgggccgggcccggcacacacaggcagagctgcagcgggcactggcagaaggtggtagcatcctcagcagagtggctgagactcgtcggcaggcaagcgaggcacagcagcgggcccaggcagccctggacaaggctaatgcttccaggggacaggtggaacaggccaaccaggaacttcaagaacttatccagagtgtgaaggacttcctcaaccaggagggggctgatcctgatagcattgaaatggtggccacacgggtgctagagctctccatcccagcttcagctgagcagatccagcacctggcgggtgcgattgcagagcgagtccggagcctggcagatgtggatgcgatcctggcacgtactgtaggagatgtgcgtcgtgccgagcagctactgcaggatgcacggcgggcaaggagctgggctgaggatgagaaacagaaggcagagacagtacaggcagcactggaggaggcccagcgggcacagggtattgcccagggtgccatccggggggcagtggctgacacacgggacacagagcagaccctgtaccaggtacaggagaggatggcaggtgcagagcgggcactgagctctgcaggtgaaagggctcggcagttggatgctctcctggaggctctgaaattgaaacgggcaggaaatagtctggcagcctctacagcagaagaaacggcaggcagtgcccagggtcgtgcccaggaggctgagcagctgctacgcggtcctctgggtgatcagtaccagacggtgaaggccctagctgagcgcaaggcccaaggtgtgctggctgcacaggcaagggcagaacaactgcgggatgaggctcgggacctgttgcaagccgctcaggacaagctgcagcggctacaggaattggaaggcacctatgaggaaaatgagcgggcactggagagtaaggcagcccagttggacgggttggaggccaggatgcgcagcgtgcttcaagccatcaacttgcaggtgcagatctacaacacctgccagtgacccctgcccaaggcctaccccagttcctagcactgccccacatgcatgtctgcctatgcactgaagagctcttggcccggcagggcccccaataaaccagtgtgaaccccc

SEQ ID NO: 1141 - DNA, 1990 bp, Homo sapiens
agggccgggagccccgccagagcccgacttcagccccagccagatcccgcgtcaacggaggcggaacggcggaccccgtacccctgcagcatcggagcaccggcgggtgaaggcaaggtccctggactggtcatatacctcttgtggccctggcagaatcaagatgaggccctgtcatgcctccccagtgaggcctacagtctgagcagacagcatggcctgccactggcagtgaacaccatgtctgcaggaggtggccgggcctttgcttggcaagtgttcccccccatgcccacttgccgggtctatggcacagtggcacaccaagatgggcacctgctggtgttggggggttgtggccgggctggactgcccctggacactgctgagacactggacatggcctcgcacacatggctggcactggcacccctgcccactgcccgggctggtgcagctgcggtagttctgggcaagcaggtgctagtggtgggtggtgtggatgaggtccagagcccggtagctgctgtagaggccttcctgatggatgagggccgctgggagcgtcgggccaccctccctcaagcagccatgggggttgcaactgtggagagagatggtatggtgtatgctctggggggaatgggccctgacacggccccccaggcccaggtacgtgtgtatgacccccgtcgggactgctggctttcgctaccctccatgcccacaccctgctatggggcctccaccttcctgcacgggaacaagatctatgtcctggggggccgccagggcaagctcccggtgactgcttttgaagcctttgatctggaggcccgtacatggacccggcatccaagcctacccagccgtcgggcctttgctggctgcgccatggctgaaggcagcgtctttagcctgggtggcctgcagcagcctgggccccacaacttctactctcgcccacactttgtcaacactgtggagatgtttgacctggagcatgggtcctggaccaaattgccccgcagcctgcgcatgagggataagagggcagactttgtggttgggtcccttgggggccacattgtggccattgggggccttggaaaccagccatgtcctttgggctctgtggagagctttagccttgcacggcggcgctgggaggcattgcctgccatgcccactgcccgctgctcctgctctagtctgcaggctgggccccggctgtttgttattgggggtgtggcccagggccccagtcaagccgtggaggcactgtgtctgcgtgatggggtctgaaggcttggtgggagctgtccactggagcagctcattgccagaggcagctatttctatggctccttttgctgctgaggacactcactgtggctctgtgggatgagagaggcatgggggtgagcacttgaaacactgccttggggccttgggttaggggagcctttgtctttagtgcaggacacacatatgcttacacctacctttatcaccattcgttcatgaatcatgcctagctccatccttgccctgggacctactaggccttccatccaactgggaaatggggagaagcaaagctggcctcatgctcttcagggtcagttcctatctggagttgaccaggcctaccccagttgccattcctgaaaaatctcagctgccaggctgcctttagggtccctgcagacccaggagagttgagagggtgggggacacagagagaatagagaggatgtgggaactgccagagggccggagcgcaggagttcaagtggaggaatgctggctttgagccctctacactgctggttgtatgaccttggacaagtcacttcacctctctgtgcctcagcatcctcatctataaatggggatctctgaaaccttcctaccctacctacctcacagggctgttgtgaggacccagggagtttggatgtggaagtaaaagtgctgctaaaaccta

SEQ ID NO: 1142 - protein, 354 aa, Homo sapiens
MSAGGGRAFAWQVFPPMPTCRVYGTVAHQDGHLLVLGGCGRAGLPLDTAETLDMASHTWLALAPLPTARAGAAAVVLGKQVLVVGGVDEVQSPVAAVEAFLMDEGRWERRATLPQAAMGVATVERDGMVYALGGMGPDTAPQAQVRVYDPRRDCWLSLPSMPTPCYGASTFLHGNKIYVLGGRQGKLPVTAFEAFDLEARTWTRHPSLPSRRAFAGCAMAEGSVFSLGGLQQPGPHNFYSRPHFVNTVEMFDLEHGSWTKLPRSLRMRDKRADFVVGSLGGHIVAIGGLGNQPCPLGSVESFSLARRRWEALPAMPTARCSCSSLQAGPRLFVIGGVAQGPSQAVEALCLRDGV

SEQ ID NO: 1143 - DNA, 2373 bp, Homo sapiens
ggcggcagagaggagactatggaacgtcaggtgctgctgagcgagcccgaggaggcggcggctctgtatcggggccttagccgccagcccgcgctgagcgccgcctgcctgggcccggaggtcaccacgcagtacggcggccaataccggacggtgcacactgagtggacccagagggacctggaacgcatggagaacattcgattctgccgccaatacctggtgttccatgacggggactcagtggtgtttgcaggacctgcaggcaacagtgtggagacccggggggaactgctgagcagagagtctccttcaggcaccatgaaagctgtgctgcgcaaggctggaggcacgggccctggggaagagaagcagttcctggaggtctgggagaagaaccggaagctcaagagcttcaacctgtcagcgctggagaaacatgggcctgtttatgaggatgactgctttggctgcctgtcctggtcgcactcggagacacacttgttgtatgtggcagagaagaagcgccccaaggccgagtccttctttcagaccaaagccttggacgtcagtgccagcgatgatgagatagccaggctgaagaagccagaccaagccatcaagggggatcagtttgtgttttatgaagactggggagaaaacatggtttccaaaagcatccctgtgctctgcgtgctggatgtcgagagtggcaacatctctgtgcttgagggggtccctgagaatgtgtcccctggacaggcattttgggcccctggagatgctggtgtggtgtttgtgggctggtggcatgagcccttccggttgggcatccgcttttgcaccaatcgcaggtcagccctgtattatgtggacctcatcggggggaagtgtgagctcctctcggatgactccctggctgtctcttctccccggctgagcccagaccaatgtcgcattgtctacctgcagtacccatctctgatcccccatcaccaatgcagccagctgtgcctgtatgactggtataccaaggttacctcagtggtggtagatgttgtgcctcggcagctgggagagaacttctctgggatctactgcagccttctgcctttgggatgctggtcagctgacagccagagagtggtctttgactcggctcagcgcagccggcaggacctgtttgctgtggacacccaagtgggcactgtgacctccctcacagctggagggtcaggtgggagctggaagttgctcacaattgaccaggacctcatggtggcacagttttccacacccagcctacctccaaccctgaaagttgggttcctgccttctgcagggaaggagcagtcagtgttgtgggtgtccctggaggaggccgagcccattcccgacatccactggggcatccgggtgctacagccacccccagagcaagagaatgtgcagtatgctggccttgactttgaagcaatcctgctgcagcctggcagccctccagataagacccaagtgcccatggtggtcatgccccacggggggccccattcatcctttgtcactgcctggatgctgttcccagccatgctttgcaagatgggctttgcggtactactagtgaactatcgtggctccacgggctttggccaggacagcatcctctccctcccaggcaatgtgggccaccaggatgtgaaggatgtccagtttgcagtggaacaggtgctccaggaggaacactttgatgcaagccatgtggcccttatgggtggttcccatggtggcttcatttcctgccacttgattggtcagtacccagagacctacagggcctgcgtggcccggaaccccgtgatcaacatcgcctccatgttgggctccactgacatccctgactggtgcgtggtggaggctggctttcctttcagcagtgactgcctgccagacctcagcgtgtgggctgagatgctggacaaatcgcccatcagatacatccctcaggtgaagacaccactgttactgatgttgggccaggaggaccggcgtgtgcccttcaagcagggcatggagtattaccgtgccctcaagacccggaatgtgcctgttcggctcctgctctatcccaaaagcacccacgcattatcagaggtggaggtggagtcagacagcttcatgaatgctgtgctctggctacgcacacacttgggcagctgaagccctgccattctgcatgagctgatcagcctgtgccacacttcgctcttgaggagctcaacggtctggcagggcagcaggaggctttctgggctctggactccacggatgcgtgggcagaggaatgtgggctatgtagtcataataaattaggac

SEQ ID NO: 1144 - protein, 732 aa, Homo sapiens
MERQVLLSEPEEAAALYRGLSRQPALSAACLGPEVTTQYGGQYRTVHTEWTQRDLERMENIRFCRQYLVFHDGDSVVFAGPAGNSVETRGELLSRESPSGTMKAVLRKAGGTGPGEEKQFLEVWEKNRKLKSFNLSALEKHGPVYEDDCFGCLSWSHSETHLLYVAEKKRPKAESFFQTKALDVSASDDEIARLKKPDQAIKGDQFVFYEDWGENMVSKSIPVLCVLDVESGNISVLEGVPENVSPGQAFWAPGDAGVVFVGWWHEPFRLGIRFCTNRRSALYYVDLIGGKCELLSDDSLAVSSPRLSPDQCRIVYLQYPSLIPHHQCSQLCLYDWYTKVTSVVVDVVPRQLGENFSGIYCSLLPLGCWSADSQRVVFDSAQRSRQDLFAVDTQVGTVTSLTAGGSGGSWKLLTIDQDLMVAQFSTPSLPPTLKVGFLPSAGKEQSVLWVSLEEAEPIPDIHWGIRVLQPPPEQENVQYAGLDFEAILLQPGSPPDKTQVPMVVMPHGGPHSSFVTAWMLFPAMLCKMGFAVLLVNYRGSTGFGQDSILSLPGNVGHQDVKDVQFAVEQVLQEEHFDASHVALMGGSHGGFISCHLIGQYPETYRACVARNPVINIASMLGSTDIPDWCVVEAGFPFSSDCLPDLSVWAEMLDKSPIRYIPQVKTPLLLMLGQEDRRVPFKQGMEYYRALKTRNVPVRLLLYPKSTHALSEVEVESDSFMNAVLWLRTHLGS

SEQ ID NO: 1145 - DNA, 2146 bp, Homo sapiens
tactcccggagtcactcatcccttaagcaagcagggtggggttaggtgcgcgtgcgcggttttaatactcctccccgaactgccaactcttcacgcacgcgaagtaggccccaccctggctgggtttacgcgtgcgcactaacgggcctggtcccggaagaccacacgcgtgcgtggtggggactacggtgacagtaccccgggtggggcgagggccagtcatggcggagtcctggtctgggcaggccttgcaggctctgccggccacggtgctgggcgcgctgggcagcgagttcttgcgggagtgggaggcgcaggacatgcgcgtgaccctcttcaagctgctgctgctgtggttggtgttaagtctcctgggcatccagctggcgtgggggttctacgggaatacagtgaccgggttgtatcaccgtccaggtctgggtggtcagaatggatccacgcctgatggctccacgcatttcccttcgtgggaaatggcagcaaacgaacctctcaaaacccacagagaataagggaaggcagcagagggtctccaagggcatcactgggtctgctggcttctacactgggttctgctactccccagacctcagggacaactgccgggggttcagggttggtagcagggagtacccagtgcctacagggctgggcctcttctgcctcttaagcctgctccctcacccaggcactgggcaagtgaagagtttgcctgtactcttatctgggtgccttaaggagagagattgtgttcttcctctctcaggggtgataactcaggaagcctctgggttgggaagaccatcagttcttttgtcttaggtttcttttcctgtccctcttccatccccaagatgtgaccccataaaaatttttcctgagttggccaggcatggtggctcacgcctgtaatcccaacactttgggaggctgaggcaggcagatcacgaggtcaggagttcgagaccagcctgaccaacatggtgaaaaccccatctctactaaaaatacaaaaattagccgggtgtggtggcacacaccagtaatcccagctactcgggaggctgaagcaggagatttgcttgaacctgggaggcagaggttgcagtgagccaagattgcgccgttgtactccagcctgggcaacagagcaagacccatctcaaaaaaaaaatttttttcctgagaggaagcctgaggttgaccagctctggggtttgtaaggcaggtctgttttctcctaggccctgagttttctgaatctctggttttgctttgttggcaaggagccagggaatcctgacctgagccagaccttaagctctatggttatttagctggccattcaggtataaggcagggtggtgtacctgctggcactatccagatggaggcaccaaacacccacatacctggcccaaccagacttctcccgtgagccaggcaaaggaaattgtcatctgccaactgtcctactcatattcctctcagtccttcttgggggtaagctgattacctgaaggacagctgaacccctggggtagcctcctatccaccactgcttaagtgcctatgggaatgtgggtctgcaccttgtcccctcataggatggtaccaagcatttagtgcacagtggccccatcatagcctgcagcctcatcatttcccatctggacctggtacaaatgcacgtcacaggctcagctcctccccactagcatcttctctaccttcaagaaccaggcagccctgccatgtcacaataggccaggggagtttccaaagatgtgggtggcaaatgcccctatagaaacaccagtacctgaaagcactgtagccctggacctgcctccttccctcggggccatacttctgtttccatctgctgggccaccagccactttagtgacccctgcctacttccttcctgttggatatcatacttccatctggctgcctttgcttaagccatctttgtggtagaggggccctggaattgcagctgtactgaggatgatgttattcacagcccctggcccacccactaatactactgcacagagtcaggatctcacatttcaccccaggctcaactgaggatgtggcttattaaacacggaagtgc

SEQ ID NO: 1146 - protein, 103 aa, Homo sapiens
MAESWSGQALQALPATVLGALGSEFLREWEAQDMRVTLFKLLLLWLVLSLLGIQLAWGFYGNTVTGLYHRPGLGGQNGSTPDGSTHFPSWEMAANEPLKTHRE

SEQ ID NO: 1147 - DNA, 1693 bp, Homo sapiens
cccgagtgcttcccgcagagggctggtggtgggagcggagtgggtcgggcggggccgagccgggccgtgggccgtgtgggggccgggcggcggccgggccggcggacggcgggatgggctgcaccgtgagcgccgaggacaaggcggcggccgagcgctctaagatgatcgacaagaacctgcgggaggacggagagaaggcggcgcgggaggtgaagttgctgctgttgggtgctggggagtcagggaagagcaccatcgtcaagcagatgaagatcatccacgaggatggctactccgaggaggaatgccggcagtaccgggcggttgtctacagcaacaccatccagtccatcatggccattgtcaaagccatgggcaacctgcagatcgactttgccgacccctccagagcggacgacgccaggcagctatttgcactgtcctgcaccgccgaggagcaaggcgtgctccctgatgacctgtccggcgtcatccggaggctctgggctgaccatggtgtgcaggcctgctttggccgctcaagggaataccagctcaacgactcagctgcctactacctgaacgacctggagcgtattgcacagagtgactacatccccacacagcaagatgtgctacggacccgcgtaaagaccacggggatcgtggagacacacttcaccttcaaggacctacacttcaagatgtttgatgtgggtggtcagcggtctgagcggaagaagtggatccactgctttgagggcgtcacagccatcatcttctgcgtagccttgagcgcctatgacttggtgctagctgaggacgaggagatgaaccgcatgcatgagagcatgaagctattcgatagcatctgcaacaacaagtggttcacagacacgtccatcatcctcttcctcaacaagaaggacctgtttgaggagaagatcacacacagtcccctgaccatctgcttccctgagtacacaggggccaacaaatatgatgaggcagccagctacatccagagtaagtttgaggacctgaataagcgcaaagacaccaaggagatctacacgcacttcacgtgcgccaccgacaccaagaacgtgcagttcgtgtttgacgccgtcaccgatgtcatcatcaagaacaacctgaaggactgcggcctcttctgaggggcagcggggcctggcgggatgggccaccgccgactttgtaccccccaacccctgaggaagatgggggcaagaagatcacgctccccgcctgttcccccgccgcttttctcctctttcctctctttgttctcagctccccctgtcccctcagctccagacgtaggggaggggttgccacaggcctccctgtttgaagcctgcccttgtctgagatgctggtaatggccatggtacccccttctgggcatctgttctggtttttaaccattgtcttgttctgtgatgaggggaggggggcacatgctgagtctcccaaggctgcgtctggaggggcccctgcttctccagcctggacccccagctttgcccaacaccagcccctgccccagcccaagtccaaatgtttacagggagcctcctgcccagtcccccaaccccagccgctcggaggccccaaaggaaaaagcacaagaagcgtgagacgccaccattcctggaaaccacagtcc

SEQ ID NO: 1148 - protein, 355 aa, Homo sapiens
MGCTVSAEDKAAAERSKMIDKNLREDGEKAAREVKLLLLGAGESGKSTIVKQMKIIHEDGYSEEECRQYRAVVYSNTIQSIMAIVKAMGNLQIDFADPSRADDARQLFALSCTAEEQGVLPDDLSGVIRRLWADHGVQACFGRSREYQLNDSAAYYLNDLERIAQSDYIPTQQDVLRTRVKTTGIVETHFTFKDLHFKMFDVGGQRSERKKWIHCFEGVTAIIFCVALSAYDLVLAEDEEMNRMHESMKLFDSICNNKWFTDTSIILFLNKKDLFEEKITHSPLTICFPEYTGANKYDEAASYIQSKFEDLNKRKDTKEIYTHFTCATDTKNVQFVFDAVTDVIIKNNLKDCGLF

SEQ ID NO: 1149 - DNA, 2919 bp, Homo sapiens
tctgtgattgtggccaggcggggcaccctcggaggggagggttcggaagtggaatgcgaccccccagcctctttcccctaggggctgtaatctgatccctggggactccccccctagcctcccgccctcgccctcactgctgactcctcttccagatcctggggcagagtccagggcagctcaaggctcctccacacacacacccgctgaaccctgagcaccctgagctgctgagatggggcgggccggggctgccgccgtgatcccgggcctggccctgctctgggcagtggggctggggagtgccgcccccagccccccacgccttcggctctccttccaagagctccaggcctggcatggtctccagactttcagcctggagcgaacctgctgctaccaggccttgctggtggatgaggagcgtggacgcctgtttgtgggtgccgagaaccatgtggcctccctcaacctggacaacatcagcaagcgggccaagaagctggcctggccggcccctgtggaatggcgagaggagtgcaactgggcagggaaggacattggtactgagtgcatgaacttcgtgaagttgctgcatgcctacaaccgcacccatttgctggcctgtggcacgggagccttccacccaacctgtgcctttgtggaagtgggccaccgggcagaggagcccgtcctccggctggacccaggaaggatagaggatggcaaggggaagagtccttatgaccccaggcatcgggctgcctccgtgctggtgggggaggagctatactcaggggtggcagcagacctcatgggacgagactttaccatctttcgcagcctagggcaacgtccaagtctccgaacagagccacacgactcccgctggctcaatgagcccaagtttgtcaaggtattttggatcccggagagcgagaacccagacgacgacaaaatctacttcttctttcgtgagacggcggtagaggcggcgccggcactgggacgcctgtccgtgtcccgcgttggccagatctgccggaacgacgtgggcggccagcgcagcctggtcaacaagtggacgacgttcctgaaggcgcggctggtgtgctcggtgcccggcgtcgagggcgacacccacttcgatcagctccaggatgtgtttctgttgtcctcgcgggaccaccggaccccgctgctctatgccgtcttctccacgtccagcagcatcttccagggctctgcggtgtgcgtgtacagcatgaacgacgtgcgccgggccttcttgggaccctttgcacacaaggaggggcccatgcaccagtgggtgtcataccagggtcgcgtcccctacccgcggccaggcatgtgccccagcaagacctttggcaccttcagttccaccaaggacttcccagacgatgtcatccagtttgcgcggaaccaccccctcatgtacaactctgtcctgcccactggggggcgccctcttttcctacaagttggagccaattacaccttcactcaaattgccgcggaccgggttgcagccgctgacggacactatgacgtcctcttcattggcacagacgttggcacggtgctgaaggtgatctcggtccccaagggcagtaggcccagcgcagaggggctgctcctggaggagctgcacgtgtttgaggactcggccgctgtcaccagcatgcaaatttcttccaagaggcaccagctgtacgtagcctcgcggagcgcggtggcccagatcgcgttgcaccgctgcgctgcccacggccgcgtctgcaccgaatgctgtctggcgcgtgacccctactgcgcctgggacggggtcgcgtgcacgcgcttccagcccagtgccaagaggcggttccggcggcaagacgtaaggaatggcgaccccagcacgttgtgctccggagactcgtctcgtcccgcgctgctggaacacaaggtgttcggcgtggagggcagcagcgcctttctggagtgtgagccccgctcgctgcaggcgcgcgtggagtggactttccagcgcgcaggggtgacagcccacacccaggtgctggcagaggagcgcaccgagcgcaccgcccggggactactgctgcgcaggctgcggcgccgggactcgggcgtgtacttgtgcgccgccgtcgagcagggctttacgcaaccgctgcgtcgcctgtcgctgcacgtgttgagtgctacgcaggccgaacgactggcgcgggccgaggaggctgcgcccgccgcgccgccgggccccaaactctggtaccgggactttctgcagctggtggagccgggcggaggtggcagcgcgaactccctgcgcatgtgccgcccgcagcctgcgctgcagtcactgcccctggagtcgcggagaaagggccgtaaccggaggacccacgcccctgagcctcgcgctgagcgggggccgcgcagcgcaacgcactggtgaccagactgtccccacgccgggaaccaagcaggagacgacaggcgagagaggagccagacagaccctgaaaagaaggacgggttggggccgggcacattgggggtcaccggccgatggagacaccaaccgacaggccctggctgagggcagctgcgcgggcttatttattaacaggataacccttgaatgtagcagccccgggagggcggcacaggtcgggcgcaggattcagccggagggaagggacggggaagccgagctccagagcaacgaccagggccgaggaggtgcctggagtgcccaccctgggagacagaccccacctccttgggtagtgagcagtgagcagaaagctgtgaacaggctgggctgctggaggtggggcgaggcaggccgactgtactaaagtaacgcaataaacgcattatcagcca

SEQ ID NO: 1150 - protein, 749 aa, Homo sapiens
MGRAGAAAVIPGLALLWAVGLGSAAPSPPRLRLSFQELQAWHGLQTFSLERTCCYQALLVDEERGRLFVGAENHVASLNLDNISKRAKKLAWPAPVEWREECNWAGKDIGTECMNFVKLLHAYNRTHLLACGTGAFHPTCAFVEVGHRAEEPVLRLDPGRIEDGKGKSPYDPRHRAASVLVGEELYSGVAADLMGRDFTIFRSLGQRPSLRTEPHDSRWLNEPKFVKVFWIPESENPDDDKIYFFFRETAVEAAPALGRLSVSRVGQICRNDVGGQRSLVNKWTTFLKARLVCSVPGVEGDTHFDQLQDVFLLSSRDHRTPLLYAVFSTSSSIFQGSAVCVYSMNDVRRAFLGPFAHKEGPMHQWVSYQGRVPYPRPGMCPSKTFGTFSSTKDFPDDVIQFARNHPLMYNSVLPTGGRPLFLQVGANYTFTQIAADRVAAADGHYDVLFIGTDVGTVLKVISVPKGSRPSAEGLLLEELHVFEDSAAVTSMQISSKRHQLYVASRSAVAQIALHRCAAHGRVCTECCLARDPYCAWDGVACTRFQPSAKRRFRRQDVRNGDPSTLCSGDSSRPALLEHKVFGVEGSSAFLECEPRSLQARVEWTFQRAGVTAHTQVLAEERTERTARGLLLRRLRRRDSGVYLCAAVEQGFTQPLRRLSLHVLSATQAERLARAEEAAPAAPPGPKLWYRDFLQLVEPGGGGSANSLRMCRPQPALQSLPLESRRKGRNRRTHAPEPRAERGPRSATHW

SEQ ID NO: 1151 - DNA, 2314 bp, Homo sapiens
atgggccccaaaaaatcttggcgaagtcacttttttccactgcctgaggtttggctgttgctcctgttatcccaagctctaagcccttcccatggtccccagacccaggcaggggtaggtctcgtctggagtgtcccgctgccaagtgccctgagaagccagtcctgccttggtgctccactgagggacgcttcggagttaaccaccgtgcacttgttcccgacgcggggctggggcgcgcgcagggcattgtgggtgcatagttcagccagcgcgtcgtcggctgctagccgccgtcgcctgcgcgctcaggcctctgggattagtagttttagcctcgtggatggcggggcgcctcgcgaagatggtggcgcgcgtggcgtgtggctcccgtcgtctggccaagtctcagcgcagcgcaccggccggcgtctcgttggcctggagcccacacccaccgggtccctgaccccgcgccccccgcgcccggttcccggcatgcctcgcgcccgtaagggcaacacgctccggaagggtggtcagcgccgtggaggaggtgcccggagcagtgcccaagctgactcgggttccagtgacgatgaggcagccagtgaggcccgcagcaccgccagtgaatgccccagccttctcagcaccactgcagaggacagccttgggggggatgtcgtggatgagcagggccagcaggaagaccttgaggaaaagctgaaggagtatgtggactgtctcacagacaagagtgccaagacccggcagggtgctcttgagagcctgcgcctggccctagcgtcccgcctactccccgacttcttgctggagcgccgcctcacgctagccgatgccctggaaaagtgcctcaagaaagggaagggcgaggaacaagccctggctgctgctgtgctaggcctgctctgcgtgcagctgggccctggacctaagggtgaggagctgtttcacagcctgcagcctctgctggtctctgtgctcagtgacagcacagctagccctgctgcccggctccactgtgcttctgcccttggcctgggctgctacgtggctgccgctgacatccaggacctggtctcttgccttgcctgcttagaaagtgttttcagccggttctatggcttggggggcagctccacaagtcctgtggttcctgccagcctgcacggcctgctctctgctgccctgcaggcctgggcattgctgctcaccatctgccctagcacccaaatcagccacatccttgacaggcagctgccccggctgccccagctcttgtccagtgaaagtgtgaacctgcggatcgctgccggtgaaaccattgcactgctctttgagcttgcccgggaccttgaggaggagtttgtttacgaggacatggaggccctctgcagtgtcctgcgcactctggccactgacagtaacaagtaccgtgccaaggctgatcgtcggcgccagcgctctactttccgcgccgtgctgcactccgtggagggcggtgaatgcgaagaagagatagtgcgcttcggctttgaggtgctctacatggacagctgggctcggcaccggatctacgctgccttcaaggaagtgctgggttcgggcatgcaccaccacctccagaacaatgagctactccgtgacatctttggcctgggccctgtgctgttgctggatgccactgccctgaaggcctgcaaggttccacgctttgagaagcacctgtacaatgctgctgccttcaaagcccggaccaaggctcgaagccgtgtgcgggacaagcgggcagacatcctgtgaagcaggacctgctgaagaggagactttctatgcccttggtccgtatttttaacagaagacagtgcaacaactggtctccaccagtatttgtcactttattttttttaatgacaaaaccaaaaacagacatggggtgggtagctgggggcccggacacttgggaccctgacccctttgtccctgcactcagccctgtggccccttcctgtcctgtctcaggccaggctaaatatgtgccttcctcagggctgtggggcaggcactagggggcctttcccttcctttcctttctcaggccttgctcccccaggatgacccactcttaggggggtggtggcatctggacaaatgccaccacagcaggtggggtggcaaagctacctggaatggatttgtgtgctgatttttaaggattattacagataattaaacagaacggtcagccttcaaaaaaaaaaaaaaaaaaaaattcctgcggccgcaaggc

SEQ ID NO: 1152 - protein, 608 aa, Homo sapiens
MGPKKSWRSHFFPLPEVWLLLLLSQALSPSHGPQTQAGVGLVWSVPLPSALRSQSCLGAPLRDASELTTVHLFPTRGWGARRALWVHSSASASSAASRRRLRAQASGISSFSLVDGGAPREDGGARGVWLPSSGQVSAQRTGRRLVGLEPTPTGSLTPRPPRPVPGMPRARKGNTLRKGGQRRGGGARSSAQADSGSSDDEAASEARSTASECPSLLSTTAEDSLGGDVVDEQGQQEDLEEKLKEYVDCLTDKSAKTRQGALESLRLALASRLLPDFLLERRLTLADALEKCLKKGKGEEQALAAAVLGLLCVQLGPGPKGEELFHSLQPLLVSVLSDSTASPAARLHCASALGLGCYVAAADIQDLVSCLACLESVFSRFYGLGGSSTSPVVPASLHGLLSAALQAWALLLTICPSTQISHILDRQLPRLPQLLSSESVNLRIAAGETIALLFELARDLEEEFVYEDMEALCSVLRTLATDSNKYRAKADRRRQRSTFRAVLHSVEGGECEEEIVRFGFEVLYMDSWARHRIYAAFKEVLGSGMHHHLQNNELLRDIFGLGPVLLLDATALKACKVPRFEKHLYNAAAFKARTKARSRVRDKRADIL

SEQ ID NO: 1153 - DNA, 1691 bp, Homo sapiens
tgcggccgcgtttccgtggagacagccgagcctgcggaaggcggcggcggcggcacctgcgatcagcggctggggcaggttatggtagtgcggactgcggtgtgagcagagcggccacggggcccgccatgcgccggcggccctgacatgggcgccagcgggtccaaagctcggggcctgtggcccttcgcctcggcggccggaggcggcggctcagaggcagcaggagctgagcaagctttggtgcggcctcggggccgagctgtgccccccttcgtattcacgcgccgcggctctatgttctatgatgaggatggggatctggctcacgagttctatgaggagacaatcgtcaccaagaacgggcagaagcgggccaagctgaggcgagtgcataagaatctgattcctcagggcatcgtgaagctggatcacccccgcatccacgtggatttccctgtgatcctctatgaggtgtgaccctgggaggtggcagacagaagcaccccctgccccggcaagaaactcccaggctcaatcaaggtgtggcttccattgaggagcccaggctggggccacaaccctgaataaactctgttggcccataaccttcagctgtgagcgggtcggtcccacagtattggttgggtgttggtttgtgtgtggacaagaggtggttggtgggtggtgaaggctaatggcagagttagcaccccactctcccaagccacccctgcaagcagcatagcagggcatataccagtcaggaatgcccgttacctggttccttgcctggtctgctttcttccaagtttgcctggggcctagccctgctagaggctacagcactttacaagcaaggtatgctttcttccagcccctaggctgtgggcactgtatacaagtaggaacttcctttccttcacttcccttttaacccctagtcagagcatttcagccgtttgctacctcgattcctcctgtgttggacagaggctgggggcagtgccagcctgattcttccgacctacctgccatttgttcccgccttcagatggatggacagtttgctggctattgataggagtggggactgggtgggggcttctccctctacccagggctgggctgatccccctactgcaactaactgttgccccccaaccccgaacccccagttgaggagttgagagagtgcaggctggggtcaggacaggctgcggatgcttgtgcctatggggagttactccaacccacctattctgtctaatctccatggctttgcaccaaatcctccacccctccaattgggaggggactgttcaccaccttgtggtaagggacaacaccctaaggctggtgccagtagttatgagtagcctaccaccccctcccttacagtaacccccaccccttcaggatcagtcaagggaaagcactagaacccctgggtagggaaagaaaggagggaaaaaccataaaaggaatacttataatgtgaaggtttgtaaatagtccatgatgatgtcgtggcagagtctgatttctatatagaggtgactttttttttaagtactgtgcaagctctgtgcttctataatgtgggaaatggcttggggaggatggcccctagcttaggaagactgttgtgttatttgttcaatttcaataaaatgatttgtagatcctgc

SEQ ID NO: 1154 - protein, 110 aa, Homo sapiens
MGASGSKARGLWPFASAAGGGGSEAAGAEQALVRPRGRAVPPFVFTRRGSMFYDEDGDLAHEFYEETIVTKNGQKRAKLRRVHKNLIPQGIVKLDHPRIHVDFPVILYEV

SEQ ID NO: 1155 - DNA, 2509 bp, Homo sapiens
ggcacgaggctgcggccgccagctcccgcgaccgcctctcctgcccctcgccggtacctcagcaaggtgccactagaagcgccaggctggggccgcctctgagcgccccgcgggggccatggatggtgaaacagcagaggagcaggggggccctgtgcccccgccagttgcacccggcggacccggcttgggcggtgctccgggggggcggcgggagcccaagaagtacgcagtgaccgacgactaccagttgtccaagcaggtgctgggcctgggtgtgaacggcaaagtgctggagtgcttccatcggcgcactggacagaagtgtgccctgaagctcctgtatgacagccccaaggcccggcaggaggtagaccatcactggcaggcttctggcggcccccatattgtctgcatcctggatgtgtatgagaacatgcaccatggcaagcgctgtctcctcatcatcatggaatgcatggaaggtggtgagttgttcagcaggattcaggagcgtggcgaccaggctttcactgagagagaagctgcagagataatgcgggatattggcactgccatccagtttctgcacagccataacattgcccaccgagatgtcaagcctgaaaacctactctacacatctaaggagaaagacgcagtgcttaagctcaccgattttggctttgctaaggagaccacccaaaatgccctgcagacaccctgctatactccctattatgtggcccctgaggtcctgggtccagagaagtatgacaagtcatgtgacatgtggtccctgggtgtcatcatgtacatcctcctttgtggcttcccacccttctactccaacacgggccaggccatctccccggggatgaagaggaggattcgcctgggccagtacggcttccccaatcctgagtggtcagaagtctctgaggatgccaagcagctgatccgcctcctgttgaagacagaccccacagagaggctgaccatcactcagttcatgaaccacccctggatcaaccaatcgatggtagtgccacagaccccactccacacggcccgagtgctgcaggaggacaaagaccactgggacgaagtcaaggaggagatgaccagtgccttggccactatgcgggtagactacgaccaggtgaagatcaaggacctgaagacctctaacaaccggctcctcaacaagaggagaaaaaagcaggcaggcagctcctctgcctcacagggctgcaacaaccagtagctcatggggccttggaggagcctggcctctcagcctgcataacagactgaaatgtgctcaggccctggccaggagggcccagggtcattcttttaacaaaaggattattttgttgtgttttaatttgtcactcggaacttcaggatggaggaccctgaccctaagcctccttcagatctctggcccaggctcaagccctagagatgggcagggcctaggggctgggagctgcctgctgccatagcagcacctttagctaggttggcccgagtgaggcctctgtgctgtcctgccctggtgcatggccttagctttctaggccactgggagttgtggctgggcttcccatcttccacagagacatctccctgtgggatgggcagatgggcctggccttgagaaaggcattggccattggttgccatggtgaccagggaccacgttgctgcctgtgaatgctgagtgagcgagtaagggaggaggggcgattgagggttcacctctgccttggggaggctgatttctcacacactggctggccctctcattctcactcctccttgggccctgaggctgctggatccggtctgcctgcctccctgtgcagtccagccctgccttgctgcagccccagcccagatggcactcagcgctctcccctgagggagtccctgggcctagccatcccctcactattcccgacccaaagggtgacttttcatctgaacttaaggtgggagatatttttaacttttttccactttggaaaatgtcactgtgacaaaagccagcatactttccctgcacccatctgctcaccagatctcaggcaggaaagcccctctctgttgaagtcaggggctatcttttggtatacttgtgtgaaagtggctggttgggagcagagctaagtggcttcccattaacctgaggtctctttctttactctgggtcagacctgaggttggggaaggcgactgagccatgctcagaatgtctggtcctggcttgggcctgagtagggcagagagggcctttcatggctgatcagagcttaccagccccaccccaccatggtagccttagggtgctgagtgcctgatactgcctgacaagtgcctgacacgcagcctagttccttcctggcccctctctcactggctgggaaaccctagaccatgtcagataggacaacactgctgggttttacatccagatagtaataaacaccatttcatcatt

SEQ ID NO: 1156 - protein, 382 aa, Homo sapiens
MDGETAEEQGGPVPPPVAPGGPGLGGAPGGRREPKKYAVTDDYQLSKQVLGLGVNGKVLECFHRRTGQKCALKLLYDSPKARQEVDHHWQASGGPHIVCILDVYENMHHGKRCLLIIMECMEGGELFSRIQERGDQAFTEREAAEIMRDIGTAIQFLHSHNIAHRDVKPENLLYTSKEKDAVLKLTDFGFAKETTQNALQTPCYTPYYVAPEVLGPEKYDKSCDMWSLGVIMYILLCGFPPFYSNTGQAISPGMKRRIRLGQYGFPNPEWSEVSEDAKQLIRLLLKTDPTERLTITQFMNHPWINQSMVVPQTPLHTARVLQEDKDHWDEVKEEMTSALATMRVDYDQVKIKDLKTSNNRLLNKRRKKQAGSSSASQGCNNQ

SEQ ID NO: 1157 - DNA, 2002 bp, Homo sapiens
ggcggcatttcctggtgtctgagcctggcgcggaggctatgggcagccaggaggtgctgggccacgcggcccggctggcctcctccggtctcctcctgcaggtgttgtttcggttgatcacctttgtcttgaatgcatttattcttcgcttcctgtcaaaggaaatcgttggcgtagtaaatgtaagactaacgctgctttactcaaccaccctcttcctggccagagaggccttccgcagagcatgtctcagtgggggcacccagcgagactggagccagaccctcaacctgctgtggctaacagtccccctgggtgtgttttggtccttattcctgggctggatctggttgcagctgcttgaagtgcctgatcctaatgttgtccctcactatgcaactggagtggtgctgtttggtctctcggcagtggtggagcttctaggagagcccttttgggtcttggcacaagcacatatgtttgtgaagctcaaggtgattgcagagagcctgtcggtaattcttaagagcgttctgacagcttttctcgtgctgtggttgcctcactggggattgtacattttctctttggcccagcttttctataccacagttctggtgctctgctatgttatttatttcacaaagttactgggttccccagaatcaaccaagcttcaaactcttcctgtctccagaataacagatctgttacccaatattacaagaaatggagcgtttataaactggaaagaggctaaactgacttggagttttttcaaacagtctttcttgaaacagattttgacagaaggcgagcgatatgtgatgacatttttgaatgtattgaactttggtgatcagggtgtgtatgatatagtgaataatcttggctcccttgtggccagattaattttccagccaatagaggaaagtttttatatattttttgctaaggtgctggagaggggaaaggatgccacacttcagaagcaggaggacgttgctgtggctgctgcagtcttggagtccctgctcaagctggccctgctggccggcctgaccatcactgtttttggctttgcctattctcagctggctctggatatctacggagggaccatgcttagctcaggatccggtcctgttttgctgcgttcctactgtctctatgttctcctgcttgccatcaatggagtgacagagtgtttcacatttgctgccatgagcaaagaggaggtcgacaggtacaattttgtgatgctggccctgtcctcctcattcctggtgttatcctatctcttgacccgttggtgtggcagcgtgggcttcatcttggccaactgctttaacatgggcattcggatcacgcagagcctttgcttcatccaccgctactaccgaaggagcccccacaggcccctggctggcctgcacctatcgccagtcctgctcgggacatttgccctcagtggtggggttactgctgtttcggaggtattcctctgctgtgagcagggctggccagccagactggcacacattgctgtgggggccttctgtctgggagcaactctcgggacagcattcctcacagagaccaagctgatccatttcctcaggactcagttaggtgtgcccagacgcactgacaaaatgacatgacttcagggaagcctggacacccgaggcacctggaccagctatgggtagttctgtgggtggaacacattctgtgtaagagccccactgagggctctgcagcggagtgacagcaaccccaaagatgaggcaccagagagtgccactgcatgagacacctgtgaccattcgaagtctgaaatgcggggggggagtttcatttttaagtgaagaccaaaagccctttaaaaataatagttttttatcattttatagtaaaaaaaaaaaaaaagggcggaccatcaatcagcacgcagcaagaaaagcacattcatactagactatacaaaaaaaaaaaaaaa

SEQ ID NO: 1158 - protein, 541 aa, Homo sapiens
MGSQEVLGHAARLASSGLLLQVLFRLITFVLNAFILRFLSKEIVGVVNVRLTLLYSTTLFLAREAFRRACLSGGTQRDWSQTLNLLWLTVPLGVFWSLFLGWIWLQLLEVPDPNVVPHYATGVVLFGLSAVVELLGEPFWVLAQAHMFVKLKVIAESLSVILKSVLTAFLVLWLPHWGLYIFSLAQLFYTTVLVLCYVIYFTKLLGSPESTKLQTLPVSRITDLLPNITRNGAFINWKEAKLTWSFFKQSFLKQILTEGERYVMTFLNVLNFGDQGVYDIVNNLGSLVARLIFQPIEESFYIFFAKVLERGKDATLQKQEDVAVAAAVLESLLKLALLAGLTITVFGFAYSQLALDIYGGTMLSSGSGPVLLRSYCLYVLLLAINGVTECFTFAAMSKEEVDRYNFVMLALSSSFLVLSYLLTRWCGSVGFILANCFNMGIRITQSLCFIHRYYRRSPHRPLAGLHLSPVLLGTFALSGGVTAVSEVFLCCEQGWPARLAHIAVGAFCLGATLGTAFLTETKLIHFLRTQLGVPRRTDKMT

SEQ ID NO: 1159 - DNA, 2038 bp, Homo sapiens
atggagagctaccacaagcctgaccagcagaagctgcaggccttgaaggacacggccaaccgcctacgtatcagctccatccaggccaccactgcggcgggctctggccaccccacgtcatgctgcagcgccgcagagatcatggctgtcctctttttccacaccatgcgctacaagtcccaggacccccggaatccgcacaatgaccgctttgtgctctccaagggccatgcagctcccatcctctacgcggtctgggctgaagctggtttcctggccgaggcggagctgctgaacctgaggaagatcagctccgacttggacgggcacccggtcccgaaacaagctttcaccgacgtggccactggctccctgggccagggcctcggggccgcttgtgggatggcctacaccggcaaatacttcgacaaggccagctaccgagtctattgcttgctgggagacggggagctgtcagagggctctgtatgggaggccatggccttcgccagcatctataagctggacaacctcgtggccattctagacatcaatcgcctgggccagagtgacccggcccctctgcagcaccagatggacatctaccagaagcggtgcgaggccttcggttggcatgccatcatcgtggatggacacagcgtggaggagctgtgcaaggcctttggccaggccaagcaccagccaacagccatcattgccaagaccttcaagggccgagggatcacgggggtagaagataaggagtcttggcatgggaagcccctccccaaaaacatggctgagcagatcatccaggagatctacagccagatccagagcaaaaagaagatcctggcaacccctccacaggaggacgcaccctcagtggacattgccaacatccgcatgcccagcctgcccagctacaaagttggggacaagatagccacccgcaaggcctacgggcaggcactggccaagctgggccatgccagtgaccgcatcatcgccctggatggggacaccaaaaattccaccttctcggagatcttcaaaaaggagcacccggaccgcttcatcgagtgctacattgctgagcagaacatggtgagcatcgcggtgggctgtgccacccgcaacaggacggtgcccttctgcagcacttttgcagccttcttcacgcgggcctttgaccagattcgcatggccgccatctccgagagcaacattaacctctgcggctcccactgcggcgtttccatcggggaagacgggccctcccagatggccctagaagatctggctatgtttcggtcagtccccacatcaactgtcttttacccaagtgatggcgttgctacagagaaggcagtggaactagccgccaatacaaagggtatctgcttcatccggaccagccgcccagaaaatgccatcatctataacaacaatgaggacttccaggtcggacaagccaaggtggtcctgaagagcaaggatgaccaggtgaccgttatcggggctggggtgaccctgcacgaggccttggccgctgccgaactgctgaagaaagaaaagatcaacatccgcgtgctggaccccttcaccatcaagcccctggacagaaaactcattctcgacagcgctcgtgccaccaagggcaggatcctcaccgtggaggaccattattatgaaggtggcattggtgaggctgtgtccagtgcagtagtgggcgagcctggcatcactgtcacccacctggcagttaaccgggtaccaagaagtgggaagccggctgagctgctgaagatgtttggtatcgacagggatgccattgcacaagctgtgaggggcctcatcaccaaggcctagggcgggtatgaagtgtggggcgggggtctatacattcctgagattctgggaaaggtgctcaaagatgtactgagaggaggggtaaatatatgttttgagaaaaatgaaaaaaaaaaaaaaaaaaaaaaaaaaaaaaaaaaaaaaaaaaaaaaaaaaaaaaaaaaaa

SEQ ID NO: 1160 - protein, 623 aa, Homo sapiens
MESYHKPDQQKLQALKDTANRLRISSIQATTAAGSGHPTSCCSAAEIMAVLFFHTMRYKSQDPRNPHNDRFVLSKGHAAPILYAVWAEAGFLAEAELLNLRKISSDLDGHPVPKQAFTDVATGSLGQGLGAACGMAYTGKYFDKASYRVYCLLGDGELSEGSVWEAMAFASIYKLDNLVAILDINRLGQSDPAPLQHQMDIYQKRCEAFGWHAIIVDGHSVEELCKAFGQAKHQPTAIIAKTFKGRGITGVEDKESWHGKPLPKNMAEQIIQEIYSQIQSKKKILATPPQEDAPSVDIANIRMPSLPSYKVGDKIATRKAYGQALAKLGHASDRIIALDGDTKNSTFSEIFKKEHPDRFIECYIAEQNMVSIAVGCATRNRTVPFCSTFAAFFTRAFDQIRMAAISESNINLCGSHCGVSIGEDGPSQMALEDLAMFRSVPTSTVFYPSDGVATEKAVELAANTKGICFIRTSRPENAIIYNNNEDFQVGQAKVVLKSKDDQVTVIGAGVTLHEALAAAELLKKEKINIRVLDPFTIKPLDRKLILDSARATKGRILTVEDHYYEGGIGEAVSSAVVGEPGITVTHLAVNRVPRSGKPAELLKMFGIDRDAIAQAVRGLITKA

SEQ ID NO: 1161 - DNA, 2960 bp, Homo sapiens
agaagcctcctggcagacactggagccacgatgaagcccccaaggcctgtccgtacctgcagcaaagttctcgtcctgctttcactgctggccatccaccagactactactgccgaaaagaatggcatcgacatctacagcctcaccgtggactccagggtctcatcccgatttgcccacacggtcgtcaccagccgagtggtcaatagggccaatactgtgcaggaggccaccttccagatggagctgcccaagaaagccttcatcaccaacttctccatgatcatcgatggcatgacctacccagggatcatcaaggagaaggctgaagcccaggcacagtacagcgcagcagtggccaagggaaagagcgctggcctcgtcaaggccaccgggagaaacatggagcagttccaggtgtcggtcagtgtggctcccaatgccaagatcacctttgagctggtctatgaggagctgctcaagcggcgtttgggggtgtacgagctgctgctgaaagtgcggccccagcagctggtcaagcacctgcagatggacattcacatcttcgagccccagggcatcagctttctggagacagagagcaccttcatgaccaaccagctggtagacgccctcaccacctggcagaataagaccaaggctcacatccggttcaagccaacactttcccagcagcaaaagtccccagagcagcaagaaacagtcctggacggcaacctcattatccgctatgatgtggaccgggccatctccgggggctccattcagatcgagaacggctactttgtacactactttgcccccgagggcctaaccacaatgcccaagaatgtggtctttgtcattgacaagagcggctccatgagtggcaggaaaatccagcagacccgggaagccctaatcaagatcctggatgacctcagccccagagaccagttcaacctcatcgtcttcagtacagaagcaactcagtggaggccatcactggtgccagcctcagccgagaacgtgaacaaggccaggagctttgctgcgggcatccaggccctgggagggaccaacatcaatgatgcaatgctgatggctgtgcagttgctggacagcagcaaccaggaggagcggctgcccgaagggagtgtctcactcatcatcctgctcaccgatggcgaccccactgtgggggagactaaccccaggagcatccagaataacgtgcgggaagctgtaagtggccggtacagcctcttctgcctgggcttcggtttcgacgtcagctatgccttcctggagaagctggcactggacaatggcggcctggcccggcgcatccatgaggactcagactctgccctgcagctccaggacttctaccaggaagtggccaacccactgctgacagcagtgaccttcgagtacccaagcaatgccgtggaggaggtcactcagaacaacttccggctcctcttcaagggctcagagatggtggtggctgggaagctccaggaccgggggcctgatgtgctcacagccacagtcagtgggaagctgcctacacagaacatcactttccaaacggagtccagtgtggcagagcaggaggcggagttccagagccccaagtatatcttccacaacttcatggagaggctctgggcatacctgactatccagcagctgctggagcaaactgtctccgcatccgatgctgatcagcaggccctccggaaccaagcgctgaatttatcacttgcctacagctttgtcacgcctctcacatctatggtagtcaccaaacccgatgaccaagagcagtctcaagttgctgagaagcccatggaaggcgaaagtagaaacaggaatgtccactcaggttccactttcttcaaatattatctccagggagcaaaaataccaaaaccagaggcttccttttctccaagaagaggatggaatagacaagctggagctgctggctcccggatgaatttcagacctggggttctcagctccaggcaacttggactcccaggacctcctgatgttcctgaccatgctgcttaccaccccttccgccgtctggccatcttgcctgcttcagcaccaccagccacctcaaatcctgatccagctgtgtctcgtgtcatgaatatgaaaatcgaagaaacaaccatgacaacccaaaccccagcccccatacaggctccctctgccatcctgccactgcctgggcagagtgtggagcggctctgtgtggaccccagacaccgccaggggccagtgaacctgctctcagaccctgagcaaggggttgaggtgactggccagtatgagagggagaaggctgggttctcatggatcgaagtgaccttcaagaaccccctggtatgggttcacgcatcccctgaacacgtggtggtgactcggaaccgaagaagctctgcgtacaagtggaaggagacgctattctcagtgatgcccggcctgaagatgaccatggacaagacgggtctcctgctgctcagtgacccagacaaagtgaccatcggcctgttgttctgggatggccgtggggaggggctccggctccttctgcgtgacactgaccgcttctccagccacgttggagggacccttggccagttttaccaggaggtgctctggggatctccagcagcatcagatgacggcagacgcacgctgagggttcagggcaatgaccactctgccaccagagagcgcaggctggattaccaggaggggcccccgggagtggagatttcctgctggtctgtggagctgtagttctgatggaaggagctgtgcccaccctgtacacttggcttccccctgcaactgcagggccgcttctggggcctggaccaccatggggaggaagagtcccactcattacaaataaagaaaggtggtgtgagcctggg

SEQ ID NO: 1162 - DNA, 2040 bp, Homo sapiens
gcggccgccaagcgatccctgctccgcgcgacactgcgtgcccgcgcacgcagagaggcggtgacgcactttacggcggcagcgtaagtgcgtgacgctcgtcagtggcttcagttcacacgtggcgccagcggaggcaggttgatgtgtttgtgcttccttctacagccaatatgaaaaggcctaagttaaagaaagcaagtaaacgcatgacctgccataagcggtataaaatccaaaaaaaggttcgagaacatcatcgaaaattaagaaaggaggctaaaaagcggggtcacaagaagcctaggaaagacccaggagttccaaacagtgctccctttaaggaggctcttcttagggaagctgagctaaggaaacagaggcttgaagaactaaaacagcagcagaaacttgacaggcagaaggaactagaaaagaaaagaaaacttgaaactaatcctgatattaagccatcaaatgtggaacctatggaaaaggagtttgggctttgcaaaactgagaacaaagccaagtcgggcaaacagaattcaaagaagctgtactgccaagaacttaaaaaggtgattgaagcctccgatgttgtcctagaggtgttggatgccagagatcctcttggttgcagatgtcctcaggtagaagaggccattgtccagagtggacagaaaaagctggtacttatattaaataaatcagatctggtaccaaaggagaatttggagagctggctaaattatttgaagaaagaattgccaacagtggtgttcagagcctcaacaaaaccaaaggataaagggaagataaccaagcgtgtgaaggcaaagaagaatgctgctccattcagaagtgaagtctgctttgggaaagagggcctttggaaacttcttggaggttttcaggaaacttgcagcaaagccattcgggttggagtaattggtttcccaaatgtggggaaaagcagcattatcaatagcttaaaacaagaacagatgtgtaatgttggtgtatccatggggcttacaaggagcatgcaagttgtccccttggacaaacagatcacaatcatagatagtccgagcttcatcgtatctccacttaattcctcctctgcgcttgctctgcgaagtccagcaagtattgaagtagtaaaaccgatggaggctgccagtgccatcctttcccaggctgatgctcgacaggtagtactgaaatatactgtcccaggctacaggaattctctggaattttttactgtgcttgctcagagaagaggtatgcaccaaaaaggtggaatcccaaatgttgaaggtgctgccaaactgctgtggtctgagtggacaggtgcctcattagcttactattgccatccccctacatcttggactcctcctccatattttaatgagagtattgtggtagacatgaaaagcggcttcaatctggaagaactggaaaagaacaatgcacagagcataagagccatcaagggccctcatttggccaatagcatccttttccagtcttccggtctgacaaatggaataatagaagaaaaggacatacatgaagaattgccaaaacggaaagaaaggaagcaggaggagagggaggatgacaaagacagtgaccaggaaactgttgatgaagaagttgatgaaaacagctcaggcatgtttgctgcagaagagacaggggaggcactgtctgaggagactacagcaggtgaacagtctacaaggtcttttatcttggataaaatcattgaagaggatgatgcttatgacttcagtacagattatgtgtaacagaacaatggctttttatgattttttttttaacattttaagcagactgctaaactgttctctgtataagttatggtatgcatgagctgtgtaaattttgtgaatatgtattatattaaaaccaggcaacttggaatccctaaattctgtaaaaagacaattcatctcattgtgagtggaagtagttatctggaataaaaaaagaagatacctattg

SEQ ID NO: 1163 - DNA, 7871 bp, Homo sapiens
actctgtcctggacagcgtgcccaccagccatggcggggccccggggcctcctcccactctgcctcctggccttctgcctggcaggcttcagcttcgtcagggggcaggtgctgttcaaaggctgtgatgtgaaaaccacgtttgtcactcatgtaccctgcacctcgtgcgcggccatcaagaagcagacgtgtccctcaggctggctgcgggagctcccggatcagataacccaggactgccgctacgaagtacagctggggggctctatggtgtccatgagcggctgcagacggaagtgccggaagcaagtggtgcagaaggcctgctgccctggctactggggttcccggtgccatgaatgccctgggggcgctgagaccccatgcaatggccacgggacctgcttggatggcatggacaggaatgggacctgtgtgtgccaggaaaacttccgcggctcagcctgccaggagtgccaagaccccaaccggttcgggcctgactgccaatcggtgtgcagctgtgtgcacggagtgtgcaaccatgggccacgtggggatggaagctgcctgtgctttgctggatacactggcccccactgtgatcaagagctgcccgtctgccaggagctgcgctgtccccagaacacccagtgctccgcagaggctcccagctgcaggtgcctgcccggctacacacagcagggcagtgaatgccgagcccccaacccctgctggccatcaccctgctcactgctggcccagtgctcggtgagccccaaggggcaggctcagtgtcactgccctgagaactaccatggcgatgggatggtgtgtctgcccaaggacccatgcactgacaaccttggtggctgccccagcaactctactttgtgtgtgtaccagaagccgggccaggccttctgcacctgccggccaggcctggtcagcatcaacagcaacgcttctgcgggctgcttcgccttctgctcccccttctcctgcgaccggtctgccacttgccaggtgaccgctgatgggaagaccagctgtgtgtgcagggaaagcgaggtgggggatgggcgtgcctgctacggacacctgctccacgaggtgcagaaggccacgcagacaggccgggtgttcctgcagctgagggtcgccgtggccatgatggaccagggctgccgggaaatccttaccacagcgggccctttcaccgtgctggtgccatccgtctcctccttctcctccaggaccatgaatgcatcccttgcccagcagctctgtagacagcacatcatcgcagggcagcacatcctggaggacacaaggacccaacaaacacgaaggtggtggacgctggccgggcaggagatcaccgtcacctttaaccaattcacgaaatactcctacaagtacaaagaccagccccagcagacgttcaacatctacaaggccaacaacatagcagctaatggcgtcttccacgtggtcactggcctgcggtggcaggccccctctgggacccctggggatcccaagagaactatcggacagatcctcgcctctaccgaggccttcagccgctttgaaaccatcctggagaactgtgggctgccctccatcctggacggacctgggcccttcacagtctttgccccaagcaatgaggctgtggacagcttgcgtgacggccgcctgatctacctcttcacagcgggtctctctaaactgcaggagttggtgcggtaccacatctacaaccacggccagctgaccgttgagaagctcatctccaagggtcggatcctcaccatggcgaaccaggtcctggctgtgaacatttctgaggaggggcgcatcctgctgggacccgagggggtcccgctgcagagggtagacgtgatggccgccaatggtgtgatccacatgctggacggcatcctgctgcccccgaccatcctgcccatcctgcccaagcactgcagcgaggagcagcacaagattgtggcgggctcctgtgtggactgccaagccctgaacaccagcacgtgtccccccaacagtgtgaagctggacatcttccccaaggagtgtgtctacatccatgacccaacggggctcaatgtgctaaagaagggctgtgccagctactgcaaccaaaccatcatggaacaaggctgctgcaaaggttttttcgggcctgactgcacgcagtgtcctgggggcttctccaacccctgctatggcaaaggcaattgcagtgatgggatccagggcaatggggcctgcctctgcttcccagactacaagggcatcgcctgccacatctgctcgaacccaaacaagcatggagagcaatgccaggaagactgcggctgtgtccatggtctctgcgacaaccgcccaggcagtgggggggtgtgccagcagggcacgtgtgcccctggcttcagtggccggttctgcaacgagtccatgggggactgtgggcccacagggctggcccagcactgccacctgcatgcccgctgtgttagccaggagggtgttgccagatgtcgctgtcttgatggctttgagggtgatggcttctcctgcacacctagcaacccctgctcccacccggaccgtggaggctgctcagagaatgctgagtgtgtccctgggtccctgggcacccaccactgcacatgccacaaaggctggagtggggatggccgcgtctgtgtggctattgacgagtgtgagctggacatgagaggtggctgccacaccgatgccctctgcagctatgtgggccccgggcagagccgatgcacctgcaagctgggctttgccggggatggctaccagtgcagccccatcgacccctgccgggcaggcaatggcggctgccacggcctggccacctgccgggcagtggggggaggtcagcgggtctgcacgtgcccccctggctttgggggtgatggcttcagctgttatggagacatcttccgggagctggaggcaaatgcccacttctccatcttctaccaatggcttaagagtgccggcatcacgcttcctgccgaccgccgagtcacagccctggtgccctccgaggctgcagtccgtcagctgagccccgaggaccgagctttctggctgcagccaaggacgctgccgaacctggtcagggcccattttctccagggtgccctcttcgaggaggagctggcccggctgggtgggcaggaagtggccaccctgaaccccaccacacgctgggagattcgcaacattagtgggagggtctgggtgcagaatgccagcgtggatgtggctgacctccttgccaccaacggtgtcctacacatcctcagccaggtcttactgcccccccgaggggatgtgcccggtgggcaggggttgctgcagcagctggacttggtgcctgccttcagcctcttccgggaattgctgcagcaccatgggttggtgccccagattgaggctgccactgcctacaccatctttgtgcccaccaaccgctccctggaggcccagggcaacagcagtcacctggacgcagacacagtgcggcaccatgtggtcctgggggaggccctctccatggaaaccctgcggaagggtggacaccgcaactccctcctgggccctgcccactggatcgtcttctacaaccacagtggccagcctgaggtgaaccatgtgccactggaaggccccatgctggaggcccctggccgctcgctgattggtctgtcgggggtcctgacggtgggctcaagtcgctgcctgcatagccacgctgaggccctgcgggagaaatgtgtaaactgcaccaggagattccgctgcactcagggcttccagctgcaggacacacccaggaagagctgtgtctaccgatctggcttctccttctcccggggctgctcttacacatgtgccaagaagatccaggtgccggactgctgccctggtttctttggcacgctgtgtgagccatgcccagggggtctagggggggtgtgctcaggccatgggcagtgccaggacaggttcctgggcagcggggagtgccactgccacgagggcttccatggaacggcctgtgaggtgtgtgagctgggccgctacgggcccaactgcaccggagtgtgtgactgtgcccatgggctgtgccaggaggggctgcaaggggacggaagctgtgtctgtaacgtgggctggcagggcctccgctgtgaccagaaaatcaccagccctcagtgccctaggaagtgcgaccccaatgccaactgcgtgcaggactcggccggagcctccacctgcgcctgtgctgcgggatactccggcaatggcatcttctgttcagaggtggacccctgcgcccacggccatgggggctgctcccctcatgccaactgtaccaaggtggcacctgggcagcggacatgcacctgccaggatggctacatgggcgacggggagctgtgccaggaaattaacagctgtctcatccaccacgggggctgccacattcacgccgagtgcatccccactggcccccagcaggtctcctgcagctgccgtgagggttacagcggggatggcatccggacctgcgagctcctggacccctgctctaagaacaatggaggatgcagcccatatgccacctgcaaaagcacaggggatggccagaggacatgtacctgcgacacagcccacaccgtgggggacggcctcacctgccgtgcccgagtcggcctggagctcctgagggataagcatgcctcattcttcagcctccgcctcctggaatataaggagctcaagggcgatgggcctttcaccatcttcgtgccgcacgcagatctaatgagcaacctgtcgcaggatgagctggcccggattcgtgcgcatcgccagctggtgtttcgctaccacgtggttggctgtcggcggctgcggagcgaggacctgctggagcaggggtacgccacggccctctcagggcacccactgcgcttcagcgagagggagggcagcatatacctcaatgacttcgcgcgcgtggtgagcagcgaccatgaggccgtgaacggcatcctgcacttcattgaccgtgtcctgctgccccccgaggcgctgcactgggagcctgatgatgctcccatcccgaggagaaatgtcaccgccgccgcccagggcttcggttacaagatcttcagcggcctcctgaaggtggccggcctcctgcccctgcttcgagaggcatcccataggcccttcacaatgctgtggcccacagacgccgcctttcgagctctgcctccggatcgccaggcctggctgtaccatgaggaccaccgtgacaagctagcagccattctgcggggccacatgattcgcaatgtcgaggccttggcatctgacctgcccaacctgggcccacttcgaaccatgcatgggacccccatctctttctcctgcagccgaacgcgggccggtgagctcatggtgggtgaggatgatgctcgcattgtgcagcggcacttgccctttgagggtggcctggcctatggcatcgaccagctgctggagccacctggccttggtgctcgctgtgaccactttgagacccggcccctgcgactgaacacctgcagcatctgtgggctggagccaccctgtcctgaggggtcacaggagcagggcagccctgaggcctgctggcgcttctacccgaagttctggacgtcccctccgctgcactctttgggattacgcagcgtctgggtccaccccagcctttggggtaggccccaaggcctgggcaggggctgccaccgcaattgtgtcaccaccacctggaagcccagctgctgccctggtcactatggcagtgagtgccaagcttgccctggcggccccagcagcccttgtagtgaccgtggcgtgtgcatggacggcatgagtggcagtgggcagtgtctgtgccgttcaggttttgctgggacagcctgtgaactctgtgctcctggtgcctttgggccccattgtcaagcctgccgctgcactgtgcatggccgctgtgatgagggccttgggggctctggctcctgcttctgtgatgaaggctggactgggccacgctgtgaggtgcaactggagctgcagcctgtgtgtaccccaccctgtgcacccgaggctgtgtgccgtgcaggcaacagctgtgagtgcagcctgggctatgaaggggatggccgtgtgtgtacagtggcagacctgtgccaggacgggcatggtggctgcagtgagcacgccaactgtagccaggtaggaacaatggtcacttgtacctgcctgcccgactacgagggtgatggctggagctgccgggcccgcaacccctgcacagatggccaccgcgggggctgcagcgagcacgccaactgcttgagcaccggcctgaacacacggcgctgtgagtgccacgcaggctacgtaggcgatggactgcagtgtctggaggagtcggaaccacctgtggaccgctgcttgggccagccaccgccctgccactcagatgccatgtgcactgacctgcacttccaggagaaacgggctggcgttttccacctccaggccaccagcggcccttatggtctgaacttttcggaggctgaggcggcatgcgaagcacagggagccgtccttgcttcattccctcagctctctgctgcccagcagctgggcttccacctgtgcctcatgggctggctggccaatggctccactgcccaccctgtggttttccctgtggcggactgtggcaatggtcgggtgggcatagtcagcctgggtgcccgcaagaacctctcagaacgctgggatgcctactgcttccgtgtgcaagatgtggcctgccgatgccgaaatggcttcgtgggtgacgggatcagcacgtgcaatgggaagctgctggatgtgctggctgccactgccaacttctccaccttctatgggatgctattgggctatgccaatgccacccagcggggtctcgacttcctggacttcctggatgatgagctcacgtataagacactcttcgtccctgtcaatgaaggctttgtggacaacatgacgctgagtggcccagacttggagctgcatgcctccaacgccaccctcctaagtgccaacgccagccaggggaagttgcttccggcccactcaggcctcagcctcatcatcagtgacgcaggccctgacaacagttcctgggcccctgtggccccagggacagttgtggttagccgtatcattgtgtgggacatcatggccttcaatggcatcatccatgctctggccagccccctcctggcacccccacagccccaggcagtgctggcgcctgaagccccacctgtggcggcaggcgtgggggctgtgcttgccgctggagcactgcttggcttggtggccggagctctctacctccgtgcccgaggcaagcccatgggctttggcttctctgccttccaggcggaagatgatgctgatgacgacttctcaccgtggcaagaagggaccaaccccaccctggtctctgtccccaaccctgtctttggcagcgacaccttttgtgaacccttcgatgactcactgctggaggaggacttccctgacacccagaggatcctcacagtcaagtgacgaggctggggctgaaagcagaagcatgcacagggaggagaccacttttattgcttgtctgggtggatggggcaggaggggctgagggcctgtcccagacaataaaggtgccctcagcggatgtgggc

SEQ ID NO: 1164 - protein, 2570 aa, Homo sapiens
MAGPRGLLPLCLLAFCLAGFSFVRGQVLFKGCDVKTTFVTHVPCTSCAAIKKQTCPSGWLRELPDQITQDCRYEVQLGGSMVSMSGCRRKCRKQVVQKACCPGYWGSRCHECPGGAETPCNGHGTCLDGMDRNGTCVCQENFRGSACQECQDPNRFGPDCQSVCSCVHGVCNHGPRGDGSCLCFAGYTGPHCDQELPVCQELRCPQNTQCSAEAPSCRCLPGYTQQGSECRAPNPCWPSPCSLLAQCSVSPKGQAQCHCPENYHGDGMVCLPKDPCTDNLGGCPSNSTLCVYQKPGQAFCTCRPGLVSINSNASAGCFAFCSPFSCDRSATCQVTADGKTSCVCRESEVGDGRACYGHLLHEVQKATQTGRVFLQLRVAVAMMDQGCREILTTAGPFTVLVPSVSSFSSRTMNASLAQQLCRQHIIAGQHILEDTRTQQTRRWWTLAGQEITVTFNQFTKYSYKYKDQPQQTFNIYKANNIAANGVFHVVTGLRWQAPSGTPGDPKRTIGQILASTEAFSRFETILENCGLPSILDGPGPFTVFAPSNEAVDSLRDGRLIYLFTAGLSKLQELVRYHIYNHGQLTVEKLISKGRILTMANQVLAVNISEEGRILLGPEGVPLQRVDVMAANGVIHMLDGILLPPTILPILPKHCSEEQHKIVAGSCVDCQALNTSTCPPNSVKLDIFPKECVYIHDPTGLNVLKKGCASYCNQTIMEQGCCKGFFGPDCTQCPGGFSNPCYGKGNCSDGIQGNGACLCFPDYKGIACHICSNPNKHGEQCQEDCGCVHGLCDNRPGSGGVCQQGTCAPGFSGRFCNESMGDCGPTGLAQHCHLHARCVSQEGVARCRCLDGFEGDGFSCTPSNPCSHPDRGGCSENAECVPGSLGTHHCTCHKGWSGDGRVCVAIDECELDMRGGCHTDALCSYVGPGQSRCTCKLGFAGDGYQCSPIDPCRAGNGGCHGLATCRAVGGGQRVCTCPPGFGGDGFSCYGDIFRELEANAHFSIFYQWLKSAGITLPADRRVTALVPSEAAVRQLSPEDRAFWLQPRTLPNLVRAHFLQGALFEEELARLGGQEVATLNPTTRWEIRNISGRVWVQNASVDVADLLATNGVLHILSQVLLPPRGDVPGGQGLLQQLDLVPAFSLFRELLQHHGLVPQIEAATAYTIFVPTNRSLEAQGNSSHLDADTVRHHVVLGEALSMETLRKGGHRNSLLGPAHWIVFYNHSGQPEVNHVPLEGPMLEAPGRSLIGLSGVLTVGSSRCLHSHAEALREKCVNCTRRFRCTQGFQLQDTPRKSCVYRSGFSFSRGCSYTCAKKIQVPDCCPGFFGTLCEPCPGGLGGVCSGHGQCQDRFLGSGECHCHEGFHGTACEVCELGRYGPNCTGVCDCAHGLCQEGLQGDGSCVCNVGWQGLRCDQKITSPQCPRKCDPNANCVQDSAGASTCACAAGYSGNGIFCSEVDPCAHGHGGCSPHANCTKVAPGQRTCTCQDGYMGDGELCQEINSCLIHHGGCHIHAECIPTGPQQVSCSCREGYSGDGIRTCELLDPCSKNNGGCSPYATCKSTGDGQRTCTCDTAHTVGDGLTCRARVGLELLRDKHASFFSLRLLEYKELKGDGPFTIFVPHADLMSNLSQDELARIRAHRQLVFRYHVVGCRRLRSEDLLEQGYATALSGHPLRFSEREGSIYLNDFARVVSSDHEAVNGILHFIDRVLLPPEALHWEPDDAPIPRRNVTAAAQGFGYKIFSGLLKVAGLLPLLREASHRPFTMLWPTDAAFRALPPDRQAWLYHEDHRDKLAAILRGHMIRNVEALASDLPNLGPLRTMHGTPISFSCSRTRAGELMVGEDDARIVQRHLPFEGGLAYGIDQLLEPPGLGARCDHFETRPLRLNTCSICGLEPPCPEGSQEQGSPEACWRFYPKFWTSPPLHSLGLRSVWVHPSLWGRPQGLGRGCHRNCVTTTWKPSCCPGHYGSECQACPGGPSSPCSDRGVCMDGMSGSGQCLCRSGFAGTACELCAPGAFGPHCQACRCTVHGRCDEGLGGSGSCFCDEGWTGPRCEVQLELQPVCTPPCAPEAVCRAGNSCECSLGYEGDGRVCTVADLCQDGHGGCSEHANCSQVGTMVTCTCLPDYEGDGWSCRARNPCTDGHRGGCSEHANCLSTGLNTRRCECHAGYVGDGLQCLEESEPPVDRCLGQPPPCHSDAMCTDLHFQEKRAGVFHLQATSGPYGLNFSEAEAACEAQGAVLASFPQLSAAQQLGFHLCLMGWLANGSTAHPVVFPVADCGNGRVGIVSLGARKNLSERWDAYCFRVQDVACRCRNGFVGDGISTCNGKLLDVLAATANFSTFYGMLLGYANATQRGLDFLDFLDDELTYKTLFVPVNEGFVDNMTLSGPDLELHASNATLLSANASQGKLLPAHSGLSLIISDAGPDNSSWAPVAPGTVVVSRIIVWDIMAFNGIIHALASPLLAPPQPQAVLAPEAPPVAAGVGAVLAAGALLGLVAGALYLRARGKPMGFGFSAFQAEDDADDDFSPWQEGTNPTLVSVPNPVFGSDTFCEPFDDSLLEEDFPDTQRILTVK

SEQ ID NO: 1165 - DNA, 5132 bp, Homo sapiens
gcggcggtggcggcggagacccgaacatggcgaccgcgcgcaccttcgggcccgagcgggaagccgagccggccaaggaagcgcgcgtcgtgggctcggagcttgtggacacttatacggtttacatcatccaggtcactgatggcagccatgagtggacagtaaagcaccgctacagcgacttccatgacctgcatgaaaagctcgttgcagagagaaagattgataaaaacctgcttccgcccaaaaagataattgggaaaaactcaagaagcttggtggagaagagggagaaggatctggaggtctacctccagaagctcctggctgccttccctggcgtgacccccagagtactggcccacttcttgcattttcacttctatgagataaatggcatcaccgcggcactggctgaagagctctttgagaaaggagaacagctcctgggggccggcgaggtctttgccattggacccctgcagctgtatgccgtcacggagcagctgcagcagggaaagcccacgtgcgccagtggggatgccaagaccgacctcgggcacatcctggacttcacctgtcgccttaagtaccttaaggtttctggcacagaaggaccttttgggaccagcaacattcaggagcagctcctgccgttcgacctatcaatattcaagtccctgcatcaggtggagataagtcactgtgatgctaagcacatcagagggctggtcgcatcgaagcccaccttagccacgctgagtgtccgcttctcagcaacctcgatgaaggaagtccttgttcctgaagcctcagaatttgatgagtgggagcctgaaggcacaaccctagaaggccctgtgactgccgtcatccccacttggcaggcattgaccacgcttgacctgagccacaacagcatctccgagatcgacgagtctgtgaaactgatcccaaagattgagttcctggacctgagtcacaatggattgctggttgtggacaatctgcagcacctgtataaccttgtgcatctggacctgtcctacaacaagctctcctccttggaagggcttcacaccaagctggggaacatcaagaccttaaacctggcaggcaacctcctagagagtctgagtggcctgcacaagctctactcactggtcaacctggatctccgggacaacaggatcgaacagatggaggaggtccggagcataggcagcctcccgtgtctggagcacgtgtctctgctgaacaaccctctgagcatcatccccgactaccggaccaaggtgctggctcagttcggagagagggcctcagaggtctgtctggatgacacagtgaccacagagaaggagctggacactgtggaagtgctgaaagcaattcagaaagccaaggaggtcaagtccaaactgagcaacccagagaagaagggtggtgaagactcccggctctcagctgccccctgcatcagacccagcagctcccctcccactgtggctcccgcatctgcctccctgccccagcccatcctctctaaccaaggaatcatgttcgttcaggaggaggccctggccagcagcctctcgtccactgacagtctgactcccgagcaccagcccattgcccagggatgttctgattccttggagtccatccctgcgggacaggcagcttccgatgatttaagggacgtgccaggagctgttggtggtgcaagcccagaacatgccgagccggaggtccaggtggtgccggggtctggccagatcatcttcctgcccttcacctgcattggctacacggccaccaatcaggacttcatccagcgcctgagcacactgatccggcaggccatcgagcggcagctgcctgcctggatcgaggctgccaaccagcgggaggagggccagggtgaacagggcgaggaggaggatgaggaggaggaagaagaggaggacgtggctgagaaccgctactttgaaatggggcccccagacgtggaggaggaggagggaggaggccagggggaggaagaggaggaggaagaggaggatgaagaggccgaggaggagcgcctggctctggaatgggccctgggcgcggacgaggacttcctgctggagcacatccgcatcctcaaggtgctgtggtgcttcctgatccatgtgcagggcagtatccgccagttcgccgcctgccttgtgctcaccgacttcggcatcgcagtcttcgagatcccgcaccaggagtctcggggcagcagccagcacatcctctcctccctgcgctttgtcttttgcttcccgcatggcgacctcaccgagtttggcttcctcatgccggagctgtgtctggtgctcaaggtacggcacagtgagaacacgctcttcattatctcggacgccgccaacctgcacgagttccacgcggacctgcgctcatgctttgcaccccagcacatggccatgctgtgtagccccatcctctacggcagccacaccagcctgcaggagttcctgcgccagctgctcaccttctacaaggtggctggcggctgccaggagcgcagccagggctgcttccccgtctacctggtctacagtgacaagcgcatggtgcagacggccgccggggactactcaggcaacatcgagtgggccagctgcacactctgttcagccgtgcggcgctcctgctgcgcgccctctgaggccgtcaagtccgccgccatcccctactggctgttgctcacgccccagcacctcaacgtcatcaaggccgacttcaaccccatgcccaaccgtggcacccacaactgtcgcaaccgcaacagcttcaagctcagccgtgtgccgctctccaccgtgctgctggaccccacacgcagctgtacccagcctcggggcgcctttgctgatggccacgtgctagagctgctcgtggggtaccgctttgtcactgccatcttcgtgctgccccacgagaagttccacttcctgcgcgtctacaaccagctgcgggcctcgctgcaggacctgaagactgtggtcatcgccaagacccccgggacgggaggcagcccccagggctcctttgcggatggccagcctgccgagcgcagggccagcaatgaccagcgtccccaggaggtcccagcagaggctctggccccggccccagtggaagtcccagctccagcccctgcagcagcctcagcctcaggcccagcgaagactccggccccagcagaggcctcaacttcagctttggtcccagaggagacgccagtggaagctccagccccacccccagccgaggcccctgcccagtacccgagtgagcacctcatccaggccacctcggaggagaatcagatcccctcgcacttgcctgcctgcccgtcgctccggcacgtcgccagcctgcggggcagcgccatcatcgagctcttccacagcagcattgctgaggttgaaaacgaggagctgaggcacctcatgtggtcctcggtggtgttctaccagaccccagggctggaggtgactgcctgcgtgctgctctccaccaaggctgtgtactttgtgctccacgacggcctccgccgctacttctcagagccactgcaggatttctggcatcagaaaaacaccgactacaacaacagccctttccacatctcccagtgcttcgtgctaaagcttagtgacctgcagtcagtcaatgtggggcttttcgaccagcatttccggctgacgggttccaccccgatgcaggtggtcacgtgcttgacgcgggacagctacctgacgcactgcttcctccagcacctcatggtcgtgctgtcctctctggaacgcacgccctcgccggagcctgttgacaaggacttctactccgagtttgggaacaagaccacagggaagatggagaactacgagctgatccactctagtcgcgtcaagtttacctaccccagtgaggaggagattggggacctgacgttcactgtggcccaaaagatggctgagccagagaaggccccagccctcagcatcctgctgtacgtgcaggccttccaggtgggcatgccaccccctgggtgctgcaggggccccctgcgccccaagacactcctgctcaccagctccgagatcttcctcctggatgaggactgtgtccactacccactgcccgagtttgccaaagagccgccgcagagagacaggtaccggctggacgatggccgccgcgtccgggacctggaccgagtgctcatgggctaccagacctacccgcaggccctcaccctcgtcttcgatgacgtgcaaggtcatgacctcatgggcagtgtcaccctggaccactttggggaggtgccaggtggcccggctagagccagccagggccgtgaagtccagtggcaggtgtttgtccccagtgctgagagcagagagaagctcatctcgctgttggctcgccagtgggaggccctgtgtggccgtgagctgcctgtcgagctcaccggctagcccaggccacagccagcctgtcgtgtccagcctgacgcctactggggcagggcagcaggcttttgtgttctctaaaaatgttttatcctccctttggtaccttaatttgactgtcctcgcagagaatgtgaacatgtgtgtgtgttgtgttaattctttctcatgttgggagtgagaatgccgggcccctcagggctgtcggtgtgctgtcagcctcccacaggtggtacagccgtgcacaccagtgtcgtgtctgctgttgtgggaccgttgttaacacgtgacactgtgggtctgactttctcttctacacgtcctttcctgaagtgtcgagtccagtcctttgttgctgttgctgttgctgttgctgttgctgttggcatcttgctgctaatcctgaggctggtagcagaatgcacattggaagctcccaccccatattgttcttcaaagtggaggtctcccctgatccagacaagtgggagagcccgtgggggcaggggacctggagctgccagcaccaagcgtgattcctgctgcctgtattctctattccaataaagcagagtttgacaccgtcttaaaaaaaaa

SEQ ID NO: 1166 - protein, 1504 aa, Homo sapiens
MATARTFGPEREAEPAKEARVVGSELVDTYTVYIIQVTDGSHEWTVKHRYSDFHDLHEKLVAERKIDKNLLPPKKIIGKNSRSLVEKREKDLEVYLQKLLAAFPGVTPRVLAHFLHFHFYEINGITAALAEELFEKGEQLLGAGEVFAIGPLQLYAVTEQLQQGKPTCASGDAKTDLGHILDFTCRLKYLKVSGTEGPFGTSNIQEQLLPFDLSIFKSLHQVEISHCDAKHIRGLVASKPTLATLSVRFSATSMKEVLVPEASEFDEWEPEGTTLEGPVTAVIPTWQALTTLDLSHNSISEIDESVKLIPKIEFLDLSHNGLLVVDNLQHLYNLVHLDLSYNKLSSLEGLHTKLGNIKTLNLAGNLLESLSGLHKLYSLVNLDLRDNRIEQMEEVRSIGSLPCLEHVSLLNNPLSIIPDYRTKVLAQFGERASEVCLDDTVTTEKELDTVEVLKAIQKAKEVKSKLSNPEKKGGEDSRLSAAPCIRPSSSPPTVAPASASLPQPILSNQGIMFVQEEALASSLSSTDSLTPEHQPIAQGCSDSLESIPAGQAASDDLRDVPGAVGGASPEHAEPEVQVVPGSGQIIFLPFTCIGYTATNQDFIQRLSTLIRQAIERQLPAWIEAANQREEGQGEQGEEEDEEEEEEEDVAENRYFEMGPPDVEEEEGGGQGEEEEEEEEDEEAEEERLALEWALGADEDFLLEHIRILKVLWCFLIHVQGSIRQFAACLVLTDFGIAVFEIPHQESRGSSQHILSSLRFVFCFPHGDLTEFGFLMPELCLVLKVRHSENTLFIISDAANLHEFHADLRSCFAPQHMAMLCSPILYGSHTSLQEFLRQLLTFYKVAGGCQERSQGCFPVYLVYSDKRMVQTAAGDYSGNIEWASCTLCSAVRRSCCAPSEAVKSAAIPYWLLLTPQHLNVIKADFNPMPNRGTHNCRNRNSFKLSRVPLSTVLLDPTRSCTQPRGAFADGHVLELLVGYRFVTAIFVLPHEKFHFLRVYNQLRASLQDLKTVVIAKTPGTGGSPQGSFADGQPAERRASNDQRPQEVPAEALAPAPVEVPAPAPAAASASGPAKTPAPAEASTSALVPEETPVEAPAPPPAEAPAQYPSEHLIQATSEENQIPSHLPACPSLRHVASLRGSAIIELFHSSIAEVENEELRHLMWSSVVFYQTPGLEVTACVLLSTKAVYFVLHDGLRRYFSEPLQDFWHQKNTDYNNSPFHISQCFVLKLSDLQSVNVGLFDQHFRLTGSTPMQVVTCLTRDSYLTHCFLQHLMVVLSSLERTPSPEPVDKDFYSEFGNKTTGKMENYELIHSSRVKFTYPSEEEIGDLTFTVAQKMAEPEKAPALSILLYVQAFQVGMPPPGCCRGPLRPKTLLLTSSEIFLLDEDCVHYPLPEFAKEPPQRDRYRLDDGRRVRDLDRVLMGYQTYPQALTLVFDDVQGHDLMGSVTLDHFGEVPGGPARASQGREVQWQVFVPSAESREKLISLLARQWEALCGRELPVELTG

SEQ ID NO: 1167 - DNA, 2373 bp, Homo sapiens
ggcacgaggagcgtttcgtttggacttctcgacttgagtgcccgcctccttcgccgccgcctctgcagtcctcagcgcagttatgcccagttcttcccgctgtggggacacgaccacggaggaatccttgcttcagggactcgggaccctgctggaccccttcctcgggtttaggggatgtggggaccaggagaaagtcaggatccctaagagtcttccctgcctggatggatgagtggcttcttctccacctagattctttccacaggagccagcatacttcctgaacatggagagtgttgttcgccgctgcccattcttatcccgagtcccccaggcctttctgcagaaagcaggcaaatctctgttgttctatgcccaaaactgccccaagatgatggaagttggggccaagccagcccctcgggcattgtccactgcagcagtacactaccaacagatcaaagaaacccctccggccagtgagaaagacaaaactgctaaggccaaggtccaacagactcctgatggatcccagcagagtccagatggcacacagcttccgtctggacaccccttgcctgccacaagccagggcactgcaagcaaatgccctttcctggcagcacagatgaatcagagaggcagcagtgtcttctgcaaagccagtcttgagcttcaggaggatgtgcaggaaatgaatgccgtgaggaaagaggttgctgaaacctcagcaggccccagtgtggttagtgtgaaaaccgatggaggggatcccagtggactgctgaagaacttccaggacattatgcaaaagcaaagaccagaaagagtgtctcatcttcttcaagataacttgccaaaatctgtttccacttttcagtatgatcgtttctttgagaaaaaaattgatgagaaaaagaatgaccacacctatcgagtttttaaaactgtgaaccggcgagcacacatcttccccatggcagatgactattcagactccctcatcaccaaaaagcaagtgtcagtctggtgcagtaatgactacctaggaatgagtcgccacccacgggtgtgtggggcagttatggacactttgaaacaacatggtgctggggcaggtggtactagaaatatttctggaactagtaaattccatgtggacttagagcgggagctggcagacctccatgggaaagatgccgcactcttgttttcctcgtgctttgtggccaatgactcaaccctcttcaccctggctaagatgatgccaggctgtgagatttactctgattctgggaaccatgcctccatgatccaagggattcgaaacagccgagtgccaaagtacatcttccgccacaatgatgtcagccacctcagagaactgctgcaaagatctgacccctcagtccccaagattgtggcatttgaaactgtccattcaatggatggggcggtgtgcccactggaagagctgtgtgatgtggcccatgagtttggagcaatcaccttcgtggatgaggtccacgcagtggggctttatggggctcgaggcggagggattggggatcgggatggagtcatgccaaaaatggacatcatttctggaacacttggcaaagcctttggttgtgttggagggtacatcgccagcacgagttctctgattgacaccgtacggtcctatgctgctggcttcatcttcaccacctctctgccacccatgctgctggctggagccctggagtctgtgcggatcctgaagagcgctgagggacgggtgcttcgccgccagcaccagcgcaacgtcaaactcatgagacagatgctaatggatgccggcctccctgttgtccactgccccagccacatcatccctgtgcgggttgcagatgctgctaaaaacacagaagtctgtgatgaactaatgagcagacataacatctacgtgcaagcaatcaattaccctacggtgccccggggagaagagctcctacggattgcccccacccctcaccacacaccccagatgatgaactacttccttgagaatctgctagtcacatggaagcaagtggggctggaactgaagcctcattcctcagctgagtgcaacttctgcaggaggccactgcattttgaagtgatgagtgaaagagagaagtcctatttctcaggcttgagcaagttggtatctgctcaggcctgagcatgacctcaattatttcacttaaccccaggccattatcatatccagatggtcttcagagttgtctttatatgtgaattaagttatattaaattttaatctatagtaaaaacatagtcctggaaataaaaaaaaaaaaaaaaaaaaaaaaaaaaaaaaaa

SEQ ID NO: 1168 - protein, 640 aa, Homo sapiens
MESVVRRCPFLSRVPQAFLQKAGKSLLFYAQNCPKMMEVGAKPAPRALSTAAVHYQQIKETPPASEKDKTAKAKVQQTPDGSQQSPDGTQLPSGHPLPATSQGTASKCPFLAAQMNQRGSSVFCKASLELQEDVQEMNAVRKEVAETSAGPSVVSVKTDGGDPSGLLKNFQDIMQKQRPERVSHLLQDNLPKSVSTFQYDRFFEKKIDEKKNDHTYRVFKTVNRRAHIFPMADDYSDSLITKKQVSVWCSNDYLGMSRHPRVCGAVMDTLKQHGAGAGGTRNISGTSKFHVDLERELADLHGKDAALLFSSCFVANDSTLFTLAKMMPGCEIYSDSGNHASMIQGIRNSRVPKYIFRHNDVSHLRELLQRSDPSVPKIVAFETVHSMDGAVCPLEELCDVAHEFGAITFVDEVHAVGLYGARGGGIGDRDGVMPKMDIISGTLGKAFGCVGGYIASTSSLIDTVRSYAAGFIFTTSLPPMLLAGALESVRILKSAEGRVLRRQHQRNVKLMRQMLMDAGLPVVHCPSHIIPVRVADAAKNTEVCDELMSRHNIYVQAINYPTVPRGEELLRIAPTPHHTPQMMNYFLENLLVTWKQVGLELKPHSSAECNFCRRPLHFEVMSEREKSYFSGLSKLVSAQA

SEQ ID NO: 1169 - DNA, 711 bp, Homo sapiens
atgccctaccaatatccattgctgaccccggagcagaaggagctgtctgacatgactcatcgcatcgtagctctgggcaagggcatcccggctgcagatgagtccactgggagcactgccaagtggctgcagtccattggcaccgagaataccgaggagaaccggtgcttctaccgccagctgtggctgacagctgacaaccgcgtgaacccctgcatcaagggtgtcatcctcttccatgagacgctgtaccaaaaggcggatgatgggcgtcccttcccccaagttatcaaatccaagggcaatgttgtgagcatcaagtgtgtcaatgtcctggcccactatgccagcatctgccagcagaatggcattgtgctcttctactgccagtatgtaaccgagaaggtgtggctgctctacaaggctctgagtgaccatgacatctacctggaaggcaccttgctgaagtccaatatggtcaccccaggccatgcctgcatccagaagttttctcatgaggagattgccatggcaactgtcacaagcactacactctggggaataagcggcctagaaggatcacaactgggccagaacagggcccacccagactcatcactgaggcagagcaaggaagtgtccatcaacctcaatgccattaacaagtgccccctcctgaagccctggggcctgaccttctcatatagctga

SEQ ID NO: 1170 - DNA, 737 bp, Homo sapiens
ttccggcgttgttgaccctatttcccgtgctgcaccgcagcccctttctcttccggttctaggcgcttcgggagccgcggcttatggtgcagacatggccaagtccaagaaccacaccacacacaaccagtcccgaaaatggcacagaaatggtatcaagaaaccccgatcacaaagatacgaatctcttaagggggtggaccccaagttcctgaggaacatgcgctttgccaagaagcacaacaaaaagggcctaaagaagatgcaggccaacaatgccaaggccatgagtgcacgtgccgaggctatcaaggccctcgtaaagcccaaggaggttaagcccaagatcccaaagggtgtcagccgcaagctcgatcgacttgcctacattgcccaccccaagcttgggaagcgtgctcgtgcccgtattgccaaggggctcaggctgtgccggccaaaggccaaggccaaggccaaggccaaggatcaaaccaaggcccaggctgcagccccagcttcagttccagctcaggctcccaaacgtacccaggcccctacaaaggcttcagagtagatatctctgccaacatgaggacagaaggactggtgcgaccccccacccccgcccctgggctaccatctgcatggggctggggtcctcctgtgctatttgtacaaataaacctgaggcaggaaaaaaaaaaaaaaaaaaaaaaaaaaaaaaaaaaaaaaaaaaa

SEQ ID NO: 1171 - protein, 159 aa, Homo sapiens [sequence omitted]

SEQ ID NO: 1172 - DNA, 1415 bp, Homo sapiens
gggcgctgagaggcgagcgtgagcccagcgacaggagagtgagctcaccacgcgcagcgccatgaccagcaagggtcccgaggaggagcacccatcggtgacgctcttccgccagtacctgcgtatccgcactgtccagcccaagcctgactatggagctgctgtggctttctttgaggagacagcccgccagctgggcctgggctgtcagaaagtagaggtggcacctggctatgtggtgaccgtgttgacctggccaggcaccaaccctacactctcctccatcttgctcaactcccacacggatgtggtgcctgtcttcaaggaacattggagtcacgacccctttgaggccttcaaggattctgagggctacatctatgccaggggtgcccaggacatgaagtgcgtcagcatccagtacctggaagctgtgaggaggctgaaggtggagggccaccggttccccagaaccatccacatgacctttgtgcctgatgaggaggttgggggtcaccaaggcatggagctgttcgtgcagcggcctgagttccacgccctgagggcaggctttgccctggatgagggcatagccaatcccactgatgccttcactgtcttttatagtgagcggagtccctggtgggtgcgggttaccagcactgggaggccaggccatgcctcacgcttcatggaggacacagcagcagagaagctgcacaaggttgtaaactccatcctggcattccgggagaaggaatggcagaggctgcagtcaaacccccacctgaaagaggggtccgtgacctccgtgaacctgactaagctagagggtggcgtggcctataacgtgatacctgccaccatgagcgccagctttgacttccgtgtggcaccggatgtggacttcaaggcttttgaggagcagctgcagagctggtgccaggcagctggcgagggggtcaccctagagtttgctcagaagtggatgcacccccaagtgacacctactgatgactcaaacccttggtgggcagcttttagccgggtctgcaaggatatgaacctcactctggagcctgagatcatgcctgctgccactgacaaccgctatatccgcgcggtgggggtcccagctctaggcttctcacccatgaaccgcacacctgtgctgctgcacgaccacgatgaacggctgcatgaggctgtgttcctccgtggggtggacatatatacacgcctgctgcctgcccttgccagtgtgcctgccctgcccagtgacagctgagccctggaactcctaaacctttgcccctggggcttccatcccaaccagtgccaaggacctcctcttcccccttccaaataataaagtctatggacagggctgtctctgaagtactaacacaaggaca

SEQ ID NO: 1173 - protein, 408 aa, Homo sapiens
MTSKGPEEEHPSVTLFRQYLRIRTVQPKPDYGAAVAFFEETARQLGLGCQKVEVAPGYVVTVLTWPGTNPTLSSILLNSHTDVVPVFKEHWSHDPFEAFKDSEGYIYARGAQDMKCVSIQYLEAVRRLKVEGHRFPRTIHMTFVPDEEVGGHQGMELFVQRPEFHALRAGFALDEGIANPTDAFTVFYSERSPWWVRVTSTGRPGHASRFMEDTAAEKLHKVVNSILAFREKEWQRLQSNPHLKEGSVTSVNLTKLEGGVAYNVIPATMSASFDFRVAPDVDFKAFEEQLQSWCQAAGEGVTLEFAQKWMHPQVTPTDDSNPWWAAFSRVCKDMNLTLEPEIMPAATDNRYIRAVGVPALGFSPMNRTPVLLHDHDERLHEAVFLRGVDIYTRLLPALASVPALPSDS

SEQ ID NO: 1174 - DNA, 1835 bp, Homo sapiens
cgccagcacgcgcctgcttcccgtctgcgcgagtccacgcagctccccagatcaagaagctgaggccccaggttacacactaaagtaaatggcagaggcagaaataacacctatgtcctcctgaccccaaggcatgttcttaaagttctggaaacctcctggaggcttccttgctgctcctctgggactgccaccctgggcagggtgttctgtggcccctcatcatcgtggttttgaaccacaggcccttcaccagcacagcagcagcaggcatggcagcaagcgtggagcagcgcgagggcaccatccaggtgcagggccaggccctcttcttccgagaggccctgcccggcagtgggcaggctcgcttctctgtactgctgctgcatggtattcgcttctcctccgagacctggcagaacctgggtacactgcacaggctggcccaggctggctaccgggctgtggccattgacctgccaggtctggggcactccaaggaagcagcagcccctgcccctattggggagctggcccctggcagcttcctggcggctgtggtggatgccttggagctgggccccccggttgtgatcagtccatcactgagtggcatgtactccctgcccttcctcacggcccctggctcccagctcccgggctttgtgccagtggcccccatctgcactgacaaaatcaatgctgccaactatgccagtgtgaagactccagctctgattgtatatggagaccaggaccccatgggtcagaccagctttgagcacctgaagcagctgcccaaccaccgggtgctgatcatgaagggggcggggcacccctgttacctggacaaaccagaggagtggcatacagggctgctggacttcctgcaggggctccagtgaagcccagcactgctgcagggggtgggctgcctgcctgctctgagctctctcttgcacgctctctcttctctcccaggctctggctcatgcacatgcaacaggtgcgtctgtctatatgtctgggttcttgtcttttgtggtctgtttgtcttttctacctctttctcttgcagtgatagactgagggggtaaaatcaagagaaaaaactctcaggaatcaaggaacataatcctgtggagggtaatccattacatgagcttctcctgttcttccactttcctgcctggctttcactccttcccctgctctgcccagcctttccctcccacccactcctccttctgcaaatgccctgaaggccagcccttaccccaacacccacttccccacctccttaggccccagatacatacatgcccacatgcacgcttacatgtttagagccatccttgtttccaaatatgacccttcgcttgagggcaactgcataggtacatctaactctggactggcatgcacattgtcatgtgcagctttgcatatacacacatgcatacatgagcctccacacaagcacttgcacacatgtggactcctaaccatgctaacctcactggctgggaaggtggggaccccatgggccagcccttgcaggaggcccttttgcaaggcttagggtgtggccagccctgaaagctacttggacacaggtttcagctggccccagcccagaagtgacccccagaaagggagggccaccgctttgccccctgcttttacccttccttctgggtgctctacacctcaggttaccaggcctgaggcatctcagccaagcttgtttcctgctctgaggcttgtggggtgggagccagagtggaggtcggtgaaataaagtgatgcaattagaaaaaaaaaaaaaaaaaaaa

SEQ ID NO: 1175 - protein, 210 aa, Homo sapiens
MAASVEQREGTIQVQGQALFFREALPGSGQARFSVLLLHGIRFSSETWQNLGTLHRLAQAGYRAVAIDLPGLGHSKEAAAPAPIGELAPGSFLAAVVDALELGPPVVISPSLSGMYSLPFLTAPGSQLPGFVPVAPICTDKINAANYASVKTPALIVYGDQDPMGQTSFEHLKQLPNHRVLIMKGAGHPCYLDKPEEWHTGLLDFLQGLQ

SEQ ID NO: 1176 - DNA, 2033 bp, Homo sapiens
ataacccctcattgttcgcagctgatgtcactcgcagttgtgagcggccgcctctcccggggacaatgtgggactgagcggcccagccgccgtgccgccgccgccgccgccgcaggacagccccagcgagagccggccaggttgcagcgcggacacactcgcaggtcgctgtggccccagcctcgcctgacagaatgagcggctcggacgggggactggaggaggagccagagctcagcatcaccctcacgctgcggatgctgatgcacgggaaggaagtgggcagcatcatcgggaagaagggcgagactgtaaagcgaatccgggagcagagcagtgcccggatcaccatctccgagggctcctgccctgaacgcatcaccaccatcaccgggtctacagcagctgtcttccatgcagtctccatgattgctttcaaactggatgaggacctttgtgctgctcctgcaaatggtggaaatgtctccaggcctccagtgaccctgcgccttgtcatccctgccagtcagtgtggctcactgattgggaaggctggcaccaagatcaaggagatccgagagactacgggtgcccaggtacaggtggcaggggacctgctccccaactccacagagcgagctgttacggtatctggggtgcctgatgccatcatcctgtgtgtgcgccagatctgcgctgttatcctggagtccccacccaaaggagccactatcccctaccatccgagcctctccctaggtactgttcttctctctgccaaccagggcttctctgtccagggtcagtatggggctgtgaccccagctgaggtcaccaagctccagcagctctcaagccatgcggtcccctttgccacacccagcgtggtgccaggactggatcccggcacacagaccagctcacaggagttcttggttcccaacgatttgattggctgtgtgatcgggcgccagggcagcaagatcagcgagatccggcagatgtcaggggcacatatcaagatcgggaaccaagcagagggcgctggggagcggcatgtcaccatcactggctctccggtctccatcgccctggcccagtacctcatcactgcctgtctagagacggccaagtctacctctggggggacgcccagctcggcccccgcagacctgcctgcccccttctcgccacccctgacggccctgcccacagctccccctggcctgctgggcacaccctatgccatctccctctccaacttcatcggcctcaagcccatgcccttcttggctttaccacctgcttccccagggccgccgccgggcttggcggcctacactgccaagatggcagcagctaatgggagcaagaaggctgagcggcagaaattctccccctactgaggccagctgaggtacaggcaggggcaggcaggaccaccagcagggggctgcctctgcaccctacccgcccaaggagactccaccctggggtcccaaacgccgctaacgcccagacgcatggatgcaccccctaccctgcctccatctatgggagttctttctctcagagtgggggcagtttctggcccaggggtctgagctgcggcagccccagggcagggggccctacctcctcagctctgtgcttggatacagggagcagccaggagactccctagtgcccccaccatggcgggtgtcactcacgcactccccatcccttagggcttcctggcctactgcatccttgtgggagtcagggaggagggcccgttgggtagctggggccaggcttctctccccaccacctgcagatttcttgctgcttccactgatacccttttgactggaatgaactggctgggcttgtcagggggcaccccaaagagggggcactgccaggtagctgggggagtggcatggggcaggggcccagttctcagcagcagacactctgtacagttttttcaatccctgtttttgaataaatattctcagcgaccaaaaaaaaaaaaaaaaaaaaaaaaa

SEQ ID NO: 1177 - protein, 403 aa, Homo sapiens
MSGSDGGLEEEPELSITLTLRMLMHGKEVGSIIGKKGETVKRIREQSSARITISEGSCPERITTITGSTAAVFHAVSMIAFKLDEDLCAAPANGGNVSRPPVTLRLVIPASQCGSLIGKAGTKIKEIRETTGAQVQVAGDLLPNSTERAVTVSGVPDAIILCVRQICAVILESPPKGATIPYHPSLSLGTVLLSANQGFSVQGQYGAVTPAEVTKLQQLSSHAVPFATPSVVPGLDPGTQTSSQEFLVPNDLIGCVIGRQGSKISEIRQMSGAHIKIGNQAEGAGERHVTITGSPVSIALAQYLITACLETAKSTSGGTPSSAPADLPAPFSPPLTALPTAPPGLLGTPYAISLSNFIGLKPMPFLALPPASPGPPPGLAAYTAKMAAANGSKKAERQKFSPY

SEQ ID NO: 1178 - DNA, 1962 bp, Homo sapiens
cctctggagtccctgtggcagaactcaaatggaaggaggagcagctgcacccaggggagcagggtgtcacctccgttggatagagccggccaggttgcagcgcggacacactcgcaggtcgctgtggccccagcctcgcctgacagaatgagcggctcggacgggggactggaggaggagccagagctcagcatcaccctcacgctgcggatgctgatgcacgggaaggaagtgggcagcatcatcgggaagaagggcgagactgtaaagcgaatccgggagcagagcagtgcccggatcaccatctccgagggctcctgccctgaacgcatcaccaccatcaccgggtctacagcagctgtcttccatgcagtctccatgattgctttcaaactggatgaggacctttgtgctgctcctgcaaatggtggaaatgtctccaggcctccagtgaccctgcgccttgtcatccctgccagtcagtgtggctcactgattgggaaggctggcaccaagatcaaggagatccgagagactacgggtgcccaggtacaggtggcaggggacctgctccccaactccacagagcgagctgttacggtatctggggtgcctgatgccatcatcctgtgtgtgcgccagatctgcgctgttatcctggagtccccacccaaaggagccactatcccctaccatccgagcctctccctaggtactgttcttctctctgccaaccagggcttctctgtccagggtcagtatggggctgtgaccccagctgaggtcaccaagctccagcagctctcaagccatgcggtcccctttgccacacccagcgtggtgccaggactggatcccggcacacagaccagctcacaggagttcttggttcccaacgatttgattggctgtgtgatcgggcgccagggcagcaagatcagcgagatccggcagatgtcaggggcacatatcaagatcgggaaccaagcagagggcgctggggagcggcatgtcaccatcactggctctccggtctccatcgccctggcccagtacctcatcactgcctgtctagagacggccaagtctacctctggggggacgcccagctcggcccccgcagacctgcctgcccccttctcgccacccctgacggccctgcccacagctccccctggcctgctgggcacaccctatgccatctccctctccaacttcatcggcctcaagcccatgcccttcttggctttaccacctgcttccccagggccgccgccgggcttggcggcctacactgccaagatggcagcagctaatgggagcaagaaggctgagcggcagaaattctccccctactgaggccagctgaggtacaggcaggggcaggcaggaccaccagcagggggctgcctctgcaccctacccgcccaaggagactccaccctggggtcccaaacgccgctaacgcccagacgcatggatgcaccccctaccctgcctccatctatgggagttctttctctcagagtgggggcagtttctggcccaggggtctgagctgcggcagccccagggcagggggccctacctcctcagctctgtgcttggatacagggagcagccaggagactccctagtgcccccaccatggcgggtgtcactcacgcactccccatcccttagggcttcctggcctactgcatccttgtgggagtcagggaggagggcccgttgggtagctggggccaggcttctctccccaccacctgcagatttcttgctgcttccactgatacccttttgactggaatgaactggctgggcttgtcagggggcaccccaaagagggggcactgccaggtagctgggggagtggcatggggcaggggcccagttctcagcagcagacactctgtacagttttttcaatccctgtttttgaataaatattctcagcgacca

SEQ ID NO: 1179 - protein, 403 aa, Homo sapiens; identical to SEQ ID NO: 1177

SEQ ID NO: 1180 - DNA, 2623 bp, Homo sapiens
atttcttttagtgtctcagggtaagggaaaggctaggtacctaccatgtatgtgcttattgttttaattctcatcactctttggagatgggaatttgtatccccttctacagatggagaagctgaggctcagagggttgaatgggctccccaggcttacacagctcgtgagacacacataagcaccctggtcagagtgatgtgtggcgctcaaggtccatgcagtctctttcctctgggagtttgactagcccagctctggggtccccatgtaagggcaggggcagggtggactgggctcctctcgaacccctctttggctgccccagcgagagccggccaggttgcagcgcggacacactcgcaggtcgctgtggccccagcctcgcctgacagaatgagcggctcggacgggggactggaggaggagccagagctcaacatcaccctcacgctgcggatgctgatgcacgggaaggaagtgggcagcatcatcgggaagaagggcgagactgtaaagcgaatccgggagcaggtgaggatggagtttgggggaggagcccagggcacctgatgtggaggggagatccctgccccactttctctctgaaccactccttctgggctgaccagtgagtcccccagagggtggcagttttgagccttgcctcaggcctggtgagtggggcaggcagacaagttccggcaagggagcagggaagatgccccgctgcccggcgctcattctatatctgcagagcagtgcccggatcaccatctccgagggctcctgccctgaacgcatcaccaccatcaccgggtctacagcagctgtcttccatgcagtctccatgattgctttcaaactggatgaggacctttgtgctgctcctgcaaatggtggaaatgtctccaggcctccagtgaccctgcgccttgtcatccctgccagtcagtgtggctcactgattgggaaggctggcaccaagatcaaggagatccgagaggtgaggggcgagatataccacccacagggaatccggggcaagggagcagttgtaagaggggtgttgggcttatggcgtcctccccacctagagagctctgagcctgggcagcccttttctgggttatgggagcagccagaagtggcccctgttctctgtttgcagactacgggtgcccaggtacaggtggcaggggacctgctccccaactccacagagcgagctgttacggtatctggggtgcctgatgccatcatcctgtgtgtgcgccagatctgcgctgttatcctggagtccccacccaaaggagccactatcccctaccatccgagcctctccctaggtactgttcttctctctgccaaccagggcttctctgtccagggtcagtatggggctgtgaccccagctgaggtcaccaagctccagcagctctcaagccatgcggtcccctttgccacacccagcgtggtgccaggactggatcccggcacacagaccagctcacaggagttcttggttcccaacgatttgattggctgtgtgatcgggcgccagggcagcaagatcagcgagatccggcagatgtcaggggcacatatcaagatcgggaaccaagcagagggcgctggggagcggcatgtcaccatcactggctctccggtctccatcgccctggcccagtacctcatcactgcctgtctagagacggccaagtctacctctggggggacgcccagctcggcccccgcagacctgcctgcccccttctcgccacccctgacggccctgcccacagctccccctggcctgctgggcacaccctatgccatctccctctccaacttcatcggcctcaagcccatgcccttcttggctttaccacctgcttccccagggccgccgccgggcttggcggcctacactgccaagatggcagcagctaatgggagcaagaaggctgagcggcagaaattctccccctactgaggccagctgaggtacaggcaggggcaggcaggaccaccagcagggggctgcctctgcaccctacccgcccaaggagactccaccctggggtcccaaacgccgctaacgcccagacgcatggatgcaccccctaccctgcctccatctatgggagttctttctctcagagtgggggcagtttctggcccaggggtctgagctgcggcagccccagggcagggggccctacctcctcagctctgtgcttggatacagggagcagccaggagactccctagtgcccccaccatggcgggtgtcactcacgcactccccatcccttagggcttcctggcctactgcatccttgtgggagtcagggaggagggcccgttgggtagctggggccaggcttctctccccaccacctgcagatttcttgctgcttccactgatacccttttgactggaatgaactggctgggcttgtcagggggcaccccaaagagggggcactgccaggtagctgggggagtggcatggggcaggggcccagttctcagcagcagacactctgtacagttttttcaatccctgtttttgaataaatattctcagcgaccaaaaaaaaaaaaaaaaaaaaaaaaa

SEQ ID NO: 1181 - protein, 424 aa, Homo sapiens
MPRCPALILYLQSSARITISEGSCPERITTITGSTAAVFHAVSMIAFKLDEDLCAAPANGGNVSRPPVTLRLVIPASQCGSLIGKAGTKIKEIREVRGEIYHPQGIRGKGAVVRGVLGLWRPPHLESSEPGQPFSGLWEQPEVAPVLCLQTTGAQVQVAGDLLPNSTERAVTVSGVPDAIILCVRQICAVILESPPKGATIPYHPSLSLGTVLLSANQGFSVQGQYGAVTPAEVTKLQQLSSHAVPFATPSVVPGLDPGTQTSSQEFLVPNDLIGCVIGRQGSKISEIRQMSGAHIKIGNQAEGAGERHVTITGSPVSIALAQYLITACLETAKSTSGGTPSSAPADLPAPFSPPLTALPTAPPGLLGTPYAISLSNFIGLKPMPFLALPPASPGPPPGLAAYTAKMAAANGSKKAERQKFSPY

SEQ ID NO: 1182 - DNA, 1521 bp, Homo sapiens
gaattccgccgctgctacacgcctggtgggcagcatgtcggcaacagcggctgctcgtaagcggggaaagccggcctctggggccggggctggcgcgggggccggcaagcggcggcgaaaggccgactctgcgggggacaggggcaaatccaagggtggcggcaagatgaatgaggagatctccagcgactctgagagcgagagcctagctccaaggaagcctgaggaggaggaggaggaggagctggaggaaactgcacaggaaaagaagctgcgcttggccaagctctacctagagcagctccgtcagcaagaggaggagaaggctgaggcccgtgcatttgaggaggaccaggtggcggggcgcctgaaggaggatgtgcttgagcagaggggcaggctgcagaagttggtggcaaaagagatccaggccccagcctcagctgacattcgcgttttacgggggcaccagctctctatcacatgtttggtcgtcacccccgatgactcagccatcttctctgctgccaaagactgcagcatcattaagtggagcgtggagagtggacggaagctgcatgtgattcctcgagccaagaagggtgccgagggaaagccccctggccacagcagccacgtcctctgcatggccatctcctccgacggcaagtaccttgcctctggtgaccgcagcaagctcattctcatttgggaggcccagagctgccagcacttgtacaccttcacaggacaccgggatgcagtgtcgggtctggcattccgcagaggcacccaccagctctacagcacatcccacgatcgctccgtgaaggtgtggaatgtggcagagaactcctacgtggagacgctcttcggacaccaggacgctgtggctgcactggatgccttgagccgggagtgctgtgtgacggctgggggccgggatgggactgtacgtgtgtggaagatccccgaggagtcccagcttgtcttctatggccaccagggctccatcgactgcatccacctaatcaatgaggagcacatggtgtccggcgcggacgatggctctgtggccttgtggggtctctccaagaagcgaccacttgccctgcagcgtgaagctcacgggctgcggggagagccaggcctggagcagcccttctggatatcgtcggtggcagccctcctcaacacagaccttgtggccacaggctcccacagctcctgtgtgcggctttggcagtgtggggaaggcttccggcagcttgaccttctctgtgacatccccctggtgggttttatcaacagcctcaagttctccagctctggggacttcctggtggctggggtagggcaggagcacaggcttggccgatggtggagaatcaaagaggctcggaattctgtctgcatcatcccactccgcagggtccctgtacccccagctgctggttcctgacactcttatcctccttatttaagtccttcccaggctatgccccaccctctttgaagctt

SEQ ID NO: 1183 - protein, 475 aa, Homo sapiens
MSATAAARKRGKPASGAGAGAGAGKRRRKADSAGDRGKSKGGGKMNEEISSDSESESLAPRKPEEEEEEELEETAQEKKLRLAKLYLEQLRQQEEEKAEARAFEEDQVAGRLKEDVLEQRGRLQKLVAKEIQAPASADIRVLRGHQLSITCLVVTPDDSAIFSAAKDCSIIKWSVESGRKLHVIPRAKKGAEGKPPGHSSHVLCMAISSDGKYLASGDRSKLILIWEAQSCQHLYTFTGHRDAVSGLAFRRGTHQLYSTSHDRSVKVWNVAENSYVETLFGHQDAVAALDALSRECCVTAGGRDGTVRVWKIPEESQLVFYGHQGSIDCIHLINEEHMVSGADDGSVALWGLSKKRPLALQREAHGLRGEPGLEQPFWISSVAALLNTDLVATGSHSSCVRLWQCGEGFRQLDLLCDIPLVGFINSLKFSSSGDFLVAGVGQEHRLGRWWRIKEARNSVCIIPLRRVPVPPAAGS

SEQ ID NO: 1184 - DNA, 4330 bp, Homo sapiens
gcagcttaggcgccaccaaggcaagaacctagcctccgaggaccccaaaaagaagagagctcagaagccctcccacatgagaagaaacatacgaaagctactccgggaggatcaattggagcctgttaccaaagcagcacagcaagaagagttggaaagaaggaagcgcctggagcagcagaggaaagattatgcagcccctattcctactgttccgctggagttcctccctgaggaaattgctttaagggcaagtgacggtccccaactgcctcctcgggtcttggcccaggaagtcatttgtttggacagtagcagtggcagtgaggatgaaaaaagcagtcgagatgaggtgattgaactgagctctggagaggaggacactctgcacattgtggacagcagtgaatctgtcagtgaagatgatgaggaagaagagaagggtggcacccatgtcaatgatgtcttaaaccagcgtgacgcccttgggcgggtccttgtcaacctaaaccaccctccagaggaggaaaatgtcttccttgccccacagttggcacgggctgtgaaacctcatcagattggcgggatccggttcctttacgataacctagtggagtctctggagaggtttaagaccagcagtggctttggctgtattctggcccacagcatgggtctggggaaaactttgcaagtgatctctttcatcgacgtcctcttccgccacacgccagccaaaacagtccttgccattgtgccggttaatactcttcagaattggctggcagagttcaacatgtggcttccacctcctgaagccctcccggctgacaacaagcctgaagaagtccagcctcggttctttaaagttcacatcttgaatgatgagcacaagacgatggcatctcgtgctaaagtgatggctgattgggtgtcagagggtggcgtgctgctgatggggtacgagatgtacagactcctcactctgaagaaatcatttgccacaggtagaccgaagaaaaccaagaagcgttctcacccagtcatcattgatctagatgaggaagatcggcagcaggagtttcggagagagtttgagaaggctttatgccgccctggccctgatgtagtaatctgtgatgagggacaccgcatcaaaaactgccaggccagcacctcacaggctctgaagaatatccgctctcgccgccgggtggtgctgactgggtaccctctgcaaaacaacctcattgagtactggtgcatggtggactttgtgcgcccagacttccttggcacccggcaggagttcagcaacatgtttgaacgccctatcctgaatgggcaatgtattgacagcacacctcaggacgtccgcctcatgcggtaccggagccatgtcctgcacagtcttctggagggctttgtgcagaggagaggccacactgtgctgaagattcatctccctgccaaggaagaaaatgtgatccttgtgcggctctccaagatccagcgagatttgtatacacagttcatggatcgcttccgggactgtggtagcagcggttggctggggctgaacccccttaaggcattctgtgtgtgttgcaagatctggaatcaccctgatgtgctgtatgaagcccttcagaaggagagcttggccaatgagcaggacctagacgtggaagaacttggctctgcagggaccagtgcccgctgtccaccacagggaacaaaaggcaagggagaggatagcaccttggcttcctcgatgggagaggcaaccaatagcaagttcctacagggcgttggcttcaaccctttccaggagcgaggcaacaacattgtcacatatgaatgggccaaggaccttctgactaattaccagactggagtcctagaaaactctcccaagatggtactgcttttccacctgattgaggaaagtgtgaagcttggggacaagatccttgtgtttagccagagtctttccaccttggctctcatcgaggaattccttggaaaacgagaagtaccctgtccacctggtaccgaggggcaaggagcacagaagtgggttcgaaacatcagctacttccggctagatggtagcacccctgcctttgagagggagcggcttattaatcagttcaatgatcccagcaacctcaccacctggctgttccttctctctacaagggccggatgcttgggtgtgaatctgattggtgccaaccgagtggtggtgtttgatgcttcctggaacccttgccatgatgcccaggcagtatgtcgggtataccgttatggccagaaaaagccctgttacatctatcgccttgtggctgattacactctagaaaagaagatctatgaccgtcagatttccaagcagggcatgtcagatcgggtggtggatgatctaaatccaatgctgaacttcacacggaaagaggtggaaaacctactgcactttgttgagaaggagccagctccccaagtttccttgaacgtaaaggggatcaaggagtcagtcctgcaactggcctgtctgaagtaccctcacctcatcaccaaggagcctttcgagcatgagtcattgctcttgaaccgaaaggatcacaagctaaccaaggctgagaaaaaagcagcaaagaaaagctatgaggaagacaaacgcacatcagtcccctatacccgcccatcgtatgcgcagtattaccctgccagcgatcagagcctgaccagcatccccgccttcagccagagaaactggcagccaactttgaagggtgatgaaaagcctgtggccagtgttcgtcctgtgcagtccacccccatccccatgatgccccggcatgtcccattgggaggaagtgtaagctctgcctccagcacaaatccatccatgaactttcccatcaactacttgcagcgtgcaggagtccttgtgcagaaggtggtcaccacgacagatattgttattcctggactcaacagctccacagatgtacaggcaagaattaatgctggtgagagcatccacatcatccgtgggacaaaagggacgtacatccgtaccagtgatggacggatctttgctgtccgggcaactggcaaaccaaaggttcctgaagatggtcggatggctgcctcaggttcccagggaccttcttgcgagtccacaagcaacggcagacacagtgcctcatcacccaaagcccccgaccctgaggggctggccaggcccgtctctcctgacagcccagagatcatcagtgagcttcagcagtatgcagatgtggctgctgcccgggaatcccgtcagagctccccaagcaccaatgccgccctgcctggccccccggcccaacttatggacagcagtgctgttcccgggacagctctcggaactgagcctcgactagggggtcattgcctcaatagttccctcttggtgactggccagccctgtggtgacaggcacccagtgctggacttaaggggccacaagcgaaagttggccacaccacctgctgcccaggagtcatcccgccggcggtccaggaagggtcatctgccagcccccgtgcagccgtatgaacacgggtatccagtctctggcgggtttgccatgccacccgtctccttaaaccataacctcaccacccccttcacctcccaggctggggagaactccctgtttatgggcagtaccccctcctactaccagctgtccaatttgctggcagatgcccgcctggtgtttccagtgactactgaccctctggtgccagcaggccccgtcagttcctcttccacggctacctcagtcactgccagcaacccctccttcatgctcaacccttctgtgccagggatactacccagctattcactcccattctcacagccactcctgtccgagccgaggatgtttgcgccttttccttcccctgtcttgcccagcaacctttcgcggggcatgtctatctatccaggctacatgtccccacatgcaggctacccagctggtggcctcctacggtcccaggtgcctccatttgactctcatgaggttgccgaggttgggttcagctccaatgatgatgaggataaagacgatgatgtgatagaggtcactgggaaatagctagggagcccctccccacctcacttggggcccccagcaggttgcccaccaagctgaaaggcagtgatttagaccttttgagaataggacacttggcaggagggaaaaggaagaggacaaaggagggtggttggccaaagtggcagagctctgttgctgtttaacaaaagaggc

SEQ ID NO: 1185 - protein, 1359 aa, Homo sapiens
MRRNIRKLLREDQLEPVTKAAQQEELERRKRLEQQRKDYAAPIPTVPLEFLPEEIALRASDGPQLPPRVLAQEVICLDSSSGSEDEKSSRDEVIELSSGEEDTLHIVDSSESVSEDDEEEEKGGTHVNDVLNQRDALGRVLVNLNHPPEEENVFLAPQLARAVKPHQIGGIRFLYDNLVESLERFKTSSGFGCILAHSMGLGKTLQVISFIDVLFRHTPAKTVLAIVPVNTLQNWLAEFNMWLPPPEALPADNKPEEVQPRFFKVHILNDEHKTMASRAKVMADWVSEGGVLLMGYEMYRLLTLKKSFATGRPKKTKKRSHPVIIDLDEEDRQQEFRREFEKALCRPGPDVVICDEGHRIKNCQASTSQALKNIRSRRRVVLTGYPLQNNLIEYWCMVDFVRPDFLGTRQEFSNMFERPILNGQCIDSTPQDVRLMRYRSHVLHSLLEGFVQRRGHTVLKIHLPAKEENVILVRLSKIQRDLYTQFMDRFRDCGSSGWLGLNPLKAFCVCCKIWNHPDVLYEALQKESLANEQDLDVEELGSAGTSARCPPQGTKGKGEDSTLASSMGEATNSKFLQGVGFNPFQERGNNIVTYEWAKDLLTNYQTGVLENSPKMVLLFHLIEESVKLGDKILVFSQSLSTLALIEEFLGKREVPCPPGTEGQGAQKWVRNISYFRLDGSTPAFERERLINQFNDPSNLTTWLFLLSTRAGCLGVNLIGANRVVVFDASWNPCHDAQAVCRVYRYGQKKPCYIYRLVADYTLEKKIYDRQISKQGMSDRVVDDLNPMLNFTRKEVENLLHFVEKEPAPQVSLNVKGIKESVLQLACLKYPHLITKEPFEHESLLLNRKDHKLTKAEKKAAKKSYEEDKRTSVPYTRPSYAQYYPASDQSLTSIPAFSQRNWQPTLKGDEKPVASVRPVQSTPIPMMPRHVPLGGSVSSASSTNPSMNFPINYLQRAGVLVQKVVTTTDIVIPGLNSSTDVQARINAGESIHIIRGTKGTYIRTSDGRIFAVRATGKPKVPEDGRMAASGSQGPSCESTSNGRHSASSPKAPDPEGLARPVSPDSPEIISELQQYADVAAARESRQSSPSTNAALPGPPAQLMDSSAVPGTALGTEPRLGGHCLNSSLLVTGQPCGDRHPVLDLRGHKRKLATPPAAQESSRRRSRKGHLPAPVQPYEHGYPVSGGFAMPPVSLNHNLTTPFTSQAGENSLFMGSTPSYYQLSNLLADARLVFPVTTDPLVPAGPVSSSSTATSVTASNPSFMLNPSVPGILPSYSLPFSQPLLSEPRMFAPFPSPVLPSNLSRGMSIYPGYMSPHAGYPAGGLLRSQVPPFDSHEVAEVGFSSNDDEDKDDDVIEVTGK

SEQ ID NO: 1186 - DNA, 3127 bp, Homo sapiens
gccaccgccgcgccgagtccttttgtccaagatggcggcgccgggggcgctgcctcctcggccgccgcctccgccgccgccgctgtgagaaacctacgggccgcccgcccgccgcgccagcgccatgaagcggcagagcgagcgagactctagcccgagcgggcgcggctcgtcatcgtccgccaagcgtccgcgggagcgcgaacgggaggcggaggcgggcgggcggcgggcggcgcacaaggcctctggcggcgccaagcacccggttccagcgcgggcccgcgacaaaccccgcggcagcggaagcggcgggggcgggcatcgcgacggccgcggcaccggggacgcgaatcaccgcgcgagtagcgggcgctcctcgggctccggcgctggcggcgggggacgcggcggcaaggcctcgggggacccgggcgcctccggcatgtcgccccgcgcgtctcctctgccgccgcctccgccaccgcctggggccgagcccgcgtgtcccggctcatccgcggccgcgcctgagtacaagacgttgctcatcagcagcttgagccccgcgctgcccgccgagcacctcgaggaccggctcttccaccagttcaagcgcttcggcgagatcagcctccgcctgtcgcacacgcctgagctgggccgtgtggcctacgtgaatttccggcacccacaggacgcacgcgaggcccgccagcacgccctggcccggcagctgctgctctacgaccgcccgctcaaggtagagcccgtgtacctgcgtggcggcggcgggagcagtcggcgaagtagcagcagcagcgccgccgcttccacgcctcccccagggccgcccgcgcccgccgacccgctcggctacctcccgctacacggaggctaccagtacaagcagcgctcgctgtcccccgtcgctgccccgcccctgcgggagccccgtgcccgtcacgccgccgcagccttcgccctggatgccgctgctgccgccgccgtgggactgtcccgggagcgggccctggactactacgggctgtacgacgaccgtgggcgcccctatggctacccagctgtgtgtgaggaggacctgatgcccgaggatgaccagcgggccacgcgcaacctcttcattggtaacctggaccacagcgtatctgaggtggagctgcgaagggccttcgagaaatatggcatcatcgaggaggtggtcatcaagaggcctgcccgtggccagggcggtgcctatgccttcctcaagttccagaacctggacatggcccatagggctaaggtggccatgtcgggccgagtgattggtcgcaaccccattaagataggctatggcaaggccaaccccaccactcgtctctgggtgggtggcctgggacctaacacgtcactggcggctctggcccgagagtttgaccgctttgggagcattcggaccattgatcacgtcaaaggagatagctttgcctatattcagtacgagagcttggacgcagcccaggccgcctgtgctaaaatgaggggttttcccttgggtggaccagaccgcaggctccgcgtggattttgccaaagcagaggagactcggtacccccagcagtaccagccctcgccactccctgtgcattatgagctgctcacagatggatacacccggcaccgcaacctggacgccgacctggtgcgggacaggacgcccccacaccttctgtactcagaccgagaccggacttttttggaaggggactggaccagccccagtaaaagctctgaccgccgaaacagccttgagggctacagtcgctcagtgcgcagccggagtggtgagcgttggggggcagatggagaccgtggtttgcccaagccctgggaagagaggcggaaacggagaagcctttccagtgaccgtgggaggacaacccattcaccatatgaggaacggagtaggaccaagggcagtgggcagcagtcagagcggggctccgaccgcacccctgagcgcagccgcaaggagaaccactccagtgaagggaccaaggagtccagcagcaactccctcagcaacagcagacatggggctgaggaacggggccaccaccaccaccaccacgaggctgcagactcttcccacgggaagaaggcaagagacagcgagcgcaatcaccggaccacagaggccgagcccaagcctctggaagagccaaaacacgagaccaaaaagctgaagaatctttcagagtacgctcagacactacagctgggttggaatgggcttctggtgttgaaaaacagctgcttccccacgtctatgcatatcctagagggggaccagggggtgatcagcagtctcctcaaagaccacacttctgggagcaagctgacccagctgaagatcgcccagcgccttcgactggaccagcccaagcttgacgaggtcacacgacgcatcaagcaggggagccccaacggctatgcggtcctcttagccacccaggcaacccccagtgggcttggcactgaggggatgcccacagtagagcccggtctgcagaggcggcttctcaggaacctggtctcctacttgaaacagaagcaggccgcaggggtgatcagcttgccagtgggggggtccaagggcagagacggcacaggcatgctctacgccttcccaccctgcgacttttcccagcagtacctccagtcagcactaaggacattgggcaagctagaagaagaacacatggtgatagtcatcgtcagagacactgcctagcccaagcctgtctttcccagcgtcatgtttgtgtcacaaaagcagttattttaaaatctgatcccctctctaccctaccactttggtttgaattatctcctgggttattttggttcatttgggtggggatcaaagtcctgtccaccaccaaaactaagttcttagattttgggggatttttttttttaaacgatgagaagggaatccggttatgttgatttctagtgtacaagatactgtctgctgtggttctgtatttttttattttttgaccaactgtatggaaagttgtcagtaaaacctttgacagaggatggatttttaaacctg

SEQ ID NO: 1187 - DNA, 1100 bp, Homo sapiens
cttccgtcgctgctgtagtcgcttcctgcggccagcccgggttcaatcagcggccgacaactgtctagggctcagacaccaccagccaatgagggagggcagcgtggagccgcccgtctgggctcgcggctcctggaccaatggggaagtggcatgtgggagggcgccggggggccccccgccaatggggagctacggcgcgcggccgggacttggaggcggtgcggcgcggcgggtgcggttcagtcggtcggcggcggcagcggaggaggaggaggaggaggaggaggaggaggatgaggaggatgtgggccacgcaggggctggcggtggcgctggctctgagcgtgctgccgggcagccgggcgctgcggccgggcgactgcgaagtttgtatttcttatctgggaagattttaccaggacctcaaagacagagatgtcacattctcaccagccactattgaaaacgaacttataaagttctgccgggaagcaagaggcaaagagaatcggttgtgctactatatcggggccacagatgatgcagccaccaaaatcatcaatgaggtatcaaagcctctggcccaccacatccctgtggagaagatctgtgagaagcttaagaagaaggacagccagatatgtgagcttaagtatgacaagcagatcgacctgagcacagtggacctgaagaagctccgagttaaagagctgaagaagattctggatgactggggggagacatgcaaaggctgtgcagaaaagtctgactacatccggaagataaatgaactgatgcctaaatatgcccccaaggcagccagtgcacggaccgatttgtagtctgctcaatctctgttgcacctgagggggaaaaaacagttcaactgcttactcccaaaacagcctttttgtaatttattttttaagtgggctcctgacaatactgtatcagatgtgaagcctggagctttcctgatgatgctggccctacagtacccccatgaggggattcccttccttctgttgctggtgtactctaggacttcaaagtgtgtctgggatttttttattaaagaaaaaaaatttctagctgtc

SEQ ID NO: 1188 - DNA, 424 bp, Homo sapiens
accagcccagcctttcagtgcaggctccagccctccacccccacccgagttgcaggatgtcgatgacagacttgctgaacgctgaggacatcaagaaggcggtgggagcctttagcgctaccgactccttcgaccacaaaaagttcttccaaatggtcggcctgaagaaaaagagtgcggatgatgtgaagaaggtgtttcacatgctggacaaggacaaaagtggcttcatcgaggaggatgagctgggattcatcctaaaaggcttctccccagatgccagagacctgtctgctaaagaaaccaagatgctgatggctgctggagacaaagatggggacggcaaaattggggttgacgaattctccactctggtggctgaaagctaagaagcactgactgcccctggtcttccacctctctg

SEQ ID NO: 1189 - protein, 110 aa, Homo sapiens
MSMTDLLNAEDIKKAVGAFSATDSFDHKKFFQMVGLKKKSADDVKKVFHMLDKDKSGFIEEDELGFILKGFSPDARDLSAKETKMLMAAGDKDGDGKIGVDEFSTLVAES

SEQ ID NO: 1190 - DNA, 1601 bp, Homo sapiens
ccgcgccagtcgcctagcaggtcctctaccggcttattcctgtgccggatcttcatcggcacaggggccactgagacgtttctgcctccctctttcttcctccgctctttctcttccctctcgtttagtttgcctgggagcttgaaaggagaaagcacggggtcgccccaaaccccttctgcttctgcccatcacaagtgccactaccgccatgggcctcactatctcctccctcttctcccgactatttggcaagaagcagatgcgcattttgatggttggattggatgctgctggcaagacaaccattctgtataaactgaagttaggggagatagtcaccaccattcctaccattggttttaatgtggaaacagtagaatataagaacatttgtttcacagtatgggatgttggtggtcaagatagaattaggcctctctggaagcattacttccagaatacccagggtcttatttttgtggtagatagcaacgatcgtgaaagaattcaggaagtagcagatgagctgcagaaaatgcttctggtagatgaattgagagatgcagtgctgctactttttgcaaacaaacaggatttgccaaatgctatggccatcagtgaaatgacagataaactagggcttcagtctcttcgtaacagaacatggtatgttcaagccacttgtgcaacacaaggaactggtctgtatgaaggacttgactggctgtcaaatgagctttcaaaacgttaaatgaaattggatatctaaccaaggacatgtttgataaaattggtctaggcttgttacaacaaaattagtttgtatcttggttattaaacagtatctgggactggtttgggcagaatattaaacttattttgttgccaattattgtttaccgagtataatgttgctatttagcaatgtgcttggttttaaagaaattctccttgggaaaaaagtatcctcttttaattttacttcccataagcgtaaatgcctggacatagctcttgtgcaacctttaaataaattgttttgagtgttttttgagccccagacaaataatgttttaaagttatccccttgctactttactgatacctttatcattcctgagacagtttgctaatttaaaaatgtagcattccatttgtatttatttctctcccttgccaaaaagattttctaatactgcttgtaccagccagagaaagatccaaaacactactcagctctcttgcactgaggaaatttttccccctacattgactcctggcctacatcagccaaacttaaccttggtggggtttggatttgatagccaattagttctgtgctggttgcaaagaattgatatttagatggtttttaatactcagcagattgtcttcctttatattgtgtcttttttatgttgcatgttgcttttgttatcagcctgattttttgctcagtatatgatagttctgctgatgttttgtttattgggcagacatatcttcattaagagtttttggaaaactcaccaaattcgatgaatacattttcttcttaacccattcggaattattcctaataaaatgataaaatacgt

SEQ ID NO: 1191 - protein, 180 aa, Homo sapiens
MGLTISSLFSRLFGKKQMRILMVGLDAAGKTTILYKLKLGEIVTTIPTIGFNVETVEYKNICFTVWDVGGQDRIRPLWKHYFQNTQGLIFVVDSNDRERIQEVADELQKMLLVDELRDAVLLLFANKQDLPNAMAISEMTDKLGLQSLRNRTWYVQATCATQGTGLYEGLDWLSNELSKR

SEQ ID NO: 1192 - DNA, 2334 bp, Homo sapiens
tcaggaatcgggattaaaagttaaccagccagcatcctttgctataaggttgaatggcgcaaaaggcaagattgatgtataggtgcacagcccctctggagccgtggaggagtgccacgtgtctgagctggagccagataagtatgctgttcgcttcatccctcatgagaatggtgtccacaccatcgatgtcaagttcaatgggagccacgtggttggaagccccttcaaagtgcgcgttggggagcctggacaagcggggaaccctgccctggtgtccgcctatggcacgggactcgaagggggcaccacaggtatccagtcggaattctttattaacaccacccgagcaggtccagggacattatccgtcaccatcgaaggcccatccaaggttaaaatggattgccaggaaacacctgaagggtacaaagtcatgtacacccccatggctcctggtaactacctgatcagcgtcaaatacggtgggcccaaccacatcgtgggcagtcccttcaaggccaaggtgacaggccagcgtctagttagccctggctcagccaacgagacctcatccatcctggtggagtcagtgaccaggtcgtctacagagacctgctatagcgccattcccaaggcatcctcggacgccagcaaggtgacctctaagggggcagggctctcaaaggcctttgtgggccagaagaagttccttcctggtggactgcagcaaagctggctccaacatgctgctgatcggggtccatgggcccaccaccccctgcgaggaggtctccatgaagcatgtaggcaaccagcaatacaacgtcacatacgtcgtcaaggagaggggcgattatgtgctggctgtgaagtggggggaggaacacatccctggcagcccttttcatgtcacagtgccttaaaacagttttctcaaatcctggagagagttcttgtggttgcttttgttgcttgtttgtaattcattttatacaaagccctccagcctgtttgtggggctgaaaccccatccctaaaatattgctgttgtaaaatgccttcagaaataagtcctagactggactcttgagggacatattggagaatcttaagaaatgcaagcttgttcagggggctgagaagatcctgagtacactaggtgcaaaccagaactcttggtggaacagaccagccactgcagcagacagaccaggaacacaatgagactgacatttcaaaaaaacaaaactggctagcctgagctgctggttcactcttcagcatttatgaaacaaggctaggggaagatgggcagagaaaaaggggacacctagtttggttgtcatttggcaaaggagatgacttaaaatccgcttaatctcttccagtgtccgtgttaatgtatttggctattagatcactagcactgctttaccgctcctcatcgccaacacccccatgctctgtggccttcttacacttctcagagggcagagtggcagccgggcaccctacagaaactcagagggcagagtggcagccaggcccacatgtctctcaagtacctgtcccctcgctctggtgattatttcttgcagaatcaccacacgagaccatcccggcagtcatggttttgctttagttttccaagtccgtttcagtcccttccttggtctgaagaaattctgcagtggcgagcagtttcccacttgccaaagatcccttttaaccaacactagcccttgtttttaacacacgctccagcccttcatcagcctgggcagtcttaccaaaatgtttaaagtgatctcagaggggcccatggattaacgccctcatcccaaggtccgtcccatgacataacactccacacccgccccagccaacttcatgggtcactttttctggaaaataatgatctgtacagacaggacagaatgaaactcctgcgggtctttggcctgaaagttgggaatggttgggggagagaagggcagcagcttattggtggtcttttcaccattggcagaaacagtgagagctgtgtggtgcagaaatccagaaatgaggtgtagggaattttgcctgccttcctgcagacctgagctggctttggaatgaggttaaagtgtcagggacgttgcctgagcccaaatgtgtagtgtggtctgggcaggcagacctttaggttttgctgcttagtcctgaggaagtggccactcttgtggcaggtgtagtatctggggcgagtgttgggggtaaaagcccaccctacagaaagtggaacagcccggagcctgatgtgaaaggaccacgggtgttgtaagctgg

SEQ ID NO: 1193 - DNA, 1501 bp, Homo sapiens
atagaggacacgaccaagatggcggcggtgtctggcttggtgcggagaccccttcgggaggtctccgggctgctgaagaggcgctttcactggaccgcgccggctgcgctgcaggtgacagttcgtgatgctataaatcagggtatggatgaggagctggaaagagatgagaaggtatttctgcttggagaagaagttgcccagtatgatggggcatacaaggttagtcgagggctgtggaagaaatatggagacaagaggattattgacactcccatatcagagatgggctttgctggaattgctgtaggtgcagctatggctgggttgcggcccatttgtgaatttatgaccttcaatttctccatgcaagccattgaccaggttataaactcagctgccaagacctactacatgtctggtggccttcagcctgtgcctatagtcttcagagggcccaatggtgcctcagcaggtgtagctgcccagcactcacagtgctttgctgcctggtatgggcactgcccaggcttaaaggtggtcagtccctggaattcagaggatgctaaaggacttattaaatcagccattcgggataacaatccagtggtggtgctagagaatgaattgatgtatggggttccttttgaatttcctccggaagctcagtcaaaagattttctgattcctattggaaaagccaaaatagaaaggcaaggaacacatataactgtggtttcccattcaagacctgtgggccactgcttagaagctgcagcagtgctatctaaagaaggagttgaatgtgaggtgataaatatgcgtaccattagaccaatggacatggaaaccatagaagccagtgtcatgaagacaaatcatcttgtaactgtggaaggaggctggccacagtttggagtaggagctgaaatctgtgccaggatcatggaaggtcctgcgttcaatttcctggatgctcctgctgttcgtgtcactggtgctgatgtccctatgccttatgcaaagattctagaggacaactctatacctcaggtcaaagacatcatatttgcaataaagaaaacattaaatatttagtttggacttgaatatcaagtcgttgaaatttatttgaaatacttgctggcactgcacctggatttgtactgcaagacctgactattcataacggaaaacgatttctaaagcaacagcaggtatttttgtacagggaagtttaaatgtgtttgtgtatggaaaactctccactctcctcccctagatgccatgcttccttttgtctgttacggttgccatgttctttgaataacaaattatataacattttatcctctctcaccacaaggacaaagtatggatgtggcagagtcctcatgaaagatgtatccaaacaagataacttatatgtataaaattaaagcatataatatacatttactgttagtttgttttgataaggaataaaggaatttctaacatg

SEQ ID NO: 1194 - protein, 359 aa, Homo sapiens
MAAVSGLVRRPLREVSGLLKRRFHWTAPAALQVTVRDAINQGMDEELERDEKVFLLGEEVAQYDGAYKVSRGLWKKYGDKRIIDTPISEMGFAGIAVGAAMAGLRPICEFMTFNFSMQAIDQVINSAAKTYYMSGGLQPVPIVFRGPNGASAGVAAQHSQCFAAWYGHCPGLKVVSPWNSEDAKGLIKSAIRDNNPVVVLENELMYGVPFEFPPEAQSKDFLIPIGKAKIERQGTHITVVSHSRPVGHCLEAAAVLSKEGVECEVINMRTIRPMDMETIEASVMKTNHLVTVEGGWPQFGVGAEICARIMEGPAFNFLDAPAVRVTGADVPMPYAKILEDNSIPQVKDIIFAIKKTLNI

SEQ ID NO: 1195 - DNA, 1308 bp, Homo sapiens
gtcagccgctgtccccttagccgcgatgccgctggagaacctggaggaggagggtctgcccaagaaccccgacttgcgtatcgcgcagctgcgcttcctgctcagcctgcccgagcaccgcggagacgctgccgtgcgcgacgagctgatggcggccgtccgcgataacaacatggctccttactatgaagccttgtgcaaatccctcgactggcagatagacgtggacctactcaataaaatgaagaaggcaaatgaagatgagttgaagcgtttggatgaggagctggaagatgcagagaagaatctaggagagagcgaaattcgcgatgcaatgatggcaaaggccgagtacctctgccggataggtgacaaagagggagctctgacagcctttcgcaagacatatgacaaaactgtggccctgggtcaccgattggatattgtattctatctccttaggattggcttattttatatggataatgatctcatcacacgaaacacagaaaaggccaaaagcttaatagaagaaggaggagactgggacaggagaaaccgcctaaaagtgtatcagggtctttattgtgtggctattcgtgatttcaaacaggcagctgaactcttccttgacactgtttcaacatttacatcctatgaactcatggattataaaacatttgtgacttatactgtctatgtcagtatgattgccttagaaagaccagatctcagggaaaaggtcattaaaggagcagagattcttgaagtgttgcacagtcttccagcagttcggcagtatctgttttcactctatgaatgccgttactctgttttcttccaatcattagcggttgtggaacaggaaatgaaaaaggactggctttttgcccctcattatcgatactatgtaagagaaatgagaattcatgcatacagtcagctgctggaatcatataggtcattaacccttggctatatggcagaagcgtttggtgttggtgtggaattcattgatcaggaactgtccaggtttattgctgccgggagactacactgcaaaatagataaagtgaatgaaatagtagaaaccaacagacctgatagcaagaactggcagtaccaagaaactatcaagaaaggagatctgctactaaacagagttcaaaaactttccagagtaattaatatgtaaagccatgtaactaacaaaggatttgctttagagataattatttggaatttttatagcttacttcacaatgtgcccaggtcagctgtataaaataaatactgcattgttgtttc

SEQ ID NO: 1196 - protein, 389 aa, Homo sapiens
MPLENLEEEGLPKNPDLRIAQLRFLLSLPEHRGDAAVRDELMAAVRDNNMAPYYEALCKSLDWQIDVDLLNKMKKANEDELKRLDEELEDAEKNLGESEIRDAMMAKAEYLCRIGDKEGALTAFRKTYDKTVALGHRLDIVFYLLRIGLFYMDNDLITRNTEKAKSLIEEGGDWDRRNRLKVYQGLYCVAIRDFKQAAELFLDTVSTFTSYELMDYKTFVTYTVYVSMIALERPDLREKVIKGAEILEVLHSLPAVRQYLFSLYECRYSVFFQSLAVVEQEMKKDWLFAPHYRYYVREMRIHAYSQLLESYRSLTLGYMAEAFGVGVEFIDQELSRFIAAGRLHCKIDKVNEIVETNRPDSKNWQYQETIKKGDLLLNRVQKLSRVINM

SEQ ID NO: 1197 - DNA, 722 bp, Homo sapiens
gagaagccatgagcagcagtctctcgcaacaccctgtacgaggcggtgcgggaagtcctgcaccggaaccagcgcaagcgccgcaagttcctggagacggtggagttgcagatcagcttgaagaactatgacccccagaaggacaagtgcttctcgggcaccgtcagacttaagtccactccccgccctaagttgtgtgtgtgtgtcctgggggaccagcagcactgtgacgaggctaaggccgtggatatcccccacatggacatcgaggcgctgaaaaaactcaaaaagaataaaaaactggtcaagaagctggccaagaagtatgatgcgtttttggcctcagagtctctgatcaagcagattccacgaatcctcggcccaggtctaaataaggcaggaaagttcccttccctgctcacacacaacgaaaacatggtggccaaagtgggtgaggtgaagtccacaatcaagttccaaatgaagaaggtgttatgtctggctgtagctgttggtcacgtgaagatgacagccgatgagcttgtgtataacattcacctggctgtcaacttcttggtgtcattgctcaagaaaaactggcagaatgtccgggccttatatatcgagagcaccatgggcaagccccagcgcctatattaaggcacatttgaataaattctattaccagttcaaaaaaaaaaaaaaaaaaaacaaaaaaaaaa

SEQ ID NO: 1198 - DNA, 1558 bp, Homo sapiens
gctcaagtggccaaggcaagatgggtcaaagtcagagtggtggtcatggtcctggaggtggcaagaaggatgacaaggacaagaaaaagaaatatgaacctcctgtaccaactagagtggggaaaaagaagaagaaaacaaagggaccagatgctgccagcaaactgccactggtgacacctcacactcagtgccggttaaaattactgaagttagagagaattaaagactatcttctcatggaggaagaattcattagaaatcaggaacaaatgaaaccattagaagaaaagcaagaggaggaaagatcaaaagtggatgatctgagggggaccccgatgtcagtaggaaccttggaagagatcattgatgacaatcatgccatcgtgtctacatctgtgggctcagaacactacgtcagcattctttcatttgtagacaaggatctgctggaacctggctgctcggtcctgctcaaccacaaggtgcatgccgtgataggggtgctgatggatgacacggatcccctggtcacagtgatgaaggtagaaaaggccccccaggagacctatgcagatattggggggttggacaaccaaattcaggaaattaaggaatctgtggagcttcctctcacccatcctgaatattatgaagagatgggtataaagcctcctaagggggtcattctctatggtccacctggcacaggtaaaaccttgttagccaaagcagtagcaaaccaaacctcagccactttcttgagagtggttggctctgaacttattcagaagtacctaggtgatgggcccaaactcgtacgggaattgttccgagttgctgaagaacatgcaccgtccatcgtgtttattgatgaaattgacgccattgggacaaaaagataagactccaattctggtggtgagagagaaattcagcgaacaatgttggaactgctgaaccagttggatggatttgattctaggggagatgtgaaagttatcatggccacaaaccgaatagaaactttggatccagcacttatcagaccaggccgcattgacaggaagattgagttccccctgcctgatgaaaagacgaagaagcgcatctttcagattcacacaagcaggatgacgctggctgatgatgtaaccctggacgacctgatcatggctaaagatgacctctctggtgctgacatcaaggcaatctgtacagaagctggtctgatggccttaagagaacgtagaatgaaagtaacaaatgaagacttcaaaaaatctaaagaaaatgttctttataagaaacaggaaggcacccctgaggggctgtatctctaatgaaccatggctgtcatcaggaaaatggttgggagatttctcagtccctgaaagggatgaggctgggggagttgcccagaggaatccctgttcccactgatttttattagcaaaacatcctgtgtcttttggagtacgatgtgtaagtgcccattgggtggcctgttggtcactgtgcagcagtctgcttcccaataaagcgtgctctttcacaa

SEQ ID NO: 1199 - DNA, 1599 bp, Homo sapiens
atgccttcaaaggaaaagcaagggacactcaccttgcaaaaccatcaaaactattcccacagacgccacatgagcccccatttatctgacttaaaagaagcagggtctgctgggattcgaatcctctggttccagagagagaagctctttcaaagactggattctggcccacaaaagaaggttcctgcttactggaatcaagaggtcaaagatttttctgaatcatgcatccacggagaagagcccattagggctattccagcagacagcagtaaggatgtccatgagctttatgttgttgttgggagctgggattctactcttccagaagaatatgacctcaaaaggagccaccacagaacgagctcggcacccatctacgaatgtattgctaaggatcattggggatggggtgacccagaagtgaactggctccatgatccattaaacaatcaccctgaaatccacagtgccagtcaactaatggggcttggagccatcattaggtcactggaaaatgatatcttcctggaggttgatactggcttcaccatcctgagagcagaaggcttgagggaggaacagcctcctgggcatggaggcacctgccatcccacatcaaatcacagagccatgcttaaaagggccaggtggatgacttatgtggaagaagtgagccgggtgaggatttctacttcgagaaaccttgctcgaagcgctttcatcattctctcctacacaacaaaccctgaactcttagaagcagctcttggcacaggagcctccaacccgtttttcagccggctttctctacttgtttctcattccatgatcacagaaaacagctccattaagactcttttcaggtctaccaaagagctagtgattgcactcaatcgatgtttcttcggcattactcaaagtgcagctacactcagcccacagcttcacatcagatttatcagcagagaacaaaagaagtacttgaaattgccacttacaacgtttatgagtaaactggaatccaaagtctggcctctagccaagcggttacgccagtggcctgactcatatacaaagaagtttgagcacagaatctaccccatcacattttctgttggaaaccctcaggagtggaagaaattgttcaaaccctgtgctgcccagagactctttcttccgatcaacctggagctctacgcctcctacgtttacctgtccatgtcttactactttgaccgcgatgatgtggctttgaagaactttgccaaatactttcttcaccaatctcatgaggagagggaacatgccgagaaactgatgacgttgcagaaccaacgaggtggccgaatcttccttcaggatatcaagaaaccagactgtgacgactgggagagcgggctgaatgcgatggatgacaaaaatgacccccatttgtgtgacttcattgagacacattacctgaatgagcaggtgaaagccatcaaagaattgggtggccacgtgaccaacttgtgcaagatgggagcacccgaatctggctcggcagaatatctctttgacaagcacacgctgggagacagtgataacgaaagctaa

SEQ ID NO: 1200 - protein, 344 aa, Homo sapiens [sequence omitted]

SEQ ID NO: 1201 - DNA, 861 bp, Homo sapiens
atgatctttaattttgccctgaataccttggttgcaatcactgtgcttgtttatccaaacggcattcaggaatacatacgacaactgcctccgaattttccctacagagatgatgtcatgaggcctggagaacccaggagtttccaagctgtgctgccacccgagctctggatccacctggctgtggtggcctgtggcaatcggctggaggagacgctggtcatgctcaaatcagctgtgctttttagccacaggaagatccaattccacatcttcactgaagactctctgaagcccgagtttgataagcagttacgccagtggcctgactcatatacaaagaagtttgagcacagaatctaccccatcacattttctgttggaaaccctcaggagtggaagaaattgttcaaaccctgtgctgcccagagactctttcttccgatcaacctggagctctacgcctcctacgtttacctgtccatgtcttactactttgaccgcgatgatgtggctttgaagaactttgccaaatactttcttcaccaatctcatgaggagagggaacatgccgagaaactgatgacgttgcagaaccaacgaggtggccgaatcttccttcaggatatcaagaaaccagactgtgacgactgggagagcgggctgaatgcgatggatgacaaaaatgacccccatttgtgtgacttcattgagacacattacctgaatgagcaggtgaaagccatcaaagaattgggtggccacgtgaccaacttgtgcaagatgggagcacccgaatctggctcggcagaatatctctttgacaagcacacgctgggagacagtgataacgaaagctaa

SEQ ID NO: 1202 - DNA, 1691 bp, Homo sapiens
gtcggcgtgtcgagtggctcttcctggctgctgaggcgggttaaggtctgagggtcttgtggggccacggcgctgatcaccaggtgtttggcttggtcggttcttatttctcgcctggcaatggcgacgtacacctgcataacttgccgggtggcgttccgcgacgcggacatgcagcgggcccactataagacggactggcaccgctacaacctgcggcggaaggtggccagcatggccccagtgaccgccgagggcttccaggagcgagtgcgggcgcagcgggccgtcgcggaggaggagagcaagggctcggccacctactgcaccgtttgcagtaagaagtttgcctctttcaacgcctacgagaaccacctcaagtcccggcgtcacgttgagctggagaagaaggccgtgcaggcagtgaatcggaaagtggagatgatgaatgaaaagaacttggagaaaggactgggcgtggacagtgtggacaaggatgccatgaacgcggccatccagcaggccatcaaggcccagccgtccatgtctcccaagaaggcgcccccagcgcctgcaaaggaggccaggaatgtcgtggccgtgggtactggtggccgtgggacccacgaccgagacccgagtgagaaaccaccccggctccagtggtttgaacagcaggcgaagaagttggcaaagcagcaggaggaggacagcgaggaggaggaagaggacctggatggagacgattgggaagatattgattctgatgaagaattggaatgtgaggatactgaagcaatggacgatgtggtggagcaggatgcagaggaggaagaggctgaggaaggcccaccccttggtgccatccctatcacggactgcttattttgttcccatcattccagctcgctgatgaagaatgtggctcacatgaccaaagaccacagtttctttattcctgatatagaatatctttcagatattaagggactgattaaatacttgggagagaaagttggtgttggcaagatttgcttgtggtgcaacgagaaagggaagtccttctactccacagaagctgtacaggcacatatgaatgacaaaagccactgtaagctcttcacagatggcgatgctgctttggaatttgcagacttctatgattttaggagtagctatccagatcacaaggaaggggaggaccccaataaggctgaggagttgccctcagaaaagaacttggaatatgatgatgaaaccatggaattgattctgccttctggtgccagagtgggtcatcgctccttgatgagatactacaaacagcgatttggcttgtcaagagctgtggcagttgccaaaaatcggaaggccgtgggccgagtacttcagcagtacagagccctgggatggactggcagcacaggagcggctcttatgcgagagcgagacatgcagtatgtccaaaggatgaaatcaaaatggatgctgaagacaggaatgaagaacaatgccaccaagcagatgcactttcgggtccaagtgagattctgagagtctgctgggattgagcaatcatctcctgcccaagtttcctccttgccctgaggaccagtgaaagacagatcataggagagacccttttgctgctacttcattcgttctgacctaataataaaagttagaaccat

SEQ ID NO: 1203 - DNA, 1325 bp, Homo sapiens
gcagacgccattatcctctgtttctctgctgcaccgacctcgacgccttgcctgtggcccacttgttcactgactataggctactgcagcactggggtgtcagttgttggtcccacccagaacgcttcagttctgctctgcaaggatatataataactgattggtgtgcccatttaataaaagaatatgtaaactgaacagccggaagaaaccttcccgaacactgaaaccaatggtgaatttggtaaacaccctgcagaagatatggaagagtaacaagcatttaaaagatctagaaacactgatgagatggttgaattacgcattctgcttcagaccaagaatgctggggcagtgattggaaaaggaggcaagaatatcaaggctctccgtacagactacaatgccagtgtttcagtcccagacagcagtggccccgagcacatattgagtatcagtgctggtattgacacaattggagaaattctgaagaaaatcatccctaccttggaagagtaccaacactataaaggaagtgactttgactgcgagttgaggctgttgattcatcagagtctagcaggaggaattattggggtcgaaggtgctaaaatcaaagaacttcgagagaacactcaaaccaccatcaagcttttccaggaatgctgtccttattccactgacaagagttgttcttattggaggaaaacccgatagggttgtagagtgcataaagatcatccttgatcttatatatgagtctcccatcaaaggacgtgcacagccttatgatcccaatttttatgatgaaacctatgattatggtggttttacaattatgtttgatgaccgctgtggacgcccagtgggatttcccatgcggggaagaggtggttttgacagaatgcctcctggtcagggtgggcgtcccatgcctccatctagaagagattatgatgatatgagccctcgtcaaggaccacctccacctcctccaggacaaggtggtgagggtggtagcagagctcggaatcttcctcttcctcctccaccaccacctagagggggagacctcatggcctatgacagaagagggagacctggagactgttaccatggcatggttggtttcagtgctgatgaaacttgggactctgcaatagatacatggagcccatcagaatggcagatggcttatgaaccacagggtggctccagatatgattattcctatgcagggggtcgtggctcatatggtaatcttggtggacttattattactacacaagtaacgattcccaaagatttggctggatctattattg

SEQ ID NO: 1204 - DNA, 936 bp, Homo sapiens
atgaataaggagaatcactccttgatagctgagttcatcctcacaggatttacatatcatccaaagctgaagactgttctgtttgtggtgttctttgccatctatctgatcaccatggtggggaacattggtttggtggcattgatttatatagagcaacgtcttcacacaccaatgtacatatttttaggcaacctagttctgatggattcctgctgttcctctgctattactcccaagatgttagagaacttcttttctgaggacaaaaggattaccctgtatgaatgtatggcacaattttattttctctgtcttgctgaaactacagactgctttcttctggcggcaatggcctatgactgctatgtggccatatgcaacccactgcagtaccacaccatgatgtccaagacactctgcattcagatgactgcaggagcctacctagctggcaacctgcatcccatgattgaaaaccttttgcccagagtagcagccaaacttgaggttgccccgatttctgacatcattgcaatcaagtcacctgacacatttgtgagaactatttatgcaggaaatgctctatgtacagtgaagtgtgatgagaaagtgaaagtgttttctgtccgtggaacatcctttgatgctgcagcaacaagtggcggtagtgccagttcagaaaaggcatcaagtacttcaccagtggaaatatcagagtggcttgaccagaaattaacaaaaagtgatcgaccagagctaacaggtgccaaagtggtggtatctggtgactgctatccatcttataacacactcattcttcagacacatcacaatgcacatgatcagattacagctttctttaccttaaggatgtcttcaaccaccacaagccctttccaaattccctacgtagataaaatttggcttttctag

SEQ ID NO: 1205 - DNA, 411 bp, Homo sapiens
atgatcaggtgtgataagtgctgtaatgaaggcaattacaaggagaggatatttgaaatcattgctgtggagggtgagagtgcgaacaaggaagttgtggtagcattgctagacagttttgagagcccagctccagagcttaaggttattgctgaattaagccacgcctcattgctacgatttcagagtaccctggtaatagctgagcatgcaaatgattccctagcacccattactttaaataccattactgcagccacacgccttggaggtgaagtgtcctgcttagtagctggaaccaaatgtgacaaggtggcacaagatctctgtaaagtagcaggcatagcaaaagttctggtggctcagcatgatgtgtacaaaggcctacttccaggtgaggttttccagtag

SEQ ID NO: 1206 - DNA, 556 bp, Rattus norvegicus
tcttttcgccatcttttgtctttccgtggagctgtcgccatgaaggtcgagctgtgcagttttagcgggtacaagatctaccccggacacgggaggcgctacgccaggaccgacgggaaggttttccagtttcttaatgcgaaatgcgagtcggctttcctttccaagaggaatcctcggcagataaactggactgtcctctacagaaggaagcacaaaaagggacagtcggaagaaattcaaaagaaaagaacccgccgagcagtcaaattccagagggccattactggtgcatctcttgctgatataatggccaagaggaatcagaaacctgaagttagaaaggctcaacgagaacaagctatcagggctgctaaggaagcaaaaaaggctaagcaagcatctaaaaagactgcaatggctgctgctaaggcacctacaaaggcagcacctaagcaaaagattgtgaagcctgtgaaagtttcagctccccgagttggtggaaaacgctaaactggcagattagatttttaaataaagattggattataactct

SEQ ID NO: 1207 - protein, 157 aa, Rattus norvegicus [sequence omitted]

SEQ ID NO: 1208 - DNA, 542 bp, Homo sapiens
gctcctccacaggaggcctacacgccgccgcttgtgctgccgccatgtcgctagtgatccctgaaaagttccagcatattttgcgagtactcaacaccaacatcgatgggcagcggaaaatagcctttgccatcactgccattaagggtgtgggccgaagatatgctcatgtggtgttgaggaaagcagacactgacctcaccaagagggcgggagaactcactgatgatgaggtggaacgtgtgatcaccgttatgcagaatccacgccagtacaagatcccagactggttcttgaacagacagaaggatgtaaaggatggaaaatatagccaggtcctagccaatggtctggacaacaagctccgtgaagacctggagcgactgaagaagattcgggcccatagagggctgcgtcacttctggggccttcgtgtccgaggccagcacaccaagaccactggccgccgtggccgcaccgtgggtgtgtccaagaagaaataagtctgtaggccttgtctgttaataaatagtttatatacc

SEQ ID NO: 1209 - DNA, 2630 bp, Homo sapiens
accgcggggcctgggtcccagccggcagcagagagctggtcgcccaccaccccaagctactgctgccgcctggctatttcccggcggggcggtacgtggtggtggctgagagccccctgccgcctggcgagtgggagctgtgccgcgcagtcccgggccctgcttacgaggaggagggcactcccctgcgctaccagcgtctggtgccctctcgcagccgcatcgtgcggacgccctccctgaaggacagcccggcaggccgggggctcagcaaggccgccgtgtccgaggagctcaagtggtggcacgagcgtgcacgcctccggagcacccgcccccactcactggaccgccaaggagctttccgggtcaggagcctgccccttgggagagagggcttcgggcgagccctgggaccccgggcacaggtgcccacagtgtgtgtgctgcggagatcgcctgacggggcccctgtgcaagtctttgtacctgaaaaaggagagatcatcagccaggtgtaactctgcgccccacgctggaaaaaactgtttcatagaggggctgggctgagacccccccacccctgagtgcctctttcagcttccccatccccatcgcaggccgatgacctggagctgagaccttttattattttttttttacacgacttttttcagaagccctgacctaaggatttatatatgtggattgtcctcaatacccctgtgatatgattatgttttatcccccagagtttggcctactggacttaaggccttgcctgtctgactgacagcctctatctccttatataagacaagtggcaggggacgagtgaagcagagtgggccaccttgggagttctccaacactctgtgctctggttctaagaaattccctggggaactgcccctggccctcctgtcccactattgctggaggctggacatggtacatactcatgcacatgactctcccccatttcccaggtctctgggtaccccagcctgggctgggggagaatctcttccccctttctaatgtgctctgtgatgcacacaccaagtggtaggtcaaaggtcagtatatcccggtggtgtattgtcttgctagaccctgctattttcctgaccccctaaatcctctttagggacccagtcactataccctgtctatgccctgtgggctcccagacccctgagctttgagtcagtggcatcacggtttgtagcctcagggggtccggctgggggctgatccatgcttgtggttagtggacagcagccaccctttgacagctacctctgggcatctcaagggcttgcagccccactgctccttctaacattttgtttgtttgtttttgagatggagtctcgctctgtcgcccaggctggaatgcagtagcaagatttcggctcactgcaacccccgtctcccgggttcaagcgaatctcctgcctcagccttccgagtagctgggattacaggcaagcaccaccatgcctgctaattttttatttttagtagagatggggtttcatcatgttggccaggctggtctcgaactcctgacctcaagtgatccacctgccttggcctttcaaagtgctgggattacaggcatgagccaccgcacctggcccttctaacgttttttcatcatagtcccaaaaaccaatactttacaagtggttttggaaaggcaccacttttgtggcatgttctggttgggagagggagtcacagttcctactccccccaccagctatgcttctgctctgagaaggtggttatttatacaaacatggacatactcactcccaagggctgatgagatgctgaattttctttgggggcattcattaattgtcccagctgcagcgactggagcaagtctggaagctgcctgtgctaagaccacccagctgtccctgggttctcatcctagggccttctttgcttccaggtcaggggacctgcttcaatgagaaagcaactgaattgaggctaggagaggtagggagagctgagttctgacttcacctgtgcagaactctctgcccccatgttacctggactggaacagactgtgaatatagcagaaggttccaagaactctggtgtctgacctagaagaggcacagttctctctactggaaagaaaacgatgtagccgattgcacaagggtgccaagggaagacccaggatggcccatcaaaggaacctgggggaggatgcaggaggctgaagggatgcacctggcatttctctcactgtgctcttaccgcatcagcaacccccaacttttgggcctactctgccccccatgcgtgaataccctgcttggatgctgtgcttttccggtttgtctctaagcccctttctccagggcatgttggtttccctggcctctcagtgtcctaactggagcccagagtgccttgtactgagccaggagacggctgagcactggccctccacacctaagcgtcctttacattaacttattggtcttgtataacacctggtgccattgccaagtggctgtgtcctcagctacagagctggaattgtgtggggtttagtgctaaatacttcaataaagtctgttttttgtgattggctg

SEQ ID NO: 1210 - protein, 89 aa, Homo sapiens [sequence omitted]

SEQ ID NO: 1211 - DNA, 2895 bp, Homo sapiens
atgaaactcttctacgaatgtgggaaatgcaaaaaggaattgaaggaagggaaaaaactgaagcctggaaaacatattaatcccagtgcttttacgcccggaaacaaagagactaagccagactatgggggaaagggagataagaaggatcctggaactttaaagagggaaagagtgagattcagaaatcgccaggactggactttaagggacgtcctgtgtcagcacaagggactggcacacacagacacacgagaccgaggagaaactgcagacaaatggagatacaaagacttagaaggacagctcctttcacctcatcctacttgtccagaagtgtgtggatcagaaccccacccccatgccactattagaggcagccacggaggacggaaagtgcctttggtttctccggacagcagtaggccagctcggtttctgaggcacactgggaggtctcgcggaattgagagatccactctggaggaaccaaaccttcagcctctccagagaaggaggagtgtgcccgtgttgagactagctcgcccaacagagccgccagcccgctcggacatcaatggggccgccgtgagacctgagcaaagaccagcagccaggggctctccgcgtgagatgatcagagatgaggggtcctcagctcggtcaagaatgttgcgtttcccttcggggtccagctctcccaacatccttgccagctttgcagggaagaacagagtatgggtcatctcagcccctcatgcctcggaaggctactaccgcctcatgatgagcctgctgaaggacgatgtgtactgtgagctggcggagaggcacatccaacagattgtgctcttccaccaggcaggtgaggaaggaggcaaggtgagaaggatcaccagcgagggccagatcctggagcagcccctggaccctagcctcatccctaagctgatgagcttcctgaagctggagaagggcaagtttggcatggtgctgctgaagaagacgctgcaggtggaggagcgctatccatatcccgttaggctggaagccatgtacgaggtcatcgaccaaggccccatccgtaggatcgagaagatcaggcagaagggctttgtccagaaatgtaaggcctctggtgtagagggccaggtggtggcggaggggaatgacggtggagggggagcaggaaggccaagcctgggcagcgagaagaagaaagaggacccaaggagagcacaagtcccaccaaccagagagagtcgggtgaaggtcctgagaaaactggccgccactgcaccagctttgccccaacctccctcaacccccagagccaccacccttcctcctgccccagccacaacagtgactcggtccacgtcccgggcggtaacagttgctgcaagacctatgaccaccactgcctttcccaccacgcagaggccctggaccccctcaccctcccacaggccccctacaaccactgaggtgatcactgccaggagaccctcagtttcagagaatctttaccctccatcccggaaggatcagcacagggagaggccacagacaaccaggaggcccagcaaggccaccagcttggagagcttcacaaatgcccctcccaccaccatctcagaacccagcacaagggctgctggcccaggccgtttccgggacaaccgcatggacaggcgggaacatggccaccgagacccaaatgtggtgccaggtcctcccaagccagcaaaggagaaacctcccaaaaagaaggcccaggacaaaattcttagtaatgagtatgaggagaagtatgacctcagccggcctactgcctctcagctggaggacgagctgcagagtcccaagaagtcagtggccgacctgctggggtcctttgaaggcaaacgaagactccttctgatcactgctcccaaggctgagaacaatatgtatgtgcaacaacgtgatgaatatctggaaagtttctgcaagatggctaccaggaaaatctctgtgatcaccatcttcggccctgtcaacaacagcaccatgaaaatcgaccactttcagctagataatgagaagcccatgcgagtggtggatgatgaagacttggtagaccagcgtctcatcagcgagctgaggaaagagtacggaatgacctacaatgacttcttcatggtgctaacagatgtggatctgagagtcaagcaatactatgaggtaccaataacaatgaagtctgtgtttgatctgatcgatactttccagtcccgaatcaaagatatggagaagcagaagaaggagggcattgtttgcaaagaggacaaaaagcagtccctggagaacttcctatccaggttccggtggaggaggaggttgctggtgatctctgctcctaacgatgaagactgggcctattcacagcagctctctgccctcagtggtcaggcgtgcaattttggtctgcgccacataaccattctgaagcttttaggcgttggagaggaagttgggggagtgttagaactgttcccaattaatgggagctctgttgttgagcgagaagacgtaccagcccatttggtgaaagacattcgtaactattttcaagtgagcccggagtacttctccatgcttctagtcggaaaagacggaaatgtcaaatcctggtatccttccccaatgtggtccatggtgattgtgtacgatttaattgattcgatgcaacttcggagacaggaaatggcgattcagcagtcactggggatgcgctgcccagaagatgagtatgcaggctatggttaccatagttaccaccaaggataccaggatggttaccaggatgactaccgtcatcatgagagttatcaccatggatacccttactga

SEQ ID NO: 1212 - protein, 950 aa, Homo sapiens
MTWRMGPRFTMLLAMWLVCGSEPHPHATIRGSHGGRKVPLVSPDSSRPARFLRHTGRSRGIERSTLEEPNLQPLQRRRSVPVLRLARPTEPPARSDINGAAVRPEQRPAARGSPREMIRDEGSSARSRMLRFPSGSSSPNILASFAGKNRVWVISAPHASEGYYRLMMSLLKDDVYCELAERHIQQIVLFHQAGEEGGKVRRITSEGQILEQPLDPSLIPKLMSFLKLEKGKFGMVLLKKTLQVEERYPYPVRLEAMYEVIDQGPIRRIEKIRQKGFVQKCKASGVEGQVVAEGNDGGGGAGRPSLGSEKKKEDPRRAQVPPTRESRVKVLRKLAATAPALPQPPSTPRATTLPPAPATTVTRSTSRAVTVAARPMTTTAFPTTQRPWTPSPSHRPPTTTEVITARRPSVSENLYPPSRKDQHRERPQTTRRPSKATSLESFTNAPPTTISEPSTRAAGPGRFRDNRMDRREHGHRDPNVVPGPPKPAKEKPPKKKAQDKILSNEYEEKYDLSRPTASQLEDELQVGNVPLKKAKESKKHEKLEKPEKEKKKKMKNENADKLLKSEKQMKKSEKKSKQEKEKSKKKKGGKTEQDGYQKPTNKHFTQSPKKSVADLLGSFEGKRRLLLITAPKAENNMYVQQRDEYLESFCKMATRKISVITIFGPVNNSTMKIDHFQLDNEKPMRVVDDEDLVDQRLISELRKEYGMTYNDFFMVLTDVDLRVKQYYEVPITMKSVFDLIDTFQSRIKDMEKQKKEGIVCKEDKKQSLENFLSRFRWRRRLLVISAPNDEDWAYSQQLSALSGQACNFGLRHITILKLLGVGEEVGGVLELFPINGSSVVEREDVPAHLVKDIRNYFQVSPEYFSMLLVGKDGNVKSWYPSPMWSMVIVYDLIDSMQLRRQEMAIQQSLGMRCPEDEYAGYGYHSYHQGYQDGYQDDYRHHESYHHGYPY

SEQ ID NO: 1213 - DNA, 1703 bp, Homo sapiens
ttctgggaagggagaatggcggcgcccgggctgcggctgggagcgggaagactctttgaaatgcctgcggtgctagagcgactgagccgctataatagcacgtcccaagcttttgctgaggtgctgcggctgccgaagcagcagctgaggaagctgctgtacccgctgcaggaagtagagcggttcctcgccccctacgggaggcaagaccttcacctgcgtatctttgacccaagcccggaggacatagccagggcggacaacatcttcacggccactgaacggaaccgcatcgactacgtcagctccgccgtccgtatcgaccacgccccggaccttccgcggccagaggtgtgttttataggcagaagcaatgttggaaaatcatctctaatcaaggctttattttcactggcccctgaggttgaagtcagagtctccaaaaaaccaggacacacaaagaaaatgaattttttcaaagttggaaaacattttacagtggtggacatgccaggttatggctttagagcacctgaagattttgttgacatggtagagacctatctaaaagaacgaaggaacttgaagagaacatttttattagtggatagcgttgttggaattcaaaaaacagacaatattgccatagaaatgtgtgaagaatttgcattaccttatgtgattgtattaacaaaaattgacaaatcttccaagggacatcttttaaaacaagtgcttcagatccagaaatttgttaacatgaaaactcaaggatgttttcctcagttgtttcctgtaagtgctgtgaccttttctggaatccacctgttgagatgctttatagccagtgtaacaggaagtcttgactaatggttcccggtttagctgaagattcaaaaaaaaaaaaaaaagctttatgctaactggagttaaatacctagaagaatttcaacattgttttaaatgttgtgcatctgtaacttcaggaggatcacttgagctttaaaacctgtgccttctcgaaacaagaatttgtgcctgaggtgaaaaaagtttgtaagttattgaattatggtgttcattagaacagctactagctgattcccctattttaacaaactgacaagagcacatccataaaatgaaaacctgttacaactatgtacagaagggtttgacgttttattgggcttttgtcttttaaagaatatgtctactatgggtattttttttttaaatgttaaaatgggctaggtaaaagggggctgcttttctgttaagcatcgataggtaagttgatggataaaagttactatgtaagcctatttttttgagtccttatttgaatattgaaaacattcttgataaaatgtgttagtccatgttggaaacaaccgaaagaacagaattcaagttctagttctgatgtttattatatatgttggatcttgggcaacttacttgatttctcggaaattcatttgttactgtaaacgtgaaagctattaagattcaaatgaatggttttacagcaggtaacatgtgagaagacagctacatatttgtaaagccaaaccaacaaagaaatatagcaaaattcacaggtagatttattacaagaaatgtcctttcatgggggaagtaacattttcactagtgaaaaagcaaaaaacaaaaatagctttaagtgagaaaactaattt

SEQ ID NO: 1214 - DNA, 2486 bp, Homo sapiens
tcggagaggaacaagctagctatgttgactggtgttcttctggctaatggaacacttaatgcatccattcttaatagcctttataatgaaaatttggttaaagaaggagtttcagcagcttttgctgtgaagctctttaaatcatggataaatgaaaaagatatcaatgcagtagctgcaagtcttcggaaagtcagcatggataacagactgatggaactctttcctgccaataagcaaagtgttgaacacttcacaaaatattttactgaggcaggcttgaaagagctttcagaatatgttcggaatcagcaaaccatcggagctcgtaaggagctccagaaagaacttcaagaacagatgtcccgtggtgatccatttaaggatataattttatatgtcaaggaggagatgaaaaaaaacaacatcccagagccagttgtcatcggaatagtctggtcaagtgtaatgagcactgtggaatggaacaaaaaagaggagcttgtagcagagcaagccatcaagcacttgaagcaatacagccctctacttgctgcctttactactcaaggtcagtctgagctgactctgttactgaagattcaggagtattgctatgacaacattcatttcatgaaagccttccagaaaatagtggtgcttttttataaagctgaagtcctgagcgaggagcccattttgaagtggtataaagatgcacatgttgcaaaggggaagagtgttttccttgagcaaatgaaaaagtttgtagaatggctcaaaaatgctgaagaagaatctgaatctgaagctgaagaaggtgactgaattttgaaactacaccctcagtaaagcaaacaggagttgtagataaaatgtcatgtctcatgtgtcctggttcttacatcttcctacctccctgtatcaagcatgatataagggctttcatggcaaattttattttaactgtttctatggttgctggaaatgttgggtttagtttctaaaaccatgttttaagtagctacaggagctatagatttgaatctaatgttgcattagtcttttcagttatcttctacctcctgtattttctactgtaataatgtaatttaaggccttccacaatgaacagttcactttattccctgggttttctataaacagttttaaggatatgatttggttaaaaaataatttgttataaaaattctgtttgcaaattaaactggaaaagtatccagagtctcaaaaggcaatgatttgtgagataatatggcatgcccggagccctgctcatcaatgaaaaacccatatgtaataatcgaattcatttaacatgaatcttgagtacgtggaccattgcttgcatgttaactttttgttttgttttgttttgttttgttttgcatttttaactccagatatcctaaagctcaattgtttggtctctggttttcatccttagagaagccatggagaacagacttgaaaagtttaggaaatcataatgtggcagaggtggtgggaagaagaaagttgagctttttccccttgagaaacttctgcatttagtttgtatctttccaggcaaaacaaatgggtattcttttcatacaaccattttcaaatgaaccttagaaaagtcttaacatttaaggtattttatgcacagaatacacttagattgataggaaagaactcgtaatggagtttgagtaaagaaaatgactgatgtactaaacccagtaaaaattgttgaaaatgttaaaggtcagcatgttctaattgggaatctagatatagcttagatttcctattggcttagagtatttgctataacaaatgaagtgcaatgacaattatatattcctactcggtcatactggactggcttcgttctcttaacatactcagtaatgactcaagcctctggctattaacataccctagttgccattttttaattgccatgagccaaatacttcttggtatacaattgatccatttattttaatggctgccttttcattttcatcttttcttgctgctacccatctatgtatgtagtcattggggggaaaatgtagccacattttttatgggaagactttgtgttaaaagtgaacattttgaaggtttttaactggtgaaactagcctggaataatgccaccagagactgagtggaaatcgccccttttgaaggtgccattcttatgagccaaaagtttgtcatttaaaagttcattttgcgggaataacatgtaatataatttgaaataaaggtatagtaaccttaaaaagaacattataactgattgttgtgaatggggtgaatttgttaaaatgagtaactttgataaagtttttcatgcacaggcaaaatgtattcactagatttctacgtagtgatctgcttttactttgtaatttgtagttctcaaaagacttttttttaaaaaaataaagtccatacttacactt

SEQ ID NO: 1215 - protein, 268 aa, Homo sapiens
MLTGVLLANGTLNASILNSLYNENLVKEGVSAAFAVKLFKSWINEKDINAVAASLRKVSMDNRLMELFPANKQSVEHFTKYFTEAGLKELSEYVRNQQTIGARKELQKELQEQMSRGDPFKDIILYVKEEMKKNNIPEPVVIGIVWSSVMSTVEWNKKEELVAEQAIKHLKQYSPLLAAFTTQGQSELTLLLKIQEYCYDNIHFMKAFQKIVVLFYKAEVLSEEPILKWYKDAHVAKGKSVFLEQMKKFVEWLKNAEEESESEAEEGD

SEQ ID NO: 1216 - DNA, 3714 bp, Homo sapiens
ggcacgagggatcggcggagctcccacctccgcttacagctcgctgccgccgtcctgccccgcgcccccaggagacctggaccagaccacgatgtggaaacgctggctcgcgctcgcgctcgcgctggtggcggtcgcctgggtccgcgccgaggaagagctaaggagcaaatccaagatctgtgccaatgtgttttgtggagccggccgggaatgtgcagtcacagagaaaggggaacccacctgtctctgcattgagcaatgcaaacctcacaagaggcctgtgtgtggcagtaatggcaagacctacctcaaccactgtgaactgcatcgagatgcctgcctcactggatccaaaatccaggttgattacgatggacactgcaaagagaagaaatccgtaagtccatctgccagcccagttgtttgctatcagtccaaccgtgatgagctccgacgtcgcatcatccagtggctggaagctgagatcattccagatggctggttctctaaaggcagcaactacagtgaaatcctagacaagtattttaagaactttgataatggtgattctcgcctggactccagtgaattcctgaagtttgtggaacagaatgaaactgccatcaatattacaacgtatccagaccaggagaacaacaagttgcttaggggactctgtgttgatgctctcattgaactgtctgatgaaaatgctgattggaaactcagcttccaagagtttctcaagtgcctcaacccatctttcaaccctcctgagaagaagtgtgccctggaggatgaaacgtatgcagatggagctgagaccgaggtggactgtaaccgctgtgtctgtgcctgtggaaattgggtctgtacagccatgacctgtgacggaaagaatcagaagggggcccagacccagacagaggaggagatgaccagatatgtccaggagctccaaaagcatcaggaaacagctgaaaagaccaagagagtgagcaccaaagagatctaatgaggaggcacagaccagtgtctggatcccagcatcttctccacttcagcgctgagttcagtatacacaagtgtctgctacagtcgccaaatcaccagtatttgcttatatagcaatgagttttattttgtttatttgttttgcaataaaggatatgaaggtggctggctaggaagggaagggccacagccttcatttctaggagtgctttaagagaaactgtaaatggtgctctggggctggaggctagtaaggaaactgcatcacgattgaaagaggaacagacccaaatctgaacctcttttgagtttactgcatctgtcagcaggctgcagggagtgcacacgatgccagagagaacttagcagggtgtccccggaggagaggtttgggaagctccacggagaggaacgctctctgcttccagcctctttccattgccgtcagcatgacagacctccagcatccacgcatctcttggtcccaataactgcctctagatacatagccatactgctagttaacccagtgtccctcagacttggatggagtttctgggagggtacacccaaatgatgcagatacttgtatactttgagccccttagcgacctaaccaaattttaaaaatactttttaccaaaggtgctatttctctgtaaaacactttttttttggcaagttgactttattcttcaattattatcattatattattgttttttaatattttattttcttgactaggtattaagcttttgtaattatttttcagtagtcccaccacttcataggtggaaggagtttggggttcttcctggtgcaggggctgaaataacccagatgcccccaccctgccacatactagatgcagcccatagttggcccccctagcttccagcagtccactatctgccagaggagcaagggtgccttagaccgaagccaggggaagaagcatcttcataaaaaactttcaagatccaaacattaatttgtttttatttattctgagaagttgaggcaaatcagtattcccaaggatggcgacaagggcagccaagcagggcttaggatatcccagcctaccaatatgctcattcgactaactaggagggtgagttggccctgtctcttcttttttctggacctcagtttcctcagtgagctggtaagaatgcactaaccttttgatttgataagttataaattctgtggttctgatcattggtccagaggggagataggttcctgtgatttttccttcttctctatagaataaatgaaatcttgttactagaacaagaaatgtcagatggccaaaaacaagatgaccagatttgatctcagcctgatgaccctacaggtcgtgctatgatatggagtcctcatgggtaaagcaggaagagagtgggaaagagaaccaccccactctgtcttcatatttgcatttcatgtttaacctccggctggaaatagaaagcattcccttagagatgaggataaaagaaagtttcagattcaacagggggaagaaaatggagatttaatcctaaaactgtgacttggggaggtcagtcatttacagttagtcctgtgtctttcgacttctgtgattattaaccccactcactaccctgtttcagatgcatttggaataccaaagattaaatccttgacataagatctcatttgcagaaagcagattaaagaccatcagaaggaaattatttaggttgtaatgcacaggcaactgtgagaaactgttgtgccaaaaatagaattccttctagtttttcttgttctcatttgaaaggagaaaattccactttgtttagcatttcaagcttttatgtatccatcccatctaaaaactcttcaaactccacttgttcagtctgaaatgcagctccctgtccaagtgccttggagaactcacagcagcacgccttaatcaaaggttttaccagcccttggacactatgggaggagggcaagagtacaccaatttgttaaaagcaagaaaccacagtgtctcttcactagtcatttagaacatggttatcatccaagactactctaccctgcaacattgaactcccaagagcaaatccacattcctcttgagttctgcagcttctgtgtaaatagggcagctgtcgtctatgccgtagaatcacatgatctgaggaccattcatggaagctgctaaatagcctagtctggggagtcttccataaagttttgcatggagcaaacaaacaggattaaactaggtttggttccttcagccctctaaaagcatagggcttagcctgcaggcttccttgggctttctctgtgtgtgtagttttgtaaacactatagcatctgttaagatccagtgtccatggaaacattcccacatgccgtgactctggactatatcagtttttggaaagcagggttcctctgcctgctaacaagcccacgtggaccagtctgaatgtctttcctttacacctatgtttttaagtagtcaaacttcaagaaacaatctaaacaagtttctgttgcatatgtgtttgtgaacttgtatttgtatttagtaggcttctatattgcatttaacttgtttttgtaactcctgattcttccttttcggatactattgatgaataaagaaattaaagtgaaaaaaaaaaaaaaaaaaaaaaa

SEQ ID NO: 1217 - protein, 308 aa, Homo sapiens
MWKRWLALALALVAVAWVRAEEELRSKSKICANVFCGAGRECAVTEKGEPTCLCIEQCKPHKRPVCGSNGKTYLNHCELHRDACLTGSKIQVDYDGHCKEKKSVSPSASPVVCYQSNRDELRRRIIQWLEAEIIPDGWFSKGSNYSEILDKYFKNFDNGDSRLDSSEFLKFVEQNETAINITTYPDQENNKLLRGLCVDALIELSDENADWKLSFQEFLKCLNPSFNPPEKKCALEDETYADGAETEVDCNRCVCACGNWVCTAMTCDGKNQKGAQTQTEEEMTRYVQELQKHQETAEKTKRVSTKEI

SEQ ID NO: 1218 - DNA, 464 bp, Homo sapiens
ctcccaagatgtcgttcccaaagtataagccgtcgagcctgcgcactctgcctgagaccctcgacccagccgaatacaacatatctccggaaacccggcgggcgcaagccgagcggttggccataagagcccagctgaaacgagagtacctgcttcagtacaacgatcccaaccgccgagggctcatcgaaaatcctgccttgcttcgttgggcctatgcaagaacaataaatgtctatcctaatttcagacccactcctaaaaactcactcatgggagctctgtgtggatttgggcccctcatcttcatttattatattatcaaaactgagagggataggaaagaaaaacttatccaggaaggaaaattggatcgaacatttcacctctcatattaagtctggcaatgatgactatatgtattcctgcctaaataaatcatctattaatcattaaaaaaaaaa

SEQ ID NO: 1219 - protein, 129 aa, Homo sapiens
MSFPKYKPSSLRTLPETLDPAEYNISPETRRAQAERLAIRAQLKREYLLQYNDPNRRGLIENPALLRWAYARTINVYPNFRPTPKNSLMGALCGFGPLIFIYYIIKTERDRKEKLIQEGKLDRTFHLSY

SEQ ID NO: 1220 - DNA, 2456 bp, Homo sapiens
gatgacacacaataatttttggttgaagaagatagaaatcagtgtttcagaagcagaaaaacgaactggaagaaatgccatgaacatgcaagaaacatatactgcttacctcattgaaacaaggtcagttgaacataccgatggtcagagtgtcctaacagactcactatggcggcgatatagtgaatttgagttgttgagaagctaccttttagtttactatccacatattgttgtgccacctctgccagaaaaacgggcagaatttgtttggcataaactctctgctgacaacatggatccagattttgtggagaggcgacggattggtttagaaaactttctcttgaggattgcttcacatcccatcctttgtagagacaaaatcttctatctgtttttaacacaggaaggtaactggaaggagactgtgaatgaaactgggtttcagctgaaggcagactccaggttaaaagcgcttaatgcaacattcagagtgaaaaacccagacaagagatttactgaccttaagcactatagtgatgaactgcagtctgtcatctcacatcttcttcgagtcagagctagagtagcagatcgactctatggtgtatataaagtacatgggaattatggtcgagttttcagtgaatggagtgccatagaaaaagaaatgggtgatggactgcagagtgctggtcatcatatggatgtgtatgcatcttctattgatgatattttggaagatgaagaacattatgcagatcagttaaaagagtatcttttttatgcagaagcattgcgggctgtgtgcaggaaacatgaacttatgcagtatgacttggagatggctgctcaggacttagcatccaagaagcagcagtgtgaggaactggtaactgggactgtgagaacattctctttgaagggaatgactaccaagctctttggtcaagaaactccagagcagagagaagccagaataaaggtgctagaagaacaaataaatgaaggagaacaacagctaaagtctaaaaatctggaaggcagagaatttgtgaaaaacgcatgggctgatattgaacgcttcaaagaacaaaagaaccgagacttaaaggaggccctcataagctatgcagtcatgcagatcagtatgtgcaaaaagagtctcaccctgtcacccaggctggagtgcaatggcatgatctcagctcactacaacctccgcctcccgtgttcaagcaattctacctcatccagccgagtagatgggattacagggaattcaagtttggaccaatgctaaggaatgctttagcaagatgtaatcctgtgaattgaatttctcttcaatcaaagtgccccaaaacagaagcacaagtaaataaaagaaatttaagtcactacctagtatacataaacatatacaataagttaaataaattcagctttctttaacttaattgtggtcgtgttaatgtagcacaaaaaatatattttaatgaagattaaatattataatttgaggttttggggactggtgctgattccaaaaagttaatttaataatatataccaacagattgtttgtcacgcttctgaaccaatgactgaatgtcaagatgttcgttaatttctagatgtttgtttcaagaccagctgtttcagatctattaatgtagggaatttttccctaagattgaattcctatatttacttggtaagatccactaatctgttatagggagttgttttctcttgccttatagttgagctatttggtttgacaaagctcagcagaaacttgatgtgaaaaatctacgattttcttctacattcattgatgccccttgtaatgtttgcatacactagaaaatgccttcaatttgtgttttaccagaattttgatactggtcagaaattttatactgccaacaaagaagactcaacttctcagatctataatgggatacattgtcatcctctagcaactcctatatagaaagttttaactgaatatgttacatataagaattaaattcttctcaaataattcttaacctcagtaatgagcctaaatttactctgcttggctctctacacatggcatttcagggtataagatgtagcatttcaatgtgtaagatatatgtactaaacatatgtgttgctatcttcatcattaacatccttcttttctattgcttggctgtaatttttgtaaagataaattatattgtttttttgtatgtgtgtttgtagtatatgttcagaaggcaagcatcttcattttgctagctttgcagaatcttaaaatgtgtactcgttatttctaatgatgtaaaaaaaaatccctagtcctgtttagcatttgacttttttatatgttttaaatgttgctggatttttgtgctgtttgccaaacttatacaataaataaatgaaatattgtgctg

SEQ ID NO: 1221 - DNA, 3870 bp, Homo sapiens
gcaattttagaatgtgctggacaaaatgtagaaagggaatgttctcagcaagctcagcagcgcaaaaatgattatataatcaccggaggtggatttttgaggtgcaagaatatcattcatgtaattggtggaaatgatgtcaagagttcagtttcctctgttttgcaggagtgtgaaaaaaaaaattactcatccatttgcctcccagccattgggacaggaaatgccaaacaacacccagataaggttgctgaagccataattgatgccattgaagactttgtccagaaaggatcagcccagtctgtgaaaaaagttaaagttgttatctttctgcctcaagtactggatgtgttttatgccaacatgaagaaaagagaagggactcagctttcttcccaacagtctgtgatgtctaaacttgcatcatttttgggcttttcaaagcaatctccccaaaaaaagaatcatttggttttggaaaagaaaacagaatcagcaacttttcgggtgtgtggtgaaaatgtcacgtgtgtggaatatgctatctcctggctacaagacctgattgaaaaagaacagtgtccttacaccagtgaagatgagtgcatcaaagactttgatgaaaaggagtatcaggagttgaatgagctgcagaagaagttaaatattaacatttccctggaccataagagacctttgattaaggttttgggaattagcagagatgtgatgcaggctagagatgaaatgaggcgatgatcaagagaggttcgattgggcaaagaacaggaatcccgggcagattgtatcagtgagtttatagaatggcagtataatcgacaataacacttctcatgtgttttaacaaaatgaccaatctgaaattagaggatgcaaggagagaaaagaaaaaaacagttgatgtcaaaattaatcatcggcactacacagtgaacttgaacacatacactgccacagacacaaagggccacagtttatctgttcagcgcctcacgaaatccaaagttgacatccctgcacactggagtgatatgaagcagcagaatttctgtgtggtggagctgctgcctagtgatcctgagtacaacacggtggcaagcaagtttaatcagacctgctcacacttcagaatagagaagattgagaggatccagaatccagatctctggaatagctaccaggcaaagaaaaaaactatggatgccaagaatggccagacaatgaatgagaagcaactcttccatgggacagatgccggctccgtgccacacgtcaatcgaaatggctttaaccgcagctatgccggaaagaatgctgtggcatatggaaagggaacctattttgctgtcaatgccaattattctgccaatgatacgtactccagaccagatgcaaatgggagaaagcatgtgtattatgtgcgagtacttactggaatctatacacatggaaatcattcattaattgtgcctccttcaaagaaccctcaaaatcctactgacctgtatgacactgtcacagataatgtgcaccatccaagtttatttgtggcattttatgactaccaagcatacccagagtaccttattacgtttagaaaataacactttggtatccttcccacaaaattattctccatttgtacatatctagttgtaaaacaagttttagcttttttttttaattcctcttaacagatttttctaatatccaaggatcattctttgtcgctgaagtcagtctttcttcagcttccctttcataatggaaatgaacttattatcttgagagcaaataacttggaaaatttaaatgagataatgcagttgcaactgtgtgtccacaagtatggacatcaaatctgtgggaaaagaacaggtttgtattttcaggaaggagagaataacagtcttatagacagagggcacagctaagcacagctgccactgcaggagacaggccccatgtcaggatgccatagtgctgtggggagcacagtattacccagtgggtagggcttctgtcttccctgggagcagggatggtatcttagtcaatttttttcccttgagatgaggtctgtgcctgatgtacaacggatactccataaatgtttgacaaaccaacgaagaatgaaaaaaagcctagtcagactcccatccaaagtaggaactatctctttaacattcttgactcactatcactttacctcaaattgaacagattccatgacggaacttcattcttcacaaactagccagtgacatgtgggacagctctggccagggctctgggactgcagtgtacttgcgctctgcacggtccaggagctgtgatgtggctgtggtctaggggaatcctgcctgccccatggagttgcgcagcacaaccctggctccaattgccagaaggctctttttaatgctgaaccaaaatgtgcctttttttttttttttttgagatggagtttcactcttgttgcccaggctggagtgcaatggcgcgatctcagctcactgcagccactgcctcccaggttcaagtgattctcctgcctcagcctcccgagtagctgggattacaggcatgcgctaacacacccagctaattttgtatttttagtagagacgaggtttctccatgttcgacaggctggtctcgaactcccacctcagcctcccaaactgctgggattacaggtgtgagccaccgtgaccagccaatgtgccttcttatagtgtctactcattggtctttgttctgcccagtgataacaatgggataacgcctgctacacatcttcattgtgaaacccttcccctgtgctgagattaaatgaactctaagattattaaatagtatattttccttgacagcctagcgtttgatgattttaaagccttatgtataaataaaccaaaggaagtaagcagtcatattgctaatttgctaactcctatctattgaatggtgaagttttaaaaatttccccaggtaagtttaagattcaaacaccatctattgagcacctacattgtgtgccaggtagtaaaataggtgctttcatacacattgtctcaattcctgtgaggtcagaattatctctgcatttgaaacttgaggaaacatgctcagagtgcaagaagcttccttgcctgagatcacctagaaaggaaccctcagagccggcaactgaatcttggtccctgtgatgtcaagcccattgctctcccactgcagaacatggcctctagattaatgccaccgattcaggaacacctccgacagtcttgaaatacccccatgttgccttgtttgttttttccttctggcttcttctattacagtctcttcattggaagctctgtaggccaaggccagagctgatactgacacggagccaatgcagatagcacatcagatgctaggggtcgctgggaggattaagggacttaatctgctaggaacacctgtacttgaagtggaggaggctagggggccacagttgctgcttcattaacatagaggttttggatttttttctcttgtggtttgttttttaagtggattggcagactccttgttgcttaagagtggctttctaggcaggccactggcatctgaattcatcattgacaataaatgtaagaaattggaataaaaaagagagacctgctgttattcgcttttgttctccagtgatttgattaactcagggcaaggctgaatatcagagtgtatcgcactgaagaataataatccattcagtaatgttatagttatcctcaatctaaatatgtcaactgtcattttgctacttttcaaataaaatacttgaaaactgtc

SEQ ID NO: 1222 - protein, 419 aa, Homo sapiens
MKKREGTQLSSQQSVMSKLASFLGFSKQSPQKKNHLVLEKKTESATFRVCGENVTCVEYAISWLQDLIEKEQCPYTSEDECIKDFDEKEYQELNELQKKLNINISLDHKRPLIKVLGISRDVMQARDEIEAMIKRVRLAKEQESRADCISEFIEWQYNDNNTSHCFNKMTNLKLEDARREKKKTVDVKINHRHYTVNLNTYTATDTKGHSLSVQRLTKSKVDIPAHWSDMKQQNFCVVELLPSDPEYNTVASKFNQTCSHFRIEKIERIQNPDLWNSYQAKKKTMDAKNGQTMNEKQLFHGTDAGSVPHVNRNGFNRSYAGKNAVAYGKGTYFAVNANYSANDTYSRPDANGRKHVYYVRVLTGIYTHGNHSLIVPPSKNPQNPTDLYDTVTDNVHHPSLFVAFYDYQAYPEYLITFRK

SEQ ID NO: 1223 - DNA, 1693 bp, Homo sapiens
gaattcggggggcgccggagtggagaaaggagccagcggtgggcagcgctgctgggatggcgcgggccgggccggcgtggctgctgctggcaatctgggtggtcctgccatcatggctgtcctctgcaaaggtctcctcgctcattgagagaatctctgaccccaaggacttgaaaaaactgctcagaacccggaataatgtactggtgctttactccaaatctgaggtggcagctgaaaatcatctcaggttactgtccacagtggcccaggcggtgaaaggacaagggaccatctgctgggtggactgtggtgatgcagagagtagaaaattgtgcaagaagatgaaagttgacctgagcccgaaggacaaaaaggttgaattattccattaccaggatggtgcatttcatactgaatataaccgagctgtgacatttaagtccatagtggcctttttgaaggatccaaaagggcccccactgtgggaggaagatcctggagccaaagatgttgtccaccttgacagtgaaaaggacttcagacggctcctgaagaaggaagagaagccgctcctgatcatgttttatgccccctggtgcagcatgtgcaagaggatgatgccgcatttccagaaggctgcgactcagctgcgaggccacgccgtgctggccgggatgaatgtctactcctctgaatttgaaaacatcaaggaggagtacagcgtgcgcggcttccccaccatctgctattttgagaaaggacggttcttgttccagtatgacaactatgggtccacagctgaggacattgtggagtggctgaagaatccgcagccgccacagccccaggtccctgagactccctgggcagatgagggcggctccgtttatcacctgaccgatgaagactttgaccagtttgtgaaggaacactcctctgtcctcgtcatgttccacgccccatggtgtggccactgtaagaaaatgaagccggagtttgagaaggcagcagaagccctccatggagaagcggatagctctggtgtccttgcagctgtcgatgccactgtcaacaaggccctggcagaaagattccacatctcagagtttcctacgttgaagtattttaagaatggagagaaatacgcagtgcctgtgctcaggacaaagaagaagtttctcgagtggatgcaaaaccctgaggcccccccgcccccagagcccacgtgggaagagcagcagacaagcgtgttgcacctggtgggggacaacttccgggagaccctgaagaagaagaaacacaccttggtcatgttctacgccccttggtgcccacactgtaagaaggtcattccgcactttactgctactgctgatgccttcaaagatgaccgaaagattgcctgtgccgctgttgactgtgtcaaagacaagaaccaagacctgtgccagcaggaggcggtcaagggctaccccactttccactactaccactatgggaagttcgcagaaaagtatgacagcgaccgcacagaattgggatttaccaattatattcgagccctccgggagggagaccatgaaagactagggaaaaagaaggaagagttataattcctgcctcagaaaaagcttttccattacactgtgaatgatacctgttttgttgtttctgaatttcccccgaattc

SEQ ID NO: 1224 - protein, 519 aa, Homo sapiens
MARAGPAWLLLAIWVVLPSWLSSAKVSSLIERISDPKDLKKLLRTRNNVLVLYSKSEVAAENHLRLLSTVAQAVKGQGTICWVDCGDAESRKLCKKMKVDLSPKDKKVELFHYQDGAFHTEYNRAVTFKSIVAFLKDPKGPPLWEEDPGAKDVVHLDSEKDFRRLLKKEEKPLLIMFYAPWCSMCKRMMPHFQKAATQLRGHAVLAGMNVYSSEFENIKEEYSVRGFPTICYFEKGRFLFQYDNYGSTAEDIVEWLKNPQPPQPQVPETPWADEGGSVYHLTDEDFDQFVKEHSSVLVMFHAPWCGHCKKMKPEFEKAAEALHGEADSSGVLAAVDATVNKALAERFHISEFPTLKYFKNGEKYAVPVLRTKKKFLEWMQNPEAPPPPEPTWEEQQTSVLHLVGDNFRETLKKKKHTLVMFYAPWCPHCKKVIPHFTATADAFKDDRKIACAAVDCVKDKNQDLCQQEAVKGYPTFHYYHYGKFAEKYDSDRTELGFTNYIRALREGDHERLGKKKEEL

SEQ ID NO: 1225 - DNA, 918 bp, Homo sapiens
ctcagactgctgtgctagcaatcagtgagactccgtgggcgtaggaccctctgagccaggtgcgggatataatcttgtggtgcgccgttttttaagccggtccgaaaagcgcaatattcgggtgggagtgacccgatttcccagggctgtgaccatctatgacaagccggcatctttctttaaagagacacctctggacctgctgcaccggctcttcatgaagctgggtggcactcactctctgttcagggcctgctcagaacctgaggacgcagccatggagcggtcggccttcatggagctggatgctgggagcaggctggtgatgcatctccgcgagtggccagccctgctggtcagcagcacgggctggacagagtttgaacaacttactcttgatggacacaaccttccttctcttgtctgtgtgataacagggtcggtggacctgggtgtctgtctgcacatgtcctccagtggcctggacctgcccatgaaggtggtggacatgttcgggtgctgtttgcctgtgtgtgccgtgaacttcaagtgtttacatgagctggtgaaacatgaagaaaatggcctggtctttgaggactcagaggaactggcagctctgcagatgcttttctcaaactttcctgatcctgcaggcaagctaaaccagttttggaagaacctgcgggagtcgcagcagctccgatgggatgagagctgggtgcagactgtgctccctttggttatggacatacaactcctgggccagaggctaaaaccccgggacccctgctgtccttcccgcagcttcttctcggagtctcagggcaaacccttttgagcagcgcctcccagtggccagaagctgaaatgacggcagtggtgccgcctggtgaatgaattggttctgtgacccgg

SEQ ID NO: 1226 - protein, 207 aa, Homo sapiens
MKLGGTHSPFRACSEPEDAAMERSAFMELDAGSRLVMHLREWPALLVSSTGWTEFEQLTLDGHNLPSLVCVITGSVDLGVCLHMSSSGLDLPMKVVDMFGCCLPVCAVNFKCLHELVKHEENGLVFEDSEELAALQMLFSNFPDPAGKLNQFWKNLRESQQLRWDESWVQTVLPLVMDIQLLGQRLKPRDPCCPSRSFFSESQGKPF

SEQ ID NO: 1227 - DNA, 1840 bp, Homo sapiens
gcagacacgtgatgcgggggagggggggggggcgtggcaggagcaagcgtctgccgcggtggccgggtgccggtaagggtttccagcgcccccggcctaggttttggaggcgcgggaatgcgttcgttgctcagtgtcggacttccccctattcccatcggccgaggctgtcactttacgctcataaccgtttttctttactgcactcgtgtcgggaggaaagggacttgcgtggcacccccagacctccccgtctccgcttccacgtttggtacatcctgcctgaggcaggaagccgcagctgagggacggcctgtcgtacggtgcggatggtggtggcctgcgaggctcatttctagcaaggaacaaggctttcccgctttgattttataaatattatgtttacaaagctgtaatatatagaaattgataagacgtgtccctgtccctggaaacgcaggcaccgcgtgtttggaaagacattcatctgggctgtttgacagactccccagttggtgccatgctctgtgcttagggaactgtgagacccctggaggggtgggtaccgggaccgcactcagcctggggtttggaggcggcctcctataggaagcgacctgggacctaagatttttagactgactgtgggttcactggaataaaaaggaagaaacaaagagcattgcaggcatcgggactgtcacatttgacaagatcaaagctgcaggaaaatggacagtgaggttcagagagatggaaggatcttggatttgattgatgatgcttggcgagaagacaagctgccttatgaggatgtcgcaataccactgaatgagcttcctgaacctgaacaagacaatggtggcaccacagaatctgtcaaagaacaagaaatgaagtggacagacttagccttacagtacctccatgagaatgttccccccattggaaactgacgcttggctcctttcttgtggatggattttctcaaagtacacagataaagcatggtttgtttcagtctccaaattcaaacctttgagtaataaatcagcactcaaaaatgtacacccatttagtttgtggtagcaaagtgcaatgcgaaattgaatgagaaactgagatttctcagtaatggtgaatatttcgctctttaaacctaaaactcttcattgagtagcttatatttgaacatgattggttaaacatttgcctctacctctgattttgctttgctgtcaaagtttaacaccttccaactacttatgtgtgtcctgtaacacaggtgattgaacgtatgagagggaaaggcaaagaaaaaggaagccagacactaggagaattattaacttctcatacttccccacattgagaagcattcggagtgtatttagcctgtagatgttgtgatatgcaaatatcccattccctggttactggcattcctaagattcttcatggtattttcaaactttggataaatttacagattagaaagatatctgacagttaatctctgttctccttacaaattccttttgtgctgctggaaaggatctttggctaggtggatgactagttttattcaaagccttttctcaaagccctttcagttacaaccaccccactatggaatcagtatttagttatacatttgtataagaacctgtattttgaaaaacacattcatgtatatttattcctggaattatttgcctgttaaacagtgtctttcatgttctctccccagattgtaaactctgtaagaagctgcttgtatctgtatcccttgttgaaactctgaaaacactgaataactaaaatctcttctcatcctttt

SEQ ID NO: 1228 - protein, 97 aa, Homo sapiens
MRGRGGGRGRSKRLPRWPGAGKGFQRPRPRFWRRGNAFVAQCRTSPYSHRPRLSLYAHNRFSLLHSCREERDLRGTPRPPRLRFHVWYILPEAGSRS

SEQ ID NO: 1229 - DNA, 3402 bp, Homo sapiens
agtggcggagaggatcgtggtactgctatggcggaatcatcggaatccttcaccatggcatccagcccggcccagcgtcggcgaggcaatgatcctctcacctccagccctggccgaagctcccggcgtactgatgccctcacctccagccctggccgtgaccttccaccatttgaggatgagtccgaggggctcctaggcacagaggggcccctggaggaagaagaggatggagaggagctcattggagatggcatggaaagggactaccgcgccatcccagagctggacgcctatgaggccgagggactggctctggatgatgaggacgtagaggagctgacggccagtcagagggaggcagcagagcgggccatgcggcagcgtgaccgggaggctggccggggcctgggccgcatgcgccgtgggctcctgtatgacagcgatgaggaggacgaggagcgccctgcccgcaagcgccgccaggtggagcgggccacggaggacggcgaggaggacgaggagatgattgagagcatcgagaacctggaggatctcaaaggccactctgtgcgcgagtgggtgagcatggcgggcccccggctggagatccaccaccgcttcaagaacttcctgcgcactcacgtcgacagccacggccacaacgtcttcaaggagcgcatcagcgacatgtgcaaagagaaccgtgagagcctggtggtgaactatgaggacttggcagccagggagcacgtgctggcctacttcctgcctgaggcaccggcggagctgctgcagatctttgatgaggctgccctggaggtggtactggccatgtaccccaagtacgaccgcatcaccaaccacatccatgtccgcatctcccacctgcctctggtggaggagctgcgctcgctgaggcagctgcatctgaaccagctgatccgcaccagtggggtggtgaccagctgcactggcgtcctgccccagctcagcatggtcaagtacaactgcaacaagtgcaatttcgtcctgggtcctttctgccagtcccagaaccaggaggtgaaaccaggctcctgtcctgagtgccagtcggccggcccctttgaggtcaacatggaggagaccatctatcagaactaccagcgtatccgaatccaggagagtccaggcaaagtggcggctggccggctgccccgctccaaggacgccattctcctcgcagatctggtggacagctgcaagccaggagacgagatagagctgactggcatctatcacaacaactatgatggctccctcaacactgccaatggcttccctgtctttgccactgtcatcctagccaaccacgtggccaagaaggacaacaaggttgctgtaggggaactgaccgatgaagatgtgaagatgatcactagcctctccaaggatcagcagatcggagagaagatctttgccagcattgctccttccatctatggtcatgaagacatcaagagaggcctggctctggccctgttcggaggggagcccaaaaacccaggtggcaagcacaaggtacgtggtgatatcaacgtgctcttgtgcggagaccctggcacagcgaagtcgcagtttctcaagtatattgagaaagtgtccagccgagccatcttcaccactggccagggggcgtcggctgtgggcctcacggcgtatgtccagcggcaccctgtcagcagggagtggaccttggaggctggggccctggttctggctgaccgaggagtgtgtctcattgatgaatttgacaagatgaatgaccaggacagaaccagcatccatgaggccatggagcaacagagcatctccatctcgaaggctggcatcgtcacctccctgcaggctcgctgcacggtcattgctgccgccaaccccataggagggcgctacgacccctcgctgactttctctgagaacgtggacctcacagagcccatcatctcacgctttgacatcctgtgtgtggtgagggacaccgtggacccagtccaggacgagatgctggcccgcttcgtggtgggcagccacgtcagacaccaccccagcaacaaggaggaggaggggctggccaatggcagcgctgctgagcccgccatgcccaacacgtatggcgtggagcccctgccccaggaggtcctgaagaagtacatcatctacgccaaggagagggtccacccgaagctcaaccagatggaccaggacaaggtggccaagatgtacagtgacctgaggaaagaatctatggcgacaggcagcatccccattacggtgcggcacatcgagtccatgatccgcatggcggaggcccacgcgcgcatccatctgcgggactatgtgatcgaagacgacgtcaacatggccatccgcgtgatgctggagagcttcatagacacacagaagttcagcgtcatgcgcagcatgcgcaagacttttgcccgctacctttcattccggcgtgacaacaatgagctgttgctcttcatactgaagcagttagtggcagagcaggtgacatatcagcgcaaccgctttggggcccagcaggacactattgaggtccctgagaaggacttggtggataaggctcgtcagatcaacatccacaacctctctgcattttatgacagtgagctcttcaggatgaacaagttcagccacgacctgaaaaggaaaatgatcctgcagcagttctgaggccctatgccatccataaggattccttgggattctggtttggggtggtcagtgccctctgtgctttatggacacaaaaccagagcacttgatgaactcggggtactagggtcagggcttatagcaggatgtctggctgcacctggcatgactgtttgtttctccaagcctgctttgtgcttctcacctttgggtgggatgccttgccagtgtgtcttacttggttgctgaacatcttgccacctccgagtgctttgtctccactcagtaccttggatcagagctgctgagttcaggatgcctgcgtgtggtttaggtgttagccttcttacatggatgtcaggagagctgctgccctcttggcgtgagttgcgtattcaggctgcttttgctgcctttggccagagagctggttgaagatgtttgtaatcgttttcagtctcctgcaggtttctgtgcccctgtggtggaagagggcacgacagtgccagcgcagcgttctgggctcctcagtcgcaggggtgggatgtgagtcatgcggattatccactcgccacagttatcagctgccattgctccctgtctgtttccccactctcttatttgtgcattcggtttggtttctgtagttttaatttttaataaagttgaataaaatat

SEQ ID NO: 1230 - protein, 904 aa, Homo sapiens
MAESSESFTMASSPAQRRRGNDPLTSSPGRSSRRTDALTSSPGRDLPPFEDESEGLLGTEGPLEEEEDGEELIGDGMERDYRAIPELDAYEAEGLALDDEDVEELTASQREAAERAMRQRDREAGRGLGRMRRGLLYDSDEEDEERPARKRRQVERATEDGEEDEEMIESIENLEDLKGHSVREWVSMAGPRLEIHHRFKNFLRTHVDSHGHNVFKERISDMCKENRESLVVNYEDLAAREHVLAYFLPEAPAELLQIFDEAALEVVLAMYPKYDRITNHIHVRISHLPLVEELRSLRQLHLNQLIRTSGVVTSCTGVLPQLSMVKYNCNKCNFVLGPFCQSQNQEVKPGSCPECQSAGPFEVNMEETIYQNYQRIRIQESPGKVAAGRLPRSKDAILLADLVDSCKPGDEIELTGIYHNNYDGSLNTANGFPVFATVILANHVAKKDNKVAVGELTDEDVKMITSLSKDQQIGEKIFASIAPSIYGHEDIKRGLALALFGGEPKNPGGKHKVRGDINVLLCGDPGTAKSQFLKYIEKVSSRAIFTTGQGASAVGLTAYVQRHPVSREWTLEAGALVLADRGVCLIDEFDKMNDQDRTSIHEAMEQQSISISKAGIVTSLQARCTVIAAANPIGGRYDPSLTFSENVDLTEPIISRFDILCVVRDTVDPVQDEMLARFVVGSHVRHHPSNKEEEGLANGSAAEPAMPNTYGVEPLPQEVLKKYIIYAKERVHPKLNQMDQDKVAKMYSDLRKESMATGSIPITVRHIESMIRMAEAHARIHLRDYVIEDDVNMAIRVMLESFIDTQKFSVMRSMRKTFARYLSFRRDNNELLLFILKQLVAEQVTYQRNRFGAQQDTIEVPEKDLVDKARQINIHNLSAFYDSELFRMNKFSHDLKRKMILQQF

SEQ ID NO: 1231 - DNA, 2143 bp, Homo sapiens
accatgggccggctgctgcgggccgcccggctgccgccgctgctttcgccgctgctgcttctgctggttgggggagcgttcctgggtgcctgtgtggctgggtctgatgagcctggcccagagggcctcacctccacctccctgctagacctcctgctgcccactggcttggagccactggactcagaggagcctagtgagaccatgggcctgggagctgggctgggagcccctggctcaggcttccccagcgaagagaatgaagagtctcggattctgcagccaccacagtacttctgggaagaggaggaagagctgaatgactcaagtctggacctgggacccactgcagattatgtttttcctgacttaactgagaaggcaggttccattgaagacaccagccaggctcaagagctgccaaacctcccctctcccttgcccaagatgaatctggttgagcctccctggcatatgcctcccagagaggaggaagaagaggaagaggaagaggaggagagggagaaggaagaggtagagaaacaagaggaggaggaagaggaggagctgctccctgtgaatggatcccaagaagaagccaagcctcaggtccgtgacttttctctcaccagcagcagccagaccccaggggccaccaaaagcaggcatgaagactccggggaccaggcctcatcaggtgtggaggtggagagcagcatggggcccagcttgctgctgccttcagtcaccccaactacagtgactccgggggaccaggactccaccagccaagaggcagaggccacagtgctgccagctgcagggcttggggtagagttcgaggctcctcaggaagcaagcgaggaagccactgcaggagcagctggtttgtctggccagcacgaggaggtgccggccttgccttcattccctcaaaccacagctcccagtggggccgagcacccagatgaagatccccttggctctagaacctcagcctcttccccactggcccctggagacatggaactgacaccttcctctgctaccttgggacaagaagatctcaaccagcagctcctagaagggcaggcagctgaagctcaatccaggataccctgggattctacgcaggtgatctgcaaggactggagcaatctggctgggaaaaactacatcattctgaacatgacagagaacatagactgtgaggtgttccggcagcaccgggggccacagctcctggccctggtggaagaggtgctgccccgccatggcagtggccaccatggggcctggcacatctctctgagcaagcccagcgagaaggagcagcaccttctcatgacactggtgggcgagcagggggtggtgcccactcaagatgtcctttccatgctgggtgacatccgcaggagcctggaggagattggcatccagaactattccacaaccagcagctgccaggcgcgggccagccaggtgcgcagcgactacggcacgctcttcgtggtgctggtggtcattggggccatctgcatcatcatcattgcgcttggcctgctctacaactgctggcagcgccggctgcccaagctcaagcacgtgtcgcacggcgaggagctgcgcttcgtggagaacggctgccacgacaaccccacgctggacgtggccagcgacagccagtcggagatgcaggagaagcaccccagcctgaacggcggcggggccctcaacggcccggggagctggggggcgctcatggggggcaagcgggaccccgaggactcggacgtgttcgaggaggacacgcacctgtgagcgcagccgaggcgcaggccgagtgggccgccaggaccaagcgaggtggaccccgaaacggacggcccggagcccgcaccagccccgcgcctacccgggccgcccccgcggcctggccctcggcgcgggctccttcccgcttcccccgacttcacacggcggcttcggaccaactccctcactcccgcccgaggggcaggcctcaaagcccgccttggccccgctttcccgcccctgaaccccggccccgcgggcggcgggcggcgcttcctgcgccccgggactcaattaaacccgcccggagaccacgccgggcccagcg

SEQ ID NO: 1232 - DNA, 1146 bp, Homo sapiens
attttacctgatgctatgagagaatcatattgaagatgaaatgtctaatatataatgtatattttaaagcagagactattttggtggataggtgggagggagcaaggggagtttgagggaatcagagcttgatgctactgtacagaactggacaggttgggccggcagtggtggggccagagggctctgtgctctaggagctaagccagcagcccccgagaggggacttggctgggcctttcctatgggcaaggcccagtgctcttcctgcccaccagggaccatggagcagtggcaccctatggggctatgatccctaggcctgggcctgggcctgcctatggcccagagctaccctgggagtgtcagtgctagcagcacagctacctctggtggcaggagaagagaggcccagcacagcagcaggccaggccttcctgtccaggtctgcatggagcactcggtgacccagagcagggactggaggcacccccagccctgccccaggccacagcaggacaggccgggacaggcctcacccaaggccaaggctggcatcagccaatcattcagagctgaggccctgggcctagcctgcccttctcaggtgccaataccaccccagccctgcccttggcctcactttttcccagcaataagtggggttcaccacccgcctcgggaatactttccccttctaaatgggacttgctgttacctcaggaggctccttagtgcaaatatgaccctggtcagggctttgccaccgttgaagccctgcagaaggtgcaatgtaggggttctggggccacagaggagaggccacttcccaccaggacccccaacatgaagtctaggcctcaggggctcccgcccttcttcctccagcagcgggaactgccactgctctcccaggccctgttctggaggctaaccttggttcctggagagtgtgcccctccaccctccctccagcagccctgatcacaccatgagagccaggaacgggtcaccctgctgaagatcactctgtgccctgggggaggagccaagccctcaccccacaaggggcaggtgggggcttggttgctgacccggcccaagtccccacagagcaccttctgtagctccagcttgtctccctgg

SEQ ID NO: 1233 - protein, 169 aa, Homo sapiens [sequence omitted]

SEQ ID NO: 1234 - DNA, 2246 bp, Homo sapiens
ctgcagacgaggcaggcggaagaggcgggacttcgcgggtgacgtcatcggggcgccggaggcccggggcgcctgggaatttgaagcaaacaggcagcgcgcgacaatggcggtcgctcgtgcagctttggggccattggtgacgggtctgtacgacgtgcaggctttcaagtttggggacttcgtgctgaagagcgggctttcctcccccatctacatcgatctgcggggcatcgtgtctcgaccgcgtcttctgagtcaggttgcagatattttattccaaactgcccaaaatgcaggcatcagttttgacaccgtgtgtggagtgccttatacagctttgccattggctacagttatctgttcaaccaatcaaattccaatgcttattagaaggaaagaaacaaaggattatggaactaagcgtcttgtagaaggaactattaatccaggagaaacctgtttaatcattgaagatgttgtcaccagtggatctagtgttttggaaactgttgaggttcttcagaaggagggcttgaaggtcactgatgccatagtgctgttggacagagagcagggaggcaaggacaagttgcaggcgcacgggatccgcctccactcagtgtgtacattgtccaaaatgctggagattctcgagcagcagaaaaaagttgatgctgagacagttgggagagtgaagaggtttattcaggagaatgtctttgtggcagcgaatcataatggttctcccctttctataaaggaagcacccaaagaactcagcttcggtgcacgtgcagagctgcccaggatccacccagttgcatcgaagcttctcaggcttatgcaaaagaaggagaccaatctgtgtctatctgctgatgtttcactggccagagagctgttgcagctagcagatgctttaggacctagtatctgcatgctgaagactcatgtagatattttgaatgattttactctggatgtgatgaaggagttgataactctggcaaaatgccatgagttcttgatatttgaagaccggaagtttgcagatataggaaacacagtgaaaaagcagtatgaaggaggtatctttaaaatagcttcctgggcagatctagtaaatgctcacgtggtgccaggctcaggagttgtgaaaggcctgcaagaagtgggcctgcctttgcatcgggggtgcctccttattgcggaaatgagctccaccggctccctggccactggggactacactagagcagcggttagaatggctgaggagcactctgaatttgttgttggttttatttctggctcccgagtaagcatgaaaccagaatttcttcacttgactccaggagttcagttggaagcaggaggagataatcttggccaacagtacaatagcccacaagaagttattggcaaacgaggttccgatatcatcattgtaggtcgtggcataatctcagcagctgatcgtctggaagcagcagagatgtacagaaaagctgcttgggaagcgtatttgagtagacttggtgtttgagtgcttcagatacatttttcagatacaatgtgaagacattgaagatatgtggtcctcctgaaagtcactggctggaaataatccaattattcctgcttggattcttccacagggcctgtgtaagaatgggttctggagttctcatggtctttaggaaatattgagtaatttgtaatcaccgcattgatactataataagttcattcttaagcttgctttttttgagactggtgtttgttagacagccacagtcctgtctgggttagggtcttccacatttgaggatccttcctatctctccatgggactagactgctttgttattctatttattttttaatttttttcgagacaggatctcactctgttgcccaggatggagtgcagtggtgagatcacggctcattgcagcctcgacctcccaggtgatcctcccacctcagcttccagattagctggtgctataggcatgcaccaccacgtccatctaaatttctttattatttgtagagatgaggtcttgccatgttacccaggctggtctcaactcctgggctcaagcgatcctcctgcctcagtctctcaaagtgctgggattacaggtgtgagccactgtgcccagcctaattgcagtaagacaaaaattctagggcaccaagaggctaaagtcagcacagcttttcttgtgtcctgtatt

SEQ ID NO: 1235 - DNA, 984 bp, Homo sapiens
ctcgggtctggtggctgccggccctgcggcatctcgccatggggagcacggagagcagcgagggccgcagggtgtccttcggagtggacgaggaggagcgggtccgggtgctgcagggtgtccggctgtctgaaaacgtggtgaaccgcatgaaggagcccagctctccaccccctgctcccacatcttctacctttggccttcaagatggcaacttgagagcccctcacaaagaatccacactgcccaggtcggggagcagtggtggccagcagccctcagggatgaaggagggtgtcaagaggtatgaacaggagcatgctgctatccaggataagctcttccaggtggcaaagagggaaagagaggctgccaccaagcactccaaggcatccctgcccacgggcgaaggcagcatcagccatgaggagcagaagtcagtccggctggccagggagctggagagcagagaggcagagctaagacgccgtgacaccttctacaaggagcagctggagcgtattgagaggaagaatgctgagatgtataaactgtcttcagagcaattccatgaggcagcctcaaagatggagagcacaataaagccccgcagggtggagcccgtctgctcagggttgcaggcccagattctccactgctaccgagatcgcccgcatgaggtgctgctgtgctcggacctggtcaaggcataccagcgctgcgtgagcgccgcccacaagggctgaggagcagacatcattccctgccctggcagtgacttggagccctgaagaagggaccaatcatgggaccacagccactgtgccctgccgtttcctgctgggcccctgcatatgcccctgagcctggggctgccacgtgtttaggaaacaaagtatgcgctactgtctgaaaacaaataaagcagatgcctttgttttcagtcaaaaaaaaaaaaaaaaaaaaaaaaaaaaaaaaaaaaaa

SEQ ID NO: 1236 - protein, 235 aa, Homo sapiens
MGSTESSEGRRVSFGVDEEERVRVLQGVRLSENVVNRMKEPSSPPPAPTSSTFGLQDGNLRAPHKESTLPRSGSSGGQQPSGMKEGVKRYEQEHAAIQDKLFQVAKREREAATKHSKASLPTGEGSISHEEQKSVRLARELESREAELRRRDTFYKEQLERIERKNAEMYKLSSEQFHEAASKMESTIKPRRVEPVCSGLQAQILHCYRDRPHEVLLCSDLVKAYQRCVSAAHKG

SEQ ID NO: 1237 - DNA, 2900 bp, Homo sapiens
gagagtggccagcgagggcagcgttcgccgcccctcaggccccgtcccggcgccgcagccgcctgcgtttcggtttgtgagcaggcccggccgggccaggagcgagagcgagactctggagcggtcgccgccgcagtcgcccgggccgggaaaggcgggcgatgcccccaaccgccgctcgggccatgtccgaggggcgcgcgtgttgtcgccgccggggcgccgtgcccgcctgtcgtcccccgggcccagccgctcgtccgaggcccgcgaggagctgcgccgccacctcgtgggcctcatcgagcgcagccgggtggtgatcttcagcaagagctactgtccccatagtactcgggtgaaagaactcttttcttctttgggagtcgaatgtaatgtcttggaacttgatcaagttgatgatggggccagggttcaagaagtgctgtcagaaatcactaatcagaaaactgtgcccaatattttcgtgaataaagtgcatgtaggtggatgtgaccaaactttccaggcatatcagagtggtttgttacagaagctccttcaggaagatttggcatatgattatgatctcatcatcatcggtggtggttctggaggcctttcatgtgcgaaggaagctgccattttgggaaagaaagttatggtgctagactttgttgtcccgtcacctcagggcacatcctggggtcttggtggcacttgtgtaaatgtaggttgtattcctaagaaattgatgcatcaggctgcccttttggggcaggcattatgtgactcaaggaaatttggctgggaatataatcaacaagtgaggcacaactgggagacaatgacaaaagcgattcagaaccacatcagctctctaaactggggctacaggttgtctctgagggaaaaggctgtggcctatgtcaattcctatggagaatttgttgaacatcataaaataaaggcaaccaataaaaaaggacaggagacttattatactgctgcacagtttgtcatagcaacgggtgaaaggccacggtatttaggaatccaaggagataaagaatactgtattactagtgatgaccttttttctctgccttattgccctggcaaaacattagtggtgggtgcctcttatgttgccctggagtgtgcagggtttctggctggctttggcctagatgtcacagttatggtacgctcaatccttctccgtggcttcgaccaagaaatggcagaaaaagtgggttcctacatggagcagcatggtgtgaagttcctacggaaattcatacctgtgatggttcaacagttggagaaaggttcacctggaaagctgaaagtgttggctaaatccactgaaggaacagaaacaattgaaggagtctataacacagttttgttagctattggtcgtgactcctgtacaaggaaaataggcttggagaagattggtgtcaaaattaatgagaagagtggaaaaatacctgtaaatgatgtggaacagaccaatgtgccatatgtctatgctgttggtgatattttggaggataagccagagctcactcctgtcgccatacagtcaggcaagctgctagctcagagactttttggggcctctttagaaaagtgtgattatattaatgttccgactacagtgtttactcctctggagtatggttgctgtggattatctgaagagaaagctattgaagtatataaaaaagagaatctagaaatatatcatactttgttctggcctcttgaatggacagtagctggcagagagaacaacacttgttatgcaaagataatctgcaataaattcgaccatgatcgggtgataggatttcatattcttggaccaaacgccggtgaggttacccaaggatttgcagctgcaatgaaatgtgggctcacaaaacagctacttgatgacaccattggaattcaccccacatgtggggaggtgttcacgactttggaaatcacaaagtcgtcaggactagacatcactcagaaaggctgctgaggctaggcctgctgctgtttagttctccttgtcatattctcatttctctcaaagataagaatgctctcggataaaatgagcctgtgctcatgacagctgctctgttactcagggaccagtgcagggctgtcttacgacacttagatgagaaagtagacaaggaaagaggacagcagtgggcatctgccttgtggtcttgctgacagcgagaagcagtgggactgcttccttgacgccttagcttggagccccgttatgaggtgagccaaggctgactctcgcaagccaggactgagcttccctcggaaagacctttgagtggcaccattcacctaagttagcttttctggtcgctattgtttttatcccctttgctttgttgtttctgtgaaaatatattttcagttaagaaatgctataaagtagtggttttctagtgcgtgggcctagaattcacacatgctcactggtgaacagtgtctgtgggctgctgtgggctgcatttggatagctgtctgcattagcaggaagctgtacacactgtgtagggttagtcatctcttttcttttttgaggcacatttaacctactgtcaaaacgctgactcatgcttcaccctcacactcactacttggtggtgataaccttgaagctattctcccctaattaatatctcgagactgagcaaaatatctcatgtaagataaaagtacttgaattgctttttcatgttcatcttaatagtattatttccaaaagtttttaatactgtattatgtgaaatctaactaatttatctgtgaaataattccatcacagtctgtttaatgatgataaagttccataaatgaatacaggt

SEQ ID NO: 1238 - DNA, 3655 bp, Homo sapiens
agcgatccgaggcccggccccggccccgccccgcgccgcgccgcgccgcttgccgccgggctagcactgacgtgtctctcggcggagctgctgtgcagtggaacgcgctgggccgcgggcagcgtcgcctcacgcggagcagagctgagctgaagcgggacccggagcccgagcagccgccgccatggcaatcaaatttctggaagtcatcaagcccttctgtgtcatcctgccggaaattcagaagccagagaggaagattcagtttaaggagaaagtgctgtggaccgctatcaccctctttatcttcttagtgtgctgccagattcccctgtttgggatcatgtcttcagattcagctgaccctttctattggatgagagtgattctagcctctaacagaggcacattgatggagctagggatctctcctattgtcacgtctggccttataatgcaactcttggctggcgccaagataattgaagttggtgacaccccaaaagaccgagctctcttcaacggagcccaaaagttatttggcatgatcattactatcggccagtctatcgtgtatgtgatgaccgggatgtatggggacccttctgaaatgggtgctggaatttgcctgctaatcaccattcagctctttgttgctggcttaattgtcctacttttggatgaactcctgcaaaaaggatatggccttggctctggtatttctctcttcattgcaactaacatctgtgaaaccatcgtatggaaggcattcagccccactactgtcaacactggccgaggaatggaatttgaaggtgctatcatcgcacttttccatctgctggccacacgcacagacaaggtccgagcccttcgggaggcgttctaccgccagaatcttcccaacctcatgaatctcatcgccaccatctttgtctttgcagtggtcatctatttccagggcttccgagtggacctgccaatcaagtcggcccgctaccgtggccagtacaacacctatcccatcaagctcttctatacgtccaacatccccatcatcctgcagtctgccctggtgtccaacctttatgtcatctcccaaatgctctcagctcgcttcagtggcaacttgctggtcagcctgctgggcacctggtcggacacgtcttctgggggcccagcacgtgcttatccagttggtggcctttgctattacctgtcccctccagaatcttttggctccgtgttagaagacccggtccatgcagttgtatacatagtgttcatgctgggctcctgtgcattcttctccaaaacgtggattgaggtctcaggttcctctgccaaagatgttgcaaagcagctgaaggagcagcagatggtgatgagaggccaccgagagacctccatggtccatgaactcaaccggtacatccccacagccgcggcctttggtgggctgtgcatcggggccctctcggtcctggctgacttcctaggcgccattgggtctggaaccgggatcctgctcgcagtcacaatcatctaccagtactttgagatcttcgttaaggagcaaagcgaggttggcagcatgggggccctgctcttctgagcccgtctcccggacaggttgaggaagctgctccagaagcgcctcggaaggggagctctcatcatggcgcgtgctgctgcggcatatggacttttaataatgtttttgaatttcgtattctttcattccactgtgtaaagtgctagacattttccaatttaaaattttgctttttatcctggcactggcaaaaagaactgtgaaagtgaaattttattcagccgactgccagagaagtgggaatggtataggattgtccccaagtgtccatgtaacttttgttttaacctttgcaccttctcagtgctgtatgcggctgcagccgtctcacctgtttccccacaaagggaatttctcactctggttggaagcacaaacactgaaatgtctacgtttcattttggcagtagggtgtgaagctgggagcagatcatgtatttcccggagacgtgggaccttgctggcatgtctccttcacaatcaggcgtgggaatatctggcttaggactgtttctctctaagacaccattgttttcccttattttaaaagtgatttttttaaggacagaacttcttccaaaagagagggatggctttcccagaagacactcctggccatctgtggatttgtctgtgcacctattggctcttctagctgactcttctggttgggcttagagtctgcctgtttctgctagctccgtgtttagtccacttgggtcatcagctctgccaagctgagcctggccaagctaggtggacagacccttgcagtgatgtccgtttgtccagattctgccagtcatcactggacacgtctcctcgcagctgccctagcaaggggagacattgtggtagctatcagacatggacagaaactgacttagtgctcacaagcccctacaccttctgggctgaagatcacccagctgtgttcagaattttcttactgtgcttaggactgcacgcaagtgagcagacaccaccgacttcctttctgcgtcaccagtgtcgtcagcagagagaggacagcacaggctcaaggttggtagtgaagtcaggttcggggtgcatgggctgtggtggtgttgatcagttgctccagtgtttgaaataagaagactcatgtttatgtctggaataagttctgtttgtgctgacaggtggcctaggtcctggagatgagcaccctctctctggcctttagggagtcccctcttaggacaggcactgcccagcagcaagggcagcagagttgggtgctaagatcctgaggagctcgaggtttcgagctggctttagacattggtgggaccaaggatgttttgcaggatgccctgatcctaagaagggggcctgggggtgcgtgcagcctgtcggggagaccccactctgacagtgggcacacggcagcctgcaaagcacagggccaccgccacagcccggcagaggggcacactctggagaccttgctggcagtgctagccaggaaacagagtgaccaagggacaagaagggacttgcctaaagccacccagcaactcagcagcagaaccaagatgggccccaggctcctccatatggcccagggcttaccaccctatcacacgtggccttgtctagacccagtcctgagcaggggagaggctcttgagacctgatgccctcctacccacatggttctcccactgccctgtctgctctgctgctacagaggggcagggcctcccccagcccacgcttaggaatgcttgcctctggcaggcaggcagctgtacccaagctggtgggcagggggctggaaggcaccaggcctcaggaggagccccatagtcccgcctgcagcctgtaaccatcggctgggccctgcaaggcccacactcacgccctgtgggtgatggtcacggtgggtgggtgggggctgaccccagcttccaggggactgtcactgtggacgccaaaatggcataactgagataaggtgaataagtgacaaataaagccagttttttacaaggtaaaaaaaaaaaaaaaaaaaaa

SEQ ID NO: 1239 - protein, 476 aa, Homo sapiens
MAIKFLEVIKPFCVILPEIQKPERKIQFKEKVLWTAITLFIFLVCCQIPLFGIMSSDSADPFYWMRVILASNRGTLMELGISPIVTSGLIMQLLAGAKIIEVGDTPKDRALFNGAQKLFGMIITIGQSIVYVMTGMYGDPSEMGAGICLLITIQLFVAGLIVLLLDELLQKGYGLGSGISLFIATNICETIVWKAFSPTTVNTGRGMEFEGAIIALFHLLATRTDKVRALREAFYRQNLPNLMNLIATIFVFAVVIYFQGFRVDLPIKSARYRGQYNTYPIKLFYTSNIPIILQSALVSNLYVISQMLSARFSGNLLVSLLGTWSDTSSGGPARAYPVGGLCYYLSPPESFGSVLEDPVHAVVYIVFMLGSCAFFSKTWIEVSGSSAKDVAKQLKEQQMVMRGHRETSMVHELNRYIPTAAAFGGLCIGALSVLADFLGAIGSGTGILLAVTIIYQYFEIFVKEQSEVGSMGALLF

SEQ ID NO: 1240 - DNA, 993 bp, Homo sapiens
atgaagattgaggaggtgaagagcactacgaagacgcagcgcatcgcctcccacagccacgtgaaagggctggggctggacgagagcggcttggccaagcaggcggcctcagggcttgtgggccaggagaacgcgcgagaggtgtggccagtggaccagggagttgggggctgcaagcagggctgctgcggcgagagagctgctgaagtcgggcctgcaggtgctccaggtcagcgggcgactttggccgctgcagagaccgagatacgcggggtaacagcccgttccggagccggtcatcaggcgccaagccccgctgggctcctcgcagccgcgggacctttctccgcccttcccgaggctgagtttcctgaacgggaagctgccggcccgcggggcagccgggagcagccagggcgtgaggacgtgggttcccgtcacccccggcttggaacagcagcgccgcaacaaccgctggcgttcatcgagcctctcagcagccctgcgaggcgatcccggggagaatcccacgccacagccgaggaaactgaggcaggcagggtgacacacagcccagtagtggcgggcgggcgcccaggctgccaccgcgctgaggaccggcccctctgccagccgggaggcgtggggcaggacagccgcgctctcgccagggcccagagccccactttgccaaggagctgtcgctggagcggtgactttgttcagggccgagaaccggaggaggaggccagacttgctgctgggcagctggcacatgggacatggggtgttatgactccagcatttatggagcgcctgctgtgtgctctgcaggtgagcaatgtgaggctcagagaagagaaacagaaagcccggaggcttgagtgggtcagacacccatcaggagcttggcatgagtatgacagctccttgacgcaaagtccagggggcatgagtgctggggccattgcaggcaccaggacccaagcctag

SEQ ID NO: 1241 - protein, 283 aa, Homo sapiens
MVDRLRPVKFPLLMGQPEAQGQPGPAGAPGQRATLAAAETEIRGVTARSGAGHQAPSPAGLLAAAGPFSALPEAEFPEREAAGPRGSREQPGREDVGSRHPRLGTAAPQQPLAFIEPLSSPARRSRGESHATAEETEAGRVTHSPVVAGGRPGCHRAEDRPLCQPGGVGQDSRALARAQSPTLPRSCRWSGDFVQGREPEEEARLAAGQLAHGTWGVMTPAFMERLLCALQVSNVRLREEKQKARRLEWVRHPSGAWHEYDSSLTQSPGGMSAGAIAGTRTQA

SEQ ID NO: 1242 - DNA, 2002 bp, Homo sapiens
aggtaaagggagaagatgaggaagagaacaatttggaagtacgtgaaaccaaaattaagggtaaaagtgggagattcttcacagtcaagctcccagttgctcttgatcctggggccaagatttcagtcattgtggaaacagtctacacccatgtgcttcatccatatccaacccagatcacccagtcagagaaacagtttgtggtgtttgaggggaaccattatttctactctccctatccaacgaagacacaaaccatgcgtgtgaagcttgcctctcgaaatgtggagagctacaccaagctggggaaccccacgcgctctgaggacctactggattatgggcctttcagagatgtgcctgcctatagtcaggatacttttaaagtacattatgagaacaacagccctttcctgaccatcaccagcatgacccgagtcattgaagtctctcactggggtaatattgctgtggaagaaaatgtggacttaaagcacacaggagctgtgcttaaggggcctttctcacgctatgattaccagagacagccagatagtggaatatcctccatccgttcttttaagaccatccttcctgctgctgcccaggatgtttattaccgggatgagattggcaatgtttctaccagccacctccttattttggatgactctgtagagatggaaatccggcctcgcttccctctctttggcgggtggaagacccattacatcgttggctacaacctcccaagctatgagtacctctataatttgggtgaccagtatgcactgaagatgaggtttgtggaccatgtgtttgatgaacaagtgatagattctctgactgtgaagatcatcctgcctgaaggagccaagaacattgaaattgatagtccctatgaaatcagccgtgccccagatgagctgcactacacctatctggatacatttggccgccctgtgattgttgcctacaagaaaaatctggtagaacagcacattcaggacattgtggtccactacacgttcaacaaggtgctcatgctgcaggagcccctgctggtggtggcggccttctacatcctgttcttcaccgttatcatctatgttcggctggacttctccatcaccaaggatccagccgcagaagccaggatgaaggtagcctgcatcacagagcaggtcttgaccctggtcaacaagagaataggcctttaccgtcactttgacgagaccgtcaataggtacaagcaatcccgggacatctccaccctcaacagtggcaagaagagcctggagactgaacacaaggccttgaccagtgagattgcactgctgcagtccaggctgaagacagagggctctgatctgtgcgacagagtgagcgaaatgcagaagctggatgcacaggtcaaggagctggtgctgaagtcggcggtggaggctgagcgcctggtggctggcaagctcaagaaagacacgtacattgagaatgagaagctcatctcaggaaagcgccaggagctggtcaccaagatcgaccacatcctggatgccctgtagcccctgcccgcatcctccagggggcccagggtgcctgcactttgctgtggcaggcagattgggtggtagtgggaggttgtgcatggaggccagtgaaagctgacatctgtaaaaggccttcaaggaagagaaaccaggccctgcgtcaggcagtgtgagtttgccgtttgtccttaactttctttttttttttttttaaaaaaagaaaactttaaaaaaactcccattaaaaacaaaacatctttgtgttttgaacaaaggaattttcaatatttgattggtattctgttctgaagtctaggatatttttcagcctataaagccccctgttttatgcccttctaattctgatgtttgggtattgtgtgagtgcatgtgtttttttttttttttttttaaagcgtgtgtgaacaaatggaaataaagcagggactgtg

SEQ ID NO: 1243 - DNA, 2274 bp, Homo sapiens
ctgctcttcccggtcatggaggcgccagccgccggcttgtttctgctcctgttgcttgggacttgggccccggcgccgggcagcgcctcctccgaggcaccgccgctgatcaatgaggacgtgaagcgcacagtggacctaagcagccacctggctaaggtgacggccgaggtggtcctggcgcacctgggcggcggctccacgtcccgagctacctctttcctgctggctttggagcctgagctcgaggcccggctggcgcacctgggcgtgcaggtaaagggagaagatgaggaagagaacaatttggaagtacgtgaaaccaaaattaagggtaaaagtgggagattcttcacagtcaagctcccagttgctcttgatcctggggccaagatttcagtcattgtggaaacagtctacacccatgtgcttcatccgtatccaacccagatcacccagtcagagaaacagtttgtggtgtttgaggggaaccattatttctactctccctatccaacgaagacacaaaccatgcgtgtgaagcttgcctctcgaaatgtggagagctacaccaagctggggaaccccacgcgctctgaggacctactggattatgggcctttcagagatgtgcctgcctatagtcaggatacttttaaagtacattatgagaacaacagccctttcctgaccatcaccagcatgacccgagtcattgaagtctctcactggggtaatattgctgtggaagaaaatgtggacttaaagcacacaggagctgtgcttaaggggcctttctcacgctatgattaccagagacagccagatagtggaatatcctccatccgttcttttaagaccatccttcctgctgctgcccaggatgtttattaccgggatgagattggcaatgtttctaccagccacctccttattttggatgactctgtagagatggaaatccggcctcgcttccctctctttggcgggtggaagacccattacatcgttggctacaacctcccaagctatgagtacctctataatttgggtgaccagtatgcactgaagatgaggtttgtggaccatgtgtttgatgaacaagtgatagattctctgactgtgaagatcatcctgcctgaaggagccaagaacattgaaattgatagtccctatgaaatcagccgtgccccagatgagctgcactacacctatctggacacatttggccgccctgtgattgttgcctacaagaaaaatctggtagaacagcacattcaggacattgtggtccactacacgttcaacaaggtgctcatgctgcaggagcccctgctggtggtggcggccttctacatcctgttcttcaccgttatcatctatgttcggctggacttctccatcaccaaggatccagccgcagaagccaggatgaaggtagcctgcatcacagagcaggtcttgaccctggtcaacaagagaataggcctttaccgtcactttgacgagaccgtcaataggtacaagcaatcccgggacatctccaccctcaacagtggcaagaagagcctggagactgaacacaaggccttgaccagtgagattgcactgctgcagtccaggctgaagacagagggctctgatctgtgcgacagagtgagcgaaatgcagaagctggatgcacaggtcaaggagctggtgctgaagtcggcggtggaggctgagcgcctggtggctggcaagctcaagaaagacacgtacattgagaatgagaagctcatctcaggaaagcgccaggagctggtcaccaagatcgaccacatcctggatgccctgtagcccctgcccgcatcctccagggggcccagggtgcctgcactttgctgtggcaggcagattgggtggtagtgggaggttgtgcatggaggccagtgaaagctgacatctgtaaaaggccttcaaggaagagaaaccaggccctgcgtcaggcagtgtgagtttgccgtttgtccttaactttctttttttttttttttaaaaaaagaaaactttaaaaaaactcccattaaaaacaaaacatctttgtgttttgaacaaaggaattttcaatatttgattggtattctgttctgaagtctaagatatttttcagcctataaagccccctgttttatgcccttctaattctgatgtttgggtattgtgtgagtgcatgtgtttttttttttttttttaaagcgtgtgtgaacaaatggaaataaagcagggactgtg

SEQ ID NO: 1244 - DNA, 2614 bp, Homo sapiens
gtgagcgccaggaaggtagcgaggccagcgtcgccccgggactcgctgctcaagtctgtctattgcctgccgccacatccatcctagcagggccccgtcgcccaccaggcggacaaaagcggtccgctgaacaccatgcggccgctcggcgtgccgcccaggctctgctggtgagcgccgccaccccgcgcccaggtcccgcgagcccgcctgccgcgcacctcgccctgctcccagctctactccaggccccgtccgcccgggggcgccgcccaccgcgcctcgctcgggccgttgccgtctgcacccagaccctgagccgccgccgccggccatggaggtggcgcccgagcagccgcgctggatggcgcacccggccgtgctgaatgcgcagcaccccgactcacaccacccgggcctggcgcacaactacatggaacccgcgcagctgctgcctccagacgaggtggacgtcttcttcaatcacctcgactcgcagggcaacccctactatgccaaccccgctcacgcgcgggcgcgcgtctcctacagccccgcgcagcccgcctgaccggaggccagatgtgccgcccacacttgttgcacagcccgggtttgccctggctggacgggggcaaagcagccctctctgccgctgcggcccaccaccacaacccctggaccgtgagccccttctccaagacgccactgcacccctcagctgctggaggccctggaggcccactctctgtgtacccaggggctgggggtgggagcgggggaggcagcgggagctcagtggcctccctcacccctacagcagcccactctggctcccaccttttcggcttcccacccacgccacccaaagaagtgtctcctgaccctagcaccacgggggctgcgtctccagcctcatcttccgcggggggtagtgcagcccgaggagaggacaaggacggcgtcaagtaccaggtgtcactgacggagagcatgaagatggaaagtggcagtcccctgcgcccaggcctagctactatgggcacccagcctgctacacaccaccccatccccacctacccctcctatgtgccggcggctgcccacgactacagcagcggactcttccaccccggaggcttcctggggggaccggcctccagcttcacccctaagcagcgcagcaaggctcgttcctgttcagaaggccgggagtgtgtcaactgtggggccacagccacccctctctggcggcgggacggcaccggccactacctgtgcaatgcctgtggcctctaccacaagatgaatgggcagaaccgaccactcatcaagcccaagcgaagactgtcggccgccagaagagccggcacctgttgtgcaaattgtcagacgacaaccaccaccttatggcgccgaaacgccaacggggaccctgtctgcaacgcctgtggcctctactacaagctgcacaatgttaacaggccactgaccatgaagaaggaagggatccagactcggaaccggaagatgtccaacaagtccaagaagagcaagaaaggggcggagtgcttcgaggagctgtcaaagtgcatgcaggagaagtcatcccccttcagtgcagctgccctggctggacacatggcacctgtgggccacctcccgcccttcagccactccggacacatcctgcccactccgacgcccatccacccctcctccagcctctccttcggccacccccacccgtccagcatggtgaccgccatgggctagggaacagatggacgtcgaggaccgggcactcccgggatgggtggaccaaacccttagcagcccagcatttcccgaaggccgacaccactcctgccagcccggctcggcccagcaccccctctcctggagggcgcccagcagcctgccagcagttactgtgaatgttccccaccgctgagaggctgcctccgcacctgaccgctgcccaggtggggtttcctgcatggacagttgtttggagaacaacaaggacaactttatgtagagaaaaggaggggacgggacagacgaaggcaaccatttttagaaggaaaaaggattaggcaaaaataatttattttgctcttgtttctaacaaggacttggagacttggtggtctgagctgtcccaagtcctccggttcttcctcgggattggcgggtccacttgccagggctctgggggcagatttgtggggacctcagcctgcaccctcttctcctctggcttccctctctgaaatagccgaactccaggctgggctgagccaaagccagagtggccacggcccagggagggtgagctggtgcctgctttgacgggccaggccctggagggcagagacaatcacgggcggtcctgcacagattcccaggccagggctgggtcacaggaaggaaacaacattttcttgaaaggggaaacgtctcccagatcgctcccttggctttgaggccgaagctgctgtgactgtgtccccttactgagcgcaagccacagcctgtcttgtcaggtggaccctgtaaatacatcctttttctgttaacccttcaaccccctcgcctactactctgagac

SEQ ID NO: 1245 - DNA, 584 bp, Homo sapiens
gtcaaagtgcatgcaggagaagtcatcccccttcagtgcagctgccctggctggacacatggcacctgtgggccacctcccgcccttcagccactccggacacatcctgcccactccgacgcccatccacccctcctccagcctctccttcggccacccccacccgtccagcatggtgaccgccatgggctagggaacagatggacgtcgaggaccgggcactcccgggatgggtggaccaaacccttagcagcccagcatttcccgaaggccgacaccactcctgccagcccggctcgacccagggagaggctgtgtccctgctggggtctcaggtccagctttactgtggctgtctggatccttcccaaggtacagctgtatataaacgtgtcccgagcttagattctgtatgcggtgacggcggggtgtggtggcctgtgaggggcccctggcccaggaggaggattgtgctgatgtagtgaccaagtgcaatatgggcgggcagtcgctgcagggagcaccacggccagaagtaacttattttgtactagtgtccgcataagaaaaagaatcggcagtat

SEQ ID NO: 1246 - DNA, 1498 bp, Homo sapiens
ggcacgaggataaagcctgaggcggcggcagcggcggagttggcggcttggagagctcgggagagttccctggaaccagaacttggaccttctcgcttctgtcctccgtttagtctcctcctcggcgggagccctcgcgacgcgcccggcccggagcccccagcgcagcggccgcgtttgaaggatgacctctaggaagaaagtgttgctgaaggttatcatcctgggagattctggagtcgggaagacatcactcatgaaccagtatgtgaataagaaattcagcaatcagtacaaagccacaataggagctgactttctgaccaaggaggtgatggtggatgacaggctagtcacaatgcagatatgggacacagcaggacaggaacggttccagtctctcggtgtggccttctacagaggtgcagactgctgcgttctggtatttgatgtgactgcccccaacacattcaaaaccctagatagctggagagatgagtttctcatccaggccagtccccgagatcctgaaaacttcccatttgttgtgttgggaaacaagattgacctcgaaaacagacaagtggccacaaagcgggcacaggcctggtgctacagcaaaaacaacattccctactttgagaccagtgccaaggaggccatcaacgtggagcaggcgttccagacgattgcacggaatgcacttaagcaggaaacggaggtggagctgtacaacgaatttcctgaacctatcaaactggacaagaatgaccgggccaaggcctcggcagaaagctgcagttgctgagggggcagtgagagttgagcacagagtccttcacaaaccaagaacacacgtaggccttcaacacaattcccctctcctcttccaaacaaaacatacattgatctctcacatccagctgccaaaagaaaaccccatcaaacacagttacaccccacatatctcgcacacacacacacacacgcacacacacacacacagatctgacgtaatcaaactccagcccttgcccgtgatggctccttggggtctgcctgcccacccacatgagcccgcgagtatggcagcaggacaagccagcggtggaagtcattctgatatggagttggcattggaagcttattctttttgttcactggagagagagagaactgtttacagttaatctgtgtctaattatctgattttttttattggtcttgtggtctttttaccccccctttcccctccctccttgaaggctaccccttgggaaggctggtgccccatgccccattacaggctcacacccagtctgatcaggctgagttttgtatgtatctatctgttaatgcttgttacttttaactaatcagatctttttacagtatccatttattatgtaatgcttcttagaaaagaatcttatagtacatgttaatatatgcaaccaattaaaatgtataaattagtgtaaaaaaaaaaaaaaaaaaa

SEQ ID NO: 1247 - protein, 231 aa, Homo sapiens
MSFSSRPVPEILKTSHLLCWETRLTSKTDKWPQSGHRPGATAKTTFPTLRPVPRRPSTWSRRSRRLHGMHLSRKRRWSCTTNFLNLSNWTRMTGPRPRQKAAVAEGAVRVEHRVLHKPRTHVGLQHNSPLLFQTKHTLISHIQLPKENPIKHSYTPHISHTHTHTHTHTHRSDVIKLQPLPVMAPWGLPAHPHEPASMAAGQASGGSHSDMELALEAYSFCSLERERTVYS

SEQ ID NO: 1248 - DNA, 1776 bp, Homo sapiens
agaatcttcagtttctgtgagcgtccgcttcgtctgggcacttccggtactcccattcagttccggtccctgtcttttacgtttccggcaaaacatcagtgtctgtgggtagttggaatcttcagttcctgtgagcgtcggcgtcttctgggcctgtggagtttcttggacaggggccgcggggctccaggacggcgcccttagcgacaccatggcccgaaatgcagaaaaggccatgacggccttagcaagatttcgccaggctcagctggaagagggaaaagtgaaggaacgaagaccctttctggcctcagaatgtactgaactgcctaaagctgagaagtggagacgacagatcattggagagatctctaaaaaagtggctcagattcagaatgctggtttaggtgaatttcgaattcgtgacctgaatgatgaaattaacaagctgctaagggagaaaggacactgggaggtccggataaaggagctgggaggtcctgattatggaaaagttggccctaaaatgctggatcatgaaggaaaagaagtcccaggaaaccgaggttacaagtactttggagcagcaaaagatttgcctggtgttagagagctgtttgaaaaagaacctcttcctcctcccagaaagacacgtgctgagctcatgaaggcaatcgattttgagtactatggttacctagatgaagatgatggtgttattgtgcctttggaacaggaatatgaaaagaaactcagagccgagttagtggaaaagtggaaagcagagagagaggctcggctggcaagaggagaaaaggaagaggaggaggaagaggaggaagagatcaacatctatgcagtcaccgaggaggagtcggacgaggaaggcagccaggagaaaggaggggacgacagccagcagaagttcattgctcacgtccctgttccctcgcagcaagagattgaggaggcactggtgcgaaggaagaaaatggaactcctccagaagtatgcaagcgagaccctgcaggcccaaagtgaagaagccagaaggctcctggggtattaggacccagctggggctctccttggagttcttccatcccccagtggtacctcaggacccagggctgcagacacaggctggtgctgcaagggctcctgccccattctcagccttccttccctctccttgtctcatgttgaccggagggtaggggtctgtccctggtcttcctggtaggttttgtacacatattttgctactgtgtggatccatttatttttattgtggagtgtatacaacaggttgcgaactggctgcctgtgtcttattttgacttgcactgccattttgaggggagaagaatcaattagtggcaaacatttaaaaatgcaattttttgcagaccaaagtataattttaaaaaatgcaaattttctaaaagacacatctcttgaaaaatgagatgatgtggccaggcgcagtggctcacgcctgtaaccccagcactttgggaggccgaggcgggcgggtcacgaggtcaagagatggagaccatcctggccaacatggtgaaaccccatgtctactaaaaatacaaaaaaattagctgggcgtactggcatgcacctgtagtcccagctgcttgggaggctgaggcaggagaatcacttgaacccgagaggtggaggttgaagtgagccaagatcgtgccattgcactccagcctggcgacagagtgagactctgtcccacaaaaaaaaaaaaaaaaa

SEQ ID NO: 1249 - protein, 285 aa, Homo sapiens
MARNAEKAMTALARFRQAQLEEGKVKERRPFLASECTELPKAEKWRRQIIGEISKKVAQIQNAGLGEFRIRDLNDEINKLLREKGHWEVRIKELGGPDYGKVGPKMLDHEGKEVPGNRGYKYFGAAKDLPGVRELFEKEPLPPPRKTRAELMKAIDFEYYGYLDEDDGVIVPLEQEYEKKLRAELVEKWKAEREARLARGEKEEEEEEEEEINIYAVTEEESDEEGSQEKGGDDSQQKFIAHVPVPSQQEIEEALVRRKKMELLQKYASETLQAQSEEARRLLGY

SEQ ID NO: 1250 - DNA, 1500 bp, Homo sapiens
gaattccaaacagcctctaccttgcgagccgtcttccccaggcctgcgtccgagtctccgccgctgcgggcccgctccgacgcggaagatctgactgcagccatgagcagcaatgagtgcttcaagtgtggacgatctggccactgggcccgggaatgtcctactggtggaggccgtggtcgtggaatgagaagccgtggcagaggtggttttacctcggatagaggtttccagtttgtttcctcgtctcttccagatatttgttatcgctgtggtgagtctggtcatcttgccaaggattgtgatcttcaggaggatgcctgctataactgcggtagaggtggccacattgccaaggactgcaaggagcccaagagagagcgagagcaatgctgctacaactgtggcaaaccaggccatctggctcgtgactgcgaccatgcagatgagcagaaatgctattcttgtggagaattcggacacattcaaaaagactgcaccaaagtgaagtgctataggtgtggtgaaactggtcatgtagccatcaactgcagcaagacaagtgaagtcaactgttaccgctgtggcgagtcagggcaccttgcacgggaatgcacaattgaggctacagcctaattattttcctttgtcgcccctcctttttctgattgatggttgtattattttctctgaatcctcttcactggccaaaggttggcagatagaggcaactcccaggccagtgagctttacttgccgtgtaaaaggaggaaaggggtggaaaaaaaccgactttctgcatttaactacaaaaaaagtttatgtttagtttggtagaggtgttatgtataatgctttgttaaagaaccccctttccgtgccactggtgaatagggattgatgaatgggaagagttgagtcagaccagtaagcccgtcctgggttccttgaacatgttcccatgtaggaggtaaaaccaattctggaagtgtctatgaacttccataaataactttaattttagtataatgatggtcttggattgtctgacctcagtagctattaaataacatcaagtaacatctgtatcaggccctacatagaacatacagttgagtgggagtaaacaaaaagataaacatgcgtgttaatggctgttcgagagaaatcggaataaaagcctaaacaggaacaacttcatcacagtgttgatgttggacacatagatggtgatggcaaaggtttagaacacattattttcaaagactaaatctaaaacccagagtaaacatcaatgctcagagttagcataatttggagctattcaggaattgcagagaaatgcattttcacagaaatcaagatgttatttttgtatactatatcacttagacaactgtgtttcatttgctgtaatcagtttttaaaagtcagatggaaagagcaactgaagtcctagaaaatagaaatgtaattttaaactattccaataaagctgga

SEQ ID NO: 1251 - protein, 177 aa, Homo sapiens
MSSNECFKCGRSGHWARECPTGGGRGRGMRSRGRGGFTSDRGFQFVSSSLPDICYRCGESGHLAKDCDLQEDACYNCGRGGHIAKDCKEPKREREQCCYNCGKPGHLARDCDHADEQKCYSCGEFGHIQKDCTKVKCYRCGETGHVAINCSKTSEVNCYRCGESGHLARECTIEATA

SEQ ID NO: 1252 - DNA, 1552 bp, Homo sapiens
catggctgccctcagatcccttgtgaagcccaagatcgtcaaaaagagaaccaagaaattcatccggcaccagtcagaccgatatgtcaaaatcaagatgagaagaataatgtctggggtgaaggtgaagcacccagcccaagactcagcagccaggaagtggcccagcgctctttataccacgggtgcaggaattcacacagaaaagtggaggccaaggcgtgagaattcctcaatgactgccctctaaaggaagaggaccaggcttcctgtcagagactgaggacccaggaagaaacatgtctcggcccctgtccccctccacaattcagaggccacattctaacaggggaggctgaccaattaaacagataatgacacctcctagagctaagagctctccgactatgaaccagatgcctggagaacacggatgaatggtctgagcatgagcaggggtgggaggcagcgttaagggaggcatcagagtcagaacctagcaaacaagtgtttgtgaagaagaattcatagaaaagggcaatgcgggcatcacatgggctaaggaacagaggggtagcagtagctgttgtgccaagctgcaggtgttatacactaccctctagatctgggtttccttaaaacaccttgagaggacaaccctgcaaagcacggcacagtggccgagagggaaaggagcattcgaggtctcagtcctcgctctgagcctacttctctgcttctgggctccagccatctttgtggaaagggggctgctagtgacaccctctcaagggtctttccagctctaggtcggctgtgctggagtctaggatttgcccactgagaaatctgtttccaagttccttcaacctgatgcatcctgcagcatcacggcagctgttcagagtggtcagaaggcccctgaatgagctcagtagagggaagcctgggaacagggaggcacctgcagctctactcatggcctggccagagctcagcagctcttctctgccatctagtggggatggcataccatcactggggaccaccctgtgcaaactggtgagcctgagtgcctgtcacagagggaaagaaaggggggggatacaggatttagatgaaatagcaactcctaccctattgtcaaaatcatccagctttttcaaaacatcatattgtactgatttttttgtgtttttgacagagtcttgctgtgtcaccaaggctggaatgcagtggcatgatctcggctcactgtagcctctgtctccctggttcaagcaattctgccccagcctcccaagtagctgggactacaggcatgcgccaccacacccagctaagttttgtatttttttagtagagtcagggttttactttggccaggctggtcttaaactcctggcctcaactgatctgcctgtctcggcctcccaaagaactgggattacaggcatgaggcaccgtgcctgtcccatgttgtacttaatagatatttaccatatacaattattttttaatttaaataaatcaatgaacagtgttatttttt

SEQ ID NO: 1253 - protein, 128 aa, Homo sapiens
MHPAASRQLFRVVRRPLNELSRGKPGNREAPAALLMAWPELSSSSLPSSGDGIPSLGTTLCKLVSLSACHRGKERGGIQDLDEIATPTLLSKSSSFFKTSYCTDFFVFLTESCCVTKAGMQWHDLGSL

SEQ ID NO: 1254 - DNA, 1634 bp, Homo sapiens
ggtggcgtggggactccctgaaagcagagcggcagggcgcccggaagtcgtgagtcgagtcttcccgggctaatccatgccgggttggaggctgctgacgcaggtcggcgcccaggtgctgggtcgactcggggacggcctgggtgctgccctgggcccggggaacagaacacacatctggctttttgttagaggtcttcatggaaagagtggtacatggtgggatgagcatctttctgaagaaaatgtcccattcattaagcagttggtctctgatgaagataaagcccaattagcaagtaaactgtgtcctctgaaagatgaaccatggcctatacatccttgggaaccaggttcctttagagttggtcttattgccttgaagctgggcatgatgcctttatggaccaaggatggtcaaaagcatgtggtcacattacttcaggtacaagactgtcatgtcttaaaatatacgtcaaaggaaaactgtaatggaaaaatggcaaccctgtctgtaggaggaaaaactgtatcacgttttcgtaaagctacatccatattggaattttaccgggaacttggattgccgccgaaacagacagttaaaatctttaatataacagataatgctgcaattaaaccaggcactcctctttatgctgctcactttcgtcctcgacagtatgtggatgtcacagccaaatcgtagtggtaaaggttttcaaggtgtcatgaaaagatggggatttaaaggccagcctgctacgcatggtcaaacgaaaacccacaggagacctggagctgttgcaactggtgatattggcagagtctggcctggaactaaaatgcctggaaaaatgggaaacatatacaggacagaatatggactgaaagtgtggagaataaacacaaagcacaacataatctatgtaaatggctctgtacctggacataaaaattgcttagtaaaggtcaaagattctaaactgcctgcatataaggatctcggtaaaaatctaccattccctacatattttcctgatggagatgaagaggaactgccagaagatttgtatgatgaaaacgtgtgtcagcccggtgcgccttctattacatttgcctaacatctttggacgtggcagaaccttacatattctgtgagcttcgatgagccagagtgatatcataaccaccagaaatcatactctcctttcttagtcacaacaaaatcacacatgtcatctttgtcaagggcataaatatatcattcatacccccattaaattttgttagaaaaattaccacattaaatatatgagttaagtagattggatttgctgaaattggtgttgggcatattagcaaaatattcttaatttgtggactcgattcttttttactacatatttcccaagttatcttaagatgtctgtaaatttaacttttattaaagttttgtcaatctttgtgaatagtggttgtggaacagtagaaaaccatatggggactatagtgcaacctatttgggtaaagaaaccatttgctaaaatggagaaagtaaatagatttttatttaaattacagaaacatgttaaaggccggacaaaggaaagacaataaaatcataaattatc

SEQ ID NO: 1255 - DNA, 540 bp, Homo sapiens
atgatgacagtaggagttgagtggaggagatggcaagttgagcggaggaggtggcagtggggccccagatcaggtgcctccatggcaggctctgaagagctggggctccgggaagacacgctgagggtcctagctgccttccttaggcgtggtgaggctgctgggtctcctgttccaaatccacctagaagccatgcccaagaagagccaacagacttcctgagccgccttcgaagatgtcttccctgctccctggggcgaggagcagccccctctgagtcccctcggccttggtctctgcccatccgcccctgctatggagcccctggccctggccatggagctgagccggcgcgtggccgagctgggggacacccgggccggactcagcgtagagcacgcgcacagcctcacgccctggatccaggcccacgggggccggctccactgcgttcgttctgtggtgagcccttgctgtatgcccggactgcagccatgagtgtggacgctatgcctggcgtcaatgactgggtacgctaa

SEQ ID NO: 1256 - DNA, 5015 bp, Homo sapiens
gaggtcagaccggttgctttcccgggagttcggcgtttgctggggctgcagcagctgaagtgtagtgttttcttgggactggcggtctgcacttctctcccgggttccatctccccccgcccggtggtgaggccctcgaggagggctcggacgggtgtagcgatccgcgctagaggaagacgaggcccgggaacgcatgtcccccagggcaggttagggggctggaggggtcaaatcccggggtacttgtggagactctttagcgtggcttcttctctctgctgagaccccgagagctttcccagttctcctcccaggaccaccggggttcctgaagatcgggacttttctgcgcccctccaccaacagcccatctcctgtctatgaagaaagacccttcgtagaaacaacttccccgctgctgacgcgttttcccgtcccgtccccgaagtagtctactatgacctcgttgtgagcctctgaacgattttgacactttcccgaggcctagggtattatatcctaaccttactaaagaccacagaggtgcttgccattatgggaaatcagcttgctggcattgctccctcccagatcctttctgtagagagttatttttcagatattcatgactttgaatatgataaaagcctggggagtactcggttttttaaagttgctcgagccaagcaccgagaaggcctggtcgttgtgaaggtttttgcaattcaggatcccacattgcctttaaccagctataaacaagagctggaggaactgaaaatcaggcttaattctgcacagaattgtctacctttccagaaagcatcagaaaaagcatctgagaaagcagctatgctctttaggcagtatgtgcgagacaatctctatgatcgcatcagtacccgtccattcttgaataacattgagaagcgctggattgctttccagatcctgacagctgtggaccaagcacacaaatctggagttcgtcatggggacatcaagactgagaatgtgatggtcaccagttggaattgggttcttctaactgattttgccagttttaagcccacttatcttccagaagacaacccggcagatttcaattatttctttgacacatcacggaggagaacttgctatattgctcctgaacgttttgttgatggtgggatgtttgccactgagttagaatatatgagagatccttcaactccgcttgtagacttaaatagcaatcagagaacaagaggagagttgaagagagcaatggacatcttttcagcaggttgtgtgatagctgagctttttacagaaggtgtaccattatttgatctctctcaacttttggcttatagaaatggacattttttccctgaacaagtgctaaataaaattgaagatcacagtatcagagaattggtaactcagatgattcaccgtgagccagataaacgtttagaggcagaagattacttaaaacagcagcgtggcaatgcctttcctgaaatattttacacttttcttcagccctacatggcccagtttgccaaggaaacgtttctttctgcagatgagcgtattctggttatacggaaggatttgggcaacattattcacaatctctgtggacatgatctgccagaaaaagccgaaggagagcctaaggaaaatgggctggttatcttggtatctgttataacatcctgcctacagacccttaaatactgtgattccaaactagctgctttggaactgattcttcatttggctccaagattaagtgttgaaatccttttggatcgtattactccatatcttttgcatttcagcaatgactctgttcctagggtgagggctgaagccttgaggacgttgaccaaagttcttgctctcgtcaaagaggttcctcgtaatgatatcaatatttatccggaatacattctgccaggcatagcccacttagcccaagatgatgctactatcgttagactagcctatgctgaaaacatagctctgctggcagaaacagctctgagattcttggaattagtacagttaaaaaatcttaatatggaaaatgaccccaataatgaagaaatagatgaggttacacatccaaatggaaattatgacacagagctccaagccttacatgaaatggtccagcagaaagttgttactttgctaagtgaccctgaaaatattgtaaaacaaaccttgatggaaaatggaataacacggctgtgtgtattctttggacgtcagaaagccaacgatgttttgttgtcccacatgattactttcctaaatgataagaatgattggcatctacgtggagcattttttgatagtatagttggtgttgctgcctatgttggctggcaaagctcctcaattctcaagcctctgctgcaacaaggtcttagtgatgctgaggaatttgtcattgtgaaagctctttatgcccttacttgtatgtgccagttaggactgctacaaaaaccccatgtttacgaatttgccagtgatattgcccccttcctgtgtcatcccaatttatggatacgttatggtgccgtgggatttatcacagtggtagctcgtcaaataagtacagctgatgtctactgtaaactgatgccttatcttgacccatatattacccaaccaataatacagattgaaagaaaacttgttctgctcagtgttttaaaggaaccagtaagtcgttctatatttgattatgctttgaggtctaaagatattactagcttgttcagacatcttcacatgcgtcagaagaaacgaaatggttctcttcccgactgccctccgccagaggatcctgccatagcacagcttctgaagaagttgctctcacagggaatgacagaggaagaggaagacaaacttctggcactgaaagacttcatgatgaaatctaataaagcaaaggccaatatagtggaccagagccatcttcatgatagtagtcagaaaggtgtaattgacttggcagctttaggcataactgggagacaagttgatcttgttaaaaccaaacaagaaccagatgacaaacgggccagaaaacatgtaaaacaagactcaaatgtaaatgaagaatggaaaagcatgtttgggtcactggacccaccaaacatgccacaggccctacctaaagggagtgatcaggaggtgattcagactgggaaacctcctcgttccgagtcctctgctggcatttgtgtccctttgtcaacttcttcacaggttccagaagtgacaactgtccaaaataaaaaaccagtaataccggttttaagtagtacaatcttaccatccacctatcagattcgaattacaacttgtaaaactgaacttcagcaactcatccagcaaaagcgggagcagtgcaatgctgagagaatagctaagcagatgatggaaaatgctgaatgggagagtaaaccaccaccacctggatggcgtcctaaagggctgttagttgcccatcttcatgagcataaatctgctgtgaatcgaattagagtctctgatgaacactcactttttgcaacatgttcaaatgatggcacagtgaaaatctggaacagtcaaaagatggaggggaagaccaccactaccagatctattcttacatacagccgaattggaggacgagtcaagacgctcacattctgccaaggctcccactatttagccatagcatctgataatggtgctgtccagcttcttggaattgaggcttctaagctgcccaagtctcctaaaatccatcctctacaaagcagaattctagatcagaaggaggacggttgtgttgtggatatgcatcacttcaactctggagcacagtctgttcttgcctatgccactgtgaatggctctctggttggctgggaccttaggtcttcaagcaatgcgtggactttaaagcatgatttaaagtcgggcctcatcacttcctttgctgtggacatccaccaatgctggctctgcattggtacaagcagtggtaccatggcttgttgggacatgaggttccagttgccaatttcaagtcactgtcatccttccagggctcgaatcagacgcctctcaatgcaccctctgtatcagtcctgggtgattgcagctgttcagggcaacaacgaagtgtccatgtgggacatggagactggtgacagaagatttactctctgggccagcagtgcaccaccactttctgaattacagccttctcctcatagcgtccatggtatctactgtagtcctgcagatggaaatcctatcctactaacagctggctcagatatgaaaataaggttttgggacttggcttacccagaaaggtcctatgttgttgcaggaagtactagttccccatctgtgtcctactacaggaaaataattgaaggcactgaagttgtccaggaaattcagaataagcagaaagtaggaccaagtgatgacacccctcgaaggggcccagagtccctgcccgtgggacatcatgacatcatcactgatgtcgccacattccagaccacacagggcttcatcgtaactgcttctagagatgggattgtgaaggtgtggaaataaaacctactgatttgtataaattttaatagttataaatataatactataactcgagaaaaggcatttctagagaacagattcatttgcttaattttcaaaattatgtctccatattactgtttcatgactgactgactaaatgacacccaaaatggttaagatgtacttgactagtttacttatgcatctctttgcaagaatcagccagccaacaatgtctgggatttttattgtatatgttatagaggtgagaaatgtaaaatatgaaaatgaatatgtttattttgtattgaaaaagatggttgaaaagatggttgtaagctattatagtataaacacatttttgctattaaaaatgctattcaaagcagttaaactgt

SEQ ID NO: 1257 - protein, 1358 aa, Homo sapiens
MGNQLAGIAPSQILSVESYFSDIHDFEYDKSLGSTRFFKVARAKHREGLVVVKVFAIQDPTLPLTSYKQELEELKIRLNSAQNCLPFQKASEKASEKAAMLFRQYVRDNLYDRISTRPFLNNIEKRWIAFQILTAVDQAHKSGVRHGDIKTENVMVTSWNWVLLTDFASFKPTYLPEDNPADFNYFFDTSRRRTCYIAPERFVDGGMFATELEYMRDPSTPLVDLNSNQRTRGELKRAMDIFSAGCVIAELFTEGVPLFDLSQLLAYRNGHFFPEQVLNKIEDHSIRELVTQMIHREPDKRLEAEDYLKQQRGNAFPEIFYTFLQPYMAQFAKETFLSADERILVIRKDLGNIIHNLCGHDLPEKAEGEPKENGLVILVSVITSCLQTLKYCDSKLAALELILHLAPRLSVEILLDRITPYLLHFSNDSVPRVRAEALRTLTKVLALVKEVPRNDINIYPEYILPGIAHLAQDDATIVRLAYAENIALLAETALRFLELVQLKNLNMENDPNNEEIDEVTHPNGNYDTELQALHEMVQQKVVTLLSDPENIVKQTLMENGITRLCVFFGRQKANDVLLSHMITFLNDKNDWHLRGAFFDSIVGVAAYVGWQSSSILKPLLQQGLSDAEEFVIVKALYALTCMCQLGLLQKPHVYEFASDIAPFLCHPNLWIRYGAVGFITVVARQISTADVYCKLMPYLDPYITQPIIQIERKLVLLSVLKEPVSRSIFDYALRSKDITSLFRHLHMRQKKRNGSLPDCPPPEDPAIAQLLKKLLSQGMTEEEEDKLLALKDFMMKSNKAKANIVDQSHLHDSSQKGVIDLAALGITGRQVDLVKTKQEPDDKRARKHVKQDSNVNEEWKSMFGSLDPPNMPQALPKGSDQEVIQTGKPPRSESSAGICVPLSTSSQVPEVTTVQNKKPVIPVLSSTILPSTYQIRITTCKTELQQLIQQKREQCNAERIAKQMMENAEWESKPPPPGWRPKGLLVAHLHEHKSAVNRIRVSDEHSLFATCSNDGTVKIWNSQKMEGKTTTTRSILTYSRIGGRVKTLTFCQGSHYLAIASDNGAVQLLGIEASKLPKSPKIHPLQSRILDQKEDGCVVDMHHFNSGAQSVLAYATVNGSLVGWDLRSSSNAWTLKHDLKSGLITSFAVDIHQCWLCIGTSSGTMACWDMRFQLPISSHCHPSRARIRRLSMHPLYQSWVIAAVQGNNEVSMWDMETGDRRFTLWASSAPPLSELQPSPHSVHGIYCSPADGNPILLTAGSDMKIRFWDLAYPERSYVVAGSTSSPSVSYYRKIIEGTEVVQEIQNKQKVGPSDDTPRRGPESLPVGHHDIITDVATFQTTQGFIVTASRDGIVKVWK

SEQ ID NO: 1258 - DNA, 3690 bp, Homo sapiens
ggccctgccttctccatcagacacctgggaatcacagctggggcccctgctttggccgtttgtcctgctggaatctgatggaggaaagacgctctgagagagtaattagacgcagacagagatctctctccatagtcagaggagcctagcaggggctgaaggaactgcctgaggatgacaaagaaggggatccatgaacaaggaggtgctaacaggtttcctgctgatcttggcactgaccgaagcgctggcatttgccatccaggaaccatctcccagggaatctcttcaggtcctcccttcaggcactcccccgggaaccatggtgacagcaccccacagctctaccagacatacttctgtggtgatgctgacccccaatcccgatggacccccctcacaggctgcagctcccatggcaacaccgacaccccgtgcagaggggcaccctcctacgcacaccatctccaccatcgctgcgacagtaaccgccccccattctgaaagctccctgtccacagggcccgctccagcagccatggcaaccacatcctccaagccagagggccgccctcgagggcaggctgcccccaccatcctgctgacaaagccaccgggggccaccagccgccccaccacagcgcccccccgcactaccacacgcaggccccccaggcccccaggctcttcccgaaaaggggctggtaattcatcacgccctgtcccgcctgcacctggtggccactccaggagtaaagaaggacagcgaggacgaaatccaagctccacacctctggggcagaagcggcccctggggaaaatctttcagatctacaagggcaacttcacagggtctgtggaaccggagccctctaccctcacccccaggaccccactctggggctactcctcttcaccacagccccagacagtggctgcgaccacagtgcccagcaatacctcatgggcacccaccaccacctccctggggcctgcaaaggacaagccaggccttcgcagagcagcccaggggggtggttctaccttcaccagccaaggagggacaccagatgccacagcagcctcaggtgcccctgtcagtccacaagctgccccagtgccttctcagcgcccccaccacggtgacccacaggatggccccagccatagtgactcttggcttactgttacccctggcaccagcagacctctgtctaccagctctggggtcttcacggctgccacggggcccaccccagctgccttcgataccagtgtctcagccccttcccaggggattcctcagggagcatccacaaccccacaagctccaacccatccctccagggtctcagaaagcactatttctggagccaaggaggagactgtggccaccctcaccatgaccgaccgggtgcccagtcctctctccacagtggtatccacagccacaggcaatttcctcaaccgcctggtccccgccgggacctggaagcctgggacagcagggaacatctcccatgtggccgagggggacaaaccgcagcacagagccaccatctgcctgagcaagatggatatcgcctgggtgatcctggccatcagcgtgcccatctcctcctgctctgtcctgctgacggtgtgctgcatgaagaggaagaagaagaccgccaacccggagaacaacctgagctactggaacaacaccatcaccatggactacttcaacaggcatgctgtggagctgcccagggagatccagtcccttgaaacctctgaggaccagctctcagagccccgctccccagccaatggcgactatagagacactgggatggtccttgttaaccccttctgtcaagaaacactgtttgtgggaaacgatcaagtatctgagatctaactacagcaggcatcactttgccattccgtatttttcgtctctaaattataaatatacaaatacatatattataaatataacctttgtgtaaccctgacttaatgagaaacattttcagctttttttcctatgaattgtcaacatcttttttacaagtgtggtttaaaaaaaaaaaaaactttacagaatgatctgtggctttataaaataaaggtatttctaagcaaagcagttgcattgattgcttctcttaataactattcttgagcacctggggatcccaggaaccctggtcaggtgaggtaagagactgacctcctgtagaagctgaatgttacagtgcaagcgcacgattctttgagtgattcttaaagctctggttcctcttgatttggtgtgaccccatttcctcccttctcatacgcacacctgtaaagggaactggaccgcctcaggggaagacggcagactcatgcacagagaaggaaaagggaacatctcatcacctctgaggatgagtaccctggagccttatgacggcaccattggatgtcatgtttaattccatccaagttgtggatggcaggcaggagcatggagccctcaggaatccatggaggacatcaaggcatcccaaggccatattcccctaacattacttccactgctaacaacaggactgcctttccctggtgggaaaatgctccctttatgcccattcctgtatcccctccaacacccacatctgcattaaacacccgtgcctttctcttggagagggtttagatgcagatcccggccctggagctttaaaatgcttgcccttccttcttcaaggatcaaatgtttattggggttcagctttgttttctcaaaaggccatggtatcgtgcccctgaggaacatgtttatctaagaagctttgaggtagtagagcgataatttttgaaaccttcctcctgcaatctttaaaaaagaaaaaaaagattgcccaaacaaatcatttgggagaagacatcattatactcctacttggcactgcaaacctgctcgcagcaccagccggtggacttgccatccagctctcagcttccactgctccccttgttcccggccggctggctgcctccccgtgctgtgtccagcacggccaacaacgtcagaccctcagagacgcccaaggggcttccagaggtggccgcttctctattttttcctgattgtggctgagagagatgattactgctttgacacttcctttctctaaaagaaaaatagtttgatagtatattttgaatatagatgctcttatagtcagattgggaattgaacttgaatattgggtcatatgtttgtgttgttgctgtagtctatcatgacttttttctttctgcattttccttaaaaaaaaaaaaaagatggccttcaaaagtgtgttctcaatgttgtatgaacctccttcacatgagttcggttgttgtctctcttcaaagactcttcaacccacaaagaagcaactaaatgtttctctaagtttaattttctagcgtgttgttgtcttacctttttaaccttaccataatatttctgttaactgttacatttaatataccaatgtgtgtaagtatacagagaaaaatctgtttgtaaagtaaaatttatatataatatatgtaatcaaagatacatatgttatatatacatatgtggatgtatgacttatttttccttatccacagatttcagctaccatgtatatataaataaacttattttattagccagag

SEQ ID NO: 1259 - protein, 575 aa, Homo sapiens
MKRSLQALYCQLLSFLLILALTEALAFAIQEPSPRESLQVLPSGTPPGTMVTAPHSSTRHTSVVMLTPNPDGPPSQAAAPMATPTPRAEGHPPTHTISTIAATVTAPHSESSLSTGPAPAAMATTSSKPEGRPRGQAAPTILLTKPPGATSRPTTAPPRTTTRRPPRPPGSSRKGAGNSSRPVPPAPGGHSRSKEGQRGRNPSSTPLGQKRPLGKIFQIYKGNFTGSVEPEPSTLTPRTPLWGYSSSPQPQTVAATTVPSNTSWAPTTTSLGPAKDKPGLRRAAQGGGSTFTSQGGTPDATAASGAPVSPQAAPVPSQRPHHGDPQDGPSHSDSWLTVTPGTSRPLSTSSGVFTAATGPTPAAFDTSVSAPSQGIPQGASTTPQAPTHPSRVSESTISGAKEETVATLTMTDRVPSPLSTVVSTATGNFLNRLVPAGTWKPGTAGNISHVAEGDKPQHRATICLSKMDIAWVILAISVPISSCSVLLTVCCMKRKKKTANPENNLSYWNNTITMDYFNRHAVELPREIQSLETSEDQLSEPRSPANGDYRDTGMVLVNPFCQETLFVGNDQVSEI

SEQ ID NO: 1260 - DNA, 1620 bp, Homo sapiens
atggcggcggcattacgggtggcggcggtcggggcaaggctcagcgttctggcgagcggtctccgcgccgcggtccgcagcctttgcagccaggccacctctgttaacgaacgcatcgaaaacaagcgccggaccgcgctgctgggagggggccaacgccgtattgacgcgcagcacaagcgaggaaagctaacagccagggagaggatcagtctcttgctggaccctggcagctttgttgagagcgacatgtttgtggaacacagatgtgcagattttggaatggctgctgacaagaataagtttcctggagacagcgtggtcactggacgaggccgaatcaatggaagattggtttatgtcttcagtcaggattttacagtttttggaggcagtctgtcaggagcacatgcccaaaagatctgcaaaatcatggaccaggccataacggtgggggctccagtgattgggctgaatgactctgggggagcacggatccaagaaggagtggagtctttggctggctatgcagacatctttctgaggaatgttacggcatccggagtcatccctcagatttctctgatcatgggcccatgtgctggtggggccgtctactccccagccctaacagacttcacgttcatggtaaaggacacctcctacctgttcatcactggccctgatgttgtgaagtctgtcaccaatgaggatgttacccaggaggagctcggtggtgccaagacccacaccaccatgtcaggtgtggcccacagagcttttgaaaatgatgttgatgccttgtgtaatctccgggatttcttcaactacctgcccctgagcagtcaggacccggcttccgtccgtgagtgccacgatcccagtgaccgtctggttcctgagcttgacacaattgtccctttggaatcaaccaaagcctacaacatggtggacatcatacactctgttgttgatgagcgtgaattttttgagatcatgcccaattatgccaagaacatcattgttggttttgcaagaatgaatgggaggactgttggaattgttggcaaccaacctaaggtggcctcaggatgcttggatattaattcatctgtgaaaggggctcgttttgtcagattctgtgatgcattcaatattccactcatcacttttgttgatgtccctggctttctacctggcacagcacaggaatacgggggcatcatccggcatggtgccaagcttctctacgcatttgctgaggcaactgtacccaaagtcacagtcatcaccaggaaggcctatggaggtgcctatgatgtcatgagctctaagcacctttgtggtgataccaactatgcctggcccaccgcagagattgcagtcatgggagcaaagggcgctgtggagatcatcttcaaagggcatgagaatgtggaagctgctcaggcagagtacatcgagaagtttgccaaccctttccctgcagcagtgcgagggtttgtggatgacatcatccaaccttcttccacacgtgcccgaatctgctgtgacctggatgtcttggccagcaagaaggtacaacgtccttggagaaaacatgcaaatattccattgtaa

SEQ ID NO: 1261 - protein, 539 aa, Homo sapiens
MAAALRVAAVGARLSVLASGLRAAVRSLCSQATSVNERIENKRRTALLGGGQRRIDAQHKRGKLTARERISLLLDPGSFVESDMFVEHRCADFGMAADKNKFPGDSVVTGRGRINGRLVYVFSQDFTVFGGSLSGAHAQKICKIMDQAITVGAPVIGLNDSGGARIQEGVESLAGYADIFLRNVTASGVIPQISLIMGPCAGGAVYSPALTDFTFMVKDTSYLFITGPDVVKSVTNEDVTQEELGGAKTHTTMSGVAHRAFENDVDALCNLRDFFNYLPLSSQDPASVRECHDPSDRLVPELDTIVPLESTKAYNMVDIIHSVVDEREFFEIMPNYAKNIIVGFARMNGRTVGIVGNQPKVASGCLDINSSVKGARFVRFCDAFNIPLITFVDVPGFLPGTAQEYGGIIRHGAKLLYAFAEATVPKVTVITRKAYGGAYDVMSSKHLCGDTNYAWPTAEIAVMGAKGAVEIIFKGHENVEAAQAEYIEKFANPFPAAVRGFVDDIIQPSSTRARICCDLDVLASKKVQRPWRKHANIPL

SEQ ID NO: 1262 - DNA, 1782 bp, Homo sapiens
gaggctatggcgctcaacaagaatcactcggagggcggcggagtgatcgtcaataacaccgagagcatcctaatgtcctatgatcacgtggaactcacattcaatgacatgaagaacgtgccagaagccttcaaagggaccaagaaaggcactgtctaccttaccccttaccgggtcatctttctgtccaagggcaaggatgccatgcagtccttcatgatgccattttatctcatgaaagactgtgagatcaagcagcccgtatttggtgcaaactacatcaagggaacagtgaaggcggaagcgggaggtggctgggaaggctctgcttcctacaagttgactttcacggcagggggcgccattgagttcggacagcggatgctccaggtggcatctcaagcctccagaggtgaagtccccagtggagcctatggctactcttacatgcccagcggggcctatgtctatcccccgccagtcgccaatggaatgtacccctgccctcctggctacccctatccaccgcccccacctgagttctatccaggaccccccatgatggacggggccatgggatacgtgcagcccccaccaccgccctaccctgggcccatggaacctccggtcagcggccccgatgtcccctccactcctgcagccgaagccaaggccgcagaagcagccgccagcgcctattacaacccaggcaatcctcacaacgtctacatgcccacgagccagccgccgccacctccctactacccaccggaagataagaagacccagtaggccctcctgcctccctgcctcccaccctcatctctctaccctacccctcccatcggggctgtgctggggcttggggaggggagggggcgccttgttctccctccaggtctgatcataaacaattaccaggaactagcattgtgggacattagggcccccggcctcgggagaggtgccgcccagcttcccatgccagcccggagcccacagtgctgcccagcgtacctccctcaccgtctggggctcttctgggagcacggagcatcccctgttcctgtttcactctcagcttctcccctcgaagggactctctggccacctcctccaccgcagtccagctccctcagtctggcacccactgctacactcagcctcatgagccacttcagaccagccaggtgtcttcccgggccctgccagaccctgctcacattccctctgctggtctgtgctggtctcagaaggccaccgcgcccgcattccactcagccagggtccagctgcagcccccgccacccttccttcccttccctgtcctgggtcatgttgttgccaccctgtgtgacttttgaagctgtaaaatgagcttccagggcttgggtggcgtcggggcagggccgccgaggctgggaggaagcccttctgccttttgctggtgtttctggaatttgctttccctcacctctcacttccttctagaaggagcttcctgactggaaccagagaatgcatgtctgtccacttggtggctgctgggtggggccgggaacaagggcccctgaccctgtgtgctggccgggacctgccaccagccccccagcctgcttcttccccttaagctttgtgcccctggatgcgctaacattcactcttgtttgtccctggactggccatgaagtgaggagatggttatttaaagagaattccctatttatttgacaaaaaatccagttaatatattaatgtgaaataaaccctgtttgcccctcg

SEQ ID NO: 1263 - DNA, 1364 bp, Homo sapiens
aggctcaggatgagatcccagcactgtccgtgtcccggccccagaccggcctgtccttcctgggccctgagcctgaggacctggaggacctgtacagccgctacaagaagctgcagcaagagctggagttcctggaggtgcaggaggaatacatcaaagatgagcaaaagaacctgaaaaaggaatttctccatgcccaggaggaggtgaagcgaatccaaagcatcccgctggtcatcggacaatttctggaggctgtggatcagaatacagccatcgtgggctctaccacaggctccaactattatgtgcgcatcctgagcaccatcgatcgggagctgctcaagcccaacgcctcagtggccctccacaagcacagcaatgcactggtggacgtgctgccccccgaagccgacagcagcatcatgatgctcacctcagaccagaagccagatgtgatgtacgcggacatcggaggcatggacatccagaagcaggaggtgcgggaggccgtggagctcccgctcacgcatttcgagctctacaagcagatcggcatcgatcccccccgaggcgtcctcatgtatggcccacctggctgtgggaagaccatgttggcaaaggcggtggcacatcacacaacagctgcattcatccgggtcgtgggctcggagtttgtacagaagtatctgggtgagggcccccgcatggtccgggatgtgttccgcctggccaaggagaatgcacctgccatcatcttcatagacgagattgatgccatcgccaccaagagattcgatgctcagacaggggccgacagggaggttcagaggatcctgctggagctgctgaatcagatggatggatttgatcagaatgtcaatgtcaaggtaatcatggccacaaacagagcagacaccctggatccggccctgctacggccaggacggctggaccgtaaaattgaatttccacttcctgaccgccgccagaagagattgattttctccactatcactagcaagatgaacctctctgaggaggttgacttggaagactatgtggcccggccagataagatttcaggagctgatattaactccatctgtcaggagagtggaatgttggctgtccgtgaaaaccgctacattgtcctggccaaggacttcgagaaagcatacaagactgtcatcaagaaggacgagcaggagcatgagttttacaagtgacccttcccttccctccaccacaccactcaggggctggggcttctctcgcacccccagcacctctgtcccaaaacctcattcccttttttctttacccaggattggtttcttcaataaatagataagatcgaatcc

SEQ ID NO: 1264 - DNA, 1373 bp, Homo sapiens
ctggaagaattcgcggccgaagtggctggctcatttaagatgaggcttctgctgcttctcctagtggcggcgtctgcgatggtccggagcgaggcctcggccaatctgggcggcgtgcccagcaagagattaaagatgcagtacgccacggggccgctgctcaagttccagatttgtgtttcctgaggttataggcgggtgtttgaggagtacatgcgggttattagccagcggtacccagacatccgcattgaaggagagaattacctccctcaaccaatatatagacacatagcatctttcctgtcagtcttcaaactagtattaataggcttaataattgttggcaaggatccttttgctttctttggcatgcaagctcctagcatctggcagtggggccaagaaaataaggtttatgcatgtatgatggttttcttcttgagcaacatgattgagaaccagtgtatgtcaacaggtgcatttgagataactttaaatgatgtacctgtgtggtctaagctggaatctggtcaccttccatccatgcaacaacttgttcaaattcttgacaatgaaatgaagctcaatgtgcatatggattcaatcccacaccatcgatcatagcaccacctatcagcactgaaaactcttttgcattaagggatcattgcaagagcagcgtgactgacattatgaaggcctgtactgaagacagcaagctgttagtacagaccagatgctttcttggcaggctcgttgtacctcttggaaaacctcaatgcaagatagtgtttcagtgctggcatattttggaattctgcacattcatggagtgcaataatactgtatagctttccccacctcccacaaaatcacccagttaatgtgtgtgtgtgttttttttttaaggtaaacattactacttgtaactttttttcttagtcatatttgaaaaagtagaaaattgagttacaatttgattttttttccaaagatgtctgttaaatctgttgtgcttttatatgaatatttgttttttatagtttaaaattgatcctttgggaatccagttgaagttcccaaatactttataagagtttatcagacatctctaatttggccatgtccagtttatacagtttacaaaatatagcagatgcaagattatgggggaaatcctatattcagagtactctataaatttttgtgtatgtgtgtatgtgcgtgtgattaccagagaactactaaaaaaaccaactgctttttaaatcctattgtgtagttaaagtgtcatgccttgaccaatctaatgaattgattaattaactgggcctttatacttaactaaataaaaaactaagcagatatga

SEQ ID NO: 1265 - DNA, 687 bp, Homo sapiens
gcggccgaagtggctggctcatttaagatgaggcttctgctgcttctcctagtggcggcgtctgcgatggtccggagcgaggcctcggccaatctgggcggcgtgcccagcaagagattagtgtttcctgaggttataggcgggtgtttgaggagtacatgcgggttattagccagcggtacccagacatccgcattgaaggagagaattacctccctcaaccaatatatagacacatagcatctttcctgtcagtcttcaaactagtattaataggcttaataattgttggcaaggatccttttgctttctttggcatgcaagctcctagcatctggcagtggggccaagaaaataaggtttatgcatgtatgatggttttcttcttgagcaacatgattgagaaccagtgtatgtcaacaggtgcatttgagataactttaaatgatgtacctgtgtggtctaagctggaatctggtcaccttccatccatgcaacaacttgttcaaattcttgacaatgaaatgaagctcaatgtgcatatggattcaatcccacaccatcgatcatagcaccacctatcagcactgaaaactcttttgcattaagggatcattgcaagagcagcgtgactgacattatgaaggcctgtactgaagacagcaagctgttagtacagaccagatg

SEQ ID NO: 1266 - DNA, 569 bp, Homo sapiens
gcggccgaagtggctggctcatttaagatgaggcttctgctgcttctcctagtggcggcgtctgcgatggtccggagcgaggcctcggccaatctgggcggcgtgcccagcaagagattaaagatgcagtacgccacggggccgctgctcaagttccagatttgtgtttcctgaggttataggcgggtgtttgaggagtacatgcgggttattagccagcggtacccagacatccgcattgaaggagagaattacctccctcaaccaatatatagacacatagcatctttcctgtcagtcttcaaactagtattaataggcttaataattgttggcaaggatccttttgctttctttggcatgcaagctcctagcatctggcagtggggccaagaccagtgtatgtcaacaggtgcatttgagataactttaaatgatgtacctgtgtggtctaagctggaatctggtcaccttccatccatgcaacaacttgttcaaattcttgacaatgaaatgaagctcaatgtgcatatggattcaatcccacaccatcgatcatagcaccacct

SEQ ID NO: 1267 - DNA, 1499 bp, Homo sapiens
caattaagttgcagagttctgatggagagatatttgaagttgatgtggaaattgccaaacaatctgtgactattaagaccatgttggaagatttgggaatggatgatgaaggagatgatgacccagttcctctaccaaatgtgaatgcagcaatattaaaaaaggtcattcagtggtgcacccaccacaaggatgaccctcctcctcctgaagatgatgagaacaaagaaaagcgaacagatgatatccctgtttgggaccaagaattcctgaaagttgaccaaggaacactttttgaactcattctggctgcaaactacttagacatcaaaggtttgcttgatgttacatgcaagactgttgccaatatgatcaaggggaaaactcctgaggagattcgcaagaccttcaatatcaaaaatgactttccctcttttttgtaaagcaatgtctgcctagtttattgtccagttaactttagtgaccttttaaaagttggcattgtaaataaaacaacttgcaaaaaagttttctggaatagaattaacaaaatattatctttattcatgagttggaaactggaaaaaggcttcttgaagtaaatgttctgagtggagctactaggatgtcttccagcctcctgcagtcaaggagtaccactgtattgattagcctgtatgtagcagggctcccttcattgcatctgaggacttgttttctttttctttatttttaatcctcttagttttaaatatattgcctagagactcagttactacccagtttgtggttttttgggagaaatgtaactggacagttagcttttcaattaaaaagacacttaacccatgtgggatgtcatctttttataattagtgttcccatgtggagaaaattattcacactacttgcatgtaaagaataatttaacttttaacattaaaatatgtggtaaaacccagaaagcatccatcatgaatgcaagatactttcaataaaaagtaagttatatagtaggtagttaagtttgcttttgtggacttaaatgtgtctcttcacttaaatgggttgaatgtgtatatatttgttcagcttgaaaagacttagtttatatcctagctcactggaggctgctgacataaccataacttctgtcccttctaattgtcatttatatgcctaactggagctagtactttaattcttaacacaaaattactctgccattgtttccagcttccctcctacaatagaatgaagtttttttgatggcttgagatggctcacaaattttgatttttttttcttccttgtgctccctttttttctccttgcttttccagttaacatctatattcacatgtaatcttgttttctcttcacattcactgagttgttcaggctcagatcatcccttgacagtagtttgccttcatctcacctttcatttgtcccaaattcaccttatttaataaagtcccatatgttgtctcacttaa

SEQ ID NO: 1268 - DNA, 1340 bp, Homo sapiens
caattaagttgcagagttctgatggagagatatttgaagttgatgtggaaattgccaaacaatctgtgactattaagaccatgttggaagatttgggaatggatgatgaaggagatgatgacccagttcctctaccaaatgtgaatgcagcaatattaaaaaaggtcattcagtggtgcacccaccacaaggatgaccctcctcctcctgaagatgatgagaacaaagaaaagcgaacagatgatatccctgtttgggaccaagaattcctgaaagttgaccaaggaacactttttgaactcattctggctgcaaactacttagacatcaaaggtttgcttgatgttacatgcaagactgttgccaatatgatcaaggggaaaactcctgaggagattcgcaagaccttcaatatcaaaaatgactttactgaagaggaggaagcccaggtacgcaaagagaaccagtggtgtgaagagaagtgaaatgttgtgcctgacactgtaacactgtaaggattgttccaaatactagttgcactgctctgtttataattgttaatattagacaaacagtagacaaatgcagcagcaagtcaattgtattagcagaatattgtcctcattgcatgtgtagtttgagcacagatcccaaaccttacggccaagtttcttctagtatgatggaaagtttcttttttctttgctctgaataaaactgaactgtgggttctctataagtggcattttgggctttccctcttttttgtaaagcaatgtctgcctagtttattgtccagttaactttagtgaccttttaaaagttggcattgtaaataaaacaacttgcaaaaaagttttctggaatagaattaacaaaatattatctttattcatgagttggaaactggaaaaaggcttcttgaagtaaatgttctgagtggagctactaggatgtcttccagcctcctgcagtcaaggagtaccactgtattgattagcctgtatgtagcagggctcccttcattgcatctgaggacttgttttctttttctttatttttaatcctcttagttttaaatatattgcctagagactcagttactacccagtttgtggttttttgggagaaatgtaactggacagttagcttttcaattaaaaagacacttaacccatgtgggatgtcatctttttataattagtgttcccatgtggagaaaattattcacactacttgcatgtaaagaataatttaacttttaacattaaaatatgtggtaaaacccagaaagcatccatcatgaatgcaagatactttcaataaaaagtaagttatat

SEQ ID NO: 1269 - protein, 162 aa, Homo sapiens [sequence omitted]

SEQ ID NO: 1270 - DNA, 3067 bp, Homo sapiens
ggtgggtttatctcaaggcctgagtagccggtaacaaacgagggttcccgggattggaccgacgcaccatgcctctgcgacttgatatcaaaagaaagctaactgctagatctgatcgagttaagagtgtggatctgcatcctacagagccatggatgttggcaagtctttacaatggcagtgtgtgtgtttggaatcatgaaacacagacactggtgaagacatttgaagtatgtgatcttcctgttcgagctgcaaagtttgttgcaaggaagaattgggttgtgacaggagcggatgacatgcagattagagtgttcaattacaatactctggagagagttcatatgtttgaagcacactcagactacattcgctgtattgctgttcatccaacccagcctttcattctaactagcagtgatgacatgcttattaagctctgggactgggataaaaaatggtcttgctcacaagtgtttgaaggacacacccattatgttatgcagattgtgatcaaccccaaagataacaatcagtttgccagtgcctctttggacaggactatcaaggtgtggcagttgggctcttcgtcaccaaacttcactttggaaggacatgagaaaggcgtgaattgcattgattactacagtggtggggacaagccatacctcatttcaggtgcagatgaccgtcttgttaaaatatgggattatcagaataaaacatgtgtgcagacactggaaggacatgcccaaaatgtgtcttgtgccagctttcatcctgagttgccaatcattatcacaggttcagaagatggaacagtacgtatttggcattcaagcacctaccggcttgagagcacactgaattatggaatggagagggtatggtgcgtggccagtctaagagggtcaaacaatgtcgctttgggctatgatgaagggagcatcattgttaagcttggtcgggaggaacctgccatgtccatggatgccaatggaaagataatttgggccaagcattcagaagtccagcaggccaacctaaaagcaatgggagatgctgaaattaaagatggtgaaagattgccactggcagtaaaggatatgggcagttgtgaaatataccctcagactattcagcacaatcctaatgggcggtttgtggtggtgtgtggtgatggggagtatatcatctacacagcaatggcattgagaaacaagagctttggatctgctcaggagtttgcatgggcccacgattcttcagagtatgcaataagagagagcaacagcattgtaaagatatttaagaactttaaggaaaaaaaatcatttaaaccagattttggagcagaaagtatctacggcggcttcttattgggagtcagatctgtaaatggcttagccttctatgactgggacaatacagaactcatacgaagaattgaaattcagcccaaacatattttctggtctgactctggagagctagtctgtattgctactgaggaatcattttttatccttaagtatctgtcagaaaaagtcttggctgcacaggaaacacatgagggagttactgaagatggcattgaagatgcctttgaggttcttggtgagattcaggaaattgtgaaaacagggctttgggtaggcgattgcttcatttacacaagttctgtgaacagattaaattattatgttggaggagaaatagtcaccattgcccacttggacaggacgatgtatctcctaggctacattcctaaagacaacaggctttatctgggggataaagaattgaacatcattagctattccctgctggtttcagtcctggaataccagacagctgtcatgcggagggactttagcatggctgataaggtccttcctaccattccaaaagaacagaggaccagagttgcacactttttggaaaagcagggcttcaagcagcaagctcttacagtatccacagatcctgagcatcgttttgagcttgctcttcagcttggagagttaaaaattgcataccagttagcagtggaagcagagtcagaacagaagtggaaacaacttgctgaacttgccattagtaaatgtcagtttggcctagcccaggagtgcctgcatcatgcacaggattatgggggcctgctgcttttggccactgcctctggaaatgctaatatggtgaacaagctagcagagggtgcggagagagatggcaaaaataatgtggcattcatgagctactttttacagggcaaggttgatgcctgcctagagctcttaattagaactggacggctgccagaagctgccttcttggcccgaacttacttacccagtcaggtttcaagggtagtgaaactctggagagagaatctctcaaaagtcaatcagaaagcagcagaatcccttgctgacccaacagagtatgaaaacctgttccctggattaaaagaagcctttgttgttgaagaatgggtgaaggaaacacatgctgatctgtggccagccaaacaatacccacttgtcacgccaaatgaagagagaaatgtcatggaagagggaaaagactttcagccctcaagatctacagctcaacaggaacttgatgggaaacctgcttctcctactccggttattgtggcctcccacacagccaacaaagaagaaaagagtttactcgaactagaagtagatttggataatttggaattagaagatattgacacaacagatatcaatctggatgaagatattttggatgattgactgtaatgctttccatttacctgactaaacagatcattattatatataggtattgattgctaccctgaccacagtgctttggactatgagaaacttcttagatttttatatgtaaatgctgtggaccactgggagcacaatgcccacatcatcttaagaagagtttatgtgcagcatttaaatcactgtgttttccttgttaactaaaacagacatgggctttgatttttttcatactattagaccatatctcataaaaccttttgaattaaaaaaaa

SEQ ID NO: 1271 - protein, 906 aa, Homo sapiens
MPLRLDIKRKLTARSDRVKSVDLHPTEPWMLASLYNGSVCVWNHETQTLVKTFEVCDLPVRAAKFVARKNWVVTGADDMQIRVFNYNTLERVHMFEAHSDYIRCIAVHPTQPFILTSSDDMLIKLWDWDKKWSCSQVFEGHTHYVMQIVINPKDNNQFASASLDRTIKVWQLGSSSPNFTLEGHEKGVNCIDYYSGGDKPYLISGADDRLVKIWDYQNKTCVQTLEGHAQNVSCASFHPELPIIITGSEDGTVRIWHSSTYRLESTLNYGMERVWCVASLRGSNNVALGYDEGSIIVKLGREEPAMSMDANGKIIWAKHSEVQQANLKAMGDAEIKDGERLPLAVKDMGSCEIYPQTIQHNPNGRFVVVCGDGEYIIYTAMALRNKSFGSAQEFAWAHDSSEYAIRESNSIVKIFKNFKEKKSFKPDFGAESIYGGFLLGVRSVNGLAFYDWDNTELIRRIEIQPKHIFWSDSGELVCIATEESFFILKYLSEKVLAAQETHEGVTEDGIEDAFEVLGEIQEIVKTGLWVGDCFIYTSSVNRLNYYVGGEIVTIAHLDRTMYLLGYIPKDNRLYLGDKELNIISYSLLVSVLEYQTAVMRRDFSMADKVLPTIPKEQRTRVAHFLEKQGFKQQALTVSTDPEHRFELALQLGELKIAYQLAVEAESEQKWKQLAELAISKCQFGLAQECLHHAQDYGGLLLLATASGNANMVNKLAEGAERDGKNNVAFMSYFLQGKVDACLELLIRTGRLPEAAFLARTYLPSQVSRVVKLWRENLSKVNQKAAESLADPTEYENLFPGLKEAFVVEEWVKETHADLWPAKQYPLVTPNEERNVMEEGKDFQPSRSTAQQELDGKPASPTPVIVASHTANKEEKSLLELEVDLDNLELEDIDTTDINLDEDILDD

SEQ ID NO: 1272 - DNA, 309 bp, Homo sapiens
atgcagcgctacaattttcattatcttaagtacattgtacatttctacagaacctgtgattattctcgcatgataaggatggtacttgcatatggtgaattactactgttgacagtttccgcagaaatcctatttcagtggaccaacattgtggcatggcagcaaatgccaacattttgtggaatagcagcaaatctacaagagaccctggttggtttttcgttttgttttctttgttttttcccccttctcctgaatcagcagggatggaaggagggtagggaagttatgaattactccttccagtag

SEQ ID NO: 1273 - protein, 102 aa, Homo sapiens
MQRYNFHYLKYIVHFYRTCDYSRMIRMVLAYGELLLLTVSAEILFQWTNIVAWQQMPTFCGIAANLQETLVGFSFCFLCFFPLLLNQQGWKEGREVMNYSFQ

SEQ ID NO: 1274 - DNA, 2783 bp, Homo sapiens
aaagctcgcgcgggggaagcggggctgtagctgggcagggagagggcggacgaaatcggtagcgatctcggctgcggcgctgccgcagctgcccggcccgcggggcgcgccctgacccttcatctttgggcaggctcgagggcgcgcgcacggttggcgttctggggcctcaaactcctgggccttgaccgggcaggccgcgtctccccgggtgtgagtccaccgggacccggccgccgcctaagcgcgggcgccacagaagcggcggcgcccgaagacgcgctcctggctcggcccgacagcctcgcttggccgccagttcttctgcagccgaaggcggttgttcttttaaagaattattgaagacgaaggtttttttctttttatttttttaatggctttacagaatcttaaatagaatacagtttgacatgacggcaaaaaatgttggtttgacttccacaaatgcagaagtaagaggatttatagatcagaatctcagtccaacaaaaggcaacatttcatttgttgcatttccagtttccaataccaactcacctacaaagattttaccaaaaaccttaggaccaataaatgtgaatgttggaccccaaatgattataagcacaccacagagactaaccagttcaggaagtgttctgattgggagtccatatacccctgcaccagcaatggttactcagacacacatagcagaagctactggctgggtccctggtgatagaaaacgggctagaaaatttatagactctgatttttcagaaagtaaacgaagcaaaaaaggagataaaaatgggaaaggcttgagacacttttcaatgaaagtgtgtgagaaagttcaacgaaaaggtacaacatcgtacaatgaagtcgctgatgagctggtgtcagagttcaccaattcaaataaccatttggctgctgattcggcttatgatcagaagaacattaggcgaagagtttatgatgctttaaatgtgctaatggcaatgaacataatttcaaaggaaaaaaaagaaatcaagtggattggcctgcctaccaattctgctcaggaatgtcagaatctggagatagagaagcagaggcggatagaacggataaagcagaagcgggcccagctgcaagaacttctcctacagcaaatcgctttcaaaaacctggtacagagaaatcgacaaaatgagcagcaaaaccagggcccgccggctctgaactctaccattcagctgccattcataatcatcaatacaagcagaaaaacagtcatagattgcagcatctccagtgacaagtttgagtatcttttcaattttgacaacacctttgagatccatgatgacatagaagtactaaagcggatgggaatgtcgtttggcctggagtcaggcaaatgctctctggaggatctgaaacttgcgaaatccctggtgccaaaggctttagaaggttatatcacagatatctccacaggaccttcttggttaaatcagggactacttctgaactctacccaatcagtttcaaatttagacctgaccactggtgccaccttaccccagtcaagtgtaaaccaagggttatgcttggatgcagaagtggccttagcaactgggcagttcctggccccaaacagtcaccagtccagcagtgcggcctctcactgctccgagtcccgaggcgagaccccctgttcgttcaatgatgaagatgaggaagatgatgaggaggattcctcctccccagaataaagacaagagaaagcctacgtttcaatatgtgatgctcatgtgtgtttgtagtgtgagctcttgtttttgaaatgattgcttcagtctttgcctttgtttgcactgtgtgttcagtgaaaactagagaaacacaataagcaaatcacatgaaggctgagatgattgagatgaaagttaacatagtgtgaatgaaagtctggccaacagagcagtagatgatataacaaagaaagcatgctttctgaggagatagtggggataatccctgaagagttggcagtgtgagtgcaactcatttatcttctgtgaggtgggatttttgtgttcctcacacccatgtaattattcttagaattgagattgctacacggagcagtccttgacgatcgtgtttctgacgtttctcttccttgcctggactgcctttgacaaggcagaaatgaacatgaaaagtccccaggagaggggagctgtgtagtgagggatactgagggcagtcctgtggctgaggggcacagattgaactgctgaactagttggaggtctagatgaggtgctttacgcatcagctgccttagacagcttctagaaaggagcgagcgctacttcttaagtacttaagtgacatttagataatttatagtaaaactgaaattattattagccaatgcattggtgcatagaatttactagggctacttctggaagccaaaatagaatagcatttccatgtgcattaaatactttgccagcactgcctttgccagcatcctaaatctggagttttacaaagaaggaaactgtatctttaggttaatcaaagctatgcatttcatatagctttttcatttaaaacaagacaaagaaacaaattcctatgaccaaattgcttgcctacagttccctgcagtaattgtatgatctcacccagtgtgcaatttgtgaaaatgaaccaaatgtcattacttttgtcttaaagaaaagtctatttcaagaatatgaacagcagtg

SEQ ID NO: 1275 - DNA, 3192 bp, Homo sapiens
acacacactcccgcttgggcctcctctctctctccggctccattttctccgccgccgggggccggggtctcctgtggggggcccagccggtatcccaggtctcccttcagtgccggggtgaacccccgggggagccgagagccgggggcagacgggcgggggttggggcggagggagcagcggccccagcgagtttgtggggagaagtaaccaagcggggggaggggctgagcagggagggggcctcagggcccccccccagctatggactaacggctactggggccgcctcctccaggcggggcccggggggggcctgggattggtgagtggggagcctgggggccctggcgagcctcctggtggcggagaccccggtgggggtagcggggggttcccgggaggccgagggaagcaagacatcggggacattctgcagcagataatgaccatcaccgaccagagcctggacgaggcccaggccaagaaacacgccctaaactgccaccgaatgaagcctgctctctttagcgtcctgtgtgaaatcaaggagaaaaccggcctcagcattcggagctcccaggaggaggagccggtggacccacagctgatgcgcttggacaacatgcttctggcagagggtgtggctgggcccgagaaagggggcggctcagcagcagcagctgcagccgctgcagcctctggtggtggcgtgtcccctgacaactccatcgaacactcggactatcgcagcaaacttgcccagatccgtcacatataccactcggaactggagaagtatgagcaggcatgtaatgagttcacgacccatgtcatgaacctgctgagggagcagagccgcaccaggcccgtggcccccaaagagatggaacgcatggtgagcatcatccatcgaaagttcagcgccatccagatgcagctgaagcagagcacctgcgaggctatgatgatgctgcgctcccgtttcctggatgccagacgaaagcgccgtaacttcagcagacaggccactgaggtcctaaatgagtatttctactcccacctgagtaacccatatcctagtgaggaggccaaggaggagcttgccaagaagtgtggcatcaccgtgtctcaggtctccaaccggtttggcaacaagaagattcgctataagaaaaacatcggaaagttccaagaggaggcaaacatctatgctgtcaagacagccgtgtcagtcacccaggggggccacagcagcaccagctccccgacacccccttcctctgcaggctctggcggctctttcaatatctcaggatctggagacatgtttctggggatgcctgggctcaacggagattcctattctgcttcccaggtggcatcactccgacgctcgatggggccagggggctatggggataacctcgggggaggccagatgtacagcccacgggaaatgagggcaaatggcagctggcaagaggctgtgaccccctcttcagtgacatccccaacggagggaccagggagtgttcactctgatacctccaactgatcttgcccctcagggtcacaggggtgggggctctcacaaggcgactcttgaagaggacgcaggcttccagaggacaaaccccaatacaggagaagcacaagacagagaagggccaatggggtcatccgctccctaatgagactgtctgtgctgggggtgctaattacatggcaggaagaatggggcccctaaggggagtgtggggtctgtctctcccttttttccaactttttcctctctcgctttctttcttacacagaaacatgcacatacccagaaacctattttctcagacccctttttctcctctgtctttctctctccctctcccacacctcacacacacatactcccacttgcaactattctgtttctctcctgggctcccccactttcccttccccaccccacttgtaggctctggaatctggagacgccagccctgcccaatcagagatgccaaaaatggggacatgacttctggacagaggacatgggacacgcccccatgcatccccacccctgcccctccagacagcttacttacctcatacgcagctcatcttaaaccaatagaatcgcttggtggacgagagtgtctgactcagatatctacctcggagggagtttctgctactttagggaattattgactgggctttggggttgaacttttttttttttttttttttaaagaaagaaaaagaaaccctgggatccatctgtttttgttgttgttgttgtttttgttgttgttgttgttggtggtggtggttcttaatttttaatttagtttggggaagtagcttgttttttttttttaaataaatatgttgatttcttgtcttttttttatttcttactttcccatattaggggtgatagccaaaggggttctggtaagagaaagggggacaaacagaactggtaaagaggcccccctggctccaggcctgtccatcaggaagtaaattttacagggcaccaagctttgccccctaaaatccattaggtgttctttgttcatgcaggcaggtttctgccgcatttgatgtggaggcagtgaagggcttgccctgctggcctctcatcccccttcttcccacaacccttgggcagggctggactcagtaattttgaggaaattgaagatgccatcttcccctgtgagtgacatgtctttaattttttaaaaaactctatttgaaaattggagggggaagaatgggaagggagttattgccaaatatgttaattatgggttggggtgcttgtatatgtatcttcctcaatttccgcataaatgaggtatctttttgtcacaccaaaatcaaggggtagggagagggaggaggttgcaaaaagccagatgtgggggaaaagtaacatcaacactgtcccatcctcagccctgaaccctaccatctgatcccctcagacattctcaggattttacaagactgtcagagtggggaacccctcccattaaagatccgggcaggactggggacaggttggaaatgtgatgggttggggggtgggaggcatgggccgggggcagttctctcctcacttgtaaacttgtgtagtttcacagaaaaaaaaaatgcagttttaaataaagaaatttcttt

SEQ ID NO: 1276 - DNA, 1988 bp, Homo sapiens
gccggccgcgtatcccccggctacctgggccgccccgcggcggtgcgcgcgtgagagggagcgcgcgggcagccgagcgccggtgtgagccagcgctgctgccagtgtgagcggcggtgtgagcgcggtgggtgcggaggggcgtgtgtgccggcgcgcgcgccgtggggtgcaaaccccgagcgtctacgctgccatgaggggcgcgaacgcctgggcgccactctgcctgctgctggctgccgccacccagctctcgcggcagcagtccccagagagacctgttttcacatgtggtggcattcttactggagagtctggatttattggcagtgaaggttttcctggagtgtaccctccaaatagcaaatgtacttggaaaatcacagttcccgaaggaaaagtagtcgttctcaatttccgattcatagacctcgagagtgacaacctgtgccgctatgactttgtggatgtgtacaatggccatgccaatggccagcgcattggccgcttctgtggcactttccggcctggagcccttgtgtccagtggcaacaagatgatggtgcagatgatttctgatgccaacacagctggcaatggcttcatggccatgttctccgctgctgaaccaaacgaaagaggggatcagtattgtggaggactccttgacagaccttccggctcttttaaaacccccaactggccagaccgggattaccctgcaggagtcacttgtgtgtggcacattgtagccccaaagaatcagcttatagaattaaagtttgagaagtttgatgtggagcgagataactactgccgatatgattatgtggctgtgtttaatggcggggaagtcaacgatgctagaagaattggaaagtattgtggtgatagtccacctgcgccaattgtgtctgagagaaatgaacttcttattcagtttttatcagacttaagtttaactgcagatgggtttattggtcactacatattcaggccaaaaaaactgcctacaactacagaacagcctgtcaccaccacattccctgtaaccacgggtttaaaacccaccgtggccttgtgtcaacaaaagtgtagacggacggggactctggagggcaattattgttcaagtgactttgtattagccggcactgttatcacaaccatcactcgcgatgggagtttgcacgccacagtctcgatcatcaacatctacaaagagggaaatttggcgattcagcaggcgggcaagaacatgagtgccaggctgactgtcgtctgcaagcagtgccctctcctcagaagaggtctaaattacattattatgggccaagtaggtgaagatgggcgaggcaaaatcatgccaaacagctttatcatgatgttcaagaccaagaatcagaagctcctggatgccttaaaaaataagcaatgttaacagtgaactgtgtccatttaagctgtattctgccattgcctttgaaagatctatgttctctcagtagaaaaaaaaatacttataaaattacatattctgaaagagcattccgaaagatgggactggttgactcttcacatgatggaggtatgaggcctccgagatagctgagggaagttctttgcctgctgtcagaggagcagctatctgattggaaacctgccgacttagtgcggtgataggaagctaaaagtgtcaagcgttgacagcttggaagcgtttatttatacatctctgtaaaaggatattttagaattgagttgtgtgaagatgtcaaaaaaagattttagaagtgcaatatttatagtgttatttgtttcaccttcaagcctttgccctgaggtgttacaatcttgtcttgcgttttctaaatcaatgcttaataaaatatttttaaaggattacaaaaaaaaaaaaaaaaaaaaaaaaaaaaaaaaaaaaaaaaaaaaaaaaaaaaaaaaaaaaaaaaaaaaaaaaaaaaaaa

SEQ ID NO: 1277 - protein, 415 aa, Homo sapiens
MRGANAWAPLCLLLAAATQLSRQQSPERPVFTCGGILTGESGFIGSEGFPGVYPPNSKCTWKITVPEGKVVVLNFRFIDLESDNLCRYDFVDVYNGHANGQRIGRFCGTFRPGALVSSGNKMMVQMISDANTAGNGFMAMFSAAEPNERGDQYCGGLLDRPSGSFKTPNWPDRDYPAGVTCVWHIVAPKNQLIELKFEKFDVERDNYCRYDYVAVFNGGEVNDARRIGKYCGDSPPAPIVSERNELLIQFLSDLSLTADGFIGHYIFRPKKLPTTTEQPVTTTFPVTTGLKPTVALCQQKCRRTGTLEGNYCSSDFVLAGTVITTITRDGSLHATVSIINIYKEGNLAIQQAGKNMSARLTVVCKQCPLLRRGLNYIIMGQVGEDGRGKIMPNSFIMMFKTKNQKLLDALKNKQC

SEQ ID NO: 1278 - DNA, 550 bp, Homo sapiens
gaaccgccatcttccagtaattcgccaaaatgacaaacacaaagggaaagaggagagccacccgatatatgttctctaggccttttagaaaacatggagctgttcctttggcgacgtatatgcgaatctataagaaaggtgatattgtagacatcaagggaatgggtactgttcaaaaaggaatgccccacaagtgttaccatggcaaaactggaagagtctacaatgttacccagcatgctgttggcattgttgtaaacaaacaagttaagggcaagattcttgccaagagaattaatgtgcgtattgagcacatttagcactctaagagccgagatagcttcctgaaatgcatgaaggaaaatgatcagaaaaagaaagaagccaaagagaaaggtacctgggttcaactaaagttccagcctgctccacccagagaagcacactttgtgagaaccaatgggaaggagcctgagctgctggaacttattccctatgaattcatggcataataggtgttaaaaaaaataaataaaggacctctgggcta

SEQ ID NO: 1279 - protein, 160 aa, Homo sapiens
MTNTKGKRRATRYMFSRPFRKHGAVPLATYMRIYKKGDIVDIKGMGTVQKGMPHKCYHGKTGRVYNVTQHAVGIVVNKQVKGKILAKRINVRIEHISHSKSRDSFLKCMKENDQKKKEAKEKGTWVQLKFQPAPPREAHFVRTNGKEPELLELIPYEFMA

SEQ ID NO: 1280 - DNA, 3912 bp, Homo sapiens
ccgcgggcggggccggctggcgttcacgtgacccggcgtcattggctcgctcgcggaagtagtcctacattcgcggtcagcgcggggtctccgggcgccctgcagggcgggcaggctgtgccatcccgccggacgtcgggatggtgcagctgtacaacctgcacccgttcgggtcgcagcaggtggtgccctgcaagctggagccggaccggttctgtggcggggggcgtgacgcgcttttcgtggcggcgggctgcaaggtggaggcgttcgcggtggccggccaggagctgtgccagccgcggtgcgccttctccacgctgggccgggtgttgcgcctggcctacagcgaggctggagattatttggtagcaattgaagagaaaaacaaagctacatttctacgtgcttatgtgaactggagaaataaaaggactgaaaactctcgtgtgtgtatccgaatgattgggcataatgtggagggaccattcagcaaagccttcagagaccagatgtacattattgaaatgccgctttcggaggcccccttgtgcatttcctgttgccctgtgaaaggagaccttctcgttggctgcacaaataaattagtcttatttagtttgaagtaccagatcattaatgaggaattctcactattggactttgaacgttctttaattatacacatagataatatcactcctgttgaggtttctttttgtgttggatatgttgctgtcatgtcagacttagaagtcttaatcgtaaaactggagtcaggccctaaaaatggagagagagttcaccaccatccacataagaccaacaatcgaataagacggacagaagaaggcatcagtaatgaaatttcacagcttgagtcagatgattttgtcatctgccagaagcccctggaacttcttggtgaaaaaagtgaacagtctggattatctgttacactggagtctacgggattagctgatgaaaaaagaaaatattcccactttcagcacctgctctatagacgttttgctcctgatatttcgtcctatgtcttgtctgatgacatcaagctacattccctccagctgctacccatttaccagaccggttctcttacatctgatggaaaaaatttgtctcaggaaaaagaattgctgagtctcttttgctttttctccttacctcatgtgggctatctctacatggttgtcaaatctgttgaattgatgtcagtctaccagtatcctgaaaagtctcagcaggcagtactcacgccacaatttttgcacgtcattacaagtaacaacctgcagtgtttcactgtgcggtgcagtgcggcggcagctcgtgaggaggacccgtacatggacaccaccctgaaggcttgcccacctgtcagtatggatgtctgtgctttaagaatacagcttttcataggcttgaaagccatctgtcactttaaaaaccacatcatacttttgactaaagcagaacctgaagccattccagagagaagacagtcacccaagaggcttctttcgagaaaagataccagtgttaaaatcaaaatacctcctgtagctgaggctgggtggaatttgtatattgtgaatacgatctcaccagtgcagctgtacaaagagatggtagactatagcaatacctataagactgtcaaaacccagagctgcattcaccttctcagtgaggctcatctgttagtgcgagctgccctgatggatgccagtcagctggaacctggagagaaggcagagcttttggaagcatttaaggaaagctgtgggcaccttggggactgttacagcaggcttgactcccagcattctcatctcaccttgccatactataagatgtctggtttgtctatggctgaagttctggcccgcacggactggacagtagaggatggattacagaaatacgagagaggattaatcttttacattaatcattcactttatgaaaacctggatgaagaattaaatgaagaattagcagcaaaagtggttcagatgttttatgtggctgagccaaagcaagtgccccatattctctgtagtccttctatgaagaatattaatcctttaactgccatgagctatctaaggaagctggatacttctgggttttcatcgatcttagtgacattgaccaaggcagcagtggctctgaaaatgggagatcttgacatgcacagaaatgaaatgaaaagccattcagagatgaagttggtatgtggcttcattctggaacctcggctgttgattcaacagagaaagggacagattgttccaaccgagcttgcacttcacttgaaggaaactcagcctggattgcttgtggcttcagttctgggcttgcagaagaacaacaaaattggaattgaagaagcagattccttttttaaggtgctttgtgctaaggatgaagatacaattcctcagctcttggtagacttttgggaagctcagctagtggcatgtctcccagatgtggtacttcaggaactctttttcaaactcacatcacagtacatctggagattgtctaagaggcagcctcctgacaccacaccattgcgaacatcggaggatctgataaatgcctgtagtcattatggcttaatttatccatgggttcacgtcgtaatatcatctgattctttagctgataaaaattatacagaagatctttcaaaattacagtctcttatatgtggtccttcatttgacatagcttccattattccgttcttggagccactttcagaagacactattgccggcctcagtgtccatgttctgtgtcgtacacgcttgaaagagtatgaacagtgcatagacatactgttagagagatgcccggaggcagtcattccatatgctaatcatgaactgaaagaagagaaccggactctgtggtggaaaaaactgttgcctgaactttgtcagagaataaaatgtggtggagagaagtatcaactctacctgtcatcattaaaagaaacattgtcaattgttgctgtggaactagaactgaaggatttcatgaatgttctcccagaagatggtactgcaacatttttcttgccatatcttctctattgcagtcgaaagaaaccattgacttaaaggtatcatttgaaaaataccataatggcatttgagactgaatttctaaaaattgaatgccaaagtacaagtagaggagttttttattttatatatacacacacacacacacacacacacacacacacacacatatatgatacaaatgctttcaggctgcttaccttaccgtgtagtggtaactattcacttcttaatttatgacctcaatcaatttaattgtctagaatgtaaaaagtctttaagacataagaattcctcaaagaagccatacattttttaaggtggggattgacttttattccaaggaacaacatcagttcactgttgttggagacatgacaatcattttcatcccaagaacactttaaggaaacattttacaagtatgcttgaaagaatgtcactaactggtccagaattttatcttcttgatttttccagatttctctatgtttttgagaaagatgttaatgttttgccatggtaaaagatttcaaacctcattttttttgttccttttcttgttacttttaagaaaactcatgctctgtttctctgaatcaaatgaagtagaagtttacaaagctaactttcttcttgtctagctattaacatgatttgtcaaatgcatgtttttttcagccaaagccttgtttccatttttgttgatgtgtactcttgctcttttagctagagtgtatgtgaaaataaagaaatacatcattgtattcacaaaaaaaaaaaaaaaaaaaaa

SEQ ID NO: 1281 - protein, 1004 aa, Homo sapiens
MVQLYNLHPFGSQQVVPCKLEPDRFCGGGRDALFVAAGCKVEAFAVAGQELCQPRCAFSTLGRVLRLAYSEAGDYLVAIEEKNKATFLRAYVNWRNKRTENSRVCIRMIGHNVEGPFSKAFRDQMYIIEMPLSEAPLCISCCPVKGDLLVGCTNKLVLFSLKYQIINEEFSLLDFERSLIIHIDNITPVEVSFCVGYVAVMSDLEVLIVKLESGPKNGERVHHHPHKTNNRIRRTEEGISNEISQLESDDFVICQKPLELLGEKSEQSGLSVTLESTGLADEKRKYSHFQHLLYRRFAPDISSYVLSDDIKLHSLQLLPIYQTGSLTSDGKNLSQEKELLSLFCFFSLPHVGYLYMVVKSVELMSVYQYPEKSQQAVLTPQFLHVITSNNLQCFTVRCSAAAAREEDPYMDTTLKACPPVSMDVCALRIQLFIGLKAICHFKNHIILLTKAEPEAIPERRQSPKRLLSRKDTSVKIKIPPVAEAGWNLYIVNTISPVQLYKEMVDYSNTYKTVKTQSCIHLLSEAHLLVRAALMDASQLEPGEKAELLEAFKESCGHLGDCYSRLDSQHSHLTLPYYKMSGLSMAEVLARTDWTVEDGLQKYERGLIFYINHSLYENLDEELNEELAAKVVQMFYVAEPKQVPHILCSPSMKNINPLTAMSYLRKLDTSGFSSILVTLTKAAVALKMGDLDMHRNEMKSHSEMKLVCGFILEPRLLIQQRKGQIVPTELALHLKETQPGLLVASVLGLQKNNKIGIEEADSFFKVLCAKDEDTIPQLLVDFWEAQLVACLPDVVLQELFFKLTSQYIWRLSKRQPPDTTPLRTSEDLINACSHYGLIYPWVHVVISSDSLADKNYTEDLSKLQSLICGPSFDIASIIPFLEPLSEDTIAGLSVHVLCRTRLKEYEQCIDILLERCPEAVIPYANHELKEENRTLWWKKLLPELCQRIKCGGEKYQLYLSSLKETLSIVAVELELKDFMNVLPEDGTATFFLPYLLYCSRKKPLT

SEQ ID NO: 1282 - DNA, 2024 bp, Homo sapiens
ggcacgagggcttctcctgcgcctccttttcgcccagcactagcgccttaggccagctcgggggatgtgagagccgaagcccttagactgccaggcacagagtcgggtcgggatttgtcagccaagcctcggctccagctccgcaatctcgggactcacccgagcgacccaggcccgacggcaagttcgggcgggacggcggccgccgcgcgctcaggctcagcttcgctgcccgcccagaagatgaatccggcctcggcgccccctccgctcccgccgcctgggcagcaagtgatccacgtcacgcaggacctagacacagacctcgaagccctcttcaactctgtcatgaatccgaagcctagctcgtggcggaagaagatcctgccggagtctttctttaaggagcctgattcgggctcgcactcgcgccagtccagcaccgactcgtcgggcggccacccggggcctcgactggctgggggtgcccagcatgtccgctcgcactcgtcgcccgcgtccctgcagctgggcaccggcgcgggtgctgcgggtagccccgcgcagcagcacgcgcacctccgccagcagtcctacgacgtgaccgacgagctgccactgcccccgggctgggagatgaccttcacggccactggccagaggtacttcctcaatcacatagaaaaaatcaccacatggcaagaccctaggaaggcgatgaatcagcctctgaatcatatgaacctccaccctgccgtcagttccacaccagtgcctcagaggtccatggcagtatcccagccaaatctcgtgatgaatcaccaacaccagcagcagatggcccccagtaccctgagccagcagaaccaccccactcagaacccacccgcagggctcatgagtatgcccaatgcgctgaccactcagcagcagcagcagcagaaactgcggcttcagagaatccagatggagagagaaaggattcgaatgcgccaagaggagctcatgaggcaggaagctgccctctgtcgacagctccccatggaagctgagactcttgccccagttcaggctgctgtcaacccacccacgatgaccccagacatgagatccatcactaataatagctcagatcctttcctcaatggagggccatatcattcgagggagcagagcactgacagtggcctggggttagggtgctacagtgtccccacaactccggaggacttcctcagcaatgtggatgagatggatacaggagaaaacgcaggacaaacacccatgaacatcaatccccaacagacccgtttccctgatttccttgactgtcttccaggaacaaacgttgacttaggaactttggaatctgaagacctgatccccctcttcaatgatgtagagtctgctctgaacaaaagtgagccctttctaacctggctgtaatcactaccattgtaacttggatgtagccatgaccttacatttcctgggcctcttggaaaaagtgatggagcagagcaagtctgcaggtgcaccacttcccgcctccatgactcgtgctccctcctttttatgttgccagtttaatcattgcctggttttgattgagagtaacttaagttaaacataaataaatattctattttcattttctgcaagcctgcgttcttgtgacagattatacagaattgtgtctgcaggattgattatgcagaatacttttctctttcttctctgctgccccatggctaagctttatgggtgttaattgaaatttatacaccaattgattttaaaccataaaaagctgaccacaggcagttacttctgagggcatcttggtccaggaaatgtgcacaaaattcgacctgatttacagtttcaaaaactgtattgatgacagtagtaccaaatgctttaaaaactatttaacttgagctttaaaaatcattgtatggatagtaaaattctactgtatggaatacaatgtaattttgaatccaaaaaaaaaaaaaaaaaaa

SEQ ID NO: 1283 - protein, 400 aa, Homo sapiens
MNPASAPPPLPPPGQQVIHVTQDLDTDLEALFNSVMNPKPSSWRKKILPESFFKEPDSGSHSRQSSTDSSGGHPGPRLAGGAQHVRSHSSPASLQLGTGAGAAGSPAQQHAHLRQQSYDVTDELPLPPGWEMTFTATGQRYFLNHIEKITTWQDPRKAMNQPLNHMNLHPAVSSTPVPQRSMAVSQPNLVMNHQHQQQMAPSTLSQQNHPTQNPPAGLMSMPNALTTQQQQQQKLRLQRIQMERERIRMRQEELMRQEAALCRQLPMEAETLAPVQAAVNPPTMTPDMRSITNNSSDPFLNGGPYHSREQSTDSGLGLGCYSVPTTPEDFLSNVDEMDTGENAGQTPMNINPQQTRFPDFLDCLPGTNVDLGTLESEDLIPLFNDVESALNKSEPFLTWL

SEQ ID NO: 1284 - DNA, 2488 bp, Rattus norvegicus
cttcctctttcactccgcgctcacggcggcggccaaagcggcggcgacggcggcgcgagaacgacccggcggccagttctcttcctcctgcgcacctgccccgctcggtcagtcagtcggcggccggcgcccggcttgtgctcagacctcgcgcttgcggcgcccaggcccagcggccgtagctagcgtctggcctgagaacctcggcgctccggcggcgcgggcaccacgagccgagcctcgcagcggctccagaggaggcaggcgagtgagcgagtccgaggggtggccggggcaggtggtggcgccgcgaagatggtcgccaagcaaaggatccgtatggccaacgagaagcacagcaagaacatcacccagcgcggcaacgtcgccaagacctcgagaaatgcccccgaagagaaggcgtctgtaggaccctggttattggctctcttcatttttgttgtctgtggttctgcaattttccagattattcaaagtatcaggatgggcatgtgaagtgactgaccttaagatgtttccattctcctgtgaattttaacttgaactcattcctgatgtttgataccctggttgaaaacaattcagtaaagcatcctgcctcagaatgactttcctatcatgcttcatgtgtcattccaaggtttcttcatgagtcattccaagttttctagtccataccacagtgccttgcaaaaaacaccacatgaataaagcaataaaatttgattgttaagatacagtagtggaccctacttattcagtcaattaagagtaagtttttttatgtggttattaaaacagtatgaacaattagtctaactctgcatagacagggtctagattttgttaacccaaatgtataactgcagttagcttaaattacaatttgaagtcttgtggtttttatatagctaggcactttattactcttttgaactgaaagcacactcccttataggttcatgtaactgtcctgtaataaggtgcttataaatggaacaactacacagcctagttttgccacaacctttagcatctaaaaagttttaaaagcttctaaatgtctaatataaagggagatgcttatagccacaacatctattttaccaatattgtttccattacactaccttggattttgcatgagtgagtatagtaacccaagatgccataaaaaaaaacttgatcgttttctgacttaattagttactgtggtttcactaaaagctaccgtggtggagtgaagtcagtcagggaaggtttgtttatgttacatttatttcaccagaactattttaatatatcaaaggggtttactatgccaaacaaaattctagggaaaaatactgctaaaaatggatgcctcatcagaacatgctgttgagtccaatgtgccataagacattttagcatgttaaatagcacttttaatagcaaaaaaaggcacatcaactgcgaagttatccttagtttgcaaatgctttttctagattaatgatttttcaatcattagggtactagacacatcagcctaaagtggcatctggaattgaatggatttactgataatgatcagtctttagtcttccctttgttatatgactttataggttatgattgatcaaatttacgttttactaatggtaagggtgagggtcatagggcaggttttgggttttctagtactgttgaaaactgcaagtattggctatttgtatacttagccataacttggtgaaaaaaaacctgagcagtgtctatgtattaatgcgttggaaagaaagctgcttgtgtttgctttgttaattgcctcaggatatttcttttaaaataagctgttttaagaggaacagaagggaaatctgctacctagtctatacacagcgtgaacctcacagggggcttctgataccctcaaacatggagaacagtaagggagcagagtggttaaggactttcaggaacttaactattctggaataaggaatgaatcaactgaccttgggccagcaggtttttaactaaattgttacttgcctttctcacccagttaatcagtctctgtacttgtttccctttttgaaacaagtgtcttggttaactaattctgttttatggttgtgctaaattcatagcaggtgccttattctttgcttttagtcaaaccattccatatcagaattttccttggtttactatagatatttggctttaagttgttgtttgtgttttttaatgtacaatgttctgataaatttgactgttaaattgctatagctagcaatcattttacatatgtaaaaaattgcattccctttgtatttcatgtgtaattcaccaattaagtgcagtttatattcaggttggattatgcatgtttaggtaaacgaaagctgtgtcttacttgatttattctttaaaaataaagttccctgaatatttgaaaaaaaaaaaaaaaaaaaaaaaa

SEQ ID NO: 1285 - protein, 66 aa, Rattus norvegicus
MVAKQRIRMANEKHSKNITQRGNVAKTSRNAPEEKASVGPWLLALFIFVVCGSAIFQIIQSIRMGM

SEQ ID NO: 1286 - DNA, 1697 bp, Homo sapiens
gcatgaggagacgtgtaggggccgggttcggccctggtgaactctcacccgagcggtttctctttccgggacaacatggcgccgtccacgccgctcttgacagggaatctgggaagaattgcaaagtctgtatctttagtaaggatgggaccttgtttgcctggggcaatggagaaaaagtaaatattatcagtgtcactaacaagggactactgcactccttcgacctcctgaaggcagtttgccttgaattctcacccaaaaatactgtcctggcaacgtggcagccttacactacttctaaagatggcacagctgggatacccaacctacaactttatgatgtgaaaactgggacatgtttgaaatctttcatccagaaaaaaatgcaaaattggtgtccatcctggtcagaagatgaaactctttgtgcccgcaatgttaacaatgaagttcacttctttgaaaacaacaattttaacacaattgcaaataaattgcatttgcaaaaaattaatgattttgtattatcacctggaccccaaccatacaaggtggctgtctatgttccaggaagtaaaggtgcaccttcatttgttagattatatcagtaccccaactttgctggacctcatgcagctttagctaataaaagtttctttaaggcagataaagttacaatgctgtggaataaaaaagctactgctgtgttggtaatagctagcacagatgttgacaagacaggagcttcctactatggagaacaaactctacactacattgcaacaaatggagaaagtgctgtagtgcaattaccaaaaaatggccccatttatgatgtagtttggaattctagttctactgagttttgtgctgtatatggttttatgcctgccaaagcgacaattttcaacttgaaatgtgatcctgtatttgactttggaactggtcctcgtaatgcagcctactatagccctcatggacatatattagtattagctggatttggaaatctgaggggacaaatggaagtgtgggatgtgaaaaactacaaacttatttctaaaccggtggcttctgattctacatattttgcttggtgcccggatggtgagcatattttaacagctacatgtgctcccaggttacgggttaataatggatacaaaatttggcattatactggctctatcttgcacaagtatgatgtgccatcaaatgcagaattatggcaggtttcttggcagccatttttggatggaatatttccagcaaaaacaataacttaccaagcagttccaagtgaagtacccaatgaggaacctaaagttgcaacagcttatagacccccagctttaagaaataaaccaatcaccaattccaaattgcatgaagaggaaccacctcagaatatgaaaccacaatcaggaaacgataagccattatcaaaaacagctcttaaaaatcaaaggaagcatgaagctaagaaagctgcaaagcaggaagcaagaagtgacaagagtccagatttggcacctactcctgccccacagagcacaccacgaaacactgtctctcagtcaatttctggggaccctgagatagacaaaaaaatcaagaacctaaagaagaaactgaaagcaatcgaacaactgaaagaacaagcagcaactggaaaacagctagaaaaaaatcag

SEQ ID NO: 1287 - protein, 458 aa, Homo sapiens [sequence omitted]

SEQ ID NO: 1288 - DNA, 4406 bp, Homo sapiens
ggccgttgctccagggagaactgcaaatatcttcatccacccccacatttaaaaacgcagttggagataaatggacgcaataacttgattcagcagaagaacatggccatgttggcccagcaaatgcaactagccaatgccatgatgcctggtgccccattacaacccgtgccaatgttttcagttgcaccaagcttagccaccaatgcatcagcagccgcctttaatccctatctgggacctgtttctccaagcctggtcccggcagagatcttgccgactgcaccaatgttggttacagggaatccgggtgtccctgtacctgcagctgctgcagctgctgcacagaaattaatgcgaacagacagacttgaggtatgtcgagagtaccaacgtggcaattgcaaccgaggagaaaatgattgtcggtttgctcatcctgctgacagcacaatgattgacaccaatgacaacacagtcactgtgtgtatggattacatcaaagggagatgctctcgggaaaagtgcaaatactttcatccccctgcacatttgcaagccaagatcaaggctgcccaataccaggtcaaccaggctgcagctgcacaggctgcagccaccgcagctgccatgactcagtcggctgtcaaatcactgaagcgacccctcgaggcaacctttgacctgggaattcctcaagctgtacttcccccattaccaaagaggcctgctcttgaaaaaaccaacggtgccaccgcagtctttaacactggtattttccaataccaacaggctctagccaacatgcagttacaacagcatacagcatttctcccaccagttcccatggtgcacggtgctacgccagccactgtgtccgcagcaacaacatctgccacaagtgttcccttcgctgcaacagccacagccaaccagatacccataatatctgccgaacatctgactagccacaagtatgttacccagatgtagaattttcatcactaaacaatcatgctaaagaggaaaggacagtgtgcttggttagagtaaaggacgaggtcattagccatattgtatatatcgtcaagcaacacacacaaaagttcctcagccacaagacatccacatattgcatgttaaccagaagaaaagacaacattttccggaaatccactgcacactgttgcctatacactttgtacatttaattgatatttgtgctgaggtgatattcctgtctaaaagaacaacattgtctttcttttctagcacagagttatgcattcaaagatgcatacctagttagtttcctatatattcatgccatcttgaaaagacagactatggtgtaaccatgattctattatgtattggtacgtctgtagaccaagatataattttttaaaaataagtttatttctttcaaggtttacaaataacaaaggtgcaccttgtatttaaaattgccattatagatgagagcgtgcatgcacagtcatttttgtttaagagtaatatttttaatgtaatagattgtaagacgtggtgagggagggatctgacagagatgaatgtgccaagcaaaaccacaactgtgtatattttaaagcacatcatggctttaagtaccatgttgttaaggattctcatgaagtgccatagactgtacatcaaattagagtattatttcttcagtgttattgttttcagagccacattttgttgcatatttgctagtactaatcagtcaaagggcaccattctttttttttttttttgaaaccaaagctgtctcagaaatggccaatttaactttacagtaacaatagacagcacaacacaaactctctcaatacagataaactcacacatactggagatatatatataatagatatatataaaattattttaatgcattgtagtgtaatatttatgcatactatactgtataacatgttattcaaaagggattgccatttctgagacacagtaacaaaaaaatgaggaaattattttgcttctatttatagcctctgtcaaaagtcaaaagactataaatgctttgcaaaaatggtttcacgtttgcttaaatgcttcatcacagtcacattcaaaatagtgactctaaacaaagaagaaagcagcactgtcatcagatgcatgataaaccaaaatatgaaaatgggaaatgtttaattaacctagtaattgggtgggttaagtacatgggtgaattttatatgtgatttttgttttgttttgttttgttcagattaactgcttatagccttagaaagccttttacaaaattaaaaaaaaaatagatgtgcattcagtttttaagaatggaatcatccaaaggaattcctttttttgaggtttggatgttgcagctagtaaaggatatttttgctctgttcagcagttctaaaaattgctgaagtaggggccaggtcactggtagttatagtatggaatgggagaagtgaaagttcagttatagaactttccatacttccaagtttactgcaagtttttatgcttgagagagatgctttctaatataagactgatgtgttgattttactgattgtactgtacatctattaaagccttagattattacattacgggttggaacccataccaatgtaatttcaatcgtgttaagaaagtaatggtgacttcacatgttattgtagttagttacattatagaatattacttatttttcttgttaaaatgtagtttttcatttcctacatttattagattttcattttctattaacaattgaataccatttcagtttatagacttgttttattagattttaccaatgaatttttcaaaatacaaaaaaaagtagtttttccttcataacatactcagttttgaattacatgtagtgtcacatgaatattcgtattgttaactaaatgatttatattttactgatttaatattacagtgtaagaatgtcagtcattgttagttcttgtctagttttcattaaaagaacaaagatcttttatatggatatcttataaatatataatcattgctaagtaagaagttaagttgttgctatcgcaacaatcctggcagacaattgagtaatattttgatgatttattttgtttgtaattagttattataagaagatctagatcctagatattagaataaaatttattttctactgtatccatttcaaatgttaaaatattgtttaatatttttgaaatccctgagtatcaggccttgttataaataagctgcataatcaataaatagaacaagggactttttgttgataatccaaatactcaaagtttacgtaatgaaaattatagcgtgtgtgcaaactcttgagggttgattatgctgcaatttagcatgttggaacgtctagggagaaggttgactttttgcacttctgtatatagtcaaaagagagaaacctgtataatagtaagatcttattttgaataaaaacgtctataattacaaggagttttgttaaggctaatacaatgacagactgagcaaaattgcttgcaaaagtggcacagagttagcactccataccccttcaaacatgttgctttgctttcttgtggacagcttgtagtttgccaggattttttcagctggaaagatacgccatcctttcaaaccctcatgactgacaaaaactccatggggccaaatctgcctgaagatcattaccaaaaatagcaggtacttctaccattaaggtgaaatcatggatcagatattccttacatttttcaaaactactgcatgtttaaaacttcaacaaaaaaagagagaaagaactatactaagaacatatattattcagatcagtttctgccaatttcagtggtttattgttcacaaaaaaatcttcaaaacaagtattgactttcacaaaatttaaatcataaacaggcaaaccaaacagcacactgtagctatagttgttatgtgattgttttttaattgctgtaggatcctgttctttcagcaggtgaaaaataaaacgcagttcaaatttcatggttttaattttcaactcagaagcactcaaaaatgcaaaatgtgataatgggcacttgtttaaaagaattagtgtatccagccttcactccagctggttaaaaatgttgcacttatcagcaaccctaccactttcatctgctgaaaggacaaatgtgcttggttttactattatgtaatcacaacttactttctgcttgtagttgcttaaaattatgtattttgtcttgggctgcaatttgttttatgcttattttattattactgcagtagttgactttgctgtatggaaaaataaagtgaaattgccctaataaaacttctctttcttaagt

SEQ ID NO: 1289 - DNA, 1263 bp, Homo sapiens
atgtggagaaagccaggggacccacagaaggctgcctgtggccacgtcatagcaaaggaactttatggagaggagcaggaagtcagagagccagctgaattcaagaatctgataggagagaagatgtcagtccctctggaagaagttagcaaagttgtggccttgaatgggaagggacagaagagaggttcagggttcgaggctgaggcaacaggaaactgcctggaatggaacttgccaagggggataggaggtgcaggccggggcctcttgggagaaagagctgcaccatcttccaacacctgtgggaatgctgtcttgaaaacactgcagcagccagtcatgagccaaggaagcagacaagagcaacgaacacaggcattgtgcatacagacctacccagagaagccagtatccatggctttggagagttcaaatattcaattttccgttcaaaaaaaggccacgccaccggctaagagttccgccaggggcccagctctcaggaggcctcttcggtgccgccagcctcccgaagtcatccaaggtagcaggcaaatccggcagcagcaaactagctcggattcggcttcggtttttctcctggccggcgccacaggcccctcctcccggggcgggctcctcggcctccttctcaacctcagcccgcggcgccgacccttccggcaccctcccgccccgtctcgtactgtcgccgtcaccgccgcggctccggccctggccccgatggctctgtgcaacggagactccaagccttgggctccgcggcggttaggccggttctggacgaacccctcggagctgcactgtcttccccctcccccaacgcccctgcaggcccgcgtgagggctggtggccccagggtcgcgcactccgttctccctccccgcttccttctcagagaggaaagggtgtgtgtccaggtcccgcctccgtccagcttgctccctgtcgagcttgctggtttgcggggtaacccgcttccccgcctttggggtccctccccgggacgcgagccgtgccagctcgcccgaggcctgggcagtccggagttccggagtgctggaaaagttgccgccttgacgtacccggcggggagagcacgtttgaccgctgctgctcatctctcctccaactcacttttcttagaccgttcctcttactttcgtcccgcttttgaattgggcaccttcgctttcacctctgtattaaaattttcattggcctggagttctttctga

SEQ ID NO: 1290 - DNA, 1566 bp, Homo sapiens
aggcatagcaaatgaatctaaaaagttatatggagcacagttccaccctgaagttggccttacagaaaatggaaaagtaatactgaagaatttcctttatgatatagctggatgcagtggaaccttcaccgtgcagaacagagaacttgagtgtattcgagagatcaaagagagagtaggcacgtcaaaagttttggttttactcagtggtggagtagactcaacagtttgtacagctttgctaaatcgtgctttgaaccaagaacaagtcattgctgtgcacattgataatggctttatgagaaaacgagaaagccagtctgttgaagaggccctcaaaaagcttggaattcaggtcaaagtgataaatgctgctcattctttctacaatggaacaacaaccctaccaatatcagatgaagatagaaccccacggaaaagaattagcaaaacgttaaatatgaccacaagtcctgaagagaaaagaaaaatcattggggatacttttgttaagattgccaatgaagtaattggagaaatgaacttgaaaccagaggaggttttccttgcccaaggtactttacggcctgatctaattgaaagtgcatcccttgttgcaagtggcaaagctgaactcatcaaaacccatcacaatgacacagagctcatcagaaagttgagagaggagggaaaagtaatagaacctctgaaagattttcataaagatgaagtgagaattttgggcagagaacttggacttccagaagagttagtttccaggcatccatttccaggtcctggcctggcaatcagagtaatatgtgctgaagaaccttatatttgtaaggactttcctgaaaccaacaatattttgaaaatagtagctgatttttctgcaagtgttaaaaagccacataccctattacagagagtcaaagcctgcacaacagaagaggatcaggagaagctgatgcaaattaccagtctgcattcactgaatgccttcttgctgccaattaaaactgtaggtgtgcagggtgactgtcgttcctacagttacgtgtgtggaatctccagtaaagatgaacctgactgggaatcacttatttttctggctaggcttatacctcgcatgtgtcacaacgttaacagagttgtttatatatttggcccaccagttaaagaacctcctacagatgttactcccactttcttgacaacaggggtgctcagtactttacgccaagctgattttgaggcccataacattctcagggagtctgggtatgctgggaaaatcagccagatgccggtgattttgacaccattacattttgatcgggacccacttcaaaagcagccttcatgccagagatctgtggttattcgaacctttattactagtgacttcatgactggtatacctgcaacacctggcaatgagatccctgtagaggtggtattaaagatggtcactgagattaagaagattcctggtatttctcgaattatgtatgacttaacatcaaagcccccaggaactactgagtgggagtaataaacttc

SEQ ID NO: 1291 - DNA, 540 bp, Homo sapiens
gacccttttcacaacatggcgccgaaagcgaagaaggaagctcctgcccctcctaaagctgaagccaaagcgaaggctttaaaggccaagaaggcagtgttgaaaggtgtccacagccacaaaaagaagaagatccgcacgtcacccaccttccggcggccgaagacactgcgactccggagacagcccagatatcctcggaagagcgctcccaggagaaacaagcttgaccactatgctatcatcaagtttccgctgaccactgagtctgccatgaagaagatagaagacaacaacacacttgtgttcattgtggatgttaaagccaacaagcaccagattaaacaggctgtgaagaagctctatgacattgatgtggccaaggtcaacatcctgattcggcctgatggagagaagaaggcatatgttcgactggctcctgattacgatgctttggatgttgccaacaaaattgggatcatctaaactgagtccagctgcctaattctgaatatatatatatatatatcttttcaccat

SEQ ID NO: 1292 - DNA, 5280 bp, Homo sapiens
gatgaagaggaagaaatcaaacaagaaattaacatgttgaagaaatattctcatcaccggaatattgctacatactatggtgcttttatcaaaaagaacccaccaggcatggatgaccaactttggttggtgatggagttttgtggtgctggctctgtcaccgacctgatcaagaacacaaaaggtaacacgttgaaagaggagtggattgcatacatctgcagggaaatcttacgggggctgagtcacctgcaccagcataaagtgattcatcgagatattaaagggcaaaatgtcttgctgactgaaaatgcagaagttaaactagtggactttggagtcagtgctcagcttgatcgaacagtgggcaggaggaatactttcattggaactccctactggatggcaccagaagttattgcctgtgatgaaaacccagatgccacatatgatttcaagagtgacttgtggtctttgggtatcaccgccattgaaatggcagaaggtgctccccctctctgtgacatgcaccccatgagagctctcttcctcatcccccggaacccagcgcctcggctgaagtctaagaagtggtcaaaaaaattccagtcatttattgagagctgcttggtaaagaatcacagccagcgaccagcaacagaacaattgatgaagcatccatttatacgagaccaacctaatgagcgacaggtccgcattcaactcaaggaccatattgatagaacaaagaagaagcgaggagaaaaagatgagacagagtatgagtacagtggaagtgaggaagaagaggaggagaatgactcaggagagcccagctccatcctgaatctgccaggggagtcgacgctgcggagggactttctgaggctgcagctggccaacaaggagcgttctgaggcctacggaggcagcagctggagcagcagcagcgggagaatgaggagcacaagcggcagctgctggccgagcgtcagaagcgcatcgaggagcagaaagagcagaggcggcggctggaggagcaacaaaggcgagagaaggagctgcggaagcagcaggagagggagcagcgccggcactatgaggagcagatgcgccgggaggaggagaggaggcgtgcggagcatgaacaggaatacatcaggcgacagttagaggaggagcagagacagttagagatcttgcagcagcagctactgcatgaacaagctctacttctggaatataagcgcaaacaattggaagaacagagacaagcagaaagactgcagaggcagctaaagcaagaaagagactacttagtttcccttcagcatcagcggcaggagcagaggcctgtggagaagaagccactgtaccattacaaagaaggaatgagtcctagtgagaagccagcatgggccaaggaggtagaagaacggtcaaggctcaaccggcaaagttcccctgccatgcctcacaaggttgccaacaggatatctgaccccaacctgcccccaaggtcggagtccttcagcattagtggagttcagcctgctcgaacaccccccatgctcagaccagtcgatccccagatcccacatctggtagctgtaaaatcccagggacctgccttgaccgcctcccagtcagtgcacgagcagcccacaaagggcctctctgggtttcaggaggctctgaacgtgacctcccaccgcgtggagatgccacgccagaactcagatcccacctcggaaaatcctcctctccccactcgcattgaaaagtttgaccgaagctcttggttacgacaggaagaagacattccaccaaaggtgcctcaaagaacaacttctatatccccagcattagccagaaagaattctcctgggaatggtagtgctctgggacccagactaggatctcaacccatcagagcaagcaaccctgatctccggagaactgagcccatcttggagagccccttgcagaggaccagcagtggcagttcctccagctccagcacccctagctcccagcccagctcccaaggaggctcccagcctggatcacaagcaggatccagtgaacgcaccagagttcgagccaacagtaagtcagaaggatcacctgtgctcccccatgagcctgcgaaggtgaaaccagaagaatccagggacattacccggcccagtcgaccagctagctacaaaaaagctatagatgaggatctgacggcattagccaaagaactaagagaactccggattgaagaaacaaaccgcccaatgaagaaggtgactgattactcctcctccagtgaggagtcagaaagtagcgaggaagaggaggaagatggagagagcgagacccatgatgggacagtggctgtcagcgacatacccagactgataccaacaggagctccaggcagcaacgagcagtacaatgtgggaatggtggggacgcatgggctggagacctctcatgcggacagtttcagcggcagtatttcaagagaaggaaccttgatgattagagagacgtctggagagaagaagcgatctggccacagtgacagcaatggctttgctggccacatcaacctccctgacctggtgcagcagagccattctccagctggaaccccgactgagggactggggcgcgtctcaacccattcccaggagatggactctgggactgaatatggcatggggagcagcaccaaagcctccttcaccccctttgtggaccccagagtataccagacgtctcccactgatgaagatgaagaggatgaggaatcatcagccgcagctctgtttactagcgaacttcttaggcaagaacaggccaaactcaatgaagcaagaaagatttcggtggtaaatgtaaacccaaccaacattcggcctcatagcgacacaccagaaatcagaaaatacaagaaacgattcaactcagaaatactttgtgcagctctgtggggtgtaaaccttctggtggggactgaaaatggcctgatgcttttggaccgaagtgggcaaggcaaagtctataatctgatcaaccggaggcgatttcagcagatggatgtgctagagggactgaatgtccttgtgacaatttcaggaaagaagaataagctacgagtttactatctttcatggttaagaaacagaatactacataatgacccagaagtagaaaagaaacaaggctggatcactgttggggacttggaaggctgtatacattataaagttgttaaatatgaaaggatcaaatttttggtgattgccttaaagaatgctgtggaaatatatgcttgggctcctaaaccgtatcataaattcatggcatttaagtcttttgcagatctccagcacaagcctctgctagttgatctcacggtagaagaaggtcaaagattaaaggttatttttggttcacacactggtttccatgtaattgatgttgattcaggaaactcttatgatatctacataccatctcatattcagggcaatatcactcctcatgctattgtcatcttgcctaaaacagatggaatggaaatgcttgtttgctatgaggatgagggggtgtatgtaaacacctatggccggataactaaggatgtggtgctccaatggggagaaatgcccacgtctgtggcctacattcattccaatcagataatgggctggggcgagaaagctattgagatccggtcagtggaaacaggacatttggatggagtatttatgcataagcgagctcaaaggttaaagtttctatgtgaaagaaatgataaggtattttttgcatccgtgcgatctggaggaagtagccaagtgtttttcatgaccctcaacagaaattccatgatgaactggtaacagaagagcacttggcacttatcttcatggcgttatttctaatttaaaagaacataactcatgtggacttatgccagtctagaggcagaatcagaaggcttggttgaacatatcgctttccctttttcctctccctccgcccctcccagtacagtccatctttcaatgttgcagcctggttgagaaggagagaaaaaggtggcaggaatttccaggagatccccaagaatgctgccttgtctgtggacaaagatggaccatgtgcccttcggaattagggatagaaacaaatattgtgtgctcttaacgattaagctgtgttatggtgggttttcaggtttttaccttttttctttacccctttactctgcaagaatggggaaagaatgcatactgcgaaaatgagtcttttaaattctgtctgcctactagttttaagtatatggtatgttgtaaaatttccaatgatgagagacagcacaataaatgtaccttatctccttaggctgaaggccataactacatagtggagtaatttaagaactctcttgccttcaccaacccaaaaggttgctttttgatagcaactggctaatgaatttttaaaaagagaagaaaaatactagttttcccctcttttgggaaatagattttaaatggctaaactactagccttaaaactactagtctaataaaatcaactaccacttttgtgaatctgacaggccacatttttatatggccctttacagaatggagtgtgttgaacaggatactaacgccattgagttgagctggcctagcgatggagggacactctaacacaactttccctcagctattatgcaacagatcagggaaaaagatgggatgacagatggggtcagacagaaagagcttctgggaaacaagcttacatagtcttttttaaaatgcacaaagcctcccagctaagaggtcacttggtttgggcttcattaggactgagactttgttgagttctttctgggacttggagagtggatgatattcaggctctgaacattcccagcgctctcccgagggtgccactttctcaagatgaaaactgtgactgaaaaaattaataataaatgtttctgagctgcctgtgttctccctgtgtgggtgagagaagggactagactcctaagcctgcctcagatacaagaggcatcattggctccaattttagagaacttgaaagcaaggctttggacaaaattttgagaccctaatcactttaccttcctccaaattacccaacatacggtaaacaacatttgtgcagaagtatgtatgtatttagttcaggttgacttgtgtccttataaactcttactcaaatgatttgaacttt

SEQ ID NO: 1293 - protein, 810 aa, Homo sapiens
MPHKVANRISDPNLPPRSESFSISGVQPARTPPMLRPVDPQIPHLVAVKSQGPALTASQSVHEQPTKGLSGFQEALNVTSHRVEMPRQNSDPTSENPPLPTRIEKFDRSSWLRQEEDIPPKVPQRTTSISPALARKNSPGNGSALGPRLGSQPIRASNPDLRRTEPILESPLQRTSSGSSSSSSTPSSQPSSQGGSQPGSQAGSSERTRVRANSKSEGSPVLPHEPAKVKPEESRDITRPSRPASYKKAIDEDLTALAKELRELRIEETNRPMKKVTDYSSSSEESESSEEEEEDGESETHDGTVAVSDIPRLIPTGAPGSNEQYNVGMVGTHGLETSHADSFSGSISREGTLMIRETSGEKKRSGHSDSNGFAGHINLPDLVQQSHSPAGTPTEGLGRVSTHSQEMDSGTEYGMGSSTKASFTPFVDPRVYQTSPTDEDEEDEESSAAALFTSELLRQEQAKLNEARKISVVNVNPTNIRPHSDTPEIRKYKKRFNSEILCAALWGVNLLVGTENGLMLLDRSGQGKVYNLINRRRFQQMDVLEGLNVLVTISGKKNKLRVYYLSWLRNRILHNDPEVEKKQGWITVGDLEGCIHYKVVKYERIKFLVIALKNAVEIYAWAPKPYHKFMAFKSFADLQHKPLLVDLTVEEGQRLKVIFGSHTGFHVIDVDSGNSYDIYIPSHIQGNITPHAIVILPKTDGMEMLVCYEDEGVYVNTYGRITKDVVLQWGEMPTSVAYIHSNQIMGWGEKAIEIRSVETGHLDGVFMHKRAQRLKFLCERNDKVFFASVRSGGSSQVFFMTLNRNSMMNW

SEQ ID NO: 1294 - DNA, 515 bp, Homo sapiens
gggggcaaaaaaaagaagcaagttctgaagttcactcttgattgcacccaccctgtagaatcatggatgctgccaattttgagcagtttttgcaagaaaggatcaaagtgaacggaaaagctgggaaccttggtggaggggtggtgaccatcgaaaggagcaagagcaagatcaccgtgacatccgaggtgcctttctccaaaaggtatttgaaatatctcaccaaaaaatatttgaagaagaataatctacgtgactggttgcgcgtagttgctaacagcaaagagagttacgaattacgttacttccagattaaccaggacgaagaagaggaggaagacgaggattaaatttcatttatctggaaaattttgtatgagttcttgaataaaacttgggaaccaaaatggtggtttatccttgtatctctgcagtgtggattgaacagaaaattggaaatcatagtcaaagggcttcccttggttcgccactcatttatttgtaacttgacttct

SEQ ID NO: 1295 - DNA, 768 bp, Homo sapiens
atgaagagagtgtcagcagaggtcgcctccagaggaggtgctgtggagactgagcgcatagcacccttaaaatcctgggaccagggcttctccacgggcttgctgaagaagggagaaaaagaacagcaagaagcgattgaacacattgatgaagtacaaaatgaaacagacagacttaatgaacaagccagtccccttacaaagaaacagacagatgatttaggtgataatgacggtgctgaagatgaagatattcgggacagtgggggtcccaaaccagtgatggtgtatatccatggtggctcatatatggaaggtactggaaatttatatgatggaagtgtcttggcaagttatggcaatgtgatcgtcatcacagtcaactatcgacttggagtactcgctctacatccgagttatgattcaggagccactgggcaggaaaatgtgaggacacagaggaagctgactgaagcaggtagacgagaagaggaaacgggttgtgcgacggcgggggtcgctgcccgtctgtccgtcggcttctccagcggtaaaaggagagctgatggaactgtgaatcaaatcgaaggtgaagccaccccagttaacctcacagagcctgccaagctggaagttaagttttcctggtcacataattatctgtcaaacacttactacatgtcacgcactaaggttgccatgatgagccggacagagctggccttggtacttatggagctcattcccagtgtggatactgacacgtga

SEQ ID NO: 1296 - DNA, 2540 bp, Homo sapiens
tattttgtcagatgtgttgaacctcgattaagattgcattatgacattcttgaagaccgagttccatcaggacttattgttgactaccacaatctgttgtctcaatgtgaggagagttacaggaaatttttaaatctgagaagcagtttgtcaaattgtaactctgattccgagcaggaaaatatctccatggtggaagggttaaaattgtattcggagatggaacagttgaaacaaaagctgaaactcattgagaatcctttgttgaggtatgtgtttggttatcagaagaattctaacatccaagcaaagggtgtccgttccagcggtcagaagatcactcatgtggtctcctccaccatgatggctggtctcctgcggtccctgcttacggacaggctttgccaggagcctggtgaggaagaaagagaaattcagttccatagtgatccattgtctgctataaatgcctgcttcgaaggtgacactgttattgtttgtcctggccattatgtggtacatggcactttctccattgctgactccattgagttggaaggatatggcctaccagatgacattgtgatagaaaagaggggcaaaggcgacacttttgtggactgcactggtgctgatattaaaatctcaggcataaaatttgttcagcatgatgctgtagagggaatcttaattgttcaccgtggtaagactacgctggaaaactgtgtgctgcagtgtgagacgaccggagtcacagtgcggacatcagcagagtttctaatgaagaactcggatttatatggcgccaagggtgctggtatagaaatctaccctgggagtcagtgcaccctgagtgacaatgggatccatcactgcaaggaagggatcctcattaaggacttcttagatgaacattatgacattcccaagatatccatggtgaataatataatacataataatgaaggttatggtgttgtcttggtgaaacctacaatcttctctgacctgcaagaaaatgctgaagatggaactgaagaaaataaagcgcttaaaattcagacaagtggagagccagatgtggctgaaagagtggatctagaagagctgattgagtgtgcaactggtaaaatggagctttgtgcaagaactgacccttctgagcaagtcgagggaaattgtgaaattgtaaatgaactaattgctgcctccacacagaaaggccagataaagaagaaaaggttgagtgaactggggatcacgcaagctgatgacaacttaatgtcacaggagatgtttgttgggattgtggggaaccagttcaagtggaatgggaaaggtagttttggcacatttcttttctgactacagtgatgtaagtagatagcaaaatactggattttgcacatgctgccctaagaatcactgctgccattgtagtttgctgtattgtctgtattttatatttgattatttgggcttgagtgaaaggtagatttatttccatttgcaggtgttgcacataaaacactccctctttataagaaaaatcataaatgcatataaaatagaaaatatttggagattgcttatctgaaagtcttgctttcttatacacatggttctctcatattaagcctggtagtaactttttagtgtaattacctttagcacttcaaagacgaggaagtaaggaagggaatgcaagactagtgcataaaaatgcaataggtgtcatatgtacagcattcttcttagagttgccttttcatcccaattacagtgagtctgatttccatcctgtatttgcataatacttgtcttaaaataaaagcttttatgattgggaatttatctgcctaatcagacttattattgagacgtcaatgggacgcatttttctgttgagctatgcagtcgtcaaaacagcgatagacagcataggaggtttgaagcagaaatgaaatgtgttattcagagccaatgttgtacatagagcattttcactattgctgaatgggaatgattaaaaacaaggtatttttcgggccaggcggtggctcacgcttgtaatcgcagcactttgggaggctgaggcaggaggatcacttgagcccaggagttcaagactagcctaggcaacatagtgagaccctgtctctactaaaaataaatttaaaaaaaattagctgagtgtggtggtgcatgcatgtagttccagctactcaggaggctgaggctagaggatccttgagcccaggaggttgaggctgcagtgaggtgtgattgcgccactgcattccagcttgggcgacagagcgagacccagtctcaaaaaaaaaaaaaagtatttttctcttaccgttacagtattctgattatattactgacacagtcaaaatgattaactgtacaacctgtatctgctgggtgttcttgttatcatattgtaaaacagctttaaaaatatttatattttaaaaactgtatgtgacattaatatgcctaatgattaaaattatagtgatgaaataacaaaa

SEQ ID NO: 1297 - DNA, 1049 bp, Homo sapiens
gtagccatggcggccatgagtttgttgcggcgggtttcggttactgcggtggcagctctgtctggccggccccttggcactcgcctcggatttgggggcttcctcactcgtggctttccgaaggctgctgctcctgttcgacacagtggagaccatgggaaaagactatttgtcatcagaccttctagattctatgacaggcgttttttgaagttattgagattctacattgcattgactgggattccagtagcaattttcataactctggtgaatgtattcattggtcaagctgaactagcagaaattccagaaggctatgtcccagaacactgggaatattataagcatcccatatcaagatggattgcccgtaatttctatgatagtcctgaaaagatatatgaaagaacaatggccgtccttcagattgaagctgaaaaggctgaattacgggtaaaggagctggaagtgcgaaaattgatgcatgtgagaggagatggaccctggtattactatgagacaattgacaaggaacttattgatcattctccgaaagcaactcctgacaattaagcctttttttctccaaatacaaagtatattctctttattggaaaataaattaataaatatattctgtatttttgctctccgtgaaaaacaaaagagcctctgacattactgtctctcagtgttggttcagattgaggcttttgtttgaggagtttggcttccagtccccaaagaaggtttaaaatgtactaataaaaactggagaaataggaatttgtgaacccctaaaattgtagcaactttgaaaggttagtgttttatttacctgacaaatggaagttatagaagtctaataatgttaagcaccagtaattatagtattttgtacaaatgcctgtactgtagatgtctgtattattgaggggcaactcaggattttaagttccataaagtattgaaccaactctaaaatgttaactccttaataaacagattctcagtaaacaaattttaaagttaaaaaaaaaaaaaaa

SEQ ID NO: 1298 - protein, 189 aa, Homo sapiens
MAAMSLLRRVSVTAVAALSGRPLGTRLGFGGFLTRGFPKAAAPVRHSGDHGKRLFVIRPSRFYDRRFLKLLRFYIALTGIPVAIFITLVNVFIGQAELAEIPEGYVPEHWEYYKHPISRWIARNFYDSPEKIYERTMAVLQIEAEKAELRVKELEVRKLMHVRGDGPWYYYETIDKELIDHSPKATPDN

SEQ ID NO: 1299 - DNA, 2840 bp, Homo sapiens
gttttgccagttatgcgaaaacatggctgcggccggtttggcccttctttgtaggagagtttcatccgccctgaaatcttcccgatcgttaataactcctcaggtccctgcctgcacagggttttttcttagtttgttgcctaagagtacaccaaatgtgacatcctttcaccaatatagattacttcataccacattgtcaaggaaaggactagaagaattttttgatgacccaaaaaactgggggcaagaaaaagtaaaatctggagcagcatggacctgtcagcaactaaggaacaaaagtaatgaagatttacacaaactttggtatgtcttactgaaagaaagaaacatgcttctaaccctagagcaggaggccaagcggcagagattgccaatgccaagtccagagcggttagataaggtagtagattccatggatgcattagataaagttgtccaggaaagagaagatgccctaaggcttcttcagactggtcaagaaagagctagacctggtgcttggagaagagacatctttggaagaatcatctggcacaagttcaagcagtgggttataccttggcacctaaataaaagatacaataggaaacgattctttgccttgccttatgtggaccattttctcagactggaacgtgagaaacgagcccgcatcaaagcacggaaggaaaatttagagagaaagaaagcaaaaattcttttaaaaaagtttccacatcttgctgaagcccaaaagtcaagtcttgtctaagatgtctgaactattaaatttaccattttgtttttcttgaatagtctgtgtacaggagtaaatatgttaagtggtttataaagaaattctgtttttagtcaagtgactttactaatcagttgttctaagtgtgaatatggcatgctaattagctaatttggtagaagctaatttgcttctaaaaatcaggtataaagttcagatgagattcccactttataaattctgacatttaagcaggctttaaatgtcacctgctaccttagagtgtgaaggtgatggtaactgccacagcaaaggcaataccgtagtttttgaatttgaataatagttttacctctgttgttaataggctatgaagaggatgtgggtattgctgttaataaacggaggactttgattcaaaataatgagaaatacatttagtccttaaagtagtaatcacagtgcacaacagtccaaaatatatttctggaatggctaatttttatttaattctgtaagcctaaggtaaaaagcataggcagtaacttttactagtcaataaaaagcagttctaccaatccactggtaattaatacactaaacagagttggaaagcattttactgaaagcaaaatatttagagaaaatagacatttatacaaaattataaaatgcttgtaataagaataagtgcatttcaaggaaagcacaaacttaatttatagagccagttaaagctttaaaaaatttaagtggaaattgaaatatgcaaaaatgtataaacattctacaaaagatggtcattcttttcctgagtatactaaagctatgaaacgtaaggtgacaaaaggaaggtagaagcttgggaactctttctcaagggcattttctttctacacactgcttccctccttcttcatattcttgcttggaaatccacatcccaacacttgtggtgacaacatgactgactcctaacattgtgtttcctgataacccctttacattggaagggtcaaataatccttctggaatctttagccgctctgcaccaaaatcacaattgtagccattggggaattcataatgaacagttggcatctgtgcagccacttgttcatcataagttgaatctgacacttgaagtaccgaagcttgaaaatcctggataacacaattacacatataattgtgccaagacctcgtaacctgaggcaacttctcttttcttttccagtttgctggagatccttcacgaacagcttcttttgatgcaatcatatatggaggaaccaattcaatattcatttcttggaagagttctctgcactgcatagtaataaagtctccagcaagaggggatttcacaatgccttgttgaaggacatagccatcgtggactggaattgcagtggtatgagtggctccactgtccaaaatcagcccagtagaacgaccattagcaaatgctgtcaaaactgcagttttgcaaaggaagaaggcagggatgttgtagtgttcaaacattaactctgtcagtttctctctctttgctctagtattccacggtgcctctgacatgagaacaggatggagactggcttctgatttgacatgcattttgtaggtatgatccaaaatagcttggaaactatcccagtcttcaaccatcccattttttagaggtgaaatggcctccatattctccctcggaacacgcagagcattagtatctatgtagtaggtgggaccgccttgtttgcctttatcgccatctatttccattaatgtgcttccgtcatctctttctaccaccataccaatagctgtaggaaaatccaccttggggcagtcctcaccagcataaccagctctcacagtataggatccaatgtcaaaaacaagggctccaacttcacctcccccgtacacgccgccgctcatggctgctgccggcgcgactcctaccctaagggctaactggcgaagtgactgcagtggccgcgactgcgagtctcgaggagcgatagcccctgactcccttaacttccaccgccacccacctcaggcaacaaagcgg

SEQ ID NO: 1300 - DNA, 1822 bp, Homo sapiens
ccgctttgttgcctgaggtgggtggcggtggaagttaagggagtcaggggctatcgctcctcgagactcgcagtcgcggccactgcagtcacttcgccagttagcccttagggtaggagtcgcgccggcagcagccatgagcggcggcgtgtacgggggagatgaagttggagcccttgtttttgacattggatcctatactgtgagagctggttatgctggtgaggactgccccaaggtggattttcctacagctattggtatggtggtagaaagagatgacggaagcacattaatggaaatagatggcgataaaggcaaacaaggcggtcccacctactacatagatactaatgctctgcgtgttccgagggagaatatggaggccatttcacctctaaaaaatgggatggttgaagactgggatagtttccaagctattttggatcatacctacaaaatgcatgtcaaatcagaagccagtctccatcctgttctcatgtcagaggcaccgtggaatactagagcaaagagagagaaactgacagagttaatgtttgaacactacaacatccctgccttcttcctttgcaaaactgcagttttgacagcatttgctaatggtcgttctactgggctgattttggacagtggagccactcataccactgcaattccagtccacgatggctatgtccttcaacaaggcattgtgaaatcccctcttgctggagactttattactatgcagtgcagagaactcttccaagaaatgaatattgaattggttcctccatatatgattgcatcaaaagaagctgttcgtgaaggatctccagcaaactggaaaagaaaagagaagttgcctcaggttacgaggtcttggcacaattatatgtgtaattgtgttatccaggattttcaagcttcggtacttcaagtgtcagattcaacttatgatgaacaagtggctgcacagatgccaactgttcattatgaattccccaatggctacaattgtgattttggtgcagagcggctaaagattccagaaggattatttgacccttccaatgtaaaggggttatcaggaaacacaatgttaggagtcagtcatgttgtcaccacaagtgttgggatgtgtgatattgacatcagaccaggtctctatggcagtgtaatagtggcaggaggaaacacactaatacagagttttactgacaggttgaatagagagctgtctcagaaaactcctccaagtatgcggttgaaattgattgcaaataatacaacagtggaacggaggtttagctcatggattggcggctccattctagcctctttgggtacctttcaacagatgtggatttccaagcaagaatatgaagaaggagggaagcagtgtgtagaaagaaaatgcccttgagaaagagttcccaagcttctaccttccttttgtcaccttacgtttcatagctttagtatactcaggaaaagaatgaccatcttttgtagaatgtttatacatttttgcatatttcaatttccacttaaattttttaaagctttaactggctctataaattaagtttgtgctttccttgaaatgcacttattcttattacaagcattttataattttgtataaatgtctattttctctaaatattttgctttcagtaaaatgctttccaactctgtttagtgtattaattaccagtggattggtagaactgctttttattgactagtaaaagttactgcctatgctttttaccttaggcttacagaattaaataaaaattagccattccagaaatat

SEQ ID NO: 1301 - protein, 429 aa, Homo sapiens
MSGGVYGGDEVGALVFDIGSYTVRAGYAGEDCPKVDFPTAIGMVVERDDGSTLMEIDGDKGKQGGPTYYIDTNALRVPRENMEAISPLKNGMVEDWDSFQAILDHTYKMHVKSEASLHPVLMSEAPWNTRAKREKLTELMFEHYNIPAFFLCKTAVLTAFANGRSTGLILDSGATHTTAIPVHDGYVLQQGIVKSPLAGDFITMQCRELFQEMNIELVPPYMIASKEAVREGSPANWKRKEKLPQVTRSWHNYMCNCVIQDFQASVLQVSDSTYDEQVAAQMPTVHYEFPNGYNCDFGAERLKIPEGLFDPSNVKGLSGNTMLGVSHVVTTSVGMCDIDIRPGLYGSVIVAGGNTLIQSFTDRLNRELSQKTPPSMRLKLIANNTTVERRFSSWIGGSILASLGTFQQMWISKQEYEEGGKQCVERKCP

SEQ ID NO: 1302 - DNA, 5855 bp, Homo sapiens
agagtacgtgtttacagataaaactggtacactgacagaaaatgagatgcagtttcgggaatgttcaattaatggcatgaaataccaagaaattaatggtagacttgtacccgaaggaccaacaccagactcttcagaaggaaacttatcttatcttagtagtttatcccatcttaacaacttatcccatcttacaaccagttcctctttcagaaccagtcctgaaaatgaaactgaactaattaaagaacatgatctcttctttaaagcagtcagtctctgtcacactgtacagattagcaatgttcaaactgactgcactggtgatggtccctggcaatccaacctggcaccatcgcagttggagtactatgcatcttcaccagatgaaaaggctctagtagaagctgctgcaaggattggtattgtgtttattggcaattctgaagaaactatggaggttaaaactcttggaaaactggaacggtacaaactgcttcatattctggaatttgattcagatcgtaggagaatgagtgtaattgttcaggcaccttcaggtgagaagttattatttgctaaaggagctgagtcatcaattctccctaaatgtataggtggagaaatagaaaaaaccagaattcatgtagatgaatttgctttgaaagggctaagaactctgtgtatagcatatagaaaatttacatcaaaagagtatgaggaaatagataaacgcatatttgaagccaggactgccttgcagcagcgggaagagaaattggcagctgttttccagttcatagagaaagacctgatattacttggagccacagcagtagaagacagactacaagataaagttcgagaaactattgaagcattgagaatggctggtatcaaagtatgggtacttactggggataaacatgaaacagctgttagtgtgagtttatcatgtggccattttcatagaaccatgaacatccttgaacttataaaccagaaatcagacagcgagtgtgctgaacaattgaggcagcttgccagaagaattacagaggatcatgtgattcagcatgggctggtagtggatgggaccagcctatctcttgcactcagggagcatgaaaaactatttatggaagtttgcagaaattgttcagctgtattatgctgtcgtatggctccactgcagaaagcaaaagtaataagactaataaaaatatcacctgagaaacctataacattggctgttggtgatggtgctaatgacgtaagcatgatacaagaagcccatgttggcataggaatcatgggtaaagaaggaagacaggctgcaagaaacagtgactatgcaatagccagatttaagttcctctccaaattgctttttgttcatggtcatttttattatattagaatagctacccttgtacagtattttttttataagaatgtgtgctttatcacaccccagtttttatatcagttctactgtttgttttctcagcaaacattgtatgacagcgtgtacctgactttatacaatatttgttttacttccctacctattctgatatatagtcttttggaacagcatgtagaccctcatgtgttacaaaataagcccaccctttatcgagacattagtaaaaaccgcctcttaagtattaaaacatttctttattggaccatcctgggcttcagtcatgcctttattttcttttttggatcctatttactaatagggaaagatacatctctgcttggaaatggccagatgtttggaaactggacatttggcactttggtcttcacagtcatggttattacagtcacagtaaagatggctctggaaactcatttttggacttggatcaaccatctcgttacctggggatctattatattttattttgtattttccttgttttatggagggattctctggccatttttgggctcccagaatatgtattttgtgtttattcagctcctgtcaagtggttctgcttggtttgccataatcctcatggttgttacatgtctatttcttgatatcataaagaaggtctttgaccgacacctccaccctacaagtactgaaaaggcacagcttactgaaacaaatgcaggtatcaagtgcttggactccatgtgctgtttcccggaaggagaagcagcgtgtgcatctgttggaagaatgctggaacgagttataggaagatgtagtccaacccacatcagcagatcatggagtgcatcggatcctttctataccaacgacaggagcatcttgactctctccacaatggactcatctacttgttaaaggggcagtagtactttgtgggagccagttcacctcctttcctaaaattcagtgtgatcaccctgttaatggccacactagctctgaaattaatttccaaaatctttgtagtagttcatacccactcagagttataatggcaaacaaacagaaagcattagtacaagcccctcccaacacccttaatttgaatctgaacatgttaaaatttgagaataaagagacatttttcatctctttgtctggtttgtcccttgtgcttatgggactcctaatggcatttcagtctgttgctgaggccattatattttaatataaatgtagaaaaaagagagaaatcttagtaaagagtattttttagtattagcttgattattgactcttctatttaaatctgcttctgtaaattatgctgaaagtttgccttgagaactctatttttttattagagttatatttaaagcttttcatgggaaaagttaatgtgaatactgaggaattttggtccctcagtgacctgtgttgttaattcattaatgcattctgagttcacagagcaaattaggagaatcatttccaaccattatttactgcagtatggggagtaaatttataccaattcctctaactgtactgtaacacagcctgtaaagttagccatataaatgcaagggtatatcatatatacaaatcaggaatcaggtccgttcaccgaacttcaaattgatgtttactaatatttttgtgacagagtataaagaccctatagtgggtaaattagatactattagcatattattaatttaatgtctttatcattggatcttttgcatgctttaatctggttaacatatttaaatttgctttttttctctttacctgaaggctctgtgtatagtatttcatgacatcgttgtacagtttaactatatcaataaaaagtttggacagtatttaaatattgcaaatatgtttaattatacaaatcagaatagtatgggtaattaaatgaatacaaaaagaagagcctctttctgcagccgacttagacatgctcttccctttctataagctagattttagaataaagggtttcagttaataatcttattttcaggttatgtcatctaacttatagcaaactaccacaatacagtgagttctgccagtgtcccagtacaaggcatatttcaggtgtggctgtggaatgtaaaaatgctcaacttgtatcaggtaatgttagcaataaattaaatgctaagaatgattaatcgggtacatgttactgtaattaactcattgcacttcaaaacctaacttccatcctgaatttatcaagtagttcagtattgtcatttgtttttgttttattgaaaagtaatgttgtcttaagatttagaagtgattattagcttgagaactattacccagctctaagcaaataatgattgtatacatattaagataatggttaaatgcggttttaccaagttttcccttgaaaatgtaattcctttatggagatttattgtgcagccctaagcttccttcccatttcatgaatataaggcttctagaattggactggcaggggaaagaatggtagagacagaaattaagactttatccttgtttgcttgtaaactattattttcttgctaatgtaacatttgtctgttccagtgatgtaaggatattaagttattaagctaaatattaattttcaaaaatagtccttctttaacttagatatttcatagctggatttaggaagatctgttattctggaagtactaaaaagaataatacaacgtacaatgtctgcattcactaattcatgttccagaagaggaaataatgaagatatactcagtagagtactaggtgggaggatatggaaatttgctcataaaatctcttataaaacgtgcatataacaaaatgacacccagtaggcctgcattacatttacatgaccgtgtttatttgccatcaaataaactgagtactgacaccagacaaagactccaaagtcataaaatagcctatgaccaactgcagcaagacaggaggtcagctcgcctataatggtgcttaaagtgtgattgatgtaattttctgtactcaccatttgaagttagttaaggagaactttatttttttaaaaaaagtaaatggcaaccactagtgtgctcatcctgaactgttactccaaatccactccgtttttaaagcaaaattatcttgtgattttaagaaaagagttttctatttatttaagaaagtaacaatgcagtctgcaagctttcagtagttttctagtgctatattcatcctgtaaaactcttactacgtaaccagtaatcacaaggaaagtgtcccctttgcatatttctttaaaattctttctttggaaagtatgatgttgataattaacttacccttatctgccaaaaccagagcaaaatgctaaatacgttattgctaatcagtggtctcaaatcgatttgcctccctttgcctcgtctgagggctgtaagcctgaagatagtggcaagcaccaagtcagtttccaaaattgcccctcagctgctttaagtgactcagcaccctgcctcagcttcagcaggcgtaggctcaccctgggcggagcaaagtatgggccagggagaactacagctacgaagacctgctgtcgagttgagaaaaggggagaatttatggtctgaattttctaactgtcctctttcttgggtctaaagctcataatacacaaaggcttccagacctgagccacacccaggccctatcctgaacaggagactaaacagaggcaaatcaaccctaggaaatacttgcattctgccctacggttagtaccaggactgaggtcatttctactggaaaagattgtgagattgaacttatctgatcgcttgagactcctaataggcaggagtcaaggccactagaaaattgacagttaagagccaaaagtttttaaaatatgctactctgaaaaatctcgtgaaggctgtaggaaaagggagaatcttccatgttggtgtttttcctgtaaagatcagtttggggtatgatataagcaggtattaataaaaataacacaccaaagagttacgtaaaacatgttttattaattttggtccccacgtacagacattttatttctattttgaaatgagttatctattttcataaaagtaaaacactattaaagtgctgttttatgtgaaataacttgaatgttgttcctataaaaaatagatcataactcatgatatgtttgtaatcatggtaatttagatttttatgaggaatgagtatctggaaatattgtagcaatacttggtttaaaattttggacctgagacactgtggctgtctaatgtaatcctttaaaaattctctgcattgtcagtaaatgtagtatattattgtacagctactcataattttttaaagtttatgaagttatatttatcaaataaaaactttcctatat

SEQ ID NO: 1303 - protein, 761 aa, Homo sapiens
MQFRECSINGMKYQEINGRLVPEGPTPDSSEGNLSYLSSLSHLNNLSHLTTSSSFRTSPENETELIKEHDLFFKAVSLCHTVQISNVQTDCTGDGPWQSNLAPSQLEYYASSPDEKALVEAAARIGIVFIGNSEETMEVKTLGKLERYKLLHILEFDSDRRRMSVIVQAPSGEKLLFAKGAESSILPKCIGGEIEKTRIHVDEFALKGLRTLCIAYRKFTSKEYEEIDKRIFEARTALQQREEKLAAVFQFIEKDLILLGATAVEDRLQDKVRETIEALRMAGIKVWVLTGDKHETAVSVSLSCGHFHRTMNILELINQKSDSECAEQLRQLARRITEDHVIQHGLVVDGTSLSLALREHEKLFMEVCRNCSAVLCCRMAPLQKAKVIRLIKISPEKPITLAVGDGANDVSMIQEAHVGIGIMGKEGRQAARNSDYAIARFKFLSKLLFVHGHFYYIRIATLVQYFFYKNVCFITPQFLYQFYCLFSQQTLYDSVYLTLYNICFTSLPILIYSLLEQHVDPHVLQNKPTLYRDISKNRLLSIKTFLYWTILGFSHAFIFFFGSYLLIGKDTSLLGNGQMFGNWTFGTLVFTVMVITVTVKMALETHFWTWINHLVTWGSIIFYFVFSLFYGGILWPFLGSQNMYFVFIQLLSSGSAWFAIILMVVTCLFLDIIKKVFDRHLHPTSTEKAQLTETNAGIKCLDSMCCFPEGEAACASVGRMLERVIGRCSPTHISRSWSASDPFYTNDRSILTLSTMDSSTC

SEQ ID NO: 1304 - DNA, 2550 bp, Homo sapiens
tttagcagtctgtgatgatcagcaaaaaagcacataaagtaaaaattagttgaccatgctaaattcaattctggaatttttttttatttgggcatttctagaactttttacatttgaaagtacatgatgagtattagtaacgatgacttatgtataatcagaatctttatgacaatttagttttacaaggtcagaagagatgagtttgctaaacccagctgtgatacctcagttggaaagggaattcaaaggtatgctttgtagaacagaaaagtatagtttttttttcatgaactttaatcattttctgtttttcctctatgtgagtcagctacaaaagtggtctaatttttacaacagtagaacttcctccttttctactgtaatcttcccactgactttactgcacaggtatgaaatactagtgtattggatcttcagtaacctttttatttcctagatgattgaaatataggtatttactccatttaaaccaggtgataagatgatgtaaatactcagggagggtattaacttgttacttttgctcgtttggggtgtaaagtgccatgactgaataatcttcaattcatgattctagagtaagtttaatttggaaaaaggggcttcacacatggtggtggttgaacattgattcttttatacttaaaaagatgaaaatgttttgtggactgatacattttatcttactgaatatgaattgtttatgtatctctactgtcaaatagcctttttgaaactcaggaaagacaaaggttcaattacaccacttttgtcaataagcaaaccaggtattttttttttctcctgttgtctggatatggcaatagattttttaaattgctgtgagaacccatatatgaaaagagaggagttgaattgtgtgtgccttttatgtcttgagatttatatgtggaaaagacgacatctacttcaaactgtatttttttcgtttttttttttttttggggaaggggggagaacggggtcttgctctgtcgcccaggctggagtgcagtggcgcgatctcagctgactgcaacctccacctcccgggttcaagggattctgcctcagcctcccgagtagctgagaccacaggtgcgtgccaccacacccggctaatttttttgtatttttagtagagacggggtttagtagagacggatcactcctgaccacgtgatccgcccacctcggcctcccaaagtgctgggattacaggcgtgagccaccacccccggcctgtattttcagagaggagagcttggtgtttttgtggtgccaagtggtaagataatgtctctttgaggcttcctatggactgcctttattttagtaaactcaagacaccagttaacctcaacagagttttggccttattagaatttgttgtgcatcttattgaaagccaggtttacatcacctcaccccattattctttttagttaaataaatttaccatgccaagtaaccagaatggagcaaattggttgatctttaaggcagtaggtttgactagctagctatcattattgtcacatctaatgctaggcaccagaaaccatttgagccaggagtgtgaatgaataattccagagacactttagacattttttaatgttttatatgaacattttacatttgtgtgattgccttagatattaaattttcctagtgctgataaaaacagcaacattcataacttattttatatattgttccaaagaaaagaatttgttttaatggtttcaaaataactgcacctgaatttgtttatgtgccttaagttctctagtgctatttcaacttttttttcaatctaaatgaagcttaccttagataaggttcatatttgtttcctatagagtaaataaacttccccttcttaaattgtgtaataagcaccaacgtgtggttgcttggcagaatgagaatgttaagggagattgttggatgtttggagtttcattatattttttgtttttattttttgatacctaggtgctttttaaaatattcagacaaatatctatcttacattgattaaacccgtgtaaattcatttgcagtatctacatcgaatgtcaaaaaagtatacttatttttgttccatacttatgtacaattttttccctcttcaggctttttcatttacctttttgaaaaagcacttactctccccttccctatcacccctcccccaaggtttctttatttaaatttttattgagagttgttggagctctaagacaatacaaatttagagttgaacaaaagtataatctgctttacaactagtatagacctaaggtcatttgctttcaattagaggctccagagtcttcatagtggaaagaatgctttgtatttaattgttcttagttaagttgtagcacgtgaatacttacttacatgttttgtttaaatatacttcttgcatagtttaattttttaaaagttgtatctaataaaatgtcttttaaccattattacttgactatatggttgtattaaattttgtttacg

SEQ ID NO: 1305 - protein, 109 aa, Homo sapiens
MYLYCQIAFLKLRKDKGSITPLLSISKPGIFFFSCCLDMAIDFLNCCENPYMKREELNCVCLLCLEIYMWKRRHLLQTVFFSFFFFFGEGGRTGSCSVAQAGVQWRDLS

SEQ ID NO: 1306 - DNA, 1991 bp, Homo sapiens
gtctggaatcaagcgaaccatcaaagaaaccgaccctgattacgaggatgtatctgtggcccttccaaataagcggcataaagcaattgagaattcagctcgagatgctgctgtgcagaagattgagactattatcaaagaacagtttgctcttgaaatgaagaataaggaacatgaaattgaagtcattgaccagcgactgattgaagcaagaaggatgatggataaactgcgtgcctgcattgtagcaaactactatgcttctgcaggtcttctaaaagtttctgagggatcaaagacatgtgatacgatggtttttaatcatcctgctatcaagaaatttttggaatcaccatctaggtcatcatctcctgccaatcagagagcagaaacaccatcagccaatcattcagaaagtgattctttatctcagcacaatgacttcttatctgacaaagataataacagcaatatggatatagaggaaagactctcaaacaacatggagcagagaccaagccgaaatactggaagggatacttctagaattactggctcccataaaacagaacagcggaatgctgatctcacagatgagacttcacgactttttgtaaagaaaacaatagtagtgggcaatgtgtccaagtatatacctccggataagagggaagaaaatgaccagtcaactcataagtggatggtatatgtccgagggtcccgtagagaacccagcattaatcattttgtcaagaaggtttggttcttccttcatcctagctataaaccaaatgaccttgtggaagttagagagcctccttttcacctgaccagaagaggctggggtgagtttcccgtcagagttcaagttcattttaaggacagccagctcaaaccactcagcgtaaacacatctggaggggtgcagacgatcctgatgcctgtgaataaagtggttcagtcattttctaccagcaagccacctgccattctgcctgtagctgccccaactccagttgtccccagctctgctccagcagctgttgcaaaagtgaagactgaaccagaaacacctggaccgagttgcctctctcaggagggtcagacagcagtgaaaacagaagaaagttctgagctgggaaactatgtcattaagatagaccatttagaaactatccagcaactcctaacttagtaaagaagattccattaatcactgcaaaaagtgaagatgccagctgcttttctgcaaagtctgtggagcagtactatggctggaacattggaaaaaggagagccgctgagtggcaaagagcaatgacaatgcgaaaagtcttacaagaaatcctggagaagaatccgagatttcaccacctgactcccctcaaaaccaagcacatcgctcactggtgccgctgtcatggctacaccccaccggaccctgagagcctgaggaatgacggggactccatcgaggacgtgctgacccagatcgacagcgagcccgagtgcccatcatcattctcctctgctgacaacctctgccgcaaactggaggacctgcaacagttccagccctggtgacagaggagaccccgtctcaaaaattgattgatcaattcagcatctgagggctgcaagtacagaaggaatctattctcagcagggcatagggcacgcactggcttaacagtttagtatataaggctcaaatagtctatacctgaactgctataagcaaggtcgatagggaagtggatagattgcttcagcaaagtgaactgtgagatctccaggacagagggagaaagatctgatccaaatgagaacagattggttattgcaggtatcacagcctaaagaaattatctttttgcaaaagaaatattaaatgatttagcagtctccacgtgtgttaatgtttcaaacgtgtatcataatgtgtataattgtgtaacaaaattgtctacaataaatcttttggtatttgt

SEQ ID NO: 1307 - protein, 345 aa, Homo sapiens
MKNKEHEIEVIDQRLIEARRMMDKLRACIVANYYASAGLLKVSEGSKTCDTMVFNHPAIKKFLESPSRSSSPANQRAETPSANHSESDSLSQHNDFLSDKDNNSNMDIEERLSNNMEQRPSRNTGRDTSRITGSHKTEQRNADLTDETSRLFVKKTIVVGNVSKYIPPDKREENDQSTHKWMVYVRGSRREPSINHFVKKVWFFLHPSYKPNDLVEVREPPFHLTRRGWGEFPVRVQVHFKDSQLKPLSVNTSGGVQTILMPVNKVVQSFSTSKPPAILPVAAPTPVVPSSAPAAVAKVKTEPETPGPSCLSQEGQTAVKTEESSELGNYVIKIDHLETIQQLLT

SEQ ID NO: 1308 - DNA, 753 bp, Homo sapiens
atgtctagagcccttgatgtcctgcaaatgaaggaggaggatgtccttaagttccttgcagcaggaacccacttaggtggtaccaaccttgacttccaaatggacaatactggccagagggctgtgctgaagtttgctgctgccactggagccactcaaattgttggccgcttcactcctggaaccttcactagccagacccaggcagccttcagggagccacggcttctagtggttactgatcccagggctgaccaccagcctctcacagagacatcttatgttaacctacctaccattgctctatgtcacacagattttcctctgcgctatgtggacattgccatcacatgcaacaacaagggagctccctcagtgggtccgagctggtggatgctggccctggaagttctgcgcgtgtgtggcaccatttccctcgaacacccatgggaggtcatgcctgatctctacttctacagagatcctgaagagattggaaaagaggagcaggttgctgctgaaaagactgtgaccaaggaggaatttcagggcaaatggactgctccagctcctgagttcaccgctattcagcctgaggttggagactggtctgatggtgtacaggtgccctctgtgcctattcatcaggtccctactgaagactggagtgctcagcctgccacagaagactggtctgcagctcccactgctcaggccactgaatgggtagaaacaaccactgaatggtcttaa

SEQ ID NO: 1309 - protein, 250 aa, Homo sapiens
MSRALDVLQMKEEDVLKFLAAGTHLGGTNLDFQMDNTGQRAVLKFAAATGATQIVGRFTPGTFTSQTQAAFREPRLLVVTDPRADHQPLTETSYVNLPTIALCHTDFPLRYVDIAITCNNKGAPSVGPSWWMLALEVLRVCGTISLEHPWEVMPDLYFYRDPEEIGKEEQVAAEKTVTKEEFQGKWTAPAPEFTAIQPEVGDWSDGVQVPSVPIHQVPTEDWSAQPATEDWSAAPTAQATEWVETTTEWS

SEQ ID NO: 1310 - DNA, 2581 bp, Homo sapiens
tgcgtgcggtggcagcttccttgcggaagtggtgaccgtgagagaagaagatggcggcccctgtagtggcgccgcctggtgtggtggttagtcgggctaacaagcgcagcggcgcggggccgggaggcagcggtggcgggggagccagaggggcggaggaggaaccgccgccgcccctacaagcagttctggtggccgatagcttcgatcgccgcttcttccccatctccaaggaccagcctcgggtcctcttgcccctggccaatgtggcattaattgactacactctggaattcctgactgccacaggtgtacaggaaacatttgtcttttgttgctggaaagctgctcaaatcaaagaacatttactgaagtcaaagtggtgccgccctacatctctcaatgtggttcgaataattacatcagagctctatcgatcactgggagatgtcctccgtgatgttgatgccaaggctttggtgcgctctgactttcttctggtgtatggggatgtcatctcaaacatcaatatcaccagagcccttgaggaacacaggttgagacggaagctagaaaaaaatgtttctgtgatgacgatgatcttcaaggagtcatcccccagccacccaactcgttgccacgaagacaatgtggtagtggctgtggatagtaccacaaacagggttctccattttcagaagacccagggtctccggcgttttgcatttcctctgagcctgtttcagggcagtagtgatggagtggaggttcgatatgatttactggattgtcatatcagcatctgttctcctcaggtggcacaactctttacagacaactttgactaccaaactcgagatgactttgtgcgaggtctcttagtgaatgaggagatcctagggaaccagatccacatgcacgtaacagctaaggaatatggtgcccgtgtctccaacctacacatgtactcagctgtctgtgctgacgtcatccgccgatgggtctaccctctcaccccagaggcgaacttcactgacagcaccacccagagctgcactcattcccggcacaacatctaccgagggcctgaggtcagcctgggccatggcagcatcctagaggaaaatgtgctcctgggctctggcactgtcattggcagcaattgctttatcaccaacagtgtcattggccccggctgccacattggtgataacgtggtgctggaccagacctacctgtggcagggtgttcgagtggcggctggagcacagatccatcagtctctgctttgtgacaatgctgaggtcaaggaacgagtgacactgaaaccacgctctgtcctcacttcccaggtggtcgtgggcccaaatatcacgctgcctgagggctcggtgatctctttgcaccctccagatgcagaggaagatgaagatgatggcgagttcagtgatgattctggggctgaccaagaaaaggacaaagtgaagatgaaaggttacaatccagcagaagtaggagctgctggcaagggctacctctggaaagctgcaggcatgaacatggaggaagaggaggaactgcagcagaatctgtggggactcaagatcaacatggaagaagagagtgaaagtgaaagtgagcaaagtatggattctgaggagccggacagccggggaggctcccctcagatggatgacatcaaagtgttccagaatgaagttttaggaacactacagcggggcaaagaggagaacatttcttgtgacaatctcgtcctggaaatcaactctctcaagtatgcctataacgtaagtctaaaggaggtgatgcaggtactgagccacgtggtcctggagttccccctgcaacagatggattccccgcttgactcaagccgctactgtgccctgctgcttcctctgctaaaggcctggagccctgtttttaggaactacataaagcgcgcagccgaccatttggaagcgttagcagccattgaggacttcttcctagagcatgaagctcttggtatttccatggccaaggtactgatggctttctaccagctggagatcctggctgaggaaacaattctgagctggttcagccaaagagatacaactgacaagggccagcagttgcgcaagaatcaacagctgcagaggttcatccagtggctaaaagaggcagaagaggagtcatctgaagatgactgaagtcacactgcctgctcctttgggtgtgattgagtgccctcctggctcctgggctgggacaagtgaggaactagctgcagagggatgagtgaccaccatccaggctgagactgaaaggagcagaggctggaactacagtattctttcccctgctagcaaccatgtgcctcccatcctgactgtggagttgggatgtggaagtggggctggaacaaagcttctgcctagggaggagctaagcaggcccggcagttggaggaaggccagaggaacagctttgtgctccggctttccctcagggaacagcagagagcagttggctctttctgctgcttgtatatgttaatattaaaagagagtggtgt

SEQ ID NO: 1311 - protein, 721 aa, Homo sapiens
MAAPVVAPPGVVVSRANKRSGAGPGGSGGGGARGAEEEPPPPLQAVLVADSFDRRFFPISKDQPRVLLPLANVALIDYTLEFLTATGVQETFVFCCWKAAQIKEHLLKSKWCRPTSLNVVRIITSELYRSLGDVLRDVDAKALVRSDFLLVYGDVISNINITRALEEHRLRRKLEKNVSVMTMIFKESSPSHPTRCHEDNVVVAVDSTTNRVLHFQKTQGLRRFAFPLSLFQGSSDGVEVRYDLLDCHISICSPQVAQLFTDNFDYQTRDDFVRGLLVNEEILGNQIHMHVTAKEYGARVSNLHMYSAVCADVIRRWVYPLTPEANFTDSTTQSCTHSRHNIYRGPEVSLGHGSILEENVLLGSGTVIGSNCFITNSVIGPGCHIGDNVVLDQTYLWQGVRVAAGAQIHQSLLCDNAEVKERVTLKPRSVLTSQVVVGPNITLPEGSVISLHPPDAEEDEDDGEFSDDSGADQEKDKVKMKGYNPAEVGAAGKGYLWKAAGMNMEEEEELQQNLWGLKINMEEESESESEQSMDSEEPDSRGGSPQMDDIKVFQNEVLGTLQRGKEENISCDNLVLEINSLKYAYNVSLKEVMQVLSHVVLEFPLQQMDSPLDSSRYCALLLPLLKAWSPVFRNYIKRAADHLEALAAIEDFFLEHEALGISMAKVLMAFYQLEILAEETILSWFSQRDTTDKGQQLRKNQQLQRFIQWLKEAEEESSEDD

SEQ ID NO: 1312 - DNA, 556 bp, Homo sapiens
atggcggcccctgtagtggcgccgcctggtgtggtggttagtcgggctaacaagcgcagcggcgcggggccgggaggcagcggtggcgggggagccagaggggcggaggaggaaccgccgccgcccctacaagcagttctggtggccgatagcttcgatcgccgcttcttccccatctccaaggaccagcctcgggtcctcttgcccctggccaatgtggcattaattgactacactctggaattcctgactgccacaggtgtacaggaaacatttgtcttttgttgctggaaagctgctcaaatcaaagaacatttactgtaaggccctgcaacttttctttccatgtttcgccatctttttccagttttttcaggatgaatgtaactaaggggaaatgtgagaggggaaaaatgtgtctacttagatgtcattgtaagttctaagggtattttctacacttatcaggaggtgagcagctgaaactttgtatctgtctgtcttgggttttctgtgacaaagattaaagaataaacttgggttttttctgaatctc

SEQ ID NO: 1313 - DNA, 5126 bp, Homo sapiens
caagcgacacaaatgaacacgccttctcagccccgccagcacttctaccctagccgggcccagcccccgagcagtgcagcctcccgagtgcagagtgcagcccctgcccgccctggcccagctgcccatgtctaccctgctggatcccaagtaatgatgatcccttcccagatctcctacccagcctcccagggggcctactacatccctggacaggggcgttccacatacgttgtcccgacacagcagtaccctgtgcagccaggagccccaggcttctatccaggtgcaagccctacagaatttgggacctacgctggcgcctactatccagcccaaggggtgcagcagtttcccactggcgtggcccccaccccagttttgatgaaccagccaccccagattgctcccaagagggagcgtaagacgatccgaattcgagatccaaaccaaggaggaaaggatatcacagaggagatcatgtctggggcccgcactgcctccacacccacccctccccagacgggaggcggtctggagcctcaagctaatggggagacgccccaggttgctgtcattgtccggccagatgaccggtcacagggagcaatcattgctgaccggccagggctgcctggcccagagcatagcccttcagaatcccagccttcgtcgccttctccgaccccatcaccatccccagtcttggaaccggggtctgagcctaatctcgcagtcctctctattcctggggacactatgacaactatacaaatgtctgtagaagaatcaacccccatctcccgtgaaactggggagccatatcgcctctctccagaacccactcctctcgccgaacccatactggaagtagaagtgacacttagcaaaccggttccagaatctgagttttcttccagtcctctccaggctcccacccctttggcatctcacacagtggaaattcatgagcctaatggcatggtcccatctgaagatctggaaccagaggtggagtcaagcccagagcttgctcctcccccagcttgcccctccgaatcccctgtgcccattgctccaactgcccaacctgaggaactgctcaacggagccccctcgccaccagctgtggacttaagcccagtcagtgagccagaggagcaggccaaggaggtgacagcatcaatggcgccccccaccatcccctctgctactccagctacggctccttcagctacttccccagctcaggaggaggaaatggaagaagaagaagaagaggaagaaggagaagcaggagaagcaggagaagctgagagtgagaaaggaggagaggaactgctccccccagagagtacccctattccagccaacttgtctcagaatttggaggcagcagcagccactcaagtggcagtatctgtgccaaagaggagacggaaaattaaggagctaaataagaaggaggctgttggagaccttctggatgccttcaaggaggcgaacccggcagtaccagaggtggaaaatcagcctcctgcaggcagcaatccaggcccagagtctgagggcagtggtgtgcccccacgtcctgaggaagcagatgagacctgggactcaaaggaagacaaaattcacaatgctgagaacatccagcccggggaacagaagtatgaatataagtcagatcagtggaagcctctaaacctagaggagaaaaaacgttacgaccgtgagttcctgcttggttttcagttcatctttgccagtatgcagaagccagagggattgccacatatcagtgacgtggtgctggacaaggccaataaaacaccactgcggccactggatcccactagactacaaggcataaattgtggcccagacttcactccatcctttgccaaccttggccggacaacccttagcacccgtgggcccccaaggggtgggccaggtggggagctgccccgtgggccggctggcctgggaccccggcgctctcagcagggaccccgaaaagaaccacgcaagatcattgccacagtgttaatgaccgaagatataaaactgaacaaagcagagaaagcctggaaacccagcagcaagcggacggcggctgataaggatcgaggggaagaagatgctgatggcagcaaaacccaggacctattccgcagggtgcgctccatcctgaataaactgacaccccagatgttccagcagctgatgaagcaagtgacgcagctggccatcgacaccgaggaacgcctcaaaggggtcattgacctcatttttgagaaggccatttcagagcccaacttctctgtggcctatgccaacatgtgccgctgcctcatggcgctgaaagtgcccactacggaaaagccaacagtgactgtgaacttccgaaagctgttgttgaatcgatgtcagaaggagtttgagaaagacaaagatgatgatgaggtttttgagaagaagcaaaaagagatggatgaagctgctacggcagaggaacgaggacgcctgaaggaagagctggaagaggctcgggacatagcccggcggcgctctttagggaatatcaagtttattggagagttgttcaaactgaagatgttaacagaggcaataatgcatgactgtgtggtcaaactgcttaagaaccatgatgaagagtcccttgagtgcctttgtcgtctgctcaccaccattggcaaagacctggactttgaaaaagccaagccccgaatggatcagtatttcaaccagatggaaaaaatcattaaagaaaagaagacgtcatcccgcatccgctttatgctgcaggacgtgctggatctgcgagggagcaattgggtgccacgccgaggggatcagggtcccaagaccattgaccagatccataaggaggctgagatggaagaacatcgagagcacatcaaagtgcagcagctcatggccaagggcagtgacaagcgtcggggcggtcctccaggccctcccatcagccgtggacttccccttgtggatgatggtggctggaacacagttcccatcagcaaaggtagccgccccattgacacctcacgactcaccaagatcaccaagcctggctccatcgattctaacaaccagctctttgcacctggagggcgactgagctggggcaagggcagcagcggaggctcaggagccaagccctcagacgcagcatcagaagctgctcgcccagctactagtactttgaatcgcttctcagcccttcaacaagcggtacccacagaaagcacagataatagacgtgtggtgcagaggagtagcttgagccgagaacgaggcgagaaagctggagaccgaggagaccgcctagagcggagtgaacggggaggggaccgtggggaccggcttgatcgtgcgcggacacctgctaccaagcggagcttcagcaaggaagtggaggagcggagtagagaacggccctcccagcctgaggggctgcgcaaggcagctagcctcacggaggatcgggaccgtgggcgggatgccgtgaagcgagaagctgccctacccccagtgagccccctgaaggcggctctctctgaggaggagttagagaagaaatccaaggctatcattgaggaatatctccatctcaatgacatgaaagtaggcagtccagtgcgtgcaggagctggcctcaccctccttgctcttcatctttgtacggcatggtgtcgagtctacgctggagcgcagtgccattgctcgtgagcatatggggcagctgctgcaccagctgctctgtgctgggcatctgtctactgctcagtactaccaagggttgtatgaaatcttggaattggctgaggacatggaaattgacatcccccacgtgtggctctacctagcggaactggtaacacccattctgcaggaaggtggggtgcccatgggggagctgttcagggagattacaaagcctctgagaccgttgggcaaagctgcttccctgttgctggagatcctgggcctcctgtgcaaaagcatgggtcctaaaaaggtggggacgctgtggcgagaagccgggcttagctggaaggaatttctacctgaaggccaggacattggtgcattcgtcgctgaacagaaggtggagtataccctgggagaggagtcggaagcccctggccagagggcactcccctccgaggagctgaacaggcagctggagaagctgctgaaggagggcagcagtaaccagcgggtgttcgactggatagaggccaacctgagtgagcagcagatagtatccaacacgttagttcgagccctcatgacggctgtctgctattctgcaattatttttgagactcccctccgagtggacgttgcagtgctgaaagcgcgagcgaagctgctgcagaaatacctgtgtgacgagcagaaggagctacaggcgctctacgccctccaggcccttgtagtgaccttagaacagcctcccaacctgctgcggatgttctttgacgcactgtatgacgaggacgtggtgaaggaggatgccttctacagttgggagagtagcaaggaccccgctgagcagcagggcaagggtgtggcccttaaatctgtcacagccttcttcaagtggctccgtgaagcagaggaggagtctgaccacaactgagggctggtggggccggggacctggagccccatggacacacagatggcccggctagccgcctggactgcaggggggcggcagcagcggcggtggcagtgggtgcctgtagtgtgatgtgtctgaactaataaagtggctgaagaggcaggatggcttggggctgcctgggcccccctccaggatgccgccaggtgtccctctcctccccctggggcacagagatatattatatataaagtcttgaaatttggtgtgtcttggggtggggaggggcaccaacgcctgcccctggggtccttttttttattttctgaaaatcactctcgggactgccgtcctcgctgctgggggcatatgccccagcccctgtaccacccctgctgttgcctgggcagggggaagggggggcacggtgcctgtaattattaaacat

SEQ ID NO: 1314 - DNA, 5254 bp, Homo sapiens
gccgcggccaccggaagagtcgcggtcgccagtccagtcgggagagtggggagcggaagcggcggccgcggcggcggcgggcggcgctgggacccggtagcggccggagaacaagggagctggcgccgccagcagccgccgagctgggttgagccgctgggccgcgccgcgcgccgccgccgtctgggaggctcggcccggccgcccgagcaggccgcgcgcgggccgccgggcccgaggccagagccatgggcgagaccaagatcatctaccacttggatgggcaggagacgccgtaccttgtgaagctgcccctgcccgccgagcgcgtcaccttggcggactttaagggcgttttgcagcgacccagctataagttcttcttcaagtctatggacgacgatttcggagtggtgaaggaggagatctcggatgacaatgccaagctaccatgcttcaatggccgggtggtgtcctggctggtgtcagctgagggctcacacccagacccagcccccttctgtgctgataacccatcggagctgccaccacctatggagcgcacgggaggcatcggggactcccgacccccatccttccaccctcatgctggtgggggcagccaggagaacctggacaatgacacagagacggactctttggtgtctgcccagcgagagcggccacgccggagggatggcccagagcatgcaacccggctaaatggaactgcgaagggggaacggcggcgagaaccagggggttatgatagctcatccacccttatgagcagtgagctggagaccaccagcttctttgactcagatgaggatgactccaccagcaggttcagcagctccacagaacagagcagtgcctcacgcctgatgagaagacacaagcggcggcggcggaagcagaaggtttctcggattgagcggtcctcgtccttcagcagcatcacggactccaccatgtcactcaacatcatcacggtcactctcaacatggaaaaatataacttcttgggcatctccattgtgggccaaagcaacgagcgtggtgacggcggcatctacattggctctatcatgaagggtggggccgtggctgctgatggacgcatcgagccaggagatatgttgttacaggtaaacgagatcaactttgagaacatgagtaatgacgatgcagtccgggtactgcgggagattgtgcacaaaccggggcccatcaccctgactgtagccaagtgctgggacccaagtccacgtggttgcttcacattgcccaggagcgagcccatccggcccattgaccctgcggcctgggtctcccacactgcagccatgaccggcaccttccctgcatacggcatgagcccctccctgagcaccatcacctccaccagctcctccatcaccagttccatccctgacacagagcgcctagacgacttccacttgtccatccacagtgacatggctgccatcgtaaaagccatggcctcccctgaatcagggttggaggtccgtgaccgcatgtggctcaagattaccatccctaatgctttcatcggctcagatgtggtggactggctgtaccacaatgtggaaggcttcacggaccggagggaggcccgcaagtatgccagcaacctgctgaaagctggcttcatccgccataccgtcaacaagatcaccttctccgagcagtgctactacatcttcggtgacctctgcggcaacatggccaacctgtctctccacgatcacgatggctccagtggcgcctctgaccaggacacactggcccctttgccgcacccgggggccgccccttggcccatggctttcccgtaccagtacccgccacccccgcacccatacaacccgcacccgggcttcccggagctgggctacagctacggcgggggcagcgccagcagtcagcacagcgaaggcagtcggagcagtggctccaaccgtagcggcagcgatcggaggaaggagaaggacccgaaggccggggactccaagtccgggggcagcggcagcgaatcggaccacaccacacgcagcagcctgcgggggccgcgggagcgggcgcccagcgagcgctcagggccggcggccagcgagcacagccaccgcagccaccattccctggccagcagccttcgcagccaccacacacacccgagctacggtcctcccggagtgccccctctctacggcccccccatgctgatgatgcccccgccgcccgcggccatggggcccccaggagcccctccgggccgcgacctggcctcagtgcccccggaactgaccgccagcagacagtccttccgcatggccatgggaaaccccagtgagttctttgtggatgtgatgtgagcagggcccctcccccagctccattccgctcccaccccagccggctgcgttcctctctccatccgtccgtcttttttactttgtctggtacctgaaagggaaataaaaggaactaaatccaggtgcgctaactgctcgcagggtgctgcgagggtggggtgcacctaccgattggctctgcagccccctaacctgcctctggccccagttcgtttcctctgcccactaatccctgcgcaggacttcccaggaccccttttgtctctgggaccagacttgttggtgctaccccttactcccctctgcaacccccattttgggagttgaccccagcaatgaccttggtggcacgctcactccctcattctctcgtttcccctttagctccctttcaccatttattcagctacatcatccctctattaaccccaccccatcaggcacgtgtgcaaacctcttgactttaccccacattactgaaaccaaaatatatttgcttcatctgcccctactaaccatccccctgcctgctgcctcagtcctgcaacctaaagctgtagtcgcctccaatagccatccatgccatccctgcctgtgcctagatcagaggcccagagggccccctcagttgcctgagcagctggtggcttccagggagcatctctgctctacccctgccccatgcctgccctgcgtgctggttccttcagacccctaaccctactaaccagcaggctcatctcacctccaggcctgaaacatttcttttctttcttttttcctcccccaattttccctgggcctggagcagccaagaatttcgggctgtttgactttctgtgagcccccagcgaggggaggcccagcctccgaggagaccaggaaccctgcttcagcagcccctcagggcttcccaaggatgtccagcccccacacccacacgttaacataatgagtcactaggcttctggggagggcccaacttcacccatgcatgagagactctcctcctttccagagagaatcggatcgcaccacgtgtggcagcctgcggcggggggaggggggcctctttagctctctttatctttctctctcactcatgtatgcatacatgcacagagatgcatacacaggtgcctatgcaagttcatttaagcctcagggctggtccctgcccaaagggctggaccctcctaatcctctcctaggttgtggggctggtcccctgacacccttctccccttcctggtagaccttaaacctcgcacacatgtccccagcattttctcacctggataaagcccataagctgggtctcaggctgggctcagcaaaggactcgccttgcaaccgacaggccattcccacccccacacacaacctcccctgttttcacattcaccatggcatcccagagcaaggacacaggagcccacaggccagttgaggttgggcaaggagacttccaggacttccagacagagtaccaggttttatttttcaccttattctctactttaaacaaatcataactttctctttaagcctctgctataaattctcctggctctcctgggcttccatattttgggggctggggtgtcaaaagtgagatgaagttcttagctccaggttttggggtaaaccaaggtaggaacattttggcatttatttcaattaacaatacttccttggacgggtgcggtggctcacgtctgtaatcccagcactttgggaggctgagacaggtggatcacttgaggtcgggagttcgagaccagcctggccaacatagcaaaaccctgtctctactaaaaatacaaaaattagatgggtgttttggcacctgcctgtaatctcagctactcaggaggctgaggcacaagaatcgcttgaatccaggaagcaagcggaggttgcagtgagttgagatcgcactccagcctgggtgacagagtgagattctgtctcaaaagcaaactaacaaagaaaaacaatacttcctggggttttggtgtgcagagggctttgttggaagtgtgactcaatcttgcctgccttctgggagctctagaattgttcccaacccagtccatggcttctagccaccactacagggctgtttcatgtacttctctctctgactctgtcttgtccgactctcttgagaatttctcaacgattgctcatgcctgtcagtatcagtgcttccatcgttccatctttgattcacttctctttcctttctatttactcccaaaatggagtcattcatcctgatgtcctcaattgctgctgatatgctggtgattcccaaatacatagctccaacccccaacttcccccagactttagatctgtattggtattacctactggacatctctatggacagttccgtatagactcaactcatctgcccaaccaagtatgttcctcctgaattcctctcctggttacttcatcacaatctacataggctcaccagctagaaacatttatgagcttacattccttcttcccatatcttatcagcatatcatatccatttcactccaacactctgtcttgaatttggccctccctctcccctctctactttaattcattggagcatgggatttggagttaggtggttttgggtttgaattccagctctactatttttggttgtgtgatagagttatttaacctctctgagcctcagttccctcgtatgtaaaatgatgataataatacctacctcacagggttgttgtgaggatttaaattagatattgtacgaaaagtgcctagcacagtgcctggcacacagtagagtaggtgctcaataaatggtagctattattatt

SEQ ID NO: 1315 - DNA, 1917 bp, Homo sapiens
ccgaggcagcgggcagacgagcagggggcgggcggacatcttgggatccggagagtggccgggccggcagagcagggggccgaggacaccaggtctgttctcagagcgatgggccgcggagactgatctgccgccatgattggaggcttattcatctataatcacaagggggaggtgctcatctcccgagtctaccgagatgacatcgggaggaacgcagtggatgcctttcgggtcaatgttatccatgcccggcagcaggtgcgcagccccgtcaccaacattgctcgcaccagcttcttccacgttaagcggtccaacatttggctggcagcagtcaccaagcagaatgtcaacgctgccatggtcttcgaattcctctataagatgtgtgacgtgatggctgcctactttggcaagatcagcgaggaaaacatcaagaacaattttgtgctcatatatgagctgctggatgagattctagactttggctacccacagaattccgagacaggcgcgctgaaaaccttcatcacgcagcagggcatcaagagtcagatgtagacaaaagaagagcagtcacagatcaccagccaggtaactgggcagattggctggcggcgagagggtatcaagtatcgtcggaatgagctcttcctggatgtgctggagagtgtgaacctgctcatgtccccacaagggcaggtgctgagtgcccatgtgtcgggccgggtggtgatgaagagctacctgagtggcatgcctgaatgcaagtttgggatgaatgacaagattgttattgaaaagcagggcaaaggcacagctgatgaaacaagcaagagcgggaagcaatcaattgccattgatgactgcaccttccaccagtgtgtgcgactcagcaagtttgactctgaacgcagcatcagctttatcccgccagatggagagtttgagcttatgaggtatcgcacaaccaaggacatcatccttcccttccgggtgatcccgctagtgcgagaagtgggacgcaccaaactggaggtcaaggtggtcatcaagtccaactttaaaccctcactgctggctcagaagatcgaggtgaggatcccaaccccactgaacacaagcggggtgcaggtgatctgcatgaaggggaaggccaagtacaaggccagcgagaatgccatcgtgtggaagatcaagcgcatggcaggcatgaaggaatcgcagatcagcgcagagattgagcttctgcctaccaacgacaagaagaaatgggctcgaccccccatttccatgaactttgaggtgccattcgcgccctctggcctcaaggtgcgctacttgaaggtgtttgaaccgaagctgaactacagcgaccatgatgtcatcaaatgggtgcgctacattggccgcagtggcatttatgaaactcgctgctagctgccactaggcagctagcccacctccccagccaccctcctccacaggtccaggtgccgctccctcccccaccacacactagtgtctcctccctcctgctttgctgccttccctttgcaccagcccgagtctaggtctgggccaagcacattacaagtgggaccggtggagcagcccctgggctccctgggcaggggagttctgaggctcctgctctcccatccacctgtctgtcctggcctaatgccaggctctgagttctgtgaccaaagccaggtgggttccctttccttcccacccctgtggccacagctctggagtgggagggttggttgcccctcacctcagagctcccccaaaggccagtaatggatccccggcctcagtccctactctgctttgggatagtgtgagcttcattttgtacacgtgtgacttcgtccagttacaaacccaataaactctgtagagtgg

SEQ ID NO: 1316 - DNA, 1463 bp, Homo sapiens
ggtgggcccacacaagcggcgcaccgttaagatggcggctgggctgcggaaacgcggccggtccggttccgcggcccaggcagagggactctgcaagcaatggctgcagcgcgcctggcaagagcggcgcctgctgctgcgggagccgcgctacacgctgctggtggccgcctgcctctgcctggcggaggtgggcatcaccttctgggtcattcacagggtggcatacacagagattgactggaaggcctacatggccgaggtagaaggcgtcatcaatggtacctatgactatacccaactgcagggtgacaccggaccacttgtgtacccagctggtttcgtgtacatctttatggggttgtactatgccaccagccgaggcactgacatccgcatggcccagaacatctttgctgtgctctacctggctaccttgctgcttgtcttcttgatctatcaccagacctgcaaggtacctcccttcgtctttttcttcatgtgctgcgcctcttaccgtgtccactccatctttgtgctgcggctcttcaatgacccagtggccatggtgctgctcttcctcagtatcaacctcctgctggcccagcgctggggctggggctgctgctttttcagcctggcagtctctgtgaagatgaatgtgctgctcttcgcccctgggttactgtttcttctcctcacacagtttggcttccgtggggccctccccaagctgggaatctgtgctggccttcaggtggtgctggggctgcccttcctgctggagaaccccagcggctacctgtcccgctcctttgaccttggccgccagtttctgttccactggacagtgaactggcgcttcctcccagaggcgctcttcctgcatcgagccttccacctggccctgttgactgcccacctcaccctgctcctgctgtttgccctctgcaggtggcacaggacaggggaaagtatcttgtcgctgctgagggatccctccaaaaggaaggttccaccccagccccttacacccaaccagatcgtttctaccctcttcacctccaacttcattggcatctgcttcagccgctccctccactaccagttctacgtctggtatttccacacactgccctacctcctgtgggccatgcctgcacggtggctcacacacctgctcaggttgttggtgctggggctcatcgagctctcctggaacacatacccttccacatcctgcagctctgctgccctgcacatatgccatgccgtcatcctgctgcagctctggctgggcccgcagcctttccccaagagcacccaacacagcaagaaagcccactgaagtccacccctttccctcaggacctgagtctaccctcaggacctggggtgggttggactctgcccttccaaataaaccttgctaagtccaaaaaaaaaaaaaaaaaaaaaaaaaa

SEQ ID NO: 1317 - protein, 438 aa, Homo sapiens
MAAGLRKRGRSGSAAQAEGLCKQWLQRAWQERRLLLREPRYTLLVAACLCLAEVGITFWVIHRVAYTEIDWKAYMAEVEGVINGTYDYTQLQGDTGPLVYPAGFVYIFMGLYYATSRGTDIRMAQNIFAVLYLATLLLVFLIYHQTCKVPPFVFFFMCCASYRVHSIFVLRLFNDPVAMVLLFLSINLLLAQRWGWGCCFFSLAVSVKMNVLLFAPGLLFLLLTQFGFRGALPKLGICAGLQVVLGLPFLLENPSGYLSRSFDLGRQFLFHWTVNWRFLPEALFLHRAFHLALLTAHLTLLLLFALCRWHRTGESILSLLRDPSKRKVPPQPLTPNQIVSTLFTSNFIGICFSRSLHYQFYVWYFHTLPYLLWAMPARWLTHLLRLLVLGLIELSWNTYPSTSCSSAALHICHAVILLQLWLGPQPFPKSTQHSKKAH

SEQ ID NO: 1318 - DNA, 1061 bp, Homo sapiens
ggcacgaggggccggcggctctggctgcccggcggttgagagcatggcctctccaggggcaggtagggcgcctccggagttaccggagcggaactgcgggtaccgcgaagtcgagtactgggatcagcgctaccaaggcgcagccgattctgccccctacgattggttcggggacttctcctccttccgtgccctcctagagccggagctgcggcccgaggaccgtatccttgtgctaggttgcgggaacagtgccctgagctacgagctgttcctcggaggcttccctaatgtgaccagtgtggactactcatcagtcgtggtggctgccatgcaggctcgctatgcccatgtgccgcagctgcgctgggagaccatggatgtgcggaagctggacttccccagtgcttcttttgatgtggtgctcgagaagggcacgctggatgccctgctggctggggaacgagatccctggaccgtgtcctctgaaggtgtccacactgtggaccaggtgttgagtgaggtgagccgcgtgcttgtccctggaggccggtttatctcaatgacttctgctgccccccactttcggaccagacactatgcccaagcctattatggctggtccctgaggcatgctacctatggcagcggtttccacttccatctctacctcatgcacaagggcgggaagctcagtgtggcccagctggctctgggggcccaaatcctctcaccccccagacctcccacctcaccttgcttccttcaggactcagatcatgaggacttccttagtgccattcagctctgaggccagagcatggtcctccacccttcctgccattctgccctgggctcctcaggtagttggaattcctgacttaggacttggggttgggtccaaggtgcttacatcccaggggcctcatgcctaagatagagggtgggagcgaacccacatgaaccaatacagcccagctccaactagatccagaaaaaaaaaaaaaaaaaaaaaaaaaaaaaaaaaaaaaaaaaaaaaaaaaaaaaaaaaaaaaaaaaaa

SEQ ID NO: 1319 - protein, 255 aa, Homo sapiens [sequence omitted]

SEQ ID NO: 1320 - DNA, 1671 bp, Homo sapiens
gaggctgcgcgccgcaggttccggctgctggcggcgttgcggccgcaggtttgactcccgtgcggtgcggcccagcagccacaaagctcccgctgccattgctccttgtactcccgccgtcactgccgctgtccaacccctcccccggggcttgcgcggcggctcccacacccctcggcccgtgtacgcgctctgcacctgcctgcccgaaaacatgttgcagacaccagagagcagggggctcccggtcccgcaggccgagggggagaaggatggcggccatgatggtgagacccgggccccgaccgcctcgcaggagcgccccaaggaggagcttggcgccgggagggaggagggggctgcggagcccgccctcacccggaaaggcgcgagggccttggcggccaaagccttggcaaggcgcagggcctaccgccggctgaatcggacggtggcggagttggtgcagttcctcctggtgaaagacaagaagaagagtcccatcacacgctcggagatggtgaaatacgttattggagacttgaagattctgttcccggacatcatcgcaagggccgcagagcatctgcggtatgtctttggttttgagctgaaacagtttgaccgcaagcaccacacttacatcctgatcaacaaactaaaacctctggaggaggaggaggaggaggatctgggaggagatggccccagattgggtctgttaatgatgatcctgggccttatctatatgagaggtaatagcgccagggaggcccaggtctgggagatgctgcgtcggttgggggtgcaaccctcaaagtatcatttcctctttgggtatccgaagaggcttattatggaagattttgtgcagcagcgatatctcagttacaggcgggtgcctcacaccaatccaccagaatatgaattctcttggggtccccgaagcaacctggaaatcagcaagatggaagtcctggggttcgtggccaaactgcataagaaggaaccgcagcactggccagtgcagtaccgtgaggccctagcagacgaggccgacagggccagagccaaggccagagctgaagccagtatgagggccagggccagtgctagggccggcatccacctctggtgagggttggtgaaaagttggccagtgggtccccgtgaggacgaactactgtcctgagtcataagtaatatgggtggggcgagggtcttatttctgtagaaatcgtgtgactttaaggatttagattttgtatcttatgttttgtaacatttaataattactgttaaaatgctgtttgtaaatgagattggtctactttttcctgtaggattttattgtagagttttgctggttttgtaaaatggatggaagaactttgtatttatactgtgattttgaacagattatgcaacattggaaggaaggctgtactttgatggtttgaaggaactcagcagtatgatgatctggttccaggggaaaaaaatagctggttggtgtctagccccccaacacttttgtctgttgtgtataaaagaagaaagactggcatgtaccttcatttgcttagctatttgagtatctagagaaaaattaaaatgcaatgagttagcagtataccctggcacacttaataaattaaacatttgtggagc

SEQ ID NO: 1321 - protein, 307 aa, Homo sapiens
MLQTPESRGLPVPQAEGEKDGGHDGETRAPTASQERPKEELGAGREEGAAEPALTRKGARALAAKALARRRAYRRLNRTVAELVQFLLVKDKKKSPITRSEMVKYVIGDLKILFPDIIARAAEHLRYVFGFELKQFDRKHHTYILINKLKPLEEEEEEDLGGDGPRLGLLMMILGLIYMRGNSAREAQVWEMLRRLGVQPSKYHFLFGYPKRLIMEDFVQQRYLSYRRVPHTNPPEYEFSWGPRSNLEISKMEVLGFVAKLHKKEPQHWPVQYREALADEADRARAKARAEASMRARASARAGIHLW

SEQ ID NO: 1322 - DNA, 498 bp, Homo sapiens
agagctatggctcgaattcccagagttcgaggtggtgggactcaccgctctggccagggtgcttttggaaacatgtgtcgtggaggccgaaggtttgcaccaaccaaaacctggcgccgttggcatcgtagagtgaacacaacccaaaaacgatatgccatctgttctgccctggctgcctcagccctaccagcactggtcatgtctaaaggtcatcgtattgaggaagttcctgaacttcctttggtatttgaagataaagttgaaggctacaagaagaccaaggaagctgttttgctccttaagaaacttaaagcctggaatgatatcgaaaaggcagcagctaccaagaaaccagcccctgaaaagaagcctgcagaaaagaaacctactacagaggaaaagaagcctgctgcataaactcttaaatttgattattccataaaggtcaaatcattttggacagcttcttttgaataaagacctgattatacaggc

SEQ ID NO: 1323 - DNA, 609 bp, Homo sapiens
attcccagagttcgaggtggtgggactcaccgctctggccagggtgcttttggaaacatgtgtcgtggaggccgaaggtttgcaccaaccaaaacctggcgccgttggcatcgtagagtgaacacaacccaaaaacgatatgccatctgttctgccctggctgcctcagccctaccagcactggtcatgtctaaaggtcatcgtattgaggaagttcctgaacttcctttggtatttgaagataaagttgaaggctacaagaagaccaaggaagctgttttgctccttaagaaacttaaagcctggaatgatatcgaaaaggtctatgcctctcagcgaatgagagctggcaaaggcaagaagcctgtggtaggtaagaaaggaaagaaggctgctgttggtgttaagaagcagaagaagcctctggtgggaaaaaaggcagcagctaccaagaaaccagcccctgaaaagaagcctgcagaaaagaaacctactacagaggaaaagaagcctgctgcataaactcttaaatttgattattccataaaggtcaaatcattttggacagcttcttttgaataaagacctgattatacaggcagtgaggaa

SEQ ID NO: 1324 - protein, 154 aa, Homo sapiens
MCRGGRRFAPTKTWRRWHRRVNTTQKRYAICSALAASALPALVMSKGHRIEEVPELPLVFEDKVEGYKKTKEAVLLLKKLKAWNDIEKVYASQRMRAGTGKKPVVGKKGKKAAVGVKKQKKPLVGKKAAATKKPAPEKKPAEKKPTTEEKKPAA

SEQ ID NO: 1325 - DNA, 1023 bp, Homo sapiens
atgactggagtgaagctggtcctgaactcgaggctgtggaaagcgctcatggaaaaggcctgtgcaaaattattacccttctgtgaagtacttaaaacctactcaaggtgcaagctttacacaccaatgccgggcttgattaatggtatcagaggagttcggttcccccccgagttttctccaccctctgaaaatgcggccggaaccctaatccgctgcgaggctgcagcatctttcggtgctgtcccctccacacccgtgttatccccaccatccccaggccgctgttccggctgcacttgcctgtgtcatttaccccctcccggtgctctggggggcagcgcctctcagacattcccctcaaactgcttcccgccccctcctcccaactgcggagctccgccaagcgtctcttctcgcgagcctccaagtcccctcggggctctcgaatctccagagactgtgaaagcctcgcaactccgcgatcccccatccactcgggagcccccgcactcgcgctccggggcgcctcccccacgacgtgtggaaagccgctctccccgcgctccggaaccgttagccgcacccgcccgacgcctcccaggaaccaaaccggaccgggccgcggggggagggggcggtcaacccggggggggtcaccccagctactgcaccccgactttgaagattctgaatcagcccgtgaactctagccggctgggcctgtcggaccagtggccggacgccccttccgatctcccccctgcccccgcaaagccccctcacctgaggcggcctctctcctccccttgcagcggccccggcggcgcaggcgcgctcacgcacgcgcgcagcgggcctgggcgcctgggcgaaaggctgggccgaaccgctccgaagacggtgaaccgctccgcgcaccagcggctggactctgcgccgcagctgccaaccaggctggagcgctggcccggccccccgcggctcgctgctccgcccgccgccattggcccgcggccctag

SEQ ID NO: 1326 - protein, 340 aa, Homo sapiens
MTGVKLVLNSRLWKALMEKACAKLLPFCEVLKTYSRCKLYTPMPGLINGIRGVRFPPEFSPPSENAAGTLIRCEAAASFGAVPSTPVLSPPSPGRCSGCTCLCHLPPPGALGGSASQTFPSNCFPPPPPNCGAPPSVSSREPPSPLGALESPETVKASQLRDPPSTREPPHSRSGAPPPRRVESRSPRAPEPLAAPARRLPGTKPDRAAGGGGGQPGGGHPSYCTPTLKILNQPVNSSRLGLSDQWPDAPSDLPPAPAKPPHLRRPLSSPCSGPGGAGALTHARSGPGRLGERLGRTAPKTVNRSAHQRLDSAPQLPTRLERWPGPPRLAAPPAAIGPRP

SEQ ID NO: 1327 - DNA, 1493 bp, Homo sapiens
aattccggttgaaaccatccctcagctcctagagggagattgttagatcatgaaactaattaccatccttttcctctgctccaggctactactaagtttaacccaggaatcacagtccgaggaaattgactgcaatgacaaggatttatttaaagctgtggatgctgctctgaagaaatataacagtcaaaaccaaagtaacaaccagtttgtattgtaccgcataactgaagccactaagacggttggctctgacacgttttattccttcaagtacgaaatcaaggagggggattgtcctgttcaaagtggcaaaacctggcaggactgtgagtacaaggatgctgcaaaagcagccactggagaatgcacggcaaccgtggggaagaggagcagtacgaaattctccgtggctacccagacctgccagattactccagccgagggccctgtggtgacagcccagtacgactgcctcggctgtgtgcatcctatatcaacgcagagcccagacctggagcccattctgagacacggcattcagtactttaacaacaacactcaacattcctccctcttcatgcttaatgaagtaaaacgggcccaaagacaggtggtggctggattgaactttcgaattacctactcaattgtgcaaacgaattgttccaaagagaattttctgttcttaactccagactgcaagtccctttggaatggtgataccggtgaatgtacagataatgcatacatcgatattcagctacgaattgcttccttctcacagaactgtgacatttatccagggaaggattttgtacaaccacctaccaagatttgcgtgggctgccccagagatatacccaccaacagcccagagctggaggagacactgactcacaccatcacaaagcttaatgcagagaataacgcaactttctatttcaagattgacaatgtgaaaaaagcaagagtacaggtggtggctggcaagaaatattttattgacttcgtggccagggaaaccacatgttccaaggaaagtaatgaagagttgaccgaaagctgtgagaccaaaaaacttggccaaagcctagattgcaacgctgaagtttatgtggtaccctgggagaaaaaaatttaccctactgtcaactgtcaaccactgggaatgatctcactgatgaaaaggcctccaggtttttcacctttccgatcatcacgaataggggaaataaaagaagaaacaactagtcacctaaggtcctgcgagtacaagggtcgacccccaaaggcaggggcagagccagcatctgagagggaggtctcttgaccaatgggcagaatcttcactccaggcacatagccccaaccacctctgccagcaaccttgagaggaaggacaagaagaaagatgggatagaatttaaatagagaagaatgccattttatcactctgcctctgggtgaaataaagatcagtcttgatgttc

SEQ ID NO: 1328 - protein, 427 aa, Homo sapiens
MKLITILFLCSRLLLSLTQESQSEEIDCNDKDLFKAVDAALKKYNSQNQSNNQFVLYRITEATKTVGSDTFYSFKYEIKEGDCPVQSGKTWQDCEYKDAAKAATGECTATVGKRSSTKFSVATQTCQITPAEGPVVTAQYDCLGCVHPISTQSPDLEPILRHGIQYFNNNTQHSSLFMLNEVKRAQRQVVAGLNFRITYSIVQTNCSKENFLFLTPDCKSLWNGDTGECTDNAYIDIQLRIASFSQNCDIYPGKDFVQPPTKICVGCPRDIPTNSPELEETLTHTITKLNAENNATFYFKIDNVKKARVQVVAGKKYFIDFVARETTCSKESNEELTESCETKKLGQSLDCNAEVYVVPWEKKIYPTVNCQPLGMISLMKRPPGFSPFRSSRIGEIKEETTSHLRSCEYKGRPPKAGAEPASEREVS

SEQ ID NO: 1329 - DNA, 1346 bp, Homo sapiens
ggcgggaactgaggcgactgtggggacatcagtgatcgtaagtctcctgggcccgttattctcagattaggtgacggagctaagacttcgagaccatctcgtcctttttgtatcgcggaaacctgaggaacgagccggcggcggtgacctgcacgagaagccaggctaactgggtgaagtaccatgcaagcatttcttaaaggtacatccatcagtactaaacccccgctgaccaaggatcgaggagtagctgccagtgcgggaagtagcggagagaacaagaaagccaaacccgttccctgggtggaaaaatatcgcccaaaatgtgtggatgaagttgctttccaggaagaagtggttgcagtgctgaaaaaatctttagaaggagcagatcttcctaatctcttgttttacggaccacctggaactggaaaaacatccactattttggcagcagctagagaactctttgggcctgaacttttccgattaagagttcttgagttaaatgcatctgatgaacgtggaatacaagtagttcgagagaaagtgaaaaattttgctcaattaactgtgtcaggaagtcgctcagatgggaagccgtgtccgccttttaagattgtgattctggatgaagcagattctatgacctcagctgctcaggcagctttaagacgtaccatggagaaggagtcgaaaaccacccgattctgtcttatctgtaactatgtcagtcgaataattgaacccctgacctctagatgttcaaaattccgcttcaagcctctgtcagataaaattcaacagcagcgattactagacattgccaagaaggaaaatgtcaaaattagtgatgagggaatagcttatcttgttaaagtgtcagaaggagacttaagaaaagccattacatttcttcaaagcgctactcgattaacaggtggaaaggagatcacagagaaagtgattacagacattgctggggtaataccagctgagaaaattgatggagtatttgctgcctgtcagagtggctcttttgacaaactagaagctgtggtcaaggatttaatagatgagggtcatgcagcaactcagctcgtcaatcaactccatgatgtggttgtagaaaataacttatctgataaacagaagtctattatcacagaaaaacttgccgtaattgacaaatgcctagcagatggtgctgatgaacatttgcaactcatcagcctttgtgcaactgtgatgcagcagttatctcagaattgttaacgtgaatatatctggatggggggttttgtaaataatgaagttgtaataaaaataaaatgaccaaaagcacc

SEQ ID NO: 1330 - DNA, 1538 bp, Homo sapiens
cctccaaccacctgcacgcctgcctgccagggcctctctggggcagccatgaagtccctcgtcctgctcctttgtcttgctcagctctggggctgccactcagccccacatggcccagggctgatttatagacaaccgaactgcgatgatccagaaactgaggaagcagctctggtggctatagactacatcaatcaaaaccttccttggggatacaaacacaccttgaaccagattgatgaagtaaaggtgtggcctcagcagccctccggagagctgtttgagattgaaatagacaccctggaaaccacctgccatgtgctggaccccacccctgtggcaagatgcagcgtgaggcagctgaaggagcatgctgtcgaaggagactgtgatttccagctgttgaaactagatggcaagttttccgtggtatacgcaaaatgtgattccagtccagactcagccgaggacgtgcgcaaggtgtgccaagactgccccctgctggccccgctgaacgacaccagggtggtgcacgccgcgaaagctgccctggccgccttcaacgctcagaacaacggctccaattttcagctggaggaaatttcccgggctcagcttgtgcccctcccaccttctacctatgtggagtttacagtgtctggcactgactgtgttgctaaagaggccacagaggcagccaagtgtaacctgctggcagaaaagcaatatggcttttgtaaggcaacactcagtgagaagcttggtggggcagaggttgcagtgacctgcacggtgttccaaacacagcccgtgacctcacagccccaaccagaaggtgccaatgaagcagtccccacccccgtggtggacccagatgcacctccgtcccctccacttggcgcacctggactccctccagctggctcacccccagactcccatgtgttactggcagctcctccaggacaccagttgcaccgggcgcactacgacctgcgccacaccttcatgggtgtggtctcattggggtcaccctcaggagaagtgtcgcacccccggaaaacacgcacagtggtgcagcctagtgttggtgctgctgctgggccagtggttcctccatgtccggggaggatcagacacttcaaggtctaggctagacatggcagagatgaggaggtttggcacagaaaacatagccaccattttgtccaagcctgggcatgggtggggggccttgtctgctggccacgcaagtgtcacatgcgatctacattaatatcaagtcttgactccctacttcccgtcattcctcacaggacagaagcagagtgggtggtggttatgtttgacagaaggcattaggttgacaacttgtcatgattttgacggtaagccaccatgattgtgttctctgcctctggttgaccttacaaaaaccattggaactgtgactttgaaaggtgctcttgctaagcttatatgtgcctgttaatgaaagtgcctgaaagaccttccttaataaagaaggttctaagctg

SEQ ID NO: 1331 - protein, 367 aa, Homo sapiens
MKSLVLLLCLAQLWGCHSAPHGPGLIYRQPNCDDPETEEAALVAIDYINQNLPWGYKHTLNQIDEVKVWPQQPSGELFEIEIDTLETTCHVLDPTPVARCSVRQLKEHAVEGDCDFQLLKLDGKFSVVYAKCDSSPDSAEDVRKVCQDCPLLAPLNDTRVVHAAKAALAAFNAQNNGSNFQLEEISRAQLVPLPPSTYVEFTVSGTDCVAKEATEAAKCNLLAEKQYGFCKATLSEKLGGAEVAVTCTVFQTQPVTSQPQPEGANEAVPTPVVDPDAPPSPPLGAPGLPPAGSPPDSHVLLAAPPGHQLHRAHYDLRHTFMGVVSLGSPSGEVSHPRKTRTVVQPSVGAAAGPVVPPCPGRIRHFKV

SEQ ID NO: 1332 - DNA, 519 bp, Homo sapiens
tttctttaagaggaagacgcggtcgtaggtgcgaggatttctggtccgcatgctcctgctcctgactcaccgctgttcgctctcgccgccgaggaacaagtcggtcatgaagccgcgcagcagccatggcttttaaggataccggaaaagcacccgtggagccggaggtggcaattcaccgaattcgaatcaccctaacaagccgcagcgtaaaatccttggaaaaggtgggtgctgacttgatcagaggcgcaaaagcaaagaatctcaaagtgaaaggaggagttcgaatgccttccaagactttgagaatcactacaagaaaaactccttgtggtgaaggttctaagacgtgggatcgtttccagatgagaattcacaagcgactctttgacttgcacagtccttctgagattgttaagcagattacttccatcagtactgagccaggagttgaggtggaagtcaccattgcagatgcttaagtcaactattttaataaattgattaccagttgtt

SEQ ID NO: 1333 - DNA, 2737 bp, Homo sapiens
ggaaagactatgttttaggtgacccgtgtggcctttttgttgaggcctttaggatacaaggcccccacctaaagacgcgaccctcccgtaggaggggggcagggcccgggggcgggagcacagcggggccccagcctcaggcggcgcgtcactgagcacaaaggagacaacagcgaggcggcagcgggcgctgatcttcgctcgccagccactcgcaattgcggttacagacctgcagctccccctcccccagccggcccgcccgcctttctgtctcctctctccctccgtactggacggccccggtccatttccgggctccggatatttggtatcgattggggccggggacgcggagcaggtggccgcggcggggcagctgggccgccagcttggtgcctcggggaccgtctcccgctgctttggtcaccagcccctgcccgcccgacccgctccgttctccggcctgcgagccctgccggccggactttgcgccgcgtccggcgctgctgctgcgctcggggccccgctcggcgccggcggtgaccgggaagcccgcgttaaaggggcaaccgggaccctggcccggtatggctgaagtcagcatcgaccagtccaagctgcctggagtcaaggaagtatgccgagattttgctgtcctggaggaccacaccctggctcacagcctgcaggaacaagagattgagcatcatttggcatcgaacgttcagcggaaccgtttggtccagcatgatctccaggtggctaagcagctccaagaggaagatctgaaagcgcaggcccagctccagaagcgctacaaagaccttgaacaacaagactgtgaaattgctcaggaaattcaggagaagctggctattgaggcagagagacgacgcattcaggagaagaaggatgaggacatagctcgccttttgcaagaaaaggagttacaggaagagaaaaagagaaagaaacactttccagagttccctgcaacccgtgcttatgcagatagttactattatgaagatggaggaatgaagccaagagtgatgaaagaagctgtatctactccatcacgaatggcccacagggatcaggaatggtatgatgctgaaattgccagaaaactgcaagaagaagaacttttggctacccaggtggacatgagagccgctcaagtagctcaagatgaagaaatcgctcgacttctaatggctgaagaaaagaaagcttacaaaaaagccaaggagcgggagaaatcatctttggacaaaagaaagcaagaccccgagtggaagccaaaaacagctaaagcagcaaattccaagtcaaaagagagtgatgaacctcaccattctaagaatgaaaggccagcacggccaccaccacctatcatgacagatggtgaagatgcggattacactcattttacaaaccagcagagttccacacggcatttctcaaaatcagagtcctctcataaaggttttcattacaaacattaaaaacctaggaatctgccttgaaaatggactcactatagcaaatattactgggtgatacagaatgaattctacacttactttttttctcctgtgtttgcattcctgggatttatcctcaagtgcatttctgaccataagtaattttaattcatttcaaatgttttggttattcatgatcacttgggcagtataagaaaatgtagcttctgaatattggccacctctatgctgcatatacttcttgggatatagtatctaagacctttgtaaactgccattttgttaggtatggagtttggtatctagggagtaggccttatttagcaattcaaattttatggagatgaatgatcaaagtgaaacaatgtttggatgcaacgcagaataaaagaatataagaaatagctttttgttgcattaatgtatgatattttgaaggacagagcctttgctttttgtattctttaagaaaagcacaaccataaagtattttaaaaaaagaaacacttggagcaattgaaatatgttattctgactagatggactgtagaggttttgcatttctcagccctcctggggagattggcctagatagcattctttaacacttcctctgcttttgcctcagtagcaaggctttcctaagctcctgggcaatggaacatttattagtatttattgacaaaaatttagttctctgaaattttaactcatatatatgaaaaactttgtattccatctcttctttttcatttacttgtagagccaaggaaatggaattgaaagatgattgcataagtaatgatgccatccttctctctggctgtagactgaggcttttctcttgcttcaagtcagagcagtatttgttgataacctctcaataatgtttggtttacatgccagtaattaaattaattcaacatgaagttgaatttgatgaagtggtcatctatccaagtatttggtttttgttttgttttgttttgttttttgagttggagtctcgccctgtcacacaggctggagtgcagtggtgcaatcttggctcactgcaacctccgccacctgggctggagcaattcccctgcctcagcctcccaagtagctggaattacaggcatgtgtcaccacacccggctaatttttgtatttttagtaaagagcgggtttcaccatgttggccaggctggtctcgaacccctgacctcaagtgatccacctgc

SEQ ID NO: 1334 - protein, 306 aa, Homo sapiens
MAEVSIDQSKLPGVKEVCRDFAVLEDHTLAHSLQEQEIEHHLASNVQRNRLVQHDLQVAKQLQEEDLKAQAQLQKRYKDLEQQDCEIAQEIQEKLAIEAERRRIQEKKDEDIARLLQEKELQEEKKRKKHFPEFPATRAYADSYYYEDGGMKPRVMKEAVSTPSRMAHRDQEWYDAEIARKLQEEELLATQVDMRAAQVAQDEEIARLLMAEEKKAYKKAKEREKSSLDKRKQDPEWKPKTAKAANSKSKESDEPHHSKNERPARPPPPIMTDGEDADYTHFTNQQSSTRHFSKSESSHKGFHYKH

SEQ ID NO: 1335 - DNA, 4849 bp, Homo sapiens
cgttgatatcaaagacagttgaaggaaatgaattttgaaacttcacggtgtgccaccctacagtactgccctgacccttacatccagcgtttcgtagaaaccccagctcatttctcttggaaagaaagttattaccgatccaccatgtcccagagcacacagacaaatgaattcctcagtccagaggttttccagcatatctgggattttctggaacagcctatatgttcagttcagcccattgacttgaactttgtggatgaaccatcagaagatggtgcgacaaacaagattgagattagcatggactgtatccgcatgcaggactcggacctgagtgaccccatgtggccacagtacacgaacctggggctcctgaacagcatggaccagcagattcagaacggctcctcgtccaccagtccctataacacagaccacgcgcagaacagcgtcacggcgccctcgccctacgcacagcccagctccaccttcgatgctctctctccatcacccgccatcccctccaacaccgactacccaggcccgcacagtttcgacgtgtccttccagcagtcgagcaccgccaagtcggccacctggacgtattccactgaactgaagaaactctactgccaaattgcaaagacatgccccatccagatcaaggtgatgaccccacctcctcagggagctgttatccgcgccatgcctgtctacaaaaaagctgagcacgtcacggaggtggtgaagcggtgccccaaccatgagctgagccgtgaattcaacgagggacagattgcccctcctagtcatttgattcgagtagaggggaacagccatgcccagtatgtagaagatcccatcacaggaagacagagtgtgctggtaccttatgagccaccccaggttggcactgaattcacgacagtcttgtacaatttcatgtgtaacagcagttgtgttggagggatgaaccgccgtccaattttaatcattgttactctggaaaccagagatgggcaagtcctgggccgacgctgctttgaggcccggatctgtgcttgcccaggaagagacaggaaggcggatgaagatagcatcagaaagcagcaagtttcggacagtacaaagaacggtgatggtacgaagcgcccgtttcgtcagaacacacatggtatccagatgacatccatcaagaaacgaagatccccagatgatgaactgttatacttaccagtgaggggccgtgagacttatgaaatgctgttgaagatcaaagagtccctggaactcatgcagtaccttcctcagcacacaattgaaacgtacaggcaacagcaacagcagcagcaccagcacttacttcagaaacagacctcaatacagtctccatcttcatatggtaacagctccccacctctgaacaaaatgaacagcatgaacaagctgccttctgtgagccagcttatcaaccctcagcagcgcaacgccctcactcctacaaccattcctgatggcatgggagccaacattcccatgatgggcacccacatgccaatggctggagacatgaatggactcagccccacccaggcactccctcccccactctccatgccatccacctcccagtgcacacccccacctccgtatcccacagattgcagcattgtcagtttcttagcgaggttgggctgttcatcatgtctggactatttcacgacccaggggctgaccaccatctatcagattgagcattactccatggatgatctggcaagtctgaaaatccctgagcaatttcgacatgcgatctggaagggcatcctggaccaccggcagctccacgaattctcctccccttctcatctcctgcggaccccaagcagtgcctctacagtcagtgtgggctccagtgagacccggggtgagcgtgttattgatgctgtgcgattcaccctccgccagaccatctctttcccaccccgagatgagtggaatgacttcaactttgacatggatgctcgccgcaataagcaacagcgcatcaaagaggagggggagtgagcctcaccatgtgagctcttcctatccctctcctaactgccagcyccctaaaagcactcctgcttaatcttcaaagccttctccctagctcctccccttcctcttgtctgatttcttaggggaaggagaagtaagaggctacctcttacctaacatctgacctggcatctaattctgattctggctttaagccttcaaaactatagcttgcagaactgtagctgccatggctaggtagaagtgagcaaaaaagagttgggtgtctccttaagctgcagagatttctcattgacttttataaagcatgttcacccttatagtctaagactatatatataaatgtataaatatacagtatagatttttgggtggggggcattgagtattgtttaaaatgtaatttaaatgaaagaaaattgagttgcacttattgaccattttttaatttacttgttttggatggcttgtctatactccttcccttaaggggtatcatgtatggtgataggtatctagagcttaatgctacatgtgagtgacgatgatgtacagattctttcagttctttggattctaaatacatgccacatcaaacctttgagtagatccatttccattgcttattatgtaggtaagactgtagatatgtattcttttctcagtgttggtatattttatattactgacatttcttctagtgatgatggttcacgttggggtgatttaatccagttataagaagaagttcatgtccaaacgtcctctttagtttttggttgggaatgaggaaaattcttaaaaggcccatagcagccagttcaaaaacacccgacgtcatgtatttgagcatatcagtaacccccttaaatttaataccagataccttatcttacaatattgattgggaaaacatttgctgccattacagaggtattaaaactaaatttcactactagattgactaactcaaatacacatttgctactgttgtaagaattctgattgatttgattgggatgaatgccatctatctagttctaacagtgaagttttactgtctattaatattcagggtaaataggaatcattcagaaatgttgagtctgtactaaacagtaagatatctcaatgaaccataaattcaactttgtaaaaatcttttgaagcatagataatattgtttggtaaatgtttcttttgtttggtaaatgtttcttttaaagaccctcctattctataaaactctgcatgtagaggcttgtttacctttctctctctaaggtttacaataggagtggtgatttgaaaaatataaaattatgagattggttttcctgtggcataaattgcatcactgtatcattttcttttttaaccggtaagagtttcagtttgttggaaagtaactgtgagaacccagtttcccgtccatctcccttagggactacccatagacatgaaaggtccccacagagcaagagataagtctttcatggctgctgttgcttaaaccacttaaacgaagagttcccttgaaactttgggaaaacatgttaatgacaatattccagatctttcagaaatataacacatttttttgcatgcatgcaaatgagctctgaaatcttcccatgcattctggtcaagggctgtcattgcacataagcttccattttaattttaaagtgcaaaagggccagcgtggctctaaaaggtaatgtgtggattgcctctgaaaagtgtgtatatattttgtgtgaaattgcatactttgtattttgattattttttttttcttcttgggatagtgggatttccagaaccacacttgaaacctttttttatcgtttttgtattttcatgaaaataccatttagtaagaataccacatcaaataagaaataatgctacaattttaagaggggagggaagggaaagtttttttttattatttttttaaaattttgtatgttaaagagaatgagtccttgatttcaaagttttgttgtacttaaatggtaataagcactgtaaacttctgcaacaagcatgcagctttgcaaacccattaaggggaagaatgaaagctgttccttggtcctagtaagaagacaaactgcttcccttactttgctgagggtttgaataaacctaggacttccgagctatgtcagtactattcaggtaacactagggccttggaaattcctgtactgtgtctcatggatttggcactagccaaagcgaggcacccttactggcttacctcctcatggcagcctactctccttgagtgtatgagtagccagggtaaggggtaaaaggatagtaagcatagaaaccactagaaagtgggcttaatggagttcttgtggcctcagctcaatgcagttagctgaagaattgaaaagtttttgtttggagacgtttataaacagaaatggaaagcagagttttcattaaatccttttaccttttttttttcttggtaatcccctaaaataacagtatgtgggatattgaatgttaaagggatattttttttctattatttttataattgtacaaaattaagcaaatgttaaaagttttatatgctttattaatgttttcaaaaggtattatacatgtgatacattttttaagcttcagttgcttgtcttctggtactttctgttatgggcttttggggagccagaagccaatctacaatctctttttgtttgccaggacatgcaataaaatttaaaaaataaataaaaactaattaagaaataaa

SEQ ID NO: 1336 - protein, 680 aa, Homo sapiens
MNFETSRCATLQYCPDPYIQRFVETPAHFSWKESYYRSTMSQSTQTNEFLSPEVFQHIWDFLEQPICSVQPIDLNFVDEPSEDGATNKIEISMDCIRMQDSDLSDPMWPQYTNLGLLNSMDQQIQNGSSSTSPYNTDHAQNSVTAPSPYAQPSSTFDALSPSPAIPSNTDYPGPHSFDVSFQQSSTAKSATWTYSTELKKLYCQIAKTCPIQIKVMTPPPQGAVIRAMPVYKKAEHVTEVVKRCPNHELSREFNEGQIAPPSHLIRVEGNSHAQYVEDPITGRQSVLVPYEPPQVGTEFTTVLYNFMCNSSCVGGMNRRPILIIVTLETRDGQVLGRRCFEARICACPGRDRKADEDSIRKQQVSDSTKNGDGTKRPFRQNTHGIQMTSIKKRRSPDDELLYLPVRGRETYEMLLKIKESLELMQYLPQHTIETYRQQQQQQHQHLLQKQTSIQSPSSYGNSSPPLNKMNSMNKLPSVSQLINPQQRNALTPTTIPDGMGANIPMMGTHMPMAGDMNGLSPTQALPPPLSMPSTSQCTPPPPYPTDCSIVSFLARLGCSSCLDYFTTQGLTTIYQIEHYSMDDLASLKIPEQFRHAIWKGILDHRQLHEFSSPSHLLRTPSSASTVSVGSSETRGERVIDAVRFTLRQTISFPPRDEWNDFNFDMDARRNKQQRIKEEGE

SEQ ID NO: 1337 - DNA, 305 bp, Homo sapiens
cattttgcgaagtttaaccacccgggtaccgccgttcttgtcaccaccaactggttttgtaacagttgcgagaaccttctccttctttttcttttcaaccttggatttagcggctgagtacttcctcttgtacatggcctttctggaatccatggcagatcgggaatacctgccaattcctctgacaaggacagggttgcggctgcaatggggcttccccttgttgggctttttagctttgaggttaccctttttcaccttgccaccagcatcaaccttcttggcttcgggtttcttctctttag

SEQ ID NO: 1338 - DNA, 2733 bp, Homo sapiens
atgcctgctgccacgtggctggtcctcctcctcctgctgtggctgagccttggggtgaagacagcttctcagatgaccaagatggtgctgcagatggtgctgaggatggagaacccaccaagccccgctaggagccacctagactggatgcagagcatggaaataagcctcggtgtggagagggcctgtcctcagggcctggcagatgtaggcgattcttaccacgtctccttcgctaccccgaaaggcacaatcataggcctttctcgtcttttaagggtttttacttccatggggaactatgtgttggatgagaaaagtatccggggaaggggacagaggttcagaaagctctgcgagtcctggacgctggtctgccttcttggctcaccctggaaggtggacgctggccccacacatcccctcttaaagacgcaggccgatagccagcagatcctggggcttgctggccccaaagcagacactgcgatgacaacggacgacacagaagtgcccgctatgactctagcaccgggccacgccgctctggaaactcaaacgctgagcgctgagacctcttctagggcctcaaccccagccggccccattccagaagcagagaccaggggagccaagagaatttcccctgcaagagagaccaggagtttcacaaaaacatctcccaacttcatggtgctgatcgccacctccgtggagacatcagccgccagtggcagccccgagggagctggaatgaccacagttcagaccatcacaggcagtgatcccagggaagccatctttgacaccctttgcaccgatgacagctctgaagaggcaaagacactcacaatggacatattgacattggctcacacctccacagaagctaagggcctgtcctcagagagcagcgcctcttccgacagcccccatccagtcatcaccccgtcacgggcctcagagagcagcgcctcttccgacggcccccatccagtcatcaccccgtcacgggcctcagagagcagcgcctcttccgacggcccccatccagtcatcaccccgtcacgggcctcagagagcagcgcctcttccgacggcccccatccagtcatcaccccgtcacgggcctcagagagcagcgcctcttccgacggcccccatccagtcatcaccccgtcacgggcctcagagagcagcgcctcttccgacggcccccatccagtcatcaccccgtcacgggcctcagagagcagcgcctcttccgacggcccccatccagtcatcaccccgtcacgggcctcagagagcagcgcctcttccgacggcccccatccagtcatcaccccgtcacgggcctcagagagcagcgcctcttccgacggcccccatccagtcatcaccccgtcacgggcctcagagagcagcgcctcttccgacggcctccatccagtcatcaccccgtcacgggcctcagagagcagcgcctcttccgacggcccccatccagtcatcaccccgtcacgggcctcagagagcagcgcctcttccgacggcccccatccagtcatcaccccctcatggtccccgggatctgacgtcactctcctcgctgaagccctggtgactgtcacaaacatcgaggttattaattgcagcatcacagaaatagaaacaacgacttccagcatccctggggcctcagacacagatctcatccccacggaaggggtgaaggcctcgtccacctccgatccaccagctctgcctgactccactgaagcaaaaccacacatcactgaggtcacagcctctgccgagaccctgtccacagccggcaccacagagtcagctgcacctgatgccacggttgggaccccactccccactaacagcgccacagaaagagaagtgacagcacccggggccacgaccctcagtggagctctggtcacagttagcaggaatccccttgaagaaacctcagccctctctgttgagacaccaagttacgtcaaagtctcaggagcagctccggtctccatagaggctgggtcagcagtgggcaaaacaacttcctttgctgggagctctgcttcctcctacagcccctcggaagccgccctcaagaacttcaccccttcagagacaccgaccatggacatcgcaaccaaggggcccttccccaccagcagggaccctcttccttctgtccctccgactacaaccaacagcagccgagggacgaacagcaccttagccaagatcacaacctcagcgaagaccacgatgaagcccccaacagccacgcccacgactgcccggacgaggccgaccacagacgtgagtgcaggtgaaaatggaggtttcctcctcctgcggctgagtgtggcttccccggaagacctcactgaccccagagtggcagaaaggctgatgcagcaggagaggctaacggacatcagctgcagccaggcatgtcccgtatgccaaaagagggtgctgcccctagcctgggcccccaccgacagactgcagctgcgttactgtgctgagaggtacccagaaggttcccatgaagggcagcatgtccaagcccctgaccccagatgtggcaacaggaccctcgctcacatccaccggagttttgttacattgtacgtgctcgaggacaagcagccggtagtattcacctctgtcatcacagaagctggcgtggagccctccacatga

SEQ ID NO: 1339 - protein, 429 aa, Homo sapiens
MTTDDTEVPAMTLAPGHAALETQTLSAETSSRASTPAGPIPEAETRGAKRISPARETRSFTKTSPNFMVLIATSVETSAASGSPEGAGMTTVQTITGSDPREAIFDTLCTDDISEEAKTLTMDILTLAHTSTEAKGLSSESSASSDGPHPVITPSRASESSASSDGLHPVITPSRASESSASSDGLHPVITPSRASESSASSDGPHPVITPSWSPGSDVTLLAEALVTVTNIEVINCSITEIETTTSSIPGASDTDLIPTEGVKASSTSDPPALPDSTNTKPHITEVTASAETLSTAGTTESAAPDATIGTPLPTNSTIEREVTAPGATTLSGALATGNPLEETSALSVETPSYVKVSGAAPVSIEAGSAVGKTTSFAGSSASSYSPLEAALKNFTPSETLTTDIATKGPFPTSRAPLPSVPPTTTNSS

SEQ ID NO: 1340 - DNA, 3696 bp, Homo sapiens
acgccacccctcttcctgtcaccagcctttcctcagtatccacaggtcacgccacccctcttgctgtcagcagtgctacctcagcttccacagtatcctcggactcccctctgaagatggaaacaccaggaatgacaacaccgtcactgaagacagacggtgggagacgcacagccacatcaccaccccccacaacctcccagaccatcatttccaccattcccagcactgccatgcacacccgctccacagctgcccccatccccatcctgcctgagagaggagtttccctcttcccctatggggcaggcgccggggacctggagttcgtcaggaggaccgtggacttcacctccccactcttcaagccggcgactggcttcccccttggctcctctctccgtgattccctctacttcacagacaatggccagatcatcttcccagagtcagactaccagattttctcctaccccaacccactcccaacaggcttcacaggccgggaccctgtggccctggtggctccgttctgggacgatgctgacttctccactggtcgggggaccacattttatcaggaatacgagacgttctatggtgaacacagcctgctagtccagcaggccgagtcttggattagaaagatgacaaacaacgggggctacaaggccaggtgggccctaaaggtcacgtgggtcaatgcccacgcctatcctgcccagtggaccctcgggagcaacacctaccaagccatcctctccacggacgggagcaggtcctatgccctgtttctctaccagagcggtgggatgcagtgggacgtggcccagcgctcaggcaacccggtgctcatgggcttctctagtggagatggctatttcgaaaacagcccactgatgtcccagccagtgtgggagaggtatcgccctgatagattcctgaattccaactcaggcctccaagggctgcagttctacaggctacaccgggaagaaaggcccaactaccgtctcgagtgcctgcagtggctgaagagccagcctcggtggcccagctggggctggaaccaggtctcctgcccttgttcctggcagcagggacgacgggacttacgattccaacccgtcagcataggtcgctggggcctcggcagtaggcagctgtgcagcttcacctcttggcgaggaggcgtgtgctgcagctacgggccctggggagagtttcgtgaaggctggcacgtgcagcgtccttggcagttggcccaggaactggagccacagagctggtgctgccgctggaatgacaagccctacctctgtgccctgtaccagcagaggcggccccacgtgggctgtgctacatacaggcccccacagcccgcctggatgttcggggacccccacatcaccaccttggatggtgtcagttacaccttcaatgggctgggggacttcctgctggtcggggcccaagacgggaactcctccttcctgcttcagggccgcaccgcccagactggctcagcccaggccaccaacttcatcgcctttgcggctcagtaccgctccagcagcctgggccccgtcacggtccaatggctccttgagcctcacgacgcaatccgtgtcctgctggataaccagactgtgacatttcagcctgaccatgaagacggcggaggccaggagacgttcaacgccaccggagtcctcctgagccgcaacggctctgaggtctcggccagcttcgacggctgggccaccgtctcggtgatcgcgctctccaacatcctccacgcctccgccagcctcccgcccgagtaccagaaccgcacggaggggctcctgggggtctggaataacaatccagaggacgacttcaggatgcccaatggctccaccattcccccagggagccctgaggagatgcttttccactttggaatgacctggcagatcaacgggacaggcctccttggcaagaggaatgaccagctgccttccaacttcacccctgttttctactcacaactgcaaaaaaacagctcctgggctgaacatttgatctccaactgtgacggagatagctcatgcatctatgacaccctggccctgcgcaacgcaagcatcggacttcacacgagggaagtcagtaaaaactacgagcaggcgaacgccaccctcaatcagtacccgccctccatcaatggtggtcgtgtgattgaagcctacaaggggcagaccacgctgattcagtacaccagcaatgctgaggatgccaacttcacgctcagagacagctgcaccgacttggagctctttgagaatgggacgttgctgtggacacccaagtcgctggagccattcactctggagattctagcaagaagtgccaagattggcttggcatctgcactccagcccaggactgtggtctgccattgcaatgcagagagccagtgtttgtacaatcagaccagcagggtgggcaactcctccctggaggtggctggctgcaagtgtgacgggggcaccttcggccgctactgcgagggctccgaggatgcctgtgaggagccgtgcttcccgagtgtccactgcgttcctgggaagggctgcgaggcctgccctccaaacctgactggggatgggcggcactgtgcggctctggggagctctttcctgtgtcagaaccagtcctgccctgtgaattactgctacaatcaaggccactgctacatctcccagactctgggctgtcagcccatgtgcacctgccccccagccttcactgacagccgctgcttcctggctgggaacaacttcagtccaactgtcaacctagaacttcccttaagagtcatccagctcttgctcagtgaagaggaaaatgcctccatggcagaagtcaacgcctcggtggcatacagactggggaccctggacatgcgggcctttctccgcaacagccaagtggaacgaatcgattctgcagcaccggcctcgggaagccccatccaacactggatggtcatctcggagttccagtaccgccctcggggcccggtcattgacttcctgaacaaccagctgctggccgcggtggtggaggcgttcttataccacgttccacggaggagtgaggagcccaggaacgacgtggtcttccagcccatctccggggaagacgtgcgcgatgtgacagccctgaacgtgagcacgctgaaggcttacttcagatgcgatggctacaagggctacgacctggtctacagcccccagagcggcttcacctgcgtgtccccgtgcagtaggggctactgtgaccatggaggccagtgccagcacctgcccagtgggccccgctgcagctgtgtgtccttctccatctacacggcctggggcgagcactgtgagcacctgagcatgaaactcgacgcgttcttcggcatcttctttggggccctgggcggcctcttgctgctgggggtcgggacgttcgtggtcctgcgcttctggggttgctccggggccaggttctcctatttcctgaactcagctgaggccttgccttgaaggggcagctgtggcctaggctacctcaagactcacctcatccttaccgcacatttaaggcgccattgcttttgggagactggaaaagggaaggtgactgaaggctgtcaggattctt

SEQ ID NO: 1341 - DNA, 1886 bp, Homo sapiens
agttctgtggagcagcggtggccggctaggatgggctgtctctggggtctggctctgccccttttcttcttctgctgggaggttggggtctctgggagctctgcaggccccagcacccgcagagcagacactgcgatgacaacggacgacacagaagtgcccgctatgactctagcaccgggccacgccgctctggaaactcaaacgctgagcgctgagacctcttctagggcctcaaccccagccggccccattccagaagcagagaccaggggagccaagagaatttcccctgcaagagagaccaggagtttcacaaaaacatctcccaacttcatggtgctgatcgccacctccgtggagacatcagccgccagtggcagccccgagggagctggaatgaccacagttcagaccatcacaggcagtgatcccgaggaagccatctttgacaccctttgcaccgatgacagctctgaagaggcaaagacactcacaatggacatattgacattggctcacacctccacagaagctaagggcctgtcctcagagagcagtgcctcttccgacggcccccatccagtcatcaccccgtcacgggcctcagagagcagcgcctcttccgacggcccccatccagtcatcaccccgtcacgggcctcagagagcagcgcctcttccgacggcccccatccagtcatcaccccgtcacgggcctcagagagcagcgcctcttccgacggcccccatccagtcatcaccccgtcatggtccccgggatctgatgtcactctcctcgctgaagcccctggtgactgtcacaaacatcgaggttattaattgcagcatcacagaaatagaaacaacaacttccagcatccctggggcctcagacatagatctcatccccacggaaggggtgaaggcctcgtccacctccgatccaccagctctgcctgactccactgaagcaaaaccacacatcactgaggtcacagcctctgccgagaccctgtcctcagccctctctgttgagacaccaagttacgtcaaagtctcaggagcagctccggtctccatagaggctgggtcagcagtgggcaaaacaacttcctttgctgggagctctgcttcctcctacagcccctcggaagccgccctcaagaacttcaccccttcagagacaccgaccatggacatcgcaaccaaggggcccttccccaccagcagggaccctcttccttctgtccctccgactacaaccaacagcagccgagggacgaacagcaccttagccaagatcacaacctcagcgaagaccacgatgaagcccccaacagccacgcccacgactgcccggacgaggccgaccacagacgtgagtgcaggtgaaaatggaggtttcctcctcctgcggctgagtgtggcttccccggaagacctcactgaccccagagtggcagaaaggctgatgcagcagctccaccgggaactccacgcccacgcgcctcacttccaggtctccttactgcgtgtcaggagaggctaacggacatcagctgcagccaggcatgtcccgtatgccaaaagagggtgctgcccctagcctgggcccccaccgacagactgcagctgcgttactgtgctgagaggtacccagaaggttcccatgaagggcagcatgtccaagcccctaaccccagatgtggcaacaggaccctcgctcacatccaccggagtgtatgtatggggaggggcttcacctgttcccagaggtgtccttggactcaccttggcacatgttctgtgtttcagtaaagagagacctgatcacccatctgtgtgcttccatcctgcattaaaattcactcagtgtggcccag

SEQ ID NO: 1342 - protein, 557 aa, Homo sapiens
MGCLWGLALPLFFFCWEVGVSGSSAGPSTRRADTAMTTDDTEVPAMTLAPGHAALETQTLSAETSSRASTPAGPIPEAETRGAKRISPARETRSFTKTSPNFMVLIATSVETSAASGSPEGAGMTTVQTITGSDPEEAIFDTLCTDDSSEEAKTLTMDILTLAHTSTEAKGLSSESSASSDGPHPVITPSRASESSASSDGPHPVITPSRASESSASSDGPHPVITPSRASESSASSDGPHPVITPSWSPGSDVTLLAEALVTVTNIEVINCSITEIETTTSSIPGASDIDLIPTEGVKASSTSDPPALPDSTEAKPHITEVTASAETLSTAGTTESAAPHATVGTPLPTNSATEREVTAPGATTLSGALVTVSRNPLEETSALSVETPSYVKVSGAAPVSIEAGSAVGKTTSFAGSSASSYSPSEAALKNFTPSETPTMDIATKGPFPTSRDPLPSVPPTTTNSSRGTNSTLAKITTSAKTTMKPPTATPTTARTRPTTDVSAGENGGFLLLRLSVASPEDLTDPRVAERLMQQLHRELHAHAPHFQVSLLRVRRG

SEQ ID NO: 1343 - DNA, 3501 bp, Homo sapiens
gggccgcactggaccagggatgagagtgggtgcccgggactcgcctatactgcctgggggtgcagcccgcactcctcactatagtcaaatcgactatgcgtgctttccaggggcccgggagaggactccatggggagggatgcttaccttgtgggctttggaatataagccctttcatcttctccgctggtcctcaccacgttggcaaggcaggtattgtgaccctgttttctcaggtgaggacatggaggctgggaggggtctagagactggcctggctagtaggaggctgagtcaggatttgaaccagcagatcatctgaccccagagccggtcgtgggcggcacagcgggagctgcaaccgaggctcttgactcctgcctcgtcattccctgaggtccacaggacaaccagctggggacctggagccccatcctgacgtcctggggagaggtgctaggccccttttgggtctatgagctacttttgggccagtggagccgggtaaagaccatctcaaaccctgtgccaggggaggtcagactccaagagcgccacctttgggcttccagctgtgtgggctgcaccaagaaggctcagagaattagggggttcgtatttgatccttttccttccaagactgggattaccagataaaacacagggcatccagttacatttgaatttcaggtaacaatttttttttaagtgtaagtacgtagccaatattgcatgagaaatactcatgctaaaaagttattcgtcatttatctgaactgcgagttcaaatttaaccgagtaccctgtatttttatttgctaaatctagaaaccctctccaagagactccttggcccactcacagggagagcccgatctccctctagacaggggaggccccctttctcaggccagaaaagatcttgtagtaaactactcaagaggctgaggcaggaggatcgcttgagcccaggaattcaagacctgcctgggcaacagagcaagaccctgtctctagggaagatatcctaccgtagcctccctcggggactcccattcctcccacctcagggccagtcaagggaacaggcctctgctctgggcagaagtgccggcagccgctctctgaaaagctaggtgttgcctcaggggctcccggtgtcctgtggaaaatgcctggccacggtttccatggttcccaggctccaaccctgcagttctcggccctcattcaggaggggcctcggcagggtggggggtgccgtctttcccttgccggagccccaaggactctgccggctccctcgctttggcagcagcactgcccaccctgtctctggaggttcccccgcctcaatccacccagctaccccgaaaggcacaatcataggcctttctcgtcttttaagggttttttacttccatggggaactatgtgttggatgagaaaagtacccggggaaggcgacagaggttcagaaagctctgcgagtcctggacgctggtctgccttcttggctcaccctggaaggtggacgctggccccacacatcccctcttaaagacgcaggccgatagccagcagatcctggggcttgctggccccaagtgagttgtcagggtttcagaggacgccagtcatggcaaccccagctccatggctgccacacaggcctgggcttcccaggactgcctccttcttgttcgcttatgtagatgaaaaatgaggtaacggcactcccctgccccaccctcctcccagaagtgcccagggtgtaaatgcaatagcttgtgtgaagtccactggaacccaggctcaccaagtcagtcttaaccaacacaggccccagcacccgcagagcagacactgcgatgacaacggacgacacagaagtgcccgctatgactctagcaccgggccacgccgctctggaaactcaaacgctgagcgctgagacctcttctagggcctcaaccccagccggccccattccagaagcagagaccaggggagccaagagaatttcccctgcaagagagaccaggagtttcacaaaaacatctcccaacttcatggtgctgatcgccacctccgtggagacatcagccgccagtggcagccccgagggagctggaatgaccacagttcagaccatcacaggcagtgatcccgaggaagccatctttgacaccctttgcaccgatgacagctctgaagaggcaaagacactcacaatggacatattgacattggctcacacctccacagaagctaagggcctgtcctcagagagcagtgcctcttccgacggcccccatccagtcatcaccccgtcacgggcctcagagagcagcgcctcttccgacggcccccatccagtcatcaccccgtcacgggcctcagagagcagcgcctcttccgacggcccccatccagtcatcaccccgtcacgggcctcagagagcagcgcctcttccgacggcccccatccagtcatcaccccgtcacgggcctcagagagcagtgcctcttccgacggcccccatccagtcatcaccccgtcacgggcctcagagagcagcgcctcttccgacggcccccatccagtcatcaccccctcatggtccccgggatctgatgtcactctcctcgctgaagcccctggtgactgtcacaaacatcgaggttattaattgcagcatcacagaaatagaaacaacaacttccagcatccctggggcctcagacatagatctcatccccacggaaggggtgaaggcctcgtccacctccgatccaccagctctgcctgactccactgaagcaaaaccacacatcactgaggtcacagcctctgccgagaccctgtccacagccggcaccacagagtcagctgcacctcatgccacggttgggaccccactccccactaacagcgccacagaaagagaagtgacagcacccggggccacgaccctcagtggagctctggtcacagttagcaggaatcccctggaagaaacctcagccctctctgttgagacaccaagttacgtcaaagtctcaggagcagctccggtctccatagaggctgggtcagcagtgggcaaaacaacttcctttgctgggagctctgcttcctcctacagcccctcggaagccgccctcaagaacttcaccccttcagagacaccgaccatggacatcgcaaccaaggggcccttccccaccagcagggaccctcttccttctgtccctccgactacaaccaacagcagccgagggacgaacagcaccttagccaagatcacaacctcagcgaagaccacgatgaagccccatctctactaaaaatacaaaaattagctgggtgtggtggcatgcacctgtagtcccagctactcgggaggttgaggcaggagaatcacttgcaccagggaggtggaggttgcagtgagccgagattgcgccactgcactccagcctgggcaacagagcaag

SEQ ID NO: 1344 - DNA, 1087 bp, Homo sapiens
cttttgagcaggagtccgggccctcgtgtcaccgctctgaagtcaaggagaggctgggaggcggcagaatgcagccagaggagggcacaggctggctgctggagctgctgtccgaggtgcagctgcaacagtacttcctgcggctccgagatgacctcaacgtcacccgcctgtcccactttgagtacgtcaagaatgaggacctggagaagatcggcatgggtcggcctggccagcggcggctgtgggaggctgtgaagaggaggaaggccttgtgcaaacgcaagtcgtggatgagtaaggtgttcagtggaaagcgactggaggctgagttcccacctcatcactctcagagcaccttccggaagacctcgcccgcccctgggggcccagcaggggaggggcccctgcagagcctcacctgcctcattggggagaaggacctgcgcctcctggagaagctgggtgatggttcctttggcgtggtgcgcaggggcgagtgggacgcgccctcagggaagacggtgagtgtggctgtgaagtgcctgaagcccgatgtcctgagccagccagaagccatggacgacttcatccgggaggtcaatgccatgcactcgctcgaccaccgaaacctcatccgcctctacggggtggtgctcacgccgcccatgaagatggcatcagtttcccaaattgcctcgagggagaggcctgagaaactgcaggactcctagaggtccccagacagcaggccaggaaggtgacagagctggcacctctgggatcgttgttggaccggctacgtaagcaccagggccacttcctcctggggactctgagccgctacgctgtgcaggtggctgagggcatgggctacctggagtccaagcgctttattcaccgtgacctggctgcccgcaatctgctgttggctacccgcgacctggtcaagatcggggactttgggctgatgcgagcactacctcagaatgacgaccattacgtcatgcaggaacatcgcaaggtgcccttcgcctggtgtgcccccgagagcctgaagacacgcaccttctcccatgccagcgac

SEQ ID NO: 1345 - DNA, 1801 bp, Homo sapiens
tgtcttcagtgaaatgataccggtccccactgcccagctcacctcccggggctgcaggaggcaccggagataatggctgtagagggtcttgtaacctgaacattgcttgcaaacataaggaattctagttactgggaggaagcacagggcagaggccagaagaggccctcagatttgaggcaccctagcccagacggataaggatccaccagctctgggggcgtgagacccaagctggcaagaatctgcaatctggagccaaggctgtgggtgcctcagtggaggccgagtcagaccgacgtggccagctttgaccctcatggcctcctttcttctgtcccttgaccttcggctcctccctgtccaccctggcctccgagtctcctccacttttccttccgtctcagccctcagctctaggcgcccctccagagacccagctgtcttcccaggccccttcccagcaaggactagcttcatctgaaccacacacacactcacggttcaacctcagactaaaattatcctctcccctgggcaggatgaagggcagccgactccctggtgagggtggagacagacagcaccaaatggtcaggccagagaaggggccagggctaaaaatggacaaggaggtgtctgtggagggcccctgcggctccatcgatgcgggttagggctggagtctgcggggtggcgggtgcaggaagggagggtggggcaggactgggaggagactccgaccttggctgggcggtgccctccctctccacacagctgggtgtggggccgctcagccacaggctgcatgcctgtcggtctctttctggcaccctccttgaggccagcatcaggctttgggttcatgtttgggggtgtgccctggacggagtgtgggcctccagccaggctgccccactgacagtttggcaaaaccaggacctatctggaagccgaagccggggatcaccaggtggacccagcggggtgggactgagtgactgaccctggggtgttggattccatctggcccccggctgccttcaaacaggtgttcagtggaaagcgactggaggctgagttcccacctcatcactctcagagcaccttccggaagacctcgcccgcccctgggggcccagcaggggaggggcccctgcagagcctcacctgcctcattggggagaaggacctgcgcctcctggagaagctgggtgatggttcctttggcgtggtgcgcaggggcgagtgggacgcgccctcagggaagacggtgagctctctgtgtcctgccagcgcagcagaggcatgggacccggggctggtagtggctcttctgcccccaaccagggtgtggatgggactggggatgcgtcacagtgtggctcatcccagagtccgtgctcaggatttttggggttttatttatttatttatttttgagatggagtctcgctctgtcgcccaggctggagtgcagtaggcacgatctcggcttcctgcaacctccactttccgggttcaagcaatcctcctgcctcagcctcctgagtagctgggattacaggcatgcaccaccacactcagttaatttttgtatttttagtagagacggggtttcaccatgttggccaggctggtctcgaactcctgacctcagatgatctgcccactttagcctcccaaagtgcttggattacaggtgtgagccaccacgtccagcccatgctcaggtttaactaagcacatttattatttcaactataaaaataatttattataaaagtttggaaagtatttg

SEQ ID NO: 1346 - protein, 112 aa, Homo sapiens
MRVRAGVCGVAGAGREGGAGLGGDSDLGWAVPSLSTQLGVGPLSHRLHACRSLSGTLLEASIRLWVHVWGCALDGVWASSQAAPLTVWQNQDLSGSRSRGSPGGPSGVGLSD

SEQ ID NO: 1347 - DNA, 1591 bp, Homo sapiens
catcctcccagagaaggggcccgaatcgccgaagggcactgcttcgccgatttaaaaaacaaagcaaaaagccccgcatctgcatcaggaaggcgcctctgcctactctgggagagagaagggcacccctcccccttgctacgtagtcgtctgcggaggcacaaccgtggaaacgggagccgccaccaccaccaccgctcaaacctctcggcactggctggggtacagggagcggctgcgagcgaatgggataagcgagcctccagttccccgtcttccagagcaagtggcttcagtgatatccaagcgcccttccagcacccattccctgcctcgccagcaggcaccggggccccacttggcgtttgcggatttcagctgaatgggaggcgacacaatgagacaagagcaaaccgtttctcagcgttcttgcccagggccttcccgtctcgcggcccggcctccctcacccggaagtgctggtcccggtactggctcagctccacgtaggagtcgctgcgcagcgccttcaggaggccacccgacatagtgcagagaagcggaccacaatgcggcgactcccggcacgaggctgcgtccgcgatggcggaagcggaaacgcgcggaggcgagcatctcattggacccaatccgagggcggcagtgtcgtcatcaagctgcgcgggggcatagacgtccgggtcgggcgccgcggggcggaagacgagggcggcgaggtcgggttccgggcgcttggagaagatggtgctgcggcggctgctggccgccctgctgcacagcccgcagctggtggaacgtctgtcagagtcgcggcctatccgacgtgcggcgcagctcacggccttcgcactgctgcaggcccagctgcggggccaggacgcggcccgccgcctgcaggacctcgcggctgggcccgtgggctccctgtgccgccgcgctgagcgatttagagacgccttcacccaggagctacgccgcggcctccgaggccgctcggggccaccaccaggtagccagaggggccctggcgcaaacatttaatcctgggctgtgcggggccgaggctgcttgcttttccttccgggctctacagtggcatcaatgtggaggggtcattccgggcactgcgcgcggcttcgaatcccgactgggattgttggcctgcagacatcccacgcataagagcctaggccagaccgcccgctccgttgaagtcttgtgattggacaagacacagtgtggagaaagacccctaagcctaacagagatgaaggtaggctgggtccagacacggcacctacggagagccacggaccgaagccagagagcctttcctctgcaagtgggactgaaactcttgacagatgctgctcaatctgactggtatagcaggacagttaattccagggacgatatggatgaaaagacaaccctacagctgccaaattcctttgattaaatgtgtgagctggttgataggcatgagtgtgatacttctcaggcaagatgtgttaagaataccggggactgtaggcctatggtaataataaacacgtattttatgaaatga

SEQ ID NO: 1348 - DNA, 1651 bp, Homo sapiens
ccggctgctgcggacctcctcggacccggacccagccccagcccggccccagccagccccgacggcgccatgcggggtccgagcggggctctgtggctgctcctggctctgcgcaccgtgctcggtggcatggaggtgcggtggtgcgccacctcggacccagagcagcacaagtgcggcaacatgagcgaggccttccgggaagcgggcatccagccctccctcctctgcgtccggggcacctccgccgaccactgcgtccagctcatcgcggcccaggaggctgacgccatcactctggatggaggagccatctatgaggcgggaaaggagcacggcctgaagccggtggtgggcgaagtgtacgatcaagaggtcggtacctcctattacgccgtggctgtggtcaggaggagctcccatgtgaccattgacaccctgaaaggcgtgaagtcctgccacacgggcatcaatcgcacagtgggctggaacgtgcccgtgggctacctggtggagagcggccgcctctcggtgatgggctgcgatgtactcaaagctgtcagcgactattttgggggcagctgcgtcccgggggcaggagagaccagttactctgagtccctctgtcgcctctgcaggggtgacagctctggggaaggggtgtgtgacaagagccccctggagagatactacgactacagcggggccttccggtgcctggcggaaggggcaggggacgtggcttttgtgaagcacagcacggtactggagaacacggatgaaagtccatcacgaaggcaaacatggaccagatctgaggaggaagaaggcgagtgccctgcacacgaggaagcacgtaggacgatgcgctctagtgctgggcaagcctggaaatgggctcccgttcacaggccccaggacgagtctgacaaaggagaatttggaaaacgggcaaagagtagggatatgttgggttaagaatcagctctttcaaacttggggttttttttgggatgggggtctcaccatgttgcccaggctggtctcaaacccccagcctcaactgatcctcgcatctcagcctcctgagtagctgggatgacaggcgtgcacctggcagctttttcaaagtgttgatggtaatctgaggcaatctaagggagtcattttttaagtgactttatacagaaagattggtaagagccaaggggtagaagtggcataaatgtctaaagcagggaagtgacaggactttcattgttcttggctgaggagaagcgggagtggctgatggaagcacctaaatgatgcctttgtctgtgggaaggcaaatgatgccccagagctctaaccaaaggttttgcagccgccgaaaaacaggaaagttgggaagcgggggtaggactacactgaatcattaacagtgctgtaaactaccatgtggccattaacaatgacctttagggagttttcctaaacgatcactctggtgcgggtgtttggttttgttttaaaatagctttgcagtgaaagctttcatgaccatacaaattatcttttttcttcctatttccttgtagaggtttttttcctccttgtcttaaggtcataaaaatattgttatgtgggaaaaaaaaaaaaaaaaaaaaaa

SEQ ID NO: 1349 - protein, 302 aa, Homo sapiens
MRGPSGALWLLLALRTVLGGMEVRWCATSDPEQHKCGNMSEAFREAGIQPSLLCVRGTSADHCVQLIAAQEADAITLDGGAIYEAGKEHGLKPVVGEVYDQEVGTSYYAVAVVRRSSHVTIDTLKGVKSCHTGINRTVGWNVPVGYLVESGRLSVMGCDVLKAVSDYFGGSCVPGAGETSYSESLCRLCRGDSSGEGVCDKSPLERYYDYSGAFRCLAEGAGDVAFVKHSTVLENTDESPSRRQTWTRSEEEEGECPAHEEARRTMRSSAGQAWKWAPVHRPQDESDKGEFGKRAKSRDMLG

SEQ ID NO: 1350 - DNA, 885 bp, Homo sapiens
gggcgccgcggggcggaagacgagggcggcgaggtcgggttccgggcgcttggagaagatggtgctgcggcggctgctggccgccctgctgcacagcccgcagctggtggaacgtctgtcagagtcgcggcctatccgacgtgcggcgcagctcacggccttcgcactgctgcaggcccagctgcggggccaggacgcggcccgccgcctgcaggacctcgcggctgggcccgtgggctccctgtgccgccgcgctgagcgatttagagacgccttcacccaggagctacgccgcggcctccgaggccgctcggggccaccaccaggtagccagaggggccctggcgcaaacatttaatcctgggctgtgcggggccgaggccgcttgcttttccttccgggctctacagtggcatcaatgtggaggggtcattccgggcactgcgcgcggcttcgaatcccgactgggattgttggcctgcagacatcccacgcataagagcctaggccagaccgcccgctccgttgaagtcttgtgattggacaagacacagtgtggagacagccctaagcctaacagagatgaaggtaggctgggtccagacacggcacctacggagagccacggaccgaagccagagagcctttcctctgcaagtgggactgaaactcttgacagatgctgctcaatctgactggtatagcaggacagttaattccagggacgatatggatgaaaagacaaccctacagctgccaaattcctttgattaaatgtgtgagctggttgataggcatgagtgtgatacttctcaggcaagatgtgttaagaataccggggactgtaggcctatggtaataataaacacgtattttatgaaatga

SEQ ID NO: 1351 - protein, 99 aa, Homo sapiens
MVLRRLLAALLHSPQLVERLSESRPIRRAAQLTAFALLQAQLRGQDAARRLQDLAAGPVGSLCRRAERFRDAFTQELRRGLRGRSGPPPGSQRGPGANI

SEQ ID NO: 1352 - DNA, 809 bp, Homo sapiens
atgcctgtcttcatcttgaaagaaaagctccaggtcccttctccagccacccagccccaagatggtgatgctgctgctgctgctttccgcactggctggcctcttcggtgcggcagagggacaagcatttcatcttgggaagtgccccaatcctccggtgcaggagaattttgacgtgaataagtatctcggaagatggtacgaaattgagaagatcccaacaacctttgagaatggacgctgcatccaggccaactactcactaatggaaaacggaaagatcaaagtgttaaaccaggagttgagagctgatggaactgtgaatcaaatcgaaggtgaagccaccccagttaacctcacagagcctgccaagctggaagttaagttttcctggtttatgccatcggcaccgtactggatcctggccaccgactatgagaactatgccctcgtgtattcctgtacctgcatcatccaactttttcacgtggattttgcttggatcttggcaagaaaccctaatctccctccagaaacagtggactctctaaaaaatatcctgacttctaataacattgatgtcaagaaaatgacggtcacagaccaggtgaactgccccaagctctcgtaaccaggttctacagggaggctgcacccactccatgttacttctgcttcgctttcccctaccccacccccccccataaagacaaaccaatcaaccacgacaaaggaagttgacctaaacatgtaaccatgccctaccctgttaccttgctagctgcaaaataaacttgttgctgacctgc

SEQ ID NO: 1353 - protein, 189 aa, Homo sapiens
MVMLLLLLSALAGLFGAAEGQAFHLGKCPNPPVQENFDVNKYLGRWYEIEKIPTTFENGRCIQANYSLMENGKIKVLNQELRADGTVNQIEGEATPVNLTEPAKLEVKFSWFMPSAPYWILATDYENYALVYSCTCIIQLFHVDFAWILARNPNLPPETVDSLKNILTSNNIDVKKMTVTDQVNCPKLS

SEQ ID NO: 1354 - DNA, 3453 bp, Homo sapiens
gcgcgagtgggaggtggcaggcctgcgactccggccttgtccgcgcccgctctcggcgcgacgtctccagccatgaaccggtttggtacccggttggtgggagccacggcgacttcttcgccgccgccgaaggcccgcagcaatgaaaacctcgacaaaatagatatgtctttggatgatatcatcaagttgaatcgaaaggaagggaagaagcagaattttccaagactaaatagaagactcctccagcaaagtggtgcccagcaattcaggatgagagtgcgatggggaatccaacagaattctggttttggtaagactagtctgaatcatagaggaagagtaatgcctggaaagagacgtcctaatggagttatcactggccttgcagctaggaaaacgactggaattcgaaaaggaattagtcctatgaatcgtccacctctaagtgacaagaatatagaacaatattttccagtgttaaaaaggaaggcaaaccttctgagacaaaatgaagggcagaggaaaccagtagcagttctcaagagacctagccagctaagcagaaaaaataacattccagctaattttaccaggagtggaaataaattaaatcatcagaaagatactcgtcaggcaacttttcttttcagaagaggcctgaaggtgcaggcccagttgaatacagaacaactgctagacgatgtagtagcaaagagaactcgtcaatggcggacttccaccacaaatggagggattttgactgtatctattgacaatcctggagcagtgcaatgcccagtaactcagaaaccacgattaactcgtactgctgtaccttcatttttaacaaagcgggagcaaagtgacgtcaagaaagttcctaaaggtgttcccctgcagtttgacataaacagtgtcggaaaacagacagggatgacgttgaatgagcggtttgggatcctgaaggaacaaagagccactctcacatacaacaaagggggaagccgctttgtcaccgtgggataggtcccatgtcaaaggaacttttgagtgatgactctgagaagttgaattgcttgaagagttcatcacggaaattcaagaaactttacttcaaaatattcacaaggctaaataactcttatttttatttttgaaggtttttttttttaaaaaaaaaaaacgtataaaataatgccctgaaagaataatagggattatacctgtctgttcttaaagatttcatggttggctcagacagaacaatcatctgtttgacttctttggttcctcatgcagcagaaggaagacagaaggatagaaattgattatttttatgatagcggtattcaggatctcatcacctttgcccgtgttttagactttgtcatggtaaatcctggtcttcataaacatgagtaggtcccttggttgctgtcacttgccctttaatagtgttgatgtagtcagtgccgttgccttttcttcattagagacacagaacaatgtattagaatttccagctgtgggtttgaagacttagggggacatccagaacgtgcttcctctttcagacggtgtaaagtcccctggaattacacagctttagtgctgagcttttaacaggaaatgtggccctaggtattagtcttagtttaaaatgttggtgtttagagactgtaaatgcatattcacaaagttatctgatagggccttggaggagaaggtccagttttaaaaaatgacagtttgtgtttaataaatgaaggcatgagaggaagtaagtagcaagttgaaggacaggtagttgagatgaaacacttcaaaaccctggttatagatgtactgtttggatgtagcatagtcttgagtctagcgtccacaaagaattattcaaatgatatttagaagaattataactattacattgaatggagtcccttggatattttgatagtaaaattaatagccataaagtcctagacttcttatttgaagttaaaatttcttatttgaaaagttgaaatttatgagctttgaagattgctaaattaaataatttatagctccaaaaacaaaaatatacttgtatatgtcacagagaaaaaaaatgcaaaatttataatagagttacattaaccttgttgtttacctttcactgatttcttatatggtataaattaaagttcaggcatttatggggagaaaaggccctccccaccgacccgccacctgccacctctgacggagtgggagaagttagtctgtgctaagatagtactgagtccccagatgttgtatactgtaaattacagtataatgccaaatgcagcaaaatcttccagctgtacgttacaagtttggtcattttgaagcttgacattttagtttgccattatgttaaaaacatctaaataggtgttagtttctcaggagtagattgttagtgttgacttttcctgtaaagcagacatcgttcttggcctgccctgcattgtatactagatttcattgttgtctctcatgcttcttgagttgcttcatggtttatgctcgccatggaaagctatcagtaacagtttcatgcttataccaaagaattaaatctgatctttaatatctgatattttcctggtactcgtactgataagggattattggaagtcagtcacagaatttggaaataaattctagtctctccttagctatttgatgcttttcatataggccaagaactcattgcaaaacatttttgcaaggatgaatgcctgtatttggtctaggaacagtacattttagtctgatttagaattactggtagcttattttaaagcaaggaaaagcagctgagctcaagtttgctgtctttagaatggtttgtgaaaatatggtataaaggtgttttcattttcctgttcttacctattattgtatagagctattcatgccattttttgggaaaactttaaaaattgccccaaatactgacattgagtgcattaaataacaaattatctttgatacattaaacttttattcttcatgcatctgtaatttaattttaagtataatgttttgcctttggtacaactaaattaaaactcttggtggtcacatattgtatataaacaaaacaatatgctttgttgaaggaaaattttctttattggaatgtggttgtaatccttgttcagttcttaagtttcggttttttttaaaaacaggatgcaacttaaacttttctttgcatcaaggtatatgcaaaacattggtgccgtgcatcaccaaatgaaagtttgtatttaacgaggaggtgctttacactgtactttttggtgttttttggaaaagttacatttagatctattctgaagctgttcatttttaacaaataaaatgttacaggtttcacatgatttattctcagctctaaaaaaaaaaaaaaaaaaa

SEQ ID NO: 1355 - protein, 318 aa, Homo sapiens
MNRFGTRLVGATATSSPPPKARSNENLDKIDMSLDDIIKLNRKEGKKQNFPRLNRRLLQQSGAQQFRMRVRWGIQQNSGFGKTSLNHRGRVMPGKRRPNGVITGLAARKTTGIRKGISPMNRPPLSDKNIEQYFPVLKRKANLLRQNEGQRKPVAVLKRPSQLSRKNNIPANFTRSGNKLNHQKDTRQATFLFRRGLKVQAQLNTEQLLDDVVAKRTRQWRTSTTNGGILTVSIDNPGAVQCPVTQKPRLTRTAVPSFLTKREQSDVKKVPKGVPLQFDINSVGKQTGMTLNERFGILKEQRATLTYNKGGSRFVTVG

SEQ ID NO: 1356 - DNA, 478 bp, Homo sapiens
aatcaagaggttccaatcttcgtgttcactttaagaacactcgtggaactgctcaggccaccaagggtatgcatatacgaaaagccacgaagtatctgaaagatgtcactttacagaaacagcgtgtaccattccgacgttacaatgatggagttggcaggtgtgcgcaggccaagcagtggggctggacacaaggtcggtggcccagaaagagtgctgaattctctggtcattgagcatatccaagtgaacaaagcacctgagatgtgccgccggacctacagagctcatggtcggattaacccatacatgagctctccctgccacattgagatgatccttatggaaaaggaacagattgttcctaaaccagaagaggaggttgcccagaagaaaaagatatcccagaagaaactgaagaaacaaaaacttacggcacgggagtaaattcagcattaaaataaatgtaattaaaagg

SEQ ID NO: 1357 - protein, 114 aa, Homo sapiens
MSLYRNSAYHSDVTMVELASVRRPSSGAGHKVGGPKRVLNSLVIEYIQVNKAPKMLRRTYRAHGRINSYMSSPWHIEMILTEKEQIVPKPEKEVAQKKKISQKKLKKQKLMARK

SEQ ID NO: 1358 - DNA, 389 bp, Homo sapiens
tgtagattagctgtgaatatcttgactcctttaaggtaataaggcttttgtttgtttttatctttcacagctagaaaattatggcatgccgtttagcagaactgaagatgggaagatttatcagcgtgcatttggtggacagagcctcaagtttggaaagggcaggcaggcccatcggtgctgctgtgtggctgatcggaccggccactcaatattgcacacctcatatgggaggtctctgagatatgataccagctgttttgtggagtattttgccttggatctcctgatagagaacagggagtgccgtggtgtcattgcactgtgcatagaggacgggtccatccatcacataagagcaaagaacactgttgttgccacagggtagg

SEQ ID NO: 1359 - DNA, 1030 bp, Homo sapiens
tttccgtgctacctgcagagggatccatacggcgttgttctggattcccgtcataacttaaagggaaactttcacaatgtccggagcccttgatgtcctgcagatgaaggaggaggatgtccttaagttccttgcagcaggaacccacttaggtagcaccaatcttgacttccagatggaacagtacatctataaaaggaaaagtgatggcgtctatatcataaatctgaagaggacctgggagaagcttctgctggcagcttgtgctgttgttgccattgaaaaccctgctcatgtcagtgttaaatcctccaggaatactggccagagggctgtgctgaagtttgctgctgccactggagccactccaattgctggccgcttcactcctggaaccttcactaacgagatccaggcagccttctgggagccacggcttcttgtggttactgatcccagggctgaccaccagcctctcacagaggcatcttaagttaacctacctaccattgctctgtgtaacacagattctcctctgtgctgtgtggacattgccatcccatgcaacagcaagggagctcactcagtgggtttgatgtggtggatgctggcttgggaagttctgcgcatgcatggcaccatttcccgtgaacacccatgggaggtcatgcctgatctctacttctacagagatcctggagagattgaaaaagaagagtaggctgctgctgaaaaggcagtgaccgaggaggaatttcagggtgaatggactgctccagctcctgagttcactgctactcagcctgaggttgcagactggtctgaaggtgtgcaggtgccctctgtgcctattcagcagttccctactgaagactggagcgctcagcctgccatagaagactggtctgcagctcccactgctcaggccactgaatgtgtaggagcaaccactgaatggtcttaagctgttcttgcataggctcttaagcaacatggaaaaatggttaatggaaaataaacatcagtttct

SEQ ID NO: 1360 - DNA, 601 bp, Homo sapiens
gggaaactttcacaatgtccggagcccttgatgtcctgcagatgaaggaggaggatgtccttaagttccttgcagcaggaacccacttaggtagcaccaatcttgacttccagatggaacagtacatctataaaaggaaaagtgatggcgtctatatcataaatctgaagaggacctgggagaagcttctgctggcagcttgtgctgttgttgccattgaaaaccctgctcatgtcagtgttaaatcctccaggaatactggccagagggctgtgctgaagtttgctgctgccactggagccactccaattgctggccgcttcactcctggaaccttcactaacgagatccaggcatcttaagttaacctacctaccattgctctgtgtaacacagattctcctctgtgctgtgtggacattgccatcccatgcaacagcaagggagctcactcagtgggtttgatgtggtggatgctggcttgggaagttctgcgcatgcatggcaccatttcccgtgaacacccatgggaggtcatgcctgatctctacttctacagagatcctggagagattgaaaaagaagagtaggctgctgctga

SEQ ID NO: 1361 - DNA, 530 bp, Homo sapiens
atctgcagtggagccgccaccaaaatgcagattttcgtgaaaacccttacggggaagaccatcaccctcgaggttgaaccctcggatacgatagaaaatgtaaaggccaagatccagggtaaggaaggaattcctcctgatcagcagagactgatctttgctggcaagcagctggaagatggacgtactttgtctgactacaatattcaaaaggagtctactcttcatcttgtgttgagacttctggtggtgctaagaaaaggaagaagaagtcttacaccactcccaagaagaataagcacaagagaaagaaggttaagctggctgtcctgaaatactataaggtggatgagaatggcaaaattagtcgccttcgtcgagagtgcccttctgatgaatgtggtgctggggtgtttatggcaagccactttgacagacattattgtggcaaatgttgtctgacttactgcttcaacaaaccagaagacaagtaactgtatgagttaataaaagacatgaactaaaaaaaa

SEQ ID NO: 1362 - protein, 102 aa, Homo sapiens [sequence omitted]

SEQ ID NO: 1363 - DNA, 2188 bp, Homo sapiens
cccgcccgctaatgttttggccgcttcaagatggcggtgcaggagtcggcggctcagttgtccatgaccctgaaggtccaggagtacccgaccctcaaggtgccctacgagacgctgaacaaacgctttcgcgccgctcagaagaacattgaccgggagaccagccacgtcaccatggtggtggccgagctggagaagacgttgagcggctgccccgccgtggactccgtggtcagcctgctggacggcgtggtggagaagctcagcgtcctcaagaggaaggcggtggaatccatccaggccgaggacgagagcgccaagctgtgcaagcgccggatcgagcacctcaaagagcatagcagcgaccagcccgcggcggccagcgtgtggaagaggaagcgcatggatcgcatgatggtggagcacctgctgcgttgcggctactacaacacggctgtcaagctggcgcgccagagcggcatcgaggacctagtgaatattgagatgttcctgacggccaaagaggtggaggagtccctggagaggcgtgagacggccacctgcctggcctggtgccatgacaacaagtcccggctccggaagatgaagagctgcctggagttcagcctcagaatccaggagttcattgaactcatccggcagaataagagactggacgctgtgagacatgcaagaaagcacttcagccaagcagaagggagccagctggacgaggtgcgccaggccatgggcatgctggccttcccgcccgacacgcacatctccccgtacaaggaccttctggaccctgcacggtggcggatgctgatccagcagttccggtacgacaactaccgactacaccagctgggaaacaattctgtgttcaccctcaccctgcaggctggcctctcagccatcaagacaccacagtgctacaaggaggacggcagctccaagagccctgactgccctgtgtgcagccgctccctgaacaagctggcgcagcccctgcccatggcccactgtgccaactcccgcctggtctgcaagatttctggcgacgtgatgaacgagaacaatccgcccatgatgctgcccaacggctacgtctacggctacaattctctgctttctatccgtcaagatgataaagtcgtgtgcccgagaaccaaagaagtcttccacttctcacaagccgagaaggtgtacatcatgtaggccccacgtcgtgaagcgcacgcctcggggacgggctgcagtgggcggggaggccacgccttcctcctgtcccacgctccagcctgccgcggcgtttctgtttcttgcgaccaaagatccgtgagcaacgataaatactcttaggaagagagaaaataaggtttcataagtttgtacttgaaaacatttggattggtaggattttgtaacacgtcaaccatttgatgcttctgaaaagtactttcaacttgcgaaggaaactcttctttaaagactgacctaaacaccgagggaaacttaagaacgtttaaaatataggagtccgtgatttccctgtgttttcagtttctttccttctgtgaacgatgagacttggagaacgggctggtccttcaccacttcctgttggccctggcctggccggggaaggtggcagcggcaccggactgacctgcagtgacccgcgatgccgcgccacgagggacacttatggcttcattcgagagctgctgccaaaacgcctggcgccgccaccgtcgggggctggcttcgaggacgcccgcctgcctcgcgggtcgtgtccgcgggactgtgttcgtacgtgcatagtttcgatatcacatcgcggggctgtgttcgtagctgcgtcgtttcgatatcacaccctctgtgtgccgccttacttcctgcttcgagaatgtataacgtggaaatccacgggaccaaatttctgcagaggccttgccggatggttccataactgtagagtctaattgctatccattacagaaattaatcgttcagttgaaagaagtactgatgacttttcaaaacaaatgaaccaccgtagctgacagagaaccgtatcgtagaggtttgtagttagtgcttatttttgcatgttgatgttgactagctaataaactgtaaatgtaaaccatgcgaataaaatggttttctatttctc

SEQ ID NO: 1364 - DNA, 3086 bp, Homo sapiens
ccccaggtccggacaggccgagatgacgccgagccccctgttgctgctcctgctgccgccgctgctgctgggggccttcccgccggccgccgccgcccgaggccccccaaagatggcggacaaggtggtcccacggcaggtggcccggctgggccgcactgtgcggctgcagtgcccagtggagggggacccgccgccgctgaccatgtggaccaaggatggccgcaccatccacagcggctggagccgcttccgcgtgctgccgcaggggctgaaggtgaagcaggtggagcgggaggatgccggcgtgtacgtgtgcaaggccaccaacggcttcggcagcctgagcgtcaactacaccctcgtcgtgctggatgacattagcccagggaaggagagcctggggcccgacagctcctctgggggtcaagaggaccccgccagccagcagtgggcacgaccgcgcttcacacagccctccaagatgaggcgccgggtgatcgcacggcccgtgggtagctccgtgcggctcaagtgcgtggccagcgggcaccctcggcccgacatcacgtggatgaaggacgaccaggccttgacgcgcccagaggccgctgagcccaggaagaagaagtggacactgagcctgaagaacctgcggccggaggacagcggcaaatacacctgccgcgtgtcgaaccgcgcgggcgccatcaacgccacctacaaggtggatgtgatccagcggacccgttccaagcccgtgctcacaggcacgcaccccgtgaacacgacggtggacttcggggggaccacgtccttccagtgcaaggtgcgcagcgacgtgaagccggtgatccagtggctgaagcgcgtggagtacgcgccgagggccgccacaactccaccatcgatgtgggcggccagaagtttgtggtgctgcccacgggtgacgtgtggtcgcggcccgacggctcctacctcaataagctgctcatcacccgtgcccgccaggacgatgcgggcatgtacatctgccttggcgccaacaccatgggctacagcttccgcagcgccttcctcaccgtgctgccagacccaaaaccgccagggccacctgtggcctcctcgtcctcggccactagcctgccgtggcccgtggtcatcggcatcccagccggcgctgtcttcatcctgggcaccctgctcctgtggctttgccaggcccagaagaagccgtgcacccccgcgcctgcccctcccctgcctgggcaccgcccgccggggacggcccgcgaccgcagcggagacaaggaccttccctcgttggccgccctcagcgctggccctggtgtggggctgtgtgaggagcatgggtctccggcagccccccagcacttactgggcccaggcccagttgctggccctaagttgtaccccaaactctacacagacatccacacacacacacacacacactctcacacacactcacacgtggagggcaaggtccaccagcacatccactatcagtgctagacggcaccgtatctgcagtgggcacgggggggccggccagacaggcagactgggaggatggaggacggagctgcagacgaaggcaggggacccatggcgaggaggaatggccagcaccccaggcagtctgtgtgtgaggcatagcccctggacacacacacacagacacacacactgcctggatgcatgtatgcacacacatgcgcgcacacgtgctccctgaaggcacacgtacgcacacacgcacatgcacagatatgccgcctgggcacacagataagctgcccaaatgcacgcacacgcacagagacatgccagaacatacaaggacatgctgcctgaacatacacacgcacacccatgcgcagatgtgctgcctggacacacacacacacacggatatgctgtctggacgcacacacgtgcagatatggtatccggacacacacgtgcacagatatgctgcctggacacacagataatgctgccttgacacacacatgcacggatattgcctggacacacacacacacacgtgtgcacagatatgctgtctggacacgcacacacatgcagatatgctgcctggacacacacttccagacacacgtgcacaggcgcagatatgctgcctggacacacgcagatatgctgtctagtcacacacacacgcagacatgctgtccggacacacacacgcatgcacagatatgctgtccggacacacacacgcacgcagatatgctgcctggacacacacacagataatgctgcctcaacactcacacacgtgcagatattgcctggacacacacatgtgcacagatatgctgtctggacatgcacacacgtgcagatatgctgtccggatacacacgcacgcacacatgcagatatgctgcctgggcacacacttccggacacacatgcacacacaggtgcagatatgctgcctggacacacgcagactgacgtgcttttgggagggtgtgccgtgaagcctgcagtacgtgtgccgtgaggctcatagttgatgagggactttccctgctccaccgtcactcccccaactctgcccgcctctgtccccgcctcagtccccgcctccatccccgcctctgtcccctggccttggcggctatttttgccacctgccttgggtgcccaggagtcccctactgctgtgggctggggttgggggcacagcagccccaagcctgagaggctggagcccatggctagtggctcatccccactgcattctccccctgacacagagaaggggccttggtatttatatttaagaaatgaagataatattaataatgatggaaggaagactgggttgcagggactgtggtctctcctggggcccgggacccgcctggtctttcagccatgctgatgaccacaccccgtccaggccagacaccaccccccaccccactgtcgtggtggccccagatctctgtaattttatgtagagtttgagctgaagccccgtatatttaatttattttgttaaacatgaaagtgcatcctttccctcc

SEQ ID NO: 1365 - DNA, 874 bp, Homo sapiens
ccaaagatgttgaccaggaagatcaagctgtgggacatcaacgcccacatcacctgccgcctgtgcagcgggtacctcatcgacgccaccacggtgaccgagtgtctgcacaccttctgcaggagctgcctggtgaagtacctggaggagaacaacacctgccccacctgcaggattgtgatccaccagagccaccccctgcagtacatcggtcatgacagaaccatgcaagatattgtttacaaattggtaccaggcctccaagaagcggaaatgagaaagcagagggagttctatcacaaattgggcatggaggtgccgggagacatcaagggggagacctgctctgcaaaacagcacttagattcccatcggaatggtgaaaccaaagcagacgacagttcaaacaaagaggccgcggaggagaagccggaggaggacaacgactaccaccgcagcgacgagcaggtgagcatctgcctggagtgtaacagcagcaaactgcgcgggctgaagcggaagtggatccgctgctcagcccaggcgaccgtcttgcatctgaagaagttcatcgccaaaaaactcaacctttcatcctttaacgagctggacattttatgcaacgaggagatcctgggcaaggaccacacactcaagttcgtggttgtcactaggtggagattcaagaaggcgccgctcctgctgcactacagacccaagatggacttgctgtgaatggtgccacacagcgcccacagactgggccctcgcacccttgggtgctcccggccgccgcgcttaagaacattgcctctgggtgtcatgtggaccagacttctgaatagagaatatttataacttttgtatgagagag

SEQ ID NO: 1366 - DNA, 336 bp, Homo sapiens
gggcttgtgcggcatcctgctccgtctgcaggttgtgcttccggtgcggaggtcatggacaaaatggtgccaccggtgcaggtctctccgctcatcaagctcggccgctactccgccctgttcctcggtgtggcctacggagccacgcgctacaattacctaaaacctcgggcagaagaggagaggaggatagcagcagaagagaagaagaagcaggatgaactgaaacggattgccagagaattggcagaagatgacagcatattaaagtgagtgaccctgcgacccactctttggaccagcagcggatgaataaagcttcctgtgttgtgtgat

SEQ ID NO: 1367 - protein, 69 aa, Homo sapiens
MVPPVQVSPLIKLGRYSALFLGVAYGATRYNYLKPRAEEERRIAAEEKKKQDELKRIARELAEDDSILK

SEQ ID NO: 1368 - DNA, 661 bp, Homo sapiens
ggagtggcagccggagtctgaactgtcctgggggaccaagcaggagcttaagatgggcaagacctggggccctgggcagacgcatcaaagcaggcagaagcaggcatggccagcaggaagaccaagaagaaggaagggggtgccctccgggcccagagagcctcatccaatgtcttctccaactttgagcagactcagatccaggagttcaaggaggcattcacactcatggatcagaaccgagatggcttcattgacaaggaggacctgaaggacacctatgcctccctgggcaagaccaacgtcaaggacgacgagctggacgccatgctcaaagaggcctcggggcccatcaacttcaccatgtttctgaacctgtttggggagaagctgagcggtaccgacgccgaggagaccattcttaacgccttcaagatgctggacccggacgggaaagggaaaatcaacaaggagtacatcaagcgtctgctgatgtcccaggctgacaagatgacggcggaagaggtggaccagatgttccagttcgcctccatcgatgtggcgggcaacctggactacaaggcgctcagctacgtgatcacccacggggaggagaaggaggagtgagacccagccgggtcaataaacctggacgcttgga

SEQ ID NO: 1369 - protein, 173 aa, Homo sapiens
MASRKTKKKEGGALRAQRASSNVFSNFEQTQIQEFKEAFTLMDQNRDGFIDKEDLKDTYASLGKTNVKDDELDAMLKEASGPINFTMFLNLFGEKLSGTDAEETILNAFKMLDPDGKGKINKEYIKRLLMSQADKMTAEEVDQMFQFASIDVAGNLDYKALSYVITHGEEKEE

SEQ ID NO: 1370 - DNA, 1619 bp, Homo sapiens
cagtagtccttggggcggaactggccccccgtggcccggcccggctcggccccacctccgcccgcaggcggtcccggcccacgcgggaaggtccttaagcccgggcggccggcgggaccggcggagacccgtggaggccgccgacgatggcggggccgacggaggccgagacggggttggccgagccccgggccctgtgcgcgcagcggggccaccgcacctacgcgcgccgctgggtgttcctgctcgcgatcagcctgctcaactgctccaacgccacgatcaactggctgtcactggtctacctcgtggtatccaccccatttggcgtggcggccatctggatcctggactccgtcgggctccgtgcggcgctcggtgtctataccatccctgctggcgtcgtctgcctgctgtccaccatctgcctgtgggagagtgtgccccccaccccgccctctgccggggctgccagctccacctcagagaagttcctggatgggctcaagccgcagctcatgtggaacaaggcctatgtcatcctggctgtgtgcttggggggaatgatcgggatctctgccagcttctcagccctcctggagcagatcctctgtgcaagcggccactccagtgggttttccggcctctgtggcgctctcttcatcacgtttgggatcctgggggcactggctctcggcccctatgtggaccggaccaagcacttcactgaggccaccaagattggcctgtgcctgttctctctggcctgcgtgccctttgccctggtgtcccagctgcagggacagacccttgccctggctgccacctgctcgctgctcgggctgtttggcttctcggtgggccccgtggccatggagttggcggtcgagtgttccttccccgtgggggagggggctgccacaggcatgatctttgtgctggggcaggccgagggaatactcatcatgctggcaatgacggcactgactgtgcgacgctcggagctgtccttgtccacctgccagcagggggaggatccacttgactggacagtgtctctgctgctgatggccggcctgtgcaccttcttcagctgcatcctggcggtcttcttccacaccccataccggcgcctgcaggccgagtctggggagcccccctccacccgtaacgccgtgggcggcgcagactcagggccgggtgtggaccgagggggagcaggaagggctggggtcctggggcccagcacggcgactccggagtgcacggcgaggggggcctcgctagaggaccccagagggcccgggagcccccacccagcctgccaccgagcgactccccgtgcgcaaggcccagcagccaccgacgcgccctcccgccccggcagactcgcaggcagggtccaagcgtccaggtttattgacccggctgggtctcactcctccttctcctccccgtgggtgatcacgtagctgagcgccttgtagtccaggttgcccgccacatcgatggaggcgaactggaacatctggtccacctgcgggcgggggcgaaagggctccttgcgggctccgggagcgaattacaagcgcgcacctgcaaaaaaaaaaaaaaaaaaa

SEQ ID NO: 1371 - protein, 441 aa, Homo sapiens
MAGPTEAETGLAEPRALCAQRGHRTYARRWVFLLAISLLNCSNATINWLSLVYLVVSTPFGVAAIWILDSVGLRAALGVYTIPAGVVCLLSTICLWESVPPTPPSAGAASSTSEKFLDGLKPQLMWNKAYVILAVCLGGMIGISASFSALLEQILCASGHSSGFSGLCGALFITFGILGALALGPYVDRTKHFTEATKIGLCLFSLACVPFALVSQLQGQTLALAATCSLLGLFGFSVGPVAMELAVECSFPVGEGAATGMIFVLGQAEGILIMLAMTALTVRRSELSLSTCQQGEDPLDWTVSLLLMAGLCTFFSCILAVFFHTPYRRLQAESGEPPSTRNAVGGADSGPGVDRGGAGRAGVLGPSTATPECTARGASLEDPRGPGSPHPACHRATPRAQGPAATDAPSRPGRLAGRVQASRFIDPAGSHSSFSSPWVIT

SEQ ID NO: 1372 - DNA, 2707 bp, Homo sapiens
ggcacgaggggttccgtttccggagtggagggcacgccagggtgtctgaagctgagaccccgggctcgcagtcgccccatgaatttcgagttccgcaactgacgctactgggcggggcttcatggccagggcctcgctcaggcctaagtttccccacctgtgctcaatgcacaggtgcggtgccgcctccagggccggccgagaagagaggccgcacccgcacggggactgcatctcccagagcgccccgcgagcggccgagcggcgggactccatgccctagagtgccccgcgggcggccgggcggcgggactccatgtcctagagtgccccgcgggcggccgggcggcgggactccatgtcctagagtgccccgcgggcggccgggcggcgggactccatgtcctagagtgccccgcgggcggccgggcggcggccgccgcaaccgacaggtccgggactgggcgctgcggcctcgtccgcgcgccggggcgggggcctagctcgacagcttcccggcggctgcgcgatggacagccccgaggtgaccttcactctcgcctatctggtgttcgccgtgtgcttcgtgttcacgcccaacgagttccacgcggcggggctcacggtgcagaacctgctgtcgggctggctgggcagcgaggacgccgccttcgtgcccttccacttgcgccgcacggccgccacgctgttgtgccactcgctgctgccgctcggctactacgtgggcatgtgccttgcggcttcagaaaagcggctccacgccctcagccaggcccctgaggcctggcggctcttcctgctgctggccgtgaccctcccctccatcgcctgcatcctgatctactactggtcccgtgaccggtgggcctgccacccactggcgcgcaccctggccctctacgccctcccacagtctggctggcaggctgttgcctcctctgtcaacactgagttccggcggattgacaagtttgccaccggtgcaccaggtgcccgtgtgattgtgacagacacgtgggtgatgaaggtaaccacctaccgagtgcacgtggcccagcagcaggacgtgcacctgactgtgacggagtctcggcagcatgagctctcgccagactcgaacttgcccgtgcagctcctcaccatccgtgtggccagcaccaaccctgctgtgcaggcctttgacatctggagctggaggcctgcataggctgcatgcagacacgtgccagcgtgaagctggtgaagacctgccaggaggcagccacaggcgagtgccagcagtgttactgccgccccatgtggtgcctcacctgcatgggcaagtggttcgccagccgccaggaccccctgcgccctgacacctggctggccagccgcgtgccctgccccacctgccgcgcacgcttctgcatcctggatgtgtgcaccgtgcgctgagtgggctggggccttgaggtgactctgtgtctccccgcaaagccacagggcagggaagggggtggctgggcctcctggctggcaaagggctctacttaaagcacatgatgtagagcaactcgcctctgccctgggtctgcagaaggctgaggacttttggttaaaagcaatcctcatgaaaacaccccaccctgcttggcagccagggtacaagtcctgggcacctcctctttgcctccctcctgcccctttcctgctggtgggggcagatcctgcacacacagacacagcgtctgcccccgagccattccctggagaccctgggtctaccccaggtggtcgtcatctgggccatttgccttacttctctggagcatacccaccctcagttacgtgccagacctggaccgcattctcctgccctgtcctggagctggcccctggctgcctggaggaccctgggtaggtcctgagggtgggatggagaagagggcactgctgtggtgtgggagcagtcctggggcttcctggtggctgtgaccagttgaggggctgttcctgggtggggtggcaatgggaggacaggtcagagcgccctcatttgtggggctgcccctccgggtttctcatcctgtccttggtgcctttttctgcccaacaagtccagggaaggccgaggtctcagactcctgggtaggggtgggggtttgagttgaggaccaaagtgccatagcgacatccagaacacaagcccaccaggggtccagcccaggctacccactcccctagggtctcccaggctcagaaggggatgcacgccccctgtggtcaagcctctggtgggcgtcttgcccagttcctgatggttcaaggggaggggggatgttggccaggccccagggcacagccctgacacaggtgtggctactggaggggccttcatacctgcggccccaaagcccctgggcttggctgtttgaggcagaggtgatggactccgggggcctgacacttgggatttgggaggcttcctagagcgctcagcaggtgaaggcagcaggggccatggccgggagccaggcctagctttgaactgagtttcaagggctgccaaagaggggcagtgggttggggttgtttttactacaaaataagttacttagttttataaagacaaaccgattgtagccaaatgacaccatatttaataaaatttagtctgaagtgaaaaaaaaaaaaaaaaaaaaaa

SEQ ID NO: 1373 - protein, 232 aa, Homo sapiens
MDSPEVTFTLAYLVFAVCFVFTPNEFHAAGLTVQNLLSGWLGSEDAAFVPFHLRRTAATLLCHSLLPLGYYVGMCLAASEKRLHALSQAPEAWRLFLLLAVTLPSIACILIYYWSRDRWACHPLARTLALYALPQSGWQAVASSVNTEFRRIDKFATGAPGARVIVTDTWVMKVTTYRVHVAQQQDVHLTVTESRQHELSPDSNLPVQLLTIRVASTNPAVQAFDIWSWRPA

SEQ ID NO: 1374 - DNA, 2788 bp, Homo sapiens
ggcggcggtagcagccaggcttggcccccggcgtggagcagacgcggacccctccttcctggcggcggcggcgcgggctcagagcccggcaacgggcgggcgggcagaatgagtctgcaggtcttaaacgacaaaaatgtcagcaatgaaaaaaatacagaaaattgcgacttcctgttttcgccaccagaagttaccggaagatcgtctgttcttcgtgtgtcacagaaagaaaatgtgccacccaagaacctggccaaagctatgaaggtgacttttcagacacctctgcgggatccacagacgcacaggattctaagtcctagcatggccagcaaacttgaggctcctttcactcaggatgacacccttggactggaaaactcacacccggtctggacacagaaagagaaccaacagctcatcaaggaagtggatgccaaaactactcatggaattctacagaaaccagtggaggctgacaccgacctcctgggggatgcaagcccagcctttgggagtggcagctccagcgagtctggcccaggtgccctggctgacctggactgctcaagctcttcccagagcccaggaagttctgagaaccaaatggtgtctccaggaaaagtgtctggcagccctgagcaagccgtggaggaaaaccttagttcctattccttagacagaagagtgacacccgcctctgagaccctagaagacccttgcaggacagagtcccagcacaaagcggagactccgcacggagccgaggaagaatgcaaagcggagactccgcacggagccgaggaggaatgccggcacggtggggtctgtgctcccgcagcagtggccacttcgcctcctggtgcaatccctaaggaagcctgcggaggagcacccctgcagggtctgcctggcgaagccctgggctgccctgcgggtgtgggcacccccgtgccagcagatggcactcagacccttacctgtgcacacacctctgctcctgagagcacagccccaaccaaccacctggtggctggcagggccatgaccctgagtcctcaggaagaagtggctgcaggccaaatggccagctcctcgaggagcggacctgtaaaactagaatttgatgtatctgatggcgccaccagcaaaagggcacccccaccaaggagactgggagagaggtccggcctcaagcctcccttgaggaaagcagcagtgaggcagcaaaaggccccgcaggaggtggaggaggacgacggtaggagcggagcaggagaggacccccccatgccagcttctcggggctcttaccacctcgactgggacaaaatggatgacccaaacttcatcccgttcggaggtgacaccaagtctggttgcagtgaggcccagcccccagaaagccctgagaccaggctgggccagccagcggctgaacagttgcatgctgggcctgccacggaggagccaggtccctgtctgagccagcagctgcattcagcctcagcggaggacacgcctgtggtgcagttggcagccgagaccccaacagcagagagcaaggagagagccttgaactctgccagcacctcgcttcccacaagctgtccaggcagtgagccagtgcccacccatcagcaggggcagcctgccttggagctgaaagaggagagcttcagagaccccgctgaggttctaggcacgggcgcggaggtggattacctggagcagtttggaacttcctcgtttaaggagtcggccttgaggaagcagtccttatacctcaagttcgaccccctcctgagggacagtcctggtagaccagtgcccgtggccaccgagaccagcagcatgcacggtgcaaatgagactccctcaggacgtccgcgggaagccaagcttgtggagttcgatttcttgggagcactggacattcctgtgccaggcccacccccaggtgttcccgcgcctgggggcccacccctgtccaccggacctatagtggacctgctccagtacagccagaaggacctggatgcagtggtaaaggcgacacaggaggagaaccgggagctgaggagcaggtgtgaggagctccacgggaagaacctggaactggggaagatcatggacaggttcgaagaggttgtgtaccaggccatggaggaagttcagaagcagaaggaactttccaaagctgaaatccagaaagttctaaaagaaaaagaccaacttaccacagatctgaactccatggagaagtccttctccgacctcttcaagcgttttgagaaacagaaagaggtgatcgagggctaccgcaagaacgaagagtcactgaagaagtgcgtggaggattacctggcaaggatcacccaggagggccagaggtaccaagccctgaaggcccacgcggaggagaagctgcagctggcaaacgaggagatcgcccaggtccggagcaaggcccaggcggaagcgttggccctccaggccagcctgaggaaggagcagatgcgcatccagtcgctggagaagacagtggagcagaagactaaagagaacgaggagctgaccaggatctgcgacgacctcatctccaagatggagaagatctgacctccacggagccgctgtccccgcccccctgctcccgtctgtctgtcctgtctgattctcttaggtgtcatgttcttttttctgtcttgtcttcaactttttttaaaactagattgctttgaaaacatgactcaataaaagtttcctttcaatttaaaaaaaa

SEQ ID NO: 1375 - protein, 838 aa, Homo sapiens
MSLQVLNDKNVSNEKNTENCDFLFSPPEVTGRSSVLRVSQKENVPPKNLAKAMKVTFQTPLRDPQTHRILSPSMASKLEAPFTQDDTLGLENSHPVWTQKENQQLIKEVDAKTTHGILQKPVEADTDLLGDASPAFGSGSSSESGPGALADLDCSSSSQSPGSSENQMVSPGKVSGSPEQAVEENLSSYSLDRRVTPASETLEDPCRTESQHKAETPHGAEEECKAETPHGAEEECRHGGVCAPAAVATSPPGAIPKEACGGAPLQGLPGEALGCPAGVGTPVPADGTQTLTCAHTSAPESTAPTNHLVAGRAMTLSPQEEVAAGQMASSSRSGPVKLEFDVSDGATSKRAPPPRRLGERSGLKPPLRKAAVRQQKAPQEVEEDDGRSGAGEDPPMPASRGSYHLDWDKMDDPNFIPFGGDTKSGCSEAQPPESPETRLGQPAAEQLHAGPATEEPGPCLSQQLHSASAEDTPVVQLAAETPTAESKERALNSASTSLPTSCPGSEPVPTHQQGQPALELKEESFRDPAEVLGTGAEVDYLEQFGTSSFKESALRKQSLYLKFDPLLRDSPGRPVPVATETSSMHGANETPSGRPREAKLVEFDFLGALDIPVPGPPPGVPAPGGPPLSTGPIVDLLQYSQKDLDAVVKATQEENRELRSRCEELHGKNLELGKIMDRFEEVVYQAMEEVQKQKELSKAEIQKVLKEKDQLTTDLNSMEKSFSDLFKRFEKQKEVIEGYRKNEESLKKCVEDYLARITQEGQRYQALKAHAEEKLQLANEEIAQVRSKAQAEALALQASLRKEQMRIQSLEKTVEQKTKENEELTRICDDLISKMEKI

SEQ ID NO: 1376 - DNA, 7886 bp, Homo sapiens
tggtcttgaactcctgaccttgtgatccgctcgcctcagcctcccaaagtgctgggattacaggcatgagccaccgtgcctgtcctagaaccactggtaactcttaactgagacaagatttcgccatgttgcccaggctggtctcgaacttctgagctcaagcgatctacctgcctcgtcctcccaaagtgttggaattgcaggtgtgagccactgcacccggcccttgcctcatgtttgaatgataatttacctgggcataaaattctggacacttgtggtggcacgagctgtctgcttttctgtggagactgcgggttgcagacaccagcagccccctattgctgcacgtcaggtgtcctccacctcagtactgtggacatctcgggccgcatagccctgttgcgcgggcatcctgtgcgttgcaggagatgcagcagcatccatgaccgcaacccatcagagtgttctaagaacggaagcatctgggctggatggaatttagcatcaagcagagtcccctttctgttcagagtgttgtaaagtgcataaagatgaagcaggcaccagaaatcctcggcagtgccaacgggaagactccgagctgcgaggtgaaccgcgagtgttctgtgttcctcagcaaagcccagctctccagtagcctgcaggagggggtcatgcagaagtttaacggccacgacgccctgccctttattccagccgacaagctgaaagatcttacttcccgggtgtttaatggagaacccggcgcacacgatgccaaactgcgttttgagtcccaggaaatgaaagggattgggacaccccctaacactacccctatcaaaaatggctctccagaaattaagctgaaaatcaccaaaacatacatgaatgggaagcctctctttgaatcttccatttgtggtgacagtgctgctgatgtgtctcagtcagaagaaaatggacaaaaaccagaaaacaaggcgagaaggaacaggaagaggagcataaaatatgactccttgctggagcagggccttgtcgaagcagctcttgtgtctaagatctcaagtccttcagataaaaagattccagctaagaaagagtcttgtccaaacactggaagagacaaagaccacctgttgaaatacaacgttggtgatttggtgtggtccaaagtgtcgggttacccttggtggccttgcatggtttctgcagatccactccttcacagctataccaaacttaaaggtcagaaaaagagtgcacgccagtatcacgtacagttctttggtgacgccccagaaagagcttggatatttgagaagagcctcgtagcttttgaaggagaaggacagtttgaaaaattatgccaggaaagtgccaagcaggcacccacgaaagctgagaaaattaagctattgaaaccaatttcagggaaattgagggcccagtgggaaatgggcattgttcaagcagaagaagctgcaagcatgtcagtggaggagcggaaagccaagttcacctttctctatgtgggggaccagcttcatctcaaccctcaagtagccaaggaggctggcattgctgcagagtctttgggagaaatggcagaatcctcaggagtcagtgaagaagctgctgaaaaccccaagtctgtgagagaagagtgcattcccatgaagagaaggcggagggccaaactgtgtagctctgcagagaccctggagagtcaccccgacatagggaagagtactcctcaaaagacggcagaggctgaccccagaagaggagtagggtctcctcctgggaggaagaagaccacagtctccatgccacgaagcaggaagggagatgcagcatcccagtttttggtcttctgtcaaaaacacagggatgaggtggtagctgagcacccagatgcttcaggtgaggagattgaagagctgctcaggtcacagtggagtctgctgagtgagaagcagagagcacgctacaacaccaagtttgccctggtggcccctgtccaggctgaagaagactctggtaatgtaaatgggaaaaaaagaaaccacacaaagaggatacaggaccctacagaagatgctgaagctgaggacacacccaggaaaagactcaggacggacaagcacagtcttcggaagagagacacaatcactgacaaaacggccagaacaagctcttacaaggccatggaggcagcctcctcgctcaagagccaggcagcaacgaaaaatctgtctgatgcatgtaaaccactgaagaagcgaaatcgggcttccacggcagcatcttcagctcttgggtttagcaaaagttcatctccttctgcatccttaactgagaatgaggtctcggacagcccgggagacgagccctcggagtccccatacgaaagtgcagacgaaacacaaactgaagtatctgtctcatccaaaaagtctgagcgaggagtgactgccaaaaaggagtatgtgtgccagctgtgtgagaagccgggcagcctcctgctctgtgaaggaccctgctgcggagctttccacctcgcctgccttgggctttcccggaggccagaagggaggttcacctgcagcgagtgtgcctcagggattcactcatgtttcgtgtgtaaagagagcaagacagatgttaagcgctgtgtggtaactcagtgtggaaaattttaccatgaggcttgtgtgaaaaaataccctctgactgtatttgagagccgaggtttccgctgccccctccacagctgtgtgagctgccatgcttccaacccttcaaacccaaggccgtcaaaaggtaaaatgatgcggtgtgtccgctgccccgttgcctatcacagcggggatgcttgtctggcagcaggatgctcagtgatcgcctccaacagcatcatctgcactgcccacttcactgctcggaaggggaagcgacaccacgcccacgtcaacgtgagctggtgcttcgtgtgctccaaaggggggagccttctgtgctgtgagtcctgcccagcggccttccaccctgactgcctgaacatcgagatgcctgacggcagctggttctgcaatgactgcagggctgggaagaagctgcacttccaggatatcatttgggtgaaacttgggaactacagatggtggccggcagaagtttgccatcccaaaaatgttcccccaaatattcagaaaatgaagcacgagattggagaattccctgtgtttttctttgggtctaaagattattactggacgcatcaggcgcgagtgttcccgtacatggagggggaccggggcagccgctaccagggggtcagagggatcggaagagtcttcaaaaacgcactgcaagaagctgaagctcgttttcgtgaaattaagcttcagagggaagcccgagaaacacaggagagcgagcgcaagcccccaccatacaagcacatcaaggtgaataagccttacgggaaagtccagatctacacagcggatatttcagaaatccctaagtgcaactgcaagcccacagatgagaatccttgtggctttgattcggagtgtctgaacaggatgctgatgtttgagtgccacccgcaggtgtgtcccgcgggcgagttctgccagaaccagtgcttcaccaagcgccagtacccagagaccaagatcatcaagacagatggcaaagggtggggcctggtcgccaagagggacatcagaaagggagaatttgttaacgagtacgttggggagctgatcgacgaggaggagtgcatggcgagaatcaagcacgcacacgagaacgacatcacccacttctacatgctcactatagacaaggaccgtataatagacgctggccccaaaggaaactactctcgatttatgaatcacagctgccagcccaactgtgagaccctcaagtggacagtgaatggggacactcgtgtgggcctgtttgccgtctgtgacattcctgcagggacggagctgacttttaactacaacctcgattgtctgggcaatgaaaaaacggtctgccggtgtggagcctccaattgcagtggattcctcggggatagaccaaagacctcgacgaccctttcatcagaggaaaagggcaaaaagaccaagaagaaaacgaggcggcgcagagcaaaaggggaagggaagaggcagtcagaggacgagtgcttccgctgcggtgatggcgggcagctggtgctgtgtgaccgcaagttctgcaccaaggcctaccacctgtcctgcctgggccttggcaagcggcccttcgggaagtgggaatgtccttggcatcattgtgacgtgtgtggcaaaccttcgacttcattttgccacctctgccccaattcgttctgtaaggagcaccaggacgggacagccttcagctgcaccccggacgggcggtcctactgctgtgagcatgacttaggggcggcatcggtcagaagcaccaagactgagaagccccccccagagccagggaagccgaaggggaagaggcggcggcggaggggctggcggagagtcacagagggcaaatagcgccaggcggccgcttggccggatccaggggcggtgcagggcggccggccctgcctgcgggagagggcgagcatgaactggcccggaggacccagctcgagccgccaggacacagacgtacaggcctcctcgggagggagcgcctccccaccactgagccatcctcagcagcgtccgctgcgtctgcactgatgaccgtctgagcccagctcagcgttcctggacaaacagcctcactcctcagcgttaccgccacacttgaatttctccgaatgtcaaggttccctcccactctatttttttaggttaaagttaattggcatatggaatgttttaatctcctctgaaatgtgtagcgtaggcttttcccaagggtcgctagaaactcgtcttcgcgttgccccctttctggctctcagcgccgtcgccactcgggagaggctgggtgaggcccgtgtgaggactgaccctggattcctcgaaactgccattgtgatcattactctgctctttggaaatggctgtatcatttttttgtactaatgtgaattgttcctcagaaacgcttcttttccatcctagtgagaagctggccctgcaggtggtggcagcaatggtgttgtaagatttcctcccgtagttttttctcctcatggatttgaatgaaatgccaataacacgtccactttcaacgtgtagtttacgcggagcactttcgaggcctggccgggttgggcctacttctcacctgggcctatcttctgaactcgctaggttcttatcaacatttgggggataactttgtatatttttttcatttggcttttctttaccagtttctgatttttattctcaatatatttttgctaaacctatttcacaaatcaccaccgactgaagtgtgtgtttactgatgcggccctgagctccatggcgaaaggagtgactttgcagggcgtgagaccgcagtctgcttagagcacaggaagtgacaacttagggagccccgtagggcgctgcaggccccggggaccccagcacgtgggtctaaagagagacggagtctagctctcctgccacccagagtggcttccatctcagcactctgtgggtctggtgatggaagatgcagtctctgctgatcacatgtgccctctgccagggcacctactgagaggtgcggtcctgggggtggaggcctgcctggcaggtgtgcgtgcctcgtacgtgtgttatgggcactggtctaggccaggtatgacacccactctcctgtgagatttcactttagtttttaaaaggtccagttctacagagtgagacctatctatctgagtactacatatgttttaagacttggttctttttttgagggatccttgaccctgggaagtctggagcaccctgagaagggggcaccatgtgtgcctttgcccacgtgtcctgaggggctgcttgtctgggagggagggagagaacattcagcagcaggtgcttttttatggccttttcttaaaataacctaagggggacacatccatcttgcagagaagtttacagaactccccttgaaaactgctgctgaggctcctgttaaattttctgtggcatcttttatgccttggtaaaaactgcagtgtctttggacctgagagtggctactccgtggttttgtgacctgtaagcgtggggttcaggggtgtgtggccctgcagggtcccacgcctccctgagcactgactggaagtttcactggctggtggctgtcccttctcccatcagggtccccagcaaagttaactacacagaggacccaggggaaacgagctgtgtagccactgacttgctcgcgcggccgtggcctctgaggggcactcgccggttaagacagggtgggagtagtgctttccagttcagactctaacttctcccaaagtgtcctaagaaaatactggatcggctcatagatttatgctccttatgatgccctaacttggaaggttgttctagggacaggccgggcagtgtccccacacacaccttagagtcgaaggccccagggccccgctgtcacttgcccaaaagatcccttccggcaggtaagggactaccaatgcttacgtcaaaacagcagaatcggctttgcagtgcactttggggagcagatattaacttatttttgtgttggacagtagtgaaatcttgtgatttttaatcgctttgataatacttccaaattttatgatttttctgaaggaaataatgcaaacattttaaatatgtttctccccctttccaaaaactgttaaactaatgagcaagtaacactaactttgaatgtctctacaatacccgttgataactcagtggagccaggctttggggtagcggccctgagcttgcagggtttctcgccactggggctgaccacgcccccagctgtgaccgtgggtgtggctggctctcggccctgcccagctttgttctgaggacgtggtgacttcctgaacatcagcttcaatcctccatcattaatgtgaagcaaaacacaaaaaccgccccaatccctcaggattccttggcatccgaaaccagcatctgcacctaaacccatacccacccgtgtgcgcccacagggggatgtgtccgaatgggcagcttaaaatgtggtcacctgtgggggaaactcttcaggcacctgaagtgagaacccagctgtccgtcctcaggccggcctttcttccggcgacacccgtccatggctggctgggtccccttcgcagtgtttgtctgtcttgacatctaaaccccggcgtgtgcagtgcccatcttccaggactaccttattttccagaattaaacctgttttataattcaagttaatgcaaatgactgtcagttgccaaatatcttgatcctgtgagtgtagttgatgactgtttgttagtcagtagagtaaaatgctgtgtccacggggtgtcacagcctcaccataccctgttgaggtgtgaaatgccccgtcagaaattaaatacaaacttaaatgtgcctattggtgtctaaacttcatacaatgtaaggtcagattccttttaggaatactgggtgctgtcaccaggtttgatagttagacttaaaaacttgaaattcactttttggggggagggatatactgaaatagagagttgagacttgccagttgggggaaaatagcatttaaaatggaaagctgtgtttggaaaattgtgtatgagtatttttgtattaaaaacattttaaaggcttttttcttaa

SEQ ID NO: 1377 - protein, 1365 aa, Homo sapiens
MEFSIKQSPLSVQSVVKCIKMKQAPEILGSANGKTPSCEVNRECSVFLSKAQLSSSLQEGVMQKFNGHDALPFIPADKLKDLTSRVFNGEPGAHDAKLRFESQEMKGIGTPPNTTPIKNGSPEIKLKITKTYMNGKPLFESSICGDSAADVSQSEENGQKPENKARRNRKRSIKYDSLLEQGLVEAALVSKISSPSDKKIPAKKESCPNTGRDKDHLLKYNVGDLVWSKVSGYPWWPCMVSADPLLHSYTKLKGQKKSARQYHVQFFGDAPERAWIFEKSLVAFEGEGQFEKLCQESAKQAPTKAEKIKLLKPISGKLRAQWEMGIVQAEEAASMSVEERKAKFTFLYVGDQLHLNPQVAKEAGIAAESLGEMAESSGVSEEAAENPKSVREECIPMKRRRRAKLCSSAETLESHPDIGKSTPQKTAEADPRRGVGSPPGRKKTTVSMPRSRKGDAASQFLVFCQKHRDEVVAEHPDASGEEIEELLRSQWSLLSEKQRARYNTKFALVAPVQAEEDSGNVNGKKRNHTKRIQDPTEDAEAEDTPRKRLRTDKHSLRKRDTITDKTARTSSYKAMEAASSLKSQAATKNLSDACKPLKKRNRASTAASSALGFSKSSSPSASLTENEVSDSPGDEPSESPYESADETQTEVSVSSKKSERGVTAKKEYVCQLCEKPGSLLLCEGPCCGAFHLACLGLSRRPEGRFTCSECASGIHSCFVCKESKTDVKRCVVTQCGKFYHEACVKKYPLTVFESRGFRCPLHSCVSCHASNPSNPRPSKGKMMRCVRCPVAYHSGDACLAAGCSVIASNSIICTAHFTARKGKRHHAHVNVSWCFVCSKGGSLLCCESCPAAFHPDCLNIEMPDGSWFCNDCRAGKKLHFQDIIWVKLGNYRWWPAEVCHPKNVPPNIQKMKHEIGEFPVFFFGSKDYYWTHQARVFPYMEGDRGSRYQGVRGIGRVFKNALQEAEARFREIKLQREARETQESERKPPPYKHIKVNKPYGKVQIYTADISEIPKCNCKPTDENPCGFDSECLNRMLMFECHPQVCPAGEFCQNQCFTKRQYPETKIIKTDGKGWGLVAKRDIRKGEFVNEYVGELIDEEECMARIKHAHENDITHFYMLTIDKDRIIDAGPKGNYSRFMNHSCQPNCETLKWTVNGDTRVGLFAVCDIPAGTELTFNYNLDCLGNEKTVCRCGASNCSGFLGDRPKTSTTLSSEEKGKKTKKKTRRRRAKGEGKRQSEDECFRCGDGGQLVLCDRKFCTKAYHLSCLGLGKRPFGKWECPWHHCDVCGKPSTSFCHLCPNSFCKEHQDGTAFSCTPDGRSYCCEHDLGAASVRSTKTEKPPPEPGKPKGKRRRRRGWRRVTEGK

SEQ ID NO: 1378 - DNA, 8458 bp, Homo sapiens
tggtcttgaactcctgaccttgtgatccgctcgcctcagcctcccaaagtgctgggattacaggcatgagccaccgtgcctgtcctagaaccactggtaactcttaactgagacaagatttcgccatgttgcccaggctggtctcgaacttctgagctcaagcgatctacctgcctcgtcctcccaaagtgttggaattgcaggtgtgagccactgcacccggcccttgcctcatgtttgaatgataatttacctgggcataaaattctggacacttgtggtggcacgagctgtctgcttttctgtggagactgcgggttgcagacaccagcagccccctattgctgcacgtcaggtgtcctccacctcagtactgtggacatctcgggccgcatagccctgttgcgcgggcatcctgtgcgttgcaggagatgcagcagcatccatgaccgcaacccatcagagtgttctaagaacggaagcatctgggctggatggaatttagcatcaagcagagtcccctttctgttcagagtgttgtaaagtgcataaagatgaagcaggcaccagaaatcctcggcagtgccaacgggaagactccgagctgcgaggtgaaccgcgagtgttctgtgttcctcagcaaagcccagctctccagtagcctgcaggagggggtcatgcagaagtttaacggccacgacgccctgccctttattccagccgacaagctgaaagatcttacttcccgggtgtttaatggagaacccggcgcacacgatgccaaactgcgttttgagtcccaggaaatgaaagggattgggacaccccctaacactacccctatcaaaaatggctctccagaaattaagctgaaaatcaccaaaacatacatgaatgggaagcctctctttgaatcttccatttgtggtgacagtgctgctgatgtgtctcagtcagaagaaaatggacaaaaaccagaaaacaaggcgagaaggaacaggaagaggagcataaaatatgactccttgctggagcagggccttgtcgaagcagctcttgtgtctaagatctcaagtccttcagataaaaagattccagctaagaaagagtcttgtccaaacactggaagagacaaagaccacctgttgaaatacaacgttggtgatttggtgtggtccaaagtgtcgggttacccttggtggccttgcatggtttctgcagatccactccttcacagctataccaaacttaaaggtcagaaaaagagtgcacgccagtatcacgtacagttctttggtgacgccccagaaagagcttggatatttgagaagagcctcgtagcttttgaaggagaaggacagtttgaaaaattatgccaggaaagtgccaagcaggcacccacgaaagctgagaaaattaagctattgaaaccaatttcagggaaattgagggcccagtgggaaatgggcattgttcaagcagaagaagctgcaagcatgtcagtggaggagcggaaagccaagttcacctttctctatgtgggggaccagcttcatctcaaccctcaagtagccaaggaggctggcattgctgcagagtctttgggagaaatggcagaatcctcaggagtcagtgaagaagctgctgaaaaccccaagtctgtgagagaagagtgcattcccatgaagagaaggcggagggccaaactgtgtagctctgcagagaccctggagagtcaccccgacatagggaagagtactcctcaaaagacggcagaggctgaccccagaagaggagtagggtctcctcctgggaggaagaagaccacagtctccatgccacgaagcaggaagggagatgcagcatcccagtttttggtcttctgtcaaaaacacagggatgaggtggtagctgagcacccagatgcttcaggtgaggagattgaagagctgctcaggtcacagtggagtctgctgagtgagaagcagagagcacgctacaacaccaagtttgccctggtggcccctgtccaggctgaagaagactctggtaatgtaaatgggaaaaaaagaaaccacacaaagaggatacaggaccctacagaagatgctgaagctgaggacacacccaggaaaagactcaggacggacaagcacagtcttcggaagagagacacaatcactgacaaaacggccagaacaagctcttacaaggccatggaggcagcctcctcgctcaagagccaggcagcaacgaaaaatctgtctgatgcatgtaaaccactgaagaagcgaaatcgggcttccacggcagcatcttcagctcttgggtttagcaaaagttcatctccttctgcatccttaactgagaatgaggtctcggacagcccgggagacgagccctcggagtccccatacgaaagtgcagacgaaacacaaactgaagtatctgtctcatccaaaaagtctgagcgaggagtgactgccaaaaaggagtatgtgtgccagctgtgtgagaagccgggcagcctcctgctctgtgaaggaccctgctgcggagctttccacctcgcctgccttgggctttcccggaggccagaagggaggttcacctgcagcgagtgtgcctcaggtgtcgcccggcacagtctggggtctgtgaggatgatgagaggacacctgcacagccgtggcccttcctgcctactcaccgggcccaaggagtctcctatctcacgtcagaacacttcctgggtcaggaagacacctggagagtctcccaggccatggcagccccacagcagcacctcacttatgggagtgtctgtctgcctgcccagaatgataagtgactgctccaccactggccagctgctctcaaggaggaaaggcctcttttcataggagccccttctttcaagcttcttgccagttagactgggcctccccagccaggctgcctagtaagattctcctgtatttcaggtgaagctggagctcagatcgcagcaaggtaatccttgatggctggatctttttgctggagaatgcttggactagtgagcaaggttggaaacagggccaggtgctttagcagcgtggctgcctctgaagaggagttgcttgattttagtggctcagaactgcaatttaattcttgttctttgcacctctctctccaccccttctttaactttttgttagggattcactcatgtttcgtgtgtaaagagagcaagacagatgttaagcgctgtgtggtaactcagtgtggaaaattttaccatgaggcttgtgtgaaaaaataccctctgactgtatttgagagccgaggtttccgctgccccctccacagctgtgtgagctgccatgcttccaacccttcaaacccaaggccgtcaaaaggtaaaatgatgcggtgtgtccgctgccccgttgcctatcacagcggggatgcttgtctggcagcaggatgctcagtgatcgcctccaacagcatcatctgcactgcccacttcactgctcggaaggggaagcgacaccacgcccacgtcaacgtgagctggtgcttcgtgtgctccaaaggggggagccttctgtgctgtgagtcctgcccagcggccttccaccctgactgcctgaacatcgagatgcctgacggcagctggttctgcaatgactgcagggctgggaagaagctgcacttccaggatatcatttgggtgaaacttgggaactacagatggtggccggcagaagtttgccatcccaaaaatgttcccccaaatattcagaaaatgaagcacgagattggagaattccctgtgtttttctttgggtctaaagattattactggacgcatcaggcgcgagtgttcccgtacatggagggggaccggggcagccgctaccagggggtcagagggatcggaagagtcttcaaaaacgcactgcaagaagctgaagctcgttttcgtgaaattaagcttcagagggaagcccgagaaacacaggagagcgagcgcaagcccccaccatacaagcacatcaaggtgaataagccttacgggaaagtccagatctacacagcggatatttcagaaatccctaagtgcaactgcaagcccacagatgagaatccttgtggctttgattcggagtgtctgaacaggatgctgatgtttgagtgccacccgcaggtgtgtcccgcgggcgagttctgccagaaccagtgcttcaccaagcgccagtacccagagaccaagatcatcaagacagatggcaaagggtggggcctggtcgccaagagggacatcagaaagggagaatttgttaacgagtacgttggggagctgatcgacgaggaggagtgcatggcgagaatcaagcacgcacacgagaacgacatcacccacttctacatgctcactatagacaaggaccgtataatagacgctggccccaaaggaaactactctcgatttatgaatcacagctgccagcccaactgtgagaccctcaagtggacagtgaatggggacactcgtgtgggcctgtttgccgtctgtgacattcctgcagggacggagctgacttttaactacaacctcgattgtctgggcaatgaaaaaacggtctgccggtgtggagcctccaattgcagtggattcctcggggatagaccaaagacctcgacgaccctttcatcagaggaaaagggcaaaaagaccaagaagaaaacgaggcggcgcagagcaaaaggggaagggaagaggcagtcagaggacgagtgcttccgctgcggtgatggcgggcagctggtgctgtgtgaccgcaagttctgcaccaaggcctaccacctgtcctgcctgggccttggcaagcggcccttcgggaagtgggaatgtccttggcatcattgtgacgtgtgtggcaaaccttcgacttcattttgccacctctgccccaattcgttctgtaaggagcaccaggacgggacagccttcagctgcaccccggacgggcggtcctactgctgtgagcatgacttaggggcggcatcggtcagaagcaccaagactgagaagccccccccagagccagggaagccgaaggggaagaggcggcggcggaggggctggcggagagtcacagagggcaaatagcgccaggcggccgcttggccggatccaggggcggtgcagggcggccggccctgcctgcgggagagggcgagcatgaactggcccggaggacccagctcgagccgccaggacacagacgtacaggcctcctcgggagggagcgcctccccaccactgagccatcctcagcagcgtccgctgcgtctgcactgatgaccgtctgagcccagctcagcgttcctggacaaacagcctcactcctcagcgttaccgccacacttgaatttctccgaatgtcaaggttccctcccactctatttttttaggttaaagttaattggcatatggaatgttttaatctcctctgaaatgtgtagcgtaggcttttcccaagggtcgctagaaactcgtcttcgcgttgccccctttctggctctcagcgccgtcgccactcgggagaggctgggtgaggcccgtgtgaggactgaccctggattcctcgaaactgccattgtgatcattactctgctctttggaaatggctgtatcatttttttgtactaatgtgaattgttcctcagaaacgcttcttttccatcctagtgagaagctggccctgcaggtggtggcagcaatggtgttgtaagatttcctcccgtagttttttctcctcatggatttgaatgaaatgccaataacacgtccactttcaacgtgtagtttacgcggagcactttcgaggcctggccgggttgggcctacttctcacctgggcctatcttctgaactcgctaggttcttatcaacatttgggggataactttgtatatttttttcatttggcttttctttaccagtttctgatttttattctcaatatatttttgctaaacctatttcacaaatcaccaccgactgaagtgtgtgtttactgatgcggccctgagctccatggcgaaaggagtgactttgcagggcgtgagaccgcagtctgcttagagcacaggaagtgacaacttagggagccccgtagggcgctgcaggccccggggaccccagcacgtgggtctaaagagagacggagtctagctctcctgccacccagagtggcttccatctcagcactctgtgggtctggtgatggaagatgcagtctctgctgatcacatgtgccctctgccagggcacctactgagaggtgcggtcctgggggtggaggcctgcctggcaggtgtgcgtgcctcgtacgtgtgttatgggcactggtctaggccaggtatgacacccactctcctgtgagatttcactttagtttttaaaaggtccagttctacagagtgagacctatctatctgagtactacatatgttttaagacttggttctttttttgagggatccttgaccctgggaagtctggagcaccctgagaagggggcaccatgtgtgcctttgcccacgtgtcctgaggggctgcttgtctgggagggagggagagaacattcagcagcaggtgcttttttatggccttttcttaaaataacctaagggggacacatccatcttgcagagaagtttacagaactccccttgaaaactgctgctgaggctcctgttaaattttctgtggcatcttttatgccttggtaaaaactgcagtgtctttggacctgagagtggctactccgtggttttgtgacctgtaagcgtggggttcaggggtgtgtggccctgcagggtcccacgcctccctgagcactgactggaagtttcactggctggtggctgtcccttctcccatcagggtccccagcaaagttaactacacagaggacccaggggaaacgagctgtgtagccactgacttgctcgcgcggccgtggcctctgaggggcactcgccggttaagacagggtgggagtagtgctttccagttcagactctaacttctcccaaagtgtcctaagaaaatactggatcggctcatagatttatgctccttatgatgccctaacttggaaggttgttctagggacaggccgggcagtgtccccacacacaccttagagtcgaaggccccagggccccgctgtcacttgcccaaaagatcccttccggcaggtaagggactaccaatgcttacgtcaaaacagcagaatcggctttgcagtgcactttggggagcagatattaacttatttttgtgttggacagtagtgaaatcttgtgatttttaatcgctttgataatacttccaaattttatgatttttctgaaggaaataatgcaaacattttaaatatgtttctccccctttccaaaaactgttaaactaatgagcaagtaacactaactttgaatgtctctacaatacccgttgataactcagtggagccaggctttggggtagcggccctgagcttgcagggtttctcgccactggggctgaccacgcccccagctgtgaccgtgggtgtggctggctctcggccctgcccagctttgttctgaggacgtggtgacttcctgaacatcagcttcaatcctccatcattaatgtgaagcaaaacacaaaaaccgccccaatccctcaggattccttggcatccgaaaccagcatctgcacctaaacccatacccacccgtgtgcgcccacagggggatgtgtccgaatgggcagcttaaaatgtggtcacctgtgggggaaactcttcaggcacctgaagtgagaacccagctgtccgtcctcaggccggcctttcttccggcgacacccgtccatggctggctgggtccccttcgcagtgtttgtctgtcttgacatctaaaccccggcgtgtgcagtgcccatcttccaggactaccttattttccagaattaaacctgttttataattcaagttaatgcaaatgactgtcagttgccaaatatcttgatcctgtgagtgtagttgatgactgtttgttagtcagtagagtaaaatgctgtgtccacggggtgtcacagcctcaccataccctgttgaggtgtgaaatgccccgtcagaaattaaatacaaacttaaatgtgcctattggtgtctaaacttcatacaatgtaaggtcagattccttttaggaatactgggtgctgtcaccaggtttgatagttagacttaaaaacttgaaattcactttttggggggagggatatactgaaatagagagttgagacttgccagttgggggaaaatagcatttaaaatggaaagctgtgtttggaaaattgtgtatgagtatttttgtattaaaaacattttaaaggcttttttcttaa

SEQ ID NO: 1379 - protein, 802 aa, Homo sapiens
MEFSIKQSPLSVQSVVKCIKMKQAPEILGSANGKTPSCEVNRECSVFLSKAQLSSSLQEGVMQKFNGHDALPFIPADKLKDLTSRVFNGEPGAHDAKLRFESQEMKGIGTPPNTTPIKNGSPEIKLKITKTYMNGKPLFESSICGDSAADVSQSEENGQKPENKARRNRKRSIKYDSLLEQGLVEAALVSKISSPSDKKIPAKKESCPNTGRDKDHLLKYNVGDLVWSKVSGYPWWPCMVSADPLLHSYTKLKGQKKSARQYHVQFFGDAPERAWIFEKSLVAFEGEGQFEKLCQESAKQAPTKAEKIKLLKPISGKLRAQWEMGIVQAEEAASMSVEERKAKFTFLYVGDQLHLNPQVAKEAGIAAESLGEMAESSGVSEEAAENPKSVREECIPMKRRRRAKLCSSAETLESHPDIGKSTPQKTAEADPRRGVGSPPGRKKTTVSMPRSRKGDAASQFLVFCQKHRDEVVAEHPDASGEEIEELLRSQWSLLSEKQRARYNTKFALVAPVQAEEDSGNVNGKKRNHTKRIQDPTEDAEAEDTPRKRLRTDKHSLRKRDTITDKTARTSSYKAMEAASSLKSQAATKNLSDACKPLKKRNRASTAASSALGFSKSSSPSASLTENEVSDSPGDEPSESPYESADETQTEVSVSSKKSERGVTAKKEYVCQLCEKPGSLLLCEGPCCGAFHLACLGLSRRPEGRFTCSECASGVARHSLGSVRMMRGHLHSRGPSCLLTGPKESPISRQNTSWVRKTPGESPRPWQPHSSTSLMGVSVCLPRMISDCSTTGQLLSRRKGLFS

SEQ ID NO: 1380 - DNA, 8113 bp, Homo sapiens
tggtcttgaactcctgaccttgtgatccgctcgcctcagcctcccaaagtgctgggattacaggcatgagccaccgtgcctgtcctagaaccactggtaactcttaactgagacaagatttcgccatgttgcccaggctggtctcgaacttctgagctcaagcgatctacctgcctcgtcctcccaaagtgttggaattgcaggtgtgagccactgcacccggcccttgcctcatgtttgaatgataatttacctgggcataaaattctggacacttgtggtggcacgagctgtctgcttttctgtggagactgcgggttgcagacaccagcagccccctattgctgcacgtcaggtgtcctccacctcagtactgtggacatctcgggccgcatagccctgttgcgcgggcatcctgtgcgttgcaggagatgcagcagcatccatgaccgcaacccatcagagtgttctaagaacggaagcatctgggctggatggaatttagcatcaagcagagtcccctttctgttcagagtgttgtaaagtgcataaagatgaagcaggcaccagaaatcctcggcagtgccaacgggaagactccgagctgcgaggtgaaccgcgagtgttctgtgttcctcagcaaagcccagctctccagtagcctgcaggagggggtcatgcagaagtttaacggccacgacgccctgccctttattccagccgacaagctgaaagatcttacttcccgggtgtttaatggagaacccggcgcacacgatgccaaactgcgttttgagtcccaggaaatgaaagggattgggacaccccctaacactacccctatcaaaaatggctctccagaaattaagctgaaaatcaccaaaacatacatgaatgggaagcctctctttgaatcttccatttgtggtgacagtgctgctgatgtgtctcagtcagaagaaaatggacaaaaaccagaaaacaaggcgagaaggaacaggaagaggagcataaaatatgactccttgctggagcagggccttgtcgaagcagctcttgtgtctaagatctcaagtccttcagataaaaagattccagctaagaaagagtcttgtccaaacactggaagagacaaagaccacctgttgaaatacaacgttggtgatttggtgtggtccaaagtgtcgggttacccttggtggccttgcatggtttctgcagatccactccttcacagctataccaaacttaaaggtcagaaaaagagtgcacgccagtatcacgtacagttctttggtgacgccccagaaagagcttggatatttgagaagagcctcgtagcttttgaaggagaaggacagtttgaaaaattatgccaggaaagtgccaagcaggcacccacgaaagctgagaaaattaagctattgaaaccaatttcagggaaattgagggcccagtgggaaatgggcattgttcaagcagaagaagctgcaagcatgtcagtggaggagcggaaagccaagttcacctttctctatgtgggggaccagcttcatctcaaccctcaagtagccaaggaggctggcattgctgcagagtctttgggagaaatggcagaatcctcaggagtcagtgaagaagctgctgaaaaccccaagtctgtgagagaagagtgcattcccatgaagagaaggcggagggccaaactgtgtagctctgcagagaccctggagagtcaccccgacatagggaagagtactcctcaaaagacggcagaggctgaccccagaagaggagtagggtctcctcctgggaggaagaagaccacagtctccatgccacgaagcaggaagggagatgcagcatcccagtttttggtcttctgtcaaaaacacagggatgaggtggtagctgagcacccagatgcttcaggtgaggagattgaagagctgctcaggtcacagtggagtctgctgagtgagaagcagagagcacgctacaacaccaagtttgccctggtggcccctgtccaggctgaagaagactctggtaatgtaaatgggaaaaaaagaaaccacacaaagaggatacaggaccctacagaagatgctgaagctgaggacacacccaggaaaagactcaggacggacaagcacagtcttcggaagagagacacaatcactgacaaaacggccagaacaagctcttacaaggccatggaggcagcctcctcgctcaagagccaggcagcaacgaaaaatctgtctgatgcatgtaaaccactgaagaagcgaaatcgggcttccacggcagcatcttcagctcttgggtttagcaaaagttcatctccttctgcatccttaactgagaatgagcttttgtgggagcccacaccagtcaagttggatttgaacccagctgctctgtactgcacttagaatgatgtaatattccaggatgctgctgcaggtggcgtatcatcgtacacactcagtgacatttctatcacaatcattttatggaagatgtgtgataatctgtttttactggtattaataaacacatacaatgaagaaaacagataacaaattttaagaccaaggtctcggacagcccgggagacgagccctcggagtccccatacgaaagtgcagacgaaacacaaactgaagtatctgtctcatccaaaaagtctgagcgaggagtgactgccaaaaaggagtatgtgtgccagctgtgtgagaagccgggcagcctcctgctctgtgaaggaccctgctgcggagctttccacctcgcctgccttgggctttcccggaggccagaagggaggttcacctgcagcgagtgtgcctcagggattcactcatgtttcgtgtgtaaagagagcaagacagatgttaagcgctgtgtggtaactcagtgtggaaaattttaccatgaggcttgtgtgaaaaaataccctctgactgtatttgagagccgaggtttccgctgccccctccacagctgtgtgagctgccatgcttccaacccttcaaacccaaggccgtcaaaaggtaaaatgatgcggtgtgtccgctgccccgttgcctatcacagcggggatgcttgtctggcagcaggatgctcagtgatcgcctccaacagcatcatctgcactgcccacttcactgctcggaaggggaagcgacaccacgcccacgtcaacgtgagctggtgcttcgtgtgctccaaaggggggagccttctgtgctgtgagtcctgcccagcggccttccaccctgactgcctgaacatcgagatgcctgacggcagctggttctgcaatgactgcagggctgggaagaagctgcacttccaggatatcatttgggtgaaacttgggaactacagatggtggccggcagaagtttgccatcccaaaaatgttcccccaaatattcagaaaatgaagcacgagattggagaattccctgtgtttttctttgggtctaaagattattactggacgcatcaggcgcgagtgttcccgtacatggagggggaccggggcagccgctaccagggggtcagagggatcggaagagtcttcaaaaacgcactgcaagaagctgaagctcgttttcgtgaaattaagcttcagagggaagcccgagaaacacaggagagcgagcgcaagcccccaccatacaagcacatcaaggtgaataagccttacgggaaagtccagatctacacagcggatatttcagaaatccctaagtgcaactgcaagcccacagatgagaatccttgtggctttgattcggagtgtctgaacaggatgctgatgtttgagtgccacccgcaggtgtgtcccgcgggcgagttctgccagaaccagtgcttcaccaagcgccagtacccagagaccaagatcatcaagacagatggcaaagggtggggcctggtcgccaagagggacatcagaaagggagaatttgttaacgagtacgttggggagctgatcgacgaggaggagtgcatggcgagaatcaagcacgcacacgagaacgacatcacccacttctacatgctcactatagacaaggaccgtataatagacgctggccccaaaggaaactactctcgatttatgaatcacagctgccagcccaactgtgagaccctcaagtggacagtgaatggggacactcgtgtgggcctgtttgccgtctgtgacattcctgcagggacggagctgacttttaactacaacctcgattgtctgggcaatgaaaaaacggtctgccggtgtggagcctccaattgcagtggattcctcggggatagaccaaagacctcgacgaccctttcatcagaggaaaagggcaaaaagaccaagaagaaaacgaggcggcgcagagcaaaaggggaagggaagaggcagtcagaggacgagtgcttccgctgcggtgatggcgggcagctggtgctgtgtgaccgcaagttctgcaccaaggcctaccacctgtcctgcctgggccttggcaagcggcccttcgggaagtgggaatgtccttggcatcattgtgacgtgtgtggcaaaccttcgacttcattttgccacctctgccccaattcgttctgtaaggagcaccaggacgggacagccttcagctgcaccccggacgggcggtcctactgctgtgagcatgacttaggggcggcatcggtcagaagcaccaagactgagaagccccccccagagccagggaagccgaaggggaagaggcggcggcggaggggctggcggagagtcacagagggcaaatagcgccaggcggccgcttggccggatccaggggcggtgcagggcggccggccctgcctgcgggagagggcgagcatgaactggcccggaggacccagctcgagccgccaggacacagacgtacaggcctcctcgggagggagcgcctccccaccactgagccatcctcagcagcgtccgctgcgtctgcactgatgaccgtctgagcccagctcagcgttcctggacaaacagcctcactcctcagcgttaccgccacacttgaatttctccgaatgtcaaggttccctcccactctatttttttaggttaaagttaattggcatatggaatgttttaatctcctctgaaatgtgtagcgtaggcttttcccaagggtcgctagaaactcgtcttcgcgttgccccctttctggctctcagcgccgtcgccactcgggagaggctgggtgaggcccgtgtgaggactgaccctggattcctcgaaactgccattgtgatcattactctgctctttggaaatggctgtatcatttttttgtactaatgtgaattgttcctcagaaacgcttcttttccatcctagtgagaagctggccctgcaggtggtggcagcaatggtgttgtaagatttcctcccgtagttttttctcctcatggatttgaatgaaatgccaataacacgtccactttcaacgtgtagtttacgcggagcactttcgaggcctggccgggttgggcctacttctcacctgggcctatcttctgaactcgctaggttcttatcaacatttgggggataactttgtatatttttttcatttggcttttctttaccagtttctgatttttattctcaatatatttttgctaaacctatttcacaaatcaccaccgactgaagtgtgtgtttactgatgcggccctgagctccatggcgaaaggagtgactttgcagggcgtgagaccgcagtctgcttagagcacaggaagtgacaacttagggagccccgtagggcgctgcaggccccggggaccccagcacgtgggtctaaagagagacggagtctagctctcctgccacccagagtggcttccatctcagcactctgtgggtctggtgatggaagatgcagtctctgctgatcacatgtgccctctgccagggcacctactgagaggtgcggtcctgggggtggaggcctgcctggcaggtgtgcgtgcctcgtacgtgtgttatgggcactggtctaggccaggtatgacacccactctcctgtgagatttcactttagtttttaaaaggtccagttctacagagtgagacctatctatctgagtactacatatgttttaagacttggttctttttttgagggatccttgaccctgggaagtctggagcaccctgagaagggggcaccatgtgtgcctttgcccacgtgtcctgaggggctgcttgtctgggagggagggagagaacattcagcagcaggtgcttttttatggccttttcttaaaataacctaagggggacacatccatcttgcagagaagtttacagaactccccttgaaaactgctgctgaggctcctgttaaattttctgtggcatcttttatgccttggtaaaaactgcagtgtctttggacctgagagtggctactccgtggttttgtgacctgtaagcgtggggttcaggggtgtgtggccctgcagggtcccacgcctccctgagcactgactggaagtttcactggctggtggctgtcccttctcccatcagggtccccagcaaagttaactacacagaggacccaggggaaacgagctgtgtagccactgacttgctcgcgcggccgtggcctctgaggggcactcgccggttaagacagggtgggagtagtgctttccagttcagactctaacttctcccaaagtgtcctaagaaaatactggatcggctcatagatttatgctccttatgatgccctaacttggaaggttgttctagggacaggccgggcagtgtccccacacacaccttagagtcgaaggccccagggccccgctgtcacttgcccaaaagatcccttccggcaggtaagggactaccaatgcttacgtcaaaacagcagaatcggctttgcagtgcactttggggagcagatattaacttatttttgtgttggacagtagtgaaatcttgtgatttttaatcgctttgataatacttccaaattttatgatttttctgaaggaaataatgcaaacattttaaatatgtttctccccctttccaaaaactgttaaactaatgagcaagtaacactaactttgaatgtctctacaatacccgttgataactcagtggagccaggctttggggtagcggccctgagcttgcagggtttctcgccactggggctgaccacgcccccagctgtgaccgtgggtgtggctggctctcggccctgcccagctttgttctgaggacgtggtgacttcctgaacatcagcttcaatcctccatcattaatgtgaagcaaaacacaaaaaccgccccaatccctcaggattccttggcatccgaaaccagcatctgcacctaaacccatacccacccgtgtgcgcccacagggggatgtgtccgaatgggcagcttaaaatgtggtcacctgtgggggaaactcttcaggcacctgaagtgagaacccagctgtccgtcctcaggccggcctttcttccggcgacacccgtccatggctggctgggtccccttcgcagtgtttgtctgtcttgacatctaaaccccggcgtgtgcagtgcccatcttccaggactaccttattttccagaattaaacctgttttataattcaagttaatgcaaatgactgtcagttgccaaatatcttgatcctgtgagtgtagttgatgactgtttgttagtcagtagagtaaaatgctgtgtccacggggtgtcacagcctcaccataccctgttgaggtgtgaaatgccccgtcagaaattaaatacaaacttaaatgtgcctattggtgtctaaacttcatacaatgtaaggtcagattccttttaggaatactgggtgctgtcaccaggtttgatagttagacttaaaaacttgaaattcactttttggggggagggatatactgaaatagagagttgagacttgccagttgggggaaaatagcatttaaaatggaaagctgtgtttggaaaattgtgtatgagtatttttgtattaaaaacattttaaaggcttttttcttaa

SEQ ID NO: 1381 - protein, 647 aa, Homo sapiens
MEFSIKQSPLSVQSVVKCIKMKQAPEILGSANGKTPSCEVNRECSVFLSKAQLSSSLQEGVMQKFNGHDALPFIPADKLKDLTSRVFNGEPGAHDAKLRFESQEMKGIGTPPNTTPIKNGSPEIKLKITKTYMNGKPLFESSICGDSAADVSQSEENGQKPENKARRNRKRSIKYDSLLEQGLVEAALVSKISSPSDKKIPAKKESCPNTGRDKDHLLKYNVGDLVWSKVSGYPWWPCMVSADPLLHSYTKLKGQKKSARQYHVQFFGDAPERAWIFEKSLVAFEGEGQFEKLCQESAKQAPTKAEKIKLLKPISGKLRAQWEMGIVQAEEAASMSVEERKAKFTFLYVGDQLHLNPQVAKEAGIAAESLGEMAESSGVSEEAAENPKSVREECIPMKRRRRAKLCSSAETLESHPDIGKSTPQKTAEADPRRGVGSPPGRKKTTVSMPRSRKGDAASQFLVFCQKHRDEVVAEHPDASGEEIEELLRSQWSLLSEKQRARYNTKFALVAPVQAEEDSGNVNGKKRNHTKRIQDPTEDAEAEDTPRKRLRTDKHSLRKRDTITDKTARTSSYKAMEAASSLKSQAATKNLSDACKPLKKRNRASTAASSALGFSKSSSPSASLTENELLWEPTPVKLDLNPAALYCT

SEQ ID NO: 1382 - DNA, 2263 bp, Homo sapiens
tagcgagggacgcgtaggtgtcttcataagatgccggggcagcggcgcgcgctttcccccaagatggcgtccatgcgggagagcgacacgggcctgtggctgcacaacaagctgggggccacggacgagctgtgggcgccgcccagcatcgcgtccctgctcacggccgcggtcatcgacaacatccgtctctgcttccatggcctctcgtcggcagtgaagctcaagttgctactcgggacgctgcacctcccgcgccgcacggtggacgagatgaagggcgccctaatggagatcatccagctcgccagcctcgactcggacccctgggtgctcatggtcgccgacatcttgaagtcctttccggacacaggctcgcttaacctggagctggaggagcagaatcccaacgttcaggatattttgggagaacttagagaaaaggtgggtgagtgtgaagcgtctgccatgctgccactggagtgccagtacttgaacaaaaacgccctgacgaccctcgcgggacccctcactcccccggtgaagcattttcagttaaagcggaaacccaagagcgccacgctgcgggcggagctgctgcagaagtccacggagaccgcccagcagttgaagcggagcgccggggtgcccttccacgccaagggccgggggctgctgcggaagatggacaccaccaccccactcaaaggcatcccgaagcaggcgcccttcagaagccccacggcgcccagcgtcttcagccccacagggaaccggacccccatcccgccttccaggacgctgctgcggaaggaacgaggtgtgaagctgctggacatctctgagctggatatggttggcgctggccgagaggcgaagcggagaaggaagactctcgatgcggaggtggtggagaagccggccaaggaggaaacggtggtggagaacgccaccccggactacgcagccggcctggtgtccacgcagaaacttgggtccctgaacaatgagcctgcgctgccctccacgagctaccttccctccacgcccagcgtggttcccgcctcctcctacatccccagctccgagacgcccccagccccatcttcccgggaagccagccgcccaccagaggagcccagcgccccgagccccacgttgccagcgcagttcaagcagcgggcgcccatgtacaacagcggcctgagccctgccacacccacgcctgcggcgcccacctcgcctctgacacccaccacacctccggctgtcgcccctaccactcagacacccccggttgccatggtggccccgcagacccaggcccctgctcagcagcagcctaagaagaacctgtccctcacgagagagcagatgttcgctgcccaggagatgttcaagacggccaacaaagtcacgcggcccgagaaggccctcatcctgggcttcatggccggctcccgagagaacccgtgccaggagcagggggacgtgatccagatcaagctgagcgagcacacggaggacctgcccaaggcggacggccagggtagcacaaccatgctggtggacacagtgtttgagatgaactatgccacgggccagtggacgcgcttcaagaagtacaagcccatgaccaatgtgtcctagaaccacctgcctcacagctggccgtcacttgtgggggtccacgggacgatggctttgccagcttaaagtaaccggatggcggacacctggcccccgaggtcccccggccgccgccctgctgctgacccagcctgttttaagttctggatgcatttctctggggtatttggggcttatttttaaaattttaatatgggttcttttttgtgtgatttaaagacactttttggactcaacgttacatttttgaatgtagtaagtaaattaaccaaaaaagttacaacttcctaattttagtgacagctctgcctgtttgttagactcttactttttaaaatcttttctattttccctcgctggggcagtgccctcctacccccagggttgaggggaccaaggtggcacggtggtactgggggtgcggcagggacacccgaccacaccagagcgtgggagacggtgggccttgtcccctgcctgtgcctgcctgggagttttgtattcatcttttgtatagttgtggacatttaagacagtctttgggtacctattttcattgtaaaactatctgaaccattaaagtcgagcttttctaaagaaaaaaaaaaaaaaa

SEQ ID NO: 1383 - protein, 528 aa, Homo sapiens
MASMRESDTGLWLHNKLGATDELWAPPSIASLLTAAVIDNIRLCFHGLSSAVKLKLLLGTLHLPRRTVDEMKGALMEIIQLASLDSDPWVLMVADILKSFPDTGSLNLELEEQNPNVQDILGELREKVGECEASAMLPLECQYLNKNALTTLAGPLTPPVKHFQLKRKPKSATLRAELLQKSTETAQQLKRSAGVPFHAKGRGLLRKMDTTTPLKGIPKQAPFRSPTAPSVFSPTGNRTPIPPSRTLLRKERGVKLLDISELDMVGAGREAKRRRKTLDAEVVEKPAKEETVVENATPDYAAGLVSTQKLGSLNNEPALPSTSYLPSTPSVVPASSYIPSSETPPAPSSREASRPPEEPSAPSPTLPAQFKQRAPMYNSGLSPATPTPAAPTSPLTPTTPPAVAPTTQTPPVAMVAPQTQAPAQQQPKKNLSLTREQMFAAQEMFKTANKVTRPEKALILGFMAGSRENPCQEQGDVIQIKLSEHTEDLPKADGQGSTTMLVDTVFEMNYATGQWTRFKKYKPMTNVS

SEQ ID NO: 1384 - DNA, 4054 bp, Homo sapiens
tcccagcctgaaaccaacacattttctaataagttatttagacagaatagcactctgcatgactttaattcttgggacaaaacggtagtttgtaccctaagacacagtttctggcccagtgtgatgggggtgggtggccgggtgggtggagcgttttgctgttggaaacctggagggaaaccctgattggatgtcatttcctgccatggagcacgcctcccagccctggcctgcagggtgggcagggtggggggcaagggagtccgcagcctccgggaggaggggcagggcgctgccttgggctgggtgggaagaggggtggccgcctcggcttccgctggccatgctcctggtctctccttcctgaggtcacaggcaggggctgccctggacggggggcggggggggtggcctggaaggggagacagaggtggagggtggcacaggctgcacattcagcttagaagtggacctggctttggtggcaggagaagaataaacacttgcccagacccctttgtgtgggggaattggggaggggtcgtggcaggcagggtgggccacggaactgggtcccaggcatcaaggccacgtgcagggccatggagggatgcttctcacgaggcgcttcagaagcgagcgaagggacagagaagccctgcgtccaagggccttttgtcctgttagcaattgaggtgtgcagagcactgtacagaccccactcccctgtacattcctccctggaggtgcccggtccccgcttggggatgggagttttgtagactgtacagaaatcggcaccctattttcttgcagctcagattttgttaatctggaatatacagacagacgtaaagtgttttagcaaaatggaaacaaacagttgtgcctttttcctcttttggtttggtttgggtttggcctggggctggtcccagttggtgcggggcatgctgggggcaggaggggcagggcgggccaggtggagtcaggtcttgggggtgtcatgtcggggtgctgccagcgtcccttggtcctgtgcctttggagcctcgggctcctggggtgcagggtgcttgggggtggctgttggagcccaccgacgccagggcagggcctggaggcccagggactgccagtgtctccttgatattgatcctagcagatccccctcctgggggttctgagagtcctgggcagtgtggccttctctcattctggtggcatctgcgcccgtgagtgacctcttccttggctgcactgccctgtgggtggtgagacgcttggccttttttgttgctgccaggacttggtagagatggcaggaagggtgtgcggggtggttgtgtgcagaaccctgccgcccctgaggtgagcagaggcactggtgtgctgccaggctggggcggagctgcccggaacccttgccaggccaatgtgtagcttggtggcgcccttgaaggccactggggggtaggtgtgtcctcccccggggctggaggccgggtgcctggtgggtgggcctgacctggcccacctcatccctccagcctgggatctcactgctctgcacctgtgcactgacgtgaattttatacgtttgtagaaactctgatgtaacttcttctacctctgaagcgccctcctgggccctgctgtcacgtggctggtgcggcttccccgagtgctggccccctgcccgctccccatgggcacccaccactcaaactctgcgtggtgaggcccggggaaagccaggccgggccctagcactgctcaggggcctggggctcctgggatttctgtgtgtttggaagcctctgtttttggagtggggggcgtggaaggcgggaggggctgacagtgcctggggccagagctgggcgaaggaggacatcctcactggacgagcactgcaggcctgacgagaggctccgggcagctgagggctgaagcgcctcgggatgccccacactgcccagagccacgggtcttgctgtgctgggggtggggtggccccaggcagctgccactgcccaggtgtgagtcgctgcagacctggtccctgagggtgggaggcctgcttgtgctgaagctgccatgtggtctggcccccagaagggctcctgagcgtagggagttgagccccgcagccgtggcggcatctcctcctccttcctccgccccatgcccagccttgcttccggctggtggcatgccttggggccgggcagcaggtgagaagctgcccccggagggagggggccaagggctgggtcagtctggcctgaggggtggatggctggccctgggggaaggctgggctgggaggccctgtggacagcaggcctgaggccacgaggtcctggggccacccctctcctgctctgggtgtccttctcagagaagatggcagaaggctgcaggccctagaggggacgacgggctggggacgccctgagcttcctggctgtgtggcaggtgctggggaagctctctgggccatagggacctggctcccctctgagaggcccgcctgccctgggacacccagggctgtgctggtggcctgaggctgggaacttgggttcctgggctctgctggcgcctgggctttgtgggggccgaaggtggttgccccgccgggcagggggctgtgtgggccctcgtggggccaccttcctgtcagtgcccgagggacggtgggacagttgcccctgcgccaagggagcccactgccatcccccgtgggctggcgctgcagtcgcgcaccctgtgttgcctgctgacttgcttatgtctgtttggaagctgcttctgtttggccacaggcctgtgttcctgggctgatggccacagagctgacacttggggtttgagttccagacttgcagaccctgggatccgcttactcctccgcgccacggctgctgtgcttccagaggtggcgtgatgcctcccggggccacggtggggtgaaggatggcgagccggacataccattgttggatgtattttttttaaaacagcaataattagccattttaaaggagggatgtacctgtgtgtgtgcatgtgcacgtgtttgagcgtgtgtgtgtgtgtgcaagtgggttcttggatatgtgtagtgtgagcatgtgtgcatgtgtgagcctgtgcacgtgcatgttgtaggtgcataagcatgtacacgcgtgagcatgcatgtgcgtgtacacgtgtataggtgtacatgtgcatgagttgtgtacatgcgtgagcacgtgtatagatgtacgtgtgtgtgcgcatgtgtgcgtgtacatgtgtttgtgtcttgggtatgcataagcatgcacgtgtgtatgaatgtgcgtgtgtatgcatgagcacgtatgcatgtgtgatgcgcatgttcttgtgtacttctctgagggggcacatatgtatgagtgtatgagtgcatacatatgcatatggtgtacgtgtgtgtactttgtgtgtgggcatgtatgcgtatgagtacttgtgtgtggctggtgtatgggtgagcatgcacatgtgtatggatgcatatgtgagctgtacatgtagagtgtacatgtgtgttgcatgagcatgcatgcgtgcgagtgcctgtgtgtgtacttgcatatatgtggctgtgcaggtacccggcggtggtgggctggcagtgcccggggaagcaggtcctgctcacggcttccctgctgggccccaggccccgggctgagcctccctggcccctcttgcccctcagtggagcagggcctgggtggagggcctgggcagctccagggcaggtccggggaggccaggcttggggagcacagggggtggggttcacctgctgctgtttgttcccgaaactgtactgtgagcccacggcgggggcagattgttctgaggccccagatgtgccaaaacagcccccagggtgggggcgagcgagttctgaggagaggggctgcgggggccgggggtgggtgtgtgcccctcccctgaatggcccccaatgctgctgtttttcaataaaaccagagttgaaggc

SEQ ID NO: 1385 - protein, 137 aa, Homo sapiens
MSMHACECLCVYLHICGCAGTRRWWAGSARGSRSCSRLPCWAPGPGLSLPGPSCPSVEQGLGGGPGQLQGRSGEARLGEHRGWGSPAAVCSRNCTVSPRRGQIVLRPQMCQNSPQGGGERVLRRGAAGAGGGCVPLP

SEQ ID NO: 1386 - DNA, 2918 bp, Homo sapiens
gaggagctctcctgggcggctgaagaaggagcttcttctccggagtgcgaaggcggtggcgcctgcggacctaactagctccaggttaggccgagctttgcgggaaagcagcggacttgaaaatactggaaatctgtccggatccaaattattttgcaagccagatgagtaaccagagggcatgaaaggttgagaacatttgacttccctgcaaaccttggtatagatcacttccttttctgtaggaaaggaaaggcaccaaagagcacaatgagtacaagaaagcgtcgtggtggagcaataaattctagacaagctcagaagcgaactcgggaagcaacctccacccccgagatctccttggaagcagaacccatagaactcgtggaaactgctggagatgaaattgtggacctcacttgtgaatctttagagcctgtggtggttgatctgactcacaatgactctgttgtgattgttgacgaaagaagaagaccaaggaggaatgctaggaggctgccccaggaccatgctgacagctgtgtggtgagcagtgacgatgaggagttgtccagggacagagacgtatatgtgactacccatactcccagaaacgccagggatgagggcgctacaggcctcaggccctcaggtactgtcagttgtcccatctgcatggacggatactcagagatcgtgcagaatggacgtctcatcgtttccacagaatgcggccatgtcttctgtagccagtgcctccgtgattccctgaagaatgctaatacttgcccaacttgtaggaaaaagatcaaccacaaacggtaccaccccatttatatatgaagtattcagagccccccaggagagacggatggacagacagacagccaggttctccagtggtatctgcctccattttcctgagatcaaaaagactgtttcgaaaccaacatctgatatgtaaactgctcttttgtttccaaccccttccttttgttatctccagtttgatgctatggcgctggacccagggccctcccaggccatctctgttcctctggggtggtccagttctagagtgggagaaagggagtcaggcgcattgggaatcgtggttccagtctggttgcagaatctgcacatttgccaagaaattttccctgtttggaaagtttgccccagctttcccgggcacaccaccttttgtcccaagtgtctgccggtcgaccaatctgcctgccacacattgaccaagccagacccggttcacccagctcgaggatcccaggttgaagagtggccccttgaggccctggaaagaccaatcactggacttcttcccttgagagtcagaggtcacccgtgattctgcctgcaccttatcattgatctgcagtgatttctgcaaatcaagagaaactctgcagggcactcccctgtttcctaagaacgaaaaagtgcaataaaggccattcgttacctacttttcagcagcccacaagatgtagcactattagtgtccccctcagaggcttaatgttgcctgtggagcagtgcccatcccagcccgtttctgcccaccagttgttctcaggaaccttacccatgctccagcgtccttcacctggcacaggacatgcaagataaatagggcaggcacgtgtttgggtgtcctctcttttctgataaaatccatcccgtgtttgccacacgccctccagtcctcagttcccactgcctaacgtctgcccccgtgtagatactgagaggtggtggcagtaattgtggccttatcagccgctcagttccaggcttttgcccaggtcactgttgccccatgttcggagaacctggcccacctgtcttggctttctcatccttcccaacccagtgccgtttatttcagaagcttcctggccactgggcttggatgcttcgggcttctgactgctccataggttttgactggtgaaacaggggcccagatgacaacctctccttcgctccacaggtacgcgggagcctcaggttctctcaggggcagcaaagtggcccaagctgcccctgacagcacagggcctgggggtggctaacgagagaggccttacagtgccggcatgcctcctcttccactgtcgtccttcctcagagggcctcacgccaaacaaacggccttttcgtgtgaaacatcttcagggcgggaaaggggccacttctggctttgttagcaataactgaccttcagtttacccttctgaaggagcagggactcagcacagaattcactttagacggggctgaaggagtgtccctcctctatgtgaaaagaaaattgttttattcttcattctgactttttaactgtttggctcacttccagttagtttgaatgaaaataataattttctacttggagttgaagagggcagaatccgcagctctcatcattgtgatgtgtagcatgtctgccctctgactggacatcattgccattaactttcttctgggcatcacggcagtgtcacgatgcccagacttggagcaaggcaaccttggagtcagtccactcataaaatatggtaacacccattttaaaatttaagttttgtccttaaagacaacttcagtggttaattataaaagttgtgttacttcgtcctaaattaaattgatagaaagatttaaaaatgtgttttgtttctactattcagaaactgcgaactagggaaaggttggtatgaaaaaatgtctttccttttttcaatgtacatagttcaactctttctttgttacatttaaactatatccatggatatcagtctgctttggactcctctgctagtgttacagatggaaataaaaccattaatttgaaccaaaaaaaaaaaaaaaaaaaaaaaaaaaaaaaaaaaaaaaaa

SEQ ID NO: 1387 - protein, 190 aa, Homo sapiens
MSTRKRRGGAINSRQAQKRTREATSTPEISLEAEPIELVETAGDEIVDLTCESLEPVVVDLTHNDSVVIVDERRRPRRNARRLPQDHADSCVVSSDDEELSRDRDVYVTTHTPRNARDEGATGLRPSGTVSCPICMDGYSEIVQNGRLIVSTECGHVFCSQCLRDSLKNANTCPTCRKKINHKRYHPIYI

SEQ ID NO: 1388 - DNA, 3951 bp, Homo sapiens
cggcgcgctcgccggccgaggtgggatcccgaggcctctccagtccgccgagggcgcaccaccggcccgtctcgcccgccgcgccggggaggtggagcacgagcgcacgtgttaggaacctagaaagattgtacaatgaatggtgattctcgtgctgcggtggtgacctcaccacccccgaccacagcccctcacaaggagaggtacttcgaccgagtagatgagaacaacccagagtacttgagggagaggaacatggcaccagaccttcgccaggacttcaacatgatggagcaaaagaagagggtgtccatgattctgcaaagccctgctttctgtgaagaattggaatcaatgatacaggagcaatttaagaaggggaagaaccccacaggcctattggcattacagcagattgcagattttatgaccacgaatgtaccaaatgtctacccagcagctccgcaaggagggatggctgccttaaacatgagtcttggtatggtgactcctgtgaacgatcttagaggatctgattctattgcgtatgacaaaggagagaagttattacggtgtaaattggcagcgttttatagactagcagatctctttgggtggtctcagcttatctacaatcatatcacaaccagagtgaactccgagcaggaacacttcctcattgtcccttttgggcttctttacagtgaagtgactgcatccagtttggttaagatcaatctacaaggagatatagtagatcgtggaagcactaatctgggagtgaatcaggccggcttcaccttacactctgcaatttatgctgcacgcccggacgtgaagtgcgtcgtgcacattcacaccccagcaggggctgcggtctctgcaatgaaatgtggcctcttgccaatctccccggaggcgctttcccttggagaagtggcttatcatgactaccatggcattctggttgatgaagaggaaaaagttttgattcagaaaaatctggggcctaaaagcaaggttcttattctccggaaccatgggctcgtgtcagttggagagagcgttgaggaggccttctattacatccataaccttgtggttgcctgtgagatccaggttcgaactctggccagtgcaggaggaccagacaacttagtcctgctgaatcctgagaagtacaaagccaagtcccgttccccagggtctccggtaggggaaggcactggatcgcctcccaagtggcagattggtgagcaggaatttgaagccctcatgcggatgctcgataatctgggctacagaactggctacccttatcgataccctgctctgagagagaagtctaaaaaatacagcgatgtggaggttcctgctagtgtcacaggttactcctttgctagtgacggtgattcgggcacttgctccccactcagacacagttttcagaagcagcagcgggagaagacaagatggctgaactctggccggggcgacgaagcttccgaggaagggcagaatggaagcagtcccaagtcgaagactaagtggactaaagaggatggacatagaacttccacctctgctgtccctaacctgtttgttccattgaacactaacccaaaagaggtccaggagatgaggaacaagatccgagagcagaatttacaggacattaagacggctggccctcagtcccaggttttgtgtggtgtagtgatggacaggagcctcgtccagggagagctggtgacggcctccaaggccatcattgaaaaggagtaccagccccacgtcattgtgagcaccacgggccccaaccccttcaccacactcacagaccgtgagctggaggagtaccgcagggaggtggagaggaagcagaagggctgtgaagagaatctggacgaggctagagaacagaaagaaaagagtcctccagaccagcctgcggtcccccacccgcctcccagcactcccatcaagctggaggaaggagacggatgcgctagagagtacctgttaccctaaccttgtgccggagccgactactggagatgacagtgatgctgccacctttaagccaactctccccgatctgtcccctgatgaaccttcagaagcactcggcttcccaatgttagagaaggaggaggaagcccatagacccccaagccccactgaggcccctactgaggccagccccgagccagccccagacccagccccggtggctgaagaggctgccccctcagctgtcgaggagggggccgccgcggaccctggcagcgatgggtctccaggcaagtccccgtccaaaaagaagaagaagttccgtaccccgtcctttctgaagaagagcaagaagaagagtgactcctgaaagccctgcgctaacactgtcctgtccggagcgaccctggctctgccagcgtccccggccacgtctgtgctctgtccttgtgtaatggaatgcaaaaaagccaagccctccgcctagaggtcccctcacgtgaccagccccgtgtagccccgggctgacccagtgtgtgctcagcagccccaccccaccctgccccttgtcctctcagagcctcagcttctgggggagacatgctctccccacaggggggaggcactaagtcatggtcctggctggaaggtactgaaggcttctgcagctttggctgcacgtcaccctcctgagcctcacctttcctgccgtccctcctgttgtgaaatcaccacattctgtctctgcttggcttcccctccaccctaaagtctcaggtgacggactcagactcctggcttcatgtggcattctctctgctcagtgatctcacttaaatctatatacaaagccttggtcccgtgaaaacactcgtgtgcccaccagcggccttgaagaggcaggtctgggccagatgctgggcaggaaaccccagcggcagatgggcctgtgtgcacccaacgtgatgctatgcatgtctgaccgacgatccctcgaccagaatcagattcaggagctcagtttctttttcacttgggtctctggattcctgtcatagggaaggtatatcaggaggggaagaggcctttctagaattttctttgagcaggtttacaatttagcttacatttttcgactgtgaacgtgaataggctgctttttgctttcttctttccagaccccacagtagagcacttttcacttatttgggggaggcttcaggggactgttctcaccttaactcagccagaaagatgccctagttgtgatcaaaggtaactcgaggtggagggtagccctggggcccctcgacatcaccgtcattgatggagcctgaaccgtgtgctcctcggcagatgctgttgttgttacttccctccaagaggctggaaaagggctcagagctgctgagcaggaaccggagggtgacccatttcaggaggtgccggtaccagcctgactaggtacaggcaagcttgtgtgggcccaacaggcccttggtagagctggtgccagatgtgggctcagatcctgggcatgatgggccgagccacctcggatcccactgattggccagccgagcgagaaccaggctgctgcatggcactgaccgccgcttccagcttcctctgagccgcagggcctgctacgcgggcaagcgtgctgcctctcttctgtgtcgttttgttgccaaggcagaatgaaaagtccttaaccgtggactcttcctttatcccctcctttaccccacatatgcaatgacttttaattttcacttttgtagtttaatcctttgtattacaacatgaaatatagttgcatatatggacaccgacttgggaggacaggtcctgaatgtcctttctccagtgtaacatgttttactcacaaataaaattctttcagcaaaaaaaaaaaaaaaaaaaaaaaaaaaaaaa

SEQ ID NO: 1389 - protein, 631 aa, Homo sapiens
MNGDSRAAVVTSPPPTTAPHKERYFDRVDENNPEYLRERNMAPDLRQDFNMMEQKKRVSMILQSPAFCEELESMIQEQFKKGKNPTGLLALQQIADFMTTNVPNVYPAAPQGGMAALNMSLGMVTPVNDLRGSDSIAYDKGEKLLRCKLAAFYRLADLFGWSQLIYNHITTRVNSEQEHFLIVPFGLLYSEVTASSLVKINLQGDIVDRGSTNLGVNQAGFTLHSAIYAARPDVKCVVHIHTPAGAAVSAMKCGLLPISPEALSLGEVAYHDYHGILVDEEEKVLIQKNLGPKSKVLILRNHGLVSVGESVEEAFYYIHNLVVACEIQVRTLASAGGPDNLVLLNPEKYKAKSRSPGSPVGEGTGSPPKWQIGEQEFEALMRMLDNLGYRTGYPYRYPALREKSKKYSDVEVPASVTGYSFASDGDSGTCSPLRHSFQKQQREKTRWLNSGRGDEASEEGQNGSSPKSKTKWTKEDGHRTSTSAVPNLFVPLNTNPKEVQEMRNKIREQNLQDIKTAGPQSQVLCGVVMDRSLVQGELVTASKAIIEKEYQPHVIVSTTGPNPFTTLTDRELEEYRREVERKQKGCEENLDEAREQKEKSPPDQPAVPHPPPSTPIKLEEGDGCAREYLLP

SEQ ID NO: 1390 - DNA, 4010 bp, Homo sapiens
cggcgcgctcgccggccgaggtgggatcccgaggcctctccagtccgccgagggcgcaccaccggcccgtctcgcccgccgcgccggggaggtggagcacgagcgcacgtgttaggaacctagaaagattgtacaatgaatggtgattctcgtgctgcggtggtgacctcaccacccccgaccacagcccctcacaaggagaggtacttcgaccgagtagatgagaacaacccagagtacttgagggagaggaacatggcaccagaccttcgccaggacttcaacatgatggagcaaaagaagagggtgtccatgattctgcaaagccctgctttctgtgaagaattggaatcaatgatacaggagcaatttaagaaggggaagaaccccacaggcctattggcattacagcagattgcagattttatgaccacgaatgtaccaaatgtctacccagcagctccgcaaggagggatggctgccttaaacatgagtcttggtatggtgactcctgtgaacgatcttagaggatctgattctattgcgtatgacaaaggagagaagttattacggtgtaaattggcagcgttttatagactagcagatctctttgggtggtctcagcttatctacaatcatatcacaaccagagtgaactccgagcaggaacacttcctcattgtcccttttgggcttctttacagtgaagtgactgcatccagtttggttaagatcaatctacaaggagatatagtagatcgtggaagcactaatctgggagtgaatcaggccggcttcaccttacactctgcaatttatgctgcacgcccggacgtgaagtgcgtcgtgcacattcacaccccagcaggggctgcggtctctgcaatgaaatgtggcctcttgccaatctccccggaggcgctttcccttggagaagtggcttatcatgactaccatggcattctggttgatgaagaggaaaaagttttgattcagaaaaatctggggcctaaaagcaaggttcttattctccggaaccatgggctcgtgtcagttggagagagcgttgaggaggccttctattacatccataaccttgtggttgcctgtgagatccaggttcgaactctggccagtgcaggaggaccagacaacttagtcctgctgaatcctgagaagtacaaagccaagtcccgttccccagggtctccggtaggggaaggcactggatcgcctcccaagtggcagattggtgagcaggaatttgaagccctcatgcggatgctcgataatctgggctacagaactggctacccttatcgataccctgctctgagagagaagtctaaaaaatacagcgatgtggaggttcctgctagtgtcacaggttactcctttgctagtgacggtgattcgggcacttgctccccactcagacacagttttcagaagcagcagcgggagaagacaagatggctgaactctggccggggcgacgaagcttccgaggaagggcagaatggaagcagtcccaagtcgaagactaaggtgtggacgaacattacacacgatcacgtgaaacccttgctgcagtctctctcgtccggtgtctgcgtgccaagctgtattaccaactgcttgtggactaaagaggatggacatagaacttccacctctgctgtccctaacctgtttgttccattgaacactaacccaaaagaggtccaggagatgaggaacaagatccgagagcagaatttacaggacattaagacggctggccctcagtcccaggttttgtgtggtgtagtgatggacaggagcctcgtccagggagagctggtgacggcctccaaggccatcattgaaaaggagtaccagccccacgtcattgtgagcaccacgggccccaaccccttcaccacactcacagaccgtgagctggaggagtaccgcagggaggtggagaggaagcagaagggctgtgaagagaatctggacgaggctagagaacagaaagaaaagagtcctccagaccagcctgcggtcccccacccgcctcccagcactcccatcaagctggaggaagaccttgtgccggagccgactactggagatgacagtgatgctgccacctttaagccaactctccccgatctgtcccctgatgaaccttcagaagcactcggcttcccaatgttagagaaggaggaggaagcccatagacccccaagccccactgaggcccctactgaggccagccccgagccagccccagacccagccccggtggctgaagaggctgccccctcagctgtcgaggagggggccgccgcggaccctggcagcgatgggtctccaggcaagtccccgtccaaaaagaagaagaagttccgtaccccgtcctttctgaagaagagcaagaagaagagtgactcctgaaagccctgcgctaacactgtcctgtccggagcgaccctggctctgccagcgtccccggccacgtctgtgctctgtccttgtgtaatggaatgcaaaaaagccaagccctccgcctagaggtcccctcacgtgaccagccccgtgtagccccgggctgacccagtgtgtgctcagcagccccaccccaccctgccccttgtcctctcagagcctcagcttctgggggagacatgctctccccacaggggggaggcactaagtcatggtcctggctggaaggtactgaaggcttctgcagctttggctgcacgtcaccctcctgagcctcacctttcctgccgtccctcctgttgtgaaatcaccacattctgtctctgcttggcttcccctccaccctaaagtctcaggtgacggactcagactcctggcttcatgtggcattctctctgctcagtgatctcacttaaatctatatacaaagccttggtcccgtgaaaacactcgtgtgcccaccagcggccttgaagaggcaggtctgggccagatgctgggcaggaaaccccagcggcagatgggcctgtgtgcacccaacgtgatgctatgcatgtctgaccgacgatccctcgaccagaatcagattcaggagctcagtttctttttcacttgggtctctggattcctgtcatagggaaggtatatcaggaggggaagaggcctttctagaattttctttgagcaggtttacaatttagcttacatttttcgactgtgaacgtgaataggctgctttttgctttcttctttccagaccccacagtagagcacttttcacttatttgggggaggcttcaggggactgttctcaccttaactcagccagaaagatgccctagttgtgatcaaaggtaactcgaggtggagggtagccctggggcccctcgacatcaccgtcattgatggagcctgaaccgtgtgctcctcggcagatgctgttgttgttacttccctccaagaggctggaaaagggctcagagctgctgagcaggaaccggagggtgacccatttcaggaggtgccggtaccagcctgactaggtacaggcaagcttgtgtgggcccaacaggcccttggtagagctggtgccagatgtgggctcagatcctgggcatgatgggccgagccacctcggatcccactgattggccagccgagcgagaaccaggctgctgcatggcactgaccgccgcttccagcttcctctgagccgcagggcctgctacgcgggcaagcgtgctgcctctcttctgtgtcgttttgttgccaaggcagaatgaaaagtccttaaccgtggactcttcctttatcccctcctttaccccacatatgcaatgacttttaattttcacttttgtagtttaatcctttgtattacaacatgaaatatagttgcatatatggacaccgacttgggaggacaggtcctgaatgtcctttctccagtgtaacatgttttactcacaaataaaattctttcagcaaaaaaaaaaaaaaaaaaaaaaaaaaaaaaa

SEQ ID NO: 1391 - protein, 768 aa, Homo sapiens
MNGDSRAAVVTSPPPTTAPHKERYFDRVDENNPEYLRERNMAPDLRQDFNMMEQKKRVSMILQSPAFCEELESMIQEQFKKGKNPTGLLALQQIADFMTTNVPNVYPAAPQGGMAALNMSLGMVTPVNDLRGSDSIAYDKGEKLLRCKLAAFYRLADLFGWSQLIYNHITTRVNSEQEHFLIVPFGLLYSEVTASSLVKINLQGDIVDRGSTNLGVNQAGFTLHSAIYAARPDVKCVVHIHTPAGAAVSAMKCGLLPISPEALSLGEVAYHDYHGILVDEEEKVLIQKNLGPKSKVLILRNHGLVSVGESVEEAFYYIHNLVVACEIQVRTLASAGGPDNLVLLNPEKYKAKSRSPGSPVGEGTGSPPKWQIGEQEFEALMRMLDNLGYRTGYPYRYPALREKSKKYSDVEVPASVTGYSFASDGDSGTCSPLRHSFQKQQREKTRWLNSGRGDEASEEGQNGSSPKSKTKVWTNITHDHVKPLLQSLSSGVCVPSCITNCLWTKEDGHRTSTSAVPNLFVPLNTNPKEVQEMRNKIREQNLQDIKTAGPQSQVLCGVVMDRSLVQGELVTASKAIIEKEYQPHVIVSTTGPNPFTTLTDRELEEYRREVERKQKGCEENLDEAREQKEKSPPDQPAVPHPPPSTPIKLEEDLVPEPTTGDDSDAATFKPTLPDLSPDEPSEALGFPMLEKEEEAHRPPSPTEAPTEASPEPAPDPAPVAEEAAPSAVEEGAAADPGSDGSPGKSPSKKKKKFRTPSFLKKSKKKSDS

SEQ ID NO: 1392 - DNA, 3539 bp, Homo sapiens
gcacgtgtcttagggtagcgcgcgcctgtctctcttcgggtctcgggcccttgggcgcagcggggcgcgcgccatggcgaaggcgaagaaggtcggggcgcgaaggaaggcctccggggcgccggcgggagcgcgagggggcccggcgaaggccaactccaatccgttcgaggtgaaagttaacaggcagaagttccagatcctgggccggaagacgcgccacgacgtgggactgcccggggtgtctcgcgcacgggccctcaggaagcgtacacagactttactaaaagagtacaaagaaagggataaatccaatgtattcagagataaacgcttcggagaatacaacagcaacatgagccccgaggagaagatgatgaagaggtttgctctggaacagcagcgacatcatgagaaaaaaagcatctacaatctaaatgaagatgaagaattgactcattatggccagtctttggcagacatcgagaagcataatgacattgtggacagtgacagcgatgctgaggatcgaggaacgttgtctgctgagctgactgctgcccactttggaggaggcggtgggctccttcacaagaagactcaacaggaaggcgaggagcgggagaaaccgaagtcccggaaagagctgattgaagagctcattgccaagtcaaaacaagagaagagggagagacaagctcaacgagaagatgccctcgagctcacggagaagctagaccaagactggaaagaaattcagactctcctgtcccacaaaactcccaagtcagagaacagagacaaaaaggaaaaacccaagcccgatgcatatgacatgatggttcgcgagcttggctttgaaatgaaggcgcagccctctaacaggatgaagacggaggcagaattggcaaaggaagagcaggagcacctcaggaagctggaggctgagagacttcgaagaatgcttggaaaggatgaggatgaaaatgttaagaaaccaaaacatatgtcagcagatgatctgaatgatggcttcgtgctagataaagatgacaggcgtttgctttcctacaaagatggaaagatgaatgtcgaggaagatgtccaggaagagcaaagcaaggaagccagtgaccctgagagcaacgaggaagaaggtgacagttcaggcggggaggacacagaggagagcgacagcccagatagccacttggacctggaatccaacgtggagagtgaggaagaaaacgagaagccagcaaaagagcagaggcagactcctgggaaagggttgataagcggcaaggaaagagctggaaaagctaccagagacgagctgccctacacgttcgcagcccctgaatcctatgaggaactgagatctctgttgttaggaagatcgatggaagagcagcttttggtggtggagagaattcagaagtgcaaccacccgagtctcgcagaaggaaacaaagcaaaattagaaaaactgtttggctttcttttggaatacgttggcgatttggctacagatgacccaccagacctcacagtcattgataagttggttgtgcacttatatcatctttgccagatgtttcctgaatctgcaagtgacgctatcaaatttgttctccgagatgcgatgcatgagatggaagaaatgattgagaccaaaggccgggcggcattgccagggttggatgtgctcatttatttgaaaatcactgggctgctatttccaacttccgacttctggcacccagtggtgacccctgccctcgtgtgcctcagtcagctgctcaccaagtgccccatcctgtccctccaggacgtggtgaagggcctgttcgtgtgctgcctgttcctggagtatgtggctttgtcccagaggtttatacctgagcttattaattttcttcttgggattctttacatagcaactccaaacaaagcaagccaaggttccactctggtgcaccctttcagagcgcttgggaagaactcggaactgctcgtggtgtctgctagagaggatgtggccacgtggcagcagagcagcctctccctccgctgggcgagtagactgagggccccaacttcgacagaggccaatcacatccgactgtcctgcctggctgtgggcctggccctgctgaagcgctgcgtgctcatgtacgggtccctgccatccttccacgccatcatggggcctctccaagccctcctcacggatcacctggcggactgcagccacccgcaggagctccaggagctgtgtcagagcacactgaccgaaatggaaagccagaagcagctctgccggccgctgacctgtgagaagagcaagcctgtcccactgaagcttttcacaccccggctggtcaaagtcctcgagtttggaagaaaacaaggcagtagtaaggaggaacaggaaaggaagaggctgatccacaaacacaagcgtgaatttaaaggggccgttcgagaaatccgcaaggacaatcagttcctggcgaggatgcaactctcagaaatcatggaacgggatgcggaaagaaagcggaaagtaaagcagctttttaacagcctggctacacaggaaggcgaatggaaggctctgaagaggaaaaagttcaaaaaataaattacattttataaataaggcaaggaactggacattacctcacatctgcaattccaaccctctgggaggccaaggcaggaagattgcttcagcccaggagttcgagaccagcctgggcaacacaggaagaccccgtctctaccaaaaaaacataaaaattagccaagtgtggtggcacgcacctgtagtcccaactactcgggaggctgaagcaggaggactgcttgagctgagtccaaggttacagtgagccgtgattgagccactgcactccagcctcggccacagtgcaagactgtgtcgcttaaaaaaaaatttttttttttgagacggagttttgctcttgttgcccaggctggagtgcaatggcacaacctccacctcctgggttcaagcgattctcctgcctcagcctcccgagtagctgggattacagacatgtgccaccacgcccagctaattttgtatttttagtagagacggggtttctccatgttggtcaggctggtctcgaattcccgacctcaggtaatccacctgccttggccccccaattataggtgtgagccacagcacccagccaaaaaagtaattttttttagagtaataatgctataatgttggtgtgattccaacctccagctccccccacccgctgcctgcggttttgtttctgttaaaacgtcacctgatgaaatagaatgaatcctgaaatgcacctctgggatcgggaatggtctgtgtgttatcagctgcgactggttcactgcgtctggacaagcctcatggggactggggattctggccagtgtaatttctgtcaaccacggacgtttgccttcatgtgtagaatttactgttgttatgcaaattatattttcaattataaatg

SEQ ID NO: 1393 - protein, 857 aa, Homo sapiens
MAKAKKVGARRKASGAPAGARGGPAKANSNPFEVKVNRQKFQILGRKTRHDVGLPGVSRARALRKRTQTLLKEYKERDKSNVFRDKRFGEYNSNMSPEEKMMKRFALEQQRHHEKKSIYNLNEDEELTHYGQSLADIEKHNDIVDSDSDAEDRGTLSAELTAAHFGGGGGLLHKKTQQEGEEREKPKSRKELIEELIAKSKQEKRERQAQREDALELTEKLDQDWKEIQTLLSHKTPKSENRDKKEKPKPDAYDMMVRELGFEMKAQPSNRMKTEAELAKEEQEHLRKLEAERLRRMLGKDEDENVKKPKHMSADDLNDGFVLDKDDRRLLSYKDGKMNVEEDVQEEQSKEASDPESNEEEGDSSGGEDTEESDSPDSHLDLESNVESEEENEKPAKEQRQTPGKGLISGKERAGKATRDELPYTFAAPESYEELRSLLLGRSMEEQLLVVERIQKCNHPSLAEGNKAKLEKLFGFLLEYVGDLATDDPPDLTVIDKLVVHLYHLCQMFPESASDAIKFVLRDAMHEMEEMIETKGRAALPGLDVLIYLKITGLLFPTSDFWHPVVTPALVCLSQLLTKCPILSLQDVVKGLFVCCLFLEYVALSQRFIPELINFLLGILYIATPNKASQGSTLVHPFRALGKNSELLVVSAREDVATWQQSSLSLRWASRLRAPTSTEANHIRLSCLAVGLALLKRCVLMYGSLPSFHAIMGPLQALLTDHLADCSHPQELQELCQSTLTEMESQKQLCRPLTCEKSKPVPLKLFTPRLVKVLEFGRKQGSSKEEQERKRLIHKHKREFKGAVREIRKDNQFLARMQLSEIMERDAERKRKVKQLFNSLATQEGEWKALKRKKFKK

SEQ ID NO: 1394 - DNA, 7064 bp, Homo sapiens
  unsure 6957: unknown base
ccctccggctcggcgaagcagggaaggggagagaagcaggagtcgggagactgcacaggccagaaagtctgcggagcgggccgcgcccctggcccgcccgggctccaagtcccgcgtcgccgccctggcggggacggtgcagcaggcggcgggatgcggcggggcggcagcctgagcgccccggatggcccgcggcggggcggcctgcaagagcgacgcgcggctgctgctggggcgggacgcgctgcggccggcgcccgccctgctggcccccgccgtgctgctgggcgccgcgctcggcctcggcctcggcctttggcttggctgccgcgcgggccgccagcgcacgcgacaccagaaagacgacactcaaaatctgctcaagaatttggagtctaatgcgcagaccccctcggaaactggctccccatcaaggaggaggaagagagaagtgcagatgtcgaaggacaaggaagctgttgatgaatgtgagccgccttccaacagcaatatcacagcattcgccctgaaggccaaagtcatctaccccatcaatcagaagttccggcctctggccgatggctcctccaacccgtctctgcatgaaaacttaaagcaggctgttttgccacaccagccggtagaggcctctccttccagcagtctggggagcctgagccagggtgagaaggacgactgcagctcctcatccagcgtccactcggccaccagcgatgacaggtttctcagccgcaccttcctccgggtgaacgccttccctgaagtgctggcctgcgagagtgtagacgttgacctgtgtatctacagccttcacttaaaagacctgctgcatttggacacggcactgaggcaggaaaagcatatgatgtttattcagatttttaaaatgtgcctccttgaccttcttcctaaaaagaagtcagatgatgaattataccagaagatcctttcaaaacaagaaaaagatttggaggaactagaaaagggacttcaggtcaaactgtcaaacacagaaatgtcgggggctggtgactctgagtacatcaccctggctgatgtggaaaagaaggagagagaatactctgaacagctaatcgataatatggaagctttctggaaacagatggcaaatatccagcactttcttgtggaccagtttaagtgttccagctccaaagcccgacagctgatgatgactctgacggaaagaatgattgcagccgaagggctattgtgcgattctcaggagctgcaggctctggacgccctggagaggacgatggggcgggcgcacatggcaaaagtgattgagtttctgaagctgcaagtccaggaggagaccaggtgccggctggctgccatctcccacggcctggagctgctggctggtgaggggaagctgtccgggcggcagaaggaggagctgctcacgcagcagcacaaggccttctggcaggaggcagagcgcttcagccgggagtttgtccagcgaggcaaagacctggtcacggcgtctctggctcaccaggtggagggaacggcaaaactcacgctggcccaagaggaggaacagagaagcttcctggctgaggcccagccgactgctgacccggaaaagtttctcgaggcttttcatgaggtcctggagaggcagaggctgatgcagtgtgacctggaggaagaggagaatgtcagagccaccgaggctgtggttgcactctgccaggagctgtacttcagcaccgtggacactttccagaagttcgtggatgccctgttccttcagacgctccctggcatgactggcctccccccggaagagtgtgactacttgaggcaggaagtccaggagaacgctgcctggcagctggggaagtcaaatcgcttccggaggcagcagtggaaactcttccaggagctcctagagcaagaccagcaggtgtggatggaggagtgtgcgctgtccagcgtgctgcagacacacctgcgggaggaccacgagggcaccatccgcggcgtcttgggccgactgggcggcctcactgaagagtccacgcggtgtgtcctgcaggggcatgacctgctgttgcgctcagccctccggaggctggcactccgcggcaacgccctggccaccctgacgcagatgcggctatcggggaagaagcacctcctgcaggagctgcgggaacagcgtgcactggagcaggggtcctcccagtgcctggacgagcatcagtggcagctgctcagggccctggaggcgcgtgtgctggaggaggccagccggctagaggaggaagcacagcagacacggctgcagctccagcagcggctcctggccgaggcccaggaggtggggcagcttctgcagcagcacatggagtgcgccattgggcaggcgctgctggtgcatgcacggaatgcagccaccaagagccgggccaaggacagggatgacttcaagaggacactgatggaggcggcagtggagagcgtctacgtgaccagcgctggtgtcagccgcctggtgcaggcgtattaccagcaaatcggaaggatcatggaggaccacgaggagagaaaactgcagcacctgaagaccctgcagggtgagaggatggaaaattacaaactgcggaaaaagcaagaactcagcaacccttcgtcgggcagcaggacggcaggtggcgctcatgagacctcccaggcggtccaccagaggatgctgtcccagcagaagaggttcctggcccagttcccagtgcaccagcagatgcgtctgcacgcccagcagcagcaggcaggagtcatggaccttctggaagcccagctggagacccagctacaggaagctgaacagaacttcatctccgagctggcagccttggcccgagtgccccttgctgaaagcaaactgttgcctgctaagcgtgggctgctagagaagcccctaaggactaaaaggaagaagcccctgccccaggaaagaggggacctgggggtgcccaacaatgaggaccttgcctccggggaccagacctcaggctcactcagcagcaaaaggctgagtcagcaagaaagtgaagctggggacagtgggaactcaaagaagatgctaaagagaagaagcaacttgtagtttaagaccagtcggtgggacaagacctgaagccctgggtctgggtgtgaattccaccttccctcctgcagtgctgagaggcagcgaggacggagaggacagcggcatctctaggctcttctgagagggacagagaaagaatagaaatgtgccctaaaagcataaatgagtatcacctgagaaaattaggcattcccgtcttggaaacacgtctctgtgagtttgcatttcatttggcttggagccctggctcgatgcctcatggatctttctccccaaggagggacgtcttgaggggtccgagcctcaggccaaggacccctgatgcagactctggaatccctggcccaaaggcctgtctgggcccatctggggctgaggacacacagatacataatgacacctgcagaaatgtattctctgaggacacttagaatatgaggaagagggtgtggcccaaccctcacttcacctggggaggggcttcttccggacagtagacaccctgcccgtgcagagagatgtcatgggggcacctgctctccctgatagatgctgagagcatccagaaacttccagaccagccctctcaccacacccagaagaggcctttcccatctggagagaagcttccagaccagcccttcacacaccacagccaggaggggcctttcccacctggagagaaacttccagaccagcccctcataccacagccaagaggggcctttctcacctggagagaaatttccagaccatcccctctcaccacagccaggagaggcctttcccaccggtagagaaacttccagaccagcccctcacaccacagccaagagaagcctttccagcctggagagaaacttccagaccagccctctcactacagccaggagaggcctttcccgcctggaaacttccggacaagcctctcacacaccacagccaggagaggcctttcccacctggacagaaacttccagaccagcccctctcaccacagccaggagaggcctttaccacctggagagaagcttccagaccagcccctcacaccacagccaggagaggcctttcccacctggagagaaacttccagaccagcccctcataccacagccaagaggggcctttctcacctggagagaaacttccagaccagcccctcacaccaccgccaggagaggcctttcccaccgggagagaaacttccagaccagcccctcacaccacagccaggagaggcctttcccaccgggagagaaacttccagaccagccctctcactacagccagaagaggcctttcccaccgggagaggaacttccagaccagcccctcacaccacagccaggagaggcctttcccgcctggagagaagcttcaggccagctcctcacaccacagccaggagagaccttttctgcctggagagaaactttcagaccagccccacacaccacagccaggagaggccgttcctgcctggagagaagcttccagaccagcccttcacaccacagccaggagaggcctttcccacctggagagaaacttccagaccagcccctctcaccacagccaggagaggccgttcccacctggagggaaaattgctcctttgatggaggttagggactgtcaccctcagcactgtgaacataccgggcgagatcattcttcaggggaaggagctgcccagagcatcacaggatgttccagtgtccctggtctctgcccaccagatgccagcactcccaccattcgtggcaaccaaggatgtctccagacactgccccgtgtccatggggttatcacccactgtgctgagtcaaagggtgccttgccctggtctaatccaggacatagccgtggatacgtccaaaaatccccagaacctagtgagccctctggctctgggagcccctatctcaggaattttcagggtcatttgtgacttttcatttcttaaaacctgaaatagactctcttagaaacaagtgactccttcccagtggccaaaacttaatcatcagagcgcttccttcagttcctcacccatcagccagtgggctctccaaagttaaccaacagctccctcttgtggttcactaaaaaacttggttattccatggagttgtgcaaagctatggcttccttggtgcaatattcttaaaacctgctttgcatagaaatcacttttgcccaggctggagtgcagtggcgtgatctcggctcatggcaatctccatctcccgggttcaagcgattttcctgcctcagcctccccagtagctgggactacagacgtgtgccaccacgcctggctaaatcttttttgtattttattttagtagagacggggtttcaccatactggccaggctgctctcgaactcctgacctcatcgtccacctgcctcggcctccccaaagtgctgagattaggcgttagccaccgcgcccggccagaaatcacttttatattgtcacatgggccctctgcacagagtccgatggctcctcccggggaagcctgattttgtgacgtgtgtatagtaaatgcaggccctctggcagcaccataattggtcggttaccctgagcccagagctctgaaagcatctgtggaatgatcacgggacccttctcctctgagaaggctcccggctgcctccccgccaccgagcttgtagcctgaatgcctggctgtcgcatggagcattttgcttctggggtgtcttccttagccaaagggaacgtgtcatttgctcgaccctggcccacccttgccgcccagctgttgtgctgggcacagtctggggcacaggcctccatgatgaagacgcgtgggctgtcggtgctttcatccgtcacaaactggcacctgtacctgccagcaggagcatgatggggacttccatgctggaattgctccctgattaaaatgagatatggctatttggaagacactgcattttagccagtgtacctgggcacagactcggggctgccctgaagctgatgaaggcttgaaggacggaagggctgagccacatgaaggcagcactcagggccaggggagagagaagaggatcagcagtgcagccccaggatgcctcgcagacgtgccttctgccatgattgtgaagttctagccacgtggaactctctcggaagaactggttgttaaagagcacctctgccttcttcctctgttgccatgtgatctctgcacacgctagctctccttcgccttctgccatgctggaagtagcctgaggccctcaccagaagcagacgctggcaccgtgctgcttgtacagcctgcagagccgtgagccaagtaaacctctttaattacccagcctcaggtgctccgggaacgccttccgcggaatgaagcggcccatgcccttgttgacgttgatgtttccgtcttcaaagacgatcttgccctggctgatgaccactagtggggagccgtggcactccataccctcgaagatgttgtactccaccgcctgcaccaacagcctcagcgttacttcccaggatttgctctgccccaaacgagctgttcataacagcgattttgcctaacattatatcataagcgtgttccaatgtttttttttctctctaaaaataccttttattgactgtaatattccactgtatggtccacagtgtatataaccaacaactcaccgttgcgcatgtaggctgccggtggctttctataatcaaatcaatattgttctggggcatcacaaagaggaagggggtcccccnggggttatgcaatgtggctgctttgactgtactggacataaaaataagtaaaatgttcttcattttacttaaaatgtgtctttaaataaaatttttttctctaggtt

SEQ ID NO: 1395 - protein, 992 aa, Homo sapiens
MARGGAACKSDARLLLGRDALRPAPALLAPAVLLGAALGLGLGLWLGCRAGRQRTRHQKDDTQNLLKNLESNAQTPSETGSPSRRRKREVQMSKDKEAVDECEPPSNSNITAFALKAKVIYPINQKFRPLADGSSNPSLHENLKQAVLPHQPVEASPSSSLGSLSQGEKDDCSSSSSVHSATSDDRFLSRTFLRVNAFPEVLACESVDVDLCIYSLHLKDLLHLDTALRQEKHMMFIQIFKMCLLDLLPKKKSDDELYQKILSKQEKDLEELEKGLQVKLSNTEMSGAGDSEYITLADVEKKEREYSEQLIDNMEAFWKQMANIQHFLVDQFKCSSSKARQLMMTLTERMIAAEGLLCDSQELQALDALERTMGRAHMAKVIEFLKLQVQEETRCRLAAISHGLELLAGEGKLSGRQKEELLTQQHKAFWQEAERFSREFVQRGKDLVTASLAHQVEGTAKLTLAQEEEQRSFLAEAQPTADPEKFLEAFHEVLERQRLMQCDLEEEENVRATEAVVALCQELYFSTVDTFQKFVDALFLQTLPGMTGLPPEECDYLRQEVQENAAWQLGKSNRFRRQQWKLFQELLEQDQQVWMEECALSSVLQTHLREDHEGTIRGVLGRLGGLTEESTRCVLQGHDLLLRSALRRLALRGNALATLTQMRLSGKKHLLQELREQRALEQGSSQCLDEHQWQLLRALEARVLEEASRLEEEAQQTRLQLQQRLLAEAQEVGQLLQQHMECAIGQALLVHARNAATKSRAKDRDDFKRTLMEAAVESVYVTSAGVSRLVQAYYQQIGRIMEDHEERKLQHLKTLQGERMENYKLRKKQELSNPSSGSRTAGGAHETSQAVHQRMLSQQKRFLAQFPVHQQMRLHAQQQQAGVMDLLEAQLETQLQEAEQNFISELAALARVPLAESKLLPAKRGLLEKPLRTKRKKPLPQERGDLGVPNNEDLASGDQTSGSLSSKRLSQQESEAGDSGNSKKMLKRRSNL

SEQ ID NO: 1396 - DNA, 2928 bp, Homo sapiens
ccgatccgggcggtgctggcagccggagcggcggcgggcgggccgagcagccggggcagccgcgcgtgggcatccacgggcgccgagcctccgtccgtgtctctatccctcccgggcctttgtcagcgcgcccgctgggagcggggccgagagcgccggttccagtcagacagccccgcaggtcagcggccgggccgagggcgccagagggggccatgtcgtaccagggcaagaagagcatcccgcacatcacgagtgaccgactcctcatcaaaggtggacggatcatcaacgatgaccaatccctttatgctgacgtctacctggaggatggacttatcaaacaaataggagagaacttaatcgttcctggtggagtgaagaccattgaagccaacgggcggatggttattcccggaggtattgatgtcaacacgtacctgcagaagccctcccaggggatgactgcggctgatgacttcttccaagggaccagggcggcactggtgggcgggaccacgatgatcattgaccatgttgttcctgaacctgggtccagcctactgacctctttcgagaagtggcacgaagcagctgacaccaaatcctgctgtgattactccctccacgtggacatcacaagctggtacgatggcgttcgggaggagctggaggtgctggtgcaggacaaaggcgtcaattccttccaagtctacatggcctataaggatgtctaccaaatgtccgacagccagctctatgaagcctttaccttccttaagggcctgggagctgtgatcttggtccatgcagaaaatggagatttgatagctcaggaacaaaagcggatcctggagatgggcatcacgggtcccgagggccatgccctgagcagacctgaagagctggaggccgaggcggtgttccgggccatcaccattgcgggccggatcaactgccctgtgtacatcaccaaggtcatgagcaagagtgcagccgacatcatcgctctggccaggaagaaagggcccctagtttttggagagcccattgccgccagcctggggaccgatggcacccattactggagcaagaactgggccaaggctgcggcgttcgtgacttcccctcccctgagcccggaccctaccacgcccgactacttgacctccctactggcctgtggggacttgcaggtcacaggcagcggccactgtccctacagcactgcccagaaggcggtgggcaaggacaactttaccctgatccccgagggtgtcaacgggatagaggagcggatgacggtcgtctgggacaaggcggtggctactggcaaaatggatgagaaccagtttgtcgctgtcaccagcaccaatgcagccaagatctttaacctgtacccaaggaaagggcggattgccgtgggctcggatgccgacgtggtcatctgggaccccgacaagttgaagaccataacagccaaaagtcacaagtcggcggtggagtacaacatcttcgagggtatggagtgccacggctccccactagtggtcatcagccagggcaagatcgtctttgaagacggaaacatcaacgtcaacaagggcatgggccgcttcattccgcggaaggcgttcccggagcacctgtaccagcgcgtcaaaatcaggaataaggtttttggattgcaaggggtttccaggggcatgtatgacggtcctgtgtacgaggtaccagctacacccaaatatgcaactcccgctccttcagccaaatcttcgccttctaaacaccagcccccacccatcagaaacctccaccagtccaacttcagcttatcaggtgcccagatagatgacaacaatcccaggcgcaccggccaccgcatcgtggcgccccctggtggccgctccaacatcaccagcctcggttgaacgtggatgcgcggaggagctagcctgaaggattctgggaatcatgtccatcccttttcctgtcagtgtttttgaaacccacagttttagttggtgctgatggagggagggggaagtcgaaggatgctctttcccttttctgtttaggaagaagtggtactagtgtggtgtgtttgcttggaaattccttgccccacagttgtgttcatgctgaatccacctcggagcatggtgttttcattcccccttcctagtgaaccacaggttttagcattgtcttgttctgtcccttccacttctaactccactggctccatgattctctgagtggtggttcctttgcaccctgtagatgttctaggatagttgatgcatgttactaaattacgtatgcaagtctgtgagtgcgtctgaggggacatcgccaaggactgactgagacacgatgccgagacctcaagccctgaggggcagtcccaaaacccttacagtgaagatgtttactcattgcccccacctctggtccacactagaaagaagctcgccccacctccacctgtgagatccgtgaattctcggaatggcaggggaagccttgcactaggttgcagagaagcatcctccacatcctgtgtcagaaaccctggtctccgtggcacttgtaactcaccgtgctgtcttctggtctgtgtgtgttcttcaagccagctctaggcttcaggccgagccaggttcacactcagaaagaggtctccccatccccattcggggctgacgatggggggctgatggctgcccctgcgtggcctgagtcctggtccctctgaggcagttgacggggcagtcagatttttaaagttttgtacaaagttttcctttgtaatcactcccatttttacttaacaaccaacttgttgtggctcttatttctgaattcaaagcttgtgaaaaaataaagaaaatgaactgcccactgaaaaaaaaaaaaaaaaaa

SEQ ID NO: 1397 - protein, 572 aa, Homo sapiens
MSYQGKKSIPHITSDRLLIKGGRIINDDQSLYADVYLEDGLIKQIGENLIVPGGVKTIEANGRMVIPGGIDVNTYLQKPSQGMTAADDFFQGTRAALVGGTTMIIDHVVPEPGSSLLTSFEKWHEAADTKSCCDYSLHVDITSWYDGVREELEVLVQDKGVNSFQVYMAYKDVYQMSDSQLYEAFTFLKGLGAVILVHAENGDLIAQEQKRILEMGITGPEGHALSRPEELEAEAVFRAITIAGRINCPVYITKVMSKSAADIIALARKKGPLVFGEPIAASLGTDGTHYWSKNWAKAAAFVTSPPLSPDPTTPDYLTSLLACGDLQVTGSGHCPYSTAQKAVGKDNFTLIPEGVNGIEERMTVVWDKAVATGKMDENQFVAVTSTNAAKIFNLYPRKGRIAVGSDADVVIWDPDKLKTITAKSHKSAVEYNIFEGMECHGSPLVVISQGKIVFEDGNINVNKGMGRFIPRKAFPEHLYQRVKIRNKVFGLQGVSRGMYDGPVYEVPATPKYATPAPSAKSSPSKHQPPPIRNLHQSNFSLSGAQIDDNNPRRTGHRIVAPPGGRSNITSLG

SEQ ID NO: 1398 - DNA, 4820 bp, Homo sapiens
tttctccttggaccaagatgactgatggaaaactctccacctctacaaatggcgtagccttcatgggtattctggatggtcgaccaggaaacccccttcagaacctgcaacacgtcaatctcaaggcgccccgactcctctccgcgcctgagtacgggcccaagctgaaactcagggctttagaagaccggcacagcctccagtccgtggactcggggattcctaccctggagatcgggaacccggagcctgtaccctgcagcgcggtccacgtgaggaggaagcagtccgactccgacctcatccccgagcgggccttccagagcgcctgcgcgctgccatcctgtgcgccaccagctcctagcagcaccgagcgggaacagagcgtgcgcaaatcctccacgtttcccaggacaggctatgactcggtaaagctctatagcccgacctccaaagccctgacccgcagcgatgatgtctccgtctgcagcgtgtccagtcttgggacagagctgtccaccacgctgtccgtcagcaatgaggacatcttggaccttgtggtcacgagcagctccagtgccattgtgaccctggagaatgacgatgacccacagtttaccaacgtcaccttgagctctatcaaggaaacccgtggcttacaccagcaggactgtgttcatgaagctgaggaggggagtaaattgaaaatattggggccatttagtaacttctttgcaaggaacttgcttgctagaaaacaaagtgcaaggcttgacaaacacaatgacttgggatggaagttatttgggaaagcgccactccgagagaatgcccagaaggattcaaagagaatacagaaggaatatgaagacaaggctggaagacctagcaagccaccctctccaaagcagaatgtgaggaagaatcttgactttgaaccactttccaccaccgcactcatcctcgaggacagaccagcaaatctcccagcaaaaccagctgaagaagctcagaagcacagacagcagtatgaagaaatggtggttcaggccaaaaagcgagagctgaaagaagcccagcgaaggaagaagcagctggaagaaagatgcagagtcgaggaaagcattggaaacgctgtgctcacctggaataatgagatcttacctaactgggaaacaatgtggtgctctagaaaagttcgagatttatggtggcagggaatccctccaagtgtgagaggcaaagtctggagcttagccattggcaacgagttaaatatcacccacgagctctttgacatctgtcttgcccgagccaaggagaggtggcggtcccttagcacaggaggctctgaagtggagaacgaagatgctggtttttcagcagcagacagagaagccagtctggagcttattaaactggacatttctagaacatttcctaatctctgcattttccagcaaggtggtccatatcatgacatgttgcacagtattttgggcgcttatacttgttaccggccagatgtgggttatgtccagggcatgtccttcatagcagcagtgttgatcttgaacttagatactgcagatgcctttattgccttttctaaccttctgaataaaccctgtcaaatggcgttttttagagtggaccatggccttatgttgacttattttgctgcatttgaagtattctttgaagaaaatttgccgaaattatttgcgcatttcaagaagaacaacctaactccagatatctacctaattgattggatctttaccttatatagtaaatctctgcccctcgacctggcctgtcgtatctgggacgtgttctgtcgcgatggggaagagttcctgttccgcacggccctgggcatcctgaagctgttcgaggacatcctgaccaagatggacttcattcacatggcccagttcctgacccggctgcccgaggacctgcccgccgaggagctgtttgcctccatcgccacgatccagatgcagagccgaaacaagaagtgggctcaggtactgactgcattgcagaaagacagccgggaaatggagaagggaagtccgtccctccgacactgaggctgcagcgggaattcgcactcggcaccaatcagagccccatgccgcggcccctctgttgtttcagactgacacccgggcagccgagaagaacagacgctctttaagtttgattcctaacactggagttggccttaaacaaaacaaacacaaaaacttttaaagaattaaaccaaggcttagccttaagcagctcagtggaaggatgagctgctgcggaccacagccagccactgcatctgctgcacagttgaacgatgggcagtggctcacccccactcctttatttcagcaaaagctaattaaattgtaatgtttctatgtcaactactgggaagtatgttacagtcttagccaggatgcatgagagatgttatttgggagacttgagatgctttggctgatatttacatgttttcgataagaaagggatcgctgattgagttattgagatagtttttccagagctggaggtcacgtttctaaaactcacctacgaaagatagcattaaaggaacaggggctctctgaggatggccactgatgtgtgtttgtggatacctgggcatcgacccagcctgcaggtgagctctgggccatgttgccttgacacagtcacagtgtagaggctgcaggtgcacacgtgggctccagtgggactgcgctctgggagactgctccctggcatcggtcctgcggaggtggaaagttcgagaggaggagctatttgcgaggaagccctgtggcaatagagataggcttaaaagcggagagaacacagagtggaatcagccccctgtaagtaaaagggtagagaaagagatgtgtggctgggccctctcccacctgcctgttcagtggaggccagggcagcagcccagaacagcacatgtgggggaggtggccccttgtgccagcagtggctcctctctgcctttgagccctgcacagctggacccatcctaagtgccagtgagtccctcacacatttgactttagaacgtgtgcttcatgacccgttgtacagacggaggagcgagcaacacacgtctaacagcctagacaatctcgtcagatgctcatactggaccatcagcctccccattttagctgactttcccagggtcgttggcaaattttttgttctgtcttttccttgactaattgtagaactttgtgtgaggactttggttatccaaaatcacagaaatgaaccgttttgcagctgcgcagtctaaagggcaggccagtgtctggaagcagggcccacgtggcggtccgctggcaggctggtcctggggagcattctgcggacccggtcacgggcttggttagtcatgcgtacatgtgtgccttggggtgctctgcactccacggcccttctcagccacacttcccaccccagggggtgcccccaggctgatctcatttctgatgttgagggctgtttggctctgtctgtatagcttgtaacaggagccttgggctaggggctggggaaggaaagccgagctggcattcgttctctggactttttatgcctgccatacccgctaatgctcctcgaggtgcaggagcaggttgctgagccagtggctgccccgtgccctccttcccagcactatcatgtgtcacgtttcccggactctgcccctacatctcagctgaatctccagggaggctgcagagcatcgtggagaccactttctgcctcggcctttaaatgctgactcacctcctctcggaggaggcgtcctgtcttcacgggggggtcccggtggcctccagacgtagccatttcctgacatcaagatgttgaatgtaatctggtctgagctgggcctgtgggaggggccgcctgaggcctgtgcgctgttgtcctcgcagatgtacttatttttgttcatgatacgggcgttccgttccttaaagatgtatatattttcttactgtacataaagatgttccttaagtcgtacagaaggtggcgcggcaaagggcctcgtgcagtgtgttcagattgcccctggggatcttctgtgtcttcagcgcccagccctgcgtgttcctggtgaagcagtttcacatcagtctctccagatagcactacgatgtattccgcttctgaacaggatcccatgccagtgtggaacaccttcccaatcttagttcagaagtggcttgtatgacctgttcaggggtcacatgaggtctcgccagtttcctgggtcctcttcagaggccagaaagttctaagttctgagtccccggccagggtcccttaacacctcggcacagaggctgttggcaagtgtagaggctgcctctgtgtgtggtttaagtaaactggaaatgagacattgacgtgctgctcctccagaggtctgcacactccacttcacatgccgttgactctcacagtctaagacttcagggccgggacctttgtccagcctgcacagtagagtgaggctgcctctcccgccaggcattgggatcccatttagaaacggcattcacttcagaaggtactttttaactgctcagtttttgactattttaaatagtttgctgaaaactcctgataacacttgctacatatcatgttttaattgcttgtacagttaacctttaattttatttagtaaagtgtatcaaagtaggacttttttgaattgtaaataggtggttttattaaataaaagtcaatgtaaaattgtt

SEQ ID NO: 1399 - protein, 693 aa, Homo sapiens
MTDGKLSTSTNGVAFMGILDGRPGNPLQNLQHVNLKAPRLLSAPEYGPKLKLRALEDRHSLQSVDSGIPTLEIGNPEPVPCSAVHVRRKQSDSDLIPERAFQSACALPSCAPPAPSSTEREQSVRKSSTFPRTGYDSVKLYSPTSKALTRSDDVSVCSVSSLGTELSTTLSVSNEDILDLVVTSSSSAIVTLENDDDPQFTNVTLSSIKETRGLHQQDCVHEAEEGSKLKILGPFSNFFARNLLARKQSARLDKHNDLGWKLFGKAPLRENAQKDSKRIQKEYEDKAGRPSKPPSPKQNVRKNLDFEPLSTTALILEDRPANLPAKPAEEAQKHRQQYEEMVVQAKKRELKEAQRRKKQLEERCRVEESIGNAVLTWNNEILPNWETMWCSRKVRDLWWQGIPPSVRGKVWSLAIGNELNITHELFDICLARAKERWRSLSTGGSEVENEDAGFSAADREASLELIKLDISRTFPNLCIFQQGGPYHDMLHSILGAYTCYRPDVGYVQGMSFIAAVLILNLDTADAFIAFSNLLNKPCQMAFFRVDHGLMLTYFAAFEVFFEENLPKLFAHFKKNNLTPDIYLIDWIFTLYSKSLPLDLACRIWDVFCRDGEEFLFRTALGILKLFEDILTKMDFIHMAQFLTRLPEDLPAEELFASIATIQMQSRNKKWAQVLTALQKDSREMEKGSPSLRH

SEQ ID NO: 1400 - DNA, 1580 bp, Homo sapiens
gctatggcggtggacatcacgctgctattccgggccagcgtcaagaccgtgaagacgcggaacaaggcgctgggagtggcggtgggcggcggggtcgatggcagccgggacgagctgttccgccggagcccccggcccaagggcgacttctccagccgggcccgcgaagtgatttctcacattggcaaactgagagattttcttctggaacacaggaaagattatattaatgcttatagccataccatgtctgaatatgggaggatgacagacacagaacgagaccagatagaccaggatgcccagatattcatgaggacctgttcagaagcaattcagcaactacgaacagaagctcacaaggagatacattcccagcaagtgaaggagcacaggaccgctgttttggatttcattgaagattacttgaaaagagtatgtaaactttactcagaacagagagccatccgagttaaaagagtggtggataagaaaagattatctaagctggaaccagaaccaaatacaaagacaagagaatccacatcttctgagaaagtttcacagagtccttcaaaagactctgaagaaaaccctgccactgaagaacgtccagaaaaaattttggctgaaacacaacctgaattgggaacgtggggagatggcaaaggcgaagatgagttatccccagaagaaatacaaatgtttgaacaggaaaatcagcgactaattggtgaaatgaacagcttgtttgatgaagtgaggcaaatcgaagggagagtggttgagatttccagactccaagagatattcacggaaaaggttttgcaacaggaagctgagattgacagcattcaccagttagttgtgggggcaactgaaaatatcaaggaaggcaacgaagacataagagaggccattaaaaacaacgctggcttccgcgtgtggatcctcttcttcctcgtgatgtgctccttctccttgctcttcctcgactggtacgacagctagccagggccacgggggcccagcacgagagtcctcatgggcactcacagactgcgtgctttcatgtacttccagtgctggagcatggtatgaccagattttatcacagtgccatttgaagggaaaggagttcagacagacagacgtattccccaaaaagggataccccaggccgatggtgttcagccatttagcagctgaaaaaggaaacagtgcacaccaatgggaggcagcctgcgtagccctcatcaggcaagacagactgaatgcaggagtgggtgattagctgctccttgaacttgaggctgccttggcagcaggggcacagcaggcctcaagagcccctaattgtctcagggttcaaaggaagacactgacctttcccatcccggtagcttcagggaagatcatagttaataacgtctctcaacaaatgattacttctttgtttccttgtggcttcttgtctgtctgagtcaacgaatacacagacttactggattatagaagagaaaattcacatctgccttgttaatctaataaatataattacagccccttaaaaaaaaaaa

SEQ ID NO: 1401 - protein, 335 aa, Homo sapiens
MAVDITLLFRASVKTVKTRNKALGVAVGGGVDGSRDELFRRSPRPKGDFSSRAREVISHIGKLRDFLLEHRKDYINAYSHTMSEYGRMTDTERDQIDQDAQIFMRTCSEAIQQLRTEAHKEIHSQQVKEHRTAVLDFIEDYLKRVCKLYSEQRAIRVKRVVDKKRLSKLEPEPNTKTRESTSSEKVSQSPSKDSEENPATEERPEKILAETQPELGTWGDGKGEDELSPEEIQMFEQENQRLIGEMNSLFDEVRQIEGRVVEISRLQEIFTEKVLQQEAEIDSIHQLVVGATENIKEGNEDIREAIKNNAGFRVWILFFLVMCSFSLLFLDWYDS

SEQ ID NO: 1402 - DNA, 2410 bp, Homo sapiens
agcttagaggcaaagttaagagactcatcagattctgagctgctgcgggatattttgcagaagacgtgctgtattgcccagaagccatcgtgtcactggtcggggtcctgcggaggctggctgcctgccgggagcacaagcaggctcctgaggtctacctggcctttaccgtccgcaacccagagacgtgccagctgttcaccaccgagctaggctggactgggatcagatgggaagtggaagctcatcatgaccagaaactgtttccctacagagagcacttggagatggcaatgctgaacctcacactgtaggactcacacacgactccaacgggcttgtgagaattaagtcactctcgtgggaagaatttttatatgggaaagcggataaaactttcattgcactggaatgtttggaaaatgttaaattccaaatcaggaaccacaaactgccctctaataagacattggctatctaagcatgtgggtgccccctttctgccagcagttctggttcttaagaaaatcaccataaatcagacatgaaaattctggctccaaaaatagcattttctttgtgcaaataaaaacgagtgtatcaagtatgacgttcccccaacgtggacacacttgtttcctcagaaagccaaacctgctgcagctgccacatccctggacacactcgtttcctcacaaagccaagcccgctacagctgccacatccctggacacactcggttcctcacaaagccaagcccgctgcagctgccacattcctgggcttatggtgcagcaggtgcttttttcaagacaggaatcaaagtgtaaggaacatggcagaaaggtgacacctggagaccaaatgcaggatgaggagtactgcagaggtcacagggaagtcacagaacagtaatacgctggcaggggcatggggcatgaagaacagaagaagacatttgagaaaagcatctgcaaaatactaaagagcagagcttacctcatttcctgtccccaccccatcccaggtcaccacctggctgaccccaggtccccgacccaacaacaacccctcccaagtccctaactcccttacctggacttgagacccttcacaccccagcagtgctccgcctccaacttgacatcatgctttctggaaacttccccgtgtgtcccactttcccacacttggtgcgctggagcaccttccggcctctacatgctgtacgttcccctgtgagcaccctcctctcggcctctggccaacacagtcccacccatctgtgggtaacaagggggtgtgggtgttcttttcagccttgctaaactgtctgaatcaaggatcacaaactacagccttcaggccaaatccagcccacagcctgtgtttgtaaataaagctttattggaacaaagccacaccccttaatctacagatgatctgtggctactttcacgccacaacagagtaccatggttctgacagagactgggggacccagtctaaatgacttccgacctggacctttactgaaaatcctcccaatcattctgttgacaagaatgatgtattactttttgcaataagaaacaagtaacatttgcagaattccacccatctttcaaggctggtcccagaagttccctttgcccacacacctacctgatcctgacaacttcctaaactgcagccctgcccacccggctccagcatcatttgtggagtgtcagctccataaatccagagggcaggtgggggtgtgtcctaacattcccgagcctactgtaccgaaacgggacagcagagtaggccagcatctgtgacttctgctccctcactagcttttccaccagaccccacatgttaccaccctggctgtgggaagcagggatcagggagtgtggctcggtgcccgtctccagaaccctgcccaccctggcgtggtggcagacatggttacctgcagctgagctgccagttcctctgagtcctcaaagaccaggccgttttcttcatgtttcactagctcatgtaaactgcagagagaaccaagggagcctgagagctgcctggggaagacaccagacccctggggtgcccagcttgcctcccacccaccccacgctcaagccaggctgggggttggaacagggggtgtggtttctgggagctggttcttagatttggcatctgaagcatataaaggtctgggggagtgcacatcaaaatggccaaatcaatttgaggagggagccttaaggaaggtttgtacgttctgtgctggatgctcttcaagtactgaagaattatttttgcatgtttttcttaattccatggccatggaacaagtaaaggcaaccccctggggactggttcagcacataaaagatgacttttctaggacacc

SEQ ID NO: 1403 - protein, 220 aa, Homo sapiens
MAPEENAGTELWLQGFERRFLAARSLRSFPWQSLEAKLRDSSDSELLRDILQKTVKHPVCVKHPPSVKYARCFLSELIKKHEAVHTEPLDELYEVLAETLMAKESTQGHRSYLLPSGGSFTLSEITAIISHGTTGLVTWDATLYLAEWAIENPAAFTNRGVLELGSGAGLTGLAICKMCRPQAYIFSDCHSRVLEQLRGNVLLNGLSLEADITANLDAPG

SEQ ID NO: 1404 - DNA, 1534 bp, Homo sapiens
ttgtccgtggcttctctgagaagaaaagttgaaaaagggtaaaagttttcaggaatattcgggctctctattgctaagcatagcgagtgtcggttttctctctccaacagacatcgctattgcggttccgaggcagtgggaagagatgcggcccctggacatcgtcgagctggcggaaccggaggaagtggaggtgctggagcccgaggaggatttcgagcagtttctgctcccggtcatcaacgagatgcgcgaggacatcgcgtcgctgacgcgcgagcacgggcgggcgtacctgcggaaccggagcaagctgtgggagatggacaatatgctcatccagatcaaaacgcaggtggaggcctcggaggagagcgccctcaaccacctccagaacccgggcgacgcggccgagggccgggcggccaagaggtgcgagaaggccgaggagaaggccaaggagattgcgaagatggcagagatgctggtggagctggtccggcggatagagaagagcgagtcgtcgtgagcgcggtcggcggtttccagccaatggattctggtcaactggtggagattggctgacaccctggagaagccgaaaccagagagccttttgttttctcttttttcctgtctatgctctgtctcacttaacactacgttttctgctatggtctgtggttgatgacctcaatatgagtttcgattgttaacgtgtttttgtttgggaagtaattttgtttgaaaatgctctcacatacaggaattagggcctagattgtaagctcttgcagcagtcacatttgttcccgggctttggtggttatttctaaatttttgaggtgctttgctatttcttgtgtgacctgatagctccctggaactttgggtctgtgtgtgacacatgagactcacagttggagttctccagctctggaggtgctgaaggagctgcattaattctggaagacgactccatgcagcaactactgaagaaaggaccagacttcaacggggagtgtggatgggccgacctggctgggactcgtgaatctggagaagagctggagaatggatagtattgtctgtatttggagactttaatttctgtgtgagaccaaaggaggagagatgtgttttgttcaaaatttaaatttgttgtggtacactatcttatgtaacctgtctggtgagtttgtttggacaacctaactcagctttatttgacatggaacctaaaatagaagataagatcttgatattctgtacaagttgatgtaataccctgatgcgttttagaggacttggcataaaatgaaagattggcaaaggcccttgaggggcttggggatgacagtatggaactgtctgcattggaccctaaactggactagaagaggcatcttcaaggttcatacgttgtccagctgtaagttcatttgagtagcagacctaacaaatatttgaggtcagaaccctaccatgttaaaacaaacaaaaacttaccatgttaataaaagtattcatttgc

SEQ ID NO: 1405 - protein, 127 aa, Homo sapiens
MRPLDIVELAEPEEVEVLEPEEDFEQFLLPVINEMREDIASLTREHGRAYLRNRSKLWEMDNMLIQIKTQVEASEESALNHLQNPGDAAEGRAAKRCEKAEEKAKEIAKMAEMLVELVRRIEKSESS

SEQ ID NO: 1406 - DNA, 1961 bp, Homo sapiens
gttggggcaacctgttgctagtctggtcgttggtgacagcgaggcttccgcgctcgctgctggtgagcagccccggcgtgccccgcgggctggaagaggcggcggcgtgatgcggcccgtggacgcggacgaggcgcgggagccccgcgaggagccgggcagcccgctgagccccgcgccccgcgccggccgcgagaacctggcctccctggagcgcgagcgcgcccgggcgcactggcgggcccgcaggaagctgctggagatccagagcctgctcgacgccatcaagagtgaggtggaggcagaggagcggggcgcccgggccccagcaccccgcccgcgtgcggaggctgaggagcgggtggctcggctgtgcgccgaagcagagaggaaggctgcggaggcggcgcggatgggcaggcggatcgtggagctgcaccagcggatcgccggctgcgagtgctgctgagccggcgaggccgcgcgggtctggagcggagcgcggcggggagtgtcccgcgtggaaggcgctgggtaggcagggaggggagcgcagagccgtgccacgctctccgcggagttggtttcattcttttttcataggtaattagagaaaataatttgatatgttgttgtaaagagtcatgaccactggaagtattttcaggacgtagacctggtgggtcactacgtggggggagagaggtgtgaagcggaggtacatgctggaaacgtgtgaatgttgttacgagattggagcatttgcgatgaccttcctgcaggtggaagcattgtgcacaggtggttgggtttgtttgactcccggatatgagaatatcaagctcaaaatttatgttgtgatgatgaatttctcccacttgtactttaggtggccaactgacgaactgtgttcacctgataaggagtcgtggctgcttggacaggctcaaaccaagagagcctttcgttttgtctcccctgtttttctgcctgcgttttctccacattagccactcaatttccagtaccatcctggcggatgacttcagcattagatggtcaggtgtatttttttattaataggcgcattcagtttggaaaagacagcttttcattaatgtcccacgtaaaggaatatggcctatacagtacgtacgctgctgcgtggtcatatttgttcctgtgatcttattgtattttcaaagtttggaagtatactcgtgtgctttgctgtttttttatgcttcctggaatttggggactcatgagagacttgaggttagagttctgcaagtgagaagacactacatggttgcagctgccacatgaagaacccaagctcctgtcaaagttgtgaatgcgactttggatgagattaagaaggcccagtggacggttggtcttgaagagtggcagtgtgtggatttgaggacctctgcagaccatcagatcaaaggagggagagctgttttgggtgttttgttttttttgtttttatagcattttgctttttcttggaatgtaattttcctatggcatgttaactggtgcacatcgtgtaacctgtctggtgagcaacctacaattgggatgagttctaggtacatgtgtttgctgactttggggtaaacaactttgttataatacagtctctgccacagatgcatgtgacctcttcaggggcccagagtggctgaggaaggaaagcttcaagctggccatgggggtcccaaacagtcattccaggcttagatgatgactagcctaggtcatcagagcccagactccacagagactaaaatcagagctctgtcttgttatgataaatttcatttgcttggaaaaagaaatgctgaaagccagtgtttagaatctttgtgcagatgaccaaagcaattgacttggccaagaaaaggtaaggtaaataaacatttttcaaaatgaaaaaaaaaaaaaaaaaa

SEQ ID NO: 1407 - protein, 119 aa, Homo sapiens
MRPVDADEAREPREEPGSPLSPAPRAGRENLASLERERARAHWRARRKLLEIQSLLDAIKSEVEAEERGARAPAPRPRAEAEERVARLCAEAERKAAEAARMGRRIVELHQRIAGCECC

SEQ ID NO: 1408 - DNA, 978 bp, Homo sapiens
atgacccacaccgtgcaaggcttggatgtggctggtcttctgaaagcacttcctcccattaaacttcattcctgttcagcagaaacagacgaggaccgtcaggaacacctgggaaggaacgagaatggaagagcagagcaaggggcaaggcatacagccctgcagggaacccagaaggcagccatccctgacagtgagagcagctcttgtcctgggaaggcagatgggtcctgccagaagcctgggcctggccttgttggcctcaccggcaagctcaagcttgccccccagctgctgatcaagcaagacatcgtgtcccttcttagcaactttgtcaccaggctgtgcttcccagagctgctgtcaccgcagttttttgtgcaggagccacaacacctacccatgcagtccatggacttctcaggtctctggggccccctcctggctgtggcctcccccgggctgggtttcctggtggccctctggagtgcaagagacctggactgggccgactggaccgtcccacaccctgaccaactgcttatgcctcgcatgtgtcacaacgttaacagagttatttgtatatttggcccaccagttaaagaacctcctacagatgttactcccactttcttgacaacaggggtgctcagtactttacgccaagctgattttgaggcccataacattctcagggagtctgggtatgctgggaaaatcagccagatgccggtgattttgacaccattacattttgatagggacccacttcaaaagcagccttcatgccagagatctgtggttattcgaacctttattactagtgactccctgactggtatacctgcaacacctggcaatgagatccctgtagaggtggtattaaagatggtcactgagattaagaagattcctggtatttctcgaattatgtatgacttaacatcaaagcccccaggaactactgagtgggagtaa

SEQ ID NO: 1409 - protein, 325 aa, Homo sapiens
MTHTVQGLDVAGLLKALPPIKLHSCSAETDEDRQEHLGRNENGRAEQGARHTALQGTQKAAIPDSESSSCPGKADGSCQKPGPGLVGLTGKLKLAPQLLIKQDIVSLLSNFVTRLCFPELLSPQFFVQEPQHLPMQSMDFSGLWGPLLAVASPGLGFLVALWSARDLDWADWTVPHPDQLLMPRMCHNVNRVICIFGPPVKEPPTDVTPTFLTTGVLSTLRQADFEAHNILRESGYAGKISQMPVILTPLHFDRDPLQKQPSCQRSVVIRTFITSDSLTGIPATPGNEIPVEVVLKMVTEIKKIPGISRIMYDLTSKPPGTTEWE

SEQ ID NO: 1410 - DNA, 1934 bp, Homo sapiens
gagcggcgccggcctcggcggctgaggaaagcaggaggaggtggtggcggcgggaagatgccgctctttggcgtaaattgcaatcgattagggatcgtttctcagaatcaagttagaagtgagagttcagataagtgaggccgccattgctgctttgaacacctcagaaggggagaatggatttatcaggagtgaaaaagaagagcttgctgggagtcaaagaaaataataaaaagtccagcactagggccccttcacctaccaaacgcaaagaccgctcagatgagaagtccaaggatcgctcaaaagataaaggggccaccaaggagtcgagtgagaaggatcgcggccgggacaaaacgcgaaagaggcacagcgcttccagtggtagcagcagtaccaggtctcggtccagctcgacttccagctcaggctccagcaccagcactggctcaagcagtggctccagctcttcctcagcctccagccgctcaggaagctccagcacctcccgcagctccagctctagcagctcttctggctctccaagtccttctcggcgcagacacgacaacaggaggcgctcccgctccaaatccaaaccacctaaaagagatgaaaaggagaggaaaaggcggagcccatctcctaagcccaccaaagtgcacattgggagactcaccaggaatgtgacaaaggatcacatcatggagatattttccacctatgggaaaattaaaatgattgacatgcccgtggaaaggatgcatccccatctgtccaaaggctatgcgtgcgtagagtttgagaatccagatgaagctgagaaggcgctgaagcacatggatggaggacaaattgatggccaggagatcactgccaccgtcgtgctggccccctggcctaggccaacccccaggagattcagccctcccaggagaatgttgccaccaccgcctatgtggctcaggtctcccccacggatgaggagaaggtcccgctccccgaggcgcaggtcccccgtgcgccggagatcacggtccccgggccgccgccgccacaggagccgctccagctccaactcctcccaataaacaggccactgaagctctcgcccctgtaacttatacgccacccagctcagttttgtcacttttctagccaaagcaagaccagtaggaaagcaaacccttgactctggcaggatttgcaggcagcaggcagcacccctctgccagccgggctccggctgcagaagtgctgttggcttggatgctgtgtgcctgtcaagattccctccggttttctggctagaaagctcacccgtttccggttttaagagtcagttcagtggcagagccaccagggacaagtgaggctcttgggggtggtttgaccctgcttacctgggagcacacttttcccttccccgatgacctgggatggtggccaggccgtgcccttgctgttgctgggcagtgtctttttggaaagggagctgccccaggctttagtgcagctgccaacgctgttaggcctggcctctcgaggcctcttctgacttcaagggtcacagccccccaaagatcctctcacccatggtagttgctgctcatggttctgtctgtccgtgcaccgatgcatacaccacaccccaccgctgtactctgaaattggcgagtgagttgagagccagctctgcggggtcatcacgcagccatggttgtgcctgtccttcatggtggtctttcaggttatcttggcaacatgtacattgcttttattttttttcttttttgcttttattgtacagtcagttctataaaatttctcttttgagttttatacctttgtagcattttagatgacattgtgtttgtactttgttgtgtagagtggaagaattgtgttgaataaacccaagatcggaatgc

SEQ ID NO: 1411 - protein, 305 aa, Homo sapiens [sequence omitted]

SEQ ID NO: 1412 - DNA, 515 bp, Homo sapiens
ctccaccctgtgggctgtaagcaagctcaggctagtctccccactgggggctgtgcccctccctgggacggttccgtgggcagccccatcactgtgttcaatagtgtgagaatgtagctgcgtggggacaatccatcgtggagtgttctctcagcttaggtctggacaggagacttggcgggagatgctccaggatgtgggtgattctgtacctggggaggctatctctgacctcccgacaggggacactcccaggccagcccaggggtcaggggcagaggtgcacacctcagcatgagccaagactggggtcagggagcaggtgtggtttgagccaggacctggggcgggggtggggccggggcctttctgcctcatttgctttcaatgaaagcctcaaagcagccaaaaccaggctttcccccttcctcgagtttgaatatccagaatcttttgtacttcttgttggttaaattgtttatttttgtaaaaaataaaataaaattagttaataa

SEQ ID NO: 1413 - DNA, 3227 bp, Homo sapiens
atagaagactactcggagagcgctgcctctgggttggcgggctggcaggctgtagccgagcgcgggcaggactcgtcccggcagggttccagagccatgggagcggaaaggaggctgctgtcgattaaggaggcctttcggctggcgcagcagccgcaccagaaccaggcgaagctggtggtggcgctgagccgcacctaccgcacgatggatgataagacagtttttcatgaggagttcattcattaccttaaatatgttatggtggtctataaacgtgaaccagctgtggagagggtaatagaatttgcagcaaagtttgttacctcatttcaccaatcagatatggaagatgatgaggaagaggaagatggtggccttttaaattatttgtttacttttctcttaaagtctcatgaagcaaacagcaatgcagtgagatttagagtgtgcctgctcataaacaagcttttgggaagtatgccagaaaatgctcagattgatgatgatgtgtttgataaaattaataaagccatgcttattagattgaaagataagattccaaatgtgagaatacaggcagttctggcgctttcacgacttcaggatcccaaggatgatgaatgcccagtggttaatgcatatgctactttgattgaaaatgattcaaatccagaagttagacgggcagtgttatcatgtattgcaccatcagcaaagactttgccaaaaattgtagggcgcaccaaggatgtgaaagaggctgtcagaaagctggcttatcaggttttagctgaaaaggttcatatgagagctatgtccattgctcagagagtaatgctccttcaacaaggtcttaatgacagatcagatgctgtgaaacaagctatgcagaagcatcttcttcaaggctggttacggttctctgaaggaaatatcttagagttgctccatcggttggatgtagaaaattcttctgaagtggcagtctctgttctcaatgccttgttttcaataactcctctcagtgaactggtgggactctgtaaaaacaatgatggcaggaaattgattccagtggaaacattaactcctgaaattgctttgtattggtgtgccctttgtgaatatttgaaatcaaaaggagatgaaggtgaagaatttttagagcagattttgccagagcctgtagtatatgcagactatttattgagttacatccagagcattccagttgttaatgaagaacacagaggtgatttttcctatattggaaatttgatgacaaaagaattcataggtcaacaattgattctaattattaagtctttggataccagtgaagaaggaggaagaaaaaaactgctggctgttttacaggagattcttattttacccacaatcccaatatccctggtttcttttcttgttgaaagactactccacatcattatagatgataataagagaacacaaattgttacagaaattatctcagagattcgggcgcccattgttactgttggtgttaataacgatccagctgatgtaagaaagaaagaactcaagatggctgaaataaaagttaagcttatcgaagccaaagaagctttggaaaattgcattaccttacaggattttaatcgggcatcagaattaaaagaagaaataaaagcattagaagatgccagaataaaccttttgaaagagacagagcaacttgaaattaaagaagtccacatagagaagaatgatgctgaaacattgcagaaatgtcttattttatgctatgaactgttgaagcagatgtccatttcaacaggcttaagtgcaaccatgaatggaatcatcgaatctttgattcttcctggaataataagtattcatcctgttgtaagaaacctggctgttttatgcttgggatgctgtggactacagaatcaggattttgcaaggaaacacttcgtattactattgcaggttttgcaaattgatgatgtcacaataaaaataagtgctttaaaggcaatctttgaccaactgatgacgttcgggattgaaccatttaaaactaaaaaaatcaaaacacttcattgtgaaggtacagaaataaacagtgatgatgagcaagaatcaaaagaagttgaagagactgctacagctaagaatgttctgaaactcctttctgatttcttagatagtgaggtatctgaacttaggactggagctgcagaaggactagccaagctgatgttctctgggcttttggtcagcagcaggattctttctcgtcttattttgttatggtacaatcctgtgactgaagaggatgttcaacttcgacattgcctaggcgtgttcttccccgtgtttgcttatgcaagcaggactaatcaggaatgctttgaagaagcttttcttccaaccctgcaaacactggccaatgcccctgcatcttctcctttagctgaaattgatatcacaaatgttgctgagttacttgtagatttgacaagaccaagtggattaaatcctcaggccaagacttcccaagattatcaggccttaacagtacatgacaatttggctatgaaaatttgcaatgagatcttaacaagtccgtgctcgccagaaattcgagtctatacaaaagccttgagttctttagaactcagtagccatcttgcaaaagatcttctggttctattgaatgagattctggagcaagtaaaagataggacatgtctgagagctttggagaaaatcaagattcagttagaaaaaggaaataaagaatttggtgaccaagctgaagcagcacaggatgccaccttgactacaactactttccaaaatgaagatgaaaagaataaagaagtatatatgactccactcaggggtgtaaaagcaacccaagcatcaaagtctactcagctaaagactaacagaggacagagaaaagtgacagtttcagctaggacgaacaggaggtgtcagactgctgaagccgactctgaaagtgatcatgaagttccagaaccagaatcagaaatgaagatgagactaccaagacgagccaaaaccgcagcactagaaaaaagtaaacttaaccttgcccaatttctcaatgaagatctaagttaggaaagacgatggaggtggaatcctttaagattatgtccagttatttgctttaataaagaagaagttacccttgtcaaaatcag

SEQ ID NO: 1414 - DNA, 789 bp, Homo sapiens
  unsure 596: unknown base
  unsure 613: unknown base
ggcacgagaacatggcggctccactagggggtatgttttctgggcagccacccggtccccctcaggccccgccgggccttccgggccaagcttcgcttcttcaggcagctccaggcgctcctagaccttccagcagtactttggtggacgagttggagtcatctttcgaggcttgctttgcatctctggtgagtcaggactatgtcaatggcaccgatcaggaagaaattcgaaccggtgttgatcagtgtatccagaagtttctggatattgcaagacagacagaatgttttttcttacaaaaaagattgcagttatctgtccagaaaccagagcaagttatcaaagaggatgtgtcagaactaaggaatgaattacagcggaaagatgcactagtccagaagcacttgacaaagctgaggcattggcagcaggtgctggaggacatcaacgtgcagcacaaaaagcccgccgacatccctcagggctccttggcctacctgggagcaggcatctgccaacatccctgcacctctgaagccaacgtgagcaaagggcagaggcagttggcctatgagtgggctgatgcgtgaggntggccacacattccttnctgtggacttgacatttttggaagaactctttgccagataatgagttcattttagttttatgctcccattgaaaaattttccactatttttataagctgttaatttcttgagtactttataacatgtctgtagcttggataaaccaagtaagtatttaaaaaaaaaaaaaaaaaaa

SEQ ID NO: 1415 - protein, 193 aa, Homo sapiens
MAAPLGGMFSGQPPGPPQAPPGLPGQASLLQAAPGAPRPSSSTLVDELESSFEACFASLVSQDYVNGTDQEEIRTGVDQCIQKFLDIARQTECFFLQKRLQLSVQKPEQVIKEDVSELRNELQRKDALVQKHLTKLRHWQQVLEDINVQHKKPADIPQGSLAYLGAGICQHPCTSEANVSKGQRQLAYEWADA

SEQ ID NO: 1416 - DNA, 2081 bp, Homo sapiens
cctagacgcacgtccgctcgcccggcgcccgagccagtccgcgcgcacgccgtctgcgccccgaaagccccgccccaaggcgcgcccgcccaccgctctccacgtgctcgctggagggcggtgcgaggggccgagccgacaagatgttcttgctgcctcttccggctgcggggcgagtagtcgtccgacgtctggccgtgagacgtttcgggagccggagtctctccaccgcagacatgacgaagggccttgttttaggaatctattccaaagaaaaagaagatgatgtgccacagttcacaagtgcaggagagaattttgataaattgttagctggaaagctgagagagactttgaacatatctggaccacctctgaaggcagggaagactcgaaccttttatggtctgcatcaggacttccccagcgtggtgctagttggcctcggcaaaaaggcagctggaatcgacgaacaggaaaactggcatgaaggcaaagaaaacatcagagctgctgttgcagcggggtgcaggcagattcaagacctggagctctcgtctgtggaggtggatccctgtggagacgctcaggctgctgcggagggagcggtgcttggtctctatgaatacgatgacctaaagcaaaaaaagaagatggctgtgtcggcaaagctctatggaagtggggatcaggaggcctggcagaaaggagtcctgtttgcttctgggcagaacttggcacgccaattgatggagacgccagccaatgagatgacgccaaccagatttgctgaaattattgagaagaatctcaaaagtgctagtagtaaaaccgaggtccatatcagacccaagtcttggattgaggaacaggcaatgggatcattcctcagtgtggccaaaggatctgacgagcccccagtcttcttggaaattcactacaaaggcagccccaatgcaaacgaaccacccctggtgtttgttgggaaaggaattacctttgacagtggtggtatctccatcaaggcttctgcaaatatggacctcatgagggctgacatgggaggagctgcaactatatgctcagccatcgtgtctgctgcaaagcttaatttgcccattaatattataggtctggcccctctttgtgaaaatatgcccagcggcaaggccaacaagccgggggatgttgttagagccaaaaacgggaagaccatccaggttgataacactgatgctgaggggaggctcatactggctgatgcgctctgttacgcacacacgtttaacccgaaggtcatcctcaatgccgccaccttaacaggtgccatggatgtagctttgggatcaggtgccactggggtctttaccaattcatcctggctctggaacaaactcttcgaggccagcattgaaacaggggaccgtgtctggaggatgcctctcttcgaacattatacaagacaggttgtagattgccagcttgctgatgttaacaacattggaaaatacagatctgcaggagcatgtacagctgcagcattcctgaaagaattcgtaactcatcctaagtgggcacatttagacatagcaggcgtgatgaccaacaaagatgaagttccctatctacggaaaggcatgactgggaggcccacaaggactctcattgagttcttacttcgtttcagtcaagacaatgcttagttcagatactcaaaaatgtcttcactctgtcttaaattggacagttgaacttaaaaggtttttgaataaatggatgaaaatcttttaacggagacaaaggatggtatttaaaaatgtagaacacaatgaaatttgtatgccttgatttttttttcatttcacacaaagatttataaaggtaaagttaatatcttacttgataaggatttttaagatactctataaatgattaaaatttttagaacttcctaatcacttttcagagtatatgtttttcattgagaagcaaaattgtaactcagatttgtgatgctaggaacatgagcaaactgaaaattactatgcacttgtcagaaacaataaatgcaacttgttgtg

SEQ ID NO: 1417 - DNA, 1502 bp, Homo sapiens
attcggagctgcgggagccgggctggcaggagcaggatggcggcggcggcggctgcaggcgaggcgcgccgggtgctggtgtacggcggcaggggcgctctgggttctcgatgcgtgcaggcttttcgggcccgcaactggtgggttgccagcgttgatgtggtggagaatgaagaggccagcgctagcatcattgttaaaatgacagactcgttcactgagcaggctgaccaggtgactgctgaggttggaaagctcttgggtgaagagaaggtggatgcaattctttgcgttgctggaggatgggccgggggcaatgccaaatccaagtctctctttaagaactgtgacctgatgtggaagcagagcatatggacatcgaccatctccagccatctggctaccaagcatctcaaggaaggaggcctcctgaccttggctggcgcaaaggctgccctggatgggactcctggtatgatcgggtacggcatggccaagggtgctgttcaccagctctgccagagcctggctgggaagaacagcggcatgccgcccggggcagccgccatcgctgtgctcccggttaccctggataccccgatgaacaggaaatcaatgcctgaggctgacttcagctcctggacacccttagaattcctagttgaaactttccatgactggatcacagggaaaaaccgaccgagctcaggaagcctaatccaggtggtaaccacagaaggaaggacggaactcaccccagcatatttttaggcctcatctcagtgcctatgaggggcctgccagaaaagtcactaacctgtctcagtgtggccttgtccagccttgtgttttctgtaacccctgtttgtggtacgagataatgagtcctatttttctctcacataatatgcatttgctctcctaggacagtgtaatacatttatgtgaagtaaagacatgcgagactggtggcctgcaaatagcatccgttgatctgtgttaactgcatagggagggctctgcatagcacctgctatagcggtgtcatgttggatcgcttttgtgactgttcatctgtccttgacagtggctgtcatcttgactactttgttgatttgttggtattggggacattttaaaggctgagttatttttgaatgtcatgtttatgtcatagacgtagttttcgcatccttgaattaaactgccttaactccttttgtggtataagcaaaactacatggactctgtcctggtatccttttcctgtgtggttgccccgtgtcctctggcctagggttaagtgtgcaagataactactcgtgagtattcagaatgttgttcctaataaatgcacttgttgtctgtcttctttaatcaaatcacatcttatatacagcagtcagagatgagtatactagaatcatggattgctggaggtcttttaatctgatgttctcagaagggggtggatttaaatcctgaaataaatatttcaacac

SEQ ID NO: 1418 - DNA, 1277 bp, Homo sapiens
acagtccctccgggtggcggggcgccccgagcgtggcagcgcgctaggcggcagcagcgggcgcggagcggggcgcggccgccgcgcgttccctcttggcggggttggccggccggggcggggcgcggcgctcgggctcgaggcattcggagctgcgggagccgggctggcaggagcaggatggcggcggcggcggctgcaggcgaggcgcgccgggtgctggtgtacggcggcaggggcgctctgggttctcgatgcgtgcaggcttttcgggctcgcaactggtgggttgccagcgttgatgtggtggagaatgaagaggccagcgctagcatcattgttaaaatgacagactcgttcactgagcaggctgaccaggtgactgctgaggttggaaagctcttgggtgaagagaaggtggatgcaattctttgcgttgctggaggatgggccgggggcaatgccaaatccaagtctctctttaagaactgtgacctgatgtggaagcagagcatatggacatcgaccatctccagccatctggctaccaagcatctcaaggaaggaggcctcctaaccttggctggcgcaaaggctgccctggatgggactcctggtatgatcgggtacggcatggccaagggtgctgttcaccagctctgccagagcctggctgggaagaacagcggcatgccgcccggggcagccgccatcgctgtgctcccggttaccctggataccccgatgaacaggaaatcaatgcctgaggctgacttcagctcctggacacccttagaattcctagttgaaactttccatgactggatcacagggaaaaaccgaccgagctcaggaagcctcatctcagtgcctatgaggggcctgccagaaaagtcactaacctgtctcagtgtggccttgtccagccttgtgttttctgtaacccctgtttgtggtacgagataatgagtcctatttttctctcacataatatgcatttgctctcctaggacagtgtaatacatttatgtgaagtaaagacatgcgagactggtggcctgcaaatagcatccgtcaatctgtgttaactgcatagggaggctctgcatagcacctgctatagcggtgtcatgttggatcgcttttgtgactgttcatctgtccttgacagtggctgtcatcttgactactttgttgatttgttggtattggggacattttaaaggctgagttatttttgaatgtcatgtttatgtcatagacgtagttttcgcatc

SEQ ID NO: 1419 - DNA, 3079 bp, Homo sapiens
ggcacgagcgcaaccacagcgcgcagggcaggcgcgagctggcctctgagccccggcctcggaccgcccactccactcccggcacgcccggtgccgccttccggctccagtccccgggctcggcctcggcgaggtgtaattcgcagcgcgggccggccccggaggctctcggcgagcgcggcgcggtaacaagtgggcgaggatgccgtacgagatcaagaaggtgttcgccagcctcccgcaggtggagaggggcgtctccaagatcatcggcggcgaccctaagggcaacaattttctgtacaccaatggaaagtgcgtcatcctaaggaacatcgacaacccagcccttgctgacatctacacagagcacgcccatcaggtggtggtggccaagtatgcgcccagcggattctacattgcctccggagatgtgtctgggaagctgaggatctgggataccacgcagaaggagcacctgttgaagtatgagtaccagcctttcgctgggaagatcaaagacattgcttggactgaagacagtaagaggatcgccgtggtcggggaaggaagggagaagtttggagcagtcttcctctgggatagtggctcttctgtgggcgagattacaggacacaacaaagtcatcaacagcgtggacatcaagcagagccggccataccggctggccacgggaagcgatgataactgcgcggcattctttgagggacccccattcaagttcaagttcacaattggcgaccacagccgctttgtcaactgtgtgcgattctctcctgatgggaacagatttgccacagccagtgctgacggccagatatacatctatgacgggaagactggggagaaggtgtgcgcgctgggcggaagcaaggcccacgacggtgggatttacgcaattagttggagtcccgacagcacccatttgctttctgcttctggggacaaaacttccaagatttgggacgtcagcgtgaactccgtggtcagcacatttcccatgggctccacggttctggaccagcagctgggctgcctatggcagaaggaccacctgctcagtgtctccctgtccgggtacatcaactatctggacagaaacaaccccagcaagcccctgcacgtcatcaagggtcacagtaaatcgatccagtgtctgacggtgcataaaaacggcggcaagtcctacatttactctgggagccacgacggacacattaattactgggattcagagacgggggagaacgactccttcgctgggaaaggccacacgaaccaggtgtccaggatgaccgtggatgagtcggggcagctcatcagctgcagcatggacgacaccgtgcggtacaccagcctcatgctgcgggactacagcggacaaggagttgtgaaactggacgttcagccaaagtgcgtagccgtcggccccgggggatacgccgtggtcgtgtgcattggacagattgtcctgctgaaggatcagaggaagtgcttcagcatcgacaaccccggctacgagcccgaagttgtggcagtgcaccccggcggggacacggtggcaattgggggtgtggacggcaacgtccgcctgtattccatcctgggcaccacgctgaaggatgagggcaagctcctagaggccaagggccccgtgaccgacgtggcctactcccacgacggcgccttcctcgcggtgtgcgacgccagcaaggtggtcacagtgttcagcgttgctgacggctactcggagaacaatgttttttatggacaccatgcaaaaatcgtctgcctggcctggtccccagacaatgaacactttgcctccggtggcatggacatgatggtgtatgtttggaccctgagtgacccggaaaccagagtcaagatccaagatgcacaccggctgcaccatgtcagcagcctggcctggctggacgagcacacgctggtcacgacctcccatgatgcctctgtcaaggagtggacaatcacctactgaggagccccacccccgcctctggatggaccgaatcaggcactagagtttaactgcagcggaacatgtcatttctctatttctgtgacgcgcccccatgcccccaccccaccacaagaggcaggagggcccagtcatgaccctcgtctctgcagggtgtctgtacacgttcttctgaaagctttagacagtaacagtttgcacatgaaaaataaagcgagcacctaaacaatgtgtggagcataactaaaacccacagcccaaccaaaccttgagaatgcgaaacattccagaggcagtagcctccaaagcacacagagcccctggccccgccgcggctctcactatctgtcaggggaggttgtacaggtgaatgagccggggggctcatgttcctgcctgcagaacatttctgtactagtgagaagagggaatatgcattgcagttcagcaaagccggaattctgtgttgaacagatgtctgtctccctagtgtgtgactcacaccttgtggctgccttcagagcgccacctccagatcagatggggacacacaacccctggatatgtttcattgtcagattttgtgcttgattttaagaatggaattgtgggtatctttcctttttttttaatgtatcttaactgttgcctgtcagtgtttacaaactagtgcgttgacggcaccgtgtccaagtttttagaacccttgttagccagaccgaggtgtcctggtcaccgtttcaccatcatgctttgatgttcccctgtctttccctcttctgctctcaagagcaaaggttaatttaaggacaaagatgaagtcactgtaaactaatctgtcattgtttttaccttccttttctttttcagtgcagaaattaaaagtaagtataaagcaccgtgattgggagtgtttttgcgtgtgtcggaatcactggtaaatgttggctgagaacaatccctccccttgcacttgtgaaaacactttgagcgctttaagagattagcctgagaaataattaaatatcttttctcttcaaaaaaaaaaaaaaaaaa

SEQ ID NO: 1420 - protein, 606 aa, Homo sapiens
MPYEIKKVFASLPQVERGVSKIIGGDPKGNNFLYTNGKCVILRNIDNPALADIYTEHAHQVVVAKYAPSGFYIASGDVSGKLRIWDTTQKEHLLKYEYQPFAGKIKDIAWTEDSKRIAVVGEGREKFGAVFLWDSGSSVGEITGHNKVINSVDIKQSRPYRLATGSDDNCAAFFEGPPFKFKFTIGDHSRFVNCVRFSPDGNRFATASADGQIYIYDGKTGEKVCALGGSKAHDGGIYAISWSPDSTHLLSASGDKTSKIWDVSVNSVVSTFPMGSTVLDQQLGCLWQKDHLLSVSLSGYINYLDRNNPSKPLHVIKGHSKSIQCLTVHKNGGKSYIYSGSHDGHINYWDSETGENDSFAGKGHTNQVSRMTVDESGQLISCSMDDTVRYTSLMLRDYSGQGVVKLDVQPKCVAVGPGGYAVVVCIGQIVLLKDQRKCFSIDNPGYEPEVVAVHPGGDTVAIGGVDGNVRLYSILGTTLKDEGKLLEAKGPVTDVAYSHDGAFLAVCDASKVVTVFSVADGYSENNVFYGHHAKIVCLAWSPDNEHFASGGMDMMVYVWTLSDPETRVKIQDAHRLHHVSSLAWLDEHTLVTTSHDASVKEWTITY

SEQ ID NO: 1421 - DNA, 2651 bp, Homo sapiens
ggcacgagcgcaaccacagcgcgcagggcaggcgcgagctggcctctgagccccggcctcggaccgcccactccactcccggcacgcccggtgccgccttccggctccagtccccgggctcggcctcggcgaggtgtaattcgcagcgcgggccggccccggaggctctcggcgagcgcggcgcggtaacaagtgggcgaggatgccgtacgagatcaagaaggtgttcgccagcctcccgcaggtggagaggggcgtctccaagatcatcggcggcgaccctaagggcaacaattttctgtacaccaatggaaagtgcgtcatcctaaggaacatcgacaacccagcccttgctgacatctacacagagcacgcccatcaggtggtggtggccaagtatgcgcccagcggattctacattgcctccggagatgtgtctgggaagctgaggatctgggataccacgcagaaggagcacctgttgaagtatgagtaccagcctttcgctgggaagatcaaagacattgcttggactgaagacagtaagaggatcgccgtggtcggggaaggaagggagaagtttggagcagtcttcctctgggatagtggctcttctgtgggcgagattacaggacacaacaaagtcatcaacagcgtggacatcaagcagagccggccataccggctggccacgggaagcgatgataactgcgcggcattctttgagggacccccattcaagttcaagttcacaattggcgaccacagccgctttgtcaactgtgtgcgattctctcctgatgggaacagatttgccacagccagtgctgacggccagatatacatctatgacgggaagactggggagaaggtgtgcgcgctgggcggaagcaaggcccacgacggtgggatttacgcaattagttggagtcccgacagcacccatttgctttctgcttctggggacaaaacttccaagatttgggacgtcagcgtgaactccgtggtcagcacatttcccatgggctccacggttctggaccagcagctgggctgcctatggcagaaggaccacctgctcagtgtctccctgtccgggtacatcaactatctggacagaaacaaccccagcaagcccctgcacgtcatcaagggtcacagtaaatcgatccagtgtctgacggtgcataaaaacggcggcaagtcctacatttactctgggagccacgacggacacattaattactgggattcagagacgggggagaacgactccttcgctgggaaaggccacacgaaccaggtgtccaggatgaccgtggatgagtcggggcagctcatcagctgcagcatggacgacaccgtgcggtacaccagcctcatgctgcgggactacagcggacaaggagttgtgaaactggacgttcagccaaagtgcgtagccgtcggccccgggggatacgccgtggtcgtgtgcattggacagattgtcctgctgaaggatcagaggaagtgcttcagcatcgacaaccccggctacgagcccgaagttgtggcagtgcaccccggcggggacacggtggcaattgggggtgtggacggcaacgtccgcctgtattccatcctgggcaccacgctgaaggatgagggcaagctcctagaggccaagggccccgtgaccgacgtggcctactcccacgacggcgccttcctcgcggtgtgcgacgccagcaaggtggtcacagtgttcagcgttgctgacggctactcggagaacaatgttttttatggacaccatgaaaaataaagcgagcacctaaacaatgtgtggagcataactaaaacccacagcccaaccaaaccttgagaatgcgaaacattccagaggcagtagcctccaaagcacacagagcccctggccccgccgcggctctcactatctgtcaggggaggttgtacaggtgaatgagccggggggctcatgttcctgcctgcagaacatttctgtactagtgagaagagggaatatgcattgcagttcagcaaagccggaattctgtgttgaacagatgtctgtctccctagtgtgtgactcacaccttgtggctgccttcagagcgccacctccagatcagatggggacacacaacccctggatatgtttcattgtcagattttgtgcttgattttaagaatggaattgtgggtatctttcctttttttttaatgtatcttaactgttgcctgtcagtgtttacaaactagtgcgttgacggcaccgtgtccaagtttttagaacccttgttagccagaccgaggtgtcctggtcaccgtttcaccatcatgctttgatgttcccctgtctttccctcttctgctctcaagagcaaaggttaatttaaggacaaagatgaagtcactgtaaactaatctgtcattgtttttaccttccttttctttttcagtgcagaaattaaaagtaagtataaagcaccgtgattgggagtgtttttgcgtgtgtcggaatcactggtaaatgttggctgagaacaatccctccccttgcacttgtgaaaacactttgagcgctttaagagattagcctgagaaataattaaatatcttttctcttcaaaaaaaaaaaaaaaaaa

SEQ ID NO: 1422 - protein, 534 aa, Homo sapiens
MPYEIKKVFASLPQVERGVSKIIGGDPKGNNFLYTNGKCVILRNIDNPALADIYTEHAHQVVVAKYAPSGFYIASGDVSGKLRIWDTTQKEHLLKYEYQPFAGKIKDIAWTEDSKRIAVVGEGREKFGAVFLWDSGSSVGEITGHNKVINSVDIKQSRPYRLATGSDDNCAAFFEGPPFKFKFTIGDHSRFVNCVRFSPDGNRFATASADGQIYIYDGKTGEKVCALGGSKAHDGGIYAISWSPDSTHLLSASGDKTSKIWDVSVNSVVSTFPMGSTVLDQQLGCLWQKDHLLSVSLSGYINYLDRNNPSKPLHVIKGHSKSIQCLTVHKNGGKSYIYSGSHDGHINYWDSETGENDSFAGKGHTNQVSRMTVDESGQLISCSMDDTVRYTSLMLRDYSGQGVVKLDVQPKCVAVGPGGYAVVVCIGQIVLLKDQRKCFSIDNPGYEPEVVAVHPGGDTVAIGGVDGNVRLYSILGTTLKDEGKLLEAKGPVTDVAYSHDGAFLAVCDASKVVTVFSVADGYSENNVFYGHHEK

SEQ ID NO: 1423 - DNA, 2981 bp, Homo sapiens
attttagctgttggttccggccgcaccgtgtgggctgtagtagcgggaggggtgggggtcctccagagttaagtggctgtcctcgactgtgcccatacagcagccagctttcttccttaataactgcccgttcgaagagtgcgaggatgtccaagcggcaccggttggacctaggggaggattacccctctggcaagaagcgtgcggggaccgatgggaaggatcgagatcgagaccgggatcgtgaagatcggtctaaagatcgagaccgagaacgtgatagaggagatagagagcgagagagggagaaagaaaaggagaaggagttgcgagcttcaacaaatgctatgcttatcagtgctggattaccacctttgaaagcttcccattcagctcactcaacccactcagcacattcaacgcattcaacacattctgctcattcaacgcatgccggacatgcaggtcacacgtcacttccacagtgcattaatccgttcaccaacttaccccatactcctcgatactatgatattctaaagaaacgtcttcagctccctgtttgggaatacaaggataggtttacagatattctggttagacatcagtcctttgtactggttggtgagactgggtctggtaaaacaacacagattccacagtggtgtgtggagtacatgcgatcattaccaggacccaagagaggagttgcctgtacccaacccaggagagtggctgcaatgagtgtggctcagagagttgctgatgagatggatgtgatgttgggccaggaagttggttactccattcgatttgaagactgcagtagtgcaaaaaccattcttaagtatatgactgatgggatgttacttcgtgaagctatgaatgatcccctcctggagcgttatggtgtaataattcttgatgaggctcatgagaggacactggctacagatattctaatgggtgttctgaaggaagttgtaagacagagatcagatttaaaggttatagttatgagcgctactctagatgcaggaaaattccagatttactttgataactgtcctctcctaactattcctgggcgtacacatcctgttgagatcttctatactccagaaccagagagagattatcttgaagcagcaattcgaacagttatccagattcatatgtgtgaagaggaagagggagatcttcttcttttcttaactggtcaagaggaaattgatgaagcctgtaagagaataaagcgtgaagttgatgatttgggccctgaagttggtgacattaaaatcattccattgtattctacacttccacctcagcagcagcaacgcatttttgagcctccacctcccaaaaaacagaatggagcaattggaagaaaggtagttgtgtcaactaacatagcagagacgtctttgacaatagatggtgtggtgtttgtgattgatcctggatttgcgaaacagaaggtctacaatcctcgaatcagagttgagtcccttttggtgacagctattagtaaagcttcagctcagcaaagggctggtcgagctggacgtaccagacctggaaaatgcttcagactttacacagagaaagcttataaaacagaaatgcaggataacacctatcctgagattttgcgttctaatttaggatcagttgtgttacaattgaagaaacttggtattgatgacttggtacattttgattttatggatccaccagctcctgaaactctgatgagagccctggaacttttgaattacctggctgctttaaatgatgatggagatctgactgaattgggatccatgatggcagagtttcctctagatccacagctcgcaaaaatggttattgcaagttgtgactacaactgttctaatgaggtcctatctattactgctatgttgtcagtcccacagtgttttgttcgccccacggaggccaagaaagccgcagatgaggccaagatgagatttgcccacatagatggagatcatctgacactgctgaacgtctaccatgcttttaaacaaaatcatgaatcggttcagtggtgttatgacaacttcattaactacaggtccctgatgtccgcagacaatgtacgccagcagctatctcgaattatggacagatttaatttgcctcgtcgaagtactgactttacaagcagggactattatattaatataagaaaagctttggttactgggtattttatgcaggtggcacatttagaacgaacagggcattacttaactgtgaaagataaccaggtggttcagttgcatccctctactgttcttgaccacaaacctgaatgggtgctttataatgagtttgttctaacaacaaagaattacatccggacatgtacagatatcaagccagaatggttggtgaaaattgcccctcaatattatgacatgagcaatttcccacagtgtgaagcaaagagacagttggaccgcatcattgccaaacttcaatccaaggaatattcacagtactgaattcagtgcttagaactgaagttattgagaggacagctttaaaagatgaatgaactcaaaagttcgagttgtgctcttcacgttggttcgataatggcctttatttgaaagctttttaatttttctttacagtaaatattccattctgatttcataaattaaacatttatgcctcccttttgtgttgacactgtagctcatactggaaaagtcgatcaatgttttgcagtttattgaaagtagttctatatataacaatgttataagcatttctttagaaatggttgaaaatgcttctaaaatgtgattatcgaccatggtatgcatgatcgttgtaattgttgacattccttttagaagttgtgaaatgttacaacttgtgcttatgtagacacaatcttctgtctcagtacagaggcactgacttcaataaagtctatttatact

SEQ ID NO: 1424 - DNA, 5167 bp, Homo sapiens
aggattttaagagtggacttggtattaccataattcctatgaatgtagcaaatgtaaagcaagtggaccgaactgtgaaacaatcttttgaaataatcactccctacaggagtttcagctttacagccgagactgaaaaggagaaacaagactggattgaagctgtgcagcaatcaatagcagaaactctctctgattatgaagtagctgagaagatttggttcaatgaatccaacaggagctgtgcagattgtaaagccccagatcctgactgggcatccatcaatctctgtgttgtcatctgtaagaagtgtgcaggacagcatagatctttaggaccaaaagattccaaggttagaagtctaaaaatggatgctagcatttggagcaatgaactcatcgagctttttattgtcattggaaacaaaagagcaaatgacttttgggctggtaatcttcaaaaggatgaagaattacatatggactcaccagtagaaaagagaaaaaactttattactcagaaatataaagaaggaaaattcagaaaaactcttttggcatctctcaccaaagaagaattaaataaggctctatgtgctgctgtagtgaaaccggatgttctagaaacaatggctttgctgttcagtggagcagatgtcatgtgtgccaccggagaccccgtgcatagcaccccctatctgctagccaagaaagctgggcaaagtctgcaaatggaatttctctaccataacaaattctcagatttccctcaacatgatattcattccgagggtgtattaagtcaagagtcttcccagtccacattcctctgtgactttttatatcaagctccttctgctgcttctaaactctcttcagagaaaaaactgcttgaagagacaaataaaaaatggtgtgttttggaaggaggcttcttgagttactatgaaaatgataagtctaccacacctaatggcaccattaatatcaatgaagttatctgcctggctatacacaaagaggacttctatttaaatactgggcccatctttatctttgagatctacttaccctccgaacgtgtgtttttatttggagctgaaacatctcaagctcaaagaaaatggacagaggcaatagccaagcattttgttcccttatttgctgaaaacttaacagaagctgactatgatttgattggtcaactcttctacaaagactgccatgccctggatcagtggagaaaaggctggtttgctatggacaaatccagcttgcatttttgccttcaaatgcaagaagttcagggagatagaatgcacttaagaagactgcaagagctaacaatcagcacaatggttcaaaatggggaaaaactggatgttttactcttggtagaaaaagggagaacattatacatccatgggcataccaagttggatttcacagtctggcatactgcaattgaaaaagcagcaggtacagatggtaatgctttacaagatcagcagctcagcaaaaatgacgttcccattatagtgaacagctgtatagcatttgttacacagtatggtttaggatgcaaatatatctatcaaaagaatggtgatcctttgcatataagtgaactcctggagagtttcaaaaaggatgcaagaagctttaaattgagggctggaaaacatcagcttgaagatgtgacggctgtgttgaaaagttttctctctgacattgatgatgcactgcttactaaggagctctacccatattggatctctgctttagatacgcaagatgacaaggaaagaattaaaaaatatggagcatttatacgttctcttccaggggtcaaccgagcaacactagcagctatcattgaacacctgtatagggttcagaaatgctcagaaatcaatcacatgaatgcccataatttggccttggtcttttcatcctgtttgtttcaaacgaagggacaaactagtgaagaagtgaatgtaattgaggacctaattaataattatgtagaaatatttgaggttaaagaagatcaagtcaaacaaatggacatagaaaatagctttattaccaagtggaaagacacccaagtttcccaggctggagatttgttaattgaagtatatgtagaaaggaaggaacccgactgtagtattataattcggatatctcctgtgatggaagcagaagaattaactaatgatatattagcgataaaaaatattattcctacaaaaggtgatatttgggccacatttgaagtcattgaaaatgaagagctagagcgtcctcttcactacaaggaaaatgtactggagcaggtgcttcggtggagttcattagctgaacctggctctgcttacctggtggtgaagagattcttaaccgctgacacaattaaacactgcagtgaccggagtacactgggaagcatcaaagaaggaatcttgaaaatcaaagaagaaccatccaaaatactatctggaaataagtttcaagaccggtattttgttttacgagatgggtttctctttctttacaaggatgtgaagagtagtaaacatgacaagatgttttctctcagttccatgaagttttatcgtggagtgaaaaagaaaatgaagcctccaacaagctggggattgaccgcatattctgagaaacatcactggcacctgtgttgtgatagttcacgaactcagacggagtggatgaccagtatctttattgcccagcatgaatatgatatatggccaccagctggaaaggaacgaaaacgttcaataaccaaaaatcccaaaattggaggtttgcctctgattcctatacagcatgaggggaatgcaaccttggcccggaaaaatattgagagtgcaagagcagaacttgaaaggctgcggctcagtgaaaagtgtgataaagagtccgtggactctagcttaaaggagagagcttccatggtggcccactgcctggagcacaaggacgataaacttcgaaatcgaccccgaaaacatcggagtttcaactgcctggaggacacagagcctgaagccccacttgggcaaccaaaaggccataaaggcctaaagacattgaggaagactgaggacaggaatagcaaagctactttggactctgatcataagttaccatcaagggtaattgaagaacttaatgtggttctacaacggtcaagaacccttccaaaagaattacaggatgagcagattttgaagtaggaaataaaatgaattgctccccagattatttttttaatattgtatgcaatctttatgtgtaactccaaaactgaactataagataattcataagaatttgcctattgataggcaaatttgtctatgcttaggcatttaaggagcatttaaaaatatgtatatatgtgactgaatgtaagattaactttattttggtctgaacaaaccttgtaaagttccattgtattaacgtgtgtaagaagacattgggttacttaggtggtcagtccttttaaagtagttgtctgttaagtggtataatttatgagcagaaatctcaaactgtactgtattgtataaaatgctgtgtttaaatgaagcctaagaaactatctgtaacatattttgcactttgagaaaccttgtatattaaattaccatatgtttttaggtttacagaagttctaccttagggaaaagaaagggaagtaaattgaaaaaggggggagaatttattgtagtggctgcctaaaaaccactggagtttttaaaagaagcaaggagttaaatgtcctgcaaaacaaggaagtgagctaagattcattctagttcactaatgaccagaacttgtcaatgagaaaccacttgttaagaaaaagtccagtgtttatttctcaagagtaatattcggccaacagatgtaaataatagcactagccactcttattaatatttatagtgttagaaaaccagccacattacagattcactacgtttgagctcattgttggtggctgctaagaggaaacttacactgcattggagaggttgtgtacacaggacctggcctggatgctgattgcactgtcattgtatgcaagcattttgtcttttttcagaatttctgactatacttttggtacgaacaaaattcatcaccacagggtcctgttgttttgtttgatttttagatttttttaaattattattaaggttgtaatgtttttctccgagttgtcagaaataactggaagaatacaatatatggccattatggagccaggggctagttggtggtttactatacatttgggggctacctggtcacatttaatctaggtttttttttctttttttaagtaaaggtgtggtctcttccctgtacttatgaataaggacaaagccctatttttgtttccacataaagatcagctactgaattggtgaatttcctgacagacaatgctatctaaccatagttcatgttaggggaagcatttttccatcagtttctttaaaattggattgtctggtgagttttgatattaaacattatgtagctaagttttttttttttagcatttcttttttatttttcaatctatattcacaggcccatacttcagtcagtccaatcatagtacagtgatgtggtggtagatgctatgaatttcttcattgtaaaatacggatcatttgtattttggggtgataaaatagttcaccatgggtatgagatatttattctttaaatcaaagtaaattagaatttttaaaaagcacaaaactgcaggacagtttatgaaataggtggcactattagggaatcttcctttaaagcaagaaatcatgttatttagaaagaaaaactaatcttaaacatactatttctaataaatatttatatttttatgaaataaagaggtatgtggaaattaatatttggtgatgttggacagtggaaaagtatctagagtttttacctgccttatctgaattcttcttgaaacttgagcttaaactctaatagctgtttccctttctattctgaacaactgtctccatttttcaagtgtgagagataagggctaatgatgacatctcatttattttgagtaaacattaaaattgttttacaagtctacttg

SEQ ID NO: 1425 - DNA, 716 bp, Homo sapiens
ttctttctttgctgcgtctactgcgagaatgaagactattctcagcaatcagactgtcgacattccagaaaatgtcgacattactctgaagggacgcacagttatcgtgaagggccccagaggaaccctgcggagggacttcaatcacatcaatgtagaactcagccttcttggaaagaaaaaaaagaggctccgggttgacaaatggtggggtaacagaaaggaactggctaccgttcggactatttgtagtcatgtacagaacatgatcaagggtgttacactgggcttccgttacaagatgaggtctgtgtatgctcacttccccatcaacgttgttatccaggagaatgggtctcttgttgaaatccgaaatttcttgggtgaaaaatacatccgcagggttcggatgagaccaggtgttgcttgttcagtatctcaagcccagaaagatgaattaatccttgaaggaaatgacattgagcttgtttcaaattcagcggctttgattcagcaagccacaacagttaaaaacaaggatatcaggaaatttttggatggtatctatgtctctgaaaaaggaactgttcagcaggctgatgaataagatctaagagttacctggctacagaaagaagatgccagatgacacttaagacctacttgtgatatttaaatgatgcaataaaagacctattgatttggaccttcttctt

SEQ ID NO: 1426 - protein, 192 aa, Homo sapiens [sequence omitted]

(The sequence listing continues in the following parts.)
